United States Patent Application Publication US 2014/0325702 A1 - sequence listing, part 46

SEQ ID NO: 117950 - DNA, 640 bp, Heterodera glycines
gcaaataataaataatataattttacgattttaaattacaatttggttaattgtctattttatctaatttattttatgtttaaaataatcaaaattcccttaactttttcacagatacttctgattttttggttgatccatcttttgctgatggttcatttcatccattcgcttctttgcgcgcatttggcgaccaaattgaggcgaattttgggcccaatttcaaattcgatttggcgactctctgaaggaagaattaattattcactaatgttttcgatcaatttgctcgtttttatcatttttatgtttttcttcttcaattaaaatttggttttctgtaataatcggaaaattttgtcgtttcccgggtatttaagactaaaagatgaaaatttacacaaaaaaaaaggttttttccaattatatgctaagattcatattaagtatctgctcatatgctatgaagaaatgggctcaaaaaagcatttctacgttaaaattttgatttggtgaaagtttttagtccatataaatccatatttagcgtttttagtttatatttctgccattttttttgagggagaggacaaaacaccggtcgaaatatcgccgcaaaaaatacatataataagaaatg

SEQ ID NO: 117951 - DNA, 734 bp, Heterodera glycines
agtaatcccaaaaaccaacctttttttgttgaaaatctgttaacaaattgcacccaaatttttaaaatttcccccggcggcgcctatcggcaccgccggaccccttctttcccaaaagttttttgaaaaagcgctccgaaaaaaagtgatgtgaaaatcaaatctgaatttctaataatactcgatcatttagtccaaaatgattaattgtttgaaataattgaagaaaatttgtttgaaaattttcattaatttaatttgctttattttgggttttattaaataaaaaaccaaataattttgtattattttcacttgaaataaattaaaatttgaattttttttaaatttttaaaatttttttgaatttttaaaatttcccggttggtcccggttcccggtttttcttgcggtcccggtcccggtcctgaagaaaaatcgaggtcccggtcccggtcccggcttctcaggtcccggcaagtcccggtcccggttttggcaaaaattcccggtcccgtggcactctatattttacccttgattttattaaatttttttagcttataactttgtcaataatagaccaaataaaaccattttatgctcattttgaagggaaaattcggaggaatatttctaatttagtcaaaagattattaaaattgtttattggcaaataaataattcttgtgttattttatatggtagagacatggaaatagtacactaaaatg

SEQ ID NO: 117952 - DNA, 99 bp, Heterodera glycines
tggcaaagggtgtttacagtaacgcgcagttttgatccaatcactactgtaacaccgttatctgcccatttcctggattctgtacattttcacgcgatg

SEQ ID NO: 117953 - DNA, 1003 bp, Heterodera glycines
gattttggtataaaaatatttaaaatgtcccggttcttagatggcgtcgatttgactttattcttaggttatgaacgtaactcatcaagagctttgccatttccgcacctcaggtgtattttttctgagcattacaggccacgagagaataatgaatggcatcaattttattcaattttttttgagtacaataataatttgatttaaatattaaattttctgatcactgacgcctcacaaaagagcattttcttggacaaaaaaggttaataaatttattacaaaaggcgtacaaaaagaattggtaattttacgagcgaaatttttttggtcgtgacaattagtctatagtacagccgcaaaatctgttaataaatcgcataaaattttcaaaaatctcccccggcggcgcttttcggcaccgcctgcctaaaattcgtctatcatttttttataatttggccaaaaattcatataaatagtcttttttggtaaaagctggaggccattcaattcaacgattgccccaataattgaaaatgaattccaatttttgttttcaattatttctgctcctggcaattttcactgtgacgaaacaaaagcattcaccgaatcgaatcgaaaggattgtaaagcactgaatggtgtaaaagttgaaatttcctttgacgcaacaattaattttggccaaaatgggccatcaaattctgacgattcgtccgagtcaaacacgacgaataaaacccaagcagcagcgccgacgacgggatgttcattgaatggggtggaccttcaggcgaacggattcgaaaggatgtgtgccgaatggcccgacttggctcccatttattgctacggcaaaatcattgaggtgccgagcaatttggtcccaattaatcataatgacatcaaaattcattaattcattacgatgttgagagtgaattaattggttgaatgactttcgcttaaggccgtcaacttttggggcgcccgaatg

SEQ ID NO: 117954 - DNA, 321 bp, Heterodera glycines
ctctcattttttactcttaggtcgaaaaagtcaaagtcgtagctgaggaaagaaatgacttttctttgtgaggattgacttttcacattttgctttgtcattatttgtcgaccgacgaatcatttcataaaactatgcttattaattcatgactgacctttccttggtttttcgattccatttacacaatattttatcatttggctttcttttttcgtttttaactatgaatgcaccgtggtaaaggtcggctatgtaattgtcctcggtgggagaaagtgttgtacaaaaggcagccctttcccgacaattacaccgatg

SEQ ID NO: 117955 - DNA, 91 bp, Heterodera glycines
aaaaaatggtttaaccaagtaaatcgagatttgttaatttttaaaatttagtgaagcaaaaaactcgccttttttccttgtcaaagaaatg

SEQ ID NO: 117956 - DNA, 96 bp, Heterodera glycines
ggtccctcccctcccctcccatttcaaatttggcatttcctcccaaatttggcattttcagggccagcagtcgccggcgtcgtcggtctgacgatg

SEQ ID NO: 117957 - DNA, 647 bp, Heterodera glycines
tttcggaaagatatttgaaatttgatgaacggattaaaacttatttctaagttaggcaaattagaaattgtataaataggtctcacttttttcaaatctcatttcttttcattatatcggcatgccattttttaattagtctcttatcccattaatttgctcaataaccttagtttttctagtcaactcgtttttactaaatttcttttttcttagccataaattgacaattttcttttatttcgtatataaaaatttaaatctttgctctactttcataatcaactctgagttttcgactttctatgaaatttccccccaaatttttcagtttttggcattctgaattgggtttttttcattttttatatttttgctctctcatcctcttaattaactaatttgaattaaggttattaatattttctttttttttaatttttgggttctttattttttttctttcttattttgtgccattcaacccaatccgttttgttttgtttcaatatttttatctcgtttctccttaattcgacatgcccctgggttttttctcctcatttttcaaacgaatttttgacaatatttcacttattttttgtcctaaatccatttttcctttattaaattttgaagccaaaatg

SEQ ID NO: 117958 - DNA, 329 bp, Heterodera glycines
ctgtcggcattgtaatgggcacgggatttggcttgacgtattgcccggcaatggtaatcggtaaacgagaagaacacattaaatatatattttggtacttattgtctcaaatcctgtgtctaaatggacttaaaattcctctaaaattataaaatcttccttggagaccgacatcacaggaaaatcgcactcgggaagctttttttatccattgctctgaatggaaatctagattttcctcactattattttagctccttaccattcgaaactctcgttcattggattcaaattttatttatttatttttcaacattttagttacaatg

SEQ ID NO: 117959 - DNA, 135 bp, Heterodera glycines
agtaaatctattcaacaaattatcactttttctcactaattatttagacccatggatttgaaaacattgaagacgaacatcgagtcgggtgaagttaacacgctcggcaaattcagttatgcaattctcaaaatg

SEQ ID NO: 117960 - DNA, 925 bp, Heterodera glycines
tctgtaaaaggggatgttaaagcgtgtcgatggattaaatattgaaaatagtttcagatctgttcggccataaacaattttatgcgccatgaacagatcaaatagctttcgcctattctcaagtgtcggcagttgcaggtattctaatcgattttggtatggaattggtggaaggctgcatttaaaaaatacccgtttggtgaaatatttttgacacttttctatttttttaatatttttttgaagagacggattccaaacctccggagcgtattccaataaaggcctaatataagttttatataacgtaatccaaatcttagatgatttggatttaattattcgaaacaaggaacgcatacgtaaatacgcattccttgttatttggttaatatgatcggaaaattgtaatttattatcaatgtttactcctaaatccctaattgtatccacagcatttattgtatttccatcaaatttatatgtttcttttgggttttttgaacccaaatataatacaaaagttttttgaattgaaacttttatttgccatttatttgcccattcgaataaattatgcaatgctttatgcataatttccgtgtcggctcttgctttataacaaatatataatttaacatcatcagcatataattttattttcactcctgatggcaaagcatcaggaagatcgttaatatagaccaaaaataataaagggcccaggacagagccctgggggacaccagagccaacttttttatttgaggataaagcatccccaattttaacatgaaaagtcctattactcaaaaagctttttatccacattaaaagtttgccccgtataccaattttttccaatttgtataaaagtaagttatggggcactgagtcaaaagctttctgaaaatcaatataaatg

SEQ ID NO: 117961 - DNA, 361 bp, Heterodera glycines
aatcgcaaaatatgcacaaaaaaacatgaaaattatggcagcctgatcattattattaatttgttacacatttcttggataaacaaattccataaattccatgtgaagtgttttgttaccgattcggcagttattattacgctgtgtaagactatttggtccaaatacaaattccttttaaaagttattcatgcaaggaccaactgaataatatccataaaaacatcaacaaaaacatttattattgttatgtggcgaagtgctgaagtgattgatggtggcaatttttgtaccattccaatgccgggggggggggggggcaaaaaatcggacaaggcaaatgccgtaattgtaaatgatg

SEQ ID NO: 117962 - DNA, 801 bp, Heterodera glycines
aatttgcgggttttctcccttgaaaacggtaacccttcatacaatcggcgtagccaggggggggggctgaggtggctaaaccctccccccccccgaaatccaaaaaatgaaccccaaaatggcaaaaaaacattcattttttggcgaaaaactgctataaatctgcaaaaaaaaacacctaatcgggatttctgaaaaaagaaaaatacaacctaaaaatcgaatttttgaattcataattcagcacctccccccctcccacgaagccaaaggtctggcctatacgcccttgccttcatacatataagtcatatatgtagattttatcaagaaattcaaaacaaaaattatgttgcaattatatcaggggattagactgatttttggttatggattctttcatttttgggacaccctataaaaaattcacgaatttatttagacaactcaaaaattgaggcacaaattttggatcgggattcaacgaactttagctactttttctgggttgaatatgttcttcaaaaaaatattttataaaaaatggaattaaaattatttttatctttcttcaaaactttgtttatttgtttaattatgaaatacaaattaacagctccttaattgggtctgaaaaatttgaatatttttaaaactggccttattaaactcgagatcactccaagaggattttattttactaaaaacattacctaaaaaattaaaaaaaaattttttttttgggctaagcaaaaaaattaaaaaattctttccattgagagctaaaccatttaaaatatg

SEQ ID NO: 117963 - DNA, 444 bp, Heterodera glycines
tgtaacattaagaagaggcattcatgcttttgccagtctctgtttttagcattgactttttgaatctgagctcagatttttgtatcaaatacttggttttttgtaatactgcagaattgcgattccgactaaaattcaaaaatttatttttaaatttttcctggggtaacaaatgtgctgattacgaattaagcttccatttagcaaaatccaattttatttttaatttttatcatcaaatatgcacttgatctaatgtgaattttgaaaaaatttaaacagaaaaaaaaaatcaaaagattgaaaaattatagacaaagttaatggcatatatctaaattctactctcggataaattctttatatctttttttatttgttttagcaaaatccatccagtgataaatttgttcattagcttccaaattatttcacgccaaaatg

SEQ ID NO: 117964 - DNA, 185 bp, Heterodera glycines
tatttttttaattttatgaactgattgatttaaattaaataatttttaaaaggaagtaaaataaatcaaattttattaaattaattcttgcttattgggtattttttaattaaaaaaataaaattttacaaattctgcacaaatgtacttatccgaaggagaagaagcttcgttcgaaggcgatg

SEQ ID NO: 117965 - DNA, 136 bp, Heterodera glycines
ctttccgtaatttacatttttggcatttattttcttggccctatcctcattttgtaagcattgtcttttctatctaatttccattttgttcctccacccaatttcctgtttttgtaatttctgttccatcccaatg

SEQ ID NO: 117966 - DNA, 86 bp, Heterodera glycines
cctgaaaggggaggggggagtgagtgagtttagtccctttgtcaaactgccgaccgtttcgcgattgccaaatccggcaaagaatg

SEQ ID NO: 117967 - DNA, 379 bp, Heterodera glycines
  unsure (1)..(379): unsure at all n locations
gcaaataaatttttttcgaaaatgaaaatntataaattttaggttgcccaaaacatataaaaaaagactatttntaagtntaataatagccaatcattagggaatgtaaaaaaagtctcgttttgaaaaacccgcgacncgatactctcgagcatcactaattgtgtacccccttgaagacacctcaactaccggaacttttaaatcaaggtgatttttttgagaaatgaacttctcgataggctttaccaatatttaaataatgataaaatagattttaaaatatatttttgttattattgtcaattagacatttttgatattcctcgtcaattaatgattttttaaatttttgtttgtttttactttcaaaaaaatg

SEQ ID NO: 117968 - DNA, 305 bp, Heterodera glycines
accaaaaaagagagagagttggggatgatgaagaatcaatgaagaaattttggattagagaaggcaaaaagcaaatggcacagatttgcttatgcaatgaaagtcaaaagcgggcgtatttggttgtttttaattttattagacaaaaaatggccaaattttgggtttgttagtttcaattacaatttgaaaattgcgttgggaaatcaaatttatggcgttttattttaaacttatttaaaattttcaactttttttcgaccttttttgttttcaataatcatttgctaattagagccgggatg

SEQ ID NO: 117969 - DNA, 128 bp, Heterodera glycines
tgcgccaatttgtcaatgcaaaatggtcatcgatacagattaacgctatttattgggagaatttttagggctttttcgggaacggcagcaaatgttacgatgtggacgaatgcctgtgggacgaaatg

SEQ ID NO: 117970 - DNA, 441 bp, Heterodera glycines
aaaaaaaaatttctcaaaaaattactttcttggcaaaaatttatttaggtatctatgtttggggttttttcctcttaaaagtcccagccctttttactccatttccagctgcaaaccagttaataaaaaatatattttctcaaattttgggctgaaaattatgtcactagttcggactttttgccactattttgtcatttttactcactattttagttaactattttgggttttttcgtcactaaaagttgcggcccttaataaatcaatattatattctgtattatgttgcataaaacaattaccaacaccgaaaacattgcagacattctgtcggtcacgcctctgattaattccatggcaaaataagtgagtttatttaatagagtaaagaatttttttggcttaatttggaatgatttaaattttctttgcaaaatg

SEQ ID NO: 117971 - DNA, 588 bp, Heterodera glycines
tttgttattcgtttttaaatgtgttaaattccataaatacatagtaatagtcagagaacggatttttagttgctaaaaatagcgaaataagtacataaatagttgctaaaaaactgaaaaatgccaaaataattgctaaaaaattggaaaaacctgtcaataaatgtgtgaattttccaaaattgcctcattctttgtccatttcggttgcacaattgtaaatcaaacacattttaagattttatttcggttgtccgccaaatcatggcgccaggatttttgctttttaaaaagtcgattgtatttctgaaaaaaaatgttagattgatttcgtacttctctcatcaagaactatccgcaaaaaaaataaagtctaaaacttaaaaatctgttcctcgtaaaaaattcatcatatattttgacttttgcaattttaattgcctaattaaatttaaaatttcattagttgccccgttctcgctctaacatcgacataccggcctttggatgtgccggtgccaattatgtgagaataaaaattttaaaattaaattattgtattttaatcgcttttttcttatgcagatg

SEQ ID NO: 117972 - DNA, 150 bp, Heterodera glycines
gccaaagaaaacacaaacgaacatttgtcgatttaaatatcttttaaatgatttccgcattccatcttttccatttggttgtttttcccccgttcactttatttgtttcttttcgtttttctttagtttttttatttgcaatttccgatg

SEQ ID NO: 117973 - DNA, 722 bp, Heterodera glycines
ataacagattatctcttctatggtgagtttttcaattcctatgtactttattaagtaaacaataataatcaaacatttttctatgattgcaaagcatttaaaaaatcataggcttgtttattttcattatgttttggaaaaggtcaattaaataaacaatttttttttgtaattttattaattgtataaatcttatgcaattttctataagcaatcgatagtaacaaatagagaagataaagtctgatcaagcacacacctttcattatttccggttaaatatgtgttcatattttaacaaaaagcagtcttgaatgtcgtcgaaatttgtggtaattccatggcttatagccgaccaattgcgctggaattttgccatgaggcttattttttgtgctggtttcgaatttacaggcgcccatgcaattggagctcattaaattttttgtcgatttttcttcaatacccactttaaacgataagcatttcctcgcacaccgctctatttgctctgttttaaacaacaaaattttcccaagcattcatacctactttcttaattgcactgggatcacatctaaacgactatgctaaaaacggggaactaaactgtattaatatttttaacaaattgccgcccttttcgcctaccctgttaagagaaatcttaatttcactaataatttctcaattttcttctataacagattaactcttctatg

SEQ ID NO: 117974 - DNA, 151 bp, Heterodera glycines
aaacgggccaaaagaagcttttcatgcactagccgaacgcctttggcactcaccacgcgcaactcgcctatggcattggcactgcctaaagaaatttaaaaaattcaaaactcaatttatcacaaaattgctttaggcattttttttaatg

SEQ ID NO: 117975 - DNA, 559 bp, Heterodera glycines
ccattcctttttcttgtccattctctaccagtgccttcctctgtttgtccttcacttgcgcgtccctttccatcgattgcattcccttttctgtttggtttgttgttgttctcaaagacaaataaactatttttctcctcctgtttcttcaagtgaaatcccaaaaaaaagtttgcttctcatttgccataattcaaaaagttggccaaaatgtcaccaacggcaacccaacgacggcattcacttttggcattgggttccttttcgtgtggtggcctaagacgaagcgcacggctttcaatgaaagcgcgaaaatgttcacgaaaaatgtgtggtgaaattaatatgtatttaaaatggaatttaattttaaaatatctttttttgatgaaaatttatcaattttaatttttactctgaaaacattttatctgattgggccaattatcaaaaagtgaggacaaaatcatgtgattacttggcttttagctacgtgtgcaacgacatttggctgcacatttttccatggcttacccccgcaaaagtcgggctgaacatg

SEQ ID NO: 117976 - DNA, 227 bp, Heterodera glycines
ttcaaaagaaattgacgcaagcgcacgcaacgaattctttaattgcgaaggaatccctccctaaaaatgttacttttttgtttatttgtttttcaatttactcccttttccattaggttcttccctctccattaattgaacaatatcgcaacaaatgcgaattttctgtcggttattcgtccggcgacaaccgttctgcggtagttggttttatgagtggcaaaatg

SEQ ID NO: 117977 - DNA, 119 bp, Heterodera glycines
tgatcaatcgcttcgatctcacacttctttatttttgattatttacaacaataacaaaagtgaattttaaaacgatcactccaaaagagagaaagaaaaaagacaaaacattggcaatg

SEQ ID NO: 117978 - DNA, 468 bp, Heterodera glycines
ttatcccgttttttgaattcccgcttgttttaaattccccccccggcatcttaaaaaagcatcattttgcttttcacctggttcttaatattttagaatttcagaaatgctgtgtaaaactttagcttgaaaatctccaaattattgacattctaatcttttgatatagtaaatttgtttagttgtctaatccaatattataatttataatcgaaactagcgtcgaactaaacgagaccaattctcatcattttttctgcatctttccttccctcactaatttttcgtgaaagtaatcaaagccaaaaaatattttgaattacatttgtacatgttaaaaatttaaaaacaaaacttaatatcacataaaaaataaaagaactgattttgatagtttgatttgtaatttaagatccttccatttttagctgtcttttgtttgtcacatacaaattccgtccaaaaatg

SEQ ID NO: 117979 - DNA, 197 bp, Heterodera glycines
  unsure (1)..(197): unsure at all n locations
tttatagccaaatgacgtttaaatgagtgatggtaaaggcagcttgggggcccatgtttgtgatggggancggtaaatntgaaatntaattgaaaatgccaaaaagaatattacnttaattgaatcacatttatttcaaatatttgtcaatttttattcttaaaatttggtctccatttttcagtctctgtccaatg

SEQ ID NO: 117980 - DNA, 1003 bp, Heterodera glycines
aaaatgaaaggtcttataaacttataaagaattaaaatttttattattctcaatacataccaaaacttgttggtgcacagctagtaaaataaaaccaattattaattttattaaaatcatgcatgcaaaacgcgttaaaacttgaattaaaatgcaattttaatattccgcacacgaaaaaagctaatattcgtatctattcttgcgattttagcagttttaaataatgttacatttataaagtaaaattgcctattacttttatttattttgtttccgaatttagcaaccagaatttcttgaaataattttatatttatgatattaatcatttttcggatcaaaaatatgactatcattgtctttggtccaattatttgctgataaaataatgtatcacttatttacattaaaatgaaaggtcttataaacttataaagaattaaaatttttattattctcaatacataccaaaacttgttggtgcacagctagtaaaataaaaccaattattaattttattaaattcatgcatgcaaaacgcgttaaaacttgacttaaaatgcaatttttatattccgcacacgaaaaagctaatattcgtatctattcttgcgatttttgtcgtggcgacaagaaatttgcgtcgaactctgcggggtgaaggggacgggaaggggatgaaatgggcgaggcgcgcagagtagccggtcgggggaacgtagggggtcgggaccgatcggagagcgatgagtcgtgccggttttcgtccaggcaaatagaccaagttgggcacaattttaataagagtatgtttattgtgtcgacctcaaacttgggtaattaaaccgtcccaatcgggacggtgagggaaacgaaaaatgggggacaaacatgataatgtgaacggggaaaagggggcacaaaaacggtgacagtaaataaatcacaaattgaaaaatgtggcaaaatcaaaaggggtcagaacggcgaaacggcgatg

SEQ ID NO: 117981 - DNA, 1003 bp, Heterodera glycines
ctttgcacacaaaagagtggacccataatgactagggttgtaaattatatggattaacatattttttctgcgcatatgctatgaagaaaggggcttattgtactttttaggtttatttaagcaaatattaaatatgcacaccttttttgggatttttgggggtttacaacatatattttggcattttttatccatattttggtccatatttggcctttttagtccatatttcgggcttttttagtccatatttaatgtccatatttcgcgttttttagtccatataatttacaaccctaataatgacgtcggcgtacaaacagggggaagaaatcaaaatagggggattttcggaccgggtcagtttagtacgggccgttttagtacgagcgcacatttttccactataacttttttatttgttatccaaatccaactttcttgatatcattcgagagcccttcggatgctctattagcctgcaaaatttcaaaaaatttcgttaggttttaaaaaaagttcgggccaaaaaagttggaaaatctggttgtatgaattcttctggccataacttttttgaactttaacgagattttttgaaattttgcaggctaatagaggacacttagggctatcgaatgataccaagattgttgaatttggtttgcaaagaaaaaagttatagccaaaaacttgtgctcgtactaaaactgcccgtactaaaccgaccccgaccggggatttcgcttcaaaaaaattatggcgaaattaatatttttaaatttgaaaaaatcattattttgaattttcattagtatctgcatgaaaaaagctcgcactagtcagggcttccttttttggttgatttattattgtgaccataatgataaaatttcttttatttctttgagccacttcaaaatcatcgtcttattataaacaatcgtaatttaaatttcctaaaatagtatcgggattcctttcagcatatcttcaaaaaatg

SEQ ID NO: 117982 - DNA, 287 bp, Heterodera glycines
ggtcggtcaaaaaaggagggggggggggggtcgctggcagaatgttctgaatactcggtccgttaagtgattggccttcgttgtgatcaatgtgcccccggcttctttaatatttcctccggaaatgggtgccatcagtgtggttgtgaccctttgggcagtttggatgggggcgtgtgcgatttgattaccggccaatgccaatgcaaaaagggggtgaccggcagacgctgtgatcagtgcgcaacgcggcatttcggcttcggcccggaagggtgcttggaatg

SEQ ID NO: 117983 - DNA, 58 bp, Heterodera glycines
tgcaggtcttaaaaaacaataaaattttttattattaaattattcagcccaccaaatg

SEQ ID NO: 117984 - DNA, 326 bp, Heterodera glycines
ttatattattataaaaataataattaccaaatctatttgagaatttaagaagagaatgaaacttcaccttattattagttttaattatattttaatcatcgaaattgatcaaatttggagcagagaagaaaaaattgaaacaaaagtcatttgacgaaatatttggagaaaaatgggaagaaaaggaagaagaaaggcgaaatgaactcaaaaaaagagaaataattgcaaaattttataaaataaaagagaaaataaagcaaaaaggaagaaaatacccaagaaaagaatggaataaaattgaaagaaaaattgcgaaaaaaatg

SEQ ID NO: 117985 - DNA, 173 bp, Heterodera glycines
tttctttttgaaatatgtttgtatttttagttttacctgtttgccaacagccatttgaaccagaaaaattaaagacaaaaattgtaaaactgcctatggtaggatctcttttttgaaaaaatggaatttttaaaagttattaaaaaattttagggtatgggtagtgtctaatg

SEQ ID NO: 117986 - DNA, 299 bp, Heterodera glycines
taaacaaaataacatatgtattttaaaatatttccaactataaaatcaattaataatttcgtttaatgaatgaatattggattgaaaaaagcaaaaaaataataataaaaattttacaagcaaatagatattttaaatgaatgcagcgccccaacccttactaatatagcaaataaattttaatgaaaatttatatcatatatatataaaaaaaaattattttctaattatttgaaaatttaaaatttaacgcaacttttggcccaaaaactattctttacacatttcggttcataatg

SEQ ID NO: 117987 - DNA, 496 bp, Heterodera glycines
tatcagtttaattcaatcattcggggccaatgttcttcaagggggggggggataattggagactgcggtattaatagagactgggccataattagagcatatacggtacataattggacgcataaaaatgattgagcggataaattgaaaaaaataatattttttacaaatactccgtctgttttttgccaaaaaatgtgatgaatttatttctgtttcaaaattgtttttgcgttctttttgctctctcatttttcccaactctctctttttaagttacataacaacagagttttgccttgccttttttgacacaccaatcaattggaaaaagggaaaattgagccacaaaaatgaatcgacggtaaggaattttttaaaattacaaaattttcatttacccatacatttttttacgaatctcagttggctttgtagcgacgtgtggatggacattatgccatcgtttgaccatgctcaactcggcctcaaaatg

SEQ ID NO: 117988 - DNA, 1003 bp, Heterodera glycines
ccatcaaaaacctttgctgcgcatgttaatggcacgttctttgactttcgcttttctatgaatgttaaatgtgacataaatatctaatttatatggctaatatttttagttttttgcctatttttttcctgactcctttggtctgaacgacaaaaacattttttttttgttaagctacttttcgagttattagcactattttctggttttttatttttagcacctaaaacttaaaattattttcaactattttggagttttgcccaaatttgttaacaaaaatgcaaaaaaacgaaagataatgaatttctcaaaaattcatctcctgatttatttatttattttcttgaaaagatttttggttttaaaaattatacacctcaatactaatttggcttatgtttgttactttttgaataaaattttacgtttttaaccctaaatttgaacgtttttagcaactttttcctatttttagcaaaatatttttgggggtttttagaacctaaaaactaacaattttggcagtttttagcaactataaataaagtagagaccggcaggctccacttcgtttaggtgctggcgtttgggcgctcgcgtttcggcgccagcatgtttttggctattgttctttgtcatccaaatccaacattgttgaaaacattcgaaagcttaacatgtttagaagctttttctaagctattgcttcacgattagacaagatttatcaatcggttatttttggtcttgtatcgaaaaaacgatcgaaccccttatctgatctctactaagtacgccgtcgtatttccaaaaaacgcctctataatgtcaaaaaatttgtaactatgaaatctaaaataaacaattttattgaaaatttaatttttttttttttttgctttggcatttagcctaaactgcagggcttaacagacatatttcctctacttttccagaaacaaaccttttaactgctgaaactgaattgcatgggaaaatg

SEQ ID NO: 117989 - DNA, 94 bp, Heterodera glycines
ggtacttccttgttttgctacacccccccccctcgaaaaattttaaaaattactatttttgggctttttaaggtcactgattatcatcaatatg

SEQ ID NO: 117990 - DNA, 57 bp, Heterodera glycines
ttgcgttcttcgattaccgaaatgcccaaaatcaccaaattactgttttaccaaatg

SEQ ID NO: 117991 - DNA, 220 bp, Heterodera glycines
aattttcggcgattatttaggacacttttgatgtgatggtgacattcattgttagttgtattcattaatacaaattcgtgtgtcaataaattggcgatgtaaattaaagaatggaattttacattgttgttttatgaagaaaacattcgttttgacgattgtattttggttgtatgacatgaattgtacaaaagtagctttgttttgtagtgctcaaatg

SEQ ID NO: 117992 - DNA, 456 bp, Heterodera glycines
tttccaaaaatcgtaacatcatcatcatcatcatcataatcatattgacgataacaaatccaaaatgtcaaacctaagctggatgattttgtacgagccacgtgagggtggtcgtatggtaccccatccgctgttcgaccccggtccggaaatgtcggcgcgcgtcattgccaccgctccgcttttttcgacatcatatttttgtttgttttttattatcttttacattacatgtcttggcaatgtgcacatcgcaccgttccatgtaataataataataatttttaagccacccaacacgctaatgaatcagacgacagcgtggcagatgctgtcatctccggcggcggtagcggcgtagcatacactgtaacagaagctgcgttgctgaacaacaccaccagcacactaataggcacgacgtcagccgccgccgtgacatcaacgacggcgatg

SEQ ID NO: 117993 - DNA, 464 bp, Heterodera glycines
  unsure (1)..(464): unsure at all n locations
ttgtgttctgttgagacagacatntcattcggctgcataacttttcataaccactcgaaaaaaaatgaaaaatttttagttttttaatggttttttcggtaagaaataaaaaactttcaaaagaatttttcgtttttttataattttaaataaaagtctgttttccttaaataaatttttcaaaaaatctttgttttttcaaaacctctaattaaattaaatttttccatttttgaatatttttggtatttattttatttttttgataaattgattttgttgttccaaaaggatgatcagcagcagtggcggctttgtgttggaaagggcaattcgcaattttcggcaaatggccctttatcagccggtgatgaatggcacgtcatttgtcaatcattcatttattaatattgtagtgcatcatcatacaataaatttaaaaattttagacacactttaaaatg

SEQ ID NO: 117994 - DNA, 596 bp, Heterodera glycines
ttttggtccctgttgcttttgctcctacagcctttttctgctcccgcagctattttcgatcagccattacagtctctaacaaattttcaaaaattccgactgtgccttcggaaccagcggcatctcttttaggcaaaaaatcatttttttaaaattcgaattgatgacgtgtaaaattttctttacccattatatttctcaatataatattgataaatcaattaaatttattttatccacgaaaaatgatcatttttaggtgatacaattttaaggatataagaaaagaaaattgaaaacattttatgatgaaaaatgatcattttttcttaaattcgttctcaaatttcttttttatattagtatttttagttattttacaaaatttctctatttaatggaaaaaatataacctaatccaatattgctaatataaaaagtgaaaaaaattttacaaactgtgagcataaataagctgatttcattattttacaaaattatttttaataaaaaataattgatttctttgcgcttcattcctgcattaggagaagtatttcatttttccgcgctcatttttaaacttttcatcaatg

SEQ ID NO: 117995 - DNA, 520 bp, Heterodera glycines
cacacattagcaattcctttcaaaagggaagaaagacatgcatcactgtgaaaggaaatcaaccgataaaatttcaactaaattttaatttttcctattcatgacttactttttcacccaattttttttgcttttgtgtaaagggaatgaagaagtttaagacttagttgaggtaatatggcaaaaaataacagaccgataaaatgtttgatgaatggccaataaaaaatgctaataatggaatgacaaaatgctgaggatatgagaaaatgggaaagcgaagaagaaaatggtggcaaatgggggggggggaagtgtgaatgatggcccaatttatgacggaatgatccgtcattggctgttatttgccaagagatcataaacggacaaaaagcattagaagaaagaagcgatggaagtgttaagagctttctcgctcaatcggcccattgaatgtgtgtcaatttctggtgaaaaagtctaacgactgttctgccgtttagagaattttagggcaatg

SEQ ID NO: 117996 - DNA, 151 bp, Heterodera glycines
gctcccacgcaccatggcaagacgaagcatgccagagtgggagacatcgttcagggatgcctaggcgcggttccaggctggacaagttgtccaagcgccacaaagattcgaacaagccaaccgggtggccgcacccgtcatgccaaacatg

SEQ ID NO: 117997 - DNA, 78 bp, Heterodera glycines
  unsure (1)..(78): unsure at all n locations
ttgcagtatgtttgggttttaaanntctcaatattataaaatatttttaattatttaaaaaatttatttttnaagatg

SEQ ID NO: 117998 - DNA, 710 bp, Heterodera glycines
tcccaacagggggttgtgtccagctcctactacaccgccttcatcgtgctcagttgcatgtgcgggttgctgctgttgtgcatggtggctgcttgtctgatcacatgcaaaaagtgcgtgcgtgagtgatcagagtctcctttctgctgatcagaatcgagagtcacgaaatgaattgtcgatccgagccttgaaagtgacccgagtctctggtcccgggtcagcaatctcgaagttgaatgttccaatcaacatataaagtgatctgagtcgagagtctcagaatgaagtgccgatcataactttgaaagtgatctgtgtctaatatcttcaagttcaatgatccatcaacatatagagcgacctggatcgagagtctcgaaataaagtgccgaatagtttcagtctatgaaatgcctctgatgggatcagactctatctttgaccaggaccgaattttcgatacaggaacttgttgtttccaactctggaaaactcaaatttattaaaaaaaaataaattatacttatcggcacagagttgtgcgcgcgcgtcgcgactcgccggcgtcgttccggcgccaccagcagctggcagcagcgggcgccagccgtgccgcggccaacggcaccggtggcaacagtaccgcagccgctgccccgctgatcacgcgcggcgacccggaacgcgtgttgctgacagccggcatg

SEQ ID NO: 117999 - DNA, 874 bp, Heterodera glycines
aaattcgattgctgtgctataagtaataaaatttatatcattggactagtttaatgcctttttataattacaaagttactgaattattttaaaatacggtaattgtccattctgaactcgttttgcatattcacaaatttaccaagttaaaatttaatttccattacggtacttatccattctgaactcgtttttcccaattcataaattttttaatttttgggaaagtattacaacccaatacgaattcactgatcggacagtacagaaaattggcagagagtgcgtgtgtgaaaagtgattgttagattgttaccaaaaaaggataagattgacaagtgaattgtggtccgagtgatcacgatcaagagaaaacagtaaaaaaattgtgcagaaaagtgagtgtgcccgctgaattgtgagtaatcacggcatcatttggcaaacaaattggtgttagacagagagtgtaccgtcccgactgatcagagagtgatcagcgtttatcatacaaaagaggccgagagggcgatacaattacgatacaattactgtgtaaaatcagtcagttccgaccttaagtacaccgcgggtgaaatcagtgaccaagtgatcggagaggcatttttgccgatcaaagtgtgattcattgatcagtaaggtacaaaaaaggggtttttacgcaacaattgttccgattcatataactttggcttaacattttaataactaaatcaaaataagtcacactcctgattaccttgaaaggcgtttcaagcaaaagccaataagtgatctcgagcgggtaagacggaagcttgagagagaccgaaagaaaaaaagtgaagaaaaattaggagaaaaccgaaatatg

SEQ ID NO: 118000 - DNA, 86 bp, Heterodera glycines
tcttttttacacactaattaaaaatttttatcgttttaaaatttgtaatttattaaaatgatgctttctacatttccgatggcatg

SEQ ID NO: 118001 - DNA, 227 bp, Heterodera glycines
ccttttgcagcgttttgctgaacctggaaatggccaaacaaaacttccgctttcgtcaaacccttcacagggggatgcttcgggcacacgacagagcgtttcagtaggattatgtgaagcgcacaaacagcatgcattgaaccaactgaaaaaagagagggcagcgtacgtgtttgcatccatgccaaattattagacaaaaagcattttttttttctaggcaaatg

SEQ ID NO: 118002 - DNA, 666 bp, Heterodera glycines
aggataggccgcggtgaattaagccaccaatgcaagaaatgagagtttagaaatgatgagcaaatcatcgtcctaggccaaccggactccataagcacaggagtccggctagctatcctttcaggataggccgcaatgaataagccacatgaatgcatgagatatgaaagtgttaagaaaatgcaaaaacatgagcaattcagcgtcccgggccaaccggactccataagcacaggagtccggctagctatcctttgaggataggccgcggtgaattaagccacatgaatgcatgagatatgaaaatgttgagaaaatgcaaaaacatatgacaattcagcgtcccgggccaaccgaactccataggcacaggagtccggctagctatcctttgaggataggccgcggtgaattaagccatatgattgcatgatttgagaaattggtcgagaattaagaataatataataataataataaattgattcaataaaatgagaaattacgaggcaaaaacgccccatcgtccgctgtcgacagaggcggattaatttgccttcggaaaattatataaaaaagaaggaattcatatatatataaataaagaattcattcaattattatctaaataaataaattcaattataataataatttagcattatg

SEQ ID NO: 118003 - DNA, 810 bp, Heterodera glycines
gcattagcgcttggcttgcccgtatacgattctccttccgccccattcctttccatccaccctttggcgtcgttcaacattctttcaataaacatttagcaattggaaatttatgtgttcattaattgttgaacaatttttaattgtttttaaatttaattattttattacttttaattctttatttctttttagcgaaaagcatttaattagtgatctttcttcaattcatcaccaaaaaaaaagggacatcagcagcgaacagtcaaacatcggacggaattgctttggtggacattcaacagacccaccagcagcatcgtcagtccttcggcacttttttggcttcaagcaacggcacagtgcttcggcggactaaattgtgaaggaagtccgactgaggcccgacaatttgaataggcacgtcgagctacggtgcgcgtctccctgcttcggcgattcaacggattttgtgtgctgttcgactacgtggatagtgcaactggacccgttactcagcgatcactttacgagacagtgaaaggacaaaggcaacgactgactgcggactgtacaactacggacatttacatcgcggacttgccacttttgagtgcagatcgggacaaagtgattttaaattaattgaaacaaacaaaaccaaaacacagaacaaataataaataataaataagaccgaaaagggaaaataaaacaattaaaattaggaattgcttcggcagcacaaggcaaagaatttactgaagtttcagtgtgactcccgcttcggcgatacaaaggcacaagatg

SEQ ID NO: 118004 - DNA, 689 bp, Heterodera glycines
aatggttaattatagtttttctgataattttttaaattttttagatttttagtgccaattgggattggctataaatttttagatttaaatcaattaaaaaaaattttttttagtttggaaaaatttttcggtcctcggtaaaaaaagaaaattataaattattaaaacattggaaaatgtgcaaaaaaaaaggcatcgacaaaaaaatgaggcatttgtcatataatatagtatattccagcgctgtactaaatcgaaacacagcctgcgtattttttttatcttgacgcaatttaattggttcgaaaattgtgattataatttaccgtacaccacggcaatttaaaaaaaaatatgattaaggagtattaaatattaatcgagactaatttctggagagttattttttttagtgacaccgattggattccgattgcacacaacagtagcggcttatgggagtttcagatcgatgtgagatagctagaaaataattttaatttataaagtaaatttaaaaaattatagttgtttttggccgaaattttttaaataaatactacaataaaaaaaaaaaaaattatcttttatttataatttacaaaagttgcggccaatttttgtcttttttttggcattttgtttaatttttggtgtcaaaaacttttataaatacttatttatcaatg

SEQ ID NO: 118005 - DNA, 307 bp, Heterodera glycines
  unsure (1)..(307): unsure at all n locations
cgccatggccatttatttttcaaatattttatattaaatagatatccagaaaaatggctatctcttttttgagaaattttctatgcaacaaacgctctcgaacatgaaacgaagtgcggtgcgccatggccattttatttttcaaataatttttatatntaatagatattccagaaaaatggctatctctttttttgagaaattttctatgcaacaaacgctctcgaacatgaaacgaagtgcggtgcgccatggccattttatttttcaaataatttttatatttaatagatattccagaaaaatg

SEQ ID NO: 118006 - DNA, 152 bp, Heterodera glycines
ggtttttttctgtaactattttttggtattgcccattacatttttttagaattttggcgctggaaaaacttggcgttgtgttcaatcaggtggtgcacaaactcaaatacacgccacggaaggcgattgtgcacgccccgtcacaaaacatg

SEQ ID NO: 118007 - DNA, 466 bp, Heterodera glycines
tttacaaaaggttgaaatacggctcctaaaaatgcatgagggagaagaatgaacacacttttccgatttcaatttcacttttaacttttgttgtcaaatgtcaccaattaattttaattaaaattatttggtggtattaatctataattggcactttcatcgtcgtgtgagcattaacagatataatttcttattttttgccggttttctgtttttgtacgcggtgtttctttttttctgaataaaatggtaattattaattaaacatagtctaaacctggaatttttacaagatttaaaaaaaatatttttaaatgcaaaaattaatataaaatcgtttgcctttgatttaaaattctcttgggattataaaaaaaataatttttaattttttaataaatcccccctgaaatattttttaaataattatttttctaggataatttttagcgtgatcacgaatatg

SEQ ID NO: 118008 - DNA, 1003 bp, Heterodera glycines
gcgggaggcgcgggatcggagccccaaaaatattggattcgggaaatttggcctaaaaagactaaaaaacagaacaaaataataaaaaagaaaataaattaacaaaaaactgaaaaattcggtaattattctaggtttttcatgtcccctgaatttttaaaaaattttccagtctaattttttgcgctgaatacgaatatgccatttgtttttagcttttacgcatttcacgtgagttacgtgaaaatttttgtgaaaatttaagtaaaaacgtgaaaatttaaaatttaaagaaacgatgtttgcaaatctcatcaacttttataatgcagattgatagagaaggcgtaacaaaaatttaaaaaatttcatcatataatctgtgacctggcgattaaaatgcatttgatctgtgactgagatttttaacttcttttttttaccataaattggagttaagccctgaccccggccttttaatccttctctccattcgccgacctttttgggccttctcccgacccatagtagggctgggcgaaacttcggtttcgaaaatatcgcggtgttttttgggcttcgaactttggacttcgccttcgaataaaattgggcttcgccttcgacttcgagtgctaagccgagcttcgcccagccccgtaaaatttttaatgcattttgttaaaaaattgaattttttttttaaatagtcaatttttactggaaaattttttaatttccgggggggggggggggggactgcctcgcccctgtccccgatccctgtgacgtgcccttccccgcgctcccccgacatgcgttctccgacgaggaatttttacactgttaaggattgattgcgttgtaaaattaaaatcaaaggatatttttcaaaaatcaagcttggttctcttccaattaaatattttcttgctcttttttgtctgtaattttatgaaaccgtccaattaagatcggacacgtagttgtccaattaagcatg

SEQ ID NO: 118009 - DNA, 230 bp, Heterodera glycines
ttagacactacccataccctaaaattttttaataacttttaaaaattccattttttcaaaaaagagatcctaccataggcagttttacaatttttgtctttaatttttctggttcaaatggctgttggcaaacaggtaaaactaaaaatacaaacatatttcaaaaagaaaatatcttattttaattgaagaaaaaatccgcggagaatatcaatgcgcggctggccatg

SEQ ID NO: 118010 - DNA, 109 bp, Heterodera glycines
ataaattaattaagtgcattgaatttctgtgcaacggctcagaaagctgttgtacctactttgtatgaatgttattttaattaatgtaaaataattactaaatcagatg

SEQ ID NO: 118011 - DNA, 725 bp, Heterodera glycines
cgcgcgcgtggcgtgcaaccaacacaactgccaacagcttttcacacatgcgaaaaaaaaattgcgcaaatttcggcaaaatgcacgggacaagcagcagcagcaattactatgatctgagaagatgtggagagaggtgttttcaatgagcgactgatcagagaatatgattttttgatggatgacgacgaccttcaaaaaatatggggaaaaataaataaaaattacattttcaaacatttatttttaaaagtgtaaagaacggcgaccaaaaaacatcgccgaacaacagaagaaaagcagagagagtgtccatcatttgttgttgtaacataacacatgcacaaaaaatgtcttgtgaatttgtggtggactgatttttggcggtgcatttcaaagggagcggcgcaaaaaaaatggaaatttttttaaattggctttttgttggcatttctgttgacatttggaaaaattaggctctaatgcagtttatgagtccaatcgacttttatgagtccaaaagtattttatgagtccaatcaattgtggcacatgtgttaacaggtcttgaaaatgttattgcttatgtggatgacattttggttttcacaaaatctgatgactttgatgaacacttagactctcttaaaagtgtttttgaaagattcagaaggtttaatttaaaacttaaaccacaaaaatgtattttggcttcggcaagtatg

SEQ ID NO: 118012 - DNA, 510 bp, Heterodera glycines
tttaatagcatctttcagtgacctacctattcgtcattccttcatttttatctttgtttatccatgtacatattccaactctctctgaatcaataactccgcttttctcttcccaattttttttttattggtcgttttcgtttagtcgcaatattatggacattgtacccatttttattccaaaaattcattgttattttgctcaaaacaaataaatagtacaatttatttgtatattcgaagagctcaaatgttctgagcattcaaaattctaaaaaatcgttttgtttacaaaaaaaacacaaataaaaaatattttgaatcttttttttgttatagctttttaaaactattaatttttttgaattttaaattataaaaagttgaaattcccattatattaattgaatttaatatctcatgacccctaacactcttctgactctaaattttgaatttccttgcgcttacaaataatttaactaaatttaaatgttcagaaaagcgatg

SEQ ID NO: 118013 - DNA, 1003 bp, Heterodera glycines
aatcttgcaccaaaaatagccaatttgcattttgggccaatttctacaaaaataagagaatttggtttcagcggagccgattggtctccgcctcgctagggaaaaaagaaatttattgctccaaaaattttacttttttacttttttgtttgtattttcgagcattataaggtatttttcgtaaacatctatcaacaaaaaaaggttggtttttgcgattattaagctcaattggtaggattttcatttaaaaaatgataaaatatgtatcaatttaaaaaaaactatgaggaatcatattttctttataggaaacccacgagtatacaaaaaaaaaaattgaaaataatctaatttctgtagagggattgaaccaggagaaagaagaagggaaagtcaaggagaatagccactaggccatttgcacacttgggcagttttacttttaaagaatatattaattattattttatttttccctttgactccaattttcttcactaatttttcactcagaccccattcttaccagtgcttgtttttcccggttcccggttgccctaccgggaccgggaccgggacctgagcttttcaaaacccgggaccgggacctcggatgaccgggaattcccggcccggtcccggtcccgtggcaatctatttcaaacacataaaaagccaacaaatttaaatattttttataaaataacttaatttccattttttcatttaacttttttaattgaaatttttcaaaattttcatatttaaaaaaattcgcgatacttcaagccttcaagtgctaccaagaatgtacggattgattaatcaagaagaaaatcatggttcataaacccaaggaggttaaatgatttatttttgaaattattgtgttaataaattgttataacaccaaaaaaggttttaaggaaacattaattttcaaaaaaccaatcacattattaagaatggtaaaaatcattaattatacaattttcagatg

SEQ ID NO: 118014 - DNA, 118 bp, Heterodera glycines
actgtcattccccgcgtcccaaccactcacatccaaatactcgtcgttgctgcgctcctcgctctccaacttgcactccgcttccgtctccaattgtccgttgatcacattcagaatg

SEQ ID NO: 118015 - DNA, 573 bp, Heterodera glycines
actgcaaaagaaacaaaaagataagacaacccaaaattgggtaagcatttttaatttaaaatttttggtatattttattacttgaattggctttttacgagaaaccggagggggggggggggactcccggggatttgcccgcaaaatttgtaccttttggagtcatagttgaagtccttcggtccataaaatatttaaaaaacatttacaatgttttagttggaattattctgagacaaaaaaaaagtcacaaaacaaagaattaccaaattggcactgggggaatttttagtacaattaaaattttgtattttttccagtaagtccattaaaatgttggtgccaccaaatcaaaaagaaagaagaaataagtgaaaaaaatgtctgtttaccgtaaattaaaaaataaatattcaaattttctttataaattaatgtaaattgaccaattttcactcattcaattattcttttatttttgaaactgtttaattataaaaaagccaaaaattgcttccataatctcgaaactcgcctgtatctgcccgaatatccggggatttcgttggaatg

SEQ ID NO: 118016 - DNA, 374 bp, Heterodera glycines
  unsure (1)..(374): unsure at all n locations
tttcttaacaaattcattaaaaagtccaaaaattttccccggcggcgcctggcggcaccgccgaaccccnaaaattcctatttttcttaaaaaattggctcaaaatcgcaaaaattggccattttttggtgcaaatctgttaacaaattacacccaaagatcaaaaaaattttcccggcggcgcctatcggcaccgccggcccccctgttcccgaaaaattttttggaaaaacgcaccgaaaaaaacggtttttgaaaagcaaaaaaaaaaaaaaaagtcatcggcggccgaccccccttcgcaaatattttttccgacccacccacctttttaatgtatgattttgcaggagaagaagccaaaaacgaaaatg

SEQ ID NO: 118017 - DNA, 78 bp, Heterodera glycines
ctatacataatgtattatggcttttttgtaaagaaatttaaataaaaattatttactttaatttaagctattattatg

SEQ ID NO: 118018 - DNA, 94 bp, Heterodera glycines
cgtaaaaacagttaaattgttggggtgaatattttttctgcataaatcattaccaaataaaaattttacaaatttttaaagagttcaaaaaatg

SEQ ID NO: 118019 - DNA, 234 bp, Heterodera glycines
tgtgatattctaaatttgaatgtccatggctaatcattttgcttttccgttttaagtttcatcgctgccgactgttggcttgaggtgttcggtttgcttccacgttttcaacttggccttggcattgcgctgattagtcaccgatttgactatttcgttgacgaacacttcaaaatccgcaaatggacatttgacaaattggaaattcgaagcaaaatacaacgatggacaatg

SEQ ID NO: 118020 - DNA, 108 bp, Heterodera glycines
ttccgtgttcttcgaccgttgcgttcgctcgtctgcgccttggaattggaaagactgcgcaaattgagcgaatatggcattttgcaagaggacgacttcaatccgatg

SEQ ID NO: 118021 - DNA, 303 bp, Heterodera glycines
tggcgctcctggacaagggtgagcagagtttgttcgattaatttctattgatttggtggtgcaacaacaattcggggactattagcaattgtccacaccacaaattcgacagagaaataaaggagtcatcaattgacgcgcctgttactcattcttgtagaagagtaacaaaccatcaaaaaaactacaaaatcgccatcgtctcgcccaacatttgtgcactttcttgtagaagtgtacaagaaaaagcagcagcaagcattcttgtagaaacttgcaaattcttctcttctcttcacaatg

SEQ ID NO: 118022 - DNA, 205 bp, Heterodera glycines
gtttaaaccaaaacctattggatgggtgcgggagtgaacctaaacctattgaaggttttaaacttattgattaataaaaattaaataattaaattaaattaaaaataaataaataataaaaataaaaataaataaacaaatcccaaaactaaacacgctgaactcggcaagaagttcagtctgttgaagaagtcgacgagcaatg

SEQ ID NO: 118023 - DNA, 341 bp, Heterodera glycines
gaaccgaacattcacaaattaaggggcgggggatccttttaagcatccgcagtcaagaaataagcacatttaattcctaagatccgacccctccaaataaggacaaagtcttagaaataaggacaaatgaaagccctatgattttcaaaggacatcattaacaaaaggtgaacaaacattttgttaaaaaccagcagagtccaaataataaatccaacttatgtcaacaaaaatccttattatataaagcggaattgcgacatcaaaaaccgaaaagaaaatcattttaaattcatgcttaattaatctataagaaattagctaaaattatgcttaaaatg

SEQ ID NO: 118024 - DNA, 126 bp, Heterodera glycines
agtccacgggagcagcttgttcaatactcgttgagcccgctatcgacttcggcagcgccttcaggcagaattatttaatcaattcatccgtttaaatttaataaaaaaaaattctgttccagcatg

SEQ ID NO: 118025 - DNA, 381 bp, Heterodera glycines
tcctgaatagcttttcagaaggcagctacgaatttttttctgaaaaatcgaaaatttccagaaattctggaataacttttttcttttttgtgataaaaaactcaaataaatcccataaaattctccttatttttctctatttttaaagctttattatagttaaattgatgaaaccatcaccgagttatgaattttccaatattagcccaaattccaaggaccaaaaaaattaaaaatattttcgaatttttaaaaaattccaaaaattctgaaacgtaaaataaacatcatattcgtgctcagcacctcaaaatactccagaaaaatatttttcactccccttttggccccaaaaaaattttggcaacaattccaaaaatg

SEQ ID NO: 118026 - DNA, 61 bp, Heterodera glycines
atcaattttcgcgtttcgtaaggagtgcactccgtgccatgcgccgaaaggccgcaaaatg

SEQ ID NO: 118027 - DNA, 369 bp, Heterodera glycines
aattctaagggatttttaagaaaaaatcggttcaggcccctagctagaaaaaaaaattagagggggggggggaatccgagactttttagcccttttcactaaatattaccaattttttttaatttttgagtaaaatttaaaaagtctgataaaatgagggttccgataggcgccgccagggaaaattttggaaattttgatgggcttggtctaaaaatagtttccaaaaacgattttctaaatttaatcccgaaaattggccacagaactttttatttccctgtaatttcgggaaagaattcatacaaatttttcccataaatttcggattgaattaattttttcacattttccaggattttgacaatg

SEQ ID NO: 118028 - DNA, 530 bp, Heterodera glycines
attgggggggggggggggctaattaggggagaaagagcagcaactcgcccccggggtcaatggcaacacatacaaatggcaacttgtattttacaaaacaaagcttaagcctaggcataacctaagcaattgtacgagttgccttttgtacaagttatcatgacacctctcgccccccccgtgccgtccctcccccgtcgcgaatttttttaaattgatttttgtctaaatttcttagagatgtttttctaatcgtatcgtatttttttaaaacaggtttctttcaatttaaataaaactaaaaaaatagcttttcaaaaaaaaatcatgcttttttgaaatttttactaaaaacctttttgaaattataaaattcaagaatttcaatttttatctttcgattcgagcgggtacagaccgggaatttcttctcaaaatagtaattttaaaattgggtctgctgatcacatcattcattgatcatccacatttcatcaattgatcaatgccttctcttccgtttagtaatg

SEQ ID NO: 118029 - DNA, 304 bp, Heterodera glycines
ttattaaaattttatttttttatgctttttaattgcacatattttttacagacatttcatatatttccggtgataaaattattaataataaaaaattaaaatcaatctaattttgttggcattatcaaaaaaatatatatttaagttttttaattttaaaattaatgtataattgtaattaaaataaatttaaatttttaaaagaaatttagtctgaaaaaggcgaataatgaggcgtgcaatattgttgttttgcatcattgtttcaatgtttgctatttcggcagtttgttgtacaacaatg

SEQ ID NO: 118030 - DNA, 67 bp, Heterodera glycines
tttgtagttcgttccattttcctaatttcatcttatcctaactgttatatttttcccccagaaaatg

SEQ ID NO: 118031 - DNA, 80 bp, Heterodera glycines
ggtcattttggcaaggctcaaaaaggaataatttcctccccatcattttataattacttaatttttttttattttagatg

SEQ ID NO: 118032 - DNA, 239 bp, Heterodera glycines
aatttatttttggtcactcaatggcacagccaattatctgttggcactttactccttttttgagctggttcatcagcttggtcattttctgtttgtgtacaacgcattttctggccaaaatttcatggagtatcgtttgacagcaaaaattttatttatccctgtgattggaatgggtaatttataaaatagaattaataaaaatatgtttaaatttaggtggaatttttccggcaatg

SEQ ID NO: 118033 - DNA, 363 bp, Heterodera glycines
aaatttttaaaaattcaaaaaattgtttaaatttattagaaaatccattggaatgccattgcatgaagccaaaattcctgctggtcgggcaaggcgaactccaaatgagttcagcaatgctagtgatcaaagcagctaatcgagacctattcgattgtggcacgggaaatcacttgaaaataaatgtaaaatttaattttataaaataaaaaaaacaaattcttaaggtacaattagaaaatcaaaagcattgggaaattggtgcatttttggttcaaatctagcctatgaacaactcagtgaattaaagaatgaattgcaattccatcagcaaaaagtgttgaaaaatttgatgctttaatg

SEQ ID NO: 118034 - DNA, 1003 bp, Heterodera glycines
aagttttttttctgggccacgaaatggcacttctcccccatttgccgtactaaacataaagcttcttattaccctataagctgggcactgtgacgtccggccttggcaccgctcttggccgttaccgtaccacgctagcaagtggtactgctgggactggtggcaatgatattgccagcggcacagcgttcgtcggtccaacacttggccatgcgatggggctgctgatgccacgagggggcgctgcggtgccatcacgcagcggtgcagaaacgccgaattctgcgcacaaagtgtcacagtcgataagtgggcaaattttatttctctatttcaacatacaattaaatgtaatctaaattaataaatatatttatcaaatttcaattaatttctctattggtttggcgcataactattatcattttttttgttaaaaataaaaaatctcaaaaaatattgcaaattagcttaaaatgtttgaaaatgatatttttcaataattaggtttaaaatcagaaaacccgagttttacaatttaaattcaaaccaggctcaagaattttttttctcggcacttttgaaaattggccaaaacttttttgtgccattttgtagaggacaaataaggctattaaaatgacaagaagcaaactaaacacaaaataaccctttggaaaaaccctgctataattatttactgtccgttattattttgaaaaatttggcattttgaaaccccagtccaagaaattgatcattcaccaatctccactgatcagatgaagaagcgtcggatgagctggaagaaagcagcgatagcaatagttcatcttcatccaccagtgatctgttggacacaaaaagttttgtcagtgccaacaatgaatcggatgcaacaacaacaaatgctggagcagcagcctcgggcaatgccaacaacaaaaagcatacggttggcacagtgccaacaacaacatcaccaccaaatgccataacaatg

SEQ ID NO: 118035 - DNA, 516 bp, Heterodera glycines
  unsure (1)..(516): unsure at all n locations
tttgaacggagaaatcaatttgcatggcacggccccctactagggagaatggnatgntgggaaagncgagaatataacttatataaaatatggattttcancattttccactgatgaaaagngagtgaatggngnagnagtttgattnaagtaaaaagnanagaaaatttgngttgttntgnannnaanggatagnttaaatattnnaataaanttantataatatttttttgntataaaataatttttaaatttaaaaatttaatttantttgnttaanattaataaaaattnaaanaatttnttagaggnaattgatgantnnaaaatgagtnntttgtntttngtttgnnttggnantgtgngaattttaatggngngnnaaatgattgtannatttttgttgnnatnntttggnatattttgnatantttntttttnaatngaatttnnntggagagttaatatataattttaattaggtacccaaaatttaccattttagcgctaatgatg

SEQ ID NO: 118036 - DNA, 377 bp, Heterodera glycines
accactcattgtgccattctttaggcccctctgcacgttcagcttgtccgtctgctagtctccagatcaggccaagggcgcgactctacctgtatgtacgcttggtttatcctctcgagcaaacaacgtttagtttgttgaactattttgaccagagagaaatgccccccacgggaaaaaaaacgctgcccggaaaaagacacatctaatttcaataaatggtcaaatttgtttaaatgcatttttagcgcctaaattttttcatattttttatttataatttaaaataaaggaaattgtagtaaatattcattgtaataatttttttgatacgaataaattatattttgtgattattcaatttaaattaaagaatg

SEQ ID NO: 118037 - DNA, 536 bp, Heterodera glycines
tttggttttaacagcagattatgtgctatagtaagaaggggcaaaactacaagaaaatttgaacaagcgcaagttgtcgatttaaaaaaatttgttttttttttaaaatacgtataagaccgagatttcaagacgacattttcaaatatggttttccggttccgacctccccaagaccgttatactggaaaacaggtcaattcgaatttccaaattgccgggccaggaactggtttctgggttggtaaaaaatttaaattctcaaatgcgagttaaaaacacaaaatttcataaattgtatcagtacgagaaaataatcgatctgctatgccataacactcaacaaaataatgctcttagaaatgaggaacaaaaaaagtgatcaaaaagcgaaaaaattatacgattctagtagtttgatacgcgttgaatgatctgcttttttagatttatggttgctacccacccttgggtcataagtaataacctatatttaaacgaggagactgccaaagcggcaatcgaagctgaagatg

SEQ ID NO: 118038 - DNA, 276 bp, Heterodera glycines
ggtaactcagcacctgttcaacaaagagctgcgtgtggcgcgcactaattcacactatttagtattaatgcgaaaccctgcgggggcgttgcagatacggaccatcgccacccacctcttcccgtcaaggactgcccattttattgaggcctaccgggacgcatgcgcgaaaaattttggctaccttctggtggacatgcacccagagagtccggaagagatccgccttcgaacaaatatatatgaacaaaaacaaatagtttacctaccaaaatg

SEQ ID NO: 118039 - DNA, 657 bp, Heterodera glycines
atctatttaccaacgacccacagtagaaaatgttatatcagaaagaaatgggataaaactgtcattttatcattaaaagaaagaatgattataaatttaaaataaaagaggcgcttggatccactcgcattgactcaagtgatacaatgggttcgtctcggtttaaaaccaaaaattaaagaaaaatagggctccaaatttcccagatcgcaatggattgatttcacccttatggcgaatggctttctggttatggcggcaactacgcatttcatgatgccggtgtcaatttggtgactggccaaatcatttgcatgctcaatggaaggcgtttgggtttgtccaatctttcataacattctgtatatattttttattcaaataaaatttcaaatttttttctaaaaattgccaaaatggtttttaaaagatcaattttaaaattttcaatgtttgatgtagtattttcttaaatttttaggaaatttaagaaaaggtttgaattttttaaaatttaactcgtattggcccctaacccttggccttagatgaagcttttttgctgtttttgataaagatttctttgcaaataagaataccttcccttccaatattttttaagagtccgaatccctcttcaagtcattgaaacagatg

SEQ ID NO: 118040 - DNA, 797 bp, Heterodera glycines
actgggaacgtgatccaaagaacaccaatttccgggacctatcctgtggtcgtaaacagtgacgatgagtgtgagcgcgattcacgatgcagctttaggcttaacgaatccttaaatcattttcgaattttcggacctggaatcggtttttgagttttgtaaaaatacaaattctcacataatttcgaccggaaaattagtaaaaaaataaaaaataaaaataatgcaagtcattttcatcagtggttggttttgaccgtaaatttttatatccgatggctaaaaatttgggggactataatcatgagaaaatttgactcgagaaggaaaaataaaacggtgctgacacaaaaaccaaatttggcacttttttcgtaattacttttccactacaatattataaaaattgatatattcactttgtattttataattcttttacaattattcaaatcatataaaaatagtcatctgaaaaagaaatcaattgaccgaaaaatttcaccttgatcatataattaaaatcattttgatgtgctcttccctttagaattattaatttaaattgggaatacaagaaaaatcaaatcaatatggcaaaaattttactatggtaatgcgtttgtaatttttaattatattataatttataattccaatattaaaaaaccaatcactttggaaaaaaattcattaaggcaattatgaataaatataatatttgcctctttacaattattattttcttttaaaaaaattaaattataaattttttttttccaataaagcccaaaatg

SEQ ID NO: 118041 - DNA, 63 bp, Heterodera glycines
atattaataatattaaattgccaatttcatttaattttttaattttttgggatttagataatg

SEQ ID NO: 118042 - DNA, 368 bp, Heterodera glycines
tctccgtctatggtgaacagttgcggttggctgccgtcgaccgtccggccgaattttttgtccattcacccgccatttacagtgcacgccaaatttcatgctcaattacaggcaataatttattaaaaatgaaagtatttcccattaatccttttgattattacgcatcaattaccatggcttccaatttctttgaaaaattcaaataaaaggaaataatttgcactgtcattaaatatcaattcaatcttgtaaatatgaagtcctctccctaagcaaaatgttaattctaaccacttttgttgtgtattaaaataatattttgtgccgtgttcggtggtgtagggccaagtggaaagcgcagaatg

SEQ ID NO: 118043 - DNA, 64 bp, Heterodera glycines
aaaaattattcgaatttctccattttgtttccataatttccgaaagttattcggtatcataatg

SEQ ID NO: 118044 - DNA, 198 bp, Heterodera glycines
ataattattttctatttttaggtcttcaaataactcttgaattggcttacatatttcgagcttcctctgaaatctgatcatgaaggggaatttttgattttacaaaacttctaaattaaaattatcgcgcttttgtaggcactgtaccgtgccaccggccaatcgtataagccggtgccaccaaaacagtcggcgatg

SEQ ID NO: 118045 - DNA, 394 bp, Heterodera glycines
attttttaatatgttttttatcaatgtttttaataataaacatgttataatttaataaatgatgctgaaatttcaatttttgtgaagtgactccttatatcaggtaaaacatttcttttttgtcaatttaaatatacttttcatcaatttctagcaaattcggaggaatttccgaatcccacacaatttattctctcctcccttggaacaaacaaaattgttctggggaaaagttcctcgtgttttagagatttattcttaaatttttaggtataaaaaatttctgacaaaaaattattggaaaacgggattctttgaatggcgcaatttattaaaataaaaaggacatttatcctatattttttaattttctcccccttggaacaacaaaatg

SEQ ID NO: 118046 - DNA, 306 bp, Heterodera glycines
cctgaaaaaatgttgccataaatttttaaacgagtggaaatccttttttgaatcgattaaattaattattcaattgaaaaaaataattttttagccgccatttcttgcaaattttaattttccaaataaataaaatattcataagaatatttcttattaaaatacagcaccaaacagcaaatggcgtaatacaaaataccaaatactcctcataatgcaaagtaaatgtttttttttgaatttaaaaaaaaattaaaattgggcgattaatgcacgcaattagaggacggacggacccgagtaatg

SEQ ID NO: 118047 - DNA, 510 bp, Heterodera glycines
agcgattttgagtttaaaaagctcaacgaagagcagtttaactgcttgatgctcctcgtggcgctcaaatcgccgaaggatgctgaattgcgaaagcgcatactgtcaaagttagcggccgatggtgacagagcaacttatgaaaatgttgtgaacgacttacaaatgtttctgtcgaccatttcggaagcgaaagcgatggagagaccaccgaactccaacattttggctgtaaagcgcaggcagcaaccgaagaaggacaattttggagaaaagggctataagcagcaaccatgttggcgttgtggcagagagcacactccgttgcactgtccgcatttgaagacaatatgtcgaaaatgctcgaaagttgggcatgtgcagagtatgtgcgccgcgcaccatgaatggctgacaaagcaaaaaggaccaaagctaggcaagaagatgaatgccctgcgaattggtggcctcatggtgaacatcctgaatggatcaacacgactgatg

SEQ ID NO: 118048 - DNA, 150 bp, Heterodera glycines
tgatcccgccaaattgccctcttcggcggtggcacaatgtgagcagcggggaaaaatggcacaaattatttgtggcacttttacagtatttttaaatgattttcatttgttcccacagtttacatttgctttttgctctgtgtcgagatg

SEQ ID NO: 118049 - DNA, 217 bp, Heterodera glycines
tttatttaactttattgttaaaattatttatttatctccccctagtttttgcattgttatttccaacttggcaataattttggaaattaacattttcattcattcattgatatgtatatatttttgtattcataatgtataatttttagccttataagttgttaaagaaattaagaaattaagaaattattattatttttattatttaaaataaatg

SEQ ID NO: 118050 - DNA, 559 bp, Heterodera glycines
attctgcaaatcagtaactacctttttaaacggccccttaagatggttcgtttttggtaacaatttgaccccctccccccctcctctcagcggtggtttttagtctctgctcggaggccaaagtgcgcaaaagtgggcgtcataatcattcactcattcatttgcccttccatttcgccctccacccaaaacagcgacaaaattcttcgccaaattcctcccaaaattacaaaatttatgccaaaaaatcaattaaaaatgccaaaaagaaaaatgccgaccgaattaaatgtcgaaattgtggcggcacttccctttgatattcgctgggccaatgtgcgaatttcttttgcatttgaccattttttgtacaaaaaacaagcccaatggatcagaaatgaattgatcagacaaaaaattgtggaagaaaatgttttttcaattaatttttaatttatttaaacaatttttttggatttagaggcaacggcttggacaggcaaaacgtcggattaaattaatgtcgttccgtctgtttgaaaaccgcttgcgcaacatg

SEQ ID NO: 118051 - DNA, 727 bp, Heterodera glycines
tttcagcgggtgttctcccaataaaagcagtgcaagtccgccttttatacttgggcgatttggacaaatttctcaggaaaacggacattttatgattttattttggtttttagggcatagaccaattgtttttaatgattcaactaatgttagcatatgggaaatgtttgttagggtaagtgcaaaaattgaggaggaaggatgaaaatggattgacaaatggagggataaactgacagtggacggattaacagcttaatgctcgtgctttgaatctcggatgaaaacgtaaacggcgcgagctaggcaaccattaacgatgacatatgctaatacataacaactgaagcattttaatttattgtatggcacggcagaataaaaagggaaagacacagcagcggagagagcgagcgaaagaataaatgtgctgctctggacgaccattagttcataactcagtttcatttggtggagagaaaatttgagaaaaagcaaaaaaaaaaaaagataaatgtaatcatttgtgtctttcagtggatagtgtgtaaaagtaaaagcatttctttttgtaagcgaccccatttccttatttttattcacaggctttgtcagggcttcatttttagaaataattgtttatttttatatcccaatttgatgaagttcgttttatctgataaaattcgttcgcagcgcattcgcggctttcttgttgacataaatg

SEQ ID NO: 118052 - DNA, 295 bp, Heterodera glycines
  unsure (1)..(295): unsure at all n locations
ggatttggattcttgtcgtccgactgcgttgtatcaaacactgaagccagccattcaagcaaagtgttcgcctatnttgtacaaactcgcagatggaccaaattntttggggttattcatactcttttattatattgagatggtcgtattgaagagaacctattgttattttagactttcccatcgtctcattttcgctgtgttatgtcgcgactccgtcctcctgtacagctcccaaaatgagtttccactcgcttacattgaaaatctccagtacgacaagttgacttcaatg

SEQ ID NO: 118053 - DNA, 87 bp, Heterodera glycines
atggccgcttattgacggacatcgaagcaattgtcaggattttcactgcccatatcaccgaagagtgcgaaatatgtcggggaaatg

SEQ ID NO: 118054 - DNA, 72 bp, Heterodera glycines
acttggttttttgtttattttagaatgaatttgtgcaaccaaaacttcttttaggaaaaaattgctcaaatg

SEQ ID NO: 118055 - DNA, 132 bp, Heterodera glycines
ttcttttcccttttttctccgttcacatttcactgttcttttttattcgttcaacaaatcacgccttacaccttcaaaaagccgtcctctttaagctgggcaggctttttcttctccttccctccccctatg

SEQ ID NO: 118056 - DNA, 349 bp, Heterodera glycines
tatttgttatttcttttctcattttattttttgcctttccttcttttttttgtttgtttcattatcatatcattaacattttatcaatttcatttatcatttcatatcttttgtttattttcaatttttacaacaattttcggttgtttttaacttttttttccttttcctccaaattgcgaaggtttaaaagtcactgtgacaaagaattcgattatttttgcaagaagaaaatggaaattaaaaacaatttattatttaattatttttctttccattattgagagaaaagtgacaaatataattatataattaatttcattttttatttttccgatcattttaaatg

SEQ ID NO: 118057 - DNA, 517 bp, Heterodera glycines
aacagaacgatcgttcgttggggcgccagcgacattttgacaattctttattttttcaactttcatttgtttgtgactgcttcttttaaattgttaatcataaaacggaatatcatttatgttcaaagtattacatggaaatcgagtttttctaaattaatattccagtagagaacacctagagcttttgaatgacactataaaatatttggttgaaattgagacaagttatgatttttattttctaccccttggcggtttttaattagtcggaaaaattttttcgaaaatatatttttattttttggatcaaaaaaatacaataatgttgtggagcggactcgaaatcgtttcactttttatttgattgatagatttttctgccttttttcccgacatgccaaaattgaaaattggcccactaatttatctcgaattttttatggtcaaaaaccaaagctgatataacaaaatcttagtttttctatacaatttagaccagtagaatccgaatatg

SEQ ID NO: 118058 - DNA, 70 bp, Heterodera glycines
ttttccctttctttgtgtgcactttccctgccgtcccttttcagtggtgaacaatgagagtacctccatg

SEQ ID NO: 118059 - DNA, 93 bp, Heterodera glycines
agacgattatctaattgaatttaaaaaccgaattttattaaaatatttattttagaatattcaaataacaattaaataattcttttagcgatg

SEQ ID NO: 118060 - DNA, 72 bp, Heterodera glycines
tgattgcaatttcgttttttcttcgtgaattcaccatgagacagaattgcacgttgacaatttttcgcaatg

SEQ ID NO: 118061 - DNA, 617 bp, Heterodera glycines
aaaacgagaagaaatgaacaaaggaaaaccccgagacgcaagggcacgggcgtccgagcactttcactggacggtggcggaattcgaggcattgtattagtgcaggttttgattcgggactttttaattaaaaattaaattttcgattaacaatttgcgacttaaataattttttcctgcaaatgaaaaattggggtttactttcttgacaaacagttaaaaaacacttccataaaaaccatattttttaaagaagcatccaaaataaacaccaatatcattcgataaacctaggtcttccattctcctgcaaaattccaaaaaattcgttctgcttcaaaaaagtcattgcccgaaaacctcaaaaaaaattttttatctaagcattttgtttataaattttccgaaacagagaatattctttaaaattttgcatcctaataaagttatcgaatgatataaagaatgtttaatttgagtgtttctttaaaaagttgtgatttacttcatttgcaaaattatttattggctggtcttttttatggtcatgtcaatgcaatagagcggcttaccaccatatttttcgctatgcttatcccttatcaaatttgcagatg

SEQ ID NO: 118062 - DNA, 92 bp, Heterodera glycines
aattttttttgatgaaaaaggatgtttttatttaatgttttatacgcttgtattttaaaaattatttcgctaattatttttagttttaaatg

SEQ ID NO: 118063 - DNA, 361 bp, Heterodera glycines
ggtggcaccaaattttcaaaattaattaaataataatattttaaaagattaaattataaattttatttaaaaatttaaaaataaattaattaaataaaattattattattagctctaaataaaaaacaatcctttttatcaattttaacggtactatatcataattttttttaaataggcatttaaaaaataagatttataaaattttcaaaatattttaatttatttttaccaaatttttttttatataaaaatgaataaataaattattatgcatttttcttttgccacaatattatattataatattttgtaaattgcattgtcaatttagttttttcagccttgcccccctccgatg

SEQ ID NO: 118064 - DNA, 99 bp, Heterodera glycines
cactccgcctgcaaatgccccattcgccactgaacagcatgacagcaaaccccagtctggaggctagcaggccaacgtacagcaacaaacgggtgaatg

SEQ ID NO: 118065 - DNA, 231 bp, Heterodera glycines
agtcttctccaatgattcattccctcataacaatttactactgtattccccattgttttcactactgtgtgtgttatgagcgctcggaatggactgcagattttcaaaatatctcaatgtctgacgaatgaagaagcattgagtattattatgaaaatctgagggccgttcggtgccaaaaattctgcatcaaattataatttcgggcaatgctttgcccctcacaaaatg

SEQ ID NO: 118066 - DNA, 364 bp, Heterodera glycines
tagtctgtaaaaaataaataaatcggcttggggattcactgtgtgtttgaattggcgcccttttgtatctttctctaaccactactctctcgtctatgtgtttgtggatggcgtggcctatcgattaagaagggacagcccgtctggaggtcgctgcgcgctaacacccctctcattatcaatcaataattacgtgttttttttcgcaggttcattttatgcttttaacaattataatcataaactatttcttaatcgtaatggccccgagaaaaatcaatgatcaattggtgtttgagaacaaaagtaatcattttttgggttttttataataattttaaatttttttaaatttaaagaaatg

SEQ ID NO: 118067 - DNA, 205 bp, Heterodera glycines
atgagcaggagttggcgcgcgtaagaaagaatgcagagacaagctaccgcatcgagaaggtttacacgaagagatagcgatcggacgggaccaccgagatgcttgtcaaatttataggatatctcaatcgtgagtggattgctgagtctcagcttgtataaaaagcatatgcatttttcattttgttcaaaaataaacaatcatg

SEQ ID NO: 118068 - DNA, 98 bp, Heterodera glycines
tgtttagtcactttcattaaacgatcttagtattaaaattgtttttcatttttttaataattttatttatacaataattcttttaaattttagatatg

SEQ ID NO: 118069 - DNA, 116 bp, Heterodera glycines
cagccaaaggcggcttcgtcatcatttgccactcaatcgggcgatcaaaaggacaaattatcaggcccacgagttggtgctgaaccgtgccaagggccgaggtggacaaatggatg

SEQ ID NO: 118070 - DNA, 996 bp, Heterodera glycines
  unsure (1)..(996): unsure at all n locations
ttattaaaatgccaacaattaagtaaataatgccagtcattaaaatggtacaagcgctgatccatgtttgatgattggtactctgaaaaatcggnctctaatgcactttatgagttccaatcgagttttatgagtccaatcgagttttatgagtccaatcagagtttttgagtccaatcaaatatttatgagtccaatgaccctttatgagtccaatcatttttttgtaagtccagtcagagtttatgagtccgatcaaaaatttgggcgccaccacaaagtgtccaagccacgaaatgtccaaaatttttcaaaatttataaaaacaaaatgagtctaatttaggatttttagggttttcggagtcgctgaatacgaatataccctttatattaccccttgcctaaccttaggcccatctgaataataaaaaactcaaattcgagacttggacatttcgtgggctggacattttgtgggtcagctaaaatttgtgaataaagtacattttacaattttattcaacttaggagattttttcattccacaataagatgaataaataaaaaagttcactttgtttgcgcatgcgctagaagacattgtgtttgttctttagataaaactgaagttggcgatctcacgttatgttaaaaaatgttttaaaaattggaactgacaagaaaataaagtcgtttgtttacactaagcgattaaaatacgaagagtttttgcttatttaaagcatgtttcttttgacaaaagttacatttaaataaaaatgctttttttcttcattttcctggtcgcaccaattaccgtaatctctcccaataattaccaatcacctgaaacgcttaatggaagttgcatcgcttattttgactaccgtaattcgaaaaaccaaaaaataacggtatacggtaattgaaatttaacgcataaatgaatttaataaaaaaatttagtggcgctgtaataaatgccgcagggatg

SEQ ID NO: 118071 - DNA, 141 bp, Heterodera glycines
  unsure (1)..(141): unsure at all n locations
caacctaaaaatcgacttttcaaaaaacctcttacgaattttaaagcccaaattaggtatgtagaaatttatcaaattaactgtttaaaaagatttntaatatattttcatatgttagtcgaaaaaacattttagcaaatg

SEQ ID NO: 118072 - DNA, 325 bp, Heterodera glycines
gtttgaggtactggcgtatcctgcccataatatctgggcatggaattaattttggaactgcgctgcctaacggcggtgcttaaagtgcgctaaaaatgatcaaatgattatcaatttttatttttcttaattccaaaatgaattcgaaacgcaaaaatttaatcataattcatgtggtaaaaaatgcatttaaaaataaaaaaattcttgaatttgcttctgaattttttaattttaaatagaaaattcctttttctgaaattcacaataacaatttggcgaagaaattcattgaaatttttataaagcattttgattaaaaatg

SEQ ID NO: 118073 - DNA, 270 bp, Heterodera glycines
  unsure (1)..(270): unsure at all n locations
gcttttcctttttgcagactgtacacatcctttttgtagtcaaagtcgaggcaatttttgcgttttttcnttcaatgtcaaaggatattgcgaaatatgtgcacagataaaatatgaaaaaatattnattctcnccttttccatttgcttttgcttaaactgttgcataaatatttttgtgtaaaaaaagaaaagtggccgattggctaaaagggaaaagtggaaactgttgttggattggaaaacgaacgttgggcgggtgaaggaatg

SEQ ID NO: 118074 - DNA, 72 bp, Heterodera glycines
actgaaattaaatatggtcaaattgaaattaatgaattaattacttattaattaactaattaccttagaatg

SEQ ID NO: 118075 - DNA, 150 bp, Heterodera glycines
tttggcattaaatttaattaacagttgcttccattcttttttaccctagcaacaaaagaatgtaatcatttcttggcatttgaaaaaaggttgttaaaagtgcacaatttctaataatattttgaacaaccaattcaaatataagcaatg

SEQ ID NO: 118076 - DNA, 272 bp, Heterodera glycines
ggtggggaccaagaaaaatgccgaaaaggggaggcatttgatttatccgagaatccttcgtttttaatggaatttttggacacgaatttatgattttttggagagattttggcaaattctagtgaagttggtggttccgcagtgcctacagatgccgttcgaatgcaataatttgttcgtttcccatttttagtagaaacaattcggacgaagcggtggacgacttgctgccgtcggtgtgcgaaagtccgtggttgttcgccgaccaaatg

SEQ ID NO: 118077 - DNA, 1003 bp, Heterodera glycines
ctattagccttacaaaaaacaaaccaaaattttagcttctaaaaaagttattaagaaaaaactcaaaaatttcgacttttttggaatttcatgttataacttttttggtaattgtctaatcgcgaagcaatagcttagaaatatcttctaaacatgttaagctttcgattgataccaagattgctggatttggttaacaacaaaaaaagttataacccaaaaacttgggctggcgccaaaacgtcggcgccaaaacgatacggaccctaatttgacgccctagtgataagtactcacattttttcaaaaaaaacaaactacaacagcaaaacggaggagagtcgaacaaacaaacaaaacaaaacacaacacatgatggtattcataaataggttgtacgtaatgggagtgcgcgaagcaaatgttttagattttatttccgccgggagggccaaaaatatgcgccaaatgggcgtggaactacaaagtacaaagaacaaaagacggagacggaatggactgaaatacatagaaaggaatggtaatgggaacatttgtgattttattacgtaattaataggggttgaattaatggatataaaatcgtaaaatatggccataaaatatggacaacaaatcgcgaaatatggacataaaattgtgaaaatctcaaatatggacataaaatggaaaaaatatggacatcaatttttctaatttgtgggtataatttctccaaacttcttcaaactggctaaattcaaaataaaaaactttcaaaaatgcctaaatatttatttatttatttattcaagtaataaaagtccaaaagaagggacaaaggccgcttatactttcggaagagaatgatagtccgggaaacatgatggtgtcagatctccaacttgaaattaatcttgtaaaatactttttacttttttcttgaaggtgggcaatgatttgatattgaaatatctgaatttttgcagatttcttgtagatg

SEQ ID NO: 118078 - DNA, 1003 bp, Heterodera glycines
gccatttcccttaattttcccgcggctcttccaaatgaaagccggcgccgaatgataaaagccgaagtgtcgctctgttatttgtgctcatcgacaaatgccgccgacttcttggccaaatgcctttgtaagcaccgcaaacgaaagaaatgaacggcgaattgcgccaacccaaagcagcagcaccagcagcagaaacagaggcaggcacagaagggttgcatcgtcaccagcagcaccgatcatttcgtccggcgcttctccatcgtcttcggcccctctctttggccatcgtcgtcctcccccgtcgccttggccatcgtccccatcgtcgtccccccgatttccccccttttctcgggtctctgctcataatcgcctcctccccctcccgcttctccttctgctaattcttccgatggccttctcctcccttctcattcattctgcaaatgccctccaccatcggcacgaacacccgcaaaaatgttcaattgagggcgaaatttgcacaacaattaatgctcatgtgtgccgaaatgggacgtaagtgaaaaatgggggaatttgttggagaaagggacagaggggagagaaatgcgaccccaattaggcgaaatgcaaagacagacagacagaaacaatgattaatgacggatggcagagactggagactcccatgtctttgagaagatttgaaatatgtagggtaggtatttggtttaatccaaccaaaacaaaaccgagagccaaaagcggcctaactgagaattgataaacccaattaaaacccggtcattaactgccctaatttgagactaaaaacacagcatcgattggcttattcattagtcattgtctgcctaacggctggcaaatcaaaaaccgggattagaaaatggacgcctttgtccctacatggattcccagccaaatctcgatttaaccaatttcaacaaaaacttcgttcagctgtgtgtccgcttgcactcttcgcggcatg

SEQ ID NO: 118079 - DNA, 248 bp, Heterodera glycines
accgactccaaccccatgtccaaaagttggccaaatgagtcaatggtcagacagtaagcaagcaagcctgagcagagagaagcacaaaattaaaggacacaacggtaaaaaaggaactaataaaaatgttagcatttatttttgattcaatcccaaccaaaagggccgtttttgtgagaccaatgccatcagaaccaatcggagggcttttgtaaaactcggttaagttttacagaggattttaaatg

SEQ ID NO: 118080 - DNA, 789 bp, Heterodera glycines
  unsure (1)..(789): unsure at all n locations
accgagttanaaggattggatttccatctaaggcttaacatttggcccatttctttatcaaacggaggaatagataaaataaaataacagttcttaggtttgggaccatttagttctgcgccgcaaatgtaattttgactgggcgccgcaactgtcggcgccgcaaatgtcgctctggctgggcgccgcaaatgtcgctctggctgggcgccgcaaatgtcgctctggctgggcgccgcaaatgtcgctctggctgggcgccgcaaatgtcgctctggctgggcgccgcaaatgtcgctctggctgggcgccgcaaatgtcgctctggctgggcgccgcaaatgtcgctctggctgggcgccgcaaatgtcgctctggctgggcgccgcaaatgtcgctctggctgggcgccgcaaatgtcgctctggctgggcgccgcaaatgtcgcatcacctcggcgacgacgttttggggtgcaccgccctgagagaccaaagcaaagggaaaggtttttggttttccttgacaatgaacatatgtaatattggtcatctgaataaaaaaaatgattgaattgaatggagatttaatttttcaatttacatatttttttaggaaattcatattttaacttttgacttttatgaagttgaccaatagaaaggattattcatttgaaaaataatttaaaaatttcaatttttggttttgatttttttttgaaaaattcccaattactcctcccggtcccgtgcaatactaatccaaaaaaaaaacagcgaaaaaatg

SEQ ID NO: 118081 - DNA, 375 bp, Heterodera glycines
aacaattacatttttagaacatatttttatgtaaatcttgtaaattctcgaaaaattttctgcaaaatctaaaagcaaatgcaaataaattttgaatatagtttaatgatcaatataagatcaaaatttcaatgttgataagaccaataaatatgcctcggtagctcaatggtcggatgcccacggattgggatttagggtgggttcgattcccacccgagtcctaacatattatcattatttatttgtaggaaaaattactaaattctcaagacttttccgtcagccttttaaattgaatttttgaccttttttaagattgtatcagctcatagagcaattctctccagtgcatccgatgtttttgaagcaatg

SEQ ID NO: 118082 - DNA, 364 bp, Heterodera glycines
aacttaataatgcatcattctgtgaatgccaatgtcacataaatattaaaagtacttaaaaaacattttttttcaaaaaaatttgaatgacttggaaaatttgcaaaaaataattttaattttacttaaaaaaatgcatttaatttttctgagaattctttctttttgaaataaaattaatttggtccattaggcagaatgaacccaatttccgttttttgtgattaagctttaagcgcgtcattatgcttttcctatttaagggcatgacactgttgcgcatggtctaatgtggtatcaacgaacaaaaaatttctcactttaaaagtattttttttaataaaaaaggtttctgtggtccatg

SEQ ID NO: 118083 - DNA, 101 bp, Heterodera glycines
tgtgaagtgtttttctgggcaaaatatttatgaaataaaaaaaattcgaatttctttagacctcagtgcccgttgacaaattcaatcggaccgatgtgatg

SEQ ID NO: 118084 - DNA, 266 bp, Heterodera glycines
gctcttttgttcttgtacagtgacctgccaattgcctgatttttgcgttgattctatgcctttgtgtgaattgcgatccaattaaaaatattttattgtttgtcaatgaattttgcgataaattgctgcaaaaacaaaaaatatgtttttttaaacgtaaattcaaacattgatcgggtaaatagataaagaactttgctcccgtattggaatcagtttaaaaggtagtctcattatcatttgtttatttcgttagctttaaaatg

SEQ ID NO: 118085 - DNA, 470 bp, Heterodera glycines
tgtgaacagtgtcccagagttggttcagatacccaaactcatccctaacactgatgattacattctcaatggatttgtcaagactgcttttgaaatgtgggaaaagctattataaagatgtaatttttagaatagcaaactttttttgcgtgttggaagaatttgattcgcttggactaagaaatatcgttgactgcgaattaatacttttgttttttgtaggtgacatatgagatggatttatttaatattttgacaatgcttaaattagaattaattacaaaataataaaaaatgaatgagagcaaaatgtggtcgaacatcagaatctgcattgaattaaagccggatggatttttcaaaatttaaaatagtgctagttaaaaattttaaattgttgaatctgtggcgttacttttgtttgagttaaacattcattttttgttttaagaaaagttataaaatatatg

SEQ ID NO: 118086 - DNA, 478 bp, Heterodera glycines
aagtcattcccaaaaaattaaataattttttgttttgctaaaaacctccccaaatgtgggataatatggaaaaaaaataaagaatcatattagggatggttttttaagttttttaactacaaagtattacgtttttcttacattaagagaaattacagcttttggaaattgactaaacataataagtcaaaaacaaataaatttttggatttaaacccataaattggttctaatttgtaagtgatgcaattaataaaaaaaaatccgccaattaacggtgccggaaaatctttgataaaaaacatagataatgatagcaaaaattggcaaattcatatgaatatgattatcatcataatattcccctttgacaaatgagtagggtaaatttatcgctttgtcatatacataattaatcagttaattacccgtgtgaaatgagtatgtcttcagccaatatgttgtgctcagagcaatg

SEQ ID NO: 118087 - DNA, 1003 bp, Heterodera glycines
ttaggcataagtcgcgacaaaatatacaaatggaaaaaagaaatgaatttaaataaaaagaaaattatgaaaaagagtttttatgaaacgaaaaaaaaagaatttattgaaagatttgatgaatttaaaagtttataaggataaagcaaacagaaagaatttgtgaaggaattgggcatttctgaattgacatttcgaaaatggaaaaaggaattgatggcaaattagcataaaagtaagagaattttagttttacttaaatttttatttccaagcatataattcttattccaatgaggataaattgcaaaggatgaagcaatacttgaaaatgaaagaagaaaatccaaaaattagtgacgaaacaattactaagaaattgggaattggaagaacatcactgattagatgacaaaaaattttaaattaatatttactctgtgatgttttgatcaaaagagcattgttattgttatggccttgaataaaactcatttcttaaaaaaaaactcattcgaaaaattatagagactaaatttcatttatttcttatttcatttgaaaaacataacacatatttaataaatcgcttttaataaatgttaaacccaccaaattaatataaaaaagggagtaaaaaattgattcagtaaaatgtaaatattctgaatgatttctttatatatatgattaccattttataaaaacatttttttattcaaaaatatttacgaatcaaaaatgtagagctttaatattatggaatttaataattatattaaccaaaattatagagaaaatggacaacaaaaaagaaaaataattcaaaaatttgaagcaattaaagaaaagtcgaaacaaaaaagaaaatttcaatggaaaaacagaggtaaaattgagagaaaaattggacaattattaggcacaaatcgcgacaaaatacaaaaatggaaaaaagaaatgaatttaaataaaagaaaaattatgaaaaagagtttttatg

SEQ ID NO: 118088 - DNA, 168 bp, Heterodera glycines
ggtatattttttttttgtttattgttgatttatgggtttttgaatgacaaaaaatactttttcgagggtttagtaggggtcaataaagaaatatttattggtttcgtttccattttagttcaagatgatcgacaaattccatatcgtgagcgttttggtgaaaaaatg

SEQ ID NO: 118089 - DNA, 156 bp, Heterodera glycines
ttttttcactttgtttttttacattccttcccacacaaatgaataaaaacatttcatttaaatgcatttaaaataatttttaatttattttatttaaaattaatttaaaatgattttaaaaaagctttaccacaaaatattttctcaacaaaaatg

SEQ ID NO: 118090 - DNA, 811 bp, Heterodera glycines
ggcaactcacaatcagttgattgctgattgggggggctttgcagttcgacgacgcgtttatgaacacgcactatgggtcaactccactgtgcagagaaaagcctagtactatttcgtcgttttctttttctttgtaatttctctctgtttggcgtactatctctttattttaattatgtaaaaaacaacatttacttctctccatataactttttttctaatgcatacagttgcaccaaattttgcataccgatagagaaacaaattctgcatttttcaatcgcttttttaaacaaaacaatcgcttagttcaatagttatagatagggatgccaaaaatatgcatataaaatcgtaaaatatgcgcataaaatatggaccaaaaatcgcaaaatatgcacataaaaagtgaaaaatatgcacataaatttttccaattgagggtataatttctcaaaatttcttcaaattttttaaacataaagtaaaatcttcaaaaatggctaaatgtggtattaaaaatcattttaggagaaaaaaacacgatacagcttaaaatttactcattttagcgaaaaatcaacctgaaaagcaaaattttgcttatttttgacataaattaaccatttttgagaaaatttatttattcaatatttttcgtgaaaattttgctaaaaaattattttttggaaaattttccggtttttgaggtcaaaaaggccaatttgtctgttgggggccgatctattagaggttttttggaaaaacgccaaaatatgcacataaaatatgcacgaaatgccaaaatatg

SEQ ID NO: 118091 - DNA, 391 bp, Heterodera glycines
gccaatcaagccgtacatggcggccttccttctctagttcaacgatcagatcgaagacattttcgtcccaaaaatggtcagacatgaaaatacctgaaattttccattcaaaatgagcataaatggttttgtttgttctattattgacaaagttaaaagctaaaaaaattcataaaaaatggtaaaaaaaaatgtcaattttttatgtttgtatttgttcttttggcgttctgtatttattattatgcacaaaaaacatttttagcactaacaaacggaactcaaatgatgtatataaggaggcgttttcacacacttctgcctattcctttcttctttcatcagcaacacatcgacgtgcccaacaaccgcaacaacagcgacaacaatg

SEQ ID NO: 118092 - DNA, 62 bp, Heterodera glycines
attacaaggaatacttatgtggaaattgtggtatagagcagaatccgggaaagccaaaaatg

SEQ ID NO: 118093 - DNA, 847 bp, Heterodera glycines
ggattatataataaattaattattaaataaagaatgaaattaaattgacaaaatattaaccagttgcattacattaaaacaattggcccggatagaaccacagttgctataattgaaagcactcggacaagaattaaaatgagataaaaaaataatataaagctgaaaaaaatatttattaaaatatgcaattaaaaaataaatgataaataatatcaaaaaatattgtgtaaaggcgctaaagcgctaaaaattaaaagttaaaaatccaaagggagcaaaataaaatttgtaaatctaaacagtctgaaaagtgataaaattggtaaaccaaaaagacacaaaagtgccaaaaaattgtgtcggtaattctgaaggcttgaaaagatcaacagaacaaatttggtatcaaaaatttgctaaactggtcattctcaatcaccaaaaaagaggtacgaaagtacaaaattggtgaccggtcgtgttcattggtatttcgactccatttgctgaaaagctacggtggggagataagttatctaagcgataattaatgatctatttttttaattttgaaaagatttgaaaaaaattaaaaaataaaggaaaaagataatattgtaaattaaaataattagcgcttaaaattaaaaagaaaaccgggttttatgctacaaaatttgttattcctcgacatgagattaatatttaaaaaatctatcaaaaaattaaatatttaattgtataatcagtctctcaaaataaaaatgatgttgacaatccgatacatcaaatataaacaaaataaattctaacaaattaaatattattataaattttaaggatg

SEQ ID NO: 118094 - DNA, 135 bp, Heterodera glycines
actttgtaaagaatcaacgagatagaatgggtaacctaggtattcgattccggctgcagattttacccgcttcaagaacctggcagcatcagtatttgtgcaggagtttaatatctgcgagaaaaagccataatg

SEQ ID NO: 118095 - DNA, 229 bp, Heterodera glycines
cgaaaaaagtttatacaattgaattttttatgtgttttgctacctaaaaagcgttaataaattttttttactattttcgtgcctattttaggatttttctgcctttttaagtgcctatttcgcgattttttgtgcctaaaaatcacatccctatacataatggattatggcttttttgcaaagaaatttaaataaaaattattttactttaatttaagctattattatg

SEQ ID NO: 118096 - DNA, 191 bp, Heterodera glycines
gcagggggcacctcccactgcacattaaggaacagcaacgagttgtggtcgccgaggaccaacaagcacatcgatttgtgctaacggcaaacaaagttggtgccgttagcgggggtcctgccacaaacaaggaccagcaaccgggagcacctcccgctacacctcggactaaccagagcgaaacgaaaatg

SEQ ID NO: 118097 - DNA, 705 bp, Heterodera glycines
  unsure (1)..(705): unsure at all n locations
tattttaaatgtgtaaaaaatgcaatggtctaattaaaaacatagctaattcatncgagttaggaatttaagttttttacgaaatcgtccactaattaaccatgtttattttgttgatcnnatacaanttctnaatatcaatgtcaatgtatatttgtgtaataattaaaggctcagtctgttaagacttaattnttatacgaacagaaacttgaacacgtctaaccctacgtntaaacaattgtaagaataaaattgttgtcctgttacctccgaaaatatttgtggtcttcgaattgcttataatatttcagtctaaggttagattgtccaacaatttatcgtccttctacgtgattccgaagtcatttttctatttgatttaagaaaattggattttaaatgttgccttttgacgctgccataaaatttgagtcatgtgtaaattttacataaaattattccactaaatttgaagcaaatttaaagaaataatttaatatgggaccaaaatagaaatgaatctttctaaatgcataaaattaatgagttaatcattggtttttaaagctaaacaaacgtgaaaaatctttcaaaactttttttctccaaattttggctttaaaaggcatttgcttacaattatttaatttgcattctttcatttgtttcccaccacaaattcccatccattatcgagccatg

SEQ ID NO: 118098 - DNA, 84 bp, Heterodera glycines
tttttggcacttttctccccctcaggcatttcaagtggtgccaatgtggtggctgcgcttcgcgttgcgcaaaagccggaaatg

SEQ ID NO: 118099 - DNA, 429 bp, Heterodera glycines
gaaaaggaaaaattcgaaccaaggaggggggaaagaggaggaaaaggatgaaaataacatcggggaaggaggagagacggaggagaaagagagaaaaaggaaaaattcgaagcaaggagggggagaaagaagaggaaaaggatgaaaatatcatcggggaaggaggagagacggaagagaaagagagaaaaaggaaaaattcgaagcaaggagggggagaaagaagaggaaaaggatgaaaatagcagtggggaaggaggagagacggaagagaaagagaggaaaaggaaaaattcgacggaagaaggagggggagaaagaggaggaaaaggatgaaaatagcagtggggaaggaggagagacggaagagaaagagaggaaaaggaaaaattcgaagcaaggagggggagaaagaggaggaaaaggatg

SEQ ID NO: 118100 - DNA, 82 bp, Heterodera glycines
ctactgtcattggcaatatttcctgacattggcaagactattctcattgaagttttggatgttggtgtaatttgtggagatg

SEQ ID NO: 118101 - DNA, 524 bp, Heterodera glycines
  unsure (1)..(524): unsure at all n locations
cacatgcacgngcacagtttgaacgccgtttggggcgacgacgccgcgggggccggcggcgccctcgcgcgtgaagtaaaatatttaaaaaaacaactataattaattattatttttataattatcattaataatatttttaaggttctccgtgtggatgccaccaaaccgtacataataggcggagcacgcgcagcggtgctcaaagttgctgagagccaacaaaagcaggtgcaaacaacgctttggctagttaatcgaattacgatttttattgccattaattcctctcatattttaatggaaagtttcgattggaccaatgttttctcacaattattcgaattttgcaacggaggactcattcctcttatataaatacaagatgtgaaaatgccgttgtgaagccgcgatttaaattacagtttaatatagtgattaaaattacttagccctccaactttgggccatctccaacatcgaacgtccaatatttcaacaatgtcacggcattccaacaaatg

SEQ ID NO: 118102 - DNA, 52 bp, Heterodera glycines
aaagcgctcatttatttttattttgttcataagttttaataaattcataatg

SEQ ID NO: 118103 - DNA, 705 bp, Heterodera glycines
atacaatcgggaaaatgtaggacaatatccagagcagaagcaatcaattgtaaaaggaatttgtgcctcatttgtcaggtacattgtttaattttgttcgtagacaggaaagaaacaaaaaatttcgaaaatttcaaggattaattagaaaagaattcaatttttaaacaaaagtaacataaaaacttttttatctaattatttgcaaaatgcaaaggaatattttgaattcaactaaatcattggttcgaaaaaatgtaaaaaataataaaatcattttgtcgttttgcagcttattagtgatgtgagcgaaaggattttacacgggaattgggagccgaccgagaccggcaaatcaccggggacccaaaaaattctgagtcgggaaccctggagcatcacaactgattttcactgcctccatacatttttcttgaatttaaatcaaacagaaaacagacaaacatttgccctattttataatcagtgccggagtttgcctatgctttcatagaattttaaatttacataaaactagtccataagcataaatttattgatgaatattcaaaattacccctgcgggagggttaaaagtgcactcatttatggctgggccaaggcaaaaatgaagacaaaaatggcaccaatggtgtgccggcggtgccgtcttttgccgcgcgcttttgctccctccggcgaatg

SEQ ID NO: 118104 - DNA, 1003 bp, Heterodera glycines
gtccaaaaaacgtctcgggtcgggtcgtggggctcggagtcggggctgaaccctagtatgtaccgtcgtcataaacgggcggcaacaaatgtctgagcggactgaacgaactgccgtagtgggggaagcgcagattgttgcaccaaccgttcggagttctgttggcacaaattgttaaagtgttatttggagtcaaattggcaaatttagggaaaattttttataggcttacaactagggctggtcgggaccgggaattttgacaaaaaccgggaccgggactgaccagaaaagtcgggatcgggaccgggaccaagtttttcgaccgggaccgagaccgggaccgcgagaaaagccgggaccgggaccaaccgggaattttcccaagagaaaattttttgaaaaaattttgaaaatttgagtgcactttgttacgaaaatttcctaaattcaaaaatgtgcccagaagattttaaaattttcttttgggggaggaattcgaagaattttctattattctctgtttcatttcgggggggggggggatctggaatcttggaattttctgggtcccaaaattctggattttttaataaattaaaatttcttaaattttttgcttttaatcgctgtttttgtggcgctgttttccaaaaaaaacttttgggaacattggtgagggggcggcagggtccggcggcgcttatcggcaccgccggaaaatttttgaaattttgagtgaaatatgttaagagaatttgtcaaaaaatgaccaatatttggcacttcaaataagtaaatcagatgttttcccttttttgcataagggctaacagatctgcaaatttctgcaaaatttcaatcattctgacaactacgaactgaataagaaaagccgctttttcaaacttagggaattcctggtctatattttttgacagccctagtacctacctattctaattaatattttaattcaactttgacttttcattcaagaatg

SEQ ID NO: 118105 - DNA, 366 bp, Heterodera glycines
aaaaacatgttttttcagttgttgttaagctagttttcgagttcatagcaactattttctagttttttattttagcacctaaatctaaaatatttttgaaattatttagttcaatactgattttgacctatttagcaactgtaaatataagccctagtcccagcttttgttcgcaaatacaaaaaagaaaaacgaacaaaaacaatgcattcttttcaactataaaaaaatattcaatttgttttcttgtgattttgttttaattaactcttttttttcctttttcatatatatttttgaacaaaaaaggcccactgaacttcaaaagtgccgaaaattgccttaataatttggcacaacaaaatg

SEQ ID NO: 118106 - DNA, 560 bp, Heterodera glycines
taattgaaattcttcaaaaaatagacgattttgaaaactattaaaaattgaaagaattaaaagacaattttgagcaaaagaaaggcctcatcaataaagtgcccattcaaaaggagatggttgaattgttgagtcaaatcattaaagtgtacagctgctcaagttcttcaccgatgtgccactataaatgggacttggacttatttgtgaaaaatgtgccgaaatttggccaaattttatccgaaattttgcacaatgcatcgaaatcagtaaaatatgacggaacagctcaattaatggcactgcccgtctcattagtggaacatttgctggttcgactgtacactgtggttcaaatgtgcctaattattaatttatttattcaaatacattattttatttatctgtataattagttaaatgtttaaaaaatttgcccaattaatcaaaggttaaattcatcaatttgtcaaattggcgaaaacgtttactttgtgattacggtagaaaatatcgtatcacaacttcctctggtattttctccacgccgaaagacaatg

SEQ ID NO: 118107 - DNA, 226 bp, Heterodera glycines
cttattcttctcataataattcacacatttttaacattccttttgtttgctactaattaagaaaatttaattaaatgaataaaattctactatattaaatttgctttttgttagataatgaaacccttgcagtcgccgttgtttcatcgcctgttaatttatattcaaagtgcatcgaataacttcatccttttttatattaattttccagacagtgcattaaatg

SEQ ID NO: 118108 - DNA, 199 bp, Heterodera glycines
gatcatcttagaattttatttacatgtttagcaatgcgatggcatgcgacgcaatcgcagcgcataatatgggctttgataacacacgggtcaaactgatagtcgatacaatgtattaccataattaagatttattgtcttaaattttaataataaagagattaattaaggattcacaattggcacattatatgagatg

SEQ ID NO: 118109 - DNA, 75 bp, Heterodera glycines
tgtaaagtgaattttcgttttttttcacatttcttaaatttttaggatgatgttgttgtccgacttgaaaaaatg

SEQ ID NO: 118110 - DNA, 79 bp, Heterodera glycines
cctaaaaaagtgcacactgaattgaatcgaattccatggcattactgtgcttaatttcctgtccaaaagcagcaaaatg

SEQ ID NO: 118111 - DNA, 110 bp, Heterodera glycines; identical to SEQ ID NO: 98226

SEQ ID NO: 118112 - DNA, 278 bp, Heterodera glycines
tcatgatgccctggtttagattttagttttattttgacgatttgtatcgcattttttagaagttttctgtgacatcactcgaccaagtcacaacaatcaccaaacatgttctacggttgacaggaaaaatgaataggcatgtgttgttttttttctgagcattgcttttttctacacaaaatgtttggtcgcttaaaatatggcttttcattccctattcctttctctctctaaactttaatttctttcttattaaaaatcttctaaaaaacaaaatg

SEQ ID NO: 118113 - DNA, 342 bp, Heterodera glycines
attttcgtaaaaaaattctttaggatgcgagggttctcagataaacttaaaaagcctgaaagcctcattttgaaagatttagcctcattgacccatcaaaaaaccacaaaatgaggctaaagcctcagatctggctaccctgttattattagagatcggaccggtcggtttttttcggtatttttcgattttcggtttcggtttttaaccgaaaaaaaccgaccgagaaatttttgagtttttcggttttttttcggtttttaaccgaaaccgttcgaccgaccctcttgtccggtctctagttattattgttgtcctaattaaaaataacatgtaaaaatg

SEQ ID NO: 118114 - DNA, 95 bp, Heterodera glycines
attatcatccaaatttcctctgctttacaaggttgtacgagccaattgtgctcccacttcgtccactggaacaaaacacctgcgacgtgcttatg

SEQ ID NO: 118115 - DNA, 154 bp, Heterodera glycines
gggaagagagtaggaggatcaagaagaggagggaagagaggaagtgaaaataaaagaagagggggaaaagaagaaaagaaaagagataaaaagtgaagagaatggatggagagggggagggaagaaaagagaagtgacgggaagagaggggatg

SEQ ID NO: 118116 - DNA, 1003 bp, Heterodera glycines
attattgtgtttaaagatgaaaagaaaaaaatatatttacataaatttaaaacttttgttaaaaattcattttttaaaggaattttgaagtgaaagagaaaacattttttacatttaatatggttttccaaaattttcaattaaggtcgtattttacaaaaacaaacaacaaaaattcttgagcggtgtctttttgagattttgtgaaaatgccttaaaatgaatatacaatatggaaatagtgacaaaaatctaaaacatggaaaggaaaaaaaattcatgaataaagctcaaaatattattttgtgtttaggtcaaagtgtttaaaaaaataggagtcaaaataaatccgatgcctaatcatagaattcattgttttgcctaagattttggttagcgacatttactgctcgccaagcttttctaaccgaagtactatttttttagcctaatatttctcatcattaaaattcattaactttttttggatataaggtggtcaatgaggaagatttgatatttagcgcattttggaaagccatatttgataggacaaaggtgtaccgaagtaaaaaaaaagattgaaaaaaaaacttggaaactaaatccatataaactatttctcagataagcattaaaaattatagaatatcctaatgatctctacggtacagtattgccttaactccattgtggaacaacaatcttgtttaagtggaatatagataattaaaaaaaacggcaaaatgccaaaaaaggtatttaatgcatgaaaatcccgaaaaaggcaaaaaaaaaagaagacataataaaagtcaacgtagaagcctcaaatcaagtggaaaatgcgttatttatgctcaatatatcgaaactagtgcgcagaaaaaaaaaggcaattgcctcaaaatgcggtctctattcattacttaagagaataagctgaatgatcggttaaacgtggaaagcggggttgataagattataaaagaaagaacggatg

SEQ ID NO: 118117 - DNA, 147 bp, Heterodera glycines
aacaaatcgcacggctgatgataagaacgaattggcctacccaaaactcaaagtaatatttttaacacattttcactacatatatgcataattatttttaagcttcgacaaagagaatattttcggagaactgtaattcccaaaatg

SEQ ID NO: 118118 - DNA, 303 bp, Heterodera glycines
gggaaaaattaaaaaaaaatttttttttaattttttggagtggagaaaaatgaaaattggcgcgattccattaaataataattatttaaatagtgatgccatgcaggtatggcacggaattccgacttccaaaaatttttggctttggaattctgactcccgaattttttggggcctcggaatgccatccctgatgccaagtccttgaattcaatgccgtccttgggaattacttgtggaattttaaaaaaatccttttttaacatgggtgtacttgagaagaaatgttccttcccaataatg

SEQ ID NO: 118119 - DNA, 1003 bp, Heterodera glycines
aatatttgaattgttctgattacttctttgttaccaaacgcggctcataccttattcgaaatcctttattttaaatttttttgggttgattctttaaatttattagaaataaatgaattcttaccaaaaattctaatgcaattgtcgtattcatttttagtttcattaaatttttcttaaatatggagatgtgcaaaaataaattgattaatatattcattttaaatttgagtattattatatcattttttagatttttgtattgttatagcctttattttcattaattttttaaatagttatgtgtccaaatttttgggttgcttttatttattttttatttaaaacattgaattttaatatattaaaccactttgttttattcaaatgctgctacttctttcatatacaagtccaaaacaccacattcaatctagttttattgttgcggaactaatttaggctatttaagacaattataaaaaattatcattcaggtcacaaaaattattgtatatttatgtttatttatctattttgatttgtttactaatatagtcggagtttaataaatggtcagcctattgctagcatggctaacatatttatttatcatatgtgatatttgttttaatatgtacatcctttacttttatatatttttgcgtttcttatagtcttttttaattatggtttaaaattagctctttatttttagaatataatttaatggctattaacaaatataatataaattttaaacaaatttaaataatttataaattttaaaaagatgttataaattgcaatttttgtatatttataataaatgataaggaatttctttttaaaatatgtttacctttatttactaatatctgataaataatcatatcaccgagatggttatgcttaatttacttattttttttcatcgagttttcatttataaaaaaatttaatttcggtttatataataattttggaaaatacgatacgtatg

SEQ ID NO: 118120 - DNA, 144 bp, Heterodera glycines
  unsure (1)..(144): unsure at all n locations
aaaatatcagtaattattttatgattataagtttttttttcaaaaaattcatctnttattagagtattttatgtaattcaaaatatgataattttaatttaatttttaaattggctaatttttcatttattattgcctaaaatg

SEQ ID NO: 118121 - DNA, 158 bp, Heterodera glycines
  unsure (1)..(158): unsure at all n locations
tgtttgctcggattngatggaattattgccttatttgttatattcgtgtccttaatttgggtattcgtacattgccaatatcatttacttttgggttgtactcttctgaagtgttagtcaattttgctttttgttgtgagtctgctaattcggaaatg

SEQ ID NO: 118122 - DNA, 143 bp, Heterodera glycines
tgctgtttgcatatggtaacaaagcaaatattaaatacgctctcaagtaccctttcaaagggccaggacattgttatgtcgagtgcaaagaagagtccggcaataaaattggaattgatgagccggctcaatatgccaagatg

SEQ ID NO: 118123 - DNA, 92 bp, Heterodera glycines
gtaacaattttggtaaaaataaataattttatccttacaaaagtgggttcttccgtactttcacggaattaccgataattttgggcgaaatg

SEQ ID NO: 118124 - DNA, 147 bp, Heterodera glycines
atccatttttacagtttcatcgaccaaaatgtcatcgcttttcttcactgttttcgtccacttttcgccgcctgtcaaatcgatttgcgcatcgaaacgacaagtgatcgcatttcggagtttattctgtgcaacatttggccaatg

SEQ ID NO: 118125 - DNA, 165 bp, Heterodera glycines
ggttaaactaccgtggcctatcctactgaatagttcaaaattgattcgaactttttagacaaattcctcacttcatttgtagggacatcgacagtgaattcgtcgccctgcaaaatgccgagcagcggacggaccaatgggtcgaattttcatctgccaaaaatg

SEQ ID NO: 118126 - DNA, 380 bp, Heterodera glycines
gtaaattttcaccaaaatttacttatggcataaacatttattttggataactccgctgtgtgccaaaaattgtaaaatctcttcaaagttttgggaaaaaagccatctcaaatttatatcgtccaatgttggaaaagcgatgaacggcagattgttggaatcattaatagaataccttgaaactttaaccatttgctaaaatgaatttaaaaaattatcatttataaaataaaattacatgaaaaaaaagtgaaaaaattttcaaaaaggacaactttttaactagcgccgacattactatgtcctagaaaaaactgtttgttgccattttagaagaaaagaacttagcagaagcacgtgccaagtttgaaaaaatcatg

SEQ ID NO: 118127 - DNA, 388 bp, Heterodera glycines
tctaataatgactaaacttttttatttttaaaattacccacacctttttttgttttcaccgattttaaaatattgactccttttactcgtttttcaatggtttatcaatttcctgattgttgaggctgcgggcaccaagggcaccggaaggcagagtgcccgaatgcgccctgcgttagctgcaaaatggtttaagcaaatttaaaaaaatagtaaaatttttcatcaactgcttgagaattttgttctgaggagagctgctgagactgccgttagtgaccggagggtccagactgcagtgcgggaacagttttgtgttttttgtatttagtttttttaacatttagcttttagtttctagtgcaaaatattaatttttattagaatg

SEQ ID NO: 118128 - DNA, 172 bp, Heterodera glycines
caattaatcatttcttctgcggctgatcaccgtttttgatgttttgtccgtcactcattgtcagaacacgaacaaaaatgtcccaaatcggctggtgaatccataaatgtaaatcagtgcctgtttggtcgaaaatttggtgatttgaacgaagaaaatccaagtcgaaatg

SEQ ID NO: 118129 - DNA, 740 bp, Heterodera glycines
agagagagagagagtgttaagagaaggataacagaaagattgattgatgaattgattttaattacatgtcaatgacggataattctttttttttcattgattattactgttgtaacaaatttttagccataaaattatgctaaacattcaaaactgcaccgttactttcaaaataataaggcgacgcctgagcaaagacgaatttttaaaaattgctcgtaatggagcaaatgttgaattgaacacacgccgttttcactcaataattatgcggcttcgctacgctgggagaacagttgcgtgccttatttttcaatcaggacgagttgttttgactggtgtaaggaaaccaagttttgcaaagatagttgcccaccgtgtccttcgacgtatacaacatgcttataatcatgctaccaacaaagcagaaaaattttctttgataaatttgcgagtggtcaacattgtatgttctcacacattcccacaccgaatacccattgttcacctgttgcctgtcctgtacactcgtaaagaatttttttctgtccgttatgacccaacaatattcccagcacttcgatgcaaactctcactgactgataatgatgttcatgcaacttgtattgtttatcattctggcaaagcaattatcactggactcgcctctgttgagcatataaataaggccttttcactattgtcttcattcatcactgataacattgaataaaaaaatg

SEQ ID NO: 118130 - DNA, 264 bp, Heterodera glycines
ggtgagcgagccattttggtacttttaggtcgtgcactacattccccggatttttacaatttttttatatgtatttttcttataaaaataatttataaaattttctacgaaggcaattgactatctaataaaaccaatggggggggggctcaatttttgcttctcggtgaaagctttattagagggggagctgtacattagacattagtagaaatactttattttactaaattattttgcaaatgtaaggtccttacacggatg

SEQ ID NO: 118131 - DNA, 823 bp, Heterodera glycines
tggatccacatgtattacaatttaaaaaaagctttaactataatttaaaaaagtgttaatcgatctcagtgtcatttttccaataccaccaccacttttctgcttttatggacatatatatatatatatatatatttcacaatagactttctttcatttcacatgtgaatatttatttgccaactcactttattattttttgcttgtggatggatttttccaatttaattattaattccctttttcaaataaatgatatatttttactttttatattatttaaagatttatattgtatttttattacttagtttttttttgagtcttagtgttttgttttgattttttggggttttttaaaattatttttctttttttgggtgttctctaaattctgttacaatagtaacatttttatttaataaatcatatcaaatttacgaataaaatttttttaaattattttcaatggttgttcccgaatatattctcgaactttgtacaatcttaataaatgttgactatgccataaaaaatcaaaccattaatctcgggaaattcttttttatttcaatgctaatttagaaaaaaacaaaaattcaagcaaacaatgaatgtgatcgcctttcatcagaaattcccgtttcggatttctccttttcatttttcttttaaaatgtttttttgtcactacaaaaaatggtaagaaaaattgtaaaacatttacataaattttataatattttttcttaaaataccaagtttttttcattaggttttgttaaatttagcagctgcgttaaacggcaatatagaaataatg

SEQ ID NO: 118132 - DNA, 895 bp, Heterodera glycines
tcgctttttgggggtatattcttctaaatttcaaaaaaagtcgatccttatttgttagaggtatattttcgccttttttttgcatttgtcttgtgaaaatttgccaaaattggcaggcaaaatatgtacaaaaaacgaaaaaatggcgaaatatggatttattcccgaaaacccccaacaatatagatttatatggattaaaaaccttcactaaatcgaaaaactttaacgtactaatgctttttttgagcccctttctttatagcatatgagcagaaaaaatatgttaatccatataatttataaccctatttattatttattgtttttttaaacttaaatttaattttttttttaatctcagttgctaagagctgatcaaaaaggaaaaaagaagttatagaagagaatccaagaagatgtcgcaatttttattattccgtgatgacgaattttgcaatggccagtagacatatttgatgtttttacatatgtatatttttatgggatagctttatatttttttggtgtataaaatagcgtaaaatttttgcctatatattttcgaaaaatgttttttttcacataatttttatgttttcaatatttcaatcgtaagcattgttgaaagcatataaagggttaaaatgcgcgaccggaagggatcgggatgccgcgagatcagattaatattgaattcagggtccagaacctcgggatctgtcccaagcttttttttcttcattcatcgggattgatcgggaccaggattgaaatgtaatcctgattcggagtctctccgactccagagcccggtctctagttaaaatacccaatttatttaattttgtttagtaccaaaaataaaaaagatttatagacaaatcgaataatg

SEQ ID NO: 118133 - DNA, 943 bp, Heterodera glycines
aaaaacaaagaaatttaatttataaaacatttttttaattaaaataaaaatatataatgatgaaggtaaaaataaaggcgctgaatatttttatacaaaaacccaactaggtaaaattttatataaatttaatataaataaaacctttaaattcatgattttatgagttaatttaaatttaattatttaataaattaaaaaattctttcaaaattttttaagcaattttttgcattaacaaaatatttaaatttctacatcaactttatttattttaatgattttcaacagctaattcctaaacaaagaacgccaacaaagccaattggcctctcctttattaatggcaccaaaattcattcaattttcccattacacaatgccgtgggtttgtgcgtttccaaggagccgccctcacattcgatggcatattttggccgcctgtgtgtatttaggtgtgccgccgacacattatgtctccaattgctttaataaatgaaaatgataattcacttcaaattttgtggaatcagagagaagatttcttacttaattttattacaacaaaaaatttttttataattaaaaagatagtttttaatattcttatctaattttatgatcaaagattaaaatattattattttttcaatattttaaaaatgatttaggttattttattcgatgaaaataggctcaatttttgcccgaatttggggcaatgacaattctggggacagcgcagctggggctgacccggacgaccgttggtccaaccaatacaggtaaaaaaatatgataaattaatgttacaattagtctggaaattaaccgccttcatgtacaatagtgattattagcgtattcccttataataatgattaccataattcgcttacaacagtgtgattaccataacagggaacgtgagaagaccagcatg

SEQ ID NO: 118134 - DNA, 276 bp, Heterodera glycines
ttatatttttttgccgaaatgtgtgcaaatgtccttcccctaatgtcccactgccaaatgctatattatcaaattacgctaatagcctaatgcatattctaataaatgcgttttataattttccttaagcatgaggctatttcaatatagaaatgtgcgtgtgccacgtttactgacgacgtaatgggtggacctgaatatgcataaatttagcatttcatttctttataaatttaatatttatttaattatttctgcaaaattatttattcaatg

SEQ ID NO: 118135 - DNA, 761 bp, Heterodera glycines
ttttgcgccgtttccattgccttttctgtgcacacagagggaaaagtgggtggggtaaggatttaaaatttcaaaaatttatcagggcgtgtcaggatcagtcagctggagataactcaactgctgatgggacaactcagctttacgagaatttaaaaaaattataaaaattgaaaaaaaaataaataataatttaaacaaattaattaaactaaaagtttttaaatttaagtttagataatgttaaattttttaaaatttaacagttgtctttcgggtgtcatgataacttgtacacaaactcgtataaaggcaacttgtacaatagcttaggctcggcctaagctttaggctaggcctaggcttaggctttatttaaaaaaaaaattattgtacggctgagttgtccatcttgacccatatcagctgagttgtcctcggttaactagtccagaagcctgttagggttttaaaatgggctaggaaaaactagatttagcgtggggcatcttttgccaaaaacatttgtatggcccaacaaaaacagcgccttgaactctgtttgtccaatccaatgataatcctcagtttcttaggcaataactaaaaaaacaaaacaaaaaaaaaggacgtgccgatttacatggccggacggattctttcgcaaaaatttcgttgaccccccgcccctcccctttttcataaaaaaccgaaaaacatatcttaaaaaatcaaaaagatgagtattttttattcagatg

SEQ ID NO: 118136 - DNA, 323 bp, Heterodera glycines
tcgcgtggtcgctttctgccagctccgttttacgggcactgttgttgacaaacaaatagtgggcgaaaacccaatggaggcatttgtggattggctcgtctacaaactgccaaagaaatacgaaacttatgcctattcacaatttggtggtcgcttcgacaacgtggcacggatgtaagaaatgttgcccaaatgacaacatggtgcttcccaatggaaaaacggcgggacaagtgcgggagcgagacggcaagaggatggagtacatcagaagatattgcaatcgcgtggatgtgtactgggaatgctgaattacggaaatg

SEQ ID NO: 118137 - DNA, 172 bp, Heterodera glycines
agctgctgtattgcgatacaggtgggcaggaataaaaagaaaataaaaaccaaaaatttagattctctagcttttgctcatcggaaggggcggtgtccgttgaaggaggggaaatttttggggtagaacattatttttgaaaattttctataaacatttgtttagtgagatg

SEQ ID NO: 118138 - DNA, 188 bp, Heterodera glycines
tttctcattggatgtgtgtcatttttacccaactcactcagttttaattcgaactttttgcttttgagggccttcctttgcctcgttcttaccacgtttttctcaacacggcttttaaattggcaaactttcgctcgtccgtggcttttgccgtcgttctcaaccgcgcattggcacttggccaaatg

SEQ ID NO: 118139 - DNA, 124 bp, Heterodera glycines
tttcctctcgcgcttcagctccgcctttgacggaaatgaacgcttttacaagttcagctgcgccaaattccacgggggatggacggcggcgattttagaggaaaaatgcgaagcgacggaaatg

SEQ ID NO: 118140 - DNA, 55 bp, Heterodera glycines
ggtatttaaattcatttaaaagttttaattgactctctaagggatgaacaaaatg

SEQ ID NO: 118141 - DNA, 606 bp, Heterodera glycines
tttcagtacagaaaattaatttaaataattaaattaaattcatttataattgaataacaatcttttaataataaatatatttgtctctattttagtatacacgacccttcaaaaaaacgagaccatcaaataatttgacaaatttaatgcaatccaacttttttacaagcatctaaattaagcatacatggtatcatttgatagccctaagtgtcctctattttcctgtaaaatttcaaacgatttggttgagcttcaaagaagttgtagccaaaaatatttaaggaattttaagcgcagcttgggtcgtttatttaaggatgaaatcacagcctaatttaagaataattttagttttttttttaataattaaagtgccaaaactttccggtgcccaatctttccactgtgaatccttaaatgtcgcccattgtcttgcaccagtttttttgtaaatatttttggtcccactgatttaaatttatataatttagagcacatttaattctctataacgaacctaattattaacttttaatggagcatggatatttcggcacgttgttcttaataccaatataatgcctgtttttagttaaactcatg

SEQ ID NO: 118142 - DNA, 223 bp, Heterodera glycines
ttattaccaaaaaagcaataagaaacatcttttgctttactctcgtcacttaaaacgaaaaacccaaaaattcttataaatatatttaatatttattgtcggtccattttggaatttggttctccggtttttaatccatatatgaaaaaagacatcgatgctcttgaaaatgttcaaaaaacatttttacgtattgtttttagacgtaataataataaggatg

SEQ ID NO: 118143 - DNA, 154 bp, Heterodera glycines
attgcccggattcccggtcacccaatggaattcgttgccaccctcaacaaccgcaacagcgacaacggcaccacatgaccaccagcaacaacaacagcagcaggcaaatgttggggacggtgttggcggcgaccaactgcagcagcaacaaatg

SEQ ID NO: 118144 - DNA, 331 bp, Heterodera glycines
ttttggtgaccttgaacgggcgcttcgcgcccattttttaaatccgttgaactcatacgggcgcttcgcgcctgttttttagcttgttaggccgcttcgcggcatcagtcgggcgcttcgccggtttttcaatttttgttggccttggacgggcgcttcgcgcccgttcttcaatttttgttgaccttgaacgggcgcttcgcgcccattttttaaattcgttgaactcatacgggcgcttcgcgcccgttttttagcttgttaggccgcttcgcggccttggacgggcgcttagcgcccgttatttaaattttgaggtacaaaagtgatg

SEQ ID NO: 118145 - DNA, 301 bp, Heterodera glycines
aggacaatcggacagaggtggacaatcggacagtggacaatccgacagtcaaatatacaaatagataagaaaatgccggtcgccgaaagggaccgattttgccatatcaagaaaaaaaaggaaaataggcaaataaattaattattttttgcgaatgacctagaaaatgtaaatgatgtgaaaatgcgatgataaaaatgtttgccaaattacttgcaagtaaaaatgaccattctcgtgcactgcacaaattaacacttccttttccttcgaaaattttcatttattccctcaaaaaatg

SEQ ID NO: 118146 - DNA, 687 bp, Heterodera glycines
caattaattattatgggagcgaaaaaagtggtaaataaaataaataaataatgacacgggtgtaaacacatttaaatcggcagcggttcaaattttccggcaaaagtaaatacaatggaacaaaaaatgtaaattatttaaaccagtttaaacaaataaaatcatcggcgtctgtaaagtaaatgaattaaaccaatggtacgaatgtttaaaatcagtggcggttcaaagtaaaatctttaaaccagtagcggctcaatacttttccggcaaataacaagttaaaccattagtgtgagtaccttcaaaccagtgacggctcaatccttttcctgcaaaagcgtaatgttttccggaaagtaaatacatttaaacaggtaatggattcaacccgttttccggcaaagtaaatacatttacaccggttatgttgtcatccttttccggcaacagtaagtacagttcaacttacaaattagtgtaaatacatttaaccagcggacgttcggaataatttaaatttaaacttacgtcaatctttggcgttttatttcatttgccgctttttgattttttgattttaaaaaaacaaagatttaaaaaatgaaatcttttttactaaaatgcattaaaattcatttaggcatctatcaattcttctccaggagtctatttctttttttgatg

SEQ ID NO: 118147 - DNA, 645 bp, Heterodera glycines
gctttattttgttgaataaaaattccatttaaagttttggaagcgtgttataaaaaatgtccttatttttgaccctaaaatcttatttttgaccagcgatgtccttatttcgggaaattttcaagggtaaccctgtttttaggtcattatttgcctcaaattaattatgcccttccacaaaaaactgcccaaatgtgcaaatactggcaatagtgtcagaagagtgcaatgttttgttgttcctctttcttcacaccatcccaaaaaacgagatgtgtaccaataaatagagaatgccagagaaaaacattatctttttttctctaattttttgtctccttttggcgtactatctaatattttcattattagcaaaaacaacatttatttcgccacatataactttttttctactcatacaatttacaccaaattttgaatatcgatagagaaaaaaattctgcatcgatttctatgtttatttttatagcttaaatgttgttttaaaaagttataagataaaaaagataaattattactgtttttaaagattttatggctaaaagaattttattacggaagcgacagaccaaaaatgcacgccaaactcgtgagaacaagcgagaggagcgacgaaccaaaatg

SEQ ID NO: 118148 - DNA, 1003 bp, Heterodera glycines
tttgggacggaaggggacgaaattggtcggtttgatcgaaagtgaaaagcaatcggagacaaaaaccaatcacaaaattgaataataaaataattcaaagggatcgattctcatgaaattgccccaaagtgaaggaattctttggatttggttcgaattcgcagtcttctgaagaagaagtgcaaagtcaaaagccaccaaatgactgaacaaaaggaccgaaactttctttgctctcccaaaatgaaccaaagaatcaaaggaatggggggaatcaacaaaaagtgacgaaatctgtgcccattttccagaagtcgccttctcgtgagaaacgggggagcaaagccaaggcaatgctccgctcggcattcattttgctcataaaaaccctttgaatgttagaaaaacagactttccaccgtttgtctgaattttgaaaaactacgaatgaaaaatggagggggagggatttgtcaatgaatgaaataatcactctttgaatgctaactgatcggaagaaggaaagacctgctggtgggggttggatggacttggagaaggcggaggaattgtgagaccatcgcaatccaacagttaattttaagcatcgtgagattaatccgtattgaaaagcggacagtttcccctggtccttgccaaatggtccctcacccctccccttggtacagattcatttttaacttgaccacttttacattggtgccgtagagattggcaacaaacatattcagccgatgttcttttaaagctaaatcacagtgtaaaaaactattagttctcaagatctaacatacccaaacagaactattttcgttgcctttattaaataattgctgcgataccgtacttcttgttttctcggatgaaaaatctcgagtttttagagttgacttatttcaccctttgttcattcatcattaaatactttgataatttcacttttaaatattaattcaaagacattgcagcattttctttgatg

SEQ ID NO: 118149 - DNA, 518 bp, Heterodera glycines
tgaattttttagcgtagcaacagtagacgttttggtttttttttcatattttgtagatttttaatcatatttttttgttcaattttaataaatttatgtaaatgcaaaaaattaattaaaacaaaaagtatatattgaaatataaaaaataaacattcggttaaatggcaataaaaatttttcttttaagaaattaattaaatcggattcattgcgaggaatagcattacaatctaaacaaagcaaaacatgttggaagaagccggatgccattgaattggttcgccaattttcattccataatattgtcgaaagaaattttataattgccaaaatgttggagagttggcaaaacaacggaatgccatccatggaacagtctttctttatcaaggcatatttcaagcaaatttccataaaaatttctgaaatattattaattgttggcggtagattggaacatcccgaaatgaatattttcgcaaattacggatttaaaatgcaaaaatggcagaatg

SEQ ID NO: 118150 - DNA, 173 bp, Heterodera glycines
cctgaaaattcgaacaaaaagtcgtccatttcgactaataaagccctgacccgaattcgaatgaaaagtcgtccatttcgactaattcaaaagtcccgaattcgaatgagagtcggtgaaattcaaattttcccccattttcagcgattgttgacctttcgcattggatgatg

SEQ ID NO: 118151 - DNA, 99 bp, Heterodera glycines
ggtggccaacatcaattagcgaatattttggcttaattaattgagtcaatcgccaaatttgaggcccaacaaaatgccgaacttgccaatgccgagatg

SEQ ID NO: 118152 - DNA, 564 bp, Heterodera glycines
aggcgttttgagaatgattgctaattggtttcattgtttggataaaattgttattgagtaaaaattgggcaaaaataaatttccatacaaaaatattttgctcatttggctgtaaatgaatttcataaaatttaacggacggggggaaattttgaaaagcaatttttctggggctaaaaaagtgcgctgatcacgaatctgaactcagattttgaaaatcattgatttttatctatgatttttcatggactacttgatttttttccaacattttaagaaaattagtcgggcgtaaaactcatacacagatgttgtagagcctaaaaagagctttcgaacgagctattgaatgtatgtagaagtcgaatttccagccaatttggaatgcttttgccagtggaatttggcccattttcgcgccaaacattcgccatttttattttacttatggccatgctcttgacaatttgcgtcgccacatttcgccaacaattctctacagtctcaaccaattgatttcaatccgatcagataatttgttgcccgcgtctattgctgatgatg

SEQ ID NO: 118153 - DNA, 1003 bp, Heterodera glycines
tttacggcccgtatttatatgcaataactatatttatttaaaaaacactaattgtaagcactacaatccattaaacattcatttaataaaacacccataacgaaaagagttcgattcaattttaatgggaaatgatgcaaattaatcgtttttggtggtctttatgggatgaatgagagaataaatgttgagaaaataaatatgaaaccggaagtaaaaatgaaattaaattttattatatttataaatcaaagaattatttccaaaaatttaattgtattattaaaaagtttggctgattagataagctgaaaagagaagtaaataataaaatgtgcttttaaaaaatgtgaattttgatttggtattttttggagaaaaatcaatttggaacataaataaaaagcgatttttgatttttgaagattttttcatttaggtcatttcccattaaaatgattgaattcattacgagccgtacacttaatgctaattacaataaataagtatatttaatatgcaaatgcaactacctaattgttctgctgtttacacataagcaaaacaaacacagaccattcatattcattcattcattcattcgtccgtcgtcacaaatttcattttgttgcttatccgctttcccaaaaaggaaatttcaactggaagagcactctctcttgagctgaagaagcatcgcatttgcccatttttacagccattcaaatttcggcgctttgaaatgtttgcgctttatcttccgctgcgcttttgtgctgtagaaatacacaaatggatcagcttttatctcacatatatctcacatatctacaaaggctgtacttgcatttttttaatttaaatttaagtaatttatttatcattaaaacattctttaatccaatgtttttcttttttccataattatgtttatattttccaattattgttttatcttattttggcattctcttaattaattaatctcttctcttcaattatg

SEQ ID NO: 118154 - DNA, 260 bp, Heterodera glycines
tctttccaagttgcgccaaataactttgtattttctaatcaaatttttgagaattttttaaaattttctagtataataaagaccgaataaataacaaaattattatttttttaaattttatcttcatcttccaaccaaatttgggatttttccaattaaatttttgagaattttcacaaaattttccagcaaaacacttttccattccatcccaatcacttctaattgatcaaaaaatataatttaaacaatcaaaaatg

SEQ ID NO: 118155 - DNA, 531 bp, Heterodera glycines
tcttgaataaaggattgttaacaacaccgctaccaatttgggaatgttaatggacccgcctggaccctcagtattcaggagtttttatggcatctattttggcctatttcgaattccggacccgaattcaaacaaaagtcgaaaattagaatttttcataaatcacttttatgtacgaatctgtgcgactttttttcgagttttggtccgggtttcgagatagggcaaaataaaagtcgaatacatgaccttgtgatttgtatggctcggagaaatatggatataaaatcgtaaaatatggaccaaaaattacaaaatatggacataaaatggccacaatacggacaaaaatggtattaaaaatcattttagaagaaaaaaacatgataatgctatgatttattcattttaacgaaaatcaacccgaaaagcgaaattttagcttttttgcttatttttaaaataaatttatcaatttttaagaaaatttaagtttattcaatattctccagaaaattttgcgataaaatg

SEQ ID NO: 118156 - DNA, 238 bp, Heterodera glycines
tctttttattttctttttcagcttccaactccgttgctgttcctactccgctttaaggcattcggcaggtgattcattcatcacagtgccatttgtcctttttttgccatttgtcctttatttcatttgccattgtccgttttctttcccatgctaataatccctttctttttcttgccaagaccgtggcgttgccattgtaaaagccggtcaaattgtgtacggtggtgaagtgatg

SEQ ID NO: 118157 - DNA, 180 bp, Heterodera glycines
atttttgtttgtctgtttcaaaaagagtctctgttacgatgccatcccatggccactcgattccttcgcttgttcacgcattagtgctctcagcttatgccaagtgcttttccttttttgtccgtgcgacgccatgcgccgtcttcccaccattttaaggccaaaaaagtcggcgaaatg

SEQ ID NO: 118158 - DNA, 586 bp, Heterodera glycines
aaatttaaaaaatttgttaatatacaaatttaaaaaatatatttataaaacttgataatcaaattcagacactgccttgaagagttttatctaacgaaacgaacagaaaaatcgcatttcaaatttggtaaaaaaaaacgaatccgggccctgttaatttccatttttatttttcctggcgtaatttaattaaaaattagtttattttttcttttaataaaatccattaactcctgctgaaagcaaatgcaaataaatatccgagttttgatccatcaattactttaatagtaataatctcttttgactggttctatttttcagttgcgtcccccccccccccctattttatttttccattgtttcgctttatttcgtcactcttttgtccattttattgcatttatctttaaaaatatgaatattttatttcattttcaattcaatttaattttttaattaattaattaatttccttttaaaattgttaagcaaatgttattgaggctgttgtgactgactgttttttgttaacaaaagtgcaatttactacacactttagccacatttatttcttgttatgatg

SEQ ID NO: 118159 - DNA, 167 bp, Heterodera glycines
ttcaccacaactaacggcaatacgactatcaccgcgctcccctagacacggcactttccattggatcgtttgaggagcctttcgaattttattggagtggcgacgaggcgggcagtgaagtgattccgttgagcattgccaacctgcaacagaatgaacaaacgatg

SEQ ID NO: 118160 - DNA, 128 bp, Heterodera glycines
catcgtcaaaggttttcgagattttgccgagtaatccactcaccgacactccttatcattttaaaatacactcgagccaaaactacattgacctgtcaaagtgttaccttttgaccgaatttcgaatg

SEQ ID NO: 118161 - DNA, 671 bp, Heterodera glycines
cacaacaaaaaataaaaaattttgattgttttaagcaaagttataccatgctttgtcgaaaaagagctaaatgacgaattttacgaaaagaccaagcacgcaaaaaatgattcattttgaaacgatttttataatttaggccccattttacatgaaaacttaaatattaagaagcttgcataaattttgccaaattacattcaattaaaataaaaataaaatattattttttctcgtgtccagacatttgcgccccggacatttgcgccccagacatttgcgcctatgtctaaaatcgggttcaaacttaatatttcaatccctgatattctaaataaccttaaataaatgatagcaattgattgtgtctaataattggaacttcagaaaatttttgaaaaatcgttaattattcaaataacatttaatgcttaattattcaaataacataattaatgctcataataaattaaattactatgttagggatcgaaaaaatttggtttgaacccgattttagacatagccgcaatgtctggggccaaatgcctgaggcgcaaatgcggggtaaccttttttcttgcgcattaattactttgaaattttttttattttcctgcaccacccccaaaataaatttacccagtattagcgaacagtatgaacgcatg

SEQ ID NO: 118162 - DNA, 129 bp, Heterodera glycines
tatttaacccaaaaccaagcgcagcaacagcaaacccaactcgtggcacatccccgagtgcttttcctggacgaagattggccagtcgaaaaggaattggacgtcaaaatatgttccgaaactgaaatg

SEQ ID NO: 118163 - DNA, 322 bp, Heterodera glycines
ataatttttttggataattttgtctcatgtttataacatttaatattttaaattaatcaaatttgtttcattttttagaatgtcaaagaaaaatttccaagaaacttcaaaagaaatccgccgctcgaaaaatacaaaaaattatttcaaaaacagtcctaatttggaaaaatgtttcgaagaagtggagagtcacataaaggaaaataaaaaatttgggataaaagagcacgtgacaactttctattttaaatgccccgaaaatgaagatcccgaaaaaatgtttaaaaaaatcctgaaaaaattaatgggggatgcaatg

SEQ ID NO: 118164 - DNA, 1003 bp, Heterodera glycines
gaagccgaagagggagaggaagaggaagagaatggcattggcaaatgggggacggaggaagagaagggcgagagagagttcatgggcaaagagtaagagggagggagggaagagacggcacggcgaaggacggagacaaatggacgaaaacggacgaaatgccaaaaccaacagaatgaaaccaaaacaaaaaaaattttgtttgtcagcggaaattgaggaaaagcaaaaattaaaaaggaaaagcaatcaaagcagaaaaaggcaaataaaacaacggacgaacggaatcggtgaagcaaaaagggaaattaataataatggccaaggcaaaagcaaaaggcaaaatttgggaaaggaataaattggcaaaagggaggacaaaaaacattcaatcatttggaaattcaaattgacgaaagggttaaataaacaaagctttgtcggacatcattttaacagcaaaagcgacggatgggaggacaaagagagaaacatttggcaaatgaaaagggggaaaggggagaagggaattcacttaggaagaatggatgttcttccggaaatgccctcacttttgggccattggcattttctgagggcgaataaaataagtgccaataaaaagggagaaaagcaaaacgaaaagcgccaattgatgccgttttgccgcacgttttgtgccgtgccgttttttcccgctgtgtgttcgcaaatcggcgcccttttcctttttccattgtccgctctttttggcctacttttttttttaattttccattttttattcatttaaaaatctctctccaaaagtacaaagcacataatttttctttttgccttttgttacgccaaccatcagaagagagtgtccggtctgttcttgatgtgctgttggagttgcggaagtgaaaacaccgctaaaaaagcacagaaaataaacaaagtaaacaatggcactttctatgcccgattaatgaaattgttgccccaattaaaaatg

SEQ ID NO: 118165 - DNA, 51 bp, Heterodera glycines
tattcaacacattttcacgaaataattggaggtatgtgtcgcatcggcatg

SEQ ID NO: 118166 - DNA, 61 bp, Heterodera glycines
agagtccgagaatcgcgcttcacgctttcaattacgtgaacaactcatcctatactgtatg

SEQ ID NO: 118167 - DNA, 114 bp, Heterodera glycines
aattattatgtttttgaatatattataccttttattaataatggatgttgttcgcgtttccgggatgtcaatccaaagaatcataaaatttcttcacttttttatcttcagatg

SEQ ID NO: 118168 - DNA, 527 bp, Heterodera glycines
ttaattaattgactctcttttcatggtcactcttcgtttcgccttcggcgatgccacaccgtcgggcgggggaggcaatgaatgatttgggagtggcacggacagtcaccggcggcgcacgtgtggcgcgaccagcagcagaccaccaaacgatgcgccgggcgttggtcgtcgtcccccgcggcgtgggcgaccggcggcagcaaaaggcaaatcgaaagggtggggcgacccgtcgccgcccggtgggcacgcctttcggcgcgttgccttgctataaaagcggggcattcattaagcgaagccacacacagtgcacaccaccaaaacagccaaaacaacaaccgtgggtggttcaacagcagcagaggaaacccaatgaaagcgaaaacaaaaacgctctctctctcattaggaccaattagcaaaatttaattagagagggaaaggattttctgattaagcattttcaatttctaaatcccgctttgaaattataattttgctttttgttccttcagaaaatg

SEQ ID NO: 118169 - DNA, 926 bp, Heterodera glycines
tttgttgtgttgcggcataaggataggcatcggatgagcacgatttctgtggtttttggatatcaaaaatgaatccaccaatctaattttttgtataaattagggaatgttattgttatattgggtgttaattgtctctcatagtagcgtcagagaagttgttgaaattaagaggacagacaattaaagggtgaccgaaaatttggttaacaccccatgccaattactgagcttaccaataaatttaattcacggaatattaaaaattgcaaacaaaattaataataatacagaggacaatgtgacaatgtttacagtaagcggtgcaataaatcatttaatagtcctaccgtattccgtgacgaattcattgcaaaaaatgtgtgtgccaagcaaaaaatggtggccgacaaaagcaacgaaacagggccaacaaaagtgtaaatgccgaagaggtccaaattgagccagcaaaaatccgacaaaggctggggctgggatggcacaattttatgcaaattttgcataaaaatggtaacgacaataagcagcagagggaaccctgtgggaattttaaaaaaattaatttaatttaaattaatttaaaaaatctattaatgtccttgcttaaggacttttaaaaattaaaaaggaatattatttgtttaaatttatttcataaagtttgtagcgacagcattaaaaaaatatatttaaattaataaaaatttaaagttttattttctaaataattataaattaaaaatatatttgtgtatgtttaaaatgattgttttaaattcattatgaataacataaaattaataatttacaaatttatgccagaataaaaatattaaagcagaattataatattgtataattaccgtatccaaagaggtacagactgatgtgtttgagcaatg

SEQ ID NO: 118170 - DNA, 792 bp, Heterodera glycines
tgccgttaaagttgtgccgagaagatttttttgagcaggtgaaggtggtggtggatcagcagtgggccaggaaattgaaatggtcaaaaggtgaaaaatttagaatttgaaaaaaccatgacaacgtaaaataattgaaaattggagattaatctaaaattcgataaatgagaacatatatttagaaaaataggtttttatgtgtttgatattcgggaaataccaaaacattatgtacatacttaacacaaaattagtattacgaatcgcattaaagttgaacccaaatttataatttctgtagatattgattttttgattttttataaatcgcaataaacattacgccaaacaaaggcaaacctaaaaaaagtaaaatcaaagcgacatatttttcctcgctaaatgttagtctccgttttttgccatgttttttaggcgtttggtgttataccatttccaaattggtttttgttttcatcggccgttgccaaattgagtctggataggatcaacttattatgttatcattttcccggcattcctttactgtttgaacctgacattagaaatgccgggctctactaatttctctaatccaattgctataatatctaggtagctagtttacttacttcctttgctttttgattctgacattgaaagggctctactaatctatctctaatccaatggttatgacatccttttaaaaatgccctgctttaatctttctctaatccaatagctatcatttatccttttaagtttagcaaagattgtgaaagaatg

SEQ ID NO: 118171 - DNA, 238 bp, Heterodera glycines
attttcaaaaaggaagacaaattggcaaatctgtcagcttcggtcttggttttctacgccctttctctctcctgattcattcctttttctgattgttaccgaataaaatgatgggttccttagtggaaattgtgccattctttgcaaaatttattccatttacctttccatggtaaaatatttgtggtttcctttttgtttttgcttacttttcctagcattttcagctgtcaaaatg

SEQ ID NO: 118172 - DNA, 1003 bp, Heterodera glycines
tggatgaattaagggaaaaattaattgtcactcacagcaaataaaaagaatttggtgccccagcctttcctttcattgtttaacaatttgtcattaaattcgactctgtaatccgacactgcgtcattttgtgagacaattcggatgattgcggaacatttgcagctccaattttctgcgccaatgcaaattaattattattaattaatattttattaatatttaaactgaaccttttttggtagtggcacaaaaaagaaaaatgctcaaacttttcgcattgtcactgtcttctgtccagtggtttattcgtgccaatattttccatggtaatccctttatgtacgtgactgtctcgcttttacgttcactcccaacaacttcgcgcgcaaattccgacactttttcaatttccatcaaaattgtcccttccgatttgctttgatcgaaaatgaatttgcttattttttcttttttgacggttaaatcgatggtaagtgtcactttgtcctcttctttgttgtaaaagccattgagcgggtccatcaattgcttaattgttcataattggataaattaagggaaaaattaattgtcaaactcaccgcaaatgacatgaaattattgaaacccaaccagtattttttattgttaaaaatatggtcacaaagtgtcccagtggaattttccgccactttcatttgcgagacaattcgaaaagtggccgaatgaacgcagcagcgccaaatcaaaccttaatggtgattaatttgttaattagccttaattaagagttaatttgaaccttcttttggagcggtacacaaaaggtaaaattccaaacatttttcattgtcagtgccttcatttcttgtttttatttgtgctaacattcgccatggaagtccacttatgtacaaagtttcgctgtatcggttactcacagccatttctcccacaaattccgacattttttcaatgtccattattaatgttccaaatg

SEQ ID NO: 118173 - DNA, 209 bp, Heterodera glycines
aatgaaagaaaatataaataaaaattaaattaaattgaaaaagattcaaaaaatgagaaatttatcatttgaaaaaataagaataaattttgcgatgattgagaataattctgctaaatttagttttcacaaataaacttcatctgctgaaccattaccgtcgctttttgctgctcgacgaccaattcgctcccaatgcttcggaaatg

SEQ ID NO: 118174 - DNA, 298 bp, Heterodera glycines
ggtgtggtgccctttttttgttccgccattctttctttgactcttcccataaaaattcggccgatcattttttccttagatcgcaatggatcaaaactgcaaagttgaagactttgaagcagctgatccgctttacgtgtccgtgaaatccaacatgagaaaagcgtactgggatttgtttagagaagacttggcaaaagagcctccggaatttggacacgccttttcactgctgggggacctaaaacaagttcaaaaatattattatgctttgtttattttttaatcgttcaagatg

SEQ ID NO: 118175 - DNA, 822 bp, Heterodera glycines
atggaggcgtaaaaaaggaccgaattctgaaagttccatttttggacaaattttcgcgagacaaatttatctataatttccgtaatgctctgaaaaaattgactaatttgccccaacatatcaaagtccgcagggacatgacccaaaacgaactcaaaattttatattcccttcggcaacaagcctatcaggccaatattgctgctggtgaatataaatattttgtggttgatttggaaatcaggtccctgaaaaacccccacccgctcagaactcgctagggacacgcgagcaaaccaaccgaaaaaaaatagaaaaacggtaaaaacaatccctggatttcctgccttttaataaatgcccgatcaatatcaaataaaatagctgatttagaacatttggctaaaaaatacaatccgtctataatcctaatcaatgagacctggttaaactccagaaatacggtagaagcggaacttacaataaattgtcaataccaaattgtttatgcgaaccgaacagaaaaaagggcggaggatcggcaattctattaaaaacattgatcccttatcagacacttttctctgggacaaaattccaatgcgaaattatacccattaaattattttttaaaaaccaattcaaattataaatatatatcggccaccgaattgtaccgttcagaatactaaaaagctattcaaatttatttcggatcaaagcgattctgaaaatatcatatactgtggggaatttaacatcccaaacattttatgggatgaaaataaggtaaaacatataaattatcctatgtcaaatatg

SEQ ID NO: 118176 - DNA, 792 bp, Heterodera glycines
atttttaagaatgttgcaatggacagacagaaaagaggaagaaaatgattcgtttttaatcattaacatttacgtacatataaatgaatatattggagctcaccaagaattaatccgggccgggcgccgttttcgtacaagaggatattttaaaaaaataaatgaaacaattgcatttaaatcatatatactactaatgttaattatgctttttaaggttttgacccaattaggtattaataactacaaaaagtaaataaaagattacgatttttgaaattattttggcaactaaattagaccagcttggtatcattcgaaagctcttgatgaggaggagctttttcgtagcaaatgttaaacgattttaaaaaaagataagagcgttcgaaaatttgtttttcttctaactcatgaataaatgcataagcaagcaaaaaatggctgtattacgatgcgttatataccgtatttgctctttttatatgccatggtatattatttttcaacctcctcagaaaggggtatataattggagaccggcagattaatggagactggcacataaaaagagcaaatacggtagatggtaggtcagatcattgttaattaattttgctgatcagatcgcttttaaggacctgtaattagttcactagtaaatccggtcagatgactgataacgattttgatcagatcattaataaatctttatcagatcactagtaaagcccggtcagatcactgaaaacccattctgatcagatcgctgtgtccgcccattggctgatg

SEQ ID NO: 118177 - DNA, 302 bp, Heterodera glycines
tttataaaacagacaaaatgccacgatatttgatcacatacttttttgttttctttttgaatttcttgccttttccgagattatgtaattgacatttttgcgggaaaattcctcctccatctcccctaagggcccttataaatttttaaggaaaaataggaaagaaaatatttctgcttgggtccctttgagtcgagatctgaaatttgggattggtcatttttatattggtttggtttacatttttaatttctttttaaatttattaattggactgcttttgctgttgctcaatttcgatg

SEQ ID NO: 118178 - DNA, 379 bp, Heterodera glycines
ttttattgctgcttttcaagggttcaacgatgatttttttttgagatgctaattttctgcttttttgagaaaagaaaatgatttaacacaccattccaaaaaacgagaagtgtaccaataaatagagaatgcagagaaaaaacaatatcttttttctctaacttttctctccttttggcgtactatctaatatttttattattaggaaaaacgacatttatttcgccacatataactttttttctactcatacaatttacaccaaattttgcatatcgatagagaaaaatattatgaatatttttaacgctcgagttttatttttttacgcttcaatctaaaattataaattaataacttatttttataattttagatg

SEQ ID NO: 118179 - DNA, 91 bp, Heterodera glycines
aaaaaagaaaaaaaatttgcagtcaaaaaattattcgaattctcccaaattttgtttccataatttccgaaagttattcggtatcataatg

SEQ ID NO: 118180 - DNA, 164 bp, Heterodera glycines
tgtttcctctttaatcgttttatttttatatttttaatttgtcctctctgtcagatctttttggcattttgtcattcgcggcacttcgtcactgctctttcggctctgccggggatgctgcttcgtcaccaccatttgtcactgtgacttcgctctcccaaatg

SEQ ID NO: 118181 - DNA, 341 bp, Heterodera glycines
tattctctatgaaagaggggctttataaataatattaaataaattagtaaattcaatgtaaaaaataaaaaaatggttttagcaacgaaactcaaaacctatataacatatatataaaaattaaaataaaaaaatgatttattagtgagcaacacgcgtgcgcaatgataatgaataataacacaccggaggggaaaccattagtgttttgttattgtttgcttaaaatgagcgagaaaaatgggggcagagaaagaaaaacagcagcatagagaacagagaaacaaaatttaaaaagagttagtaaaagacaaacagatagtggcgagagaaagtacatg

SEQ ID NO: 118182 - DNA, 436 bp, Heterodera glycines
  unsure (1)..(436): unsure at all n locations
tgcacgccggagtcgttgaaagggcaaantcggacaatacaagagcgcttgtacagatattttacaaagaaagacactctacgatgggtcgatgtaatagacaaaataataacaaacattaacaacagtgtgaatagaacattgggagccaaaccgtcttcaattaattttgaaaatgcccgtgcgctctgggaaaaattatataaggcgaaggaatttaaaatttcgaaaaagaacaaatttaaaattggcgatatcgttcgaattaccaaggaaaaaggaaaatttgcaaaggggtatctcccaaactttaccgaagaattgtttaaaatcgttgttgttaatccgacgacacccgattcatacaggattgaagatttggaaggaaatttaataaaaggcatattttataaccaggaattagtgaaaatagatg

SEQ ID NO: 118183 - DNA, 413 bp, Heterodera glycines
attttgaaaaaactggggaaattgggatccagctgggtagcattgggcgccgaatttagaaatttttggtcaaattaaccaagaaaattgaatattcattttgtgggcaactgcccccccccctatggttacgggtctgaacaatccattgaatttatatgtgaacagccgtaatgctaatccttttgtctttttaaggtctttttgggcacgttcaaccttgtgttggattttgttgtggtgctgttcacctatttcatcttcaaaaactgtgtgaaaacgactctcagctatttgaacgacatcgaatttcgcaattccttcacaacgccttacttttggtccctccctcctccgttcattccaatgcatttttaaatttaaggcgcatcgacgcaaaaagaaatgaaatg

SEQ ID NO: 118184 - DNA, 168 bp, Heterodera glycines
tttcaactttagctaccgcgcgaggacgtgacggagttgctgccgaacgacggggacttcctggtgcgcacgacagaagaaacttcgggcacagagcgcgtctttgcattgtctgtgaacgtcggaggcctggtcaaccacgtcatcttccgccgacacaacgggatg

SEQ ID NO: 118185 - DNA, 78 bp, Heterodera glycines
tgtttacaaaataatgaatactttgaaaagcctaagtatttatttaaaataaatatttttgtaaatgaataagaaatg

SEQ ID NO: 118186 - DNA, 755 bp, Heterodera glycines
ataatgctggtgtggtaagtgtgaagaactgtgttcctccaggcaaaaaattctaagaaaatttataagcatttgtagggttctcagcagtttccctgcaaaatttggtgagcttctgatcagtctagaacgttgggtgataaaatgaaaaaaataatttaaaaaaaataatgctggtgtggtaagtgtgaagaactgtgttcctccaggcaaaaaattctaagaaaatttataagcatttgaagggttctcagcagtttccctgcaaaatttggtgagattctgatcagtctagaacgttgggtgatatttataagcatttgtagggttctcagcagtttccctgcaaaatttggtgagcttctgatcagtctagaacgttgggtgataaaatgaaaaaaataattaaaaaaaaataatgctggtgtggtaagtgtgaagaactgtgttcctccaggcaaaaaattctaagaaaatttataagcatttgtagggttctcagcagtttccctgcaaaatttggtgagcttctgatcagtctagaacgttgggtgataaaatgaaaaaaataattaaaaaaaaataatgctggtgtggtaagtgtgaagaactgtgttcctccaggcaaaaaattctaagaaaatttataagcatttgaagggttctcagcagtttccctgcaaaatttggtgagcttctgatcagtctagaacgttgggtgataaaatgaaaaaaataattaaaaaaaaataatg

SEQ ID NO: 118187 - DNA, 1003 bp, Heterodera glycines
aattatttttcttcattattactattttcgttataatttatgccttattattgtaatcagtttaaatttaatataattgattttgttttttgtcttttcttaaaggttttgattatttcgatgcactaactttccgctatgacatttgtaattaaatttttaaaatatttcttaattaaatatttaaaaaatgaatatttagcccagaaaactgtcagagagccattttgttagtcacagaattaaatgattttattttagtaacgaggtgtttttaataaatttgctctagaatatttagtttttaatttactttcgaaatgtcgatagaattattaaatgatttaactttttttttactctttttcaattattttaatttttttttaattcttgaactcagcttaatttaacattgatcataatttgaaaggaaataaatatttacattaaataattagtgaaattttttttactttatattttattttcattttataaatttatttgttttttcaaaatcaaaaatttttatataaaatttataaaataaatggaaaatagtttaaaagttttttcttatttaatacttcaattttttatatttgccatcaatacactccattccctaatttttttttatttttcgtaaaaaatgtaaaaagttataatatatcttttttttattttaaacaattcaaatcttctttgcgacgaattattactaatctcaaataaaaacataaataaataatataattaaaattttataaccttttagaatttttctttccattaaaaatttttgtttcataaatagatttgtataaattttgtttgaagctttaatgaaatggtaaaaaaaaattcattcttttccatttgggtttgcttttatttgtatttttttgtaataatttttagcttttcttatatttgtatattaatagttacttttggttgtaatatatttagattttaaaaacttgttcaggtccatatg

SEQ ID NO: 118188 - DNA, 130 bp, Heterodera glycines
tcggcatgttgtctgctgcgcaaaccgatttcgcatcgttggaggacaaggtttggaaaagattagtgggagttaaaataaacaataatttatatttcaaatgttctagaaaatccaattattggttatg

SEQ ID NO: 118189 - DNA, 157 bp, Heterodera glycines
gctgcaaatttggcatacattttattttatggcaacaaaatgccaatgtatataggtagagagggagaccaatacgagatgttcgagaaggtgattcgtgtcggtggtccaaaaatccaaaaattttcggatcggcatttaagattatccgaaaatg

SEQ ID NO: 118190 - DNA, 94 bp, Heterodera glycines
actaagggaatcgtcgatgagccacttttgcgatcaatcaaatttgaccgaataattctggcgccttttcatgtcttccagggcattggaaatg

SEQ ID NO: 118191 - DNA, 487 bp, Heterodera glycines
acgacgaaatttacttttgacgcaattttttattgtggaatattttttgaaataaaatttttgtttattttttgtaagttaattatgtaataattatttgataataaaaaataattaatggatgattaatgctattgattttgaattaatgtgaattgggagaatacattttcttcgttcatcacatcataaatgtggccctggctgatgctgtgtgtcgtcttcgttaaatcaacaaattaattcccccccccaccctcacaaatgtttttttgtttgtttattattaaaaataaattcattatttcaaatttgtcagctgaaaagcttacaaattttctttttgggcaattggaaatcttatccaattaagttattcgatctaaattcattaaaatgtattaaaatattcaacagaatttattttctcttagatttcaaaatgttatccgccgatgaaaattattggcacaatgtgcaaaatatg

SEQ ID NO: 118192 - DNA, 152 bp, Heterodera glycines
aggtgctagtgcgttttataaattccgccacccatgcgcgttttttaaatccgccagcgcgttttataaatccgccagcacatttttttgcatatatctttaataatattaaaattttatgcaataatttcagctatattttatacaaaatg

SEQ ID NO: 118193 - DNA, 73 bp, Heterodera glycines
tatttattgccgtagctcaaaattccctaccttcggcaccaaatctgtaccggaaactgttccatggacgatg

SEQ ID NO: 118194 - DNA, 135 bp, Heterodera glycines
tttaaggtctcagacaatgtgaaaacggccaatcaactttcaccaaccatttttatgcttattttgacaaatttaggcgcaaatattttattcatagccacatctttttacagaatcaatgataacgccattatg

SEQ ID NO: 118195 - DNA, 196 bp, Heterodera glycines
ctagagtccggcgggatcgggactcccgcgggatttttcgggagtcccgctcccgactcccgcttttttcggtgaacgggatttttaacgggagcgggatttttacgggattcccgttcgggacttccgtcccggaaaattttgaactcccgatcccgctcccggaaatttttacccaaaaacgggagtaaaaatg

SEQ ID NO: 118196 - DNA, 127 bp, Heterodera glycines
ttacagagtcctagtcgaaacagagatgggacgcgaccttttttatcgtttttttcgcgcgatccacgattcgtgacccttgaatttaaaagaccgtatattatccgcggctttttaggtaaaaatg

SEQ ID NO: 118197 - DNA, 124 bp, Heterodera glycines
atgatgtttcaaggttttttcattaacaattccccttgttatgtttagttatattgtttttatgtccggcatttcattagttggcaattttgacaacgatgtccaaacgttttcggcactgatg

SEQ ID NO: 118198 - DNA, 677 bp, Heterodera glycines
tgcaggtccaaatggaccaagaggaaagtgccaaaatcgaaatgcttacagaagcgatgttcatttaaaacggatgaagagaatgaccaaacggagctgagcatcgaagtgcaaacatcgcgagagacaggggacgaacatacggtaagtgtacagtaggcatatggtaaaaacatggcgttcgctaccgcacgactcaaaaagcgaaattttgaaagtttcaaataccccctccccatccgccgaatatttgaaacttcttatctttcactttacctattcaagtctcaacaaaaatgaattaaccgtcgtttgttcactccgtcgtggtttaatcccaaatttaattcatttttataaaatattatttaggtaacaaggttagacgtatattatttagagcatttaaatttaaatttgaatttaaaataatcccaaaatgtgctgattgctctcccctgttgctgagtgactgtgccgtcccttcccttcagcggcacatttttcgcgcgttcgctttcgtccctctgaaaagggatggcacctcctccgctcccacttccgtcgatgacttttcttccgctgtttccgaaaaaagagacggcggtagaagaagcggaagaatcggcacagtcgcggcgaagcggtggcaatcgatgggcaccaacaaaaccatg

SEQ ID NO: 118199 - DNA, 331 bp, Heterodera glycines
tatcaacaaaggtcgtttattgattttattgactgtgcgtggcgaactctcccaatatttgctggcgataaacattcactctcatttactcattttcattcacacaaacattggtccgactgaaaagcacttaactgatcaaaatggccgctgacattggtcaaattcttcaacaattagttaaaaatcagacggaggcttttcaagcccttctccaaaatacccaaacaaatccaaattccgtcaattattccactatttattcgactatcaatagccaacttggccaattcacatataatccagaattggatttcacttttcaagcatg

SEQ ID NO: 118200 - DNA, 52 bp, Heterodera glycines
aagaaattaaattttcctatgtaaacactccatttaaaattttagcataatg

SEQ ID NO: 118201 - DNA, 180 bp, Heterodera glycines
ttaactgcgaataaattttgaataattaataaaaaaaaatttggcgtgaaaatttcctaaaaaattgattacattatccttaaatttttgtttttttttaaattttaaaattttcattacccaaccttgtcaatttgtaagatcattgatggctttttggttctgcgcacgtagcgaatg

SEQ ID NO: 118202 - DNA, 52 bp, Heterodera glycines
tcaattgtcgtccttaattgttcttccatttggtccaataatcgctccaatg

SEQ ID NO: 118203 - DNA, 293 bp, Heterodera glycines; identical to SEQ ID NO: 99822

SEQ ID NO: 118204 - DNA, 305 bp, Heterodera glycines
agcatcactttccttctaaaaacaaatgatttgtttttcaatttttatgaaatttaataaatgtggtcatattatttatatcaattttccatgatagcgtaatggtctttacgcttccattctgtagtacaattactagcatatgttcacattcagtatctggcaaattgtaaaatatgatgtaatttaatcccttttttcgactatctttataatccttaatcaattttttttcatccaaataaagtgctttattctattccattttccattgtccttcaacattcatcccacaaaaacaaatg

SEQ ID NO: 118205 - DNA, 73 bp, Heterodera glycines
tggagcatacgtcagcttttttgaagcaattcggcaccgagttgggaataattggttcccaattcgcatcatg

SEQ ID NO: 118206 - DNA, 94 bp, Heterodera glycines
aatggcaaccgatattaaaaacatcttaaatcgactgtcttcaattgaaacgttattatcaaacaacaacaacaacactttggcaacgcaaatg

SEQ ID NO: 118207 - DNA, 213 bp, Heterodera glycines
  unsure (1)..(213): unsure at all n locations
ctgtttaggttatagacgatttatttcaatgatgatnntaatacnataaaacattatgacaacaaagaaaacaaagttaaatagaggcactatcttatttctaagtagagtatcaattatttcttaaaaattcattttgtttgattacttaaggcgcatagtgcaactgcgtttagagaatgttcaagcatttttttaaatttataccatatg

SEQ ID NO: 118208 - DNA, 543 bp, Heterodera glycines
tccactctcttgtcacttctctcttccactctcatcgtggtttcgcttctctctctttcctccactctctccgtacagccctttcttctctcatttttctttacacactctgcgacctctttctctcaatgagccctgaaagggtcattggtggtctctctcaataggcttactgtatgtacctcattctttggttcttttatggctaattaactttaattggtgcaacatattaaacgatcgagttgattgaagaggccaatgtataggaatgattgaaagttatagttcaaatttatcgaaatttatttttttttatcgttttcaatcaaaaagtaattaccgtatttactagcccccgggggctctattgttcaattcccctcggaaagagggttataatcgagtgtaaatacggtagtaattaattaattatacagataaaaaactaaatagatttgttttgcgttcctttgaatattttccccttgtgtttctttttgtgcgaccaaaattaataatcaaaacaataagaatctgatg

SEQ ID NO: 118209 - DNA, 205 bp, Heterodera glycines
tattgtccaacccctcgggcccatttgcaacaatttaaggcaaacaaaattcaaaaattgttgaataaaatgtgattttcgttagaatttttggttttccgcttttctcattatataaaaataaagtttccaacgcaattaattcttctgctatttgtgtgacatcattcggaactcggccaaattgtgctaattgccaaaaatg

SEQ ID NO: 118210 - DNA, 548 bp, Heterodera glycines
aaaactaacaaacaacttatttagttaatcaaaagggcgcgccacgaaatcaatgcaccaccagcagtcccgaccaatttgaattttgagatcggccaagcatacaggacctacacatcgacgggtggcgctgaggagctgtttctttctattgggcgactccggggtgtattttgaaaatggaaacgaaaacctgcaacggtaatttgtgaaaaaatgcaaaaatttttttcgcagagttttattgtttgggcgcgaatcatttggacgctttgcggacagaatgactgagtgtttcggtgacggaactttctcgctcgcgccagcccaattttatcaaatttatacgatcctggcaaagtctgtttgtcttaaatcggttttcaaatttgtaaattaaaatatttagacgtgaaaaatggattttcccagtgtgccatgccctaatgacttccaaatcgcaaacatcgtacgaaagaatgtttacacttttgcgtgctgcgtggccaaattttgctcccatttctttttccgtggattttgaaatg

SEQ ID NO: 118211 - DNA, 658 bp, Heterodera glycines
aattaaaagcggtttaatgttcaaatcaacttccatccatttttttcgtccaaaagttttcttgcggatttccatttaaaaagatttatttttaaatttaaattatttaattaattaaataatcaaataacactttttcgtcttctccaattgaatataaatagctcaaatcccctgctgctttttgttcattgctaaatgttctcttttatttgtcgtgtccgggtaacctaaattaccttaattattttttgaaaaatttctaataacctattaatcaaattttttgatgttctgttccgttccatgccataaacaaaaataatcgccagaactgcagcaattcttatgctcataataatgcctttctaaaatgtaatttactataataatggaaatagtcataaataagaagttcttaatcaaaaatgttcacaatgaatttcatcaataaaatttatggatagagaggctaaaaaaaaaaaggtcttcggaccggacccctccctttccccccccccccccgaaaatttttcctggctacgggcttgattgtatgcgaatttgagtcgaatttcgcattcttgaatgtcagttataatacaatttttagctttataatgaagtgtcggctctgtacgcgacctccgaccaaatg

SEQ ID NO: 118212 - DNA, 804 bp, Heterodera glycines
  unsure (1)..(804): unsure at all n locations
agtgatgttgccgccncatttcgcttccaaaattttccgggtgaaccccgagaatggcctttattttggaagctgtttgagacttcagttgaaagtcttcaaattgaagacttcaaaaaacacatttatctcttgggatgtcttcccgagaagtcagttgctcgaagagcaattgatttgtacccgccttcagatgaaaactacccgcgagtggtagaaatcctcaagaaaagatttggggatgagaagtcaattgtggagacactccaatcagagttgctccatctttcaaaaccgtcagattcggttcaatctctgaggcagttttcagagtccattgaaaggatttgtcagcagttgtcagattttggagaaaatgaacaaaataagttcatggcctccacgataaaatccaaattgccatactatctcctcactcaagtggtggagaaggaaatgcgttcaggtggaacatttgattgttccgacctacgcaaggcaatcacttccattgttgaagtgaaggaagaagtacaaagatgtacacaagtcttccgtggggaagaaaaaccccgaaattttcctcctcaaatgcagaggaacaatttccaagggagaggaacaaatttctctcccaaccaatttcgtcagggtcattggcgacccaacaacagaaatgagtctgtggggatgatgtctccccaaatacacagatcatttaacactgttaatcagagggaacaaacacatttttctcctcgagaacgaggaacgaacccactttgttctctttgtagtgacatg

SEQ ID NO: 118213 - DNA, 295 bp, Heterodera glycines
actcaaaatttaaaaaaaaattgggtcgacaaggtccgaaaattgcccttaagaaacggtccgccaatgtccgggacgcaaatgtcgcgggccgcaaaagtccgattttggcttaggccgcaccaaaaaaaaactgggccgaaaatgtccgttaatggatcttaagaaacgggccgcaaatgtccaggattcaaatgagaaaaaattaccaagaaaatccaatgatgaaaatgcaaaaaaaggaaatattaaataaaggaaatttggatttttaaaatcctttttttagaaaatg

SEQ ID NO: 118214 - DNA, 469 bp, Heterodera glycines
aaataaaatagaaaaaatgaatttaattgcaagaaaacatgaaattttgtttgctaattttattttttgtttccaaaaattgaaatttttgtacaaaaattttcctgaaaaacgagataaatttaaataacgaaaaattaattttttaaaaagcttaatttaaattagcaattcacttaagtaaataaagtcacaataaataaaatggaaaaagaattgaatttgaataaaaagaaaatgaaaaagagttttagagaaaaaagcgggaacttatttaaagaattcttttgaaattaaatctgacaaaattttttagggaataaaaatatatgcgctaaatagactaagaaatgttaaatatgcatataaaactttaaaaaatgcctaaatattttttctaaattgacgataaaaaaattgaaaccggcaaaatgcaatcaaattttgaggaaatatttggcgaagaatg

SEQ ID NO: 118215 - DNA, 62 bp, Heterodera glycines
tggttcgggtaaaatattagcgaatgtcccgaaatgacaactaattattgtggtagaaaatg

SEQ ID NO: 118216 - DNA, 255 bp, Heterodera glycines
tttcttctaattaagaatttaaaaatatattttaaactttccacctaataatacttaatctattctacttccaatttattggaaccccttaaataatatcggttccaaaggtaatggttttcatgaactaaggtgggtattttgttcagacgacatggatttgattgagccgcttttccaattcttttcactctcgaaaagaatgaatttttgctagaatccaaagacttcaattattcacattttttttcaatg

SEQ ID NO: 118217 - DNA, 801 bp, Heterodera glycines
ttggctttgtcccctcaaccaaatgtttgccgtaacaccggcaattcccttttctctgtttttaatgcaaatttctttctttgctcagttttgtgcttcggtgttcacaatggtcgcgataagcattgatcggtcgttagtttgagtcaattagctaatcgctcttttttcttcagttactttgccattctttacccgttgcaacgtcgcccttggggtggcaattcgaatgctaaacaattaatgcattcattaagcagatgaactccatccaatcactccttttcaggaaccaatggcaatcgctgctgcgcattaacaatttgtgccatttggacaatttcccttctcttcggggcacccgccctttacgtttatggtacgaccagtttaagaagcagaaagtgcctgccatttgttcagatacggtcgagaatgcctttttggtgcgtgggagggaagtgctcaattcgacgcgaacgatttgcgacgtaattccgtcaaaaaggggcgcctttttgctgtgaggcgtcgcattaattattcattccttaattgcttttaattgtcaaatcccttcgcagttacaatgcttcgcttgtgcttctccaatttttgttgccttttgccattctcattttcacttatgggcgaattgcgcacgaattgtgcaaaaaacaaacgcccgaaaataaaccgaaggaatcatttctgaaggcaaagcgaagggtgggcgaagcaaagaaagcgcaacgcaattagtgctaattggccaattagcatttgttatcgtttcagatg

SEQ ID NO: 118218 - DNA, 125 bp, Heterodera glycines
  unsure (1)..(125): unsure at all n locations
ttcattttactagggcttgaattacatggaagaatttgcttcttttttggtgcatcatttaattaaatttcaaaatccanaattaatactttaaaataaaatttctcccgcaaatttgaacaatg

SEQ ID NO: 118219 - DNA, 410 bp, Heterodera glycines
  unsure (1)..(410): unsure at all n locations
ttttttaaattnngtttnggtgcttctagggacgtatttcccatatgcgtatttgcatatttgtgcatacttcgcatagtgcatattttgtgcacatattttgcgatttattatatgtatatttttggacacacaaattccttttaacgaaaatgaattaattgtttttgtgtaaaaaaaccactagaatttcaaatggctattaattaggtacggtactttttttaagaaaatctttgacttttgaaaaatttgggcattttagcatgaaaagacaagcattattttaataaaactttaaattttctaaattatattggtgaactttgaatttaaaataatttttcgccaaattaaaactattttaaaatgggccattaataattcaacacattttctttttcaaaatg

SEQ ID NO: 118220 - DNA, 448 bp, Heterodera glycines
cgtccgagtatgtgcaatttggtggatacaacatttatcgggggttgccctatcagcgtggagcgggagttggcgcagtgttcagaagtcttatgagatacttgctgccgattggaaagcaaattggctccgcaattggacgtcagggaatggaaagcggaaatcgagtactcaccaatgtgctagagggaaaagacctcaaagagtctctcgttagtgagagtaaggcaggactaaagaatcttctcgaaaaagcagccaacaacataaacactcagaagggtcaaggttttgattttaagcgatacaaaaaagactcggctcccaaaattggaaaaataaggcgaaaaaatataaataaacttcaatcgtcagtcgggccaccaatggttgtaaagaccaaaaataaacgtctgcgtgttgactcactaggaacttactaaaaatg

SEQ ID NO: 118221 - DNA, 530 bp, Heterodera glycines
tattgatctcaatttgtctttatgactgcttatcatattgataaactttcactcttgtgcttgaatctaccttactcttgctttctttttccgattacattggctcgtttccttatgtacgacttagaatagatctggtcaaccccggggggttcgacaaggcgtcggtgttaggttattgggcaatggcttcggagtaagaagcccggctagtcttaacggataggccgggtttgtctagcggaattgactcatccgctagttaggggcggttggggaggttactccgaaagtcatgctgagatagcctgtgctgtggcgccgaagctatgagaatcttatctcctagccagatcgaaagtgcaatgagacccgtagatatcaaccccgaggtattgaataaatgcccgggagggaccagtagagtgggtacctgctggtcctgggtagggtaagtgatcggtggtttttccgcagaggcggtgctacaccaggtcgaacgccagaaccgtactgcatagaataatatg

SEQ ID NO: 118222 - DNA, 136 bp, Heterodera glycines
gcataaattcgataatttacaaaaatttagcgtttttccacctaatggacgtgggaatgaggacttttccttatttggaataattaatgggcagcgtgttgatgtggtaatgtgccaaaaaatttagcgcaaaatg

SEQ ID NO: 118223 - DNA, 133 bp, Heterodera glycines
attatatttgagaaatggtcgttggtctgatgctctcatttgatttgtgtttctttcgtttgaatacaatatacttttaataacaattgaaaagtttaagcctataaaattgtttttggcccggttaaaaatg

SEQ ID NO: 118224 - DNA, 79 bp, Heterodera glycines
ttcttccttggaactatctaaaagagagcatagaaaagcaaaaagtcaaatacagtagcagaagggataaggtgctatg

SEQ ID NO: 118225 - DNA, 523 bp, Heterodera glycines
tgcttatgatttggaaacggtgacaaaaaacaaagaaccgttaaaaaaatgtttaattttactgtaatttaaattatttttaaaataaaatattttaatattaaagaaaatatttaatttaaaaatttaagaataaaaaattgtttttttattgtaatccaactaaaattatttatattaaaaaataaatttaattcattaaatgaatggataaaaaaattttaatgtaaaattaagaatttattcaaaaataatttttaaattaaattaattcatttaataataaatcagctagttcaaacttcgtgaaatttttgtacttaaatccgttttctaataatcttttttcctttatttctgaagatgaatgaattggattcggtgtgcaatttcgaatggcgaattttcgatttcagtcaaatggtggaaggacgggttcgccaccttaaaagtttcgcgtggaagttttttgtgtgggcggtaaattttttaaattttgaatttaaaatgattcgttaaaatg

SEQ ID NO: 118226 - DNA, 198 bp, Heterodera glycines
gtgaagaagagggagagaggaatggagaattggaatgaatcaaatgatcagaaaatgggaagactgatcaaagacaaaagagaacaaaaagtgattggaaatcgatggcacggggggggggaacgatggaagaatggcatgaaatgtcaaactgatcagctaaggcactctgatcaaaatccatggcattggcagatg

SEQ ID NO: 118227 - DNA, 200 bp, Heterodera glycines
aattaattttaatttttttaaatttaaatttttgcgttttaaagcgtttcaacttcttctgaaataaccaaaaaaatgattgaaatgaataaacaagtttctcgaaatctgcttgttcagggttcattaatcatttattattgtaaattaaaaaatatatatttttttaatttaattttttgtttatttaggcttcgatg

SEQ ID NO: 118228 - DNA, 509 bp, Heterodera glycines
tggcgcgaatattcagagaaatgaccagcggagtatggcccgatcgcttaaccccccccccctttcccatccactttagttctccaaatttttgtttcttttgtcaatttgtcgtcttttcattgtccaaatggccatacagatgttatcttcctttgtttggctcggggagtgatcaacaaagattagtactaggaatattggacacaaaagaataagtaactttaggcgccccactgacatgatttggcggcggcaaaatttgaatttaatgaatgtgttataaaatttgttgaaattgtgattaggggacggtcggggaaattttatgtattaagagtcattctaaagtaatttataattctgcaacataagtaaaacaatctgaacccaaatattccgataattttgcgtgaaaaatgggacagatcaattcatagctacctcatttttagttgacttaaataatttgatttgtttattagtgccggcaccgtcaccgagacatg

SEQ ID NO: 118229 - DNA, 1003 bp, Heterodera glycines
tcaactactgtatttcgtcggtaataattagggcttccaattatatggaaatccatatttttttcctggactgtgggaggtctgaaacgcacgaaaaacatgtttttaacttggtttaaagcttctaggatgggtttccatatccatttttcgtatatttttccatatttcgcgatttatgcagggctcggatcgaaaatttttcaaaataagagcatcaaggccaaaaaataagattttagggtcaaaaataagaacatttcgcaaaattgcttcaaatcagttatttttacaatttattcgatcaaaaatgtatcaaatagtatatttttgtctcccattaacgattttaacaattttggggaggaaattagcaaatcataaaattttagtgcattcaggataaaaaaaatcagatttttaacaattttttgcggcgcatttttccaaaaaacttttgggaagtgcgaggggaggaaaaattttttgtaatttaattctgatttgttacagattttcaccaaaaaaggccaatttttgtattaaaagccaagcgacgactttttttgcctttaaaaatactttttttgcggtgcgttttttcaaaaacttttggggaacaatgggggagatggtccggtgacgccgataggcgacgccgggaaaaactttgtaatttttaatgcgatttgctaacagttttttgtcaaaaaataaccaaattttgcgcaaaccttatattttcttgataaaatagtgacattctgccataaaatttcaaaattttgaatatatttaagaaataagaacaaaataagaacaatagcccgaaataaggacaaatcttacaaataaggacagatacgcgccctgaattaaacataaagttctttaaagtttttcccactttatgtccaatgaatgaaaaagcagaatttcttgtttctcatttaacttaacccattctattctaattttgcatttgctattcagattggccatg

SEQ ID NO: 118230 - DNA, 664 bp, Heterodera glycines
ttgacatttaaaaattattttctgatgaaattaaatttattttaatacaaatatatttaataaaattattaattaattattaattaattttgtaaattttttagtgatgcgtttttttgtcttcgtgtctgtcgcgcctaattaccctaattaccccccccctgcggcgattgttttgtgactgacaaataattgtaaaaattttatgatttatataaatttaaattttttaggctttaggctctaaaaagaaaaacctagaaaataggccctaataactcgaaaagtaccttaacaaccaccaaaaaacaacaacaacttgtttttcgtgtatttcagaccatagggagctcagcaaataaaaattgaagccctagtgatgaagtgtgaaaacatccaatgggacgtaattacgaaatggcatttgaaattatgatgaaattcatggcttttaattattttaatattatttattaatattttattattaagaaaatctattgatgatcagtttcacttattgatcgcatttttggcaatgcttctccacattcattaaaatgaaataaaaaattattttccgaagaaattagcttaattttaatacaaatatatatattaaaaacttattaattaattatttattatactttttttagtgatg

SEQ ID NO: 118231 - DNA, 300 bp, Heterodera glycines
gaatattttattttaattattctaaattacaaaatctttcggacccgtgtaaccctagaaaatattatggacaatgccaatcagcacttcatcatttttttattattttacacataaaataggcatatatttccttccagcatttacatttttagcttcatgggtcgttgcaatggttttcattgcgaaggggcggcgttgggaggggggggggggggggggaaatcgaaaaggcatttcaaaattatattcatgaaaaagccaaaagctttggctacagcaaaatcatagaatccaatg

SEQ ID NO: 118232 - DNA, 534 bp, Heterodera glycines
gattttttgaaactcatcttaaaaatcaaaaaaagtttgaaaaaattaagtgattgcttagaaacatctaaaaatatctacttaataataataatgtatttttaaattaatttaatctttttttgaaaattaaaaaaaacatcggtcacttgaaataataaattctaaaattttgtccaggaaaatccaggtttttcgtgttttgcctggacctggacctggattttttttcacattggacctggatttcctggacaaaaatccaggaaaaatccaggttgccgaaaaatgacctggacctggattcaggaaaaatccaggcctggatccagttccaggccgagctctaaacgtttcattaacgcgttttacgcaagcttaatttataaatgcagaataaaagaaaccagccaaaatttaccaaatttttctttgaaattactaaattttagccttattttaaaacgattttcatagcaaaccgtattcaattttacttttcagtcactgcaattactgtacttccgcgcaatg

SEQ ID NO: 118233 - DNA, 1003 bp, Heterodera glycines
tttttttttcggcgacattgtcttatcgacggcgactttctgatgaaccgaatttctacatataattgatgacattttgctggttttttccaaattaacatgtgaaaatttaaacttttaccaatccggaatccggttccgaatccggcaatttgaaaatctgggttgaccggattttgagagaccggacccagaatccggcacttttagttgaaaattttgggggttttagagcctaaaaatatcagcctaaaagtcataatgcgtagtgttcctataagcatgaaagtaaaccatctttaataattatatttaggaatttaactgcaaataatcaatttaaaattatggaaatgaattttctgaaaacaatacaaataattgcgtcggcagaaaacaaattgatcagtgaaaagtgtccatcatatattaataaagaaagtaataatgattttttcaaattgctcttcacattggcactccgtctgggtttgttcatcggatcaaatgaatttgttgaacaatatttgccggctttattaagtcaattagaattacgcccaaaaaacaataatgataagttagtaaattaaaaaatatataaataatattaaattaatatgagattaattattgggtaagaaaaatacgcaaaatatgtaaataaatattaaaatttccggattaaactcataaatgaacttttgataaagtaaaataaaagattttttaataagtttttgttttaaaaaggcaaaaaatgactaattttatctttaattacgtttttcaatcactcagttaatgtcaaatctggcatcatttgaaatatctaagtgtgtttccacatttacatgtcaaaatataaaggaatttcaatagtaaaaaagttatggcatgtggcgccgaaaaagcaaaaaaaaaaaaagtcaatttttgatgtttttagacataactttttttttgtaaattgacgatgtaatttgtaggctaatagagaatg

SEQ ID NO: 118234 - DNA, 286 bp, Heterodera glycines
tgcagtttaacagaagaaagagaagaagcaaattcattcactatttgaatgtgtaaaatgccgggaattaagaaaagtgcgcacggagagaaaaaagaaagaaaaataattgccttttaacgaattttaagcatcgaaaagggccaaagggggggggggcggcaccaaaggcaaaaggccgtgcgcggaattaccaccacccattcgttatttgtgcttcgtatctcatcatttattttgctttgattattcgctttgctctcttaattttatttaaatggccatg

SEQ ID NO: 118235 - DNA, 506 bp, Heterodera glycines
tctagagtcatgtgtcaaaaataaaagtgaaacaataaattgcacgttaatgtgttgccaatttgttgattttttgctgcattaaataaatgcaaactaagtgactcacgattttaaatttaggaaggtagactttaaaatgcaattggataaaaatgaaaataatgcataaataagtcgcggacatacaatgcatccttgacgcaaaaaaagattacgctgttttccggaactcaacgcggtagttacaacaaaatgaatattttactaacaaaccaaaaccccaagaaatcaaatagcattgaatttatatattgaaaattgttaagaactcatcatcaccttttttacggaagtaacttttaagttgcacaagatttatcagcttgttgccgaaaaagagtctttattatagaaaaataatttttatatttaaaatttatagatttgttattattatatttccgtcaagaatttaaatatcaattaaattaattttaatcatg

SEQ ID NO: 118236 - DNA, 191 bp, Heterodera glycines
taattatccctgccggtgcaagttcactcatcacaatttacaatgcgcagggaaattttgcaggtttattcatttgaaaaatattataaattaatttatgttaaggatgtgcgttacgtaagcacgggaagaaaagaagcaatttagcagtaaacgagagaatgagctgttactgcaaatcccaaagaatg

SEQ ID NO: 118237 - DNA, 1003 bp, Heterodera glycines
gtccctaatttatgtagcgaacatcatgattatagcaacaacggcaaacaatattaaaatataataatttttgtttatttatagacgtattgcaatgtaaaaaatttgtataaatgaataactattaaaattattaaacttatattcacatataatgttggcaaacaactgactgatatttttgacagacacttcttttcacgaataacaaagaatatatatattcaatcgaaaagtttgtataataatattatatcataaaatttaattccaaacaataaattaataagtcatagcgctacttttattaatgagacatcaagtctgtacagcaggattttgcatatttcgtcaatttatcagcaattagatgaattattatattatattactcatagtaaaaaaaagtaaaaaataaaaaaattattaaaatgttaattaaaagaccaaaataataaaggtacttttttcataaatataaatttttgtgtataaattgtcaaaagaaatgcatttgagtcaaaagttcatttatctatcaaatacaacaaaaaatgaatttaaataatttataaaaaatattaattaagtaatttctggataaaggccgcgattttatcaagaaggtgaggatcgttaaaaattttattgaaaaagacggaaatcactgtgataaacccaaattataatatgataaagactaaaaggtctttttacataaatgacatgatagacacaaattaaaagatattttaaataaataatttttcgtgaaactatcagccaataattgattaaaaattatttattaaaattatatataaaattcctttattttttattgtatccaattaaacgggccataaaattcaaattggcagagaatatattaatgagtatttaaaatacaaatatttttttatatccttatttagcattccataaacttaaagtataatcaataaacgaggagatgcacaatttccgcaccgacttcaacatg

SEQ ID NO: 118238 - DNA, 59 bp, Heterodera glycines
  unsure (1)..(59): unsure at all n locations
tggtgcaagaagattttgtcaaatttgtgagcagtgaaaaattggcatgcattntgatg

SEQ ID NO: 118239 - DNA, 79 bp, Heterodera glycines
ggtgcctatgttcattttttaaaattctttttatttggattttaattattttgacaggtataagccaattgatccgatg

SEQ ID NO: 118240 - DNA, 83 bp, Heterodera glycines
aaaaattcgctttttgttctaaaatgaggtaaaataataaaattaatctgaaaccattgaaagaccaaaaaatattcattatg

SEQ ID NO: 118241 - DNA, 233 bp, Heterodera glycines
tttttcgcctgtaattgttatttttttcataaaatacattgattttttaaaaagtagacttcaacaaatattggcattggcaacgcaagcagaatttattcaatttatgcaaagatcataaaattatatttgcgttggcaaacaaattaaatttcttcagcgtttttttcgccatttatatttccttattattattattaaataattattattttgttgattgtattcctatg

SEQ ID NO: 118242 - DNA, 268 bp, Heterodera glycines
aatttttttatcccatttctaattttttttttcgaccccctcaacgtgggaggggcattggtaaaatgttatgcccctttttgaagcctcctctgcattttcatgcaatacctcctcctcattgttttgcaattccatcatgttcaggtgcacagagctcgcaacaaatggaaatttactctcaaagatggggtattttattaacaaatttgcacatttttcaccaaatatgtcataattgtaaatttttgtcttttttcaggtaatg

SEQ ID NO: 118243 - DNA, 68 bp, Heterodera glycines
tgtatgatttggcttggttttttctttaattttatgaaaatcgaatttcagggtgtatggtcggcatg

SEQ ID NO: 118244 - DNA, 104 bp, Heterodera glycines
catcgcgaagcatagcttagaaaacgcttagaaaaatcttataaatatgttaagctttcaaatgataccaaaaacatttgatttggatatagtgtgaaagcatg

SEQ ID NO: 118245 - DNA, 470 bp, Heterodera glycines
  unsure (1)..(470): unsure at all n locations
aattgaatgaggtacattcaaagggctaatgctcttctacataggaagncttcatagtangnagntnttcggnaacgctttctcgggaaanttanaaaagatggngangnngtnaaatatgatgaattgattgaggattgcatcannattttttgtctacaatccatgaggcaaaattgatcgaagcaacttccgtgtcatcaaggacagtgaattcagtgaagccaaaccaaagaagggaaagaccaaagccacaatccaagcaaggccaaccaaacgcaactccaactcagcttcaatgttggagatgtgggaaaacgaaccacacccacagagaatgctcgcacaaatcggctaagtgtcccaaatgtcactacaccggccatttggagaaccaatgcgaaaaagtgcaagagtggcgccgcaaaaacttcaaagtgaagaaagttggaacgcttagcattggaatg

SEQ ID NO: 118246 - DNA, 607 bp, Heterodera glycines
ttatcagttttatagatgataacttttttctttctaaatgaatcaaataatttaaaatattaaatttatcctgtaattggactaattcggtctcgagatttgggactttgttttcgagaatcgtgacaaaaagtattcgtttttttgaaaattctttacataaataaagaccttggctgactttggcactaagacaaaacaaaattaaagccaatggaattttttttgatattattctgtaatgcttccaaacaggaaaaaagactaattgatggttacatttcgtcattaattataagaaattgaatttttacgcctaatttaaatagtcattttccgttaattaatgggcatgcctttcatatgaattaaatgctaattactgcattttcttcttctatttttatgttttacatcgtaattaattgatggactggttccgttgtgtgattatatttacgtttgttgaagaaaaaattataaaaaatgatttaataggcgaataaaatttcgttgaattacttaagcatattcatttttttgttaattaatgtgtttttcatgtgaattatatttgatgattacacgcactaattaacaaagtatg

SEQ ID NO: 118247 - DNA, 1003 bp, Heterodera glycines
ctggcaaaccactaaaaattgtcaccaccaccaccaacaccaataccacaggaacataaccaccgccaacaccaataccaacaggaacacaaccaccgccaaaaacaacaaaaacagcagcagcaaaatcaccacccctacaacaaaaactgcaaaattggttgtggatgagcagttgccagtcgcaacactcctcccaacattgattcaccaaatgtgcaaggatcgtcccggggaagaaaacttttatcagcaagccatctgttgggcactttttgcgctctatttaatggtgattgtcagtctggtacttcatcagctttgttctatctgttggttaaaaaagaaaaaggagtatggacagcgcgcagatttcgactattttgaggcaaagtcgggaaaccgcacgagttttccggggctgtttcccaagtgaccagctcccagcgccggacacgctacggtacccagcggcgctagttgtgaacaacgacccacactacaaacaaggatcccattggtgcgcgatttatgccccttcaaagacggaggaagcggtcatatattttgatagtctcacaaaaacaattcctcctattgtaaagacatcatttatggataaatttccaaaaggttttgttacaaataagcacccgtaccagtccccactcactaccacatgtgcaattcactgtatagtgttcatttatcatatggccttaggtcacccatttgatgcatttctgcgcatattagacgctagtgaaagccccgacatgtattctttgtgcattttgaataaaatgattaatccgtatttgtgtgtgcgtgccaattttagtctccctcggggaaagggcatagggaatgattgattaatttattataccacggcgcacatcgcgcgctgttggtgcctaccgcatatatacaatgaattgacgcgggaaaggctcactttttcgcaaaaataaattaaatatattaataaataataataatg

SEQ ID NO: 118248 - DNA, 994 bp, Heterodera glycines
gtacataattagtaataatttaataacaaaagaaaatgccattgctcacccaatgcaacatctgtggacactcaaataaaagtggacattgtttaaattgttcaaattttcatctttttggcaaactgtcgccgcctccccaaaaattgggcatcgtttcataatcaaactataaaaattgggttcttttttctccaccaatatcagcttttccctggttcgttcgttcaccacatcgaatggctcaatcattggcgttgatccaaaaatgataaaagtgtaactggtagaagttgtggcatggagaaatgcctaaacaatcaacgagtaaatggcatgcccaaaaaaccaagcattagcttgtttttcaaggcaaaaaaatgcttaagactcattcaagcagcatattaatcaaacagggctggtcaaaaatatacaagaaaaatggccaaaatatgcgcataaatatgcaaataaaatcgtgaaatatgcaccaaatatgcacaaaaatcgcaaagtattcaccaaatatgcacaaaaacttgaaaattaggggtgcaaaataattaaaaaattttattttttatcagtttttgcaattgaaaaccaaaaatttctcaagattttcggcagtgaaactcactgttgacccactcgcgcatccttcagatttggatttaggtaattttggcataatcaaattttttcctaagggatattcaaatcgaaaaatatttaatgaaaaatggcaaaatatgcaacaaaaaaaaattttgttcataaaatggcaaaatatgcagaaaaaccaaaaatatgcaaaagtcccggtttttatacgcaaatagcaaaaagaagatgtttttcatactaattagactgcgcagaatttttgtagaatttggtttcattttcaaaaaagaccaaaaaatgaacgaaaataaattgaccaaatttcgcgatgttggggcaaacaaaaaataaatcacgaaatatg

SEQ ID NO: 118249 - DNA, 239 bp, Heterodera glycines
ggccctaaagttatggattgagctcacaattaaggcacctaatagcgcaaaatggcactgaaaaaaggcacaaaaatcccgacttaggcatgaaaaaaggcatttaaatttttttattaatgatttttagggagtaaaacacgtaaaaactaaccaaaaaactaaattttgctgatttattgataattcaattttataatgtttttcaataaggaaatttttaatcaagaaaaaaaatg

SEQ ID NO: 118250 - DNA, 147 bp, Heterodera glycines
agtttgttttgctataaacaatttgatagtgttaattcatccatttcaactgcggataaaaaatcaaattctttattttaacattgtcagatcattttcaataacactgaaacttcgtctcgcggcaatttcaagtcgttgtcaatg

SEQ ID NO: 118251 - DNA, 239 bp, Heterodera glycines
tttatttgtaataaaaagaaactgaatctatgaataacattaaagaaaataactggactaaaaaattgtttcccaatttttaggcggtcagaaagacaaataggggtagcaaaattttcaattaggtaaaataaaatttagttattaaagcgaaaattactgttcgatgagaaagttagagaaagttaaaaggggatagagacaaagacataagcaaaggaagggaaagaaaggcaatg

SEQ ID NO: 118252 - DNA, 232 bp, Heterodera glycines
ttatttatttatttattccgacaactaaaaggaagtaaagaaaaaattatggtaaaaatacagtttttcatttaattactctgatgtaaaaaatcttaaattgaattacatactgtaaattaatgcctattggctggcaatgacaaaagcatggccaggatttaaacgaagcacttctcactttttttatcacataaattatataatttgaattttaatatgtatatagatg

SEQ ID NO: 118253 - DNA, 350 bp, Heterodera glycines
ttttacaaaaataaaagtcttcaacaaataaaaattttttgaaaatagtttaaaaaactcataaaatattaattttaaaaaccaaaaataaaagataattttataatggagttactttatgtgaaagatggtaagacttggattcaaggggtaaagcaaaaatacgtttaatgattcttaaatggtgtataattaataggaatgaccattttttggcgtaaacccactagttcatggtgaaatgcatttttttcaaagtttaaaaatgtgttgttaaatcttaagttctttgcaataatcctttattttttgcttatatacaagtatattattatttttgctttaaaatg

SEQ ID NO: 118254 - DNA, 99 bp, Heterodera glycines
tctttcctgaatatagttaaattcattctttaaaaaaagagggcggtttttttctttttttaaattatttaataataaattattaattttagagaaatg

SEQ ID NO: 118255 - DNA, 171 bp, Heterodera glycines
tatttttcaataatttttaaatttaatagatactttagaaaaatggctatctatttttttgagaaattttctatgcaacaaacgctctcgaacatgaaacgaagtgcggtgcgccgtggccattttatttttcaaataatttttaaatttaatacatattccagaaaaatg

SEQ ID NO: 118256 - DNA, 320 bp, Heterodera glycines
tcgctgctatccgtcattctcaattgttttccgtaattttacccaaatcgatttctttttccacccagcagaacacatcaaaatggtgttgttagtccgcggcgttacgcggaaactctcttctgactcggtttgtgtgatggctgcagggatgtcattaaaaatttttttttgttcataaccaatcagtagaaatactggtttttaaatcaaaattttccattaccgattttccgttaattatcgaccacaattataatttgtctaaattaagggaaaaagcattcaattttttttattgtctttttttgcacaaaatg

SEQ ID NO: 118257 - DNA, 989 bp, Heterodera glycines
ttattagtgcgtcctatatttcaaggacaaaatcatgcatattccattaaatcactcccgttagctcttggaaaaggcaatttcatgaataaattttttattcacaatcgtggcgcaaatgtaggggcgcaaatgtaggggcgcaaatgtaggggcgcaaatgtaggggcgcaaatgtaggggcgcaaatgttcggggcgcaaatgttcagtcaccctatcaaaatatgttttttatgttgctaaaaactcgctctgattgaaaggaaaacaggtaaaaatgctatttttgagcttttcatgcgatggcatatgcgcaaaaaaaatatgtaaaaacatataaatccgttccctgataataaatttgaatgtttcttttatagttttgttccctcaattaaattacattttttataaacaattttttccaaaattcctactcaatatttttcgttttaagggtgtttttttgtttcccttatgattagagaacgtaaaaaaggcacaaatgtttaataggcataaaaaattgggaaaaagcacgaaaatcccgaaaaaggcatgaaaaaggcatttaaaaattttttattaagtatttttagtgagcaaaacacgtaaaacttaatcaaaaaacttaattttggtcatttaaatggtttttaaattttttttttcgaataaggaaaatttttaaacctaaaattttttatcaagaaaaaaaaaattaaattttggcaatcaatttttgagaaaaattttcaattcttaggggtgtattttctgaatatagctaaattctgggttaaagcaaacagacacaaaaaaatattctttaatatactcaaaaaatactgaatcccggattcttttttcttaatgtcaacatttttttgttgttattttcttgtgacagactttaagcattcgtttgatatcaaaaagttagcattgatcaattaagaaaaattatggcacaagaagctaaggatg

SEQ ID NO: 118258 - DNA, 623 bp, Heterodera glycines
  unsure (1)..(623): unsure at all n locations
tgctttaaattcaaccgtaattggggttttaggtgatcaatttgcagtcgaaaaaagtcattttccttcaaaatccgagaaaaccaagacggtatcaatttattttcgtgatcagtgacctcgataatcccaatatgaatttttttttaattttgtgaggaggaggaggaggtagcaaaacacggaagtacctaatatccatcaaccatcaccctgcgcaaaaatgacaagctaattggtacgaaatcacaattattcagaattttagattggacataaattttgacaaaaaaaaacggatacaaacaaatacatgtaccaaaaaatgcaaatgatcagaggaaaatgacacaattgtataaaaacgtgccttatatacacacccaaagcaattggtatttgcattgtcaaaaacatttgttgcgatggaaacatgttttcatgatttttgaaaacaaaattattttttcaaaaaaatggctgaggaatttgtctataaaagggcgagaatttggcatttccaatcatttcaatcgttccctttattctaatttgctattcttctatccacttcttcgactacaacaacnccatttcaagtgcacaacagcgntggacgcatg

SEQ ID NO: 118259 - DNA, 602 bp, Heterodera glycines
aaaaatctctcaacaaatcataattttttacttaaaaaaatgagagacaatttaaagaaactctaattaattttcatttgaataaaacttaatttttttatttataataataaaaatcaaaaattaatcggtgagtgataaattgggaagaagaaataattcgtgtgaatggatcaaatttgataaataataaaatctcatcactcttttaattcccaaaaaatattcaagaatttatctcttttttaaaaaataattaaaataatttaatttaatttaaatataattcaaatttcttttttaatttccaaaaattcaaaattaataaaaattaatataattattttaatacattaatatataattttgaattgtaataattttgttttatcttttaaagaccaaaaattaatcagtgagtgaatgggaaaaagcacattatttgcatggcttatttttttgtatataaaaagacttaaaataattttaggaatttatttactaattatttgcacaaaaataagtatataattttataacaatttttattaatttgccaattttgtcaaggaaaaaagctcaaaatattttctacaaaaatg

SEQ ID NO: 118260 - DNA, 288 bp, Heterodera glycines
aatttttaatggtcgcaattacgaaagccaaggcatatttgctaaaacaaagccaaattctgagtttcaaaatacaaatactttattttccaatgttcggtttttgcccccccattcaattttcaaataattttttctaacttaaaatgtggttttgtgaaccctcatttttatggtaatttggtacttttcttcttttctacatcgttttacaacagcatgcatttccttgccccattttgcgtgttcaatttaatttcctattttttccagcgaacccacgaaatg

SEQ ID NO: 118261 - DNA, 642 bp, Heterodera glycines
tttcggccccgagttggcgccaccaatgaaacaatgttgggcataaaaattagtttttatgcttttcatttttagtttattgttagagaaggaagtaattattgattaggtgtatgaccccacgccacttcgccatcttccccctcccattcccctcattcagttgttattgtgcccaccgattttgacctcccaatttatattctctgcatttatttattattttattttcttcggcaaataaacttatttaatttgttatcttcggacataacaaattttggcgcagtcagcagctcaacgacagcgtttattttccaagctttatctcgtgctgatattgcttgtggtgattcatcataaaccgatctttgccatattttacggcacggtttatcaacaatctgtgcaactaaaccgcatctttgccatatcttacggcacggtttatcaacaatttgtgcgacataaaccgaatctttgccgtatctcaaggcacggtttcatcttcgacaagaaccgatttttgccaaatctcgaggcacggttatcgtctatttcaagccaattttacggcacatcatttctccgatttcggcaaattaaagtctgccgtgtgcagtttttcttcaattggccatg

SEQ ID NO: 118262 - DNA, 1003 bp, Heterodera glycines
gtcctctatgttgtatttgataagaaataatggttttaatgacaattttcgttaagttttttcaaaataatcatgaaatttatgaaaaattttggcaccctcccatagcctgctagccttgcatttcatcatcagcatgctccccagaaaattctcttctccttcattagtgttatagaattgatgagcgtaaatatgttatacacatgtacatagtagccacattattactataattgcaataattaattaagtaataattatcaaaacgtggaaaggcggggaaaggcccgctgagcacgcccaaccgcagttgtaatgcgcctggttttcattttcgggacacgtttgtgcaatttgtttcaattaagggacgtttcaggaaaaaacaacaaccaaaaaacgaagttcgttccactgggccctctctttttttctccgctgccgacgccccaaaaatctgggcgggacaaatttttcgatggtttcgcgcaaagaaattaattaataaaaaataaaaatgaaaggcaaaatcaaacaagacaaaacggaaaattgaaatgacttacgaaggtgaaaaagaagggaaaaaggcaaaggaggagagaaatgggggaggggggacacgtcccccaggggggacaaacagcgcaaaggcacaaaagtgtacgaaaatgcccgagggcaaaatgggccatgcgacttaaggaaaatggggtgatagaagaaaaaagtggcaaaatattcacatataaaagggggcagcaattctcgactccaccaactcagcagcattcattctctcatctgctgaaaattaaacagcttttcttcagtctttccaaaatgtgccttttatttatcaaaaactgaaattaattaactaaaaaactttcaattttttcggcattttaaattcattagttccaatgaaatcccttccctatccccctcaaaaaattggttttgtcttttggaatttcaaatttttagcgctaaaatg

SEQ ID NO: 118263 - DNA, 62 bp, Heterodera glycines
aaatcgtttgttgctgttttcaggaaagcaaactgaaaggaccttcacttttttccgcaatg

SEQ ID NO: 118264 - DNA, 78 bp, Heterodera glycines
aggtgaaatttagaattaaaaaaattaactgttaaaaataattagatggaactggaaagaaacaacttgtggagcatg

SEQ ID NO: 118265 - DNA, 60 bp, Heterodera glycines
ggtccaagtttaagtcattttacacaaaatcacattggcatagtttaggtgctcaatatg

SEQ ID NO: 118266 - DNA, 979 bp, Heterodera glycines
ttctccgtttgttttattgggtttctttccaatattaattgtgagatttttatatgcatttgaccttttttatattgaaaatttgaaccgcatctttcacattgcttagctgtttttgaaagttggcaaaatttttattctctccctttataaaataaactttgtttgaacaattgtttcatttccgtcatatgatttccgataatttctttcataaccaacattgaattcgacgctaataactttatgctttgttaatttgataaattttttaatcaatggtaaaaaaattggcgcattataaaagttagccagtagaagttttgtttaaggtaaatcgatcgagtttcacatagcttagctctgagaaatttttttttgtaagttctgaccatagtcttttggccaccaaatttttgaacaaaagttttcagagtggatgaataattagtacatcgtacagggatgtaaaggaagtgagtttggattcaggatggggctaaatttgtgtggagaaagcttttatctacaaccattttttgggattttacacgactttttcttcattgactaggtagggaccgggaccaaaacacggacaactgagtacaactgagtgccggggtcccggttttgaacagttttgaccgggaaattcccggggttattcccggtcttcccagccaaaaaatcccgggttttcaacccgaaaagtcccggtcccggttttgcccaaagttcccagtcccgacctaccctagttaaaaccaaagaatccgctcccgagttattttcttgaattcgctaaaatccgctcagattcacagttaagttctgttgtaaggctattttggcataatacttagaaatgatggaatgaatgtttgtgttgttggcattgattggcatttattgattaattaatgtatttaaattgtaaaaattattttttaatacaaatgtttcttttttaaaaatg

SEQ ID NO: 118267 - DNA, 194 bp, Heterodera glycines
tttttgggcttaaatgacatatgtatatagggaaggaagtaaactaaaagtcaaaaaccctctaataaaagatcatttcaaccatttctagaccaacactgagaaattcgaaaatttgaaatagaaccgaaagaattgtatagaaatggcattttctaaatcaaatatttaagagattttaaactggtaaaatg

SEQ ID NO: 118268 - DNA, 797 bp, Heterodera glycines
atttattgatgtttttctccgtccatttccgtgcagtgtcctgctgattaaaatgaaaggtgccgtcccaaaataatcaatgtttttaaaaaagatggaataagcaaatgcaaggaggagagagagagaggggaaaggggcaaagggagtgcaaaggcatggaggaaaaacgaacggaggaaaagcaaatgacccattgccggtcaatgtctgcccttttatgtactttggacccggccgcagcagcagcggtggcagcacaaatgaaaagcgaacagtcaaaaagggagaatgaatggggtcattttggcgccagcccaacttttagggctataacttttttattttcaactaaatcaaaattgtcttggtatcattagaaagcgcttcacatgctcaattagtcttacaaaaagcacaaaatttttttagtaatataaaaaagttatgaagaaaaaactttaatttttttggatttttggcaatttttgtgttataactatttattttggtaattgtctaattgccaaccaatagatacaaaacagcttcttctaaacatgttagagctttcgaatgaaatgagtacaaagcaaaacaaataaacaaacaaacaaacaaacaataaaaggctaacataaatttattcaaatgaaagtgcgtgcacaaaataatcgaatgttttaaaggaatgaatgaaccaatcaaatgcaaggaggagagagagagaggggaaagggaggggggggggggaagtcatggaggaaaaatgaacgaatgagaagcagagaaaaatg

SEQ ID NO: 118269 - DNA, 826 bp, Heterodera glycines
tctcgcgccttcttttggcttacaacaaaattcgatcatttgggttttaaaatcataaaaattcgtcaaaatcaaaggacatgaccttaaaaattcaggtaaagatgattgagtggaaaatgctgaaaatggcactatgtaaaattgggaaaacaaaaaatggaaagaaattaaaactttgaagagatggcaaaaaaatacgaagagtcatttgagaatcaaaatttcataattgaaaatgttatggaaaatttgaaaaataaattggaggacttgaaaaaaagtaattttaaggaaaaatggaaaataaaaaaaaggaggagaaagaggaagagaaaaattagtctgaagaaggaaagagtgcggaagaaagttttaagagagaactacgaacggaaacttttcctttttatttaatattttttggcattcgaagtttaacactgtcgtctgaaaattacaaattattgaaaaattccatattattatttttgtttgtattaataggttttattcgtaagtctttcccgtgggagcatttaattgatttgaaatagtcatttaaaaggacaattataataaatattattaacataaattgccctttcccttgtgattttttgccaaagtgtgatcatattcgattttattttgtcatatgaaaaagggcaattttagcaatgatctgtaagcttcataagcttgcgaaattttggagtatttcattacatataaaattccgtattattattatttaaagcattttctgcataaatttttaataatttatttaatttttatttaatttcatattattattaaaatg

SEQ ID NO: 118270 - DNA, 180 bp, Heterodera glycines
attgaataacacgaaaagccttttttattcggaatttgttttattaaatttgctcgacactcaattaccgtatcttacccggatcatttctgctattccccattacagtacctcgccttgacttactccgacccttgcgactgtttgtcccccgtttggttggtttacgccgtccgaatg

SEQ ID NO: 118271 - DNA, 579 bp, Heterodera glycines
ttgttttaattataatttacaaggattatgtttttaggttttactttttattagtttggcgcctaaaaacctgtttcggttgttcatctgctcttttttagttttccttaattttcctaaaaaccttaagaaaatgcaagaaacccgaaaaatttcaccaggggtgcatatcgccaaaaacaacagaacaaaaaattttggccgccaaagtcatcaaaaaataatcattaaacacattgggaaaaatttaaatgatgggtgaatcttttttaattttgagtttaaactagagtagagcgggaccgggactaaaacacggacaactgagtaccgaggtcccggttttgaccgggaccagtcccggggggttttttcccggttttcccagccaaaaattcccggtttttcaacccgaaaaggtcccggttaagcccaaaattcttattggttatttccacggtactgagcacgaatctgccctacccctcaaattcaaaaaatttctaattttaaaaaagaataaatgaagattaaatcaaataatataattatttaaaaattatatccgaggcataaatg

SEQ ID NO: 118272 - DNA, 174 bp, Heterodera glycines
  unsure (1)..(174): unsure at all n locations
ctcaaaatcaatcacataatagcagaggaattcactcctgtgaaatagagaataanaattcaaacaaaatttgaaattgcccncnaactttcaatttaaaaatatttattttcaaaataaatttaattctttaaatgcctcattnaaagttgtttttttaattaagctcaaatg

SEQ ID NO: 118273 - DNA, 567 bp, Heterodera glycines
aattaaaaaatatttaaataaaaatcttaatttgttatcaatacggtaacttttcaatccattataatgaacagagaaggagatttttttgcatgaaaaatcacaaaaatgaacaaaaaattttgtatttaatttgaaaataaaatatataattataaatttccaatatttaaaatcaaaattggtcatgaataaattttatgcattaatttttgagaaaattttctcattttcgtagaggtaatcaaattttctaaatttatttaagtctatatttatcagtatgttttcattttcattgtgtttttgttaagggatttacgaaaattttgcaaatgtcctaaaaaatgccaaaatcggtgcaaaattatgttcagtctaaaactgattaaaaacatacaataaaaataatgaaataaagcaataaaaaagcatttttcatttttattatcgaaaatcttaactgatttttctcaaaaattaatagttttttcaaaaagttttaaatattgaaaaactaaaatataatttcctgaatttttcgttcacctatattcattaggaatg

SEQ ID NO: 118274 - DNA, 178 bp, Heterodera glycines
  unsure (1)..(178): unsure at all n locations
catgctgattttgcttaaattggtatttttgtgcttaatgctaagaataaaaatgaaaaaaacagccctaagaatcgcataaatatttatatntaaacaaatatcaaatntcgagtttatgataagaaaaattttaaaagaattttagtaaaattattcataatgttagttttaaatg

SEQ ID NO: 118275 - DNA, 211 bp, Heterodera glycines
acgaggtccaaaaaggccgtaatttccgtaattacgcccagccctgtttaggacccttcaaaatttatttttgaccgatgaaacgcaacgcattctgtcacttgacgacactttgccaaagtttctgatcacctgccctttgcgttcttatccttcttcctcttctccgtctttttcacacaaatcgtcgccattgcctcagcctacgatg

SEQ ID NO: 118276 - DNA, 85 bp, Heterodera glycines
tatgttttagataccgactccatctactacgtcaacaagagggtgggtccgtgtgttagcagagggcgaggcgctggggcagatg

SEQ ID NO: 118277 - DNA, 196 bp, Heterodera glycines
aggtccccccacgaagccgatgatgaccagtatattatgggagagacacgaatccattcgtggaatagcgttccctatagcctgtactttaattctgcgttggatttttgctccccataagtgtttgagtaccccaaacggacacttgaaaaaatcgatttttttgattcataaatatttttttcagaaagacatg

SEQ ID NO: 118278 - DNA, 51 bp, Heterodera glycines
attgacgataaatagtaaaaaattttgtcattgcattttagatttaaaatg

SEQ ID NO: 118279 - DNA, 620 bp, Heterodera glycines
aatgtctgattgtgaccagcgactctgaaaacacacataagcatttttaaaagattttttacggaccaacctgatttgtattactttgtcacgcacacattcttgacaattgagagtttaataaaaaaaataatttccaaaattcttacagctaatccgatttcaggaaattgcgaaatttacactaaaaacaaaatttaatttaatcattgcaacagaagaatatttggtacttcgggttatgtcgccccccctcaaaaaaattccaaaattcgtaatttggggtttccaacttcgctgatcacgaatatgatatttattttaacatctgatgacttttaatcatagatttgacaaaatatctatgattttagaaaaataggcttagaatcacatttgaatattttacaaattaatttttgatatatcattttttgaaaaaatcgattttttagggataaatattttcaagctataaaaaaattatattaagaaaaaacttcaaaaatgttgatttttttagttttcatgttatatcttttttgataattgtcgaattgccaagcaatagcttagaaaaagcttctaaacacattaagctttcgaatgatagcaatatg

SEQ ID NO: 118280 - DNA, 633 bp, Heterodera glycines
atgaaacgggtctggggttcaaatccgcttggctgcggattattttttatgacagccaatgaccgttcgtgctttatttgcgcacatttatttaataatgacatacaatgtcaattgttaaccggataataatacgcaatactctacaacatctgtgcttgagtttttacgctcatttaattttttttaaattttggaaaaaatcaattacttgatgaaaaatcatagataaaatcaatgattttgcaaaatctgagctcagattcgtaatcggcacattttttcgccctaaaaaaactaaaataaaattttttaattaatttttcgtcgggaccgcaattctgaaggattaccgaattccgatttccgaaaatttttggggcctcggaatgccatccgtgccatggacacaaaatgtcatgggacgcgtaaaatgccatgggacgcgtaaaaccgtctagaaccttttttaccctagaaaaaatgctttttgaaattttactatttttccgtcgggaccacaattccacaccattgccctagaatgggtgtcaatcaatcagaccctgaaaacccaggaaaggcgttttagattttctaaaaaatttattttcagaaaataggagggacatg

SEQ ID NO: 118281 - DNA, 392 bp, Heterodera glycines
tctaaaaaaatcaataataattaacaggaaaattttaaaaatattgaaaattatttaaaatttaatttttttttctttattttagagccaaaaagcctaaaaagttttgaaaaaagttatttttgcctattttggcgttatgcctgaaatttaacaaaaattttataaaggaaaaatactctaagaattcgaccctaaaatttcagaaatacacgcttaagaaatgaaatgaaaagttttctcgcacatctccatgattttgcaaaacaaatgtatattcgtgatcagcgtcataaataaccctagaaactttttttccgaaattaaacaacaggcgagacctcccgtgaataaaaaataaaattctttttgcttgttttaggaggataatg

SEQ ID NO: 118282 - DNA, 917 bp, Heterodera glycines
atttttgccatcatttttctcttaagcgctgctctgttggtacgccactccgttggttctttcggctggcgctgcactgttggaaggagtaattcgaattcattttcgcttttcatttttctccagggattcagaatttcatcttctcataaattagggtattttcgactctaattataaaagattcaaaatccttctcaaaatgcttattcattcgggtctctctctctctaaaacgactcttttatttgtatttagggtaatttgttgtttttctccacaggtttcttcgttggtgatgggtttgggtgcctttctgcgcagttttttcccagaactcgtcgcctcggggctcgccttcttttccgcttacgttttgggcaagaaaaaaatggtcgactgaaaataaaccatcgaacggagacggaaaagagatattatgtgcctatgtaaattttactacaccgaattatgttttttttcaatttattttcatgaataaaatggctaattattttatttcgaatttacaattgggtaccgttccaagttttaatctttaatcatttttaattcgtcggttttgccatatttggtttttatttgtctctttttcttttagcttatgtgctcaaattttctgtttgttttccgttttcaaattgtttctcatcagcctttcctccgttctgccttttctttcacttctcatcaattctctgctcagtatttgataattcaaaatacacaaattaaattaaattaaacgaccataaattggaatgtttaatttccaaaatttaattttcacaactaattcaaaattttctttttctaactgccacaaattgtgcactttcagcattcgtcgcaaccactttgtctgctcatcgttctccacaaaaacgaaaaaaatg

SEQ ID NO: 118283 - DNA, 176 bp, Heterodera glycines
tttttaagacccatgacaatttctgattaccataaccacaagccctaacttttttttgaattttaaaaattttcaatttttaagcagatagggcttacataatcattaaacgctgattagttaattagtgttaataaaaatttgcaattttttcagtttgaaacaatccaagaatg

SEQ ID NO: 118284 - DNA, 52 bp, Heterodera glycines
catggggacagaaaaagaagctaatggaagcagcagcccattatcaacaatg

SEQ ID NO: 118285 - DNA, 258 bp, Heterodera glycines
tccttcgtctcctttgcgcttcccttctttccgttccgtttttgccaatgtttcgccgttgtccgtcgcttcgtccccttcgcttcttcgtccgtccccctcccccttttctctcccttttgtcccttcttttcctttcgctgctttcagtcaattcgcaaagttacgaatcgtcagaaatgagaattatggaggaaagaggtgacaaaacaaagaaaaagtgaacactttggcttggattaaggcggaaagcgaatg

SEQ ID NO: 118286 - DNA, 185 bp, Heterodera glycines
aattagccaaaattgcgaaaaacattttaggttttatgagagtttgaacaaatccacgactttcccattcaaagaaatgcgcgaaggcggggcacaaaagaaacttttgcaggcacattcgattcaagagtcgctgcagctggtcgagactccctctcgaatcccctctctaattgccataaatg

SEQ ID NO: 118287 - DNA, 90 bp, Heterodera glycines
atccgtcggggtaacaaattatacgaaatgaaaattgcgaggggcgaaaaaaatccggaaatcatcgtaagagacagctggaaccttatg

SEQ ID NO: 118288 - DNA, 1003 bp, Heterodera glycines
ggggccccccccccccccccccaaaaaaaaaaataaaccccccaaagaggcaccccccccttttaaccccatttttttttttcttggggggggttaaaaaaaaaattttgggactttctcttttttttaacggatttttattttttccttttaaaaaattttttttttcgggggccaaaaccttttttaaaaattttataaaaaaaaaaatcgcttttttaaaggttttttttttcctaaaaatttggattaaaaatttaaaatttttttatccccggcaaaaaaaggaaaattttgaccaatttttgttaatgtttaaaaaaccttaattcgttcattgtccccccccttcaaaaatatttttcatttagggtgttcccgcgttcccggttcttgacgccgatccctgacatttttgggcctattccccgccccgacccccgacatgtcgccccccgaggtccccgaccctcgacattttgcccccccccccgaggggtcggggagcaatcctaaattaaattattaaaaacaaatttcataaataaaagaataattgcatctcattattttcaccagcagagattgaagcccaaacgaaaagtgttttttttattcgtaatggaggaatttaaaatgaaaagggaatggaaaatgaaatgctgatcaattgaaaaataggctttcacaatatgttatgaagttttgtcattaaaaaggataaatatagaagatagatctataaaagatagtattttaaaaatacaagataaaaagtcaaaaagtaattataaagataataaaaaaaaataattcaaaaattaaattattaaaaatattatttacaaagataattttaattgaatatctttatatccaccccaccgatgctcattccttaagtgttaaccgagacagttcatttaaagcattattttataattaattttcgcacatttttctttcatccataatattgtgttttttaggaaaagtaaatatg

SEQ ID NO: 118289 - DNA, 214 bp, Heterodera glycines
gccacatggggaaacccttgaaaaacaacaattgttgtgggaaacggtacagaaaaatgttggaattttgaacgaggaacagagtgaagaattaagagaattgtgtgaaagttttggagaaatttttgcggcaagggacgaatatttgacccaaacatatctggtccagcacaaaatcgaaacgggtgacgcaccgccgatcaaaatcaaaatg

SEQ ID NO: 118290 - DNA, 725 bp, Heterodera glycines
tttattttaggtttaaagtgttttatgcgctgagtcgcttaaaacaatgttttgaatataaaagaaataaccaaaattaaaaacttaaattgaaaagctaattttatctagaaaattgctaattgtaagagcattttgaacaaatttttcgttaatgtaaaaatttttgatttgaatttatttaaatgaaataacatttcgccataagaaataaaacaaaaagcgctattttaaatcctttaaaaattgcgtttcctcacaattccgggttgccaaaatgctataaatcgtgattcttctgagtaaatttgggggtcgtaattccttacttttccccataaatattaatttgttttttaagattttcattagtccattccatcatgtccaatccgctctcattttccttcctttgccgtaaatgttttcttcgacccgttcattttcattcacaacaaaagcatggcatttcttcacttttgaaagggaatgccgacaattttgtcgtcgttatgtccaacagttatttggccgaaggatttacggaaacgtttaaatgtaacgaagttttttgattttaattttcgaaaaactataatttagactaatttaagggacattttttttggaaaaaaatacatcaaaagtttttaagcgtatccaaattttcaaaatgtcaagaaaaatccataattatgcccaattaatatttgtgccatcaaatg

SEQ ID NO: 118291 - DNA, 803 bp, Heterodera glycines
ggactgggatttttaagacaaaaaaaccaaatagttacctaaaaaaatttttaaaattaaatttttttgccaagaaagtaaatttttgagaaaattttttttcattgcataggagtatattttgaaaaattttagcttgattcttaggggtgtattttttgaaatttttttaggtagattcttaagggtgtataaaatgaatgcatcattactaaaaatgaggtgacaaatttaatggatgtaacggaacgaccgctcggcgtagaatgttgagaataaacggagaaaatcgatgcaccaagaaaatggcaaaagatgcagaaactacaattaatgtatatatatatatatatgaaaaaaatagatttttctacgacaaaaaaatgtttaaattttttgaaaatccaaaaaaaaatgccaaatttagcagattttcaagaattttatcggttttcaaacaattcagagaatttttcagccctggtacatccctgctgtcccatgatgaaagttcatccaacagactttgttgcctcatcccgaccaatttaatcatggaaattttcaaaaaaaaatttttttttttttgttttccggtgccagtataatgcacaacattcttgagctatttaatttttttttgtaaataaatcagggtatgaatttgtccttgtgtgccattggggaaaaaaagaaagaaaatattccataataaaaaacaattttatttaaaaaattacaaggaaataaataagggacagttaagcaaatgttggaaaaaatctaaaaatgtacaccttatg

SEQ ID NO: 118292 - DNA, 162 bp, Heterodera glycines
  unsure (1)..(162): unsure at all n locations
aaagaaggaaatagtgcactgtctgnctgtctggcttcgcttctaaaaaatttgtcccaaaagggccgaacaaactgaatgagtaccagattcagacccttcaaatcacccatttcctttattttactcaagcttaattttcagcttcgaacataaaaaatg

SEQ ID NO: 118293 - DNA, 1003 bp, Heterodera glycines
aggggggggggattaaatgccaatgtcagttttatggcgatgattcatcgaaaaaattttcggattagcatacagcgaatgaaggtaatccatgttgggttaacgggaattgttcccttaattgtcgagaattcatgtttcgaaaatggcacaaatcagtttgacctatctatttaaattttgaaaagaatcaagaaaattttaaagaataaaaattaaaaaagggcttgtcaaactcaatctgatcaatgaactataagtgattaatccatctggtcaatggaccgtcagatcaatgttatgatcaataattgatcacttctctctcgattggtgactttagagcagcaaaattaattcagtcctcgaaaatccctagccaatttgagcagtgtgatcagcttcaagtttcgaaaggcagtttcaaatgggataagactgatcagatcagtgcattgatcggctgtttccacccgatcagcggcttccacttacaagcgtcgatttccgattgttgtacatggttagctgcaaaatgtccgttttcaacaacagatttgcttgatgaggatgaacacttgtacagccggcgttgaatgcgcgaaatcattgaggaatcttaattcattaattgattattttaattgaatttgagtaattaaaaaaaaaatttaaaaaaacaatacaattagtctattaaaattacaaacaaaaaaattcattttgttgtcagcaaaatttttcaaaagcgaacaaaatacctaaaaattttgccaaaattctttgtcgtatttttcggtgctggtgcatttcctaaaaacggtgctatgtcgttacttaaaaaaccatcattatgatttgatgaaaaattatttataacttagctgaaaaacaacacaatttttatttcttaatatgattcgatagccctaagtgttctctatcagtctacaaaatttcaaaaaaatttcattaagtttcaaaagagttagggccaaagatg

SEQ ID NO: 118294 - DNA, 354 bp, Heterodera glycines
gaattgtatcgatgcgagcgttgattttgtctatgtttgtcatggcattgtgttgaacttttgttattttcgcaccgtaaattgatttttttaaaattttaattttcgactttttgttcgaattcgggtccggagttcgaaattggtcgcaatggatgtcagattcgtgatcagcgaccccgaaaaccccctagaaatgtgttaaaaaaaaattttttttatggtctgtaaaccacataaataccaatttttctattgaaatgcaaaagttgaagcggacgacttctttaatccagatatctggcagcccttttcatttatttttttattcagacataggtataaactaaaatg

SEQ ID NO: 118295 - DNA, 1003 bp, Heterodera glycines
aaatttgcaacaaataaaacacattttttccaattatctgctaaaattcataatgttatttaaaaactcgaagaaagctaattaacatggtaaattgattccggagttgagcttaacgacttcgtaattagttggtatgatgatggaaatttccacccggtcaaacattatttgaatgaaatgggaatgatgttctgtattttgttaattgaaaattataaattgtatagtttaaatatgtttctgcgcatgaagaaatgtgctaaaaatagcattcctactttaaaattttgatttggtgagttttgtagtccatataaatccatatttagcgtttttagtccatataaatccatatttagcgtttttagtccagataaatccatacatccctgcttgatagtgcctattaacctgcaaagtttcaaaaaatgagctgagaaacaaaaaagttatggccaaaaaacctcaaaaaattgcattttcctggccattttggcgcagcgcgccatatcttttttaaaacccaatataattttttgaaattttgcaggctaataaagaacatttagacctattgattaatatcaacattattttatttggttgaattaaaaaaaagttatgaatctttaaacttgtctgcgccaaaatgaccccgaccccttagaaaatgcttacaaatatcttctaaacatatagagctttctaatgataaaaagtttgtttgatttggccaacaaagaaaaaagttatggcttcataaagttgtctcagacgcagttgaacccaaccgtgcctatgcaccaatttttcactgccaaatgacacgaaaattcctatttaagcttggcaaattgcattcttcgccccattccttcgatcattcattcagctcgtttcacttttcccttcaattcttaaatcgccatgcttttccaatattaatttttttttttctaataaatttgataacatccttccttccttttaagcctaaatg

SEQ ID NO: 118296 - DNA, 1003 bp, Heterodera glycines
atccccagtgccatccccatcggcgaccaatttcctaataattgcttcttctgccattaaataatctacaaaaagttttaagggaaaggatttgttttaaaatttcagacgaagttgtcagtatgtccgtttttcagttaagttatcactagagttcgacctttgtcatggatccaggttcaggtccaggccattttggccatttttttggcaacctggatttttgcggttgtttaaatttaattaaatttatttaaaaatatttggcattctgtcttaatattcaaaaaatgcaagggatcccgcggatcccacacaaaaaatcccttaactatatactaagtcagccgaagccccgcccctatttttgaattggcggttaaatgctgttttgttgtaataggaaaaagaaacagaaaattaaaaaatataattggagattaatagagaaaggatgggtagaagagagagtgcagtgtatgtttctctgtcggcgcggatgggaggggtagagtgggtaacgcgtgcggttgtcacgcaggattgaatgcgtgcgagtttgtttatgtgtgtgatgagtgtgtaggagtgcttgggaataaggaggtagagaagaagaggaaaacaatagagagagatgaaaaaggaagcgagagagtgtacagaatgaagagattctaaaggaaggggagagagagaggactgagagagaaagagaagaagagatagggataaagagaagataaaggagaaaaagcaagaggacaattaaagagaaagcggaagataaatagcgattgagaatggggaaatggtaacgatagaaaaagagtgggaagactgagagatgacagagagagagagagaaagagagagagagatgagaggatgggagagagacagagagagagcagggagagagaaaaagagagaagggagagagaatgagaaagcaaagagagagatagagaagagaaagagctaagagagaggtgagaggatg

SEQ ID NO: 118297 - DNA, 562 bp, Heterodera glycines
taaatcctaaaaaatttaaaaaatttcagataaatgcgaattgaataactttctaggccaaaatttttactcaaaacactgaaagtttgctcattttccttttctctatcgatatgcaaaatttggggtggatttaacgtgtagaaaaaaagttaaacgtagcgaagtgaatgttgttttttacataattaaaatgaagagatagtacgccaaagtgagagaaattacaaagaaaaagagaaacgacgagatagtactaggcttttctctgcacagtggggcgtacccatagtgttctagtgaaaaatgagttcgaattttgttacaattcggggctggtccgaaattgatcgaaatagatgtccattttgtgatcagcgaccccgaaaccactcacaagaacatgttttacacgtttttaccaaaaaagtggggaacaacctgactattacccttttttccaacagtgtagtactgtcaggatctatattatgaaaatttcaccatttggtataactcatattcagaacctttcttccatttgaatcttttttcaaatatg

SEQ ID NO: 118298 - DNA, 79 bp, Heterodera glycines
attttaatatttcttcagctacattgactactctgtgctcgcatttctccgttccaacaagccaatttgggacagaatg

SEQ ID NO: 118299 - DNA, 148 bp, Heterodera glycines
cctggcaaaagaagaaaagggatttctattccaatgccatgccaagggattttcattccagtgccattcccttcctcctccgctttctcaccctttctcgttgaagaaagacattcatctggagcatgtcagtgtcggcaaagccatg

SEQ ID NO: 118300 - DNA, 1003 bp, Heterodera glycines
gcagtcctctgctccgtctgccttttcccccgaacaaacacctcccaggctgctcctcacagacacaattcatccccttcccaattccacaaagaagggatggtaaatgggggacgcggtttcccatggcgattcatccaaaatcaaattcaccccccccccgtccgccgctcgcgtcccttccgttctttaccctcctccccccgtcattatattcctgaagaacgaagactgacgactatggaaaagggtgcaaagtggggggaaacggggaaaaacaacaaccgatgaattcttgcaaatccaatcgatcctctgagaatgcattcaatatgtatgtgaaatatgcgacgggtgtaactgaaaaggaaaaggggaggggcaaaaatgaactgaccgatgacgccaaattgacgtcatcccattaattttgcaaaggaaaaggacatgacatgtaaagcagaaagggaaatgttgcgtttccattcatttgcaaaatgcgcgtaaaaggaaaattggattagaaaaagctaaatttgaaattggaaaaaaggaagtgtggaaagcaagtgatgcggaacacccatccattgagaggaattagttccaaccaaagcaattaggaaatccataaaggaaagggtcgaaattaaattgaactattttaaataaaattggcgttttgtaatttaaattaaatttcggaataaaaaattgttaaagttaggtgtggtggtgccaaataagtttgttacagtatgtctttttatttggtcactttgcgagtgctgagatgggtgcagtcgaagaaaaggaacccataaattatattaatttcggcgccttacacttacaaaacaacgaaatttattgttgtcgctttcatttattctatctttgcatttcttgtcgcgctttttaacctctttttgtgatgccatttacattggatcacttaattgaattcattttcctccctttttatagcacttaattaattatg

SEQ ID NO: 118301 - DNA, 1003 bp, Heterodera glycines
gaccacgataaaaatctctgatttaaaaaagctcaaaatgatatggggaaattagaagatggagtgaacagagcttttcgctgcctgaatcgttccttgaaccaaaaagtcaattgggtgaaagatgtcgtggccaatacaaatgccaattttgagactctgaaagtccaattcgagaccttaaccgaaagagttgatatgttggaacaagacagtgattggacgaattcaggtggggctgttagtattactgcgccgtttgtgacccaatgggcaatgcacagcccaaccaagtcgtaccgaaccaagtgccaattcatcaattatcaagcgaagacgaagatgacaggccgactctttttggcctgaacatgctctcgagcggacccacagtgggggcaggtttggaaatgttctgtgaggagtctgtttttgcatttgatgattgggcagaacgtttcaaggactacctttccgtgtcaggcaaggcttacactgaacaagaaaaagtcacgagactcaaattggctctgagggacactcctcgggcactgtttaaggagttattaccagcacaaacggacactcttgactcagcattgagtgaacttcgacagaaattggactcccctcagcgtcgggaaattgcaaaacgaactttatcgctgtgcaaacagagggaggatgagacggtggcgcaatttctgagacgcttaactcctttggtggatgcgacaaattcgtcattaaccggtgtaactcgaaaagagaaaatttgcgaagaatttttggatagattgaagccaaacattagttttcttatccgtctggtgggtctatcacgagcaaaagacttggacttggtaagagcacaagcagaggagttggaggctttactattgatgaacaagggcgatgaagcatcacgcctttcaggcagtcaatgcgctgaacaatcagtcatcccagtcccagtggtctacagaagcaaaccagaataatg

SEQ ID NO: 118302 - DNA, 1003 bp, Heterodera glycines
attcgtactgctccaatttgccgattcgtactgttcgacaaaaaagaaactgctctattccagttgtccattcaaagtttacgcgtccaatcagtgacttcctttgtttcctaggccatattttttttttacttagtcaatgcctatgtgatttgttgtgatttcacagaaatgttctaatttgagggtagtgaccaaatttagttctgatttcttaaacaaactcttaattttgaaattatgtggcatattgtataacaaatttaattgacgcaaaattagggggatcatatacacagcggcccaattttgggctacccgacttttggggatttgcaacttggggacccgacttttggggatccgacacttagggatcctgacatttggggatcccgacatttggggatccgacacttagggatcccgacatttggggatcccgacatttggggacccgacttttggggatcccgacatttggggacccgacatttggagaccgaacgacatttgagcaaaagacacttaagaaaaccacggacatttggcaacccgacatttagggacccgacatttggggatttcaataaaacaaaaaaaaattaaaaaatttaattctaagccacaaaattagaaaaattacgtctgctttagtcgctcgttgtcgaagcaagtaaaaagctggcacaactcgaatttcctccagaaaagagagcgcagccaaactccgaaccaagattttgtattcattatttgttgtgtaatagtggctaagtttcccggtcttcaatctacgattaattgcctgtcctaagtggaacaagcaaaaacgaatttgtaggctggcacaaataattcccttccccccccccgctctcgttcgttcgttcggcggcttctcaaaaacaatgttcaattagctgacgcgacggctggcacaattctcttctcccgtttttgtcattgctttacgaattatgaatatattttctagaaaatg

SEQ ID NO: 118303 - DNA, 312 bp, Heterodera glycines
tcaaacacggacacaaagcgccggaggggtagaaactttcgtcccccacttttttggcactttctgagttttttctgatcgtgttttcgtccttaaaaatttcgtttttggttttcaaaatttaaattttcatttcgtttttgttagggtttccaaaatttaaaaaaaattgtttcttttacgtttcgtttcggtttttgaaaatttttgatttcgttttcgaaaacattttcggtttcgtgccaagtctcggggcatcaattttgtttacgctagcgggcgctaaggtaattagtacttattgtacatatg

SEQ ID NO: 118304 - DNA, 87 bp, Heterodera glycines
tctaaaaaagcagaattttgtcacatatttcatctgcctaatacaagtgggctatagaaattttatagactaatttaatttaccatg

SEQ ID NO: 118305 - DNA, 92 bp, Heterodera glycines
ggtgaacgacaattttaaatgcttaatgattttatgagtccaatcgtcaacaattgcttagactttgtgctttcaattcgtatccaaaaatg

SEQ ID NO: 118306 - DNA, 483 bp, Heterodera glycines
ggtgaaaataggtgaaaaggaaacaggtgaaaacaagtgaaaataggtgaaatttcacctaaaaatatatagggacgtgcatttaatggggcatattagagaatgtctcaactagtatcaataaaaagtgccaaaggaaaattttgtgatggttatcgctattacaaacataaaacgaccaagttcaaaatttggtggaaatgtgaacttaattcacatgggtgccagggctggggtttgaaaaggaagggttttttacaatgactcgccgacacaatcatcatccagacactatattgattgaaatcgaagaggatataaaatatcgtaatttttctgcgggggcaaaatgttttttgggtgacaacaagaattagttgatgatgctaagaaaaagccgagactccaaactgaatttagagacaaatttattgcatataaaatataaaagaaaaatttaataaatgaaaaataaaaaaaatg

SEQ ID NO: 118307 - DNA, 70 bp, Heterodera glycines
ttccgatcagcataaaaagtggattcgggacgctgatcttgtaaaagagcgcaaagctaaataaaaaatg

SEQ ID NO: 118308 - DNA, 1003 bp, Heterodera glycines
taagaaaatggatgtatttttgggttaaattttgaaaaaaaaaacttaggaaattggtggccagccgatgagcgctgccggaaagatatctatctatccgagaaaacagagttagccgacatttgagtcgtgacgcttgaggcacagactattgcggcgctgatatttgcagcgcccacttttcaggcgcccacttttgcggcgcccagttataagcgacatttgcggcgccacacacgcggcgccgacatttgagtcgtgacgttaaggcgccgactattgcggcgccgacactcgcggtgccgacatttgagtcgtgacgcttgaggcgcagactattgcggcgccgacactcgcggtgccgacatttgagtcgtgacgcttgaggcacagactatgtattgcggcgcggctgggcggtaaaaaaacgcgtgatttttcggtgatgcaacatttgcggggatggtgccgcaaatttcggcacagatttaaaaagttctttttaatctgtttttatttgtttaaaactaattttcaatttttaattattaaaatacaaaaatagcgaaaaataaaattgttctttttgcagaatacaaaaacaaaaatttcttttgccattatggccaatccttcaaaaaatattgccatgctgcgcgaagcgcgctcctccccgtacattggcggcggcggaagcggcggcactttgccacctgacgcgctgcctgtttcaggcccgatgcacacgcgcctgcaacgcaatcgtcgaccggattcggccaccgcgccctacactgcacgactgcagaacgctgcaagcgctgaacattttgagcaggtgggggagaattgctaaatggttgggtgaacaatttggggagggggggggcaaatgatcaaccaaacttgaacaaatgatcaccccgaatgttgtaatttatcacccaaataaggcaactgatcacacacaggggacgattgaccaattaatctccaaaaaatg

SEQ ID NO: 118309 - DNA, 154 bp, Heterodera glycines
tggccattacgattttgaaatacggtacatcaacaccgcatcatttggccaggctgacgttctctcgcgcctcatcgccaattatccccgaccagaggaggatattttgatcgccaacatctgcaccgaaaccgagtgctacatcagcaccatg

SEQ ID NO: 118310 - DNA, 308 bp, Heterodera glycines
ccccccccccccccccctccccctaaggtcggtgtattcgtcctccaacccgtattcctactggccctaccgttaccttaccgatccgaattcggtcagtgttcgaatttcggttccgtccctctgctgaaccagtcccttccgaactcagcacgaggtgttttggcacgacgtgcacagccaattctcggcattgcgccgcctcgatttgttcggcaagcacaaaccctcagtgtgagtgcagcgtgccgtgccatttcccattcggaattcaattcactgttcgttccattttcagggattacatg

SEQ ID NO: 118311 - DNA, 109 bp, Heterodera glycines
agttgagggaagcggctgcgcatcagctcgaccagttagtggtggttcattttggttttatttgcctttcctttccccctttagggccaatttggaaatacaaaggatg

SEQ ID NO: 118312 - DNA, 296 bp, Heterodera glycines
aaaaagtattcaatcgaattaaatgcttccattttaaatttaaaaattaatccgatttttaagctactggggggcaattgtcaaagattttggaaaaaattggtgaaatggaaaaacagaacgaaaacacggacaaaggcgagggaattttagcgaagaataaattatcacttattaaaaattctttttttttgaataagtttcttatatgaattaagaatttcatttaaataaattataacatttttaatttttgaaaattaattttaggaactttggagcaattttcaaagatg

SEQ ID NO: 118313 - DNA, 684 bp, Heterodera glycines
caacaacatttcgtgaattgcacaccaaaaacattgaattgtcggaggcattggagcgaatgcaggagaaccaggacaaaatcatcgccaattatcacaacaccgagtaaatctaaaaatgaatcgccccttttttcatcactaaatttcccatattttgttttagaattgagtcactgaagcaagccaatcaccaatcacaggttcattatacatataattttgcataaatggttcatatttgtaatgaaaagcgattttatcgtgaaaaaccaattcaagttttataatgggttactatttttcaaaaaaaaaaacccctacaaaatcaccgaaaaaaatttgttaaagaaatttcggagagggggggggggtgaattgcaccccaaatttgtgtataaaaacgggatattttagaaattaatttgttcagccccgtttttttgttgtcaggatgatttgcgactgctgcgtgacaactatgctaagcaggagctgctcatccgtgagctgagcgagcagcgcgagcagtaccgacagctgtacgaacagcagcagatgatgggtgacaacacaacgccagcaaccacggggttgacggcgcccagcgcaaattcaaacgcatcgtcgctgtcctcggcagcaacaacgaccaacgctgtcgaccaaccgccgcaacaaatg

SEQ ID NO: 118314 - DNA, 640 bp, Heterodera glycines
tttttttgggaaatttcgttaaaaaatcaaaaaattcaaaaaccaaaaaaaccgtatattaggcctagctcgaaaaattttgaaaattttcgaaattttaaaatttggaaaaatccagctcattgatctctacaataagtctgctggccaccctacgctcaggtcaaagcctaatgagttattcaacggggactgaactggacaaagttggtactgaaaagttctagaagcacccagcccagggggttagagctagaggcctagaattttttttaacttttaggcaacattctcacttagggccctcacagcgggaattttttgatccgagttttagaaaaaaagttatgggctaacaaacgcaagaaaaagtgagaaatcggtccccgggactcagtcgtccgcgcagaatttttctctatatttttcccggatgcgcctcaaaaagttgtaagacccttccaccactttcagggcgctcccggccttcggccgggagaaaatggcctaatatttctatttaaattatataataaaaaataaattaaatgcttattttcaccgtaggtttgcctaattaatgagctgaacgggagccgaacactgctttcttcactgggcaacaaacgttggcctaatg

SEQ ID NO: 118315 - DNA, 56 bp, Heterodera glycines
attaaactgccaatttataagtttagcaaaataataatacatttaagaagaaaatg

SEQ ID NO: 118316 - DNA, 1003 bp, Heterodera glycines
aaattaatcttaacaatttttagattggattttttaaatttaaaaattttttaaattaaaaaaaatttttgaaaattacggattacgtattacggattacgccaaattacggactttttggacctccgtaatgacggattacggatggccgtaactgaaaaaattgccgtaattacggatttgaaaatcagttacgtccagctctggtgccaacaaatggagaatgcaaagcagagaaaaaaaatacaaaatttttggcattttttgagggttaaaagccatttttggcagttttttaaggaatattatttcgcgatttttgggaaatttattaacaaaaatgcaataaaaacgaaaaatacaccccctatttgcggaatttttcaaaggattagcgacaaattttaaggaatttgtctctttttaaaaaggattttataaatcttgttccaattttcatgttttagtctatattttcatgaactcccagaccctttcttaagcaaatgcaaattttcaaagactcgcaacttttttttctggtgcttcaagatgcttaacatttacattgaaaaggtttctcctcaccaagagactttgaatgataccaagaatgttcaattgcttcaaataaaattttaagaatgttcattgccgtggtgcgggctcgaacctgcacagttttcgctttattatcttacaaaatccacttatccatacgcaaattttcttggtactgatgttaattttcctgacgctgtatagaaataaaaacaaaaaattaaaatgtaaatgatatgatcggattaataaatgaatcatattgacaaacatccctatccaactgcgttttagcaatgctaaacggaaaaaatcgggtgagtaattaattcacttcaaacgcacaaattggacggactaaattggttagggtttcattgctttcatttttcatatcattattatcatccacttttgaattttccccaatttaccaaaaatg

SEQ ID NO: 118317 - DNA, 149 bp, Heterodera glycines
aaataataattactctgtcttattgttagtcggacggggaagtgccctccgccggtggttacgctcagccatcgacggaaagttcggcctgtacagcaggcgagggttgttcagagggagaaggagccccccagcctgaacaacaaatg

SEQ ID NO: 118318 - DNA, 373 bp, Heterodera glycines
tttggttgctgctcacttgtgcttgaagaattgtgcggcaagtagattaattgttgttgaagaaataatgggggaatgaaaatttagcgaatatttcgcttatttatatgcaatttttgtctcattatcgccagcaaaaactaatgtgtatataaagaggaaaggaatttctacgaattctcattccctgcttcattattcacattcatttttccatcgccaccaattgtgtgcacgcgtaatttctgaggcatgtttttttgttttgttttttgcaatttttctgattttattttatttttcattttacagaaaaccgacagttgctcacgttcaacaacagcgccattctcaacaacatcgcaccaaaatg

SEQ ID NO: 118319 - DNA, 87 bp, Heterodera glycines
gctgagaatttaaaactcttttttctgttggtttttgagtttctgatcaatgatcataatttgaaggtgtgcaaaaagtgggaaatg

SEQ ID NO: 118320 - DNA, 270 bp, Heterodera glycines
tgtgtaagtggcacaaaataaagctaattaagaggcaattaggctcattagtcatgtaattttttaactgtgaatttccctgcttctctctgtcatcgaattggcaaattcgattattattttccccgttcgccgttcaggcgccgtgcccagctgaccatcgttgccattttggtcttttccgtgtgctacaatttgatccgtttttgggagtaccgtatcaacaattcgtccgatggcgacggcaccgacgccaaaaatgagcaaatg

SEQ ID NO: 118321 - DNA, 51 bp, Heterodera glycines
ggtgctcccccctgttggcgccgctttttttgtcccaatttccagcgaatg

SEQ ID NO: 118322 - DNA, 879 bp, Heterodera glycines
atgcccaaatatgcactaaaatatgccttaaaactgccaaaaatagcttttaaccctcaaaaaaattccaaaaattgtgtaaaaattcagaattgacttttaaaactccaaaacataggttaaggagcgttttttagacaattgtaaaacattttggttttcaaatttataaatttttcttatatgctaaaacaaaattatgtttttatataaattaatttttttcaaaaaagcttacaaagtttaaaaatttctcgatttttaagggtgtatttttaaaaaaattccaaaaaagtcgatccgtagggggtgtatttttcgtttttattgcattttcttatgaattttgccaaaaatgaccgaaatatgctctaaaaacgcaaaaatggccaaatatgcatttattctcaaaaacccccaaaatatgtttatatatgcactaaaaaccttcaccaaatcaaaaattttaatgcagaaatgctattttgagcccctttcttcatagcatatgcgcagaaaaaataagcaaaatcatacaaattataaccctattcataactagggcatccaaaaatatggatataaaatcgcgaaaaagaaaaaaacacgatacagcttaaaatttactcattttagcgaaaaatcaacctgaaaagcgaaattttcgcttttttgcttatttttaatataaattacgcaatttttaagaaaatttaaatttaatcaatattttcgacaaaattttgctaaaaatgtctttttctgaaattttttaggggtcaaaaatgccaatttacctgatggggccgttatgatagaggttttttggaaaaaatttaaaatatggacataaaatatggataaaaatgccaaaatatg

SEQ ID NO: 118323 - DNA, 677 bp, Heterodera glycines
tttattttttttgtgttatttgataagttcagcatttttatgcattaaattaattaacggtgtcttttcttcgtcctctgttttttaaaagctctttttaagcatttttattccttaatttaatttttaatacataatataacccctaatattacttaagattgattgatgattgatcgcttaatatattttcaataaactcactttcattttcatttatcattcattatacatatatctctcctccctttttccttatcatttaatgcctaattaattgtaatttaaattctttaaaattttgtgtctttaattctccggataaaatttcgtgaatcttttttcaattttaatttttccatttattacgtcccattctcataaattgccatttccatttccatgccaaagagttataaacttttattcctttttttttgactttctttcgtcaataaaaatcacacattttgtggttctgtgctgaaaatgcattggcaaaagaacggcgaaatgagtcgccgcgtttaagcgaatcgataaaatgcacagaaaatgagcaaaaaaaaaagcattttgcttcataaatttaaaatagacaaaaattattttgtttatacagttaatttatttagctaaatatatttttaattaattaattttttcgacttaaaatg

SEQ ID NO: 118324 - DNA, 155 bp, Heterodera glycines
aaaaaaaaaaaaaaaatttttttttttttttttttttttttttttttttttttttttttaaaaaaaaaaaattttttttccccaagggtaaatggggatttggggaggccaaaatttccatcaagccctcccattggcctttgtttggcccaatg

SEQ ID NO: 118325 - DNA, 645 bp, Heterodera glycines
cacagtcgcctttggccagttgtggaacgaaaaaatgggaatatcagatggggtgcgctcttttctaaaaattcctcttttcgtctaaccatccctcccttttgtgcactatttcgtttcaaaattgaatcattttttttggctttttgaaataaattgtgaaaaatatacgaaaattattttcggttttaattatgctgtacaatgcttttaagccccgccgtgcggcggctccccttttgtgcactattttagtttttaaaattggttccggactttttggctttttgaaataaattgtgaaaaatatacgaaaattattttagcttttaattacgctgtacaatgcttttaagccccgccgtgaggcgggacagttccaaaattttgtaccacattttactgtggaaagtccaagtaccttattggacaactacgtgtcaatgagcacagtcgcctttggccagttgtggaacggaaaaatgggaatatcagatggggtgcgctcttttctaaaaattcctcttttcgtctaaccatccctcccttttgtgcactatttcgtttcaaaattgaatcattttttttggctttttgaaataaattgtgaaaaatatacgaaaattattttagcttttaattatg

SEQ ID NO: 118326 - DNA, 90 bp, Heterodera glycines
ctatacgaccaaagtggcgaatttttgccccacgttcggctggccaaagatttggtggagaagtacgaccaccgtgtccgacccgtgatg

SEQ ID NO: 118327 - DNA, 475 bp, Heterodera glycines
aatatttaaagatttaatcagtataaatacttctataacttcatcactagtcaacatcaggtccttaaactacaagtttagtgaacgagaaagaatcaatatataaataaagacaattaagcaaaataaagtccataaatagataataaatggaaaaatttatatttattaagtaaacataaatttgagaaataatgtcaagaacggattcagatttttaagcaaaaataaatcaaattaataaaattaaatgactttcaaattttcattaagggataaatatttattttttatttgcattattaaaacaaaataaaaagtagatgaattatattattcattaaattttcaatttttgataaaagaatatttctcaccattttcgaagaaataagaaaaatttggaagactggtttaaatagaaaagcttagctcaaattatattaatctttcagataaggatgaattaaatatg

SEQ ID NO: 118328 - DNA, 266 bp, Heterodera glycines
ggttcgtccccgttagccgttaggggtcacattttgaaagctttgttgtattcaattagcggagagcgattagagaaggggagggtcaattatttcgaaactttgcattcaggtttgagaatttgagggtaaagatggaattaatgaaaccgtttagaaaaaaagccaacaatactttaactcgcgccaatcccttacatttaaatttctccaaatggcacttccccttacatacatacccatccacccaaataagtcaaattatg

SEQ ID NO: 118329 - DNA, 604 bp, Heterodera glycines
attttactttagaggggttgaacaatagaaggcccccccttggtagaaggcccccttctaattaaaggccccttttttggaggggttgaacaatagaaggcccccctttggtagaaggcccccctctaatttaaggccactttttggaagggttgaaaaatagaaggcccgggccttcaaatacaggaaatacggtatattgattttcaaaaaagcatttgactcagtgccccatgaattacttttatacaaattggaaaaataggtataaggggcaaacttttgcggaccgggtcggttgggccccgccgattgggccccgccagttgggccccgccgattgggccccggtacgattgggccccgccgattgggccccatagagcacatggacaagggggggggtcagaataaaaaagttatattgtcaaatgttattgttttcgtgtttcattgcatatttgtaaatatatttggtttcatatttgttttctaatttttttatattttcccttttcttgattgcctaactaaaataccattaattcagcttattatttaatatattaatatcacgatggaaaataatatcttatcgaagatg

SEQ ID NO: 118330 - DNA, 401 bp, Heterodera glycines
aaattgaaaataaatttttgtaaatttaaaaatgagcaaagagaagtttaaggcgtacaacacattaacaacatgcagcagaataaatacaatgagcaggaagaaagtaatgaaaaaaatgaaaaaagaaaaattgaaattgaaaatacaattataaatttaaatttaaatgcctatttaggcgatgagttgggaagaataggcagaacgggtgccaaaaatgtgaagaaaaataaaaggaaaaaacaaaatgccaaaaaaggaaaaggacgaaacaacggtaaacagaagaaaggtgataaaacgataatcaattaataaaatcgaaagattttgaacggattaaaacttaaaaaaaaattaaaattgaaaattgaatcacagattttcagataataatg

SEQ ID NO: 118331 - DNA, 270 bp, Heterodera glycines
  unsure (1)..(270): unsure at all n locations
gaaaaattttttgcagatatttttgtcgaaaacactcaaaatgggaagaaaagtgctgcacagacaaagattttgtttaaaatancaatgtaggtgtaatttatttaatntaattaattttcctaatatattattttttggtaaaaatgccaaaattagtgccaagaccgcgaaaaacccgcaacttgctacatttgatttaaatagttataacttttttgttaattgtttaagcgcaaagcaattgtttggaaatagcttccaaacatg

SEQ ID NO: 118332 - DNA, 159 bp, Heterodera glycines
aacattcaggtttggtttgggggaagcaaatggactagcaattttatcgaatttgggaggggcaacaattcaatagtcgaaaaatttgttacttattacactcaaacagtcctttttcccttctcatccgtccgatgttctctcccttttcatgtgatg

SEQ ID NO: 118333 - DNA, 190 bp, Heterodera glycines
  unsure (1)..(190): unsure at all n locations
acggattgntattagggattttaagggtcggagaatccaatacaatctttgtaccagagccgcaaatagggatgaatttatagattcgtttattgtacaaaaaatcaatggatatttgtttaataggctgaatctctgataaaattcccttttaaatgtttttcctttttaaattcaagatgttcgaatg

SEQ ID NO: 118334 - DNA, 298 bp, Heterodera glycines
  unsure (1)..(298): unsure at all n locations
atttgctctcgcacagggcacggcaacaaaaacacacattttcttggcacctttttaaatattttgttgtttgtcctacactttgtgctgtcctcctttttgatctgctgatgacacacaaatgacttgttgaaattgaaatgcgattgactgccttttttaattgtaatttttgttaacaattttttattcgcataaattagtgcaatttgtttaattagtcaatcaaaatgtttttggaaaaagtgatcccgccccccntaaaatgttttgttgtcagttgagtgagcgaataatg

SEQ ID NO: 118335 - DNA, 465 bp, Heterodera glycines
catttgatggttttttgactaacgcccattttgttggtttttgactaacgtcccagcaccattgagatcattcgagcattattccctttggaatttgttcatttcaatgtttatgttttcttcttttctttctcagctcatctaataaaaatttatttttaagtttaagaattgagaattgggtcgttttgtttttttaacttttgggatattttgagcctggggtaaacttgcaacatccctgatgcatatgattaataaaattaggcattcatattaagcaaaatgaaaaaattatggacgtcataaatgaaaagcctttttttctcgcttaaattgattttacttaaatccattctataaaattacaattacgaattcaaagaataatcattgctcattttttgaacgaatgagcaaaacaaagttacattttacctattcttaagcataaaaataaatatg

SEQ ID NO: 118336 - DNA, 304 bp, Heterodera glycines
tttgacaatataattttttcttaaaaaattaattaattatttatatattcatatttatctttataagcaaaatattgcttaatttcttcatataaatatttttaatttactttttatgtaaataattgaattttgaccattattaaagaaaaacataatgttttattctttttctattatcttttttcatattattattatacatcaatttttatttcacttttcaatgcaattgcatcagtaagcttattaatcagggtaattaatttgtctaatcatttttaattaggaagacgacaacatg

SEQ ID NO: 118337 - DNA, 174 bp, Heterodera glycines
tgagctctgtgcttaagcatttgatttcaaccctttttattgcctttcaatcgctttaaatcggaaaatacgctatttttttacggatgtttaaactgttatatctcgtcaaatgttgtttttaatggggtttacactatacattcagtttttagagagtgaaaacaaaaaatg

SEQ ID NO: 118338 - DNA, 165 bp, Heterodera glycines
tgttggcaagggaactttgaatggatcaacaatttcaaggaggtgtggccataatctcgaaaaatcactgatttttgttttcaaattgtttagcattttcttcgtgccaatgccatttcttccgtcagttaccaaattcatttttctgttcatgtgccatcaatg

SEQ ID NO: 118339 - DNA, 182 bp, Heterodera glycines
atggcacaatgaacggcaccaccagcagaagaatttctttgtcgtctgaacttttgcaggcgccgaatgtttatggcattggcgatttgcgaatggaacaccggtggaggggggagacgacgccgcaggggcaatcggaggagggaaattgccaaagagtgcaaaagttgctgagaaaaatg

SEQ ID NO: 118340 - DNA, 77 bp, Heterodera glycines
acggcgcccgctggactcaaccacttggccgaatcagagaagaaaaagtgggaagaagcgtccaaggaaacgccatg

SEQ ID NO: 118341 - DNA, 627 bp, Heterodera glycines
tcactattttggcgttttgtcactatttttcactatttcgacattttttggaaaaattccttaacaaaaatgcaataaaaccaaaaaatacacccctaagaatcgagctaaaatttttcaaaatatactcctatgaaatgaaaaaaaattttctcaaaaatttactttcttggcaaaaatttttaattttaaaaacttttttaggtaattattttgggttttttgctcataaaaatcccagtcctactcatttgcaactgcaaatagtgaataaaaattatttttgctcaatttttggctgaaaattatgtcactattcgtcactatttcggactttttgtcactgtttcttcactattttgggatttttactcactattttagttaactatttcggtatttttcgtcactaaaagttgcggccctaataattacgtataaaagaaaaaggattaaccagaggccatcatgccaaaaagcagttgctgatcctaacaaatacaataagtgggattaaataatgccaaattaaaaattgtagaaaaaataaataaaatcgaaatgcctatgctttgctaagaaaaattttttttttcaaaaaaaatatacaataattcagctgaaatg

SEQ ID NO: 118342 - DNA, 68 bp, Heterodera glycines
ggcggtggtgaaggcgtttcaattggttcgcatcggagccctttgaaggcccaaagtctgttcaaatg

SEQ ID NO: 118343 - DNA, 174 bp, Heterodera glycines
attggaaatcgattgggtggtgcaaaaagtggtaatttgtatgacataatcgaccgatgaataatgaaatgaatccaaaagtaaagccccgcataaaatgttggaaaatgtttgctttgctgaccaataaataacattaatatttattcacgggagaagatcataagaaaaatg

SEQ ID NO: 118344 - DNA, 501 bp, Heterodera glycines
acaaaattagcccaaaatctcaaaatttgggcattttttagtcaaaatctgctagcaaatggcactaaaaatacaaaattttccccggcggcgcctatcggcaccgccggctcccgcgttcgcgaaatttttttgagaagaccgcgccgcaaaaaaaagagattttaaaaagcaaaaaaaaaaaaaggtcgtcaaaaattttggaccccgtcataaggaaaatcgcatatgaccacccccccctggcccgatcgtacgtcgtatgacccttggaagtgaccaccccttgtacacgtatgctgtgcaggtgtgtgaaatgcgattttttggaaaaaaattttgaggaccggcggaagggtgccgataggcgccactggaaattttaaaatttttccccacttttgtagcccgtgctgatgctcaacgccagcaaatggcaatggccacacagtgtgcgacgaatgcagcgactgttaacgaaagcgaccactgccaccaatg

SEQ ID NO: 118345 - DNA, 110 bp, Heterodera glycines; identical to SEQ ID NO: 98226

SEQ ID NO: 118346 - DNA, 623 bp, Heterodera glycines
atgtcaatggacgacagtaataaatcaattttattgttttgtttattgctggaaaatttgtccattttcagctacattttattatatatttaaaacattttcatgacaatttttattttattttcttttttatagctaatttattattttttctaatttaagctttatttaataaatattgctttgataagatatattatacattggctttggaccatatgatgaatgcttacaaaattttgtttttctgactataatccgaatatagcttttgcataaatatcggggcctagagagcaaatgtctaataataagctaatttaattttagtttttaaattttttcctaatttattttatccaccattaaagcagcaaatgtgtgcgtaaacaaacaccaatggatttgttttcccgtttttacgaatgaatcactcattcataaaaagcatttgtgctttgctttttttctttgtttgttatcgtcatcccattaaattccacgtaaaatttaagcatttttaattatttcaaagaaaattaagagtttaaatggtaaacatatctattcctcttcattatttgaacaatatttttatataatttcataataaatttagaatg

SEQ ID NO: 118347 - DNA, 645 bp, Heterodera glycines
attaccggtttttaccggtaccggtaccggtaccggttgaaaaagttggtaccggtaccggtaccggtttttgcagtaccggtcagtaccggtaccggtttttttgcaattaccgattaccgctcaactctagttaatgctaagcgattagaaaatttacaaaaaaaaagttatgccttgaaaacttgaaaatattaatattttgcgaaatttattggtgtttcatttttttagtggctgataaagctttcaaattgccatttctgtaaaattagggcgaatttgaaaaaaagttttccgaaaatttgacttataaattgacggattggtcctcttcggaaaactgaaaaaaaatttttttttttttgctattcgttaaattataaaattattaaaattttatgagtcataagaagtgaaaaaaagaacataatgtcatgatttatttgccttctttctacctttactatataaacaaaatgtttttttttttttttttgttaatatgggaattcattaaattaaacattacagtaatgtccttcttccattagccctacaatttactgtagctacaatgtcaaatatagcggcatgaattatttttgctagtgaacgttttgtgtaattttcagtgcctttatg

SEQ ID NO: 118348 - DNA, 153 bp, Heterodera glycines
aaggttaaaattggcgaagaattgtcagaaagtttcagaatattttcaggagtgccccagggaagtgtcttagggccattactctttttaatttttataaatgatctgccgtccgttattacaaatgaagcggcatcagttggcataaaaatg

SEQ ID NO: 118349 - DNA, 682 bp, Heterodera glycines
ttatctgctggaaatctctttctgattagtgctgtctctgcttcaccaaacagattaatattaaatattcacccaacaaaaatatatatggatatatttcaacaaaaaattatttatttaaattagggttaagccccgtcccaattgtccccgacttttccctcacgagagtctaacatattaattagttagccacttcctgcaactctcagctttttctgtttcaattctcgcttaaataatgataaattccattcaattctcaatcatgatttcccgattttcttaaacagttcaatcgagacttaactatgccgataatttataattaaatgttgcaaacaagcaccagcagcagttgacaaatgcaagttaaagtgtcagcttatttcaccatttgacattcattttagcgctccaattattcgtcatccccaacaattgacattttctgtccgattattaatattcatcatgcccagaaaattttttgcccatttacataaatgaattaagtatcctttattaaagcattagtgaaaatcttactttaattgtaaaaataattaccgaattaaattaataaaaattattgttttaattgtaataaaaaattgtcgaattaaattaataaaaattctttttttatgtaaaaataattgcaaaattaaattaagaaatg

SEQ ID NO: 118350 - DNA, 263 bp, Heterodera glycines
aatttataggtaaaattttgaaaaattttatgggaatttaatccaattcttaggggtgtaaaagtcgcgtttcgcgccaaaaagcgaaatgcgaaacgccaaaaaatgcgaataatgcgaaaggcgaaatgcgaaaagcgaaacctaggcacatctctgctacaaagtagggtgtttttgtcgctttgcccctattttttattcattttaactttttaaaaattcttaataatattgaaatactatataaaccaaccataatg

SEQ ID NO: 118351 - DNA, 1003 bp, Heterodera glycines
tttattgaatgatataccataaaatcctgctgggccgtttcgtaaaactgccaagcttacagatttttcgagaaaaatcgtcataacttttcttaaccttacaaaataagtttttctcttaaaatctgtaaatttggcagtttttatgaaacgatctagcaacccataaatattaatttggttgaaaatgagccaatatacgaagccaatgtgatcataatatattcataatttagcttctaatttttttttgtttaaataatttttaatgaatactttttttttaaaattatattattcaatacaaaatttttctcaataggtatcaaaatttgagcaatattctatagagcgaagcgaatttagtttgtgcatttttctatcggcttctccatttattcatctatttcttttttaattttaattaaaatacaaaataatactaaagaatgcaaaaagaattatattaaaacaaatattaataaaggattaaaaatattcgaatggcaaaactcattagaaataaaatataaatcaatgatgacaactggtgaaaagagaagacaaatatttgtcatatctttaaaaatgttgaataaaactaatttatatttaaatatattttcaaagttaattttttttttgaaattctttatagcttcttacaaataatcaaattatatattttcaaataatatatagacttattactttataagtttccaaaatgttatacaaataatatttagcaaagttttttaattaaattcacttgcaaattaaacaagaagagaatttaattttcgatttttggaactattttttataaaaaaatcagctgccataatttgtatttaatctggattcgaaattaactgaggatattcaaagacaaaaaaaaattaaaagaaacaaaaataagatgcatttgtaaacccattccatcatacctatttaataaattttttaataaaataaaaacttattatttttagtttttatg

SEQ ID NO: 118352 - DNA, 1003 bp, Heterodera glycines
acaggtaccattgagcttttggaggagttcactgtgtgcaagacggttgaccaactgtccgcggaccagccccgcattttgaagcagttcggccacctgttggcacaattccgcatccgtctggtcgcctggtaaagcaaaaagaagggatttgaacagattgacggaggagcagatcaattgaatgaataattgatgtgtttttttggttggatcaatccacaatttttcttttttttaaatttttttttaattttaattgatttcatgcgattttaatttaaaattaaacagtttggtggttttttagaccgacttctatttaatattccaccaactttggaccaacaaaatctcaaatttaaggctaaatttctcaaaatctaattgaccaaaagcagaaattgtttattgaacaataagaacaaaaaatataattgttttccggaaaaagtaaaaacatgtttcctgtcttgttacagaaatacacctatttttcggttttgacagaaaagacaattgttttccggttactgtcgaaggttttgaatgtgttgaaatacaatttgttgcagtcaaacatccaatccaatccaccactttattttgttatttttttctaatttaaattggttttatgggattttaatttaaaatttagttgctggtggttttgcaagaccgacttctattcataaaactatggtgtattttgatggttttacgaatacattattcattttcttcaataaattgttcttgtcctcagtagtttctcattaatttcccaatacattataaatgacgattttgattacatacaaaatggtaaatagatagcaaaaattggaaaattgagtttttacggctgatcagtagggggtcggaaaaacatttgatataaattcctgaaatattgcaccaacaaaatctcttatttatggctaaatttgcacgaaatctcttcaaaatcattaaatttcagttaaaagcctacggaatg

SEQ ID NO: 118353 - DNA, 327 bp, Heterodera glycines
ttccgatcagcataacaagtggattcgggacgctgatcttgtaaaagagcgcaaagctaaataaaaaatggatgaattttatgtggtactacgatccaattcacctggaccagggaacacgacctcaaaattcactgtcaggcttccacacacgcttgagctggacgcaaactggatggtggcactttcatcaattatatacccatattatttccatccgtcggaattgatgatgacgacttcattagcattaaacttgtaaatccaaattttacattcgcggatgacaaacgttttgtggatattgaactaaaaataccgagcatg

SEQ ID NO: 118354 - DNA, 339 bp, Heterodera glycines
ggttcgtccgcgtgtccccccccccccataaacttcatggccaaaatgaataccattttcgtgataagcgaccccaaaaaaatactattttctttaaaaagtgaatggcggccgtacggagggattcgatgaaatggaaagatttttcgactttttgtttgaatctgagttaagtttcgaaatgggtcaaaatttatgaacggtgtcacagctagagggcatgcaacaatggttttgtactgcctttttctgacaagcgctgtataaaaatggagcccataagctcgaaaaatcgagcgtcttctctcgaaactgattaacttgaccattttgggtatg

SEQ ID NO: 118355 - DNA, 535 bp, Heterodera glycines
atttcccccctggttcttcaattaaatggaaattcattttttgacgcattaaaatgatttttttctgattaaaaaactgaataaatcattattttacttaataaaataaggaaatcctgtttaattgcaaagaaataataataataattttatcttaatgacaaaataattgccaattggtaaattaatgattaaataaaattttattactttctactggagctcatttgaaaataataaacatattttcaataaaaataaaataaattcacaatgtaaagagattttagaaaaattaaagagattttatgaaatttcattatatcagaaaattggtgtaaaattccaaaaatgaaattttagcgccaaaaatgtgctgttcacgaaaataatagaaacttgaatatttgaatgctttgaacacctgtgggtttccacaacggttagccgacttttgcgccgcagacatttgcgccgcgccatttgcgccgcgacacttcccaattcttataagcgaggacggaggctgtccatg

SEQ ID NO: 118356 - DNA, 228 bp, Heterodera glycines
  unsure (1)..(228): unsure at all n locations
cagggtgaaacagagagtgatcaatctccgggattcgggcaaaatagagacatttattgtatttataaactgcaatgcttnttcggtcactaaactaattgtaatctgtagcgttttttttgcatatgttttgaaaaagctttctctattttttaggcgttgctttggaatttatcatcgacgcttgttcaaaaagtgtcgccctttttatggcgttgacaaaaaatg

SEQ ID NO: 118357 - DNA, 263 bp, Heterodera glycines
cattcttccgacgaatttgcgcatttgcattaggaaaacggggaaagtgagcagaagagtttaattgtgagcataaataacttaatttgttttaaaagtgagtaaaaaaataattaagcgaatgatttgaagggatttgtcatgggcaaaatggacaacagacaacgcacgaagaacgaaccgaaattcggactatgacggcgaaaatttaaaagcaaaaattataaaaatataatttaaggcaatggaaaagacggacaatg

SEQ ID NO: 118358 - DNA, 79 bp, Heterodera glycines
tgttccaatttgtccttctttgtctttaatccatgccaatttgccctaaggcgttggcattgacgacgcttttctaatg

SEQ ID NO: 118359 - DNA, 1003 bp, Heterodera glycines
ttagctggggaagggtgaaccgattcgtccggggcaaatagggggagagggggaattggaagagttcgggattagccaattcccccctctcgaaagagtgaaagagtacaatgtgctggagggcagctaaagacttaaagtgggcggggcctacatgatcagcttaggcatactgtacttagtaaatggtctacggtaaacacaaaataatgagctaagtcaaactaatagagagaatgagaaagaaaagtacatttcttttgcttcaaattttcataccgatagaaaaatatatataaataataatttaattcaaattaaaaaaaatcattttgtttactaaaaaaaattcaaaatttttcatttgaacggcatttttcgtcactagaaatcactattttggcgctttgtcactatttttttcattttttcgacattacagtaaaaccaaaaaatacacccctaagaatcgacctaaaaattttcaaaattcactcctaagaaatgaaaaaattttctcaaaaattcatttcttggcaagaatttataatttaaaaattattttttaggtgcctattttgggttttttgcccttaaaaacccagtcctactcattttcaacagcaactagtgaataaaaattatttttgcttaatttttggctgaaaaattatgtcacaattcgtcactatttcgcaccttttgccactattttggcacttttttgatatttttttatcactattttagttaactatttcaagatttttcgtcactataagtcgcgaccctactcctaacttttttttttcctgatacatatggattagaatttacttagaaaaagcttcccctcttcatttttttctgattccaatatcatttcaattttaaacaaacttttcataatggttttgtccattttcttaagttttattattttagcattttaaaattaaagctgataattatttaatccggcataacattcgtgttctaaatg

SEQ ID NO: 118360 - DNA, 565 bp, Heterodera glycines
tcccgaactttgacataaacacagcaacctccgtctctatctcgtcaccgcaagtagaaaatccgccagtctgtcccgagcatcgccttttgttgccccccgccccctcaattcgcctgggagtgtttttcccccaattgctcttcttttgaatcgaaatggccaggccacaataatttatttgttgttaattgtgatttatccaagtttatttatctaaagtagcgtgattagcagtgaaattggcaatgaaagtccgtccttttgtgtgggtttggctcgtcggtccttttttctttctctttctttttccactgatagtgagcgatcagaaagtcaaacatgccaagtcataaagggccgtctttggccattgaatgggcattgattgagccgagagaatgtcgccccctccccgcccattgttaaaactgaacggttcttcggctcgccttgttccgccctttttgctattcatccgttggtccttcgcccgttttggccattcgctcgcccttttgttcctttgattggctttcgctataaaaggtgtcccatcggaatg

SEQ ID NO: 118361 - DNA, 497 bp, Heterodera glycines
  unsure (1)..(497): unsure at all n locations
atcatttttcaaaattaatttcctttaatgcttctttagtctgaccagtgttngagtgaggtgcaaacgctgtgccaattgttgctgtgcgtgccgggcatttttcgcntnaaggaatttcaatggtacggtcaaagaccgatgcgcacatggctggtggattaaaattcaattatttaatttgttaacaattttaaataattttaggcttactttccctttttgaagggtgtaatattccggttctaaattggtacgatcctcccacgcttaactttccgcgtgacatcagagcgcgagttggccttccgttgtcaaaagatgcgccaaattatgtaggcccttttttcaccgatggaaattgggaaaaaaattaggaaattaaaaattttttagtcaagaaaaaggaaatggctttcaattttgaccttttttattcccttaaatttatttaatccaaaaagtggataatgcacgatttataggtgaacgaaatg

SEQ ID NO: 118362 - DNA, 1003 bp, Heterodera glycines
ttcgattatatccccccccctcgattagaacccccctctcgaataaagcccccttttgaggagggttaaacaatagagcccccgggggctataatcgaagaagtacggtattacatatttattcacaaatcgaaacaaatgtgaagaaaagtattattattaggaagaagatactaaaactgattttatagaattgtttttttatatgatgggctcaatgttctcaaataaatattgtaatttgcgcctttttactgtatcaaattatgattttgcggtatgttacataataagcaaattgccacggcgaaaggcctgcttacatgatttttttaactttgttttttcactcggaaaaattctaaatgtgaaaaatgtcatataatttcttagcactctctctattttttgttttacatttcgtgaatttttgtaagtgaaattttggctctaatgcattttatgagtccaatcgagttttatgagtccaatcgagttttatgagtccaatcaaatatttgtgaataaagtacattttacaattttattcaacttaggagatttttcattccacaataagatgaataaataaaaaagttcactttgtttgcgcaagcgctagaagacattgtgtttgttctttagataaaagaactaacattcgttcaatgcatacgatcatagatttttataacttttatagagatctttgccaagtgtggcagaaagacagcaagcagaagggcggctgggtggccaaggccttgttgtggaaatcgatgaaagcaaattttttagagcaaaatataacaggggggagaatgataaatagagcctacgattgggttttggtctattagaaaggggcactaacaaagttagattcttcaacgtacagcgtagagatgccgacactctcctgcctataatagctgataatattgaagctaactcaattataataagtgacggatgggctgcttatggagggataaataacatg

SEQ ID NO: 118363 - DNA, 68 bp, Heterodera glycines
aacggtggggaggaggggaaaatgaatgaatggtggcggaaaaagcggatgaaaaatgaatgaaaatg

SEQ ID NO: 118364 - DNA, 133 bp, Heterodera glycines
ttggtggttaaattgctttaaaaaattttaaatatttattttaaaaatttaattgataatagccgatggatgtgcgtgccctgctgaaaagccacaatcaccgcatcattcctcctcatcatcaccagtgatg

SEQ ID NO: 118365 - DNA, 64 bp, Heterodera glycines
ggtcagtttggctgtttcgattctcaaacataaataaaatagttaatttctttacagccacatg

SEQ ID NO: 118366 - DNA, 276 bp, Heterodera glycines
acggtactttcgggttttgtgtcaacaaaatttttctctttgttaaattgattttaaattaataaaaagtcgtttctatgggttttcggggtcgtagaacccgaatatgatgtccgtttcgacccatttcgaactccgaacccggagttcgaacaattatcaaaattcaatttttttttcattttttctcctaattattgtatcatcgagagaactcacatcatattgccgttgccggtcggtgtgggcactatgtttggttcatggagggtaatg

SEQ ID NO: 118367 - DNA, 671 bp, Heterodera glycines
  unsure (1)..(671): unsure at all n locations
gggataaanttggatgaacaataaacaagcactatattatttttaaatgttaattagagtataataaattaaatgggaggggaacataaattatgtaatgtcatggaaatgaagagaaattaaaatttgagaaataaaaaataatttttaatatttaaaaaaatgatttttttaatgatataaaattacataaaattaattttttttttttcattatgaaatttttatattcataatttaatggagagggaacataaattatgtaatgttagggaagtgaagagaaatttttgaaatacatatacaaagaaaattttgagagcgatcaacaattaatgcgaaaaaattctctcgggattttttgatttattaaaataaaatgctattaatgctaagcaatcggttaaattatatcctcaaaaattaaagaattttaaggtcttcatgatatacaaattagtgaaattaaatttttgagattataaaattttatagaaataatttaatgcagggcaaggaactgcgaagcctcgatgcttttagtgaattttctaacccggatttcggctccaaatattaaaaatattgccttataatttaattagtgtgtgccataattcaaataaaatttaaataaatgaaatattttatttagtacgaggctgaggatg

SEQ ID NO: 118368 - DNA, 485 bp, Heterodera glycines
  unsure (1)..(485): unsure at all n locations
gttaaaattatattttaatacagtcgatcagtttcttttcactttgccgttaaacattgtgtatatttggataccacaactccgtcgncacagtaaagagctattaaaatttaatattttatttccattgttcaaactaataaagcatttattaaaatttaaaagtattaaaaaaactaacaaaaaaactagatttggatatgtttttatgaaaaatgtttcaacttaagaaatgttttacaaaatcgagaactattaaaaaaagtcatgaatttctcaactcaagagttgaaagttatgaattttttattttcttaacataatcccaaattgtcaaaaacaaaatttgtgaaagggtgacctaaattcccaattaattaccaaaaaagcctcgtccaccaagcggacgtttctgctacgataaccacgagtgttgtacacagtggaccaccaggggcgcgtgttggacagcgccgcgttacatg

SEQ ID NO: 118369 - DNA, 293 bp, Heterodera glycines; identical to SEQ ID NO: 115397

SEQ ID NO: 118370 - DNA, 119 bp, Heterodera glycines
tcttcaatttaaatttttttaatcgttccacctaaactataaaattgccaaaaaaataaaaatcgaattacgaaaactaaaaaaatcttttttatttttagtcgcctccctccccaatg

SEQ ID NO: 118371 - DNA, 320 bp, Heterodera glycines
gggggggggggggggggggttaaagggggccgggccaaaatattcgcccccgaaataaaaaaattttttcaaacctagaaatttttcataaacaattcttagggaatttcttagtaagaaaatttcaagaaaaaaatttttgaaaaacatttcagcgattcgaaattttatgaaaattgctaagttttttagaaaaatttgaatttttcaatggtttttcaggaaattttcttttaaaaaatttcttaagaattttttcttgaaaatttctaagtttgaaaaatttctttttaaatttctgcggcgatatttttaggatg

SEQ ID NO: 118372 - DNA, 1003 bp, Heterodera glycines
gagactggcactgaaatttttaaatttgtttacacaaaaagcaaagggaaagcggcggaaaattggtgggagacaaatgagtgagtgactcattcattattcactgagtgaaatggacgaagagataaataaataaaaaatatttatggccagcggattatttttggttgagtcattatgaaatttggagtcgggggcgtttgggccccagtttttgggcccccgcgtttgggcccccgtttttgggccctcgtttttgggccccagggtcgtttgggccccagggtcgtttgggccccaagtacagaaaaatgaaaaatcacagtaaaaacaactttttaaatttcagcataaaaatgtaaaataaacattttaaaaataaattcaacaataatttgcaattaccacaaaagatttgattaattaagtaattgctgattattttcgtttgtaactttcttgaaatgttagaattctcttgttttctcgtattattacattattcagactttgtgctttcgaatgataccaaaaagatagggtttgttcgaacatggaaaaagttattgtataaaaaccatggattgtcaattgattggactcataaagtgcattagagtcaattttactttttgttttttggttgcaattgggttagccatttctgaaaaatgtccaaatcagaatgtacatcaaattggttaactattaaaaaataataggatttggaataagtaaaaaatgagcgaatgtaattaaacctaacttatgccaagtggcgagggatccctcaggcttagtttttagaatcttaatttttaaaaaagcacatttttctatttttgggttggggcccaaacgaccccgggcccaaaaacgggggcccaaaaacgggggcccaaacgcggggcccaaaaacgggggcccaaacgctctggtcccgtttttatgtgcgaaaacgccaaattgtgtatcatttaattgcagaataataaaatcaatg

SEQ ID NO: 118373 - DNA, 96 bp, Heterodera glycines
actgtccattgccttgcctcgtattttgctggtgcgttaattcgctgctttttaggaattcgtgagagggattcgcgactgtccgacgagggaatg

SEQ ID NO: 118374 - DNA, 676 bp, Heterodera glycines
gttgcactggttcaaaatcaaaaaaggaaaaatttattcgttaaaacattaattatcagggatgcaaaaaacatgtaaatgcatattttttttcctggcttctcaatgctctaaatagcaggaaaaacactttcttttttgtgtttgcgtataaaaatcgggacttttatttgcatatttatgcatattttggctttttctgcatatttcatgcatattttgccattttttgtgcatattttcagattcttttgcatattttgccatttttcgtcaaatattttcgcggtttttgggcttcgaacttcgaatttcgtgcttcgaaaaaaattaattcggcttcgagtgctaagccgagcttcgcccagccctgctccccgtagccagaaaagcatgaaaaacatgttttttatggttgttaagctatttacgagtttttaaaacctatttttagcacctaatttgggtttttttttagaacctaaaaagtaactattattttggcatttttttgcaccaaaaaatcttatccctggttataatatgctggaaaattcttttcatattaaatttatgaattagggagttgttgaatttttttctgaaaatactaatttaattttaaaaatgacgaaatttgtggctttttttctagaaaaaaatttgaagagatatg

SEQ ID NO: 118375 - DNA, 112 bp, Heterodera glycines
ggggttaaaatatgggactatgcaaaatttcaagaaattctcaactgtagaaaaattttttcaactgagtgaatatttcaataaatttccttcacttttacagttaaaaatg

SEQ ID NO: 118376 - DNA, 517 bp, Heterodera glycines
  unsure (1)..(517): unsure at all n locations
tgcaagggggagacgacgaaggaggggaaggacggtgaagcaagcatggaaatgaagagagagagagagaggaagagagagcgatggcaccactcactcgcccattgatcattcatcccatttcgaatttgcaaattttgtccagttttgtaaaattttaaatttccattattacaaaaaatgcaaatttcgacacgattaagaagctttccaatatttgaagtgctcgcccaatctctcacgtccgcattattgttgtgcaactgaccaatatgggcaaaagcgaagcaaaagttgtcatggatacggacgcggagagggagaagagaatgcccgggggggggngggggggagtgaccaattgccaaagggcaacgaaatgtccgaacagcacgcactaattccatccgatgtatacacttaagtcacttattaacgccttggggaacgaccggcgactaacggcgatgagtgacgaatcaaaggaaaaccgacagcatcagcacatccccaaatg

SEQ ID NO: 118377 - DNA, 329 bp, Heterodera glycines
  unsure (1)..(329): unsure at all n locations
caattcncaatataaaaccattcaattcttccacaattaacactaaacatttcttacctcccccctttgggagattatctctttcttccctttatcccttcgcccaattaatcaacacaattcttctcgcattagcatgcacacatcaaagaatgtattcccttcgcatttacgcgtaattatttccctttttaattttcatatgtctaattttgaataccacactaaatcaccacttttcgcccaattaatcaaactcatggccatttcggctctattctatcaacactttattgcttgattaatcatccaatttagaaaaaacaatg

SEQ ID NO: 118378 - DNA, 129 bp, Heterodera glycines
aaacgcgttctgttctatgcgtccagcaatttggacgacgaattcctgttcaggtaccacgcacaaatattcatgccaagttttccaaatggttaattcacacatttcatgtctgaactgcagcagatg

SEQ ID NO: 118379 - DNA, 103 bp, Heterodera glycines
ggtattatcccttttctcatttttgccgttttctcaattcgccgttaggactgagttggatttcaccgtcgccattgacttcactcgttccaatttgcccatg

SEQ ID NO: 118380 - DNA, 214 bp, Heterodera glycines
atttttgtctaattcgcaaaattacagctcactcttcgcgaaatataagctgaatcagtgtttgcggaatgaccgagctgattttcttatatccaaatgtaatctgtataagtttacagtaggaaattgtaatttgggggttattggcgatttcaaatcgatccttccggaacactgatgctgtttatatttagagcgtaatgagctgaaaatg

SEQ ID NO: 118381 - DNA, 71 bp, Heterodera glycines
aaaattttgaaataatttcccaattttcgatttttttatatcaaactttttttcccgccaaggttaacatg

SEQ ID NO: 118382 - DNA, 819 bp, Heterodera glycines
tgccccaccccaattaaacgacgactaattaggcacccaattaataataatttagcccctcgcgcagaaagaaaaatgggaaaaaattggacaaaataataaaatccgttgcggaagaggagaagccgaagaagcaaaatgacaaaaataatgggaggaaaaggaaggaaaagaagaagaaatcggagatgggaaaaatgggaaaatttatgtgagtgaatttggggggaggcaattcagagccaaatttgagcaacaatcaaacttttaagcaaatttaattaacagattataatttgaaaatttacggtggagtatttttcgggtaaaccggagaaatctgaaatcggaaaaacccaatgaagcccagggatcccagttctccacctggtctggagaatttcggccgaaaatcctgtctagtgcctttttgacgaaaattcatgaaaatccgagagttttaattaattcaaaattttaaagtgtcatttttgtacaaaatctgctaataaataataaattaaaacaaaaattcttaagaaattttcctccgcgattgactgactctccattgtcaaaaattggaaaacatttttaaaataatttttcgtataaatagaaaaaattgaaaatttggtcctcgtctgctgggcatgaaaaaatgttggccgcgtattcagcgtgtacaaaatttgctagtaaataataaattgcaccaaattcataagaaaatttcttaggcgacggtccctgaaattattttgagaaatagaaaaaatttacaaattttgtcctttgtctgctggacacattaaaatg

SEQ ID NO: 118383 - DNA, 179 bp, Heterodera glycines
ttctttcttttccatacagctcttcttttctgctctggctgatgtcttcaattgttttggccttttattgcgctttctccaccaattttcagcttcgttttgaagataacgtacaattttaatccatttgtcttttcgatttcatttatataattcagagttttgttatcttcaaaatg

SEQ ID NO: 118384 - DNA, 96 bp, Heterodera glycines
gctaaatgaatggaaaaaaagtaattaattaatatgtgacaaaatttaatttgtaaaaataaaattaaaaaatatttttaaaaatatttagaaatg

SEQ ID NO: 118385 - DNA, 222 bp, Heterodera glycines
ggtaaattttaatggtaaaataaataaattattattccaataaaaatgctcttaattctttatcttttcattgcacttttattatttcaatttaatattaaatacttttctttgacctttaccgaatcagaaattgtttttttaattcagcaaatgtccctttttaattacccccccccctcccctctcattaccaattaggctcctttttctgccaaaatg

SEQ ID NO: 118386 - DNA, 198 bp, Heterodera glycines
ggttatgcctgtatcagccttagatcgtataggatgccaccagggagggtccaggcacatatccagaatcggaagacgaatccgaaaacctttttttttgctctggtctgaaaattttttctccgatgctatttttcaaaaattctgcaccaaggcgaaaaaaaaacaaaattttacgcccttttacaacaaaaaatg

SEQ ID NO: 118387 - DNA, 308 bp, Heterodera glycines
aagctatttaaaattatgaaattaaaaactatctttaataggggaatggtggtaattaatttggtgtatcttatttttcccgaaagtcacttgggctgaaacctacgaaaagcaaattgtgaaatgctgttgtcaactactactcgttttgaattcatattttacgaatttaagttctagaaaaatatgaacacaaatctagtcaaaaagaataaattaagcggaccaaataagttttaattttctttacaaatcaaatattttattagtcaaattaaaattgtttttaatgtcaggaatcgaccatg

SEQ ID NO: 118388 - DNA, 122 bp, Heterodera glycines
aaaatctgttttattttttcaagatttaactcaaaaatcacgggcatataagctatctgttcggttaaggttttttgatctgacttacaaatttttaattctgtttttttgtttaaggcatg

SEQ ID NO: 118389 - DNA, 811 bp, Heterodera glycines
aatagtatatttaaatctttgcaaattcccaagtcgcaacggtgtatgacgtcactcaaaaactaatgaataattttctgtcaaaaatttttattttgatgattctttgagcaacgatccggcacatcatttaaaaaaggaaaaaaaataattaaaaaaaaataattaaattttaaaaaactcaactgcgcaagttttccttgcttctgcctaggctctccttttcgttttgctttgtggtgtaaataatttagatggtagaatatgaaggtctgagtggagacaaaaagaatttatttttaattaatttttgtgggaaataattcaattgaaattttcggttttttttttcttgggaaaatactcggttggtcccatttgaaaacccagcagctctctgtactggatgtcttagtcccggttttgcccaaaattatcggtcccgttctatactaaattaaccaaaaagctttattatttttcgcttgccaaattttatacaattttatttatttacaaaaaaattaatttattcttcatttatgaattttcttttctctcgttattggaaagtcaataaatgcatttgatggacagcacaaatcacttacatatttagtcattccaagataataataaatgtgatgattcagaaatggatagcaaaatgtgtggggaaatcattcaatgaattaatttaatttcgttatttcgcattcacaattttgaaataacggataattactataaaatttgcttcttcaaatttagtcacaaatttcaaaataataccaaatttatttctaaaatg

SEQ ID NO: 118390 - DNA, 551 bp, Heterodera glycines
tcgcttggtagggctcttgtgtagtttaagccccatacataaaattatttattttttacacttcagaataaaatatgccaaacaaaatcatttaaaccttttttagactaaaaatgaaaaacaaaagttttaatttttcgacttcttgttcgaattcgggtccgggatttgccgaaacgaatactggattcgcaattagcgaccccgaaaacctatagattggcttcttttattctgaaatgtaaaaatatttgtatatggggctacactacacagcccttggtagtactatcgatctcccctcatttgaagaaaattttatgtcagattaatgatcagcgaccctgaaaacatttataaacatgttccgtgaatttctgaacgaaaaattttccaaaaagaggcatgcatcatcgatagtattttacacatctttttcttttttgcaatcattgatctacatgaaatttcacaatcagcagcagcaaaatgccggcacggatcccgccgccgataatggaggcgagcacgaagaataagtggaggcaatg

SEQ ID NO: 118391 - DNA, 277 bp, Heterodera glycines
ttcgacaacattgttgatcaaatttcccattattaccccgtgaatgcgtgatcaaatgatcgcttatatgcagcaaatcacatttatttaggcatattatatgcacaataaaaaaaaattttttgtttgaaaatatgttcgaatccgggttaggggttcagaatttgtcaaaaataatgccggattcgtgctcagcaccataaaatagccctagaaaaatttttccaggcttttcaaataaaaaaaacgggaccagtaaactagtttgccgcaaatg

SEQ ID NO: 118392 - DNA, 678 bp, Heterodera glycines
tttgggcactgtcggccaccgcatttaagcgctgtccgatcagcgaaaaatcagtcagttcacaaatttcataagctcctaaccaaaaagcactaactaataagctggggaaggaaaaaggaaaagccaaataaaaacattttttgaaaatttaatagcgattaaaaaagatttaaataatttttttggaaactatttaaatttctttttttatttcatttttaattagaacacaaaaaatattttttggtttaatatccaatattttgtatttcattgtaacattttaggaagagatttttcctctatttctgatcccaaatcccactccaaagcaacccgtctcactctcaattttgaacatgaacaagtggcttgcacttgtgtaagttaagggagggaggaggcttgaactctggccaaatattaactctctgtccactttcagtctgttgatcgccctgatcagcgcgcaggccagcgctttttcacttggtaattaaaaatttgattaaaaaagttttttttttttgaatttctccaaggctagtagcttttttaaacagagtttcgagtctataaattcttcgctctcgggtatcacttaacacgaatacaccatcatacacaggtgatgcaagcatcattttgccggacggaaaacttggcgacacgatg

SEQ ID NO: 118393 - DNA, 230 bp, Heterodera glycines
gaattggcaaaatccaaacagtgtcaacccctttttttttcaaaatccagaggaacaggaaaatgcctgtgtatgcgccaatttttcgtggaattaaatgtggcaagtttggttcccaaattgcagttcccaagttgattcggaaatgaaaatgttcaaaggccaaaaaaaaaatttttacaaaattttgtaaataaaaaaaaaaaaaatttattttagcatggaaaatg

SEQ ID NO: 118394 - DNA, 855 bp, Heterodera glycines
aataaaaactggaagcaagaaacaattcattaatttatggatctaaattcgtataaattgttgttgggcagaaaattgttacacattcagaatttgttagagtaaatttgttaaaaatttggtttttctaaaatattttgtgcattttaaaatttttccatatttttattccatagatgaagctgaataacgtagaattttttgcgttttagtggaatttgatttattttacgactaattatacataatcagcgataaaaattaataaattaatgaaaaataaacctatgccgagagcaattgtttttagtgaaaaccccccgactttgcagacttcgatccaattatgggcggtctataaaaataattaaatcagtcaaaataagaaaaaattaattattatataaaaaagaatttcaaaatttaaatattgacatattgttttaataacattttaaacgtgcaaagctcctacgcattattagctgttgctgattgtctgagccaaagattgtttcattatggcccaatatttaacatttttgaaaattaatcattttccatcatttggaattgtcaattaattttctgtccaacaatgaataattcttaaaaagcaatttgttcaattaattggtaatacaaatgcacaaaaaattgcttaatcatcgcatttaaggccaattcggcccatttatgactttttgagttttaatcttatgaccggacaaaaagactatttaaggccaattaacttttaacgaagcaaccactaattcagcaatatattttaaataaattcaattaatttaattataatataaaatataattatatttgaatttagtcaaaatg

SEQ ID NO: 118395 - DNA, 378 bp, Heterodera glycines
ttctccaattttattgtggcataaagccaatcgatattcgcctctctccgtcaccaatttattattttattttcttcaataaactttattgtttatatttgttgtcgttcctttgggtaaggacacaacaaatttggcgcagtcagcaacaaaagcctaagcggctttcattggacattttaaaaaactgatcacctgggtggtgtaagtttccgctgggtgcggttttcatcgacaaaaaaaactgatcacctgggtggtgtaagtttccgctgggtgcggttttcatcgacaaaaaaactgatcacctggggggtgtaagtttccgctgggtgcggttttgaaaattcaacaaattttcgacaaaaattcgacatg

SEQ ID NO: 118396 - DNA, 140 bp, Heterodera glycines
ttacgggtccttttcggcattttagccgataaaatcgggtaatgtttgcttttatcagtgtattaattgcctttaattactcttttttcattttgctaattaacttttctttcagttgtgctagtgaagtgaacaaaatg

SEQ ID NO: 118397 - DNA, 160 bp, Heterodera glycines
ataatgaaagcagaggtgcgcaacgagcaactgaaactcagttattacatcgtaaaattaaaaaaaaaaattaatatttttgaaacgattttactgtatttaaaagaacggtacatggaacggaacaacaaattgtacggctgtgaaattgacggaaatg

SEQ ID NO: 118398 - DNA, 402 bp, Heterodera glycines
ttcaaaagctttaaatgtttaatagtcgctattgaatgcaaatgagataagccttaatgagagctctaagaatacttgtttatctttaaactttcaaaaaaatttcattgaattttctatactaaaaaacattttttttaaaattcattaattgataaatttcccttttacattttcacaaatgaatcataattaatttactaaattccttctgaatttcccaaccgattgattcatttttataaaatatgtgaattaatttttcaaaatattaggctaaagcactgccctttttttgtacagtgaaaagaaacaacaaaaatgtcttttttattatttcatttttcaattttccctttttaactattattttccaacttcaatcatttttaaataaaaatg

SEQ ID NO: 118399 - DNA, 81 bp, Heterodera glycines
aaaaggccaagatgcaatggatcaacggccaaagggacaaaatacaatggaaacggccaatgggacaaaaggcccaaaatg

SEQ ID NO: 118400 - DNA, 1003 bp, Heterodera glycines
cacttggcataagttaggtttaattacattcgctcattttttacttattccaaatcctattattttttaatagttaaccaatttgatgtacattctgatttggacatttttcagaaatggctaacccaattgcaaccaaaaaacaaaaagtaaaattgactctaatgcactttatgagtccaatcaattgacaatccatggtttttatacaataactttttccatgttcgaacaaaccctatctttttggtatcattcgaaagcacaaagtctgaataatgtaataatacgagaaaacaagagaattctaacatttcaagaaagttacaaacgaaaataatcagcaattacttaattaatcaaatcttttgtggtaattgcaaattattgttgaatttatttttaaaatgtttattttacatttttatgctgaaatttaaaaagttgtttttactgtgatttttcatttttctgtacttggggcccaaacgaccctggggcccaaacgaccctggggcccaaaaacgagggcccaaaaacgggggcccaaacgcgggggcccaaaaactggggcccaaacgcccccgactccaaatttcataatgactcaaccaaaaataatccgctggccataaatattttttatttatttatctcttcgtccatttcactcagtgaataatgaatgagtcactcactcatttgtctcccaccaattttccgccgctttccctttgctttttgtgtaaacaaatttaaaaatttcagtgccagtctctctcttatcgttgtcattattcgttcattctttacgagtaaaaaacgaaatatttgcacatataaaaggccacaaattcctcggaaaagtgaagtcccaaccgaaagataagacaccaaagattcaaattttcattttctgacaccatttctaaaacattcgttgcttaaattccatttttaaaatttaattaatttaagccattaaaaaaaatctgacaaaatg

SEQ ID NO: 118401 - DNA, 584 bp, Heterodera glycines
tctccaactataacaaaattggtatctgaaatttatttttgaaaaaaagaatttttttctaaacaaatcctaaacaaaagttgctcattcgttgcactgttttgctttttattcatgaaaaatttgcgataaaatgtattgatacgactcagaatgttccaaattgggtcggacaaatgaaaattgttagagaaggaagtaattattgattaggtgtatgacccaacgccacttcgtcatcttccccctccgattcccctcatttcaattgttcattgtgcccaccaattttgacctcccaatttatattctctgcatttatttattattttattttcttcggcaaataaacttatttaatttgttatcttcggacataacaaattttggcgcagtcagcaattaactgcacatcaccggcaaagcaacaattcaagctttatctcgtgctgatattgctcgtgttggaaaattagaaatctcgtgttgatttctaattttcgcagatcaaaaaaaaaacaaaacttttctctccgtgtgagattaaagtctgccgtgtgcagtttttcttcaattggaccatg

SEQ ID NO: 118402 - DNA, 543 bp, Heterodera glycines
  unsure (1)..(543): unsure at all n locations
tgattataaatttttcgaaatcanaaatatttcaatccgacttcaaaaagatttcctcgctggaatcgttcgtaatggtcattctatctcagccgtcatgttcttgttgcatattgtcgctaccaaattgtccgaagtatggaaattattcttatcattatcttgtattttttggatcggttactttgcatgtttttttctatttagactcgtttcactttccttggtctgctggctgtcctttcatggccggccttattcttcgtacattatgaacagattcacaaccgagattatctgatcagtcgcttagcactttctgcctttacactgctcatcagcacagcacttctctttttaccaaaaaagccgaaacgcaagaaaagaccgaacactttttacaggttaacgaaccaagacgcgccaataatctggtcataatttagtgccttttccgttgccagcactcctctctcgcaacgttcacgttttactcgggactcatctgttacagattttgtacttgataattcaaaaagaatg

SEQ ID NO: 118403 - DNA, 1003 bp, Heterodera glycines
cacccaaaatgaaaccaaattttaaaatattgatatcattcaataggcccaactgttttctattagcctataaagtttcaaaaagttccgttaagtttcaaaaaagttataacttgagaagctcaaaaaaccaagttttttacaacatttttggtcgtaactttcttgaaacttaacgaaacctttttgaaggcacgatgacatttcgcctactaagccaagatcggagtttcgcctactaagccaaaatctgacatttcgcctactagacatctcgcctactgacacttcacctactggacatttcgtctactaagccaaaggcttcacatccatggaaaacaaagagtgattaagaagctaatggagatgcgtcactttctgtgttctttgaaaaatttatttgctttttttggctaaatttcattagcattataaatatagcgaattatatgtcaaattagaatatatatttggtgaaatttgctgtcgaaagagctaggtattttaggttagcaggcgagatattcaataggcgaaatgtacagtaggcaaaatgtcagattttaggtgagtaggcggaacgtccgattttggctgagtaggcgaaatgtcagtaggcgaagtgtcagtaggcgagatcgtccagtaggcgaaacgtacgcacaccctttttgaaattttgcatgctaatagaaaacaactagagctattgaatgatataaagaattaaaaatttggttgattttaagtaaagatattgaaaaaaattgctacaattgatggttttttgaccaacatcatagcaccgaccgaagaaacggcgagcagaaaaagggaatggcacagtgaattggaatggaacgcaacagaggagaggaggaccactaaagagaatatttttcaaaattatgaccatttgccgggcgttttaccttatccccccacccacaaatcaatcaatcaaataatcaattggacggatagagagagggaaaggatg

SEQ ID NO: 118404 - DNA, 1003 bp, Heterodera glycines
ttagtaaataagcttgaacaatttgttaatttatctttttgaatatttcaatttaattttttgcaattccttgcgggacccgcaaatttgaaatgcgggattaatcccgcgggatcctttcccgcaaaatttaattcaaaattcgcattggaatctgcaaatttgaaattgctgagctctattaacatactatgtttcctgtaatagtatgaaacgggtttatcattccccttgaaaatgtcttttaatgaggggggggggggggttctattagggaaaatggcaaaaaacacttattttttttctcactttgtcaacgcttttacaaaatgtttctttcccaacctttccctcattcatttattgtttttattttgacaaaattggctccaacagtgacgacccctaactttttcaattcgggtaattgtaattttgaaaagtgcaattagaaataaactccaattgttttttatttgttaattgattattgctaattgactatcacattttaatttgtttgattgccttttttcctttttcctccaattgttgtttcacacaccgtccgaaaaaacgagatgtgtaccaataaatagagcggtaggggtcaactccgtcttgccaactccgtctcgccaactccgtctgggccaactacgtctaggggccaactccgtctcagccaactccgtctcgccaactccgtcttagtgtataaggggccaactccgtctcagacaaaaaaaaaatatttaaaaatttttttcgacgaatttttcaaaaaatatacccctaagaaattaaaaattttctcaaaaattcatctgcaaatctatttatttattttcatgttctgatttttaaaattattcatcaaaatatcgctttggcttaattttgttacttttaaaaataaatttaccgttatcatttattagtatatacttacctaacagtttaaagtaccattaattttttagccttgcgaaaatggaaaatg

SEQ ID NO: 118405 - DNA, 779 bp, Heterodera glycines
tcggttgccatgaatgcttagtaataatttgaccggtgacctctcccctccgggcacatcgttccgcccttttctttactgtttctcctttatttagttatttttctggtgtttttacattagtttattctttttgtttatgttttcatattttgtgctcaacacattccctccttttcactcaaaaattcactaattgttcagtgttgaatatgtcgctttggcgcgtttaattgacaagaaaaacctttttttctaatttctcgaataaaaatttgtacaaatcaaaacaagcgattcgtgcaggtactgaaacctttttaaaaagccgattttgaggatatttgacggtgccgaaccaagccttaaccgctaaagatggtaataaaagcggacactagcattttgaatgccttttcaaaaagcgccatcagcgaacagtcaattacgcttgtattaacaattcagtccttaacattgttaataccaacataaatctccatcttatttcaaaccttaccttccctttcctaattagctttttcccttttttcataatccattttcctattattggcgtcgcaatttgactatctttccaccttcaaattttttacatataatctccattattgttgaattttaaaaacattttatttgataaaatgtttgaatgatgaataaaataattaaaaggaattgcgctttaattggttttatcgtttaagcttggttcatcatctatttgcagtgttaatttcgcttaatttgtgtgaatg

SEQ ID NO: 118406 - DNA, 347 bp, Heterodera glycines
gtgctgagacgaatcgaaaaaatagtctcagtgtcaataaaaatatttaaatttaatttacaattcaagtcggtctcgaaaaaatattaatttaattagacaattatttttaaaaataaactaaaaaataatactataaaagcattcgatctccgaaaaagttgaaccgaaatgattaaatttaaatatttatcgacattgagactattttcggttcgacctaacaccacagaaaaaagtgccgaaaattcatttaaatttaaaatataattatatttagaaacaataacatttaattttgtgtttttatattttaattaataaatttttttgcaaaaagtgaaatg

SEQ ID NO: 118407 - DNA, 51 bp, Heterodera glycines
aaaaatttccatttaatttacgattatttcaggccatctctgatcataatg

SEQ ID NO: 118408 - DNA, 165 bp, Heterodera glycines
ttttatatgcattttctgttgcactttttttcagtgggaaatttgaatataaaaaggcgtgaaattgagagaaatttcattctcttcacattcttaattctattctctgcactattacatctaatttctgctgctcaccgactccatcgacaacgacacgcgatg

SEQ ID NO: 118409 - DNA, 787 bp, Heterodera glycines
tgctgcttcatttgcctgaaatgccaacgctggctaaaaaaaccaagggtcagttttttttggggggggggaaacaaaggggtaaaaagaaaaagctgagaatggacaaaaataagaacatgagaaagtgcattttaattatataaaattattttgttaaaattgaaaaaaaataattttcgttaggacatgtttttttaactaacaaattaaaatatgaattaaatctttttttaggttccctttttcactgggcttttgtaaattttaatgaactctttcctaattgcctttaaagtgcctttgcccatttccttccttttgttatccgttcgttgcccacggcaccaaaaatcgattgacccctttttccccttcccctttttccccttcccctttttcctcccatcccttttccctttaccttttcccgacacaatgtttaagccatggcttttcctattttttttaactttttccgttcaaccgaaaaccaaatgttacaatgagaaaagaagggaattaaaatgaagaaagaaatggcggagaaagagaagaaaagagatcaatgggagagaagggaagggaattaatattaattgcatttcttttcgtttcgtttcgccttttctttctttcaattattttcttcaaaaacaatagtccgttttaatcggactttttcaattttcctttttaattaaattaaaatccctccccttttttcccttttttaaacttttgccaattttccccctcagaaaggcttccccccgagttggagatg

SEQ ID NO: 118410 - DNA, 509 bp, Heterodera glycines
  unsure (1)..(509): unsure at all n locations
ttcaaatattttagatcagctgtaataaaacaactctaaaatctcaaaattgtaaatggatggagaagcgaagtgagttattcggactgcatgaaaaaagaaaaccaatggcaatcatctttcatatgtaggtcccgaaaattttttgtttgaaacttaaattcaaaattaccaaaacttacttttatgttgtatctttaagaatgaccatttcttgatgttgcaatggttttgacttacaaaacacctggggaccttcttttgttaggaacaaaagaagaaaaaatagaaaattttaaacttggcaaaataaagtgagattcaaaaaaaaacaaacaagtcccgtttcggtaactgacggactggcctaatctgtgaccaaatagcccagttggcttgtcacccaatagcatcgcccaattgacttccatcgcagagggggggggggggggggaattgaaaaaaatggcggtccatttttgtgaaatatttatntaagcaacaaaatg

SEQ ID NO: 118411 - DNA, 228 bp, Heterodera glycines
ttttgttttgtaacctcctgaatttgttttaaccaaattttagcattttttacgcctaaaaatcttttgcgttagttacataggtaggtattgaaaatttaagtgataatagaataaaaatttaaaaaccaaaagttaggaggggtgacaaaacaaaaaatatacgtataaaattggtaccatttgaagaaaccacaaatgacagtcttttgaacattgctagtaatg

SEQ ID NO: 118412 - DNA, 279 bp, Heterodera glycines
tcaaattcgttttgtttggaccaacgccttgactttatggcacttacactaaagaaaatgaaatatatgattttttcaaaattggattaattaaatgttcgctcaaataaaaaagcgataagtcaaaacaatatcacaaatttttaatttctaatattcaagtccaaaacttctaaacaatttcaaaactaaataacaacggtaactgtagccaatcatggcaggtaaaacaatctttaaaaacaaataaatataattatttttagatttcaaataatg

SEQ ID NO: 118413 - DNA, 233 bp, Heterodera glycines
ccgaagtactaacgaagtaccagcaagtgattgaagagcaattcggagcgggagtgatcgaggagacgacaatcggcaccggacggagcgagtatttcattccacatcaggcggtgatcacgccaaagaagctgagggtcgtgtatgacgccagtgcgcacgctaagggagcgccctccctaaacgactgcctgctgagaggcccagtgtggctgccggacttggcaggcatg

SEQ ID NO: 118414 - DNA, 492 bp, Heterodera glycines
taaactttatgtaaacaaaaaaaaaatgcattcccatgaattaatctattaaaaatattcaaattacatttagactatttttaaagccaaaaatgtgctaatagatgaaatcggagtgtgggaaaaagtgtggggtgggcgggataaagacaagggggagaaaaacaaataaaaactgctcaaaaatacgtgaatttctcaaccatttcgctagaaaaatcgtaaaccaaaattatttaaatgatttttggcgtaaatctttttaacccaatgtcaaatgaaagtaaaatctgatttgagatcttttggcatctgtgagaataaaaattaagctttaagtttgactcaattgtacatttattttttaatttcaacacactatcgatgccgatatgaatcgacgataagttttgatcttttacaaagatattaattacaaaaaaaaaggtgataataaaaattttaaaaatttttaatagatttttaggtatg

SEQ ID NO: 118415 - DNA, 460 bp, Heterodera glycines
tttcctgcaataaatgttttcatataaaggtttaaaaaattcgatcgggtttagaaacgttcaacaaatgcatagataaattttttgaatattatacaatcgtgctttttgctctctatcaatttattataaaaaaattttcttcccttcgaaattgaaggcagaatgctcatttgaagctacgcaaatataaattaatatttgctataagaaccgactatttagtcaacagaaaacaaataaatcataacgaatttctgttggtcccgggtcgtggcaccacttttgtcgttctgacgacggcaaaaaagtttgaatgggctgggcggacgtattcagagcgagttgacaaaaattaaagaccaaaggcgccaaaaattcactttattttgtaccctcaaacttgggtaattaaaccataattaattaatgaacaaatataatccgacatgataaaatg

SEQ ID NO: 118416 - DNA, 121 bp, Heterodera glycines
agttattaaaatttttattttcaaaagaggatactaaaactgggataaccccattcagagactagtcaaaaaaaataataataggcttggactactatactaaattagaaattttagaatg

SEQ ID NO: 118417 - DNA, 147 bp, Heterodera glycines; identical to SEQ ID NO: 100432

SEQ ID NO: 118418 - DNA, 70 bp, Heterodera glycines
actgtctctttttaagttacataacaacagattttaaagggaaaagtgtgctaattgagcctccaaaatg

SEQ ID NO: 118419 - DNA, 83 bp, Heterodera glycines
atattttttttggataattttgtctcatgtttatagcatttaatattttaaattaatcaaatttgtttcctatttttagaatg

SEQ ID NO: 118420 - DNA, 500 bp, Heterodera glycines
agtaggatttatattatttatattcattatcaatatttattttgttttattagtaatgatttttaatttatcttaaacaaattgagttttattttttgttgtggctgttagtgcttttttcttttaagataattcaattcaattatctctttttttgcctcagctttattattgttaaactttcgagttttaactttatacagtcatggtcatatgtttaacaacactcaaaattttctaccaaatttgatttaaattgattataaaatctcaatatgactatattgtgtttatatgttttatatttcttgtagcattttttgtgggctttataatgataccattcactatcccttgtaaaaatgttattattagttacaaacaattttaccaactgcactccctttttggggtggtcatatgtttaacaacactacccatatattttttcatagcattaaaaaaatctaaaaaaattcaggtaagcataactttggatg

SEQ ID NO: 118421 - DNA, 123 bp, Heterodera glycines
atgggagacgcactttacaaaatccgttttccaattatcgcagaaagggacttttcggactatatttgtaacaaattattaattagatttcgttttttttgtgtgacatgagtccaaaaaatg

SEQ ID NO: 118422 - DNA, 140 bp, Heterodera glycines
ggtattatatcatttaattggctttctgttgtgacctcgttccaaaaaaccctaaagaactaaatgttaggaaaattctgcttcaatcccttatttggacgactgagtaacatttgctttttcagttggacttggccatg

SEQ ID NO: 118423 - DNA, 935 bp, Heterodera glycines
tgtagataaatggactttctcttaaggccctttccccttatcccatttgccggtgcattgtgaaaatcggcaacaatgtgctgccaacgttcaaattctttaagcattcgcttaacaaatttgctgaacagtgggtttggttcaagaagggccccccaaatgttatgccacgcttctaacgaattgttgcttcttgaaagaccaatttcgaggcgatgagtcagattccatagctaaattacagaaatatgtaaaagtagatagtcaagaattttttaccgctattggaaatagcatttggggaattacatttaggcactcatgtttgggaaacgagaaattttgacgtccattaaaaattttttacggtgatcactgatcagacactccaaaatttcaaatacataactttatttaaaaaaaaatagttttcactaataaataattctttattttatttcagtgacgaaaggttcagtgacgaaaagtttagtgacgaaaggttcagtgacgaaacgttcggccacccgaaaaagctttctttctccgatcaaagtgtgtgtgtatagtttgtgataagtagggcgtcaaattatatggacaacaaatcgcaaaatatggacataaaattgcaaaaatctcaaaatatggacataaaattgcaaaatatggacatacatttttccaaatttagtgtataatttctcaaaatttcttcaaatttattggttgaaatgcatataagatacatttccaaattttgagctgaaaaactcattcgattgtcggcaaatttaaatttattcaatatttttcgtgaaaattttgctaaaaaattattttttggaaaattttccggtttttgaggtcaaaaggccaatttgcctgttgggggccgttctattagaggtttttttaaaaaatgccaaaatatg

SEQ ID NO: 118424 - DNA, 147 bp, Heterodera glycines
atgcgctttgtttcagttgcatttgcttatgccgtgccactttggacgatttggtgcccttagtcggcagtacttccggtgatttattatctgtcgaatctgctttctcaatgtgttttaattggtgtcttttgctgtttaggaatg

SEQ ID NO: 118425 - DNA, 558 bp, Heterodera glycines
tctcaccataacaataaagaattttttcaggcgatggttcaattagattcttatgatgttttaaaaaccgtaatagccaacgggtcttaccactcccagtagcccccgagagaattagagtgaacggaccgcgaaacatttttaatgcatcttatttatttgacctatttatattttcatagggaacatgtttcgcgcatttggggcatagccagaaattatcaaaaaatgatgtaccgaaatgcaaaagactgtgttttttacatctgttacacatctcgtaatgacaggggcagtaatgacaacacttaattttatgtggacagttcatttttttcaatttaattttatttttggttgctatttatagaaggggtatataaagggagtgaaaggaccatttgattggtacattgtatcaaaaatgcaaaaaccgataatcgtaaatataattgctctcgctaatatcggtaccggaattaaactaaactctctgacgatcaccgaatgcgaatttaagtataaccctagaaaattcaatgccgcagttatcaaatg

SEQ ID NO: 118426 - DNA, 330 bp, Heterodera glycines
tttcgccaacaaaatttgtcacttgagcaaggggtcagaacaaaaatttttcaaagccagaaaattgggctgaaaaaaacaatcgaattttgggctcaagaatcagaaaatctttttcaacaattttggggtcaaaagaattatttttcgtaaaattttttgtttttcaacgggccgggcacgacgtgccagaagtttattaacacttttgcacaaaaatgaccgatttgtgattctgagagaatgggagtccaagtgaaaaaggggttcattggtgccaattggaataaccggaagaaattttgaccatttcgtttaccaattgaaatg

SEQ ID NO: 118427 - DNA, 270 bp, Heterodera glycines
aaaagccgaaatggacattttaacactttttatcgttgtgtatttatgtgcttttggtacttatcattctttgtttatggttgtttacgaataaatcaattaattattaattaattaattaattatggtcactttatcagtcaaacgtcctcttccctttgtatttgtttgttttgcaaatcatttgctgtgactctctttttcgtttctctccgttttcccatgtttacccctggcgacgatttctgcgccgcctgcggttccatcatg

SEQ ID NO: 118428 - DNA, 274 bp, Heterodera glycines
aaaacatttccggcgtttctgcacggaaagaaatttgtggggaggggaagccattgaaaattagctagagcaatttatgaaaaaagcatatgaaatgcataacattatgccaatagttttcacatttgtgcagaaaattaatttgcatataaatattgaaaaactcacataaatttttatattaaaacatttcgtgaaactttgtgcctttaaatattttacatttttgctgcttttcataataagcattgatgatgaagcatcattagcaatg

SEQ ID NO: 118429 - DNA, 1003 bp, Heterodera glycines
tatttaattgtttaaattaatttttgtttcaataatgttattttttgtttgtgtgatcacaattctccaccaccccaataaatgataaagattcgaagttgattaattaattttaaatggttttttttatcaggcgccgctgggaaattttatcaggttttggcacgaatgcataatgagcgaattgaaaaagaagtttaattgaaaaattcgtcctgaatttcaataaagaaaaaatttgactctcatcagacttgatcaaattcctaccctatgacattcattttatctatggacctattaaggagtattaaataggcttaattaaaaatgaaactttatattttataaatgaaatagaaagcaaaacagacacaaacttatttgttataatttgaaataataatgctttacaaaacatttaaataaattaaaaatttcctaccttttttttagtcactagttttttcccaactccgccgatttttttcccgggtttgcaagcatatgagataattaaacagccaacctaaaatttctatcaaaaaaaaattggtcattagtgaacaaaggaaagctgatgaggaagacatcattttttttataaaatttgcaaaaatttaaatattttgtattaattttggtattttttaataaaaaattgaaatgtacctaaacaattgatatgcatttggcattttccggctttttcatcaatttttatgcccgtatttgtcaattaaaaaaatcttaaatcttttaaacttaatttgatttttattcatatgattttcttggggtctccctcatcccattgaatcgcatcaaaattttgttttgactattgaagctttgccacgtttattcataataaaattcgccatgaattcataaaaaataagtaattttcattatttatttcttttataaattatatatttttattttcaagaaatatatgaaaatataaatatttatgtttagcttacttctcaattaaatg

SEQ ID NO: 118430 - DNA, 129 bp, Heterodera glycines
tgttcgtttatttgtcttttttttttgttcggagtttgtctttgtcttttaattaagtagggaatttcgaattaatttataattttgaatttattattgctgaaccctcttattctcattgaaaaaatg

SEQ ID NO: 118431 - DNA, 1003 bp, Heterodera glycines
caaacctattgcgcgacttttttcttgcaaacccaaacctattgcaggggggtgcgcgacttttttgactacgcgactttatgcaaattattttaattaaatttatttaattttaaattattttaaacgtcttaaaggtcaaagacgttgaatttaaattcatttaaaattctccaaaaattccccgcaccaagcggatccgaaccccaggggggcggccagactgacgcactaaccactcggccacattggcaatggatgataaacattaatttgctctcataaagggaaaaattgacgtcaccagcggcgggaggggggcgagagcaggcggcgagaagggggagggggtcaaataaacaaatcaattattgaattcacaattttctcttttaaaagcaaaaagaaatgggggaccgtataataaaatataatttagaaattaaaataattaaaagggtaattaattaattattattcctaaaataaattttttattacttctaaaataatataaatatttttcagtgaattaacaaatacatttaagtttaattattgatttgtctgttaattttttatctcctcaaaaataattacagcaccctttcaggtgttgggcgtttgtttatttgaccaataatttttaatttcacatctttacgttgcccctccctcacacctgctcatttgtgtaatttgacaccgtttcttttatcttttcgttaaaaattaaaaagattgtctggaatttgtcttgcgccaaaccgctgtgccattcatttatgtaatttgacaccagtctgataataatttcgccaaaatttatttattatttgtccatttattacgaattattttgcatctatcactccaaattttgttaaaaaaaaattttttattgtcccaatttttaccattttgtgttttttcaacaaaataaatatttgttcaaaatttaaagaattaatttttaaaattttagacacaaaaacaaatcatg

SEQ ID NO: 118432 - DNA, 540 bp, Heterodera glycines
cccccccccgaaacgcaaaaaagtaaaaattttcagtaaattttttgaaattttcaacaattttcttaacaaattgcattaaaatactcaaaaaattttcccggcggcgcctatcggcaccgccgggacctccaattttaccaaaatgtcaaaaaatagtaatctttggcgaaaaacggctaaaaatcttgtaaaatataccccataattcgggatttcaaaaaacgaaaaacacacccctaaaaaccaaatttttgaacttcagccccctccgaagccaagggtctggctacgcccttgaaatgagaccatcaggagcatttcttttttgctcaaaaggggttccaaaataagaattgaattcagcacaaaaattgattaaaaatagttataatttattttcattaaaaagtgtaagatttaatttaatttaatttcaaacagattctctacattccatgtttgatagcaatttggaaacaccgtgcccaaccctgctacaagtttctgttcttcatcggcatcactgatgtgctgatg

SEQ ID NO: 118433 - DNA, 109 bp, Heterodera glycines
tgtattgaatactcaacaataattcatgaatttatgcacgtcgttggattgtaaaaataaatttaaaataaataaatttaaaaaatatattttttttttagtatccatg

SEQ ID NO: 118434 - DNA, 743 bp, Heterodera glycines
cggagatttgtcattggccatgtcctcattcggcttgccatactcgcatgtgcaatgagaatttgtcaaattaagctcatttttcataacgttttggaaaaaaatgggacagtattcgatttctttgatccaatgacattgccaataagtgactgcgaaagacggattgccctctaaatcaatttgtaattaatttaaaaacgggctgatccgcttgttttgactcttgtcatgaattcacgagtaacttttggagtctcagctcaactctcatgggaatattctcgatactgatttggtctcaagctgaggagtttagctgtttttgatttctcgtgaaaattttgcttcgctaaaaacggatttggcacaacaccagtatacgggggacatgatctgaccctgttgaacgtacaaaattctggcctccacgtcacctattgttacatatagtcagtcttactgtatcgtattttacaaaaggacacaccatttttcgtgatcttcccgtaaacagataaaactgaaatttttacaaatcgagctgagttctaaaaatattaagacaaagtagatgccaatgacaagccgaatattcagtcgaaaaattattataaactcagattttcaaatttttcaagcgcctgtctttttttataaaagaaactgaaaaaatgataataagagccgaaaagattgaagagagtgaaaaataaattaaggacatgttgtgacatgacatg

SEQ ID NO: 118435 - DNA, 127 bp, Heterodera glycines
ccttaacagatttttagaacaattttccattagatatgtaaagcattttaaaatacaaatttaaaatttttttaatttaaaaaacaaataaaattattttacaattttcctcgcctcgattcaaatg

SEQ ID NO: 118436 - DNA, 910 bp, Heterodera glycines
agatcattcaaaagagtaatcaatgtcttacgctctcactctttttctctctctgttcaattagccgcattctccccccactcccttccctctctctctctctctcttctattagccacagtctcttccatcactctttttctttgtcggctttgtccctgtggttttgcccctttctttctcttccgttttggcgtatttttcttttctgtttagcattttcaatttccgatctaatcggatggatattcatatttactgctaaaatgtgaagatctgaacagttctttttcatgtggcaattaatgttagcatcattagcctaagtaagcacatgaatttctcgagtaaaatcagctgaatttatttaaaaaataaactaaaaatagacattatttaaacaaattcgatttgcgaaaacaaactcatataatattccctagtaaattacaaaaattaaatgttttctcaaataaaaaatttgataattttctccgtcgtctttttttacattctcttatttgtaataatatcggttaattcgcatgttgacagaaactccaacgacgctgtttcgaatgtgcacaattcacttaccgtacatccgattagttcggaaggtatttttaattaccataattaacaaatagccataatagcattttgtttctttctgtttgaaagtataaaattttagttagaatccgaatgcattgtcataattgttctttgtttttcggggattcaaacgcttttctcggaagtgccgactttaatttttaaattgtctaaattattttttccttaaattttccccaaaaaacgaacttgagttgcgtcgggaacctcctaattttaagaaagtctcgaggcagtgaatccatcggatgagaattcgtggccaaatatg

SEQ ID NO: 118437 - DNA, 483 bp, Heterodera glycines
ttctcgctgattcggagtcccaccgtttccttcaaatttaggcccccaccattctttcatccaagaggaacattcacctggtaaattttggaaattttaataataaaaacctttccaaaagcgtggagtgtttcttacacagcaccgaacgacggtcggaaaaatgtccgaccatcgcatcgatacgtttttcaaggagttcaattcgctaagccacccgacccacaaagcatatggcaggaacagctgaaccaactgaaacaaaaagacgcacaaagcatggaattgatgggaaggacggaaatccctcaggcaaaaaaaggaaaaggaaaaaaaggaaaagaaaagagaaactaatcatcgaaacaactataggcaatccgcaattacttttcgttggatttgccgcccgaaaaagtgatcaaagaaatcatcggcgtcgatttgcactctctcctcggcccgccttttgacaaattcatg

SEQ ID NO: 118438 - DNA, 156 bp, Heterodera glycines
tggtcgttggtgggttttgttggaaatcaaaaagaaactttttcggaattcatctccccctgctattcagtgctgttagctagggaggatggcggatgggaagaagtttttttgaatcagacagagagaataacgtcgtccattgactgcctgatg

SEQ ID NO: 118439 - DNA, 1003 bp, Heterodera glycines
tcgagacttcgattccgacacaaaatttattaaagaagcgatcgacgaattaaaaatgcgtaaaatggtgaaaaaaattgatcgaaaagtccagcaaaacgaataaaagaatggttgggggtgaaggaagcgaagagagcgaccccttgggcagggccgcttaaatagacattcgacaaaatgggcggagtgacagacggcccgataatgcgatgagaaaaaatgggacaaaaaatgggcagaaattgtgatgtgaaaagtgtgaacaaagaaatggcgcataaaaataaaatgtaaattggcagatgtgaaaagttaaagaaattgaaaagaaagaactttgtgcaaaattgttttgcacaaagcttgggccggagattagccagccgatgagaaatgaatttgtaaagaagtgaaaaatgggacaaaaaataggtgaaatgataatggctggtacgattaaatggagaggaacgtgatcaaaatcagcgatttaggaattgatgaatcgggaatccgcccgaacgtctcgtcgcctttttgctctttttcttccggtatttcttcgtatttgacggtccggcccatgtgctcgtgcttggtcccgagaaaacggactccccgtaacggtcctcctcgtctgtgtcaagttctttcccgattcgctgcccgtccgcgccctggttgaacgcgagcactcgcgcacgccgtggcgggttggcaccccccttctcgtcgccaatgagaaaattggcgacaaattaattcgtcacatttttctctccttttgtaaatcaattttttgttgtttcttcagttcatttgtattaattcacaaagtgataaaatgggctcagagaaggggaaaggggggaacaacagcatcaaatcatcacaatataatacaaaattaattatgtattatattaatttgttaaacttgaaagggcatcaaaaagcggggaataaactcgacttttggaaggccggcactccgaacatg

SEQ ID NO: 118440 - DNA, 1003 bp, Heterodera glycines
taaacatgacatatttttttatattttgatggatcgtcctttattcttaacatagattctctaattcttgaaacgagccgcccagaagagagggtaggataaggcgagaataaaaacatttattttaccatacattaaatttatattcaaatttattttttttaaaaacttgtgctttgaacatcgaccacttcgccttttttgcatttgaactgctttgagcactaagccgaactttgccaaaccctttatccatgtccctgttcaaaatcagatacagatctcggctttcctggtccaagtcaaagccctttaaccggatgataaaaaaggtataaaaggaaaatttaaattttatttttaaaaaatattttttggctttcttcaatatcacttgcttaaattatattttattagaatggaaaaaaccatttttaaagacaaggacaacctaattgtattgattgccaataaataattgatttttattgcaacattctcttatatcttatatttacaattttatttaattttatttttatgttttagtaatataataacatttaataatatttaattattgttaccctttcttataaactttcttgtaattagccattttatttcttgaagaaaaagaaaacaaaaaataataattaataaatagcaaataaccaagactaatgtaattaaaatctttttggcatttatttttggcaactttcataaaactcgaaaaaaacacattctggtaaaaaactaaccatttgaaaaattaattttttatgattaatttttgaagtatcgttggaattcagaaattttttcccttacgtcctttgaaatcacaaatcacttaatcgttattactattatttataagacaagagattttaatacttatgccatgtttgagaatgctttcatttgattctcaaattggaatgaaataaatgaaaatgaaaatggttattttttacctaataatataaattttagaatg

SEQ ID NO: 118441 - DNA, 151 bp, Heterodera glycines
tcggtaaattacttgatcaaaaaatcataaagtgaaaatttaaacccatagaactcgccgaagcgcaagaccaccctgctgctgctgctgctgccgaagcggaagcagttgtcgactctgccgaccctgctcacgatgcgacaacgtgatg

SEQ ID NO: 118442 - DNA, 341 bp, Heterodera glycines
cgtatccgtatacggatttttacagatccgtagtccgtaatccgtatttttttgggccgatacggatttttacggagtacggattttccggatttttagtccgtaatccgtatgtgtgcctagtccgtagtccggatcctgatccgtacaattttttgatacggattacggattttttaaactgaacttttgttgaatattttttttgaattttcattatatttcgccaagttttgataataaatttgaatttgataactctttttctcaattcttaacttattttcaacaattaatgaattttttgtttgatctttgaaaaactgaatttagcaaagatg

SEQ ID NO: 118443 - DNA, 350 bp, Heterodera glycines
  unsure (1)..(350): unsure at all n locations
tcaaaaaattttacngcagaaatgctatttttagcccctttcttcatagcatatgcgcagaaaaaatatgttaatccatataatttacaaccctacatataatatatgtgggtgaccatggcaaaaagcataacatatttaatgatttatgctttttttcttaagcaactaaattatattttcttttttgggatttgattcccttgtataatctattaaataaatatttcaaaacatttcattgtttcaaaaagcttatggccaaaaaaggacttaaaattttttgaattttataaccaatttttcaaaaaattataaaattaatattaacatccaggagctattgaatg

SEQ ID NO: 118444 - DNA, 53 bp, Heterodera glycines
ttctttaaaaattgcctattttagaggatttttttcctaaattattccaaatg

SEQ ID NO: 118445 - DNA, 391 bp, Heterodera glycines
  unsure (1)..(391): unsure at all n locations
atggcgaccatcaacaaatccgtccgagattgtgtgatagcattgagatggcgaatttcctgggggattactggtgaaaaaaagggagggaaagtggnccagccccgaagattagcacgaaatgtttatggtgaaatttccccccaatttttacggattaacattaataatatttttttgaatttttttaggcctcccgaattctcgaaggccacttcgagccgttgttgtacattgcggtggagtactgttttgccaacaatttcaagctggccgccgactttctgacagacgcggcccaagtggggaaataattttttgataaaaattcacagatttttaaatttatatttaaaaaaataccaaattgcccataaaaacagttgctatg

SEQ ID NO: 118446 - DNA, 152 bp, Heterodera glycines
tgctaacatagattttttacaaaataaaaaaccttaaaaattaatttaggtatttaaattttcaatgaaaatagggatttttttctcttccatattaatttttttttttaatttagcatttttttagttgcccgagcatttttgcctgcatg

SEQ ID NO: 118447 - DNA, 329 bp, Heterodera glycines
aattaagtaattagcttctatttatttatatatagtgtccctttttgtttggcagcattacataaatcattaggaaggagaaccatgatcatgatttttataaactttattcgtcatagcatatgcgcagaaaaaatatgttaatccatataatttacaaccctattcatcaccattttcatgtattataattattaattatttcgtttcacttgacattgattccaattagaaatgtttataattttttcacagacattgattccaattagtatttttataattttttcacaatcattttctgcaatatattcaatagtttgaaaatg

SEQ ID NO: 118448 - DNA, 168 bp, Heterodera glycines
aaaacggaaaataatgtcttaattcactacgttggagcattcgaaagtttaaaacctcaccatagagcaaaaagggaaaatgagaatgggataagccaaaaaagagggaatgccccaagagaaagaccaaacaagaagccaaacatacggcgaggacaaatcacaatg

SEQ ID NO: 118449 - DNA, 582 bp, Heterodera glycines
tcttgcgcagcacgaaattatgccgttaaaagaagaaattgaaattaacacacaacatagggaggacttgaacctgggaccccccttttggtgactaactcacagaccactaagacgaaaaaaccaacttaccgtatttgctctttttatataccatggtatattatttttcaaccttctcagaagggggtatataattggagactggcagactaatggagactggcatataaaaagagcaaatacggcaattgtacttggagcccaaaattgaatcgccgtgtggaacaaagtcaccaatttacgcttgactgttccgtttgcaacagccgatgagcagccagtttggggtgttattatgcgtaaaatttggccaattttttcggcaaacattcgccacttgggcgtttgcaatggcatcctttttgacaaattgcgtcgtctcacttcgccttcaattctcaccgatctcgaccaattgaattcaatctattccggtgatttgttgcccgaggcgattggtgatgatgattttgatgggccaaatgccacaatttctgctggccaaatgttgtcaaaatg

SEQ ID NO: 118450 - DNA, 177 bp, Heterodera glycines
ggtgacccggaacaaccctggtgcacacacatacactgttgacccctcatttatttttgcataaatacccctcctcttcctcccttcgttcactgttcactttgccatttttctcctcatttcctctgtgacccatttccaatcaatattttggctattacttttgattttcagatg

SEQ ID NO: 118451 - DNA, 351 bp, Heterodera glycines
  unsure (1)..(351): unsure at all n locations
ccccccccccctccgctttagtcctcgttagttanctgtcagaccaactccttcccctctatttgataaatgaaaaatttgaaaatttttgagtggcttagaatctaaactcacaaaattaaatgggaatcgattttttttttgttgaaagcgcttaatttacaaaaaatatttaatcggctacttttttagctcatatcaatttgataatttacaaaaagttacatggcaatacatttttttaattgcataatgaaatttattagtgagagactcgaattttaatcaaaaaaatttaaatatatttcacaaaataatttattaatttatccctttcagaattacttgatg

SEQ ID NO: 118452 - DNA, 56 bp, Heterodera glycines
  unsure (1)..(56): unsure at all n locations
cttatgtatcaaaatactctntagctaattatcatacctttcattanccataaatg

SEQ ID NO: 118453 - DNA, 1003 bp, Heterodera glycines
caataaataacatttttaaatttattttgagtgttattaatgcaaattttaatttttttttagcctgaagcggggaaaaaggtgcgaattcaattcaaaagtttgagcaatttgtttgaatgcacatacaactgctcatcggcgtatgtcgaggtcaaataccgagacgacaaaagggcccaaggcaaaaagacaaataattaattactgattaattgcaaaaggatcgtttataaggtgccaaactttgctgtccccgtgcactcactgatctgaacggaaatcaatacaaaaattggattgcggcggaaaagccggacacggacatagtcatttccgcgcacctttcaccaaattggaccgtaccgtctaccgtattcgagctgacgtatgaatcaggcaaggaaattgtaaaatatattttatttgttttttaattcttttttaaatatttattattttaatttgactttattttaaaatgctttgcatatctaatggataattgttcaaaaaatattaaggcaacgtcagaatctttttttcgagcaaatgcgtaaaaatcgaaaatttgtttgccgagaaaaggaaccccggcaccggcactttgtattgttatgacgggatcaataagaaacgttatgcctgctcctgtaacggtgataagaaatgcctcactgaagaaaaatatgaacacgacagctttatttgcccaataataaaggtgatgaggtaataataattaaataaaaactcaatattaaaggtatttaattaattaatcagacaccggcatagaaaaattttaactatttcattaacaaattattatccattcaacattcgcaagtttatgaagttttaggctaaaatataattaaaaatataaacgaacgatgtactgaaataaggacaagagagaagataattgataaaaagcccatctattctatataagttcaaggtcaatggaattcaaatcaaaggaagccgacaaacaatg

SEQ ID NO: 118454 - DNA, 246 bp, Heterodera glycines
cgtgggttcgaatcccaccgcaggctgatcctttgcacttacgccatccgccaataataccacaacattttaaattttgctaatgtttattttatttttaaatctttacccgaatatctattttttgaaatggcaaattttattccagttttattctctttttgaaagtacaataagttccagacataattggcccccacgtggcaaaaaaaaatatagaaaaaaccccaaaattgtcacgaaatg

SEQ ID NO: 118455 - DNA, 170 bp, Heterodera glycines
  unsure (1)..(170): unsure at all n locations
cattattcgcgtcgcgcctnttattcgttttggtcgcgtgccgtgccttaatgttacttttcgttccttaattaattaattttgttatttttatttcctcctttttgtgctttcggttttgtcactttagtttattttctatttaggtacaatatacctaattcagtatg

SEQ ID NO: 118456 - DNA, 97 bp, Heterodera glycines
ctttttaactctccggattgttatttatatgtctccccattaagatacgttctttgggtgaactgaacttggtcgaacgcgttgtccttcaccaatg

SEQ ID NO: 118457 - DNA, 187 bp, Heterodera glycines
cacagatttattagatttggatttttaaaattatacatttatttaaattttttcagataactcaaactcaaaaaaaaaattgccttttgtttcctcgattcctcgtcattttgcttcatatacaaaaaatttatacgcccttcgttctttcgtcaacaaaaaaaacacatttaaccaaacaattatg

SEQ ID NO: 118458 - DNA, 171 bp, Heterodera glycines
atcattgattaattgatcatcgattgattgctccccttttttgcccttcacagatcatttgcttcaagcgcttcatctatgaaccatttgagcgccgatacatcaaacagcacgtgcccgtttcgttcccgttggacaacttcagcctgagcaaatacttttcgcccgatg

SEQ ID NO: 118459 - DNA, 138 bp, Heterodera glycines
tcttcttccgtcgatggatatatcggcttcaccacagtgtggggctgcagcttaaccaaagaatcatttatgaacaatccaatttggtcaaaaacttccaaatgtaattattttattggggaaaaaaatgacgacatg

SEQ ID NO: 118460 - DNA, 231 bp, Heterodera glycines
taatacaggtaaaaaatactgactaattctacagtagactattacagtataattcaggaagaagggcatttgaaggtccgaacctaaccaaaaaatatttacaaaaaaaactttcgacaactattgatatcgaaaaatattttaaaattttagcgaaattattaaaaaaaatggaaaaactttcaaaaaaaagcaatttaatcatgaagcttatcattaatgtttaccatg

SEQ ID NO: 118461 - DNA, 67 bp, Heterodera glycines
gtcaactcattaaacaaaattcaaattggctatgttcattggcgaggactaaatcaagtaaaaaatg

SEQ ID NO: 118462 - DNA, 1003 bp, Heterodera glycines
ccagaattttgggactcagaaaatccaagattcccccccccccgcatgaaaatttaaaaaaaaatttctatataatggaaaaattcttcgaatgcctcccccaatgagtacatattttaatataggcaattttcgtaacaaagtgcagtcaaattttcaaattttttttcaaaaaaactttcacttgggaaaattttattgattaaattgaaaattttgataattttgtttttaaatgcgtggtccgcggccgcggcaatttgaatgcgcgatgcgcggtgcgcggccgcggttttttttttttgcgcgatgcgcggtcgcggccgcggcaatttgaatgcgcgatgcgcggccgcggtttttttctgtgcgcgctccagccctgctccgagcattgtaaacatttaaaaagttcaatcaacaacgaaggagggaaagtgttggactttttgacctttattttattttttatatttgtttggcattatgtttaattatttgtgaccgtttttcccaccttttcttgtattcgaatttaattgcattagttttatgttttgtcttctccaaagaaaattgattgtttctttttttaatttggaataaataaactctctgagaagccttgacaccttccttgaatcccgaaccaaaagttgaagaaaaatcccatttggcgctcctgaggaagcaggtaaaaacgattgggggaggtcggaaaaataggactaagcagacttcgccgtgtgagttatcgatccaggacggacgataattaacgaagtgtgcaacaaaaagcttgacccaggaaagggcgagtcgcgtcttacttgaacaagaaaaaaaaaaaaaaaaaaaaacgacaaaagttcgggtcgaatctcgcctatttcttccgttgttgacaccgggtcggtgctacagcataaagttggaaactgcagaaaagtgaattgtatgaacatatccgggtcggagtgttgtaaaagataaattggaaatg

SEQ ID NO: 118463 - DNA, 630 bp, Heterodera glycines
  unsure (1)..(630): unsure at all n locations
cagacttttggaaaaatatatttgcaattatcanccaattttgagaagtgagatagaaatgataacttcacgattcaaaccaattttcggtgctctaattaaccgcgataaaanacatccgaatncaattaaatagcttctgagataataaggtttatcataaaatttcatntaaaaataaaccctcaattattggtatgaacgatactttccaaacatgcacgcgttttgcgctcgagctatttatcatcgggcttgtcaattcaaagcgaaacaacaaagatagtgttttgaacgaataaagggcataggttattttgaagaagtgtcaaagaacatgcagcaataagcctgcaaaatctaataagtggaaaatacatgagtatagaatttattttcagaaagtgtcaacagacttttggaaaaatatatttgcaatttatcaacaattttgagaagtgagttagaaatgataaacttcacgattcaaaccaattttcggtgctctaattaaccgcgataaaaacattcgaatcaattaaatagcttctgagataataaggtttatcataaaatttcatttaaaaataaacactcaattattggtatgaacgatactttccaaacatg

SEQ ID NO: 118464 - DNA, 638 bp, Heterodera glycines
tcaggggtggagcgcgaccgcaacggatacttgattcgtgatgcgcgacccgcgaccacgggtttttttactgcgcgacagcgactcgcggctttttggttctaaatttttataaagaaaatttatgaactgattgttttatttaaatattcatattagaaacaaaaaatttctggaaacggattatttttctcaaaaaaccattcgacgctaacaaaaaattttaaattttctttaaaatattggctcttaatcacaaaaaagtcatttttagacataatcttttaaggaggacgagaaggaaaatgagaaagacgataggcatatcggaaaaaatccctgtctaagtaggcacgaaaaacatggatattcgaatttagcatttttgatccaaaaacggcctaaatgatcttttattacatggttgatgactttcagtttgtttcagtaatatgctaatttcgaaaattttgactttcgactttttcttcgagttcgggtctagggttcggaattcagaatgatgttcttaagaattttacttttatcaacacatatacaaaaccgaggccaaccaacaagcgccattgtttgaatttaaatattaaagaattaaagtgcaagcgtttttgttaatg

SEQ ID NO: 118465 - DNA, 467 bp, Heterodera glycines
  unsure (1)..(467): unsure at all n locations
tatccagaaaaaanatttcggggagggcacctgaagagctttttttttgctcttcgaaggtgcaaacatttcagaaaatttggctattcttgcttgaaaaaatttttgatttttcatttcggggggcacgtgccccccccccctagatacggtcctgatgtacttatacccagggaagcaatatatgaatgtagaaaattaagggggcatcgcaaatgaaatggcccactacggggaaaaaaaggaggaagaagtgatcgcgaagcgtatatgactgccgcgtacacctatgtaagcaactgaattttaaaatttaatacgaaacaacattattaaatagattaaataagatttccttagataaaaaggcaagtaatacctaagacaacaacaaaaggttcgttcgaaactgtgccagcaattcttgatgcagaaactgagacgagaattacacaattaatcgaatg

SEQ ID NO: 118466 - DNA, 255 bp, Heterodera glycines
ttggaagaatttgcagaaaaaatgtaaaaagaaatgaatgagaagggcattctcgtcgtcgttgacggcatatgtttgctcttctccgttcgcgtctcgatctactcacaatatttattacgctgataagaaaaaggggccatctcaaaaaattatgcaaattatataaagctaaaaaaaggatgaacggtccggtatataaatggggacaaacaaatttagtttcattttgatcagattttcaaaaaaaatatg

SEQ ID NO: 118467 - DNA, 359 bp, Heterodera glycines
tttgcgttatttcgaacattccgcagctaaagaagcgctccgtgaagcttcagaattgtccggcattgaaaaagtcgaatttggcggagcattgggtaaaagcaatgcaagaaattaaatttccatttgtctatttcacaatttataattcaattttttaggtcgtcgcacacgctttcaacaaaaagaagtcccacaattgtttttacaggtgtaatttctgataatttgtgacttttatttgcatttttttaaaattcctttttttgttgtttcattttgaattagtgtgtgtgtttagactgtcacccattttctaacttccctctttcaggtgactctttcctcctctcaaaatg

SEQ ID NO: 118468 - DNA, 748 bp, Heterodera glycines
caaaagaaaaacaattaaaaaataattacaaattcacttattaaaaacttaataaagaatgataattgattgcattcggcatcataaacataagagaatatgtagaacgccaaaatttattacataattaattaattaaaagataaactttttgaactgaattagaaatcctgaaataaattttgtgtacagaatagctaaatgaaaatatgtattaaacgaagagacaatataaaaaatgtaaagaaaaattaaaatataccaaatacgttcaaaacagttgtaagatgaattagtacaacctttattttgtttaataaaaaggcaattgcttcaaagatttataaataattaataattaaaagaaacatataatattttatgtattgaaataaaaaagaaaggtacacatcggaacattcgataattttttatagttaatcaaaagaaattaagacaattttatataactgaaaataacaaaaagtttattgattgataaattaacaaattcaaaatatagaatattataaatataataaatatttaataaacaaagggcgacaaaacataaatattccaacattcacagattaaaataaatatatatttcataatgtgggcattgttcacaagaaaaagcctaaatatacaaaaatggagtcataaaaacttaaaattaaattacaaatatattttcataaattaaataataatattataaattttgtttatttaagctaaaatg

SEQ ID NO: 118469 - DNA, 61 bp, Heterodera glycines
tcagctgatgatgcgtcagcgcatttttcatagacagtaaaaatacgaatatatttagatg

SEQ ID NO: 118470 - DNA, 563 bp, Heterodera glycines
ttgggttttgcaatggactaacaatttagtttaatttcattttataaaaaatgctttttatttattttagtgtgtgtgtgggattttaggcgctaatttgacatattatgttgaaaatttattgaatgcaaatacgtttttatgcgaaaaattatttttgaaaaaaaaaacatttctcattccgtcttccagaaataagaatttatttggtacttatccttttttaccccctcttgaaaaaaaatttacttctaaatgggaaaattttattcgctttggtcagatttttgcaaatttgactccaagttaatgcgcattagtcaatctttcgtcatgattttttttttatatatataattttttccgcacactttttaaaggtcaaacaaatttctgtctctgaaattctgccccgcacttccgacctgatcttcctgaacatcaaaacgtacgaaggtatggggtaggcaggcgtaaaaaaagttacaaattttttttttgagaaatttaattttgtttatgttagaccatccttacactttggaattgaccatgaaaggatg

SEQ ID NO: 118471 - DNA, 358 bp, Heterodera glycines
tattgagaaattatgattatgaaatttttctttaacagattcctcgttgacagatagtgaacaagaaaacagagtgcatttaacaaaaaagagattaagagggattttcaccaaaaaagatggcccaaaaaatggtaagaatggagcttgaatttgagtgagaggatggaagaaatacattaatttttaagtaaaatcagttgagtattatatgaaattgaggtaatttcctttttttatgaaaaatttgctcaatatttagcgattattcttaaaataatctacttttggaaaatatccttattttcggggttctttcgtctaaaaaaaccttttagccaaattgttccgaggaatg

SEQ ID NO: 118472 - DNA, 465 bp, Heterodera glycines
aaaaaatttcgacaaaaattataataactttttttttcagaagcaaactaaacttatattttttggtattttgatagacctatttttttttattagacagaaaaattttaaaaatttggcaaccgtattaaggcctgaaaaattaaaaattctcgcttttctagaattttttggcgccacaagttctttgtattttgtccaaatttgaaattttgcttgctaaaaaactaatcatttcatgctatcgaatgatactaattatataagatttggcagaattctaaacaaaatcattatatgaaaagaatgcatcttctttttatgcgaggaaaatggaagtaattattgatgataaaatttttccccttttttctcactgtgttaatatattttttttattttggagtgatttctgtttaaattttattttcatacggtatcaccaccgtatcagacttaaaaatg

SEQ ID NO: 118473 - DNA, 71 bp, Heterodera glycines
gctaaaaataatttttgtaaaatatttaaaaataaaaaatattatatatttatacagtggcgccaaaaatg

SEQ ID NO: 118474 - DNA, 282 bp, Heterodera glycines
accaaattccaactcctcttcggtattcatctccgatctgccctaagtggtcctctattagcacgtaaaatttcgaaaaatttcactaagattcaaaaaagttattatcaatatcgttcagaaatctggttttttgaataccaaatctaataatcttgctaatagaggacacttagagctatcgatcatatcaagattgttggttgatttggttgacaatgaaaaaagaaaacgaccccgactcattgtcagaatttttaatgtcaaatttcagcatttatg

SEQ ID NO: 118475 - DNA, 146 bp, Heterodera glycines
ctgagtatgcttttaatttcaatcattgggttaaattctcatcccctccatttttcagaaggatgctcttccgactttcgtctgaacagagttgaggtgagaaactttttttaaaattattataattatttagttaaacaaaaatg

SEQ ID NO: 118476 - DNA, 872 bp, Heterodera glycines
ttcttcattcattccattcattcttcggccgcccgttttcttatgcttacattcactcatccatccgtgtctatttgtttattgtacatgtgatcgatcagtggtggtatttttctccctcctcatactactcgacaccattctctcaccactatatgtgttgatcagtgatgatcatattgattgatcggggcgggggcaaaaagattacacagacaaatttttttgtcgcccattattttcctcatttgttgcaaacaaaatgcattagcattagctatcaatctatttaatgggaggggatgataagcaatctctcgtcgatctcgaagaatgaaaatctcgattttgtttttttctaactacaaattcgactgtgatctctaattgtagggtgagaattcggctaactaattaaccgggcggggggggggtcatttacaatcgtttaattgatccagttttacaccgtgagaggtatttaacactcccaatcgaatcaatgtgtcaccaccactgactaaggtattaatcgctacttaatgaccttgctgtcagagagggtacttaacacctctaattgaaccaacacggtaattaaactcaaatgttttatgtttaattgacccaatttcgtcccggcggaaacacacaccctaaagcacattttatgtgcaccattcaattaataaaacatggcctggagcccaaaattagcgcgcgcacacttcaaacacaactttcagaactagcaaaaacaaaaaaacaatttcctcctgtgaacattttgccacccgttcttcaacacatttccacattcattaattcacaacatcattctccgccaatgaaaaattgttgttgccaaaatg

SEQ ID NO: 118477 - DNA, 147 bp, Heterodera glycines
aaacatttgtgtagatgaaccagacctatatactctatacacttttccggattccacctcgaatattataagtcctttctaaaaaatcagttggtcggtgggctcgccgtgcgtcgtgcgtgctacggtgtgctgcgcttcatcatg

SEQ ID NO: 118478 - DNA, 281 bp, Heterodera glycines
tttatggggtctaatgagcgggcactttggcaccttaactccacgtttggttcatcccacatcgccagttctgcttaccaaaaatggcccacttggagctcaaacattcaacgcctgggttcagagtcaagcaaccctggcttcatacccatttagagtttgagaataggttaaggacatttcgtccccaagtcctctaatcattcgctttaccgagtataactgcttaacgagctccagctatcctgggggaaacttcggagggaaccagctactagatg

SEQ ID NO: 118479 - DNA, 52 bp, Heterodera glycines
tgcacagctgcgactggagcagtgccgggtgggccaacagaacagcaaaatg

SEQ ID NO: 118480 - DNA, 491 bp, Heterodera glycines
taatgaattatgttcctacatatctccccttattacatagtaattatttcacgaagaaactctcataattcaggatttctaatatcaaataatactcgtttaaaaatctcctgaataaagaaaaatacgcactttaaaatcgactgaaaatagaataattcgtctctaataatcgatattttgatttcaaccacttccgaagacaagggtctggctactgccttgacagagacttcaaaattcaggaacaatttgtatatcaagggcttcttagatttttcagatggtttccttataatttaagttatatctgaataatcaggtctctcgggatgattgtagttataacaatacctttggatgtcataaatctatatttgtctcataaaactcgattggactcataaaactcgattgcactcataaagtgcattagagccgaaatcggtacgtagaagcgcttccaattctgaagtcattatgaagcgatg

SEQ ID NO: 118481 - DNA, 177 bp, Heterodera glycines
  unsure (1)..(177): unsure at all n locations
ttaattaaaaattgatgatagacagaaatgttattaataattttcttanaacaataattagttntaaattaaaataatcaactaaaaaaattaaaaggccttattaatttatttaattactttattttattaattataatattaaaatgccaatttttagcactgaatatcacaatg

SEQ ID NO: 118482 - DNA, 719 bp, Heterodera glycines
  unsure (1)..(719): unsure at all n locations
tttagcagatanataatccgttcattaatcataaaccggttagttttgtcctttttaacaatggtcaaatagttcgttccattcgaatccagtttcataaccctgaccagaatgtttaggtttttatttgggattaaattactgtaataatatattttcattcggatacgtaattttttttatccttatatcgtattttaaatagaatttcttcggaaattgaaagtattatttaaaatatctttgatcaattattttttgtcgtttatgtttataaaattcgttgttcgtccattctttatctacgattagatcgcttcgattggttcgcacatttcttttttcgtgttattttaaaatcgttaatttgagttgtctttcttattcctgcacggctctatcattattttaccagtattaatatttttcataaaattcaaatttaatttaaaaatttgtaccccttgtttatacttagaatatgtttttatttgaccttttaaatttttgacttatttttcatatcgttttttacaaataccttttttacaaatgtgcaaatttaatttctttttcaataaaaattatcgtaaatttcaggtattttgtcttttaaattgtttaaaatcaatggcccgtctcgaacctgcaccatatatatttgtgcgtttctgtttattaaccatttaatttttaggggtaatttctaaatttagatg

SEQ ID NO: 118483 - DNA, 82 bp, Heterodera glycines
cggccccgggggaagaagcagtgaagatggacgaagcggccccgggggaaggaatgaatcccccaaaagtttccctaaaatg

SEQ ID NO: 118484 - DNA, 1003 bp, Heterodera glycines
attttatttttaatttaatcgatagaaaggagaatttgttattatttgtgcaatggcttgctttttagaaaaccaatgaatagggatgggatttttagtgataaaaaatctcaaaataattaactaaatagtgaccaaaaaatgccaaaatagtggtaaaaatagtggcgaaaaagttccaaatttaggggtgtaattttttaaatagctgttttttaatttgaaaataatttaaaattaaggaaaaagattttattcactgattgcagttacaaaatattttcaatgccaaaatagtggcaaaaataatgacgaaacgccaaaatagtggcaaaaaattattttagtggccaacttccgaaatagttttttttagtggcaaagctccaaaatagtgattcctagtgatgaatagtggcactaaaaatgaaaaattttcgaaaaagaatgtgtttttcgtgcatttctcgtcgagttaaagccgcagaaaaaatagttaaaaaactaagaatcccatccttaccaatgaatcagcaacaaccatttatttagttatgtccattctcagcccgttaaatcggataaatcattcgtacaattcaaaaaccattaacatttatttttattttgttctcatttatttttttagtgtttttattgaaaaatatttatgtgtaaaagtaaaattaaggaaaataaaaaataaatataaattaataattaaatgctgggattatcgatcacttttttctccgttggatttttgtacacagcctttggtaaaaaataaaaatataacattaagaattttctgaaactctttagcattgaaatgtttcgtccagttcagtcccaaaggcaaatttgaccctgaagaccaattggacctttatgaatgccctgttgctggccatcaatgcgcttatgtccgatgcattgacaaaattaggaaaagtaaaaatataataaataaaaaataataatataaaaatttaaaaaaatg

SEQ ID NO: 118485 - DNA, 293 bp, Heterodera glycines
attttgaatttgtgccatttggcgttttgtttccaattcgcattccgtccctttcagcagttgcgccgtgactcttcgtccctccggcaacgctttccgtcgcccgcggcggtgtgccaccgcactttcttctccaatcagcccaccgggcagcactgttccggcaaagatgccgcctcttcgactgcgcgtctctgctgccaattgcgcttccgccccttccaaaatcggcacttcaccgccctgagattggaaaatgcggtcacttcggcactgattcaatactcacaatg

SEQ ID NO: 118486 - DNA, 54 bp, Heterodera glycines
atttcgtttactgcgtttttgtgacttttcccactggcatttaatttaagaatg

SEQ ID NO: 118487 - DNA, 1003 bp, Heterodera glycines
atttaaaataaattttaattatttttttcattttcaattttgaagcgcaacttcttattgttctttattgaccagaaaaaggattgtaatgaataaacaaatttctcggaatctcctcatccaggtttaatattcattaatttaataattgtatatatattttatttattattttctaattttttggcttttaatttattaggctttggtgcccgtcatcatttattttgacgttctttttctgctgattctttctttatttaaaattgacacaaaagggtgggaacatttgggtatgtgcaaaactcattaactttttattgcaataattttttgtccatttttaaatttatttattttacaggaaagtgctttcttaaaactgatcatcaaattagcactgtaaatgtttagaaactgcagcaaaagaaacagcatccagcaaaatgggccatcagtgttataaaaagagaaaaagtcgatttacctaattagcctctaattattttttagatttcacttatcacatacaccgttaaggcctcagaatccctgcgtaaactgggattctgatcaccttggattccgctgggggctttaaaaaaaaacgggcgcgaagcgcccgtccgaacccaataagatttaataaaacgggcgcgaaacgcccgtccaagctcaacaaaatttaaaaacgggcgtgaagcgcccgtccgagaaggaaattacgcgaaccactttatcccagctaaagaaccgactgttcacacacccgctagttatacataaatttaattttatttaaagaaaagaaataattgttgtataaatttataagaaaagattatcttttgatgaggtaagtgaattgaatgattggtgccacgttttccttttgcatttccatgtgattccaaaatgggcacttacgaaggccttttcaattgaataatataatacattaggaaatatttcaaatcattgccttttctttgctccaaaaatg

SEQ ID NO: 118488 - DNA, 137 bp, Heterodera glycines
acatggaaagacaaaatttgacgaataaaatataaaatatttgtgatttttttaaaactgtctcaaaaacagtttatcatattttttttgaaatcataatatttttatttgtgtttcagctaataaaaaagaaaatg

SEQ ID NO: 118489 - DNA, 244 bp, Heterodera glycines
tttttaggaaaatggaagaataataatacaaagaactaaaaattttgcattttatacctttcaatgtttatttaacccataaaataaatttggctcattcgaaatcattataaatagcatttatacttgcttaattttttcattttgttgtcttcatctcattaatattgcatttttcctctataaattgcactcttcctttcgttaatttttccaaaattgtagcttccaaattctcaaaatg

SEQ ID NO: 118490 - DNA, 849 bp, Heterodera glycines
tgaaagtgtgcgtcttcgaagcaaagaggaagcggcgcgtgaagcggcgcgaagggaagcggcggattcgcctgagtcggagagagccgcggaaggaatgcgccattttgtgttggaggacaacgttttaacagtgccggaacgctttttggaggcggttggtccctttgctgctttgctttgctttacctccgatcactttttccgctgctattcttctgatctttttccgctttgcttttcctctaatcactttttccgctttgcttttcctctgatcacgttttccgctttgcttttcctctgatcactttttccactttgcttttcctctgatcacttttcccgctttgcttttcctctgatcacgttttccgctttgcttttcctctgatcactttttccactttgcttttcctctgatcacgttttccgctttgcttttcctctgatcacttttcccgctttgcttttcctctgatcacttttcccgctttgcttttcctctgatcacttttcccgctttgcttttcctctgatcacttttcccgctttgcttttcctctgatcacttttcccgctttgcttttcctctgatcacttttcccgctttgcttttcctctgatcacttttcccgctttgcttttcctctgatcacttttcccgctttgcttttcctctgatcacttttcccgctttgcttttcctctgatcacttttcccgctttgcttttcctctgatcacttttctcttccctttctcttttccataatcatttttcaattaaatatcaatctcttttttcctgttcaagattagcaaatatgcgggaagtgaccagcagatg

SEQ ID NO: 118491 - DNA, 1003 bp, Heterodera glycines
acgagcgagccaccagcagttgaattgccaacgattaaattggatatacatatttatatgttgtttaaaacaaactatttcaacagctttctaacccatagaaatctttaatttttccattgaattgtttaagaaacaaaggcaaaaaaataaagaaagtataaaagaatttttggccaaaaagcagccatcaacatttttaaattgcgtataaatctcgcaaaaatgaacaaattgtttataaattagagtccggaggaactctcgactcaaattttaatttagaaaataaaaagtccacaagaaataaccaagtttgtcaggttttttgtaaaaataagtacagagttaaatcatagaatagaaatttctgcctggataaatatttttgggtggaagagacgcaccccataatcttgtacaaaattctctatctgttgcacattttgatattatttttttattatatataaaatggagattaaattattattttttgggtcatcgttttgcctttaattattattttatgccctcgccaccccatcataaatataagtgaaccatgccatctttcttcatttaactcttctgcaattacttttttgttcaataagttcccttttaaatatatatttgttaaagaattgttatttaaaaaagagaattcacaatttggcaatttgtgattttagtccctcaaaataacccggcaattcaaatgttattttggcttgttccaatttcataattcgaatattatttttactggggtttgttgctcatcagtaaaataaattcattttaaaggtttgttacaaattttgaacatgggggaaagtttattttctgatgatctgatgggcttcaatctcgatttccattttcaaatttccacaaaaaatgaactaaaccggaattttaaataatttatctcatttagtttccaattattttattgcataaaatagataaattacgaatttcacaattgtttataatg

SEQ ID NO: 118492 - DNA, 1003 bp, Heterodera glycines
ttttaatcgttccctgttaatggtatgaataatcagtctgaacaagtgcatcatctccttatccgtcgtcccaatgcatctcttcccccttcctttccccctcccttccgttttcatcatccgccattatccgtccccccgggggcgtcttcttccgttagtgctcatcccttccaaagccgtgccaatgtttaccaaatccattagacattatttgcgcaagggcctctccatatcagcaaattcatttgcgttaaatgctccgaaaatccaaagcgaaaaaataagtcaaacaatttgaaggtttaaaattttctttaaaaaatattaaaaatgtataaaaatagttaaaagcatttatggaaatgattgatccttgattgccattttcctctatttatctgctaattagatttattaaaatttttataacaaatattttcccaccatttagagcgagtttttaaattcaaataaaaaaatgaacggcacaattattcggcaccaaattgaaaaggaggacgtggaaagtgagcgcgagttggtcgactttgtggagattgtgtacctttcgttgagcgtttgcattggcactttgctcaattcggtggccgtcgttcgcctcgtccgttactcaaagtcagtgacacggctcattaacgacaaattacacccaaatttaaaatggctaaatctgtttaaaaaaaaacattttttaccgacagaagtccctcgtcccaggccaagcaccattgcctggtccgacccctgcacatgaacccgttcgccatgttcaaattcaacttggccatcaccgactttgccattctgttcattcacgcacttggcaaggcgagtaaatattggaaatgcattttaatgccaaaaataaatgaaataaaacgatctaaccaagtccaaacctaacatttaccgagccatcgcttaaaataatgtttcttgatattctatgtactgtaatacagtaatcctccttcagatg

SEQ ID NO: 118493 - DNA, 1003 bp, Heterodera glycines
ttttttttttttgttactatcatgccaccgcatcagcagcatgggatgcatttttcgtaatgagttgtgttttaaatgaaaaagcatcaatcagcaattggcaccacacacccacctactaaacgccccctcctctcctgaggcatttaaaaccggtacaaaaaagttgcccgagggatttattaatgggcaaattcacaatttcacggacaattagctccagccctatgctggaccacaccacaaccagaagcaagagttgacgttttgcaggcccatcacctcattttcatcaagcgccaaatagcagtcagcagttagcagaaaaagcgcgcggcgatgtgatagtgtaaataatcccccccgcggggcttcaaacggcaccctcccccctcccctctccgagttcgtcctcgttgtcatatccatttaccgcacagccgaccccatcggtgccatcaatagtagtggtgccaatggaatttcacaccccttttagcctccccccacatcagttgagcagcagcaataatggctccacccctggcgggccggacaagtctccccatcatccattttcattattggcatcttcccagcccccagtcggagaatgtggcaaaaatggaaatcccatcccccacccgtaggcgaaatttcagagcaaaaatcagtgaccatgcgcttctgctcgaagagcaccaaaaattgtttcattagcgaaccacaattaaatttctaaatgcggcgtgaaagtttttctgtctgaaatgataattaaaataattttaaagatagaagaaccatttcaatttgttggcaatgctcgtttccgcccccccccccactccatttttaatgtcatttgtacaaattaaatccgatttttagatgagcggttcccgagacatttaaaataattggatcactaatatgctcataataaaactaatttaaaaccgttattttagaacagaaatttgcttttttccattttaaaatg

SEQ ID NO: 118494 - DNA, 502 bp, Heterodera glycines
cgttaattttatattttatattttcttttttcattaaaaatatttatttaccataccttcaacaggactctcgtgctgttagaccgaaacggaaaaatttgtaatttgagttttgtccaaaattttgaatcccggacccgaactcgaacaaaattcgaaattttaaataccaagttatccttacatgaaaaatttatttaaaactctcgttacttgatggaaaatcatagacaaaatcaaagattttccgaattctggactcagactcgtaatcagggtatttttaacactagaaaccccgaaagaaaaatttttaaatttttttttcgccgggacaccaattctccagtattaccaagcatcatgtgctgaaaatgctaatgcgcagagttaattaatcgattatttttttaaatgttaagtatatatatatataacgcacttattctatgaatttatacaggaattgcggtccattttattggatccaaactcacaaatg

SEQ ID NO: 118495 - DNA, 58 bp, Heterodera glycines
ttctcggtttaccgttctttttttactgtttttaagacggtgctaaactaccaccatg

SEQ ID NO: 118496 - DNA, 222 bp, Heterodera glycines
ggtgtgtttaagtgaaattttcagccatattttaattttagaattcacatttttggctggctttcattcggaaattgggctttcgaaatgaagtatatttagctgacggaaccttcgcaagtgcaccggagctcttttcgcaactttacgtcattttggggcggtacttttttggcaattttgatttcaatagttttctcctaatttcagtcgtggaaaatg

SEQ ID NO: 118497 - DNA, 92 bp, Heterodera glycines
ataaggaaaagccggaggaagcgcaaggggagcagaaggaagagaaggagacccaacgggagaaggagaagcagttgggagagaaggaaatg

SEQ ID NO: 118498 - DNA, 371 bp, Heterodera glycines
atcaaaagaatataaaattaaaatatgaataaaattgtatatatttttatcatttgagcaaatatattacagtcgagatttctctagttgtttgtcaagaaaattaatcgatgaatgttatgcatatattttattatgtgagaaaaatttgcttaataatattttaaaaaaattaattataaaattttgcggttttcgcgcaacgcccttttttgcggttttcgcaaaatagctatttttgcgggtttcgcgcaacgacgcggcaccgaaagcgcaataaaatcagaaataaattaaatatgcaataaaataaaaccattaaaaaaaaatttatgtccttatttggtgtttttagataaactctaataatg

SEQ ID NO: 118499 - DNA, 282 bp, Heterodera glycines
ttagtttaataataaggatccaactgggatttttccaaattttttttgtttttaaaatcttatttgcttggaattaacgcaaaaactttaattaataactgcaaatcccgatccgctatagccataagaactcaaaatattgagtctcgccgtacggtatagtatactttcttttgttgacaacctctgcttgttccttggcccgcccaatttttaaatacttattacaaaatgcctttgtttttcaggggatgggatgacctgaaactgagcatcacaatg

SEQ ID NO: 118500 - DNA, 1003 bp, Heterodera glycines
gtaagcattaattcatgtaaaacactgaatttaaaaaaaaattttttttttaacccaataagcgttgaaattttcaggttaggctagtcctgtaccggggagtaagccgataaaatttaatgcgaatttttattaattatagaaagagttcagttcagtaaaactttgctttaccgagcactttctttaaaaatttatgaattaattttgcaaaaaaacggaaaactctgatttcgaaaattttttaaaaaaccaatacgcataaatatattttcaggttcaattagaacaatacaaatgtttacaaattttacacagaatttttcatccgaggaaaaatttttttatgcattcaccacttttgcataatttttttgtttcttttttgaaaaaattttccacctaggaaattttactaacattttcatagttcagttcaaaaattgactagatcaatcaaaagataaagttacctaatggaaaaaaatcccagaagcagagaatttaattaaatccaatcctcgggggtaataggaataattaaaaattcataaaaaatttaaaattcaaatggaacctcaacaatcctcattgacctatcaaaaagccacaaaatgaggataaatcctcagatctggctaccctgatattagtgctttattaaaaaaaggaacaattatcaaagttgaaggctgaacacccgggccatttaattttttcgtttgatttaattaattggctcaaccgttttggtttaatttttgcgaaaaaaatcactgagtttcatttaaaaaaaattcacgtaattttatatatttttaaaatttattcattggaaaaaatcaattacacgtggcacattagcttcaattttctgtattcatgaaagaattggtaggcatttaccttaatttattcgttgtgaatattaataaatcataaatatttttatattaccttttttacaattttttaaagaatttttagaagtttttgaaaaatg

SEQ ID NO: 118501 - DNA, 200 bp, Heterodera glycines
ggtatttatttttaagttcaaaaataatattttaatttagactaatacaattttggacgaaaattcgctgagaaaagagactgtacataaaccgaattttattagtgcccgatttacctgttcattatgtgagggagaaataaaggattgtgaaatttgtgggaaggaaccgcgacatttaaaatggtgtagtaaggatg

SEQ ID NO: 118502 - DNA, 642 bp, Heterodera glycines
ctaattactattctccgttaaaaatggtgcgaaaacaaccatgactaattagggagtggcaattaataataattaattaattacaatttgccgttaaaatggtgggaaaacaattaggaaaccaaattgtaaggctcgaaatatatgcatattttggcattttttcaaaaacccctatttaaacggccccctttattaaagaggccctgttgagctttaaggataattttttgattttttttctcgataatattaatataaaaaatgtaatttatgccataaataagtacacaaaatgaaaaattttcggggttttttactcaatttttttttacaaaccaatatattttagctttatttatttttattttcgtcaaaatgatttttcataccatatttagcttttttcgagatttttagcttagatttaacgaaaagattttttggaaaaattcatatgcatattttggcagttttggtgcatattttttcgtgctctattaattagggaacggcgtcaattaatacgacactaattaaggagcggcaattaattgattaatcccctaattgtttaaggtcaaatcttattttgagttcaaacacaatgtgacggtccaacgagtggagttcccactgatg

SEQ ID NO: 118503 - DNA, 1003 bp, Heterodera glycines
gtcattgccattttttgcgaacttttctttttttaaaaaagaatttttttgaaattttggcaaacttggaaatattttttatacgatggacgacaataaaaaaaatttgcatttttatgttttaaatccatttttggttgtttattgtttttttaagtttatttaagcaattattgaacacaaacactttttttggaatttttgagggtttaaaacacatattttgacagtttttgtccatattttggtccatatttggccatttttgagctttttagtccatatttcgggcttttttagtccatattttatgtccatatttgacgttttttagtccatataatttacaaccctaattattacctatttattttcttaccaaaaattaaaatactgatttggcttaattttgttacttttgcaataagcccacaccgtttcaaaaaacgagacatgaaccaataaatagagagtgcagagaaaaaaacatctctctttttggcgtactatttctttatctctgttaatagagaaaaaccgaatttacttcgctacgtttaattttttttctatacgttagatccactccaaattttgcatatcgatagagaaaaaaattacaaacaaaatgtaagggtttttaaacgcaaaaaaagggttaactaaaaagttattcgagaaacaaaatttcgaaccctcatatctttttcctaatcaatccaattgcttagcagttgcttagaaaaagcttctcctcataaagagctttcgaatgatatcaagtttttccaatttggttcggaaaaaccttcaaaaataattcccaaaattcgtcattttttaatattttggacaaaaataaataaaaatattcatgttgcacaacggactcgaaccaccaccctttgttcctttactatcttacaaaaaccacttcgccacacatgcaaatgtttttggaactgagaggccaaaattgaaacggtgtgaagccctaacaatg

SEQ ID NO: 118504 - DNA, 832 bp, Heterodera glycines
gggctgatcggtctttctcttgctaatctttgactctttctctgatcactctctttgggcttatcggtctttctcttgctaatctttgactctttctctgatcactctctttgggctgatcggtctctctgctaatctttgactctttctctgatcactctctttgggctgatcggtctctctgctaatctttgactctttctctgatcactctctttgggctgatcggtctttctcttgctaatctttgactctttctctgatcactctctttgggctgatcggtctttctcttgctaatctttgactctttctctgatcactctctttgggctgatcggtctttctcttgctaatctttgactctttctctgatcactctctttgggctgatcggtctttctcttgctaatctttgactctttctctgatcactctctttgggctgatcggtctctctgctaatctttgactctttctctgatcactctctttgggctgatcgttctttctctgctaatctttgactctttctctgatcactctctttgggctgatcggtctctctgctaatctttgactctttctctgatcactctctttgggctgatcggtctttctcttgctaatctttgactctttctctgatcactctctttgggctgatcgttctttctcttgctaatctttgactctttctctgatcactctctttgggctgatcggtttctcttttccgtccgttttcttttaggagggcgtttctcttcgtgagcccatccgtgacacctttttgcaccatttcgacgtgaatacggtcggccccgtcatg

SEQ ID NO: 118505 - DNA, 309 bp, Heterodera glycines
tttgaatacggattcagtcagagaaattggaactcccattttatttaatttgaacatcaaaatttttgtgaattccaaaatcaaattcccccaacgaattcacaaattatcccaagtcgaaattgccaaaatgaattttatccagttcggaaaattcaaagtgaaagttttccaaatcgggcggaacacggaaactggaaagagcaaaaaacagttcggtatgctcaaagtttccgacaacaggacaaaattctttaccatcctccgcccgcaaaacaattgggcgagcatccacaaaatttccaaatg

SEQ ID NO: 118506 - DNA, 52 bp, Heterodera glycines
  unsure (1)..(52): unsure at all n locations
ccaaaacggagtacagagacaattctatccaaatttccnacacaatcaaatg

SEQ ID NO: 118507 - DNA, 1003 bp, Heterodera glycines
gacacattttcacataaaatttaacggaaattacatgaaaatttcggaaatggataagtttcaaattaatattttaatttgtttggggcaatttttaataataagaaagaaacccattgaaggctatctttttatttgcaaaatatcaaaaaaagaattagggaaggtaaatacttgtaaatttgaagaagcactgattttttcacattacaaaaaataaaaataaatgcggaattcttgcgaaaaataatttatgtattaaaattggtccaaattaggaggaaaatacatagcacagaaaatcattttgttgacatgtccaacacttatttaaagtaatacatatttgataagtgattgattattcgggaattttttgcgcgaaaatattgaagttctcctttgaaaagtgccacgttatcaaatgcgatggttgtggtggcagggtcgatagttcagttggtagaacattggtccgcaaattcacagacgatggttcaaagcccactctaaatcttccctaaaagtttccctagaagtctaaataaattaaaataacatttgagcacttttacatttaatttatgatctcatttttattgaaaaaagagattttttggctgtctttttaaaaatattttaatttttcataagaaattcctataaattctcaaaacttcaaaatatgtataaaaaatgaaaaaagcgaaatattttgggttttattttgaattgtatcttctaaatcagtgaattttttattcttaatttcttttttgttttttttaatttgattaaaaacatttgaatttttatgaaattaaatattaaacttttctgttaattggtgattttttatttttggcttggcaccttgattgttataatcattttttgttattgataggaaaaatgcttttcacatgaattttaaaaaataaaataaaattgtatatataaattacattttaatttattatttatttcagttttgcaaagaatg

SEQ ID NO: 118508 - DNA, 256 bp, Heterodera glycines
ttttcgaaaagaatgccaactaaataaacaattaaatgaccttttttcaattaagctatgcatacatattacaaaatataaatattaatttatttgtgttgttacagccgccgccgttgccggcggaatcgaaaagtttggcggttcggccaaggcccttcacctcatcggcacgcgtaaaatttataatttaaaattgaaattaataattaatttttttaaatatatattattttttagttttcatgttacaatg

SEQ ID NO: 118509 - DNA, 97 bp, Heterodera glycines
gagaaaagagagttcagagtttagatgaaagaggagcttagtgatcaacgaaagtgctcaggagaagtgatcagagttgaataaagttgcaaaaatg

SEQ ID NO: 118510 - DNA, 53 bp, Heterodera glycines
cctgggataaattggtaattataattttatttcagcagtgtcttgtgagaatg

SEQ ID NO: 118511 - DNA, 229 bp, Heterodera glycines
ttgtaaaatttaatccgaaaacaatgcaaaatttgaatgaaaatggaacgaattttgctatttagtaaaaaacgagcaaagagaaaagcctaaaaatataagccctatataaagtgccaattcatttccactgtttgtcacagaagagcctttatcgtttattatggtagagcaaacataattgagagacaacacatagcgattaaatcgacaatacaacatcagaatg

SEQ ID NO: 118512 - DNA, 220 bp, Heterodera glycines
gggggggctgtcggacatacaccgtcggaaaaaacaaatgaaatttaaaagaaataagtcaacacatccaaacattcgccaaactgggattttaagttgatacttgaaaaaattaagtaagatattgtggcccgacaggcaccaaattatttttagaaataattttaaaaaataaaatgaaaaaatctaccattttcggggttgaacccaagcaaaaatg

SEQ ID NO: 118513 - DNA, 54 bp, Heterodera glycines; identical to SEQ ID NO: 118486

SEQ ID NO: 118514 - DNA, 1003 bp, Heterodera glycines
gtcgacgtgccattgcgaaaacggcgagcgaattgatgtgaaggacggacggacgaatgaacgatgagaaacggcgatgaggtcgcttttgaagtgttgttgttattgcacaatgaagggatgatgatgataaacgcaaatagttctgttctaaaaaaggaaaaaacataaaaacaatacataatgaaatgaattataaatttaaaaatagggaaattgcagtttttgtaaaaaaaaatttgataaatttaggttcaaatttggtagtataggccagggaaactctgataaactttcaggtcgatgtcgataatttttggaattcgggttgggtatttactggttaagataagaaatatgtctttttgaaacagtgaagtttatgaaattcacaaaaaacatagtaaaacactcataaaagaaaaatgagtgaatgaaaagggaggaaaagggggcacaatatttatagtacgacgcaacaagggagggcaaaagttaggtagtaacgtaggtaggtaccattgcccaaattccaaggttttctctctatataaggaggtgtttttctcattggactgacattttttgcattacgcctatatgctttgcttacttgttccctcctctattcagtccttaatgttctgatttaattttttgtgttacagagtacgcaaaatataattaacccgaatttttccaattgttttttcaatcaaaattgactgtttctcacagaattttcctgctggacaatctaaacttggaatttaatcaaaaaaacccaaaaaattgcttttccctatttttaaaatttataattcatttcattatttatgtttttatgctttttcattttttagaacacaactatttgcgtttatcatcatcatcccttcattgtgcaacaacaacaacacttcaaaagcgacctcatcgccgtttctcatcgttcgttcgtccgtccgtccttcacatcaattcgctcgccgttttcgcaatg

SEQ ID NO: 118515 - DNA, 1003 bp, Heterodera glycines
attttttattttgatgatttttaaataaacgacatagcaccatttaatccgttgttcatcattgaaaatatttgaaaattcatttattgaaaaattatatttttagaattctgagctaatctgtacatattggcgaacgcccttattgatggtttttatataacgacatagcacccaatttgtactattctaccttgtggtcacaaccccactgcgccatttatttgtaaatcgtggcccacttgaaaatttactttatttaatgattttttatttttatttatttaaaataaatttttgttttactatattatcaattctagaattttacaattttttcaataaaactttctaatagttgtatttaggttggttagttttaattttaaaataaccattttcgtacgaaacgaaacgaaaaaccgaaaatttttcaacaaatttcatttttaattaagaactttaaaattgtatcctctaatagagcccggcgcgggattttgcgggataccgtcctaattaagagcttgtttattagctataagactttaaactttttgaaaatttgattctagcttaataataatttatgctcaaattttcatcggaagctgcgcggtgaatttcacgtaaactgacttaaaaaataaggtaaaaattgttaaaaattccccaaaaaatattatccaacaaatataagaaaaaatggtggaaaatatttacaaaatttttaataaataattgtattacctcacttccacttttcacgaatgcatgtgaatgaatgtaaattgacaaataaaatgagttaaaatcgttaaaagtgaattgaaattttattttgtcaaaattataaccacaaattgattttaactatggaaaaattaactcaattatccaatgatgtaatcaaataaaaaaatatttatgagtatttaaatgctttcttagcaaatggctttttcacatttatctaaagaattgttatttcttttttaaaatg

SEQ ID NO: 118516 - DNA, 249 bp, Heterodera glycines
tttgccaagttgggctggacttggccggcccctttccatttcactcaaaaagggaacaaacacattttaaatatcgtttgttggttcaccaaatacgtaatttctgtcccagtccccgacacaaaagcacaaacaattgcccacacttttctcaccaattgttacttaaaatacggcggttgtgttgaattgatcaccgataatgcctctgccttcacttccgaatttttcagagaattttgctccatg

SEQ ID NO: 118517 - DNA, 199 bp, Heterodera glycines
ttagtgcatgcgcaagctgaacaatcaaaatgtttggcgaattcatcaaaattttaaattgtcaaaatttttccgtttcgtcgccctataaatactcgttccaaaatcagttttggcaatccaataaaatttctcttaataaaaaaatactattcaaataaataatcattcctagctgcttttggtttgatcacaaatg

SEQ ID NO: 118518 - DNA, 1003 bp, Heterodera glycines
gatttcagaaattttagggtccttgaaatctcacccgagacaacgataagcgtgttttaattggagatgaaatggaaaacccggcttttgtgacacctgacctgaattttttttcgggccaacagatatttcgaaatgagataagatacggaaaataaaatttaaaggccactatgaaagaaatttagccctagaaaaaaagaaattaaaaaattacacattatttgagtcgtggccaacccagtcccacccattcaaccaaccccgccgccgctcaatgtcagttgctgtctgttcgcggtgccgggcgataataactatgacatgaatattttattgaacggattaaaaatattttatttgccctttggatttcaaaattaagatctggaaataaagtttaatggccactaggaaatcaaacctagccatagaaaaagaagaaaaaaatcccgcgtcaggaccaatcagatggggggggacccatcagtcgaggacaactcagctttcgacaatttaataaaaaataaataaatttttaaactaaacatattttttaatctttaaaaggcaactcatacaatgacttaggctaggaggctaggatgaagcttttttaggctaggcctaggcttgcttggacctaggtttaggctttatttggtaatccatcagccgaattcagttgagttgtccccagctgattgtccagaagtcgaaaaatatatacatatttttctaaaaaatggctaaggcgcccccacaaagtgtccaagccacgaaatgtccaaaagagtaaaaacccacgaaatgtccaaaatttttcaaaatttataaaaacaaaatgagtctaatttaggatttttagggttttcggggtcgctgaatacgaatataccctttatattaccccttgcctaaccttaggcccatctgaataataaaaaactcaaattcgagacttggacatttcgtggcctggacattttgtgggtcagcgatg

SEQ ID NO: 118519 - DNA, 912 bp, Heterodera glycines
attgcgattccgattacgattccgattcggcacatccctgctttgtaccccccccccctcccctttttggaaaagaaaattttcaaaaatttttttcgaaataaagttgttttatgggttttctgggtcgaagaattcgattcttatatctatttcggcccatttcgaaacactgacccggactcgaacaaaaattcgaaaattcaattttcgaaaaattctaaatatgcaaccaaatacatgaaataaaaatgagaatcgattcagaaggcaagataaaggggtcggggtcactttggcgcgggccattttggcgccgcgaactttcaagtgttataacttttttcttatccaaccaaataaaataattttgataccattaaataggcctaagtgttctttattagcctgcaaaatattagaaaaaataaattctgtttgacaaaagatatagcgtgcggcgccaaaatggccagaaaaagtcagttttttgaggttttttggccataacttttttgtgtgtcaattaaattttttgaaattttgcaggctattaggtactatcaagcgctttaaaatgatatcaagcttatttaatttgaatgagaaataaaaatgttatagcgtttggcgccaaaatggctggcgccaaagtggccggttcccaagataaagtatttcgtgcatttgaaccggttttgctgcatatttagaattcgggcaccgaaccgtcccctaccgcactggggcgtacccatagtgttgaattcaaattcaaattttcaacgcttatttttttgaagctgaaacggaccattcccgagagatcccaactcacatgctaatttgactcatgaatttcatttttgaacatttagaattacaccatagttgctcttgaatttggagatg

SEQ ID NO: 118520 - DNA, 776 bp, Heterodera glycines
ttaagttgtaaataaaatttggtgcgctttagagctctttctgaaaaaaatatttatgaaacaaaaaaatcgattttttcaagtgtccgtttagggtactcaaacaattatggggagcaaaaatccaacgcagaattaaagtacaggctatagggaagctattcccgaaggattcggtctccccataaatctgggcgcatcggctcggggggactgccccgaaaacaaaaaaatcgattttttcaagtgtccgtttggggtactcaaacaattatggggagcaaaaatccaacgcagaattaaagtacaggctatagggaagctattcccgaaggattcggtctccccataaatctgggcgcatcggttcagggggactgccccgaaaacccaaaaaaaaatttttttggataaaaattatttaaatgaactgactagataatatttaaaataggttattactcttcctttcagtatccctgcaaagtttggtgcgcttctgatcagtttctgaaaaaaaagttaagcctaaactttttggcctgtttaaaaaggaattaaaaattttattcatctccctttttgatagaaaaagcatcagagtgcctaaactaacctgtaaataaagttttgtgtgtttcagagcactttctgaaaaaatacttatgaattaattttgcaaaaaataaataattaatgaaaaagtcagaatttcgaaaaattttaaaaacaacaagcgttggcattttttcaggttaagttagtcctttacaatg

SEQ ID NO: 118521 - DNA, 449 bp, Heterodera glycines
tcatgtcggtgtgaattcgccctcgacattcgtcccttcgttcgcatcgccagaatttcaaactaatatcaacattaaatttgtcgaaaatgtaaaggagtccatcgttaattaatttatccttgtgacgatttgtttcaacttcagacattattaataagtaaccaaatattgcttaagatataaagatagacaatatagatttaataaattatggtacacgagaagtataacaaattttttttggtggccgaacgtttcgtcactgaacctttcgtcactgaaataaaataaagaattatttattagtgaaaactatttttttttaaataaagttatgtatttgaaattttggagtgtctgatcagtgatcaccgtaaaaaatttttaatggacgtcaaaatttctcgtttcccaaacatgagtgcctaaatgtaattccccaaatg

SEQ ID NO: 118522 - DNA, 305 bp, Heterodera glycines
tttactaattttctgtaaattttttttggacattattctttttaattaaattttataaaaagctttacaaaatttcaattaaaaaagtcaaatatatttgtttgttataccaatatttcttgtaaaaaacttatgcggaatgttctgaacatggattttgtacagtgccgtgccaagcatttcccgacgatttgctcccgtaatttctttgccatttttaaggcactgattgtccgcccaacggagtgccttttaaaattaaaaaaaaaataataaataaatgacaaaaaaggctcctaattatg

SEQ ID NO: 118523 - DNA, 94 bp, Heterodera glycines
  unsure (1)..(94): unsure at all n locations
gtctggcccgaaggcggtccgagtgctatcgaaatnttattggacggctgagcaggaggcgcgtcctgttagccgttactttgtgcaacgtatg

SEQ ID NO: 118524 - DNA, 123 bp, Heterodera glycines
tggattagacaaacatggacttggcctttttattctcccatcctcaagtcgatgtgtttgtgctccgaaatttaattccaaaattatacattatttttgttttagtttgtttgttaaacaatg

SEQ ID NO: 118525 - DNA, 721 bp, Heterodera glycines
ttttctatgtaatttatgtacctaaattctcatcagatattatggtaataatgtaatggtgggctcccttttcgaaaaaaaattttaaattatgagttttgggccgccttgatcagtgatcatgaccttgaaatctagaatcccgactcaaattcgattatacaagtattgacatgaattcgaaacccaacccggtttagcgaaatttttacggcgtaaaaaagtcattttacacgggtgccaaaaggacacaccaaagcgaaaaaagttaggtatgcacctagtcgcttatttgttagccatattatgtaacaacattatgccatttttttggatttaaattccaacaaattaagaaatctttttaatcttaacaaataaaaaagctaaattttaattttttcgtcttagactaggggacgattaaaaattagccgaatgctttctggtcgatgatcatgataacaattttaatccctaattttatggtaaaaattgcatacaaaatgcatcaaaaaggttaaatttctctacccttaagctatggaaaagaaaaattgtaaaaatgattgaaaaacataatttcatcccatgaaaaacacttgtagaaatttcaccccattctcggttttttgtcggccctttctctagagaagtgccaaaatgacaaaatctaaatttttaagcgaaaacaaatttgtttttctacgagtaagcaatg

SEQ ID NO: 118526 - DNA, 268 bp, Heterodera glycines
tatattttttgctctttgaaaaatacgattaattaccatgccataaataaataattgcttttggaaattttcgaaattgttgagttttaaaatggcttgttataacattataaaaccgttgaattttcttttggtgcttgcgcttcgattttgattattccctgtttcttatcacaatctgtgcattttggtatagtaattacaattcctttctttaaagattgaaaatattctttttgttcaactcgaaaaagagaggcaaacgatg

SEQ ID NO: 118527 - DNA, 829 bp, Heterodera glycines
aatgattttatttttgagatgcttgtaccagaattcgccaaaaaagcccattaaatctgatgggccgaagtgccaaattaactgaatgcgcttatttgcaaaatgatggccatcaacgaatttgcgttgagaagaacactattcagacagttaatcaattttattcaattaaaaatcattattttttaaaatttattaattttttaaatatttataaaactttgaatttttgcgaaaaagtaatcaaggacataaaggacatgtgcagggtttgtccttgaatgcttaaattcttttattttcttagggtgatagcggcggtgcgttattgggcagcaacggcacaaattttgtccaaattggcgttgcaagtgtcactttatgtgaccccttatttggcaaaagcaattttaatatttataaaatttaaattagtctaaattaacgaataattttaattaaatttttatgaattttaaattattcaaaattaaagaatttaaatacaaatttgtttatcataaggtttggtgagcatttactctccgctggacggttgttggattgagcgaattactggtgttgaatgtggcacctaattgatcgatctctattaattgcttttaatgccacaaattaattactaattaaaattgtcataaaatatgtgcaaagataattgaaatgaataaaatgatgcaattttgagatggataaaaaagcacaaattaattcgttgtcgccataatcatttaatttaataaatatttaagtatattttaattcatagtcaaatgggatgaagccaaatttaaattttcagaaaatg

SEQ ID NO: 118528 - DNA, 586 bp, Heterodera glycines
tgaaaaatttggctaattcctaacaaaattcattaaaaatccttaaaattttctcccggcggcgcatatcggcaccgccggctcccaaaaatctttttttttctaaaaattggattagtataaaagtggttggcttctcctccgccacttcattattataattattcattggccatttatttgtattcgtctctctctcttcgacttttcgccctaacaatgtccttaaaagtgatttcggagtccgaaatgggtcaaaatggatgtcaaaatcgattttcccaatcttaaaaactcaaaaaacaaagtttttcttagaaaaaacaaattttgaaagataattataacaagtacccatttttacaaggcatcaaaaattgctaaaaattagtataaaagtggttgctcctcctccgccactttcattattattattttccattcgccatttatttgtattcgtctctctgtcttcgaccttttctccatgacaatgtccttaaaagtgattctgtacgttttttgcatttcttctcgacatttaccattttccttctcattttttagtctgatcgctgtaccaatg

SEQ ID NO: 118529 - DNA, 435 bp, Heterodera glycines
agtaattttacattgagttttaacccgtttttgagatacgtgtccacccttttcaggtacattgacgtggccgtcatccaatttctccgcctcaatcagcaaatttgggacagaggcaccaatttgcgtttgaattttcgccggatatcagccaacactaacaatgtccagccaattttggatgtttttgtccgtcaaatttggcccatttttacgccaacagcaacaaatgtccaccatttgggagttgaccatggcgccgatttggacactttgcttcgtcttacatcgccgacaattctcatcgatcttaaactcacttcagtccaatgcaatggtggactgtttccggaagcgcttgctgatgacgacgacgatgatgggccaaatgcaacaaattctgccggccaaattttgtccaaatggttacacatg

SEQ ID NO: 118530 - DNA, 552 bp, Heterodera glycines
tgcgcgcactgataaaacaaattgtattgttaaaaacgatcagtgccgaattcagcaaaattattcatttgaggacagaatgatttttggcaaacaaataacaatcaaattctatcttaaaatgggtaactaatagaaaattttttacttcaacaatttttttcagaattaataaataaatttttttgagaagaagtttttaactagcgccaaaatttttgtgctaattgtgaatcgattcgtaaaagtgccagaatgggcgtccctcaatatttctatattttcatgaccaaatcaaattcattcaagcaaatacaaaagattaattaatttttggaatccaggtccaggtattttttgctacttaacgagctttaataattaataacagactattgattttaaattcctgacaaaagtaataaaaaaaataatatataccaccattctcaatgaatcaacctgccaaatttgttaaacaaacccacagaacaaaccttttaattgtctattttctaacttttggaatgggatttttaccgaggcaaaatg

SEQ ID NO: 118531 - DNA, 943 bp, Heterodera glycines
tataattagttctaaattaacatccaattcatattaagagaaaatttaaagaaaataaaaattttatttttaaaattcttttgaactttccttaagatctcaaaacttacgaaaaaattatgaaattttctatttttatgcatttaagaaaaatttcattaaaaatcccaaaaaaataaataaataaaaagaaaaactgcaaaatttgtacgaaaaaatgtaaaaatgtgccaaaaatgtaaaaaaaaatatgtaaatcccaaaatatgtataaacataaaatcgcttttattaattaatttttaaaaattaaagaaatttgaaatcatcatcactttctgtgctttcgattaaaaatgaaaattgcacggaaatttttgtgatttatatttaataaaccaaaagcagtgaatgcaaaaataaataaaaatcagccaccacttttagttaatgtgaaacaaaaaacagaaattcctatgctaatcaaaatgtgtaatatgttgggacaaaatatctaaataaatgaagaaatatatatatatatatatatatatatatatatatatatatatatatatatatatatataatatatatatatatatatataaagattaatttaataaaccatttacattattaaatttttttcaataaataaccgaaaaataatttgagagtccttttgagcatagatttacatttaagcattagcatttgttttcaaaatgtgtgccgaactttgatgatgccaattttgttgatgaatcactgctttttgtgccaattactcaccaatcggaaagtgcaaagagattttagagaagcgcaatgaaaagcagaaacaaaagtgccggatgtgataaagacggaaaatgggataattaattaattaattattaattaactaaaattaagtaaaatttttaagggttttcgaatg

SEQ ID NO: 118532 - DNA, 229 bp, Heterodera glycines
caggaaaatcgaaaattttcagcaaaaatactttttccttggttttgtgaaaataatgggccaaaaagaagttggggatcgggggtctatttggatcagggtcccactctaaaaaaatatacgttttcgaagaatgccaatgttcacttcctcccccaccaatggcgatttcctttttgggtatactgttccacttttgtaaatacagtaaccgcccagcaaattcatg

SEQ ID NO: 118533 - DNA, 252 bp, Heterodera glycines
  unsure (1)..(252): unsure at all n locations
gccgttgatcattctgatcattgtgggcacaattgcggcattngatacggtgaaagatgatgacacacggagggcggagaagaaggacatgtcaaagcaaaaggcacttatcaaaacgtacttttgcgccaaatgctgnagggatggaattgcagcgaagaatcatggaaaaaactgatgagtgggatgcaggtttacactggcgtaaacgttaaattgttagaagcgcgttgtgaatcttgaanaaggatg

SEQ ID NO: 118534 - DNA, 217 bp, Heterodera glycines
tcttcaggtactgctccacaaggcgcggatcagcgacggtttcgcattggcgctgaacaaaaggaaatgtgcgaatggattggcaaggaaaagaagtgaatgttgtttgatgcggttattaatttcatttaatttttagctttttgggactgaaaaacggccgatttcaaaaaaaatcttttggcattttttgtgttcgttcgctttgcacatgatg

SEQ ID NO: 118535 - DNA, 177 bp, Heterodera glycines
ttttgacaaaaattggtaaaatgattctgggtttttggcaggcaaaatgttttggcttttagtgggcgtgtctaaaaccgtgactgttttcaaatggtgtgtgtaggcgtggccacacttttgcgcatataaaagtaaaatttttcaacctcattccaatttcattctcctgccatg

SEQ ID NO: 118536 - DNA, 444 bp, Heterodera glycines
  unsure (1)..(444): unsure at all n locations
attaattaaattgatgcaattttttaatgatttttaactccttttcaacatatcnnttgtggntttaaaaaaaaagttcttggctttcccccctccgaaattttttctggcaactgaatgaatgttcgttaaatatcgtcgagatgccgattttataccccaaaaattttaatgtagggcccaatgagtgctaattaaattaattaattattttttttcaactttcactaaaagatttaagcctagaaatagtgagaccttttcttattttaagcgaccagttgctttgatcaacagcagacacaaatcggtcaccgtttttcatgcggactttactcaaagcgtaaatatttatttttgatttttatatcacaaaaattcgaaaatttagctaaaattaaataaataaagatttaaaaaatggcttaattaattttcaatatg

SEQ ID NO: 118537 - DNA, 818 bp, Heterodera glycines
attaagtgtacggaaatgaataattaaattgattaattgtatttgagaaatgaattttcgattgaaacgattatctagagaatttggaaatccattaagtagttaagggttcactcatccccccgcttagaaaaaaataattaaaaattcactagggtaataagaaaggttgcgatttttagtgacgaaaaatctcgagagtttttctaaattttctcgcatgagagtcaatttcaagtacgtacttgccattcaagtacatacgaatccgagctaacaaataagcaagcaacattcaaatcaaaggcaagctttcgtgcatttgaacgtgcatcgatcggtgagaattaccaaatccggaaaaccccgatcagagagtccgcctcagtttcctagcaattaacaatttttcaatcatcgatattagcagggaacggatttttaggttttcacctacttttttggggggataacatatgctgagataagcgcaaaaaacacattttcttcgatcacttttcgatttagagcgacttttaaacaattattatgacttgtgaaatttttaaaaaacttttaaaatatttctgctttaacagaaacattattatgaaaaagcaataaaaaaacaaaacaaaaaattggcgttactttttttcaaaaaatgcacccctcagaatcgatttttcaaaaagcaaagatcctggacccatgatttggcggacgatcgaacatttttacgcttgaatactacatatcttcaaatttcagtacttcttgaaagggaaaagtgtgctctaaaattgcagcaaacaatg

SEQ ID NO: 118538 - DNA, 1003 bp, Heterodera glycines
cactattataaataattgcataataattacataataatatatatatataattttattaagtaaaaaatagatttggttaatcctacttatggtcaatcaccattttcaaaaattgcatcataattaaataatatataaattctattaagtaaaaaatagattcagataatcctactaatgatcaatcccaatttttaaatattgcatcattatttaatataataaacaaattatattaagtaaaatatagatttggataatcctactaatgatcactcccaatttttaaaattttcaccatttataaggcgatgagatattctttttttatttttaataattactttgctttttctcatatatgaaatagtgtaaacttaattttctttaaattttcaaattttaccaaaacccttaattcaaaaaagtattttatttttttatatcccttttttaaacactttttagatataagaaattttatttttaagcattaaaaattaaatggttacattacaaagatttttgcagaaaatggaaatatttcaaaaatgcgaaataaaattgtattaatgaatttcagtctttttttaaaattcatataatatgtagtttttattataaataagctttaaatagagatgcaaattccaataagttcatatttctttccctgtttaaacgtgttcaaaaagtagaaaaaaatttcgtgtttcagaatgaaagttgtgatttctatttttttaaattttttggtttttctgcatattaattatttacgtatttttctaaataaattcaagtaaaaatgtcactatttaatataaaaataaattaaaaaataaatagaaatttggatgattcttctaaaagcaatctatttaataataaatgcatcaatatttaatgtaaatcttaaagaaagaaggaatttaattatttaacgcattttcattttcattttttgtatggtaatttatatttcagaaagaaagacataatg

SEQ ID NO: 118539 - DNA, 1003 bp, Heterodera glycines
ttcgctccaattttggcaattcaatgaaattttatgaaattaattaatttaaaattggatgaattttgattattttcgaattattttagccaataatcccttccaaataattcaaaattaatttttgtatctttttaatactactttaagacgcaactccaattttgtcatttcaatgaattttatgaataattaattcatttaaaattgggggaattttgcattattttcaaattattttatgtcataatccattctaaataataaccttattatttggtttatttgcacattttccaccaccattttgttccttctcatatattatttgcccgttgtgttgtgctgctgtcgggtcatgttttgtttgcccacacaaaacgtcgtcaagtcgctcaaccaccgcccgactaaagtccaacgattaatgaatgaatgagtgaccaataccaaaataataatcaatgcacaacattttaacactgattttgcgttaattgaaaaataaatatttatgttgtaattattttgattaattaattaaatttaattcgtttcattttttgtacttatttattttagtgtaaaaaaaaaaatgaaaaattggaaactttttagcaaaaaattttgtgaaactctcttctattaattactgtgaattcagtaatagtttttcaaaaaatttctcggcagcatcgcctggtgcccatgaaaatacctgaaattatttcttggttcacattaagttaaaaaaaaattgcttaaaattcgtcacaaaataattaatgcttcctacttcaatttgggttaaaaattattttgacactaatttgattaattctaattagcattttatttgttagacaccaactgttttttttaatatataaaacaatgaaaaattaatttttttgtgaaacaaaatgtgtgtaaatgggagggagtttttattcttttggtgtctaaaattctaaaaaaaatctattatcataactcaacaatg

SEQ ID NO: 118540 - DNA, 371 bp, Heterodera glycines
ttttagcggcaattcgccgaacaataaaagcatcccggcaaaatgcttcttctccgccgagcgctgcttactaattcattagctgcccccgggcgaatgtgtcgctataaaaggaggccatcaccgaacagtgccagcattcagttcacaaatcattttctaatcgagcttctttctcgaacaatttagcattaaatctccttttaatccgccctttcttttaaatttttgaaaaatatgccttaatgataatttattcattattcagaaattttttttaaaattatctttaatagaatttcttttatctattttttgtgtgctaaaatgaaaggattttcaggtaaaattctaaatttgattttgtgatg

SEQ ID NO: 118541 - DNA, 53 bp, Heterodera glycines
ggggcttaaatacgatccaaaattggtggggctacaattacttataagaaatg

SEQ ID NO: 118542 - DNA, 418 bp, Heterodera glycines
aaagggcgattaagatttttcgaatgggtcataaaaagagatcggaatcacatctgttaatggtcaataaatttgactattttttgcttttcaaaaatgctttttttcggcgcaattttttcaaaaactagaaacaaagaggtccgtctatgccgataggcgccgtccgaattttttttttttgaaaatttttatcaataattaactgaatttgaccaaaaaatgacaaaatgtcacaccttttgactcaattctacaggattaatgtctatccagtggtgtcgatagacgccgccgggaaatttttttgcaaattctaggtgaaatttgagatgaaaattgaatttattttgattgattttatcataaatttattcaaaaattttggcattccgtcttttaaaattttcaaagaatg

SEQ ID NO: 118543 - DNA, 278 bp, Heterodera glycines
tctgagcaggagttagttacacgaaaagtgaatgcgtgctttttgaaagaatgaatggtcgaatcactcactacacatcctcaaaatttgtattcaaattttgcgttaaaaaattcgcttcaaaaaatcgtacatagcagcctatttaagtgcagattgtatgcttaagtatacactttaatcattcattaaaactaattttttgaaaaatggacaatttcattaaaaaaagtgaaggagtttgtatgaataatcagtttcagcatgaggacaaaatg

SEQ ID NO: 118544 - DNA, 1003 bp, Heterodera glycines
ggcacccacaataattcgttgcattttgagggcaggggcacatacggcacagattagtgccatggcccattgccgatggaggaggattgagtgatgatagccccgaggatgggttgtgggattgaaagtgagtggatgcagagatgaggagaagaagaccttcgagaatttaattgcagttttcattcgccctgaggggacggaccgacggacggggaaaatggcattttgccgggcaatgagttcagcggtggggggcggatgggacagataatccaccattccccgggggtgatagcaatgaaaaccaatttgtggcacattaccgtatgaatttaatgggtgccgattggttagcacagcgcttcgggacacgccccttttgccttgggggcatggaaaacttcaaaatgccttccttttaagtgcaccctttcaccattggcactggttgagatgcttaaagccataatttagtggtgccaaggacgaggtgtgtgctggtggatttcaggaaattttagagtttccccctagggcatccttttcccgggagtttcaagaaaatttgagagcttcacctagggcatcctttttccggtggcttcaaaaaaattcgagagcttcccctcgggcatccttttcccgaagatttccggaaaatttagacctggggcatacttttctctgtggtttcaagaaaattcaagccctctctttagccagaaaataaagaaaaattcaaagatttccggaaaatttgaaaatttccccgtggaaatcacaggcaaaaaagaggtcaaaaaatccattaaaacattcaaaaaaaaaaatttcctccgtcatatccttgagggattttcaacaggaaatacattttggaattttccttcatttgtcagagaagcaccgaaaaatttgcaaaattttgaaaaatttctaaaggaaaaaattaaaaaaccctcgagaaaatctcgaacattaacaaggtttcttgcctatg

SEQ ID NO: 118545 - DNA, 110 bp, Heterodera glycines; identical to SEQ ID NO: 98226

SEQ ID NO: 118546 - DNA, 862 bp, Heterodera glycines
  unsure (1)..(862): unsure at all n locations
gaatagaaataattaanttttcagtgatatattttaaatattttccgnacgcnaattcgtcttaatttatgactttacacagaataagcgccctaacaaataagtgttctaactattagcttgcatttntaaaaatggaaaaaatgaaattaaattttgattcgacgcagcaagcaaaaggtatcaattttttgtttaaaaagtgtccatgatgtggcattttttgcgggacatagtttatgctggcaccataatttccacatatttttgtgtacaaatattgtctgatcactcacaatttcacatgatctctgttttgatcagatcccgatttttttccgctgggcggtcgcttttctgcttgatctgatcagtccccagctggcggtcattgtccgctcgtacgtgcgcagtgcggacgacgcgcgccaggcgcacgccgagttggacgcctacgtgcacaaagtgcgtacgtgtgcgtgcaacgcgagggcgcgctgcaaaatttcaaattaaatttttgcctaattacagtagcttaaccagggggttacacaaaatgtggatttctgccaccaaatttgtttggccaattttagcattttttcaattcaaaaatttaaaaaaaacatttaaaaatcagttcaacgagcattggttggagcagaagttggacgcgctcattgtgcccgcttttcccgtcccagccgttgggcaccaatggccaagcgatttagtgagagagaatatttgttggcacagaaaataatgtcaagccgagtgccaaaatttaaaaaatcaaattttcgaattttgggttgcctgcgctttcgccactgggatgtacaacatgttggacatg

SEQ ID NO: 118547 - DNA, 502 bp, Heterodera glycines
atatatataaatagtcaatcattaaaaaaaatattaactaaaaaatatggagattttacaagagggttcggcggggggggggggtggattcaaattcgattttttagggagagatttttttttttgtgtaaaaatgtcattcttattgggttaaggggggttttatttttctttttttcagaaatcccgaattagatgtgttttgcaaagatttatagctgttttttgccaaaggtccggcggtgacattaggcaccggcgggaaaattttggaaattttaacacaatttgttaagaaattatctaaatcttcaaaattgaaatttttttttgttatttgtatttcgggcaggggctttagcccatcagctgctccccatcctaagcccttgagatttgattgccctaattcccattgaatataatagtcggattcttaattaactttgaaatagcattttacattttaaatccttagaaacaagaacagcccagcgaaatg

SEQ ID NO: 118548 - DNA, 533 bp, Heterodera glycines
tttttcttatccattgattattcatataatttacaaagctatccatttcctcccttaatcttccttcaaaatcatttttgaatgaaaccaatatcggccacatttttgtagcttcatctttacgaagaaacggaagagcaaagattcgacgtatctaacaaatttttaaaaacataattttattttacccatttccacacgtcttgttgttgattaaattcattaaataaatttgaaaaattcgatttgatatgatgaactgctgcgcgtatgtagtgcacaatgcagccatgaactttattaacaccaaaaatttttattaaagcattaacttctaatttgattttatttgttaatatatacaattcataactgagataatgttggcaataatgttgacaaatatttattaaattttcgtgaaaaacaaacatttgctaataattatgtctagactgatatttgtgcatccgacaaatgttctatagataaaattcaaaaatataatttttatgaaaattttggcctaaatg

SEQ ID NO: 118549 - DNA, 132 bp, Heterodera glycines
agcggactgaaaattccgccggagcgtcgccgtgaacttctcgcgctctccggcgggggtggcgaatcggaggacgagcgaacgtcgtccatttctgaacaaccaccagcaaaaaaagcgacgacaacaatg

SEQ ID NO: 118550 - DNA, 200 bp, Heterodera glycines
gagaaattttttaagaaggctaaagaatattcaaattctattaccaaggggaagtgaattttcagcaaaaatatgagactcatcttggcattatgcatttgatgcgaaaaaattggcaatgtaataaaattgcggatgcatatgaagaatatgaactgaaagaattccaaaatatcgtaaatatttgaacattttatatg

SEQ ID NO: 118551 - DNA, 88 bp, Heterodera glycines
agaaaaccaaacaaaatgttgaaaatggaaggcattaattggcagaacgcaattgcttgcctttttggatgacttgcagaacaaaatg

SEQ ID NO: 118552 - DNA, 137 bp, Heterodera glycines
tgcaggtcctggttcaattgggataccatttataatcaagttggttgctccaaatttgacaatttttggatgaatttttattgaaaatattttagggacgaattttgaagattttttaatttcagataatttcgatg

SEQ ID NO: 118553 - DNA, 182 bp, Heterodera glycines
  unsure (1)..(182): unsure at all n locations
gcatcagagagccnttaattacctgtaaataaagtnttgtgtgtttcagagcactttctgaaaaaatacttatgaattaattttgcaaaaaataaataagtaatgaaaaagtcagaatttcgaaaaattntaaaaacaacaagcgttggcattttttcaggttaagttagtcctttacaatg

SEQ ID NO: 118554 - DNA, 301 bp, Heterodera glycines
tgcgtgaacagccaacgacgggcttttgaattgtaaatgagagcgccaccgaatgacttaaatttcatttttcggtgcccaatgactcatcaaccaattaatgaattaatattataaacggtaattccttggcagatagatgactatggttttacgtatttgggtttattccaataaaacacgcttttcttacaattagctgatcggcaaattccccgcctcactgttaccaccggcggaggaggcggaagcgtcgtcaacaaatgctgtcaacgacgacggcaaaagtgccacaaaaatg

SEQ ID NO: 118555 - DNA, 201 bp, Heterodera glycines
cgcaatcattgaaagatgtagaaaaataagcagcgaaatatgtgaccggaaatccgtcatcacagattatcgcatttgttactattttttattaaaaaaggttggcaaaattcaaaaaacaatggcacgccccaaaatgcgcgaaatgggcttttttaaacgcgccaaagtatagccaaatgcctctcactccatcaaatg

SEQ ID NO: 118556 - DNA, 156 bp, Heterodera glycines
tttatattatacatatataaaaattagattattctaagcaatatgggttgaaaaattgaaattcttcataaatgttgtaaacacagatttctgaacaacaatgacggcgaaaatgcaaaaaattctgatcattgtgagcaaacgacaacaacaatg

SEQ ID NO: 118557 - DNA, 401 bp, Heterodera glycines
aaaattacatataaagatataaattgccctcttcacttttatccttgttttttttttgtatatttttcattttttaattactaatttttattttttatatttttaatttcaataaattcaaaaaattttttttttgaaaataccctaaaaacgagaaattaaaaaacttacttacaactcaaaaaaataaaataaaatatttcatttggtccaaaaacaggctttccaaaattaaaaatattaaaattaaatttccaaaaaatttcctatttttaaatataattttacgtggaaaccttgaataaaaactaaaaaaatgaattcatcatgttaaaataaagtttgccaatttaaagccatctctgctggtcggcaaattcatcgacgccgacaaaacaatg

SEQ ID NO: 118558 - DNA, 613 bp, Heterodera glycines
  unsure (1)..(613): unsure at all n locations
ggtttttgtgttnaacaaattgtgaaatgttccatctgtttttttgtttgtttgttaattacaacttgtgagcncagatgataatttcaaaataaagttgctatgtgcacaaaaactattaatttggaaagttcattggcattagaatttatactaaatcaatttggttgattgtttgttgatatttggttctcacgaaggtaacttatggcgcaaaatactgcacaaattgaagagttcgttcgtttggtgctcagttcatggccttcatatcaatttgcgattaaaaatcagttggcgggatcattaacaagtgccaaggcaaaaaaattttggcgcaattgcaacagatttatggaaaggcgctatttaaaaagagtaaacttttgaattctatcaaaaacaacaggggggacctttttgttttgcaaaatttttttgaaataaaaatccatgaaaatttgttatccggggttttaaaggtcgctgatcacgaatctgacatccaattcgaggtcatggaccccaagaaccacagggaataaattttcatgactaaatattaaaaaattttcggcatttccttcccggataccaaacagttgaagcaatg

SEQ ID NO: 118559 - DNA, 1003 bp, Heterodera glycines
tcggaaatttttttgttttcatttcttagtggtgttttttcgtttttattgcactttttcgaatcataaaaattggcacattaagcacaaaaagcccgaaatatgcaaaaaataggccttataaaagtcattgtagacactccaaaccaagcggaaaatgcgtttttcatgcttatctgagagtatcatgtgcgttgaaagttgagcaaaaatattcactggttgcagttacaaatgaggtacattttctttctaatatttttcttacaattagcaaatatttggaaaataattgaaaataatgaatgcaataagaaaaagcctacaaatatctctgaaaataaacaatcccgatttgcaagaaatttttggaactttttggttttaatttttttttttgaaattctgagattttctattttttttgcaaaatgaatttctaaatatttttccagaaagtgctcagaaaagcacgaaattttattgtcatgccactttgcactcggtgtcctctcaaaggacccacaaaaaataatgttaattaaaaaataaataattaaaataagctatgagagaatacctgttattaaatttattcaaataggattatgagaaaactgctatatggccaaaaaatcactaatcttaatgagaaaaattttatatgaccaaatgttatgaccaaacatcactattcttactaatgagaaaatgctattgaccaaaaatcactaatctgaacaaattagaattaaatttcgtcaatggattgccccgaatagcctgaaagaagttctataaaaggctgaactaaattacaaaattcatttaattcttttttttctattatgatggctaagttttttccttcacaaatgggcggcaaactcgtttttgaaggccatatgcatcaaaaaaagaagcacgtagggaattcatttattggcgctgtgaccaaaacaaaacaataaagtgcaccggggcagcaaaaactatcgggatg

SEQ ID NO: 118560 - DNA, 56 bp, Heterodera glycines
agttaggcattttctaccaattaagccgatacaattccaaaatttatcaaaaaatg

SEQ ID NO: 118561 - DNA, 187 bp, Heterodera glycines
ttgactaaattttaatgtaaatttttaaaatgttgatatgcatatttatttatatagataatgaaaacaaaaaaatattttttaggttttatataaagtttttttgcagtgaaaagtgtatatctgatggaaaataggtccggttagcaccgcgaaaaatttcttcttatttcttttcttcaggatg

SEQ ID NO: 118562 - DNA, 348 bp, Heterodera glycines
attaagtgtgataatgagcgtaataaaatggggcacatttcgaaattatgcttaagccacaaaaaaatcgttaggggggcaacgaaaaaattataatttaaatgtcccttttcattaattgtttataaatttaagaaacaattagcaaacattggagcacgttgaaggagatgactttgttcataagcattctctccattcattttcaggtgtttttttgaaaaaaatgtttttttaaattaaaatgagtaaaattaaattttgcaaaatttacaatttttgggcaataatattaaaaagggcttacaattagttgaccttttttagcttggccgtatcatcacaatg

SEQ ID NO: 118563 - DNA, 646 bp, Heterodera glycines
tattggtcatgaaatttgattgaatgaatgaatgaagagtgaattaaaatatttttgtgcccggttctcatgggctcattaattattcaatagttaatattgacttcaaaagacatttgaatttgccgacaatagtgaaggagataacttcaaaggaaatttgaatttgccgacaataaggaaggagagttcgagaaaattaattggtattcggatggggacaccccgcccctaggcttcataaatactcagtccaaatcacatttcattcacatctgctcatatccttactcactttaataataaaattgtaataaaatttttattttattgctgttaaccagggcggttgctccaattattgggctccgtttatcctggcagcacttgtgtgtcttttagggcttggggttgtgcgcgtgacctttactaattacccgagccgtttaggtgccctgtcgtcttgtgcttcatgggtggcagtgcgctgctcttcagggcatagttggtttaaaatttttaaaattattattattatccattaatttgcattcacaacgacaatttccatgcctcaaaaatatgtgtcaagattgttcattttatccattcaattcattatttttccctgtaaaattagataatg

SEQ ID NO: 118564 - DNA, 305 bp, Heterodera glycines
atgatgggccaaatttaaatgctggccaagcgttggccaaatggttgcacactccgcgcactgatccgaagcgattgcattatttcgaggatttgaacggacaatcaaatttcgattgggtcaacagtttcaaagaggtggccacattattttaaaataataaaatttttgagtttttctaaggttaaatttttgaaaatttcctatccatatgacccgcggcatttgccttttgatttgcttaggcttttctcagtgccaccaccaccaattctccagtcaattactgtatttgttttgaaatg

SEQ ID NO: 118565 - DNA, 62 bp, Heterodera glycines
agtccagcagtgattagaagaggtacaacagtgattagaagaggtccaacagtgattagatg

SEQ ID NO: 118566 - DNA, 202 bp, Heterodera glycines
gctttcgttcattcatttcgtctttttttggtgccttcgccgatttcattcgccacaatttccaatttccatgcgtttttcctcagttttgccaatttttttctcccattttttaataatttttttcgctgttaattcgctgaaaatccgagaattcgttgcccctccaccgaacgaagtggcaaaaaataaaggcaaaatg

SEQ ID NO: 118567 - DNA, 228 bp, Heterodera glycines
ctcgccgcggggcagagagttctgagtgacatcgctcttggccgtgatttaagggatgccgtcagggaacattcaagacaggggctgactaaccttaccgacaagttacaacaatgtggtaaaggaaaaaaggccctgatcactaataagaaccgaaaacgggtatttgatcagttaagtttcatctaaaggtataaatagaacaaataatataaaaagttaaaaatg

SEQ ID NO: 118568 - DNA, 72 bp, Heterodera glycines
aatgcaaaaaaatgttcaaattcaaatttacagtacaaaaaaatcaatatcctacccctgtctctaataatg

SEQ ID NO: 118569 - DNA, 228 bp, Heterodera glycines
ttaaatggcttcgacttaattatgctaaaaatgccaaaaaagttgtcaaaaaatttggtaaaaaaacaggacaaaaatagtgaaaaaattttttcaaaaggggtattttacttttgaaacgcctaaatataaattcattattatttttaaaattttcgtttcgttttcgatttcgtcagacggtatttggaggaaaaaagacgaaacaattttacacccttaagaatg

SEQ ID NO: 118570 - DNA, 260 bp, Heterodera glycines
  unsure (1)..(260): unsure at all n locations
attaanttttaaaatattagtantctcgaaaaaaattgttatttaacaaaaccaatatttcaaaaaatggattttaaaaaatgaaatttggaatgtattcgaattcattcggctccgggctcggaatgggataaatctgaggtcacttcgtgaccaacacactataaccgcagtaattgattttgagcctaagataaaaagttgaatttggatcctcaattcttttatcgaagatattcagcaaattacttttcaaaatg

SEQ ID NO: 118571 - DNA, 1003 bp, Heterodera glycines
caaaagcacaaagataccactgtagaattcttgtattaatacgcaattaccactcaggcaattaccgcgtgtcaatgttgaaaaatttaatccacaaaatattgattttcttgcccgtgtttgacataattatgtgatgaaccttgaattttttttcggcttttgttaattttatatgcattatcgaataatatagaaagaaaattaaaaatttgtcaattatgaaattattcatatttacccagacgattttcattaaatgtgcataacaaaaatttttttatacattataaaaaatggaccaattctcatatttttttcatgatacgttttcttaattaaaatattcattttgccagaccattaattaattcacatgaaaaaaagcttgctatttgcctgaatggagcaattttcataaacttttctaataattttataattatgaaattattcctagaattacccagacgattaattaattcacatgaaaaacgcgtgccatttgtctgtttttaatattaaatagcaaaaataataataaaatttttttatacattatggaaaaatagagcgtttcataatctcttcgtgatacctttattaattatgtggtaattaacttacccagacgattaattaattcacatgaaaaaaatttgccatttatttgtctattttttagaataaatacagcgaaattttctaatttcattcattagatgcgcataaacaaaaaataacattaagtttcatacattttgaataaactatatcgaagttaaacaaaatatttcaaaaaattagtggacgaccaaaataatattttaaaaatttatttactccaatttcatatttagttttttcaaattttgattgctgtttgattttcaatctggcaaaaaattgcattaatcaatttataattatgcaaaattgattttataattaagaaatatattattttccaatgtttttattttttaataatattttaaagatg

SEQ ID NO: 118572 - DNA, 1003 bp, Heterodera glycines
tataaatttaatttataaattttaaaaataaatgattaaaaatgttttttttaatttaaaattacggaaaaacaaaggaatattgtcgagaagaaaaatgtgaatgaaaatcaatatgtggtatgtatgtacgcgagcaaatgttggcgaagtgaagttgaaggaaatgggaacgggtcgtttcggcgccgccgattcggcgccgccgattcggcgccgccgtttcggcgccagggtcgtttcggcgccaaaaatcaaaaacgcagaaatagtaatttttttttgttttgtttcagaagatgaagtcaataaaataatagtctatattaaatttaatttcttcattttcactttcatcttttgtgatcttgcataattttgtcggtaatagttagggcggggatttatatggacataaaatcgcaaaatatggccataaaatatggaccaaaaatcgcgaaatatggacataaaatggcaaaaatatggacataaatttttccaaattggggtgtaaattttaaaaatttcttcaaattcgctcaatgtaaggtaaaactttcaaaaatagctaaatatggtattaaaataccatttttgaagaaaaaacacgatacaccttaaaatttactaatttagcaaaaaaatcaacctgaaaagcgaaattttcgcttttttgtttattttgacataaattaaccaatttttaagaaaatttataattcatcaatattttcgtgaaaattttgctaattaaatgattttttgaaaatttttccggtttttgttgtccaaaaggtcaatttagctgctaggggccgttctaatagaggttttttggaaaaatgcaaaaatatggacataaatatggaaaaaatcccaaaatatggacaaatatggatatagaaatccatcctagaagaacagatcaagctaaaaacatatttttcgtgcgtttcggcccaaaaaaaatggtatccaccagttaattgactcgcaaatg

SEQ ID NO: 118573 - DNA, 81 bp, Heterodera glycines
agtgggtttcatggcattttcaaaacaattctttcgttttacttaataaggtaaatttgtcacaattacagtattttgatg

SEQ ID NO: 118574 - DNA, 1003 bp, Heterodera glycines
atccacttccccccttccccccccccaattattgtcttctcgtcaagtgggcccctcgggggttggtccggtggggatgaaagggatgggatgggatggatgaattcatttttgtaggatgattttgtgcagaagaaggatgagaggagatggaaaatttggaagttccggaaaattgggaccaaagattacaaaagagaaaattgaaaaaaaaagattttgtttggaaaatcgaacacaaaaaaaatgaaaaccaatagaaaaaatggacattttttaaaaacattaaaaaaatttaaaacgaaaacaatttaaacattaggcactcaaaaaatatttaaacagttggggaccaaagaacgaacgctggtgacggattttgtggtgtttaaagtgtgagatttgtggcatacaattgggattttttggggtgggatagagatggatattttctggggggggggggggaggcggtgacggattgatgcgattcggcggtgcgtgcgggaggggggcggtgttgtgaaataatctaattagcggtcatttgccccgcctgcgggcggcaaaaacattgcattacattacaaattacactcgccactcattcactataaaaatgaaaatcctggaaaaaagccaatgttagcctattattccccaagcagtgtgtttcaaagtagaatttaaaaaatatatttttaaatatatttaaaatgtatttttaatttattatcattaaattaataatatttttaaatttgtttgctgaaattgttcgcctattcatcagaacatatcagaaaaatcagtacatttaacgatttttattaataccagtaacattagaaaaaaatgggcaatattcgatgaaagtaattattctaaatattttgcattatatgtaaaaatgaatttgtggtatttattatattttttaatatttttgtattgaatccggcaaaatccgtccgaattttgaagaaatatttggcgatggatg

SEQ ID NO: 118575 - DNA, 172 bp, Heterodera glycines
ttttctgtaatattaaccaattaatttttttcttaatctaaatgaatccaattattaacttttgctcatgatcattgagcaacataaaattttgagccaataaaatatttttaaattcttttaaatttatattttttaatcaaatttaaaattcttcataaaataaaaaatg

SEQ ID NO: 118576 - DNA, 384 bp, Heterodera glycines
ttcgaaatggtacttcataaaatacatatttacctttagacctccattttttcatatttctaaataaaaaacgagtaatgaataagtagaaaatagaaaatttatgggattcgttcataaggatatgacagtgatctttcattccttagaggttttttcgccttcgagaataaaaaaaattcaccttttgttcggattttgatccggggtgcgaaaaggatgcttgattctgattagcgactatgaaaacctactaattgtcatttttaattttaaaaagtgcttttaaatttatttcaaattgaacaactgtcagatttttaacagcaaaaaataggacgaaagcgacgtcgagggaggaaatccggtcgccgtgctcgaatg

SEQ ID NO: 118577 - DNA, 1003 bp, Heterodera glycines
aaaacctttaatttttctttaaaaaattggctctaaatcacaaaataggtcattttttacaaaactttaaccaaatggtactcaaattttattcatccagaatttagttagacccaattccaaaagtcttcaagcattatcacgccggcctctacttctcacaaccatttactgatttattccattaaaattgaatagaattgaaaataattgaaatataattttttaaaataataataataaaatacaaaattattttttctgacctatttattatttgaattagaatttattcatttttattcttgtggggcaaccgctgaagaagaactcacacaaattaatttgaacaaaaatacaattattattcaaatgtcaattgcatttttcatttcttttattaaccattagatcttgtctaatacatattatgtgaaaaaattaattatttaattttttaattaattttatttttgaattaaacaattaaaaattaatgaaagacatcgatttcagtccgaaaaattctaacccatgaaaaatttggatgggcctaaaaacataagttccgcattcggacgtcaataaacgcgcataaatcctttatacttcgtgattgagcatacagaaatgaatagagaggaggggggggggggatttttgcccacaattctgaaaatttctaagggaataaattttgaggacagctgagtaaaaaaaggtctccggattccctaattttcttattcgattttttggttacgatccttcactgtctgatcgattcaagtatttttgcaaaattgtgtccgaatattatagcttatcattgcaaaatgaggcttttgcaaaatcataaaccgaaaaatttggatttctatcaagcgatattcgagcattatattagttacattttcaaaattaattttttaagaataatttattcaccgtaattcatcgaataaaaataatattgaagtaaaattcataagaattttaaatg

SEQ ID NO: 118578 - DNA, 454 bp, Heterodera glycines
  unsure (1)..(454): unsure at all n locations
aaaaataaaattatttatcgaattttgnggaatcggaattccgtgctaaataatgtccatatataaataatcaaaatntcaaaggaaattaaaatgttccaaagtgtntaataataaaaaatttgaaataatgataattttattaatgatattgtcataattgaaaaaagtattattaatttagatgtttaaattaaaatttctaatgcaaaaaaggacgaaaaacattttttaaatttttaaaaacttttttttaaatatttttaaaaattttatgtaattcaatttaaaataaagaagaagaaaaatagaagaaaacaaaccctttttaagtgaaattctatttttcattaaaaaccagaaaaaaaattttcaagtaatttcattaaaagagcttttttttattattaaaaaaaaatatttctcaaaattataaagggtagagaaagtgatg

SEQ ID NO: 118579 - DNA, 171 bp, Heterodera glycines
tggtacgcggaggagaatggcgttgtggtgcagacggtgcattcggcaggcggagagaagaaaattgggcagtattccgtggatggctgggtggaggaagaaagaagagcaatcgaagtcaatggatgtgtatggcacggctgcaaggactgcttccccaacgacaacatg

SEQ ID NO: 118580 - DNA, 135 bp, Heterodera glycines
ggtaaatcaaaaattatacagaaaccaattacttaatatggttggtcatcttcttcattatttcactttatcagttacattgaccattctgtactcacatttatccgttcaaacaagccaatttgggacagaatg

SEQ ID NO: 118581 - DNA, 1003 bp, Heterodera glycines
aaaaaattaaatgattatttaggctttattctgtcttataaataggtggccataaaatttttttttcagcttgagtcaaatttataactatttcaagaaaatttgattctctaacaaattactacaaatttatatttgattagaatatttatgctgatccttctcttgaattgtttcggtgttactaggccattattaaaagaaattatgccaatctgattataatatcaaatagcatatctaaatggtcgacacattctgaaaaagtaatgcaattcatgtttaatttgtacctacaaatttaaaatcaatatcaaaatgtaaattccaaaaaattgtctaaaatttacattttcatccaatttttttaatggctaaaattaataattcataaaataaaaaattaatcgattatttaggctttattctgtcttataaataggtggccataaaatttttttttcagcttgagtcaaatttataactatttcaacaaaatttgattctctaacaatttattataattttatatattttttttgataattttataaaataaaaaaattaaacaattattatttctcttcaattgaatgaacaattaattcaataattttttcgttaactttaaatcgtctaggcttttaaaacaaacagttatatgtaataaatttattcatatattccattcaacggtcgactttgatttggcaaattaattccaaatcgtctcttaaattaaatttctaagcatttaaagatggttaatttttagcaagaattatttcgttcaactgacgactttgattgggcaaattaattccaaattgtctcttaaattaaatttataagcatttaaagatggttaacttttagcagagtaattataaataattcttttcatcaaaatatgaaccttacagaaaaattgtttttaattattttgtccaaaaattaaaagatatttaggtggtgcatattacatatattttattcctcaatg

SEQ ID NO: 118582 - DNA, 486 bp, Heterodera glycines
attgccctgccctccaccttcctcctggttaaaaagtgtcaaaacttacattctttgttggtaaaaccaaacaaatttggtgtcatttgaaagctttgattggttagaaaatagatatttgtaagctaatgctaattgtaagcaattgtgtggctcacaaaaaaattattgtttgaaaactgcaaaaatgaaaggatttttgtagtttttttaataaaaacattaattgggctagagagcatgttattaaagttttcgatgataccaagattgtgatggggaattgttaatcaaacaacctataaaattatgttgaatcaatttcgattctgacggagttggtcagctccccactcaattcatacgatttattagggatttaaataatttttttttgtttttccctctaaaaactaaattttgtaaattaaaaatgactgaccaatttacttaaaaatcttaaaattccttttttagcgtgtcatg

SEQ ID NO: 118583 - DNA, 147 bp, Heterodera glycines
tttaattttattataagcatttttttttaatcataaaattcaattttcctcattttttatggccttatttggcatctctgatcattatttaattatttttctctatctattagtaataaaagttaaattaagcaatcagttgaaatg

SEQ ID NO: 118584 - DNA, 160 bp, Heterodera glycines
tcgttgcgcccgcacacttaacaattcaatgataatgctttttttgcacaattatatatattttttttgcttaacgaattcaaataaaaattattgaataaatgttaccgaaattaataagcggtttttactttggcttaatcaatggcacttataaatg

SEQ ID NO: 118585 - DNA, 54 bp, Heterodera glycines
  unsure (1)..(54): unsure at all n locations
atggggggggggggggggaagaaatgccccagaaaaaaaaacatttntaaaatg

SEQ ID NO: 118586 - DNA, 1003 bp, Heterodera glycines
tcattacaattgtctacaaaatttttcccggcggcgcctatcggcacccccccccccggttccccaaatttttttttttaaagcgtgccgtaaaatagtgttttaaaataaaacaaaaaaagccgttgcgtgcttgacctatttcccaagctaaaatagaagactaccaatttttattagtcaacttatatcaatttttattaatcaactttccacaaattaaaaaaatccctgtccctggcggggcaccggctcaaaattgggacgggagtcccggaaaagtgggagtccccgtcacggggtcccgcctcggtctattttcgaagtcccggccccggtcccggctatttcacaattccagtctctactaaaaatacataagcgcgatttttgtttgcgggatcctacgcgggactcataatttaatttaggttaagaattttaaaaaatcatacggagtctggtactatttgggataaagaataagccttgcattacggattgggatcacgcaaaaatccgacgcggaacgatcccgcgccaatctctagattagtaaccacaaattttttgcgtctaatcaaataaagcaatttcaacggcgccaaaacaacgtgtcccgttctaataatgccctttctgtttaacttttcctaggaattggcactttctaccaatccatatttaccacaattaacattgacttcaaagcacatctctagcattcaaagcaatccttgtcatgtttaagccatattcattttacgctattttatcaacccaaaaaatttttttcacaatttttaataatatttaaaaaatatattagtgattattggttaatttttataaaacataatattgactatgcaatgatttttttttaataaagactaatgcatagcaaaaatgaataataatatgaaatctcagaaatatgaataagtaatgacatatacattttacttaaatttcatttatttttaagcaaatattttaaatg

SEQ ID NO: 118587 - DNA, 79 bp, Heterodera glycines
tggcatggggatgcacttgaaaagggtaaaagggacaattacttattttgtttcttcttaaaataaactaacggaaatg

SEQ ID NO: 118588 - DNA, 130 bp, Heterodera glycines
gcaaagcaaataaaacgtaaaaaaagcacacagcaaacctttcaaacaaaaaaggaggcacaatggaatggacaaaaatggaaaaccacgatttttttaaaaatttattggcatttaacctaaattaatg

SEQ ID NO: 118589 - DNA, 242 bp, Heterodera glycines
tcacgctttggtgcacgcgcatatagaaggcccaattcattccgttcgatgtggtgtacgatttgccggttcattgctttttccgtttgaaaaataagtctcgagtgttcaacataccctacggcgacataccctcttctgacacgcacaccactaaacggccccgcaccaatgactatcatcaacatgagctgaagcgcaaagcaaaggtagctcttgacttagtggaggccggactaatg

SEQ ID NO: 118590 - DNA, 99 bp, Heterodera glycines
aattttgttttcccttttttcagcttcatctccgccgattgttggctttgtgtgttcgatttgattacgccttcacaacttggccttggaattgcgatg

SEQ ID NO: 118591 - DNA, 62 bp, Heterodera glycines
ttcgcgcagtgcaaaatgatcagaaggcattttggaccgaatcggtgatttgagaacaaatg

SEQ ID NO: 118592 - DNA, 1003 bp, Heterodera glycines
ccccggcggcgcctagcggcaccgccgggcccccgaaacttatttttcataaaaaatggctctaacgcaaaatttatcatttttagtgaaaatcttttagcaaattgcactcaaattttcaaaaattttcccgacggcgcctaccggcaccgccgaccttgttctgaaaaaaattttttttggaaaaaatgcgcctttttattgatttttttcttcatttgtaagaaattttcaaaaatgctgattcttgaccccaaataatgattttttgtttgaaaaatgatgattttgaaaattttcatttggcaaccctgatttaaatagttgttttccgttttattagattacttaaattacctttttaacattttattgcatatattatttcatatataaactttacatttttcttcgcttatctttttgctgtatataaataattgttatataaaaacatgataattctcacgatattttctaactattttaaattatcttttataatatttgttagtttattaaacttattttaataattatttaatttattcttttatattggtttttttaattaagtaaaagtgttaatattctttagctataattttatttatattttgaatcgatttatttttgacgaagtttgaaaattcttattcttcttttttttcataggtgccagaatatttgaatttcggtttggttttcttggtacaacgattaatatggacattttaacaaatgaacatatgataattttatttctattctttttttaatattttaaaatgattaatgttatctgattttttatgttcctcaatttatttttattgtcacatttatgaattaaaatatgttagtttcaatcaagtgaggaagtttataatttgatttcatctctttttcacaaaaatttgaaaaatttgttattgaattcatatatatataagaggtcttaatagttggtttaagtatttcattaatttcagatccttaaatg

SEQ ID NO: 118593 - DNA, 1003 bp, Heterodera glycines
attttaactgataaactttgaaactttctattataatttcattaaaaaatccttccttttttcgttttatttttaaaattagacatttaatttgccttcgaatttactataataattttattggacataaatttgtgaaaattcacagtgtaaacattttaaaattataaatttgctttcataaatttttttatttaaaaatttaactcaatttttgagaaactttttgtctgcagttaggcgttaattgtttattctatgatcagcctgtcacctgatttcgttaaacagttgggggctgaacgaacgtgcgcgagaaccttccacaattgaagctcgccaattttcgaggaaatccaaattttaactgataaactttaaaactttgttttataattgcaattttttttttcgtttgttttaaaattttattttgttgtagtatttgttatgcataaattgaggtgaatttaaaaatgtttcttattttatttttgtataaatttcttttcaatttatttttgtgcttattcatcttttcattctttcttccgacattttaattatttttttcattctttggctttttcatcttgacattaacacattgttaaaataatgaacataaaaaatgttttcttcttttttgcttattcatcgctgtaaatcaactgcaaattgttcaaatttttaaagatgaataatttctgaatatatattttttctatttaacaaaaatcatttcaattatttgcaattaaataattataattttattataataaggaattaataatagattattttgtatttgtgtaaaaattatgcattgataaattaagtttatataaagtttgttaagtgtattatgtatttattatttattaatttcttcacattttttaccgtactattcaactccgtcaatggccaatgcttcttcccctctgaagagtaattttacattattaatttttattttaagtaatgttcaggtcgaatg

SEQ ID NO: 118594 - DNA, 90 bp, Heterodera glycines
ttccaacctctccctgttttgtcattcctgactatcattcttggaataaaccagaggttgggccaagggcagcaagcttacttgcaaatg

SEQ ID NO: 118595 - DNA, 720 bp, Heterodera glycines
  unsure (1)..(720): unsure at all n locations
cttggaaaatcaaacacaactccgcttaaaagacagatttctgtctgcaaaagaaatagaaatgtgaaaaaagatttgtctttcttatttagcttattttatcagtttcttttnggtagttattgagatttgattcgtttttatcaagtgtctctattttaaattaacacccctttttcgggaaaaaattcataaaattttttattattttcgaaacaaatcgacaatttttaaatttaaaatttaaacaaaattatttgtttttgaagaaaaacatatttatcattattattttattataaaaaataattttaaaaaaacaattaatccaattaattgcgttgctttatttgggcattttattatttttgaaacaaatcgacaatttttaaatttaaaatttaaacaaaattttgagaatatatttctaaaaatgatgttttcggacaatttccgatctttgggggtcaatagtctaatttagctgatgggagccgttctattagatcttttttggaaagctgccaaaatatgtacataaaatatgtaaatatggatataaatcgcggattacggaaaaatatggatatagaaatccatcctagaagcttcaaaccaaactaaaaaaatgtttttcgtgcgtttcagggctcgcacattccaattccatataattccaagccctaattataacttcacaggtgttggatacaaacaatg

SEQ ID NO: 118596 - DNA, 81 bp, Heterodera glycines
agtgcgtttttctgaaaaacattcctccttcgttcgttttcagaagtgtggcaccaatactacgaaattctcagccaaatg

SEQ ID NO: 118597 - DNA, 55 bp, Heterodera glycines
ttttaaaagattgaaaaagtgtctgaagagcaaaaatgaagcactcaaattaatg

SEQ ID NO: 118598 - DNA, 103 bp, Heterodera glycines
atcggataaattgccgggcgtttccgagcacttttttgcatcatctctgtgaatatcggtggctaaaaatgttctcgctcgtctcgaccgacttgaaaagatg

SEQ ID NO: 118599 - DNA, 429 bp, Heterodera glycines
cctaaaaccatttaggggcggtcctttaatgggggcatatagagaatgtttcaacttgtatcaataaaaaggtgccaaaggaaaatttttgtgatgattatcgctattacaaacataaaacgaccaagttccaaactttggtggaaatgtgactttaattcacatgggtgccagggctggggttttgaaaaggaagggttttttacaatgacgcgccgacacaatcatcatcctgactctatattgattgaaatcgaagaggacataaaatatcataatttttctgcgggggcaaaatgctttttgggtgacaacaagaaatagttgatgatgctaagaaaaatccgagactccaaacagaatttagagatgaatttattgcatataaaatataaaagaaaaatttaataaatgaaaaataaaaaaatg

SEQ ID NO: 118600 - DNA, 809 bp, Heterodera glycines
ttggagttgagcgcacaatttatgcattaatcttctatttatgaatgaatattaaatcaaaaacgaatttattcaaatttaaaaaatttttttttgataaaatgcaaatattagcattcgttatatactgggaattaaatttaaaaaatgcgcccacattctcataatttgaatgacattttttaaaattatgagattaaactttttacttatgaaattttttttctaatttatcactttttataaaatttggtttgactaaaagttagggaatgcaaaatgcaaaccggccccctggtccccaaatcaccaacatttttgcctacggtatcagttcggtgccgactgtttcggcgccgccaactttgaaatgccacaacatttttctttgccagttcacgtagcaaatctgggcaccatttgatagcacaatttgtgctatttgtaaaaaaaaagttatggcatgtagcgctgaaaaagctatgaaaaagtcaattttttcaccatattttttttgtaaattgatgaaattttttgaaatttagcttactaattgtgaaccttaataactatcgcatcatatcaaaaatttaatttggtttataatgaaaaaagtcattaccaactgcgccgaactgggcgtttcccttccatccacccggtctttctattcctcagttttttaaaaaaaatttttaaatttttttaagctctccaccctcttaatttcttccaattttccctcattttcccctcaaaaattgaccccccccccataaattgttttctgatgcccattgatcacaatg

SEQ ID NO: 118601 - DNA, 148 bp, Heterodera glycines
  unsure (1)..(148): unsure at all n locations
attaattaaatccattaaactaattaggctgttcaagttaatnaatactcaaatnaaggaattaattcaggctctaaatcatntattctactcaatcaattaggcactcaaatgtacctggaatgccaatgtcgtccgcgccgcgatg

SEQ ID NO: 118602 - DNA, 254 bp, Heterodera glycines
  unsure (1)..(254): unsure at all n locations
gctcgagaccgagactcttgagacctacatctgaagctaggtcccgagactcaagacctgctctagnctagattccgggttttggtgtctaggctcaggaccgagactcttgagacctacgtttgagctaggtcccgagactcaaaacttactaggctagattccgagattcgagatcgagattttcgagacctactctaggctggcaagaaaaaaaggttcaatgcgcgccattaggttccgcaaccagcatg

SEQ ID NO: 118603 - DNA, 93 bp, Heterodera glycines
agtacgggagggatatggtaatgacaccattttgatcaatctcgacaatgccaagactcacccattttgctgattcaccaggacacaccaatg

SEQ ID NO: 118604 - DNA, 84 bp, Heterodera glycines
acagcaggataaggatggtcaacccttctcgacagtagcggcaaaaaaattgatctgtttgcgttgatgaagtcatacggcatg

SEQ ID NO: 118605 - DNA, 379 bp, Heterodera glycines
ttttcggattgaatttggccttcaatttaaaccaatagccaacgggaaaattgtgaatatgttcaactgggaaaataaacagctgagtggcatagtttggcacgtaaacaaatttgttgaatgctaaatggatgaggaacaaataattttgtatttattataataccctaatgcgataaattaataaatgctttttattttggtggttgaaaaatgcaaaaaaagcgaaaaatataccttaaggaccgctttttgtaaatttttttaaaatactccattataatataaaccgaaaatttttgaactttttgtaagaacttttgaaaaaaattttgtttatattaaaaagtaattttattttagcatataataaaaaatg

SEQ ID NO: 118606 - DNA, 475 bp, Heterodera glycines
agaaacaaggggggggggacaccatctaatagtatcaaaattacaaagcaaaattgaagcataagaaaaaaagaatctctgtacaacatggcttaggacaagtcgtaaaactcctaagggaagattatcattaccttgccagatatctacaggaatcgaatgtcaaggtcaatcgcagttaattccccacgttcatttggcacaaatcttcggtcggacatgtcgcatatgtttccaagtaacttttaggtaggtaccttagaggcctcctcccccaccccccccccctctaatcattaattctttttgtttttaaccctttccctaatttacaggctttcaaaatggcaattgtggcgcggcgtctgctcaaaaaccgggccattcaaaaacagttggagcgccgccaaaaaagtcggttgaattttgggcaaaaaattaaaaaacaaattttttttttttgtttgaagacatg

SEQ ID NO: 118607 - DNA, 477 bp, Heterodera glycines
ttaattaattaatgtaaaatatgttaaaaattttaataataatattttatatttataataaatttaattaaaaaaaaaaattaaaataaagttcaaaaaatattgtttttttaataaacgaaaattcaaagaatttttgaatatttttaaatttatctaaattttttatattaaaattaaaaaataatccaaaagtgaaaaaaggcaatggctttattgtaaggcaaaatattataatgctttttatgaaattaattaaatttaaaaaattctgttatagtcattaaatttttaattttattatgtatttttttaatgcataaatatatttaataaattgttgtaaatttatttttttaattttaaataatttataaattcgccaggaaaaacactgcttggcgcgcgtggaaggatgtaatgttcttcgatttgcgcacaaattcggagtgccaacgattgtgcgtgtgcacaatg

SEQ ID NO: 118608 - DNA, 86 bp, Heterodera glycines
tcggctatgaatacagaagatcagttccaagttcccactgtggcccaattgcatgcgatctataaggaggacatgataaggcaatg

SEQ ID NO: 118609 - DNA, 526 bp, Heterodera glycines
ggcgatgccagaaaattttgattttcattgaatttagttaagaaaatgttgcacgcactttgaagtcataaaacgaaattttttgcgatttttcaaaaaaaaatttgtttgttttttgaataaaagtttttggtagcagttttgcataaaaatggccagattagatcattttaacaatcattctcatacatatgttttccttttttcacataaaattctcttcttatttcggttttgattttagcttacaaattttctacaaaaaattttcatggatttggacgcatttcttcgtttcttcgctggggtttgcaatttattttaatgtttgtcttaaacttttttttgtccagccgcagcagcagccggcaccaatgagtatttacgaacgctttaacaaggaagtttgcgaaaaaaacccttgagcgtaaaactaaaaatgtacatttagttgaatgtttgttgtttttctatttaaaaataatttttatttgcacttttaatagcacctcttgcgtgcacgatg

SEQ ID NO: 118610 - DNA, 128 bp, Heterodera glycines
aaaataaataaattaattaattaattttcagatgaaagcaaatgggccagaggatggggccaattaacaaatgttttattttttaaatttcgaaattcaaacagtgcaaacaaattcaggatggcatg

SEQ ID NO: 118611 - DNA, 1003 bp, Heterodera glycines
tggtatcattcgaaagctcttaacaagctctatcggcttcccaaaaaacataaagatttaccgacatgtaaaaaagttataaattaaaatatgcaaattctgactttttttggttttattgttgcaacttttttatacataagttgttcaatcgcttagaaataccttaccaaaagcttctaaacatgtagaacttttgaatgatgccaaatttgaccaacaaagaaaaaatttgtgatattttatgcttgggtcagacgcaactgacccctactggggggaaacaccttaactactttatttccaaattcactagacaatcgttccattgaaataataaattgttcaacaaaaataaccaataaaataattgtgtatacatattatacactggtggaaaaaagtctttgaacaaaaatgcaatttttgtaaattggtttataaattgaaataaatgaaaaatcatggcggaaaaaagtctttgaacacatttaaaaaactatttcaaaaggctcttaaaaatctgaaataattcctgctaagacgcatttttattcggagtaaaaacgaaaaggacgaaggtgtctaaaaaagaaaagaccattgtttttacgggaaccggccattttggcgcaagactctatatcattttgatttcacagcaaaattaaataatcttggtatttttgcaggctaataaagaacatttagacctattgattaatatcaacattattttatttggtcgaattaaaaaaagttatgaatctttaaacttgtctgcgccaaaatgaccccgacccgttttttacaccactgcccagtcccagtattttatttattatataaatgcgaattttggatgaatttctgtttttgcgttctttttgctctctcatttttcccaactctctctttttaagttacataacaacagagttttgcattgccttttgtgacacaccaatcaattggaaaaacggcaaattgagccacaaaaatg

SEQ ID NO: 118612 - DNA, 184 bp, Heterodera glycines
aaggaaatcctaggtaatacaaatgcatgaattaaaaattattattaattattgattaataaagaattactaattaataattattaaaatattaattaattattttcagcagaaggtcttttttcttttcacaacaaatgacaaaattaaatgctgacactaataaagagaagcagcaaaaatg

SEQ ID NO: 118613 - DNA, 63 bp, Heterodera glycines
tggaacaatttatgaaaaattaatgagaaaaataagcaactttcaggcctaaaagagatcatg

SEQ ID NO: 118614 - DNA, 224 bp, Heterodera glycines
acaatagcttcaaaaaagatttcggtatacgttaataaaatgtatgttttctcgtgattgttttatgtacttagatgaaggtctcctcttttttctttgattgcatttttcatatgaatttctaagaaaataaagcctatttaactgaaaaagtgccgaaaactgtcttaataatttgctgcaacaaaatgtcagacaaccgaaaagaagccgaataaaaaatg

SEQ ID NO: 118615 - DNA, 76 bp, Heterodera glycines
tctataaatatgattttttgggattttagaataaattttataattggtggtcggcagtaataatcggacagagatg

SEQ ID NO: 118616 - DNA, 213 bp, Heterodera glycines
agagtaagttgcacaaatgcaattcgtaatatgtttttattcaaaacctagaatttatcatttttttgctaatatatactacaaatataaaaattctcaattggaaatcatttgaaattttactaaaatttagggatttattgaagattttaaaaagatgcacattctcattgcatgaattgtttaactttaacatttaagggatgcagcatg

SEQ ID NO: 118617 - DNA, 269 bp, Heterodera glycines
  unsure (1)..(269): unsure at all n locations
ttatttttatgaaaatatgtttattatttcgaatgagctncagtagaaagtaataaattttatntaatcattaatttaccanntggcaattatttgtcatttaagataaaattattattattatttctttgaaattaaacaggatttccttattttattaagtaaaataatgatttattcagttttttaatcagaaaaaaatcatttaaatgcctcaaaaaatgaattgccatttaatttaagaaaaataaaataaaatcttgaaaatg

SEQ ID NO: 118618 - DNA, 1003 bp, Heterodera glycines
gtattaatcagcgaaagatgtgatggacaattaaatgtttctttttggtattaatatgtaaattgttcagcattgttgtgatcagtgttgaaaaaacggtgatcaaaaatataatatttttatgttctaaaacattccatttcattgacatttttagtgacgaaataccgtaaatacaggggtaggtaccgtaaaaagttccaggggatgggaaattttttttttaaattggctcaaaatcgtaaaattttgtcattttttgaacaaaatcgttaagaaatcgcattaaaaattacaaatttttcgccgagccactgtccccaaaattttttggaagcgtgccgcaaaaaaaagcatttttaaaagcaaaaaaagtcgtcgtttggcttttatttgcaaaatttggtaaatttttggacacaatttgttagcaattcgcattaaaaattacaaatttttttccggcggcgcctagcggcaccgccggactctcttccctcacacattctcaaaaagttttttggaaaaagtgcaaaaaaaaaaatcaaaaagttttttacgaaaatttcaagattaaatttttgaaaaaattttcagcgattttttctaaatgttttcgaaaaactattaattcctataaaaaattgaaaatccgtttcaaaattttttcaactttttttttttttacaagtacatattaaaataattttttttggtgtgattaaatctattatttcaactgaccgatgttttttcaagttttcaaaaaatgcttaaatggttttaaaatacattcttattataaattagatatttttagacgttcccaagcaattaattgattttttcaagcatttgtttgttttttaaaacaaatttaaaaaaatccaggtccaggcctggatccaggtctcgaggagcctggatttttcctggacctggattttcctaaattttaggcaattaaaggaaatgcacgacgattttgaaacaaaaattgatg

SEQ ID NO: 118619 - DNA, 419 bp, Heterodera glycines
ttttaaaaattggaaaaaaattttaagaatttggggtaaaataaatcaaaaatatgactaaatttgtatcatcaattgagcagaaaactcttataaaaactgtgattgatgttcatttctcctataaattgatgataagtgacaaaatgtcatcgcaattccttatctttattctcaaaaaataaaaaatatttacccaaatttacataaaatgaataaaaacaaaataatatgtaaaatatttaaataaagatccaccaaatacagctttatattgatcagaaaaacaaactatttaaatcatttttacaaaatcaatcaaaaaatttgagtcgcttttttgagttcaatcagatgccaatttttcattgtaaaagcgattggcaccgtttggggtgccattcttcggctggacaatg

SEQ ID NO: 118620 - DNA, 618 bp, Heterodera glycines
tccatcttttatttttgagtttttaattttagtttattttaacactttttctcgccaattagcctttgctaaatgcactttttcgctccttttgcgatgactttggccacttttttggccatatcactcgtcctctcctcaattttcccttgccaatcagccgaagaatcaatttttcgctcatttctttttcatcgtcgggaaatgtgaaaacggagggcgggggaatttccgattcattctttcgttgccttttcggcgagtgttgcataagaatgtgaaaagacgaagaaaaagacaaaatcttacgatgattcatgcttttcctgctcttttgcttaaaatttaaaaaagtaattattgaattatatttttgaataaatatttaatttttttttaattaccaagcttaaatggacatttcagcaaaaggtgcaacagttccgcataattttctgctgctaccgattgaccaaattattatattatttctgatgattctctggcgccctttttctttgataatccattcccaaaaacccattaatttggcccattaaagtgactttggccatgaccaatttatttattatgaaagcgtcttaagtgtcgactatg

SEQ ID NO: 118621 - DNA, 134 bp, Heterodera glycines
actgaaaaatttgttcataaaatattaccgatctaactttcgaatttattgttattctatttaatttaaaatttaaaaaaaacagaattccgatacacaaaatttgctttttgaatattttttgttgaaaaatg

SEQ ID NO: 118622 - DNA, 244 bp, Heterodera glycines
attagccactattattatttataatcgaggataatttttgtcgaaatttgacccaataatctcggacatttttgttctcgaccatttcgagaatttctcgagacgtttttaggtttttggtaaatttattacaaacatcaccaacatagaatattctattgatgtcatttagtacagttttgacgccatttttagtttggaggcacagtttggtgaccgtttcggctccgattgctgtcccatg

SEQ ID NO: 118623 - DNA, 62 bp, Heterodera glycines
tgggggtcgtcgtcgccctaaatggatcccccccgaatgtgcggagcgtccagctgcgaatg

SEQ ID NO: 118624 - DNA, 406 bp, Heterodera glycines
tccttgtgtgttttgcgataggcacaacagggaaaatatccgcaatgttgacgctgccatttgtcgattcgtcaaaaccgtgaatttttagggagccgttattattttgaacaatactaaaattgatcgtatttatcattatgactagggcttatatttatttgaatatttttaacagttttcatttttgtgagaatttccacaataactcgtttttggtcggaactatcttctttttagcgttaatatccgtaaatacaaaaatttttttttatagataaaatgttgtaaaaaatacaacgttaagaaaaactgttgaaaaaattcgaaactggtagaaaattttaaaaaattaaaattaaaaaagattttaaaatagccatatttacattttacgcgccaaatg

SEQ ID NO: 118625 - DNA, 284 bp, Heterodera glycines; identical to SEQ ID NO: 98949

SEQ ID NO: 118626 - DNA, 604 bp, Heterodera glycines
  unsure (1)..(604): unsure at all n locations
aaacttttcgagagaaggggtggttcgtggtgccgataggcgccgccgggaaaaatttttgaaatnttacttcgatttgttaacagattttattaaaaaatgaccaaattttgtggttttatccaatatgtttacagaatttctaccaaaaatgttcaaattttcaagaaatatagggttaaattttcaaaatttcttatggggatattgcaaaaaaaaattaaacacctgagaaataccaaatgaatccaacataatatccactaggccacaggagcaataaatgaattacttttacaataaaaattaaatattctttttaaaaaccgggtccgggacccggacccgtctaaccctacttttttcaattgaaatttatttatttattttcttttgttagtaaatttattaattaaattgttattcatttaacaaataaggttctaagattttatataacatcataagtagcatactcctttaggactttatattatttgtccatatttcgtatatattttgggatttttgactcttctttttccttggaccgattcatttgtttaaccaaagtcaagtcttctcatcatatttcaagacaatg

SEQ ID NO: 118627 - DNA, 299 bp, Heterodera glycines
tatataaatgaaataaaaaaaaactaaaagttataaaataattatttttaatttttaacatataaatgtctgaacagatatataaatgacaaaaattaactgtttatttcaattatcaaagagatatattttaatttataaatcaaatttatttataaatagaaaaaaaataaaattttaatattgtaaattatatttattcaatattcattataaaggatgaattaagcgactaaattctcaaattattttttaatattaataatatttaaatttaggtgctgtatgtgccctgtatg

SEQ ID NO: 118628 - DNA, 1003 bp, Heterodera glycines
ttttgggggaggaccataccatacgaagcatactgtcccctattcgtactgtacatgtgtgtctaaactgtactgtctaacatgctactactctctgtgtctgttcatctcccatgtgaaaacagtacgaatatggacagaactgaatcggcctcgtagaaactgtttttttttacgatttgattctttggaacttttatgtgttagtaaggaaggcattttttaaaagctctatgagtcattgggttgtttttattcttagataattaagtagggaggatgataattttaagtgctaaaaactgccaaaatagtaattttttaaattcaaaattcttttcaagaaataaataaattttgaggatgaatttttgataaaaatttttccattcttaggggttttagaggtgcgccgtgactatagtaaagaaggcatttttcgaaatcaatatgagtcactgcttttttaaaatttattttttattagataatagtgagaatagaattatttttaatgagacagaagaaacccttaatagggacccaaaaataaaaaataaatttaaatggtaaaaattgccaaatcatctttttatttacgaaagtctaaattttgcagtaaattctggattaatgcccattttttatttttttttaaatatacaaattcttctgctgatttcgtgactagaaaaataaggaacaaaattatgaatttcaaaaaagctaaataaatatgtgcatttgtaaataaaatttgatgcaattttattaattatcgaaagatttaagttagaaaataattatttctaaaaattaaataatcacaaaccatttgtatgcagtaatatgtaaaaaaacaatacaaatgtttaaaaattttcctagaaatttttcacttgaggaaaactcgacaattttggcactatgtcttgaaattcagcatcgagaaaagccttttgaactcattagtgggcaaaaagcgacaacaaatgcgccaatg

SEQ ID NO: 118629 - DNA, 102 bp, Heterodera glycines; identical to SEQ ID NO: 99198

SEQ ID NO: 118630 - DNA, 381 bp, Heterodera glycines
taatcggccaaaacggaaagccattcactgtgtgggggctgtcaaaaaagcaaaacatattagtttagcttaattgggtggccaaatttaaattgatttttactaatggcccaccggttttattgtcattttgttttgttcgggcattggccaaaatttcgtcgcgaatttggccaaaagttcaaagggtcggcttctcattcgctgctgcattttgccaccgtcgccagctgatgaaaacagaatttggagcagtgcatgtcgcgtcgccactgtgtccttttcgggaaggacggcgaaccaaaattggaagtccctttcctccaattgcatggatacggtgcgcgtgttgcgcccgagtacggtagtgggttcaaaatg

SEQ ID NO: 118631 - DNA, 795 bp, Heterodera glycines
aaattgtattttgttatttggtattttttttattcaaatgacgcaataataaagtattaaaaattttaatattgtaaataattttaagactcaatcaaagtcttaaaaataaaatccaaatcattgtcgttacatcatatttttttaggtgttttttctcgaaaaatataataggaaaataaatttataaaaaattggtaatttatgcagaaataagtcaaaaatggaaaatttccgatttttttatctctcatttttcgccaaaatttataaatcttcgctttattttgtcaattgataaattttcttttggtttgttcccaattttttcgctatttttgaataaatttattccattttttattttgaatattttcttcctctttcctttattttttcttttatttttgtaaggattattcgacgcatttccctcatttcattatttcctattggccattatcaattcaatcacatttatccatttcacacgtttttccttttctcattgtaatgtttctccgcccattctcttcgcattttctccttccccagtgatcagttagtcagttatttatggaacagacttaaattattattccaatttctcgcttctgtaaatccaacaacgaatgaataaacacatctttaacagtcaatgagtcgtttgggggttcggggcttggtcaaaggcgccttggcttttcctcattccctcccaaattccatccgggataaacggtgcatagttggtcttagggcacagtgcgcatccctcactggtagcaccggatg

SEQ ID NO: 118632 - DNA, 256 bp, Heterodera glycines
  unsure (1)..(256): unsure at all n locations
aaagggttcctgagagttttcaggctattatgatcanaattcaggatccattatctcaagtccaaagaaaattgagttatgagttcgacctgtacttggatttcttgattttgagtgatttattttattttttattttacaaccaatattatagtaattgttggcttgttttcagaatgatgatgacgtggtgattgtcggtgaaacgtgcactgtgatgtcgagttcgcccaccttcggcttcaactcggacatg

SEQ ID NO: 118633 - DNA, 564 bp, Heterodera glycines
aaaaaaaacaaaaaaattgttaaaaatggtttaaaaaaataggaaaatgaatgcctcggcatgggtttttttgaaaattatttttttctgcttttcctgattttttgttcatttctgttcataattttcttatcatttgtcaaaataagaccagaaagttgattgtattttgctttccgctatttttcggttaataatttacattttttaaacaattattttaaaatcgaattttttttttaaatttctttttgcgcattttttgcaaaacataaatttcagtcagcccatttcatatttaattatttattttttatttcgacgtttccacacatgacgaaggaataaacgtggtttttttcataaaaatattatgttttttatgtctcgggtgatataaaaaaggaatgttttccataaattttcattattttccaatattttttctccaatttttgaatgccttcgtcagtttcggcaatgatgccattttttgtgttattcaaaatgctttttcaatttgcccaactttgcgggggcgtcgatgaatatgaaaaaataatg

SEQ ID NO: 118634 - DNA, 56 bp, Heterodera glycines
ggtgagacaaagtcaaaagagcagcgatcgcttatctgttaatcaccaaggacatg

SEQ ID NO: 118635 - DNA, 344 bp, Heterodera glycines
tttctcggccaaaattttcaaactctcattcctattcactaaaactggataagtgcggttttgattttcagccatttcattcacattttgctgggcgtttgcatttacagcctgagggcggtctctttccaatctccgaatttcctgacttatagcctcatcaaattcattctcaatttctgcccaatttcgccgattttgccggtctctcaaatcgtaccgtctctcatccggcacttgtcctccatcattctctcttgcatttaaaccttgacgccttcccgacatcctcggatcaaatgtgcttcttgtcgcttcggtacacagttggcgtttcccgaatg

SEQ ID NO: 118636 - DNA, 705 bp, Heterodera glycines
  unsure (1)..(705): unsure at all n locations
ttttaaataaataaatatgcttaaatttattgaaaatatattttgtcagttaactcataagtaaacaaaaaaaaagtgaccgggacaaaaaggagtcacaatccatgttgaagatcctggccccggtcccgggtttttanaaaattcccggtcctactctatcctatgtagagcccggaaatttgaaaaagtcgggtaggattactggggttaaaatcccgcttttgccgggattccgggaaaatctctgcgtaattccgatcacgttccggttcggttcaaattctcaaaggatctattattagaatttttaaaaattgaattataaaatgattttcattcgctttaatacattttctcgattattgatttaaaactgtatttctgttaaaaaaatgaaaatgtggcaagttggggatattcactgcggagagggcgtgttcgttttcggcgttggactagtgaaacgaattggataggagggagattttatcttttcattagtccatcctttttttcgaaaaaccaaaattgttattgttactttaggatgttgagttctgccgagttctgccgaaaaatttgtgtaaagaattttcgtaaatgaatgtacatgcacttgcaattattttttgttttttaagctaagaaaatttgtcttgttattcgttcgtctttcacacggtcaaacccgcaaaagaaatg

SEQ ID NO: 118637 - DNA, 121 bp, Heterodera glycines
aaatgttggcaatttcattcttattgacccattaataaatatataaactggcatttaaacgaaaaattatataataaatttaaaaggcataaaatattatatatttttattttataaaatg

SEQ ID NO: 118638 - DNA, 814 bp, Heterodera glycines
tgtttaacaaaggtgagcttccccgattcggagcggggaagggagggggtcgggatccggatccaacggccaggtaaggaagagagggtggacaaaggaaaagcatatacaagcatattggggaggagacaaagggaaggaccgccccaggcaaattgtcatatggctataagcaaagaagagggagagcagaaaaagaatagagacagtgagaaaaagagtaaatgattaaatattagtcatcattaaacataaagatgtaatagatgcacaaaatatcatgtcgggctgactggcgcactaccggtacaccattggacattcgaataaagcgaagataaatatttaatttatttattcactaaaaaggtttggcacgtcataactcggcacttgtgcttatggggaccttcctttgtcagtaaaatgcagttttataccattgaatcaagttttaaatgtaatttgcaaatttcgatgcgatatattatttaagcaataattagggttaacaattttagtgactatttttgcggctttctttctaccaactgtaaacgaagaatatatgaaaatggaaaattaaattttcctaaatatttagtttttgctaaaaattttcttggaatatcctatttattcattcacacaaacaactttaaatatgtaaagaaataaacaaatgttgtttacctttttatatctggcagtttattttttattactttacccatcagttcaatacttttgttaattctaatttctacatatttagcatttttaaatttaatttaaaagcatcacaaacaaaatg

SEQ ID NO: 118639 - DNA, 216 bp, Heterodera glycines
tacgcccttgtcacaacacttactgctccacggtgatcagaccgtcagaacaaagcgggaaaaattcccgcgagaaggaacagaaaattgtcctcctctaaaaacgggactaaccaaccccagaggaaaagttcgtgccaaagttaattacggatttttaaattaaattcaaataatttattattcattcatccaacaaaagcaatcgaatgcatg

SEQ ID NO: 118640 - DNA, 540 bp, Heterodera glycines
  unsure (1)..(540): unsure at all n locations
tgcaggtctnnttcgacaaacatttgagaaaaaagtgacaaaaggccacctctaagcaaacgaatgaattgggggggggggagagggcaaccttcattcattcgttaagggatagaatgccaaaatcatgcccaaaaatatacacactaaaaccgttgaattatctaattagtcggattgcttttcgtgactttaaattcaaatttgcacaaaagtaatgctaacttgtcatttatcaagctccttaaaatgcttaaaaaatggcattatttggctttcaaatcctttttgttaatattttcgatgtcaactcctcgtttaaaatcattttgttttttcttataaaatgcatttcaatattttaattaaaacaatttaaacatcatataaaaaatgcttaattattaatgaaatgatgttgctcattatttttctgtcatattcattgattttttagctccgttaatttggtaatggagttggcacatcatttctgaaaaataagaaaaatattatataattttaattaaaaacaaaatg

SEQ ID NO: 118641 - DNA, 133 bp, Heterodera glycines
tctgaaattttcagcttttacctgataaagttttatttttaattttccatgttttgcgactattttcagtaataggtcatcaaatcaaatcttttctacaattatttaaagaaaatcttattttttcccaatg

SEQ ID NO: 118642 - DNA, 141 bp, Heterodera glycines
ggttaaataaactcattttacaaatctgtttttatttatactcccgcatttttagccggcttcttgcaacaactgcttgacttcttaagtgccgaaaactatggcgaattggcaaccattgttggtcgttattatgccatg

SEQ ID NO: 118643 - DNA, 332 bp, Heterodera glycines
gcaacatctaagcacagcgattgagctagatgggatgcgatgtgatcagaaatgggggactgattgattgttgtgattgattcgctctattttccgtatttgtcagaaaaaaaaattttttatttggacagacgcaaattttttgtttattccaccaaaatcattttaactattagcggtaaattttatttttcaaaaatttctttgaatttcttcgcttttcttcttttgctggtctcttcacgctgcaccttctttccacggctcattcatggctgaaaaaattgggcaattaattagcaataattccaatatccacccctcacatcatg

SEQ ID NO: 118644 - DNA, 349 bp, Heterodera glycines
tttattaaagtatggggaaaacgacatcagtgtccctactcaagtttatttaccggacatgaattttaaaaccgccgggggcctgggaaataaaattaatgaggcattcacacatcattacaaaatcaaaaaacaacgtggaaagagagaagccaaggctgaagataccaaagattcaaaaattgatgtcgcaaagagggccgcagaacgcgccgggagagacgtagaaagacattttaatcagatcaacaatatatcgaattccatccaaacccaactaaacacactacgagaaacaaatcctcaaattttagaagagcctgatataaaaatttggtttgacaaaatg

SEQ ID NO: 118645 - DNA, 119 bp, Heterodera glycines
tcactcaccccatataaaagctctccaaattcacccccaatcagttcaaccaaaagttggattttgctaaaataagattgtgcgtaaatatttagaaattattaaatattattaaaatg

SEQ ID NO: 118646 - DNA, 1003 bp, Heterodera glycines
actcaaacattggcatgacaaaacagcagagcaattgcgatttcaaaatgattgaactccattaattaattgaaaatggcaattaatttggcaattcgtatatatacagcgaaataaccttatagtaaactgcgatcacaaacaatccaatcgcttcacaatgtcatttttgtacacaatgattgatttttcgattaattttcactttgaaagaagaattaattgataggtttaatttaataattttcacgcttttttaagggcctaaattttttctataaaatgacagtttataatatgccattatataagtaattctaaaagtcaaatcgtaataaacagttccgctgggaaattttaaaatttttttcgtgcttttttgaagtcaaatttgaaatctttgggtgccaccatgaaaaattgttgctagaaaatcgttgtaaaatttgtatgaaaattttcaaaatttctccttattgagaaaattaaacgtttagagtgtgcctgttttttttttttgttcaatttaaaacattcattcaattttctctcgttccatttgatcaaaattaattaaaacataaagaaagaaaaaaagagacacaatatttttattatttttcgtaaaaagaaagtgcgacccaatcgtatgaccgattaattaataacaaattttgttgaaagaagaagattttctgaaagttcgttaaatgttttttttattataattcaaatttcttattaatctaatgatgttattttaaaaatattaaataatttagaagatctttataattttaaattaatcttatcatcaaccattcccgaaataggttaattgcgccaatttaaacgccacgaaatgaatgaaatgggaaaataatttaaggattcgaataaaaaaaagtataataaattaaagaagcaatgaacccaattccaccaactcatatttaagcagccaaaaagtaattgcaaacacttcaatagaaagtgtaaaatg

SEQ ID NO: 118647 - DNA, 418 bp, Heterodera glycines
  unsure (1)..(418): unsure at all n locations
actagaaaaatgggggagagagagagaaaggggaaatgagggtaaaggaaaagaaagaggaaaaagaatggaagagagataagagaaaaaagaaaaagagggggagagagagggaaacaacaaaataaagaaaaaagaatgtgaaatgaaatgagaaagaggccaaattggagaggaaggagagaggagcagaagatgaacgaatatccgaaacagagaaagtgggggnggggggggggtgactcagacaacggtgctctcgcctctctcattcaatcatttcaccaacggacggatcgacgagaagagaccgactgactcaatgctgccattcccctccccctaaacaaaggcaaaagccaaacagatcaacaaataaacacgtcagattagggtcgattcggaatggcacaatatg

SEQ ID NO: 118648 - DNA, 314 bp, Heterodera glycines
aaatttttcagcgatttttttgaaattttgtaatgaactactaagttttttcaaaaattttccaataaatcgctgaaaaactttaaaaaaaaatttttttttttcttagaatttcttatgaaaaaatttcctacgaatttttttatgaacaatttctaggtttgaaattttaaaaaaaaatttttcggacgggaaacgacggggggggggcgacctgctcccttttttggcatttgcaaattatggcgaatttacaaaaactttttgtgaaaaaaataataatattttaattgtaggaagttacacagtcaatg

SEQ ID NO: 118649 - DNA, 651 bp, Heterodera glycines
ggtgagcattaaaattgccttcggagacctttggctgggttaaaatgccggaaatggttctttatacggtaggagtgagtgcacattactgtaaaatcctgtaatggccaagtttgcttaagaatgtttctaatttcaatcgctttttgtcaggttacgtcgcccccgcgccctttcattacgccgcgttaggctgccccgcggcgccgtccgcgctcggcatggacccgtccgcttttgcgcactttccgcccgcttattttcccggcaccgccccgtccgaccattcgctgggcaccaaattggacccgtccatggcctacgccccttacgacggttatgcggcggctgccgcgttcgccggcggtggcggcgcgtattcgcacttttacggaggccaattcaccagccaatgacaacaaaacgaagcggaaaaaacgacgacaaagagggaaaaatgagcgaaaagggaaaagcgacgaacgattcgacggagagaccaccgaacttcggcggactgatcaacttctgctcctgcacctctgttggccaaactgtgttcactcactctttcccctccccacctcacaattttactttttgtgccgcccgcgggtctccggcaatccctcccaatggcaggccaaaatg

SEQ ID NO: 118650 - DNA, 197 bp, Heterodera glycines
tttttgtagatagaactatgaatgatttgcaaaatttggcggaagttcaaaagcgtgccgattttatatgttttcattcgattaggctccgcccacttttcgacagttcgaagctccgcccatttttcgcttcccaaccttcacccacccaaaatcaggattcatttgcaaaattttcaaaaaattctattgaaatg

SEQ ID NO: 118651 - DNA, 162 bp, Heterodera glycines
tctacgctctcactccaataaatgcagagacgcaaaatatatttttatttcccaatgcctattgttatttcattgcttttttcttcttcgcgttttcttattatcctacatttctaattacttattcctttatttaaaataaactttttagcgggagcaatg

SEQ ID NO: 118652 - DNA, 1003 bp, Heterodera glycines
atgaagcgagttatggcagatcaaaataaaaaatacaaaaaaggcattttccagtgtaaattttgaaatagcgcgcaaaaatttacgccaaatgcgctatttggcgttatgagtaattttgtctaacactgggcttgacccatagtgccatagtgctcttttttactcaaattttttttttttgttttttattatcagaattgctttaaataatttttagcagacaacgaattctgctcataagacgagatttggcacacacagatcacttttttccacatacatttctgattttttgtggcgtaagcaatttggaggactcaatttgaattatcattgaaattcaaaggttcctcttccttgtgtgtaaagtattattttgttccctaaaaacttttttgtttgtttatgccaacttttcttcaacttcggcgtcgctcttttcccacaccaaattctgcatctttctcctcaactgttgagcaccatttaccaagcccaaattccgctcgaggaatctacggatttgcgctttatttgggcgtttggattctgtttgtcctttacctgatttgggcgttggttcgtttttatttaatttttagccggactttcttttttcaaacatatttcattttttacgcttcatccttttatgtccccgattatctgctgaaatctcttcacttaacctatcttccagcaaagtattgggcgttagctgtgccttcgtttttagtcttttccatttgtaaggatttttttctttactttttttaaaggtttcctcttttttagttgcatacattttggtgaatttctttttcaatttggtcaactttcactcactttatgaccaagaaacaacaaaatttcaattggtgaatgatttcctcgattggttcgttttcacatctttttaattttcgttattttttaattttgtcggtgttttctcttcccatttttccaaattctctttaattcatttgaaacagaaatg

SEQ ID NO: 118653 - DNA, 761 bp, Heterodera glycines
ttaattaaggccttttagctgcttgttgtcatttatgtaaaatttcaatttattaagtgaggaggagctgcgacattttaataaataaaattttagccatataataattaaggcaactgacaaatgaggctgggattttaattataaacttttcaaaaaaattatgtgtttaaaaaaattttttttaaagattacgtgtcaaaattattattttttatgtgcgaaattggcggtaattgttgcaaagtcgggaaggatttcttttgctttgcaaattttaattttcccgacacggctgaatgtacaaaaattgctttaaaagaaattacaatatttctgcttttcttcaatgttgcaatttttcaacccccaaaagctgacgtaggcatacgaaagatatttttctttcatttttagtgtttgccaatattaaagctttaattttcttaactaataagcttttcgataattaagagagctcggctctggttcagattatgtgtccaaacaattacaatcctcagtttcttaggccataactttttttctttttggcttacattcttggtgccaatcaaagcttaaactcactagaattatgaatacagcaaagttacaaataaacacgaatttcaggctttttcgagtagctatatttacgaattatttttcgtctctttttttattaacccataatttgtcattaattgaacgcataaactaacaacagattgctagtgtatatacataaaataaatatg

SEQ ID NO: 118654 - DNA, 1003 bp, Heterodera glycines
taacggctaatttcctaaagcaacaaatgcacataaaatcgatggcacaaattaagcaggacattcgcattgataatttttattaaaaagaatggttcttttctgttttgtgaccccccctgaaattttcaaataaaaagtcatttctagggtaatttggggcgctgatcacgaatatgacatttatttttcataattccgaatcccgaacccgaattcgaaccaaaattcgaaattcataaattacaaggaaaacataaatcggaagcaaaataaaactaacgattggggccttcccttccatatttatgttaatttgaccacatttggcatttaatattatttttttaaaggccgaggagcgttcgccaatggccagcacgcggagaaaggagggcaagtagtggtgcgaccggagcgaagcaagcggcgcacattaggcttaggcttcagcttgcttaggcctaggcttaggcttcagcttgcttaggcctaggcttaggcttcagcttaggcttcagcttaggcttagacttcagcttaggcttcagcttaggcttaggcatagacccagtacgtattcagcgacctcgaaaacccataaaaatatgttttccttgtaatttatgaatttcaaatttatgttcgaattcgggttcgggattcggaatattgaaaaataaatgtcatattcgtgatcagcgccccaaattaccctagaaatgactttttatttgaaaatttcaggtggggtcacaaaacagaaaagtaccaaaagaattttcagttattcgtatttaacacctttactggtctacttaaaaaatatcaccatttaaaaaaatactgaaaaatatttattttttgattttcatatcctttgatagcttcaaaagatatttcgttgttttatcatgtattgtcaaaaattcattaaaaaattaagaaattcaaataattagtttcaacaattacccaaaaatttattaattgaataaagatg

SEQ ID NO: 118655 - DNA, 143 bp, Heterodera glycines
aaaatgttcgaattcggtttcggaactcgccaataaaggagtcctgaatcgtactcatcgcatcaaaacacccctagaaatatgttattagatttttcaggaaactttaaaaaatttttttttagggaccaataaaagacatg

SEQ ID NO: 118656 - DNA, 1003 bp, Heterodera glycines
aaaaattttctttattcgaaaaacattataaaatatttaataatcatttaagtgaccaaaattaagtttttttttgttaagttttacgtgttttgctccctaaaaatccttaataaaaaatttttaaatgccttttcatgcctttttcgggattttcgtgccttttcatgcttttttttcaattttttggtgcctataatagtgcctttttcgcgatttttggtgcctttttagtcggtctctagttatgccagaaatagtaattattttcatacaactttttcgaaggttgaccgaatttgttgtaattttgcaggctaatatagaaaaacctgggctatcgaacgatactaactaaaaaattatattgcttttattccaccgaatttggctggctctattccacatagaatgagtaaaacaatggcatctgcattatcttctaatccattcattaaataaaatattaggaattggaagaaatgcgagcgccaaaacattttcacgaactctctttcttaaaccaagttctgcagcataacaagactagactccaaccctgttactaagttcaatacacattggtttagattagagttgcacgggcccgggaattttgacaaaaaccgggaccgggacttttcgggttgaaaaccccggagaatttttgtctgggaaaaccgggaaaaaaccgggactagtcctggtcccggtcaaaaccgggacttggtactcatttgtagttttttcagtaccagtcccggtcccgtgcaactctagtctagatttaaattcttcatcttaatgtttactagttttgaatttcttccaatttgtcgggcaaaaaaaaaaaaaaagtaaaattacccattaattcggcatcagtccgaaaaatagatagttattgcctaggagaccttatccaaggatgttacaaaattatgactttttccaataacggcgattaagcaattttgaagccaatttgtaaaagtgaaaaatg

SEQ ID NO: 118657 - DNA, 881 bp, Heterodera glycines
aaatcaaattaccgttcacgccacagaatcacaaatcattcattcatttgatttgacaaacaatttttaattaacgaaaattaatggccaaatttctttgtcaaaattggcagatgcatttcttctgactttgtgagtaaaggcaaattgccatgttagcattgcaataaaattgcatttcaagaaaacataaggacacagtcactttagcgtaaaaaatattataccatttattatcaatgagaaattccaacaaattattcaactcaaaattggcatgtgcattttctaagagaatgtaaataagcgaattgtcacactagcattaacataattcgtagaaacatcgtcgaagtgtaattagtgagtgctatagttctaattgttcactagatttttcagtgcgggaaaaattcgatttttaccatttaaaaaaaaatattttcttgaactttgtttttatattttcttaaacatttttttagcgtcaaaacataaatatgaaaatatttcatgtttcaatatatgaattttcggctttaataggagttctaatctcaaagtttcatgtaaaaaaaaagtgaaagaattttaatttttttttcaaaaatcggatccacgtttagacaccttcgtgaacgtgttagttaaatcattaaacgatggaattctatttattaatttaggatactaatcttaatgagttttttatgaaattttcacaatcgatttttcagtctgaataattcttataaaaaaaattttaatattcatgtctctttgtcgacaggtgaaaaattaaattaccgttcacgccacagaaaggaatttatattttttgaaaaaaaggtttaaaatatttacgaagtgattcagaaatg

SEQ ID NO: 118658 - DNA, 965 bp, Heterodera glycines
  unsure (1)..(965): unsure at all n locations
tttcctgggggcagtgaacanaatctcaaatgcaatttaatttttgcaggtgaaaggtccgattgcggttggcatcagtttcacaacttatgacatggtcagtgaacggctaaagcggtggaccggccaaaagggcacacattaacagtgagaagaggagcagaagtaattcgagtccatccatttgctacattaaattataccctctcttcctcccattttcgatgttatgcgtgtcagtcaaaacaacaaaaatttgttttttgttcattcgttcatttcttctcacattcttttcgtaatttttggcattcgattttattgtatccaagtaaataattgtgtaaccaaaatgtgtcccttttggattgtgcctttaactttttcctctttcctgtcattttgtgttcagtcagcttttgttcggtgtttttcagaatcgcacaaaagcgaagcaatttagtactgtttgtactcaatgccaccagttgtgcagtcattttggtttctttttcaaggttctattttccattattctttgggtttgcacaaagccttactgtcactttttactgatttatgtaagaacttgtaattaaaataaaaaaggcgttgtgcttctgttttgttattcgattgtattttggggtttacttcaaaatatatggccttccttacaacaaattgccatcaattatttatctgctcgtcacgccatttgctcaatttcgaccaaacgaatcactcgttttgtgatttctcttgattgttatacttcagaggtttcttttgcactaatcgaaatggtacagattttgttcacaaatgttgtatttgtacacaaacagaataaaattatgttaaagttcgaagtctaaaaaaataatcgtttcaatttttgggttgtccttaaacaaaagaattttataaaaaaacacttgaagatggtctttttttaaaaaatg

SEQ ID NO: 118659 - DNA, 350 bp, Heterodera glycines
tagtactatctcgtcgtttctctttttctttataatttctctcactttggcgtactatctcttcattttaatgatgtaaaaaacaacatttacttctctccatataacttgttttctatgcatacaagttgcaccaaattttgcataccgatagagaaaaaaattctgcatcggttaataggtcaagtcaatattaaaataggtcgaattagaaagtttttttgtgctaataaataaaaatatagattctttaagtattcatggcagaaagaaaattattaagtaagctaatcggcggagaatctgtaaaaaagcgctggaacaagcgagaggagcgacgaaccaaaatg

SEQ ID NO: 118660 - DNA, 108 bp, Heterodera glycines
ggtgaaataatacaaaaagcctccgatacagcgaagcgaattgaattcctttaggtgaagacaatcgctaaaggaacaataaattcgcgaacgatggaaatcaaaatg

SEQ ID NO: 118661 - DNA, 493 bp, Heterodera glycines
aatgaacgaatggccaaagaccgtcccttaaattttgtgagttaaggtgagcgacgaagagggaacggcggacgcgggggacaattcgccgaacggagcggacgattcgctgtcgggaaaaaagaaaaaaacgcggacggttttctcgaggaaccaagtcaatttaaacaaataaaaaatcagcagcgactgattgaattgtgttgacattcgttaaggtcagtctgctggaacaaacatttggggccaacaaatatttgagcgcaaagcaaagggagcacttggccaacagcctcaaactgacggagacccaagtgaagatttggttccagaacagacggaacaaatggtgagcatatcaaatgggacggagtgccaaattcgaattcgaactctaagctacaccctcccctagcatttaaatgctaaattgaaaaaagcaatgccaaaagtaaattgctttaggaaacgtatgggccaagacgatcaaatg

SEQ ID NO: 118662 - DNA, 321 bp, Heterodera glycines
catccaaaacattaaaaatgtaaattattttttcataatttatctaaaagcatgaaatctgagttgaattttcataaaattccttattttaaaatagccaatcacaggaaatgaacgatttgctaagttttgtcataagatttttaagaattttatttatacattaaataaatctataaaacttcgcataataattacaaaatttgtaatatttttcacgaaataattattattaaaaatccagaaaataaatcatttcaattgcagagattttgaaatattttctaaatcttttttagactgagtcattgcataaaaatg

SEQ ID NO: 118663 - DNA, 334 bp, Heterodera glycines
ttctttgaattctaccatttttcaaaaaagaaggtgtgctctttttaatttgccaaaaattgattgaaatgcaagtgacttgggttatagaaattagttgataattatgtaattataaccggaattaacgaaggagcacaaaataataaacaaaaaggacagaaagtattcgcctaattgagcaccaatgcgaatcagtagtgatgttttgataaacacaattaggtaactttccatcgttttccattaacaaaaatattcccatttaaattgaattggaaaaaccaaaataataattatttatcctttttaaatataattaaaaaataaaatg

SEQ ID NO: 118664 - DNA, 124 bp, Heterodera glycines
tcagatgttgacgactcttccgtgactgatgataaatcatcaaatgttgacgactcttccgtgactgatgataaatcatcaaatgttgacgattcttccgtgactgatgataaatcttcagatg

SEQ ID NO: 118665 - DNA, 715 bp, Heterodera glycines
tttttgttgtgtcaaaggcatcgtccgccgttcacctcctccttttatacgctttttattgcgcttggctttgtggatttaaggttttatgaatttatttttattagatgttaaatgcaaaagtatttaaattaaatcgaaggtcccaacaaagctcagaaatagtcggaattgatttttatatcacacgaaaatggcgttaaagtgtcaatctatgccaaaaagaaaagctagtctttaaaaataatttgaattttaaaaaattttgattttttgaaaaagattagctttctttcacttttattatatttttcattacaaatttccaaaaaatggccaaaaaaggacccactgattcgcatttttctcatcatgttgtgactatagaatcgattcagaccatttttggacgattttgagtttggaagctcagattaacatttatttaatttattttttaaattttattccattttagcaaatttttattgtgcattgtcaagaaatgcgcatattgggcctatgttccgacaatcttttatccgctgaatcatgcaaacgccgcagcgaatttaatttactgtttgctatggacattgggcttaatccaatttcaggcatttttaaaattaaaagattaaagcaatttattctaatttcttagcaatatgaaatgttaaaaataaatttaaaattttagctgaatttcctaatg

SEQ ID NO: 118666 - DNA, 497 bp, Heterodera glycines
ctagggcgcgaagcgcccgcccaagcccaataaaatttgaaaacgggcgcgaagcgcccgtctgagtccaacaaaatttgaaaaacggcgcgaagcgcccgtatggccaaaacaaatttaaaaaacgggtgcgaagagcccgtaagaatccgactacattattatgggaaaggaataaccctgtacctctatctgatccatctgaatagctacagaaggagcatttactcgacaacccttgaatattgcactttgacgcactgattgatttgatattgaaaagcaaatcatttagagaaaaactcacagaaggtaaaaattaaattgccataattaaaaaatatataattttttattgtcaaaaaggctttgataatgatgaaaatacaaaacagcgctttttggaatttgtcctgccaaattatcaggaagcggtgctgaaactgctcaattctggtgattttgctgaatttgagaatgaaattgcattgaaaatg

SEQ ID NO: 118667 - DNA, 1003 bp, Heterodera glycines
tttacgatttttctcccatcttctaaaagatgatcctaaatacgatgagacgtcgtgaaatgatgggaattgaaacaaaattttacacgatatgacgtcatatcggagatatgacgcgaattgaaataggccccaggccgatcagccgaattaaaatgactttgactttttcatttcgtgtaaaataaattcaactttcttcactatattaaatttactcaattcgtttgggaaaatccaatacccgaacgcggtcagccctaaaacaaaatatgatcagctgatttttgaggtgccatgaatttaggccgaaactctcgagcaaaaattgtaaggcaaagaaagtgatcgtaaaatgtctctctaattaattgaccgcatttctgaatcatcggaataattattttcccggacatcacaaaataatcagaccgatttaaaaatgcaatttttgggaaccgttgaaaaacttgggcccggccaaccctaataaaaaaatgatcagttgaatttgcagtgccatgaattcttattgattgatcttctctgaatgatcggaagaattaatttcacggacatcacaaaataatcagaccgatttaaaatggacttcttcttgcgaaaggcttagccttgcttgggttgggcttagtccaaacttaggcttaaatttcccaaaatttttgtttggtacgttttaccgtttatctggtttataaacataacatatttaatatttatttaaattacaaccaaaattccatcccaatgaatcatccatcgttttgtccgatcacttttttcagtttccaaccacagcaaattgctgattatgtaaatatgagttggcattggaatgggctttcgctgggttggttggtacatattccatccccacccttctcatttcatttttccattcattttacattttttccaaaaattttcaaaccattcaaaaactctgaacaatccaatggagtttgcccgtcgtcgtcccatg

SEQ ID NO: 118668 - DNA, 166 bp, Heterodera glycines
ttgctaattgcttggctttatgcttcccttttacctctgatcagatgccaacgatcgcttgcacgcgttggaccgtacgctgaacgctctgaatgatcagctttcgtccacaattaaaggcattgatttgcgcattttggacgagcaaattgtggacccgataatg

SEQ ID NO: 118669 - DNA, 93 bp, Heterodera glycines
actgaaaattggaaacgacggatttgccaaatccacaatgatcaattcactttgtgtttgacgcccgccaatcgttctgtgattagcgcaatg

SEQ ID NO: 118670 - DNA, 227 bp, Heterodera glycines
attttttttgaatgattttatttttttaaattaattaagtttattaaaaataatttattttaaatattaaaaataataattctttcttcctaatttagcccaaaaatctattgtttgaccttttttgtgcaaaatcatttaaaaaatggagacaaattaataagttacctaaacataaaattataaatattttatgccaaaaaaagaaggaaagtgaaaaggaaatg

SEQ ID NO: 118671 - DNA, 1003 bp, Heterodera glycines
aaaacaaaattggctttctagcagtactttttaatccatttgacaataaaaaaaaacaaataaaaattgactacttttaattcaactagaattagtggcaaaagcaataaccattctcttcttctgtgaagtctgtgttctgcctacgtacgtacggaagtgtgtctatttcgtagaatctttctctctctcaatgcactgcctacaccaacaaatcgtgaatgtgtgaaataaacggaattcgaatcgatcgattctaatcaatcaaataaatcgtatcaaaccgagcaaaaatagtgatatctaaagttatgaaaataatctgagcaaacgctcggctagccgaaacgttgcaaatacatgataagcttgtacaaatgggggaaggctcaaatttatatcattacaaagcttaaaattgcattaacattgggttaagcctcgaattaacggatatgttataaatgtatcggtgtcttttagatcacaaagatacgaagaaaggcgtcgattcattcaaatgggaaataaatttgtaattattgttcttagaaattaactccaaaatgctttaccttgtgtcaccattcaacaaactttcatcagcacaatcatttcatgcccagccactgacgggaaatttgtcaaataataaaccttaaataaaatggaagttaaaattaaattagagcttataaatgtgatcaaggttaaactaatactggttaaagctttactgtcgattaccgtcttcaaaaagtaataaaatcaattgtgtgtctagcatttagcgcgttaaaagccaaaattcgtatttttcatttttggcataatgcttagcattttatttaaaaaatgagaaaataaacatctgtggctgctgattacttattcccactgttttctgccccttttcactccggctttatcaatttttctatttgtcattgagaaattttgaagtttaaaagcattttgcagacattcaaaatgtcccgtgatg

SEQ ID NO: 118672 - DNA, 89 bp, Heterodera glycines
tttgtcatgtattttttcaagtagttaaaatttcgctgttatatttactacattttggaatatgcattaattgatgggtattaagaatg

SEQ ID NO: 118673 - DNA, 806 bp, Heterodera glycines
gcggctcaaatgtcggcggcgcaagtgtcggcggcgcaaatggcagcggcgcaagtgtcggcggcgcaaatggcagcggcgcaaatgtcggcggcgcaagtgtcattttggctgggcggcgcaactgtcgcggcgcaaatgtcggccaatcaacgcaaacatggaaaaattgaagttttaaaaggaattctttgagaaaatattttttgttttgcaaatctgaatattcaaaaaaaaaaacggataaactgtagtgaactccccgtgaaaaaaagggtcaaatgatataccaatcgattcgtcccgaggagcaaagaataaaccggttcaaaactcgaaaaattgagagatttcgcactctaacttttttttaaacgatcgaatccccacaaattagtaccattcgaaagctcttggcgagctaagtctaaaaatcattgtatgaagtcgaaccgcgccacctaaaaaccgacaagtataaaccggtggtttttgaaccgattcaaatcctatagtgccaattcagtaccaaaggtaatttttaattatttgaattggcggcgcagggaaactggtgcaaataggtcattttgtttattgcgctaaaaaaccgccgcacactcgactacggcggccagtaggtggggcgagactacgggctacgggagaagtccgcgcgtcgcgggtcgtagtcacgctccacccctgtttgtcctcacattttttgaaaaatttctttttcaaatttaattaagtggttcgggagttaaatatttaattcttcaatcctgattttataggaaatg

SEQ ID NO: 118674 - DNA, 360 bp, Heterodera glycines
gaaccggttcgtttgagggtccgcttcaatttgtcccccgatattgaggaaatttcgggcgcggaaacccaaaggccatatcctgcccgtaaaattcgttcactgcccacctttgacatttcacctattcatgttgaaaaatgcctttcctgtcccatatgcatgtgtccttttgtgagtggggagggtgccacctcactccattgtttccatatttttcatgccccatgtattgtaccatggcttaggattcagcgctcatgtcctgtttgtaaatttttattgccgtgaataaattttttgttgttctctgttaaggcgattgaggacagtttcgtcattgagcgcaccacgcaaatg

SEQ ID NO: 118675 - DNA, 300 bp, Heterodera glycines
aaaatcctcatttcccaaaaaatcttcattgactacaaaaagccacaaaatgaggataaatcctcagatctggcaaccctgttcatagctgttctaaataaattaatttgctataggccgtaaatgtcctgcaaaattcgaaaattttggttatgattcaaaaaataaaagccaaaaaactttggattttagccttaattttttgaaatttttcgaaattctgcaatgccgggctaaaatgcgtgcattttcattcagttggccggcaaatttcttctgctacaccagccatttgtgatg

SEQ ID NO: 118676 - DNA, 65 bp, Heterodera glycines
cttcgtgccatgccatttcttccgtcagttacgaaatcctttttgatgttcgtgcgacgtcaatg

SEQ ID NO: 118677 - DNA, 336 bp, Heterodera glycines
gacgtccataacaaatccctttggatttattcaaggcccaaaaaccctcagaaatgctgtttttctgtcataaatcaccgatggccctccccccccccccccaccaatttaccttttttaaatttttttataccacggattggtgcaaattttcctatttattccgaatccgagttctggcataattctcgagtgtaggataattcataattgccataatttggcatttacgtgttttgaattggaggtaggggtgggctattactaaatttagccgtcgttttcaagctcaaattgctgttcactttggccaaaagtggcggcgtcgcgcggatg

SEQ ID NO: 118678 - DNA, 1003 bp, Heterodera glycines
taaatttttagagttatcacgaacaactacgtaacctcgataagctagcaagataagatttataaaatatacacaaatataataatatttaaattataaattaaaaaatagtaaaagtgctgaaaaatattattccgttggggacccgtctcgatattcagggatttaaagagaatataatattattttgtcatatataatttttttagttctagtttatagaaaatataaaaaacgctttggttattttttcaatttctattttatattggaagtattgaaagtgactttgaaattattaatcattttgttttctgtaggtgccaatttgaacaaactttttgtaattatacaattaccattaatgtgtctattatttaaaaaattccaaaatattcattgaatattacaatattaaaattgcttatcgaagaaaacttatcatcttattataataagtaaatcccaaacataatttttttcattaaaattgggaaaacaaaatatcgtaaataaacttattatatattttttcttttgcccattttgttttttgtttaaattatgcaaattaaaaaaattatacacgtgaaataaaaaaggaataattgataattgacacaaagcatatttcttataaataaaatttttacgtttataaaccttaataaaatgaaatattatgatattttaaattacaaattataataaatattaaaatataaaaataccaaaaaaataaatattaatttcaatgaaaaagttttaaaaattaatttaagcatttcctcagtatgttttaaacgcctttccaaaatcgagtaaattaaaaataaaattttacttggaaatataaattattaaaatttgctaaataataatccttttctcaaaataaaaaaaaacaaatatttgtttttaatgggaatattatgatttcttatttttttatcactacaaaaaaaaatagtttatagttaaaattcatatatttgtcaaaatg

SEQ ID NO: 118679 - DNA, 528 bp, Heterodera glycines
tgtaagcatcaaattaaagagttaaaatatttaagtcatgccgctaactctgcaaaactttaaggatcttaattattgaaatttgtcttttaagtcttcttaagtttcttaaaaatattaatttatttgctatcgaatttattgaaaatatatatttttaaatctaatcaaaaaaatttacaatttttttcgtgaaatattcaattttttactagtcgaaaaatttttgatcataaaagcgaatttggatcttttgcttgctcctaatattcatctcaggttgaagaagtttatgaacatttagatgccaaagtgatgactataaggatgcaaattatatgcaccaaaacgtgcaaaaaagtgaaaatatgtaaaatataaaattgtcagaagtgagggcaaatttttttttaattctttaaattcgttaaatttgagcaaaaatctcgtaaatagctaaatatggtaaaaaatcatttaaaaaatgcttttactgtcctcccccaatttattaggttcatcgccatg

SEQ ID NO: 118680 - DNA, 259 bp, Heterodera glycines
tttttttaagcaaattaaggattttaagactcccgcttccgtaaaaaatcccgttcaccgaaaaaagcgggagtcgggagcgggactcccgtaaacttcctccccgctcccgccgggccgtattatttaataataaaattaaatacttggcagaaagtgttcggtgagcatgaatcataagcaaaaattttttaatctgtttaattcgatgacatataattttttcataaataaatatatctttattatattacagatg

SEQ ID NO: 118681 - DNA, 55 bp, Heterodera glycines
tttcaactcgtttttgccaattttttggccccttttatttggtggcgccaaaatg

SEQ ID NO: 118682 - DNA, 1003 bp, Heterodera glycines
  unsure (1)..(1003): unsure at all n locations
accccncgaatttgttggtgtttgtccgcatgaatcaatctctcctctaccataagtggttaacggcgggaatgaaaaagggcatggaattgacgctgcgcgagtacgaacatagcccccctttccccccctctttcccctcttcccccccccttttccccattcccccgtccgttcctttagtctcctcatttgcacaaggtgatcggttggctgttgtttaattacccactcaattttaataccctttccctctatcaaaatatatatttatatgttttattttcacttgcttttcccccatttcagcttttttctgtgcattttattttgttccaattagctctaattatccgtcaattaagtaaaatagaaatttattggataattaagcaatttcctccaaatgtccattagtgtcaacatcaacgacccacaattcccagccgaactttatgagattttcttcgctcgaagtcccttcatcttccatcgatggcccatttggtctctgagaaacgcctctcgtgtggcaaaccaaaggcaatggcactgtccgacactttgccttcttcgctttcccagggacgacgacattttgaacatctcaatggcaattagtggcagaaccataagacgaagcgaccgccaaaggcttttcgatcgcatttcaaggtcgaaatgacaaatcactggccccaaatttgctaaagcaattatttttcgccaaccgtttggatggccagtgattacagagataatccatcggatcagttcacttcacttcatctcatttcctccctaagggatgtgcgaaattttactttctcgtaaaaaattgacttcgtgagtttcgcacatcccttcggccaaatagcgctttttgcattgtattatacaggtattaaacagaaaaaaacaacaacatttatttccgcaattttgtttcgtttcctccattttctcgccaatttccgtccgtttcgtttgttttgctcaaatg

SEQ ID NO: 118683 - DNA, 230 bp, Heterodera glycines
taatcatctgatcaatgcccatggcactgcgccaatcctcaattgactgcacaaattcgagttcggcaagcgttgggtcggtgctgaactgaggccgacttgaacgaccaaaacctatggaaaggaaatgaaagtgattagagaacaaattgttagaaattaaaatattattgtaaatggatttctcatttcattgctatgaatgggagataatttccctgcctaaaatg

SEQ ID NO: 118684 - DNA, 727 bp, Heterodera glycines
taattgtttgagtaccccaaacggacacttgaaaaaatcgatttttttgttttcggggcagtccccccgagccgatgcgcccagatttatggggagaccgaatccttccggaatagcttccctatagcctgtactttaattctgcgttggatttttgctccccataattgtttgagtaccccaaacggacacttgaaaaaatcgatttttttgttttcggggcagtccccccgaaccgatgcgcccagatttatggggagaccgaatccttccggaatagcttccctatagcctgtactttaattctgcgttggatttttgctccccataattgtttgagtaccccaaacggacacttgaaaaaatcgatttttttgttttcggggcagtccccccgaaccgatgcgcccagatttatggggagaccgaatccttcgggaatagcttccctatagcctgtactttaattctgcgttggatttttgctccccataattgtttgagtaccccaaacggacacttgaaaaaatcgatttttttgtttcataaatatttttttcagaaagtgctctaaagcgcaccaaattttatttacaacttaattttagcactctgatgctttagtatcaaaaaggaagatggagaaaaaattttttaaaaaatttttccttatattttggttatatcgttttgcttttggtggggtgcttggaacagtggaatcatg

SEQ ID NO: 118685 - DNA, 55 bp, Heterodera glycines; identical to SEQ ID NO: 99576

SEQ ID NO: 118686 - DNA, 356 bp, Heterodera glycines
gaaatatgttttcatgacttttgaaaacaaaaaaaaaattctccgaaaaatgggggcaaccatctaaactattaccggggttggttaccgggaaaataattgagttgctctaagccagttttagtttaaacgatcaaaaacgcaaaacaattgaccttaatgctcctaacttttctcacccattgaaatgtttgcctcttacatacatataacttacaatttgtttttggaaattttttttattttgatcaacataacgccaaataaataaaattatttttttatttgtttatttttaattaggtacaaaattgagcgaaaccggggccagtccgggaatttccaggtttttaatg

SEQ ID NO: 118687 - DNA, 876 bp, Heterodera glycines
ggatttttatgtgctaaaaatcctgaaatatgtaataaaatatgtgctaaaaaatgctgaaatatgtgctaaaaatccccaaaaatgccaaaatatgtgctaaaatatgtgttaaaaattgaaaaaataagtgtgtttttgcataaaaattcccaaaaatctcattctttatcatttttagcccatacaacgcaaatcaaatacatttcgaagtgtttggggtaaaattgtctttttttgataaatcatttctataaattgaaagttccagcagagaacttcgaaatccaatgacgaattaatgaattcgagatttcattagtttctacaatcgaagaaaaaattttttaatttgaaaattatgttaataattaggaaaaaagtcgatttttagggggtgtatttttcaattttcttgtatttttattgcaatttttctcaaaaatgccaaaatatgtgcaaaatatgtgccaaactccaaaatatgtgctaacatattttatgtgacaaaacgccaaaatatgtgtttttatgtttttataagtcgctctaaatcaaaaattgttcggagataatgctatttttgggcttctctcgccataactaagccgcaaaaaaaatatgtaaaaacataaaaatccgggccctagtaatggccaaaccttttggttagaaaaaaatgtttcaaaaaaaaacgccagaaaaaaatgcgggaaaatttcccgcaccagccccggacaaacacccgggtttgggacaaacaccgggggcgacccttgttttcacacccccctcccaaaggtgtgaaaacacatgttttcacacctgggacggttgggacgctccccgtgggataactactaatgacttaaaatg

SEQ ID NO: 118688 - DNA, 90 bp, Heterodera glycines
tttttgtctatgctttttttcaaatttaaacgccatttgaccaacagtgagctgatcgaccaatcattgctgcaaattcgactaactatg

SEQ ID NO: 118689 - DNA, 76 bp, Heterodera glycines
ggtgatgaaattttatgtgcgtaattaattaatttaattaataattgaatatatttttttgttttttcttcagatg

SEQ ID NO: 118690 - DNA, 200 bp, Heterodera glycines
aaaggaaatggggaagcactgatcagaattgtttgggctttaacctttttcgatgctccaaaagaaggtgcgaattaactgttaattaatgctaattacaacgatgattaatttccatttagacgaaaattggagttgcaaatgtcctgcaacttttcgaattgtctctcaaaagaacgatgggtcggatttgaagaatg

SEQ ID NO: 118691 - DNA, 499 bp, Heterodera glycines
gttaattaccttttggcactttgctcccttttcgaattaattcatcaacctggctattttctttttgtttacacggctttttctggacaaaatttcattgagtattgtttggccgtaaagatcactttcatttcttggtttggaatcggtaaaaatatcatgatgaaatgtaaaaaatgaaactttatttatacattaaatttacgtttaaggcacaataaatttaaaatttggctctatttgactacggtaaccttaatttgctttgttttcggttttgatttactcattacattataccaatttatgaatttgtatggtgatcagatgatcactggctgtgtgacagattttatcaaagttcttcctaatctattgctagttttacaaaaaattattcaaattaagggcccttctcatcaaaaaacaatatggtttagcttaacaatgatgacaattgttatttatttatttatttgttggacttgttataaaaatg

SEQ ID NO: 118692 - DNA, 126 bp, Heterodera glycines
  unsure (1)..(126): unsure at all n locations
ttcattcccccgcccgaacaggtgggcacagacacgattctagtgcagaattttacttgtcactcccacgatggatcaaacccgcgctntcagctagaagaatggcgtaggcaaatcgattcaatg

SEQ ID NO: 118693 - DNA, 139 bp, Heterodera glycines
ttccgctttgtcttcgtttgtcttcatttaaatttcttattaataatatttatttcggcgttagttattttcttgtttagatttattcgtttcgtttttgacctttatttccatcacaatcaactgaaaaacggcaatg

SEQ ID NO: 118694 - DNA, 151 bp, Heterodera glycines
aatagcgtagcaatggctgagagacaggagtgagactatgtgtcatagtttatttgtaagttatttttgacgagttcaacgaacgagtcacaccactgctacccgtgcaaaaacagcgcatcaaccgtttgacactcaagactttctaatg

SEQ ID NO: 118695 - DNA, 1003 bp, Heterodera glycines
aacggaaattttgtgtccattttgcagaattttctaataagttcgataattgggcccattttcttaaatgtacaagctgaaatttgctcaataaatcgaaaaattctttctgaatagaaaacggaaattttgtgtccattttgcagaattttctaataagttcgataattgggcccattttcttaaatgtacaagctgaaatttgctcaataaatcgaaaaattctttctgaatagaaaacggaaattttgtgtccattttgcagaattttctaataagttcgataattgggcccattttcttaaatgtacaagctgaaatttgctcaataaatcgaaaaattctttctgaatagaaaacggaaattttgtgtccattttgcagaattttctaataagttcgataattgggcccattttcttaaatgtacaagctgaaatttgctcaataaatcgaaaaattctttctgaatagaaaacggaaattttgtgtccattttgcagaattttctaattagttcgataattgggtaaaaaagaatgaaggttaacccctttttacaaaaaaatgattattctattgttattttggataatcattagcacattacttagttaaaatttgctttatttttgttattttgaaaaagtttttcaagcctagaaaaaattttattgagaaaaaacttaaaaatttcgacttttttaaaattttcatgtgtaacttttttgttaattgtctaatctcggagcaatagcttagaaaaagcttctaaacatgttaagctttcaaatgatacaaacaatgttgggatttggttgataaagaaaaaagttatagaaagatagtgtaaaagcttgctggggccgaaccgtgggggccgaactgacgtagaccgggcactatcacttatcttttaaaatttgattatagtacgaaacgccaaattgaaacattgtacgaactgcctttgtacgaactgcccattgtacgaactgccatg

SEQ ID NO: 118696 - DNA, 418 bp, Heterodera glycines
tgcaaaattttttaatgtatattcatgaaattttgttcaacggggtttttggggttcccgatcacactaatctgtcaaatattttgatcaattcccttttcctaacctaaatttgaacaaaaaaatcataaatcgaaaaattcaaatttcgatttttgttcgggttcgggttagggattagaaattggtcaaaataaatgtcaaattcgtgatcagcgacccttaaaaccccggagaacaaattttaacggttttttatcacaaaaaaattttgaaaatcaaaagggtccctcccccctttttgataaaaaaaaaattcaaagccgcccttctttaaagtagcgtcaattgtatcaattcatacacaatcacagaagttcaaactttattaccaaattttataacattcacgaaaatg

SEQ ID NO: 118697 - DNA, 623 bp, Heterodera glycines
  unsure (1)..(623): unsure at all n locations
catcgtatgcttcaagttttttgtgttgaaaaacacctaaactggttatgtaagctagatttaggtacaaataagcaagccaagcctnttattttctttccaattccagctgttttgacaataaaccgttgaagaataaaatgcgcccgagacatctttgataaagtgcactgaatattgcccaaagatttgaaacgaatacaggccaacataaacttaaaagttttttttactaagtttttgggaaaatgcgggatttttaagattaatccagcgggattcgtgatgccaaaaaatttaataatgccaaaatttaattaggtataataattttttcaattcatatttccgattcccaatttttgggccgttagaattcagattgccgaaaataaattatgacgtcgtgaagagaggactctactgtctttcaaaaccattgattgtcagacaaatacccaattttttttggtactgagtgtgagaggctaaaactaaaaccgtctttagataaaatttttataatatgggatttggtggtcgaggaggtggtggatttcgtggccgtggcggtggtcgaggtcgcggaggaagagacggcgggcgaccgatgacagactatg

SEQ ID NO: 118698 - DNA, 1003 bp, Heterodera glycines
caatttttttgtctaatttcagtacatttacaattttccgtcattgactaatctatttttacaaaatttctcaatagttcaaactatacggggtaatttaatctcatttcttccaaaatatgctgaaaggcgctatgttaaaagtgaccagttttgaaaattttttcaaaaggggggaacaaggggggaacccttttgttttgcaaatttttttttgtgataaaaaaccatgatgttacttggctattatagtgcattttttgttttaatggatttattttaatgaaaaatttgattggacgcataaaaatttgattggacgcataaaaattgattggacgcataaaaattgatgggacgcataaaaattgattggacgcataaaatttgattggatgcataaaaattgattggacgcataaaatttgattggacgcataaaaattgattggacgcataaaaattgattggacgcataaaaattgattggacgcataaaatttgattggatgcataaaaattgattggacgcataaaatttgattggatgcataaaaattgattggacgcataaaaattgatgggacgcataaaagtcgactctctctctcatctctctctctctgctctctctctctatctttcgctctctctctttctctctctccctctctctcccttcgctttttctctcttcgctttctctctctgctctctagcacgcgttacccaactcttaccctctcatccgcgccgacaaagaaacaaacactgcactctctcctctacccaacctttctcattagtctccaattatatttttttattttctgtttcttttcctctgtgtaaacagaacaccactttcggcgcgaattcaaaaagctaaaaaaggagcggggctattactcgcttaatatatagtaagtgattttctcaaaaattcatctctaaaatttatttatttattattttagaaatattcgaattttattactaaatg

SEQ ID NO: 118699 - DNA, 1003 bp, Heterodera glycines
ggcgatttattggaaaataattttttcgtaaatttttttttgaaaaattataccaaaaagttttttgagtgtcaaacaaagcctcctttttgaaaatttggatcgtaaacaaacaaagtaaggtgtgaaaaagttttccgttggaaaaagttcgaaacacaaacttttatccgatggctttcgagatcactgattacgaaccctgacatccattttggactgttccccaatctgcaatttttgaccaatttgccgtttcctttgatgatcactcccgactcttgacccagcaaatttattatgtaatttttccccttttaatgtgtgcctttgctctctccctttgaattccccgtctgataagaattatgtcggcatcctctcttcttgtccttgcctatttaaactctgtccccattgactcttggctttttttgtcttccttttcctatccaatcctaccacttatacactttcacctttaatttcttcatacctttcccatcctacttaaataaacttcttttccatttcttggcaaacttaggagtaaacccggggattaattgggagtaaaacaaaagcctccttggccaaatctctcccaacaaattgtgcacggacagtgcagttggtgccacgacccgggactattcctcattcgcattttgccaaaccaggcaaaatcccaataggctgaacgcctaagattgtcgagtcgtagctgtgtgctcctcggcggctgtgtgccatcgaaaaaagagccaagtcgaagctgtgtgctccttggtgcggctgtgtgccctctgaaaagccgagtcgaagctgtgtgctccttggtgcggctgtgtgccctctgaaaagccgagtcgaagctgtgtgctccttggtgcggctgtgtgccctctgaaaagccgagtcgaagctgtgtgctccttggtgtggctgtgtgccgaattctctttgaccttttttttgtcaaattaatccaaaattctccatg

SEQ ID NO: 118700 - DNA, 496 bp, Heterodera glycines
tcgtttttcccgatagcttttttctttgacatccaacctaacattgttggtatcatttgaaagctcttaacatatgctctattagccttaccaaaagcgaaaagattttcaagcctggaaaagaaaaaacttcaaaaatttcgacttttcgcaattttatgtataacttttttggaaattgtctaatagcgaagcaatagcttagaaaaaatttctgttaataaattgcactggaaaagattttgatgaaaatcactaaaaaattttcaagcaaatatagaaatattataccaaatatattttttgttttgttaaaaatgggtttttggccatgggttcaaatccacatgcctgcaacattttttaaaaattatttttggggtttcgagtttggatcaaagctttggaattgggcaaaatggatgccaagttcttgattagtggtcccaaaaaccctaaaaaaacatttttacaggcaagtggatctgaacccatg

SEQ ID NO: 118701 - DNA, 468 bp, Heterodera glycines
tgtgtcgcaccaatacgattcgctgactggcccctcggggcatgtgtcgcaccaatacggttcgctgactggcccctcggggcatgtgtcgcaccaatacggttcgctgacaggccctcggggcatttgtcgcaccaaagcggtttgctgactggccctttgggcatgtgtcgcaccaaagcggttcgctgactggccctttgggcacgtgtcgcaccaaagcggtcgctgactggccctttgggcatgtgttgcaccaacttttggatctgcattcttaatgggatgtgtgagccctggctgatggatttcagcacaggatgactacactccatggcgaagaatgatgtctttgatctttatttgtgcattttggttaataaatttttaacttgtgtgcatttattggttaattacctcatatttttgccgcatttgctattccttcctgattttttgtttcagatg

SEQ ID NO: 118702 - DNA, 110 bp, Heterodera glycines; identical to SEQ ID NO: 98226

SEQ ID NO: 118703 - DNA, 501 bp, Heterodera glycines
ttcggaaggccggtgccggccttcgttgcagaccttgcacaaattctcgtgcccggtcttccaaatgctgttggcagcggcccaatcgccgttgattatgctgctgttgttgtacataaaaacgaatttacgaaggaggaagagagagtagtattaatttcgaagtaaaaatgttcaaactaaacaaattaaaaaattttaattttaaaaacaaattaaaagacaaaataaatttaaattgttgctcgtttggcattatgttattagataaattggaattaaaaatattttttattttaatttacttattaaattttgcctgcggctttgtaagccatccgcttatccccccgtatcccttttaacctaaaaccggttttttctgtagagaacatatttttctaaaattaaagcttaatttcaaatttgtatttagcagatttaaaccgtaattgcttttttattttttaaatcaaaatttaaatatacttttaagtgatg

SEQ ID NO: 118704 - DNA, 231 bp, Heterodera glycines
tttttgcttatgatttcatttcatgacagtagctggctggcctgctgcaaatatcgccttcttaattatacaaattgccaattttttttatatataaaattatatgcatacattttgtaaattaatttttctaaaatttctagaaaaatccaatacaaaaattagcttacctccccttccgctgtctgtccaacccctcatccgactacagtactcttttctctgtgaatg

SEQ ID NO: 118705 - DNA, 812 bp, Heterodera glycines
aattttttaacttgtttcggtatcattttaatagcgattagtctgttctctctatttacaaataaaattaaattttttattattcatttataaaaagattgaaaagaaacaaaaaataattttttttttcgtttctgcaccgcgcgaattctttcttttttataattattatttaaatttaaaattaatgaattaaaaaggaatttgaataaattaaattaaattattaaaaatttttattaaaatttatttcttttgcctgccaatttaatacagatgatcaccaatctgttcgcatcaatgatgggaggagaacgagctgcgcgaaagtatggcgtgaaaaggcaaatcttgcagcgaactcggagttcattaaggtgtttaattatacaaattagaattgatccgtcgaaacttaatcactttagtcaaacatcggcgtaattttaagaacgcttttgcgtacatcacgtcattcgtactggcagacccaaaatttactgatattttttatattacaatttttggccaatatttttgcgtatataaaattagcataggagtggcattgccgggtcccattttaccatttttttgataattaacccctaaatggcaaatggtcatttttaataacaaaaaacaacgactacaaatttctgattctcccttcagatttttttttattcggtcaacaaaaaaagactgaatatttttaattttttttgacgcattttttgcttagaagaccccaattggtcagtgttcgttcccgtggctctgtcttccatcaacaaaagcgtcgtgacatg

SEQ ID NO: 118706 - DNA, 135 bp, Heterodera glycines
tctaaaggtgagagataagcttttggaataggcaatatgccatttttaccacaataatctgagttttattggaaatagccaatcgtaaacaatcaaaaatttccgaattttcagctttgtaggattttaaggatg

SEQ ID NO: 118707 - DNA, 863 bp, Heterodera glycines
tattaaattgtattataatatttgcgcactggcagtcttttgaaacgcgccgataggcagtttttagaaacgcgcaaccccattttggcagtttttagaaacgcgcaaccccattttggcagtttttagaaacgcgcaaccccattttggcagtttttagaaacgcgccgattggcagtttttagaaacgcgcaaccccattttggcagtttttaagaaatgcgcaaccccattttggcagttttaagaaacgcgccgattggcagttttaagaaacgcgcaaccccattttggcagttttaagaaacgcgcaaccccattttggcagtttttaagaaatgcgcaaccccattttggcagttttaagaaacgcgccgattggcagttttaagaaacgcgcaaccccattttggcagttttaagaaacgcgcaaccctattttggcagttttaagaaacgcgccgattggcagtttttagaaacgcgcaaccccattttggcagtttttaagaaatgcgcaaccccattttggcagttttaagaaacgcgccgattggcagttttaagaaacgcgcaaccccattttggcagttttaagaaacgcgcaaccccattttggcagttttaagaaacgcgcaaccccattttggcagttttaagaaacgcacaaccccattttggcagttttaagaaacgcgcaaccccattttggcagttttaagaaacgcgcaaccccattttggcagttttaagaaacgcgcaaccccattttggcagttttaagaaacgcgcaaccccattttggcagttttaagaaacgcgtcagcactcttatatttactattttgaagaagaagcaaatg

SEQ ID NO: 118708 - DNA, 54 bp, Heterodera glycines
  unsure (1)..(54): unsure at all n locations
ggtttgaaatttcaaaaagatgaattaatttaaaatttaaaatttttaanaatg

SEQ ID NO: 118709 - DNA, 789 bp, Heterodera glycines
ctctagagtcactccataatgttttatcatcaaaagttcaaaaaaaaatttttttttttctaaaaagctcttattgaaaagaaaactggtcaaaatgctattttgagtttctcatgcgataaatattcgcaaaaaacatactgaaaagaatattaaacccggtcctgtttattattatttttaaaagaaattttcatattttattttgggactcaaaatttaccccatttttcgtatgttctttgtgaagcagttctttatttttatttaaatttacttcctccaacactcaaattgggaaaaagataggtccttttatgttcaagtgataaaatgaaaaatgaagatgaaaaattccgacttgtaacaccgtaaacccaaaaaaaaaaataaggggaacataaatattccgcggtggttccaaagtgatgcctttgaaaaaaaataaataaaatatccgtaaaaaaattctaatcaatttttcttacaaaatgtattaaaattaaaaaaaaattccggcggcgcctatcggcaccacttttctttttgaaattttcctcaaaaatagcaaaaattagtcctattttttggcgaaaggcggctacaaatttctttttttttttttgctcaccgctgctcaaatttttaaattaaattttggcccaaacagcaaaaaaaagcttttcggttgcaaattcaaattgttctcgctttgttttttaaaaaatttcaaaagacaccacatcggaacgagcgcctacaattcccataaaaattgcgttaaaaatg

SEQ ID NO: 118710 - DNA, 626 bp, Heterodera glycines
tgtagaagattgagcacagaataacagcagaacacatcaaatagatggcttaatacaaataatgatcagtagagcctggatttatggatttttttgcataaattattcgaccaaatatcaaataaaagtatttttagccttggtttgatgcttcgatgcttttattttttccacattcatatttttgtacaaaaatatttccattttttatccataatccggcactttcacaaataaacctctaacaaaaatttaaaaaaaattcaaaaattaccaagacttttttcatgttcaaaattcctattcaatataaattttatttaaaaattattttaattaatgagaaaaaaaatattttctcagactacaatatgcgatattagggttgcaaccccgacgtcggggttggaagcgtcggggttcggggttgccaaatcgttcggggtcggggtttttcaaaaaactggattttcggtcaatagcacctattttggcctttttccagaaatttcatagcaaaaatgcaataaaaacgaaaaatgcaccccaagaatcgatctaaaaaatttcaaaaaatatacccctaaaaattgaccaaaatttcagaaaatattcccctaagaatg

SEQ ID NO: 118711 - DNA, 59 bp, Heterodera glycines
attaaaaaaaattgcttaaaatttaataaaaattcttcagagttgttaatctgctgatg

SEQ ID NO: 118712 - DNA, 112 bp, Heterodera glycines
ttatttcgaaatgaattttcactcaaaattcccccctcctctaattgctcgcctcgtgcttcttcgcaatggcatcatgctaatgatgcgcagtttgtacggttttaaaatg

SEQ ID NO: 118713 - DNA, 1003 bp, Heterodera glycines
ttctatttaatctattattattaataaattttaattgtatcttgcataacattaagtcaaaaatgaattgaagttgcttgctacacatataaaaaaccaaccaatgttttattatatacagtttttagttgcttagatattaaattcaatcttctaaagcgttgatttacattcattttttaactctaatcacattctatgtacttaaaattaatctaagtccatttataaaataatttaaaaggaaaagattaacgaaaagtgtttaatttacagataaataaaaattattaaaaaaaagaaaaaatattcccaatttgattatctataaatttgctcaaagaaataagtataaaattgggaaaatgtctccaaagtcaacataaaatttaatttcttattgacgaaaattgtgattatgaaatttcacaatatttaaaaaaataagaaatttaaactatttcgctcaaaatataatcttattcgctcaaaaaaaaagaatatctatttatttttataataattgatcgatataaaataatttactaaatataatttaatccatatacaattttatatgtgttgttacttttttaaatattggcacagcaatttttggtataaaacaaaattagttaatttattctaaaaataataattataactgattgatgattactgatggaaacattgtgttggactttttgacctttattttattttttgtatttgtttggcattatgtttaattatttgtgaccgtttttttcccaccttttcaatgattcgaatttaattgtattagttttatgttttgtcttctccaaaaaaaattgtttgtgtttcttttatttaatttggaataaataaactctctgaaaagccttgacaccttccttgaatcccaaccaaaagtagaagaaaaatctcatttttatgttcttctcgcaaagtaaaagcctattttttcacgattttttttatcttttaggcgtgataaatg

SEQ ID NO: 118714 - DNA, 611 bp, Heterodera glycines
ttttgaatttaaaggaacaaagcaagtttatgtgcggataataattaaataattcagcacttaatgaattgaaaagcaaatatttattaatgaaagtcaaaatattatcttatcaaataaaactgcataatgaactcaataaaatatatttatttcagttatttaaatgtttataaattttcaatacattaaaaagcaataaatataaatatatttctttctttttaaaacaaagccaaattgcattcaaattattttaaaaaatttcccccggcggcgtctagcggcatcgcgcaaaaaaacgcacattttttccaaaaaaattgtataaatttttaatttataccttggaatttttaaaactttaaacaaattgtttattgagttaattcaaaaaatcaaataaattcgaattcaccgctttgtttattaaaatatatttttttattcaattaacaatagtttaaagcataaaaaatttaaataatttttaattaaattaaatatgagaaatccgaaattaagaaatacatataaatcattcaaataacaagaaaaaatattgaatataaaattcttttatatgataattgaaatttcttcaaaaaatg

SEQ ID NO: 118715 - DNA, 1003 bp, Heterodera glycines
gataatcattcgggatgaatttgtggtaatactggggtttgttccccccccccctttttggcaaaaatttaaaattttaaaaagtcaggtaaagcatgttttctggggttttcggggccgctgatcacgaattcggtatccatttcgcccaattccgaaccccgaactcaaattcgaacaaaaagtcgaaatttatttttcatcaaaattcaatttattgcaccaaatctattcaaatgcacgaaatcaacaacggaaagaatagattttacaattactcacgaggatagatttcaattctgagtgtaagacccagtcgcggggtctataaaattctgtgaatgattcacagtaaaatgttgataaccctggggcagcattgagatggaattgtagccccgcccaatgaatgaccatttcgtgcatttgaatagatttggtgcaataaattgaattttgatgaaaaataaattttcgactttttgttcgaatttgagttcggggttcggaattgggcgaaatggatgccggattcgtgatcagagaccccggaaaccccagaaaaaatgttttacgtgacttttaaaaatttgaaatttttgccaaaaaaggggggggaacaaaccccagtattaccaaaaatagtaaaattttaaaaagcattttttctggggtagaaaaatacgctgatcacgaatctgaactcagattttgaaaaatcattgattttgtctatggctttttatcaggtacttgattttttccaaaaaatttaagaaaattaattagcgtaaaaaactcataccagatgttgtagagcttaaaaagagctttcgaatgagctattgaatctttacagatgttaagtatttaaatcccaacttatgattaattaactaaaaataagtcttataggtaagttcgaaaatttctttatcggtacgctctcgactagtgattaacattttacggctatcttagcttcctaattgtttatgaaatg

SEQ ID NO: 118716 - DNA, 1003 bp, Heterodera glycines
tcggggcagtccccccgaaccgatgcgcccagatttatggggagaccgaattcttcgggaatagcttccctatagtctgtactttaattctgcgttggatttttgctccccataattgtttgagtaccccaaacggacacttgaaaaaatcgatttttttgttttcggggcagtccccccgaaccgatgcgcccagatttatggggagaccgaatccttccggaatagcttccctatagcctgtactttaattctgcgttggatttttgctccccataattgtttgagtaccccaaacggacacttgaaaaaatcgatttttttgttttcggggcagtccccccgaaccgatgcgcccagatttatggggagaccgaatccttccggaatagcttccctatagtctgtactttaattctgcgttggatttttgctccccataattgtttgagtaccccaaacggacacttgaaaaaatcgatttttttgttttcggggcagtccccccgaaccgatgcgcccagatttatggggagaccgaattcttcgggaatagcttccctatagtctgtactttaattctgcgttggatttttgctccccataattgtttgagtaccccaaacggacacttgaaaaaatcgatttttttgttttcggggcagtccccccgaaccgatgcgcccagatttatggggagaccgaatccttcgggaatagcttccctatagcctgtactttaattctgcgttggatttttgctccccataaatgtttgagtaccccaaacggacacttgaaaaaatcgatttttttgtttcataaatatttttttcagaaagtgctctaaagcgcaccaaattttatttacaacttaattttagcactctgatgctttagtatcaaaaaggaagatggagaaaaaaatttttaaaaaaattttccttatattttggttatatcgttttgcttttggtggggtgcttggaacagtggaatcatg

SEQ ID NO: 118717 - DNA, 563 bp, Heterodera glycines
attttaaacattttcatattattgtttttttattgatattttatatattttatgaagatttctttgcttgaagcacttttataataaatttaatatcattatatagttaaaattaaattttcgactagttggcgaaattagttggcgaaacgtcagattttggctgagttggcgaaacgtcatgttggcgagatgtcagttggcgagatgtaaacttggtgagatgtcagttggcaaaatgtctgattttggctgagttggcgaaatgaatgtttttggctgagttggcgaaatgtcagttggcgaaatgtcatgtagcccaccaaattagctacaagatgaaaaggtcccatgtctctacgatttctccccattgagaaaagagaggtcaaaaatcaagtatcccgaaataattttgttggcgcgctgtcaaaatcccgctgcgtcgaaatcgcgccaaagccaaaatgagtcgaaatcccgccaaataaaaattagcgaaaaagtcttaaaattacattcctaaggcttcaaaatatgaaattcattaattgggaataatg

SEQ ID NO: 118718 - DNA, 149 bp, Heterodera glycines
ggtaatatattcaaaaatacaattaatttcccatttaaaataaataacaataattttaaattcattttattgctaattttaattttattcaaacataaaaatgattatttgttaatgatagttaatatgattcatttgttagggtgatg

SEQ ID NO: 118719 - DNA, 1003 bp, Heterodera glycines
tgtgaagagctttcgaatgatatcaaaaattgttggattcggtcaacaatttaaaaagttacgctgctcaaaacttggctgggacggagttggcccgttccgccccaatcttgggtgtcaagccccccccccgcccccttattttttttttgtatgccctgcgtttccggtaagtccctatcctaattttcaaaaaaaattaacattttccattaaatcactagggatgctaatcttatgtaacaaaatttgcgaattatgtaaataaaatatgtataaaaaatgctaaaatatgtatgaaatatgtacaaaaacccccaaatatgtactaaaatatgtaaataaaatttttttaatggttattttttggaaaaaaattcttcgtaaaaagtgaaataggcacaaaatgccataaaaatgaccaaaataggcttagaatcacatttgaacattttacagattaatttttgatatatcattttttgaaaaaaatcgatttttttggatacattttcaaaaaaaaattttaaattttttacaaaaaatttctataaattctcaaaaatcctcaaaatatgtaaaaaaatgaaaaatatgtacgaaaaattgcgaaatatgtacgaaaaagtccaaaatatgtataaaaatatgtacatatgtaatatgtagaaaaatccgaaaatatgtaaataaaagtcccaacttttgttcgcaaacacaaaaaagaaagtgattttcctactaattaggttatggagaatctaggaaaaaatatgtatttacataaaattagcatccctataaatcaccaattatgataataaaatttattaaatgcattcccactgactcagcaccatccatcccatttttctccactcggttttagaattggcggaatcactttattaaccaaaaataaaataaaagtgaacaaaataaaacgaaaaagcattctttttaaatatttgtattttcaaaaacttcaaaaacttccaaaatg

SEQ ID NO: 118720 - DNA, 224 bp, Heterodera glycines
ttgtcaaccaaatctaattttcttgatatcattcgaaagcccttcacatgctctattagcctgcaaaatttcgaaaaatttcgttaaggttcaaaaaagttatggccaaaaaagctgaaaaacccggtttctgatgtacttttggtcataagtttgttgaaaattaacgaaattttttgaaattttgtaggctaatagaggatacttagggctattgaatgatg

SEQ ID NO: 118721 - DNA, 211 bp, Heterodera glycines
tttatgaaaatttaaggtttataaattaacgtacttactgaattagtacccccccccccctcttttagaaccccctttcgaggggggttgaaaatagaaccccgggagtaataattcagtaaatacggcatttagatatcttttttaataatttttgaatcaatttttgaaaatatttgatcacaataggacagacaaacagtaattaatg

SEQ ID NO: 118722 - DNA, 93 bp, Heterodera glycines
tacctagaaaataagtatttcgaaaatcgataaattctaagatcgtaattaaaaataaatgatttttagaatcgagaaacaagaaacaaaatg

SEQ ID NO: 118723 - DNA, 400 bp, Heterodera glycines
actttttgtttatatttaattagttttttcattttttaggtgtatatttaataattaataaaaaaattagccaaataattgcattaattaattaatttttttggtgttaaaatttagacgacattaaaggcacatgagcgagtgcatgacataacgcaggtattttaaacttaattttatattttaatttaagcgtattatttatttttccgtaaatttaggcgtaatttaaatttatttattttttttgtaaatttaagccctatttatgcaataaatgcggcgaatcatttcattacatgtgcgagcttgaataccatgcaaaaacccatctgcgtaagcaattttaatatttttaaataatatttaataaaaatttagaacaaaaaggctacaaatg

SEQ ID NO: 118724 - DNA, 260 bp, Heterodera glycines
ttttgaattaattctaaaaaaaggctgcaatgatttttacttttatttaattgttaaaaatgaatattccgctgattctgtgcctttttatcgataattttaaaaaatagacgcaaaatgatgacctaaaagtgtgttaaattggcaaaaatttgaatttattcccatatttattctctcttttatttgcctccagacaaaaattgattaattagggcaaaagatggatggataatctttggttaactcaattaaaaatg

SEQ ID NO: 118725 - DNA, 783 bp, Heterodera glycines
agaaggaaacccctggctggggggaacttctgtcatggacagaaattttgttgaatccatatataatcttgatcgtataaatttcgcttttccttaaaagatttggattgggaattttgccctagtcggacttttttaaaatatggggatcatcttcccacctaatccctgcgtttttcccatttttaaatatcttcgtggtcagtacgtagcgtaagccggtccttggtcatcaacaatttgccgaacgcccaactcaacggcccgcccatggatcagcttgtccgacggatggccgtataaaagaaagacgaaggaatgatgctcaccttcttccactacccttttccaaagtccaatttcttcccccaaaatttgcttttgctatccaattttcaaagatcgtattcaagtgatcatttttcatttcacatttcattttcttggtgtgtaataaaggttttgcgttgtaaaaccttgcgttcaaaagcaattgtgtgccatcccggccactcgaactccctgacattctcagggacggtcttaagccaatccggcaaattataataaaataaataaaaccaaaacaaaaactttttccaatcacttcattttcacataaaacattcatttcctaaaacgaatcaaaagttttggattcagccgcctcggttgacgtctgttctttaaaccgggtcagacgaagtcgaaacaaccgcagtcagcggccacaatgagcaggcgctggccattgacaagcaaaaagcggagcaactcaaaatg

SEQ ID NO: 118726 - DNA, 862 bp, Heterodera glycines
ttagcgctgagaatttgattatttttcttaaaaaatgacaaaaaaataacatttaattaaactaatatttctttttaaaataattatattttagttaaatgccttatttcatttaaatttaattatcaataaattaatttatctacactaattatttttgcataaaatcgtctgaactttttaagttaatttttgtaaaattctgttcctgtttcctttttgtagcaatttcctgtttaaaaaaaaataatttttataaaaagagtaattaaatctccgcatttttcacattttttgcacttttgcgtaattaacggaagcaaaaaatatttgtaaattttaccgtatccttccgtctccgcttccggcatttgcttaattaggcaattaattattcatgttatacccattttttgtgtcaatgaagcgaaccccatttaaacgaagaaaaatatttacaatgttcacaatacaatcagttttaaggttcataaatgaataacaaattgttaaactttttgaataatctttttacagtttttggaaattaattaatttttgaaaataataaagaaatattttaaatatttaatagaataaataatttttaaacattaaattaaatcagctcttttattaatttacgatgaaaattttggtgatagatttcaatttaataaaaaaaataaccaatgcctaaaatacgggtccctaatggattacaacataaataaattaccattaattaaaaggaattttctattaaataaattttgattatttcatttgacctttacaagtggaaataaatattatcaaatttattttttataacaattttttagaaaaaaataaataaatg

SEQ ID NO: 118727 - DNA, 292 bp, Heterodera glycines
ttgctgttgttgtcgctgttgtcgggctggctttgtgggtgcttgatgtgtgatcgttgagagcgttgcttgaagtgttgctgctgctgagtgaggagaatgtgcaaaatccacctccttatatacaaaattcgggtgcaaaaattcatgcagcaaaaaaagtgtataaaaggcgacggttttcttcacttttcaccagtgccagccagccttcaactcaacgcaacatcaacaccagtgcgcgccaagctcgtctacacatttcgtcgcgacaactcatcacttcatcatg

SEQ ID NO: 118728 - DNA, 106 bp, Heterodera glycines
aaaaagattggcatttacacccaaggaagagatgtccaatggcgtctcgcaatgcacggctattgggcactgatcagttttcacaaaattggcattgtgtcaaatg

SEQ ID NO: 118729 - DNA, 76 bp, Heterodera glycines
agcaatcaacaaagaacaaagaggacaaagagctggaacgacatgcgcatacggcagaaaaaagacaatcgacatg

SEQ ID NO: 118730 - DNA, 1003 bp, Heterodera glycines
attatttatcaagaaaaaaaatgaattttgcgttcaattcataaaagtatattctctgaatctccctttataaaagtttggggtgcggccgcatatagtaattcaatttaaaaattttcttgaaatttgttatgaaaatttcgtaaattgaagaaaacaaagcctttatagttttttcactccgtctcccctcccttcaaagtttttatcggttctcaaaatggtaaattactcaatttttaggtcgggttttcatcattttttaatatttttatttgaaattttcaggtttattaaaaaattttatttattttttttttgcatttaccagtagaagaacgcgccgacgagaagaaaagcagcgattggtcagcaaatcgcagtacaaaaggacagcaggtaaacgccgtgctcaattgttcggggggggggggggaaattaatttaagaatatttattccatttaagaaaattttgacagttccgtttttgtcaagttcttgtctcattgtcagtggttatgaacggaaaatattttggaggagattcggctcctttccacgccaacttttaattttttttaagaaaaataattctatttcattaaaaaataaataaattttgaaagatgctttacagaaccctcccaatccctcttctaaaaattgaactttttacacccaatttccgaccgaggaacacgtgggtgttttgattaaattaaatattgattgcttggttgtcaattaataatggttctaattctttattttatattttcacaaattaaacaaacaaaattacgcgcgcacccaaaaaaataatttagtatagaaatgtgtccagcagaatgtcacgaccagaaggcatgctgataaccagaaaaaactcggaggtgaaatcaagaaactcctttttttgctcttacaattaggcgccaaattattttttttaattttagtttttcaaaaaaattctggaacggacttttgtccgtgccatg

SEQ ID NO: 118731 - DNA, 754 bp, Heterodera glycines
gcacataaaattcactattttccaatatcttttctctgcataaatcacactttttcttcctcaattgtccaacactgatgaggcgacaaattggtcaaaaattgacgaggaaggtgagaattttgagaaaatattcggatttttaatgggagggttagtaaatttttttcgtactgggaatgacaatttaattattttaaaacgatgacttttcgcgtttattttgtgtttaaatttcatattcgttttgaggttttttgttcgttgggagttgcttttggatattctccgtttttgttttttctccgtgttttaaaaataaattgttcttcaaatcgccttaatttgttctgatcaacaaagtgtttgtcatcagacgactttttgactacgaggtgcggccaatttgtaaggcaacaattctcttcgtcttctctccgcttctcttcaactccgttaaatcttgactaagcattcaatcttgtccccgtaattgtgtttctgagttttaattacctgaccaccccatttccttccccaaccgtccaaaatacagtcagtcctaccccatttcctatttccgcaatcccggagaggtaagacttggcgctcctgggttacgacgtaaacccatccttttggacagcgtttttaaggcgctgacgcggacaaaagcatttgactgggtgttaattttggaaagtcttgactcaaatttttcaggtttttgttccattttgcagtaaaatgaatg

SEQ ID NO: 118732 - DNA, 64 bp, Heterodera glycines
ggcaaggacaaaaaattggcatttttcaaaaattttcaaaattttgttaggcctcgtttcaatg

SEQ ID NO: 118733 - DNA, 629 bp, Heterodera glycines
tttttaatctaatgctttattaaaatgataaatcgacaataggaagggcatatttatatgagccgagctcgtaacaaatacaaaatggggaaggaaaagtgatgaaattgagtgaaatttaacacttaaataaacccatcttggcctgatgagccgcgcactgccacccatgaagcacaagacgacagggcacctaaacaactctgggaattagacaagtcaaaaaagcattacctcaagatctaaaaaacaaattaacaaaattgctgccaggataaacggtactctgtaggtcgagctaccgccctggttaacagcaaaattggaaatggaaaatttttattaagaatataattaagggcaaggaacaaatgaaaaattctctgtacagtctcgcttttaaagttgctgtctccgcccattaatcgataacttttcggcgaatcaatgcgcatttccctctgggaaatgccacatggtaacagatgtttgcaaacaatcgataattttcaaagccaattcaaattttcactgattcccgagggaacggtatcgccttctggtatcatgcatcctaaagccaacctatgcatgcatttattcattcatttctttttttcactacaatg

SEQ ID NO: 118734 - DNA, 168 bp, Heterodera glycines
ccccccccccccccccattatttttttgcttcaaatttttcatgaaattttgaatttttccaccccctacctatccctccatttttttttttgcagttcaatttccacaaaaagtgctggggccaagtgccgacgttgtgcgaaccggagcggatcaccagcgaaatg

SEQ ID NO: 118735 - DNA, 875 bp, Heterodera glycines
cattattttaattaaaattttaattttaaagaatattccaacttttttctttcatgttaagcatcctaaaaacccaaaacttaatcaattggtcattttttttacaaattctgttaacaaatcgcattaaaaattacaaaatttttcccggcggcgcctatcggcaccgccggccctccttgttccccaaaagtcttgagaaaaacgtgccgcgaaaaaagcggtgttgaaagcaaaaaaggtcattgatttacattaatttacatggccggagacccttcgcaaaattagaaaattggctgctgaccccttgttttgcaataatctgaattttgaggtctatatctgaattttagtgttctatgtcctgaatttgaaaaaaaaaacttggtcaacctgaatatacatatacttctgaacaattctaatgctaaaaaacaggtactcgcgcgaaaactgaataaaaattttgtatttggaaaattttgtccaaaaatttttacgttggaaaattaccggtttttaccggtaccggtaccggtaccggtggaaaaagttggtaccggtaccggtaccggtttttgcagtaccggtcagtaccggtaccggtttttttgcaattaccgattaccgagcaactctactcaaaacttgattaatttttgcctttatagtttttaaatttacaaattttggcgttatttattttaattacgaaattatattaatgaaaaatttagttaagccacaaccacagctcttgcctttaacataaaagcttcactaacacattattttatttatctttggttaatttcttgtcaatcaatcattaaaatttctatttttagactgattttttgaaaaaaaaaatg

SEQ ID NO: 118736 - DNA, 399 bp, Heterodera glycines
gtgcaagcaacacagtacggcatctaacgaacgtaaatacattcgaatttaaatcatttcaataaaaaatttaataaaaaaaatttcattttttcaaatttatttttattattatatttaggaccctcttaacaatttgtcgctagcggcagccgacctgccgcaggaagtaaaaataattaaattataaatcaaaaacaataaaaaaaatttttacagtatcaatataactttatgttttttgactaatttgtaaggtcctttaaatctttattaattaaaaaaaaagaaaattcggtaagtgaaaacgaagcgaaaatgtaatttgaaatatgatgccaaaaaatcaaatcatttttatgtttagcattgaaatttcaggaaaagcttgtccaaatg

SEQ ID NO: 118737 - DNA, 238 bp, Heterodera glycines
  unsure (1)..(238): unsure at all n locations
actgtccctctctctgcctctgcgctgtttctccctgtttcatatctctaggctccgccatatttacgtggtactaacaganaatcactcgccaatttgtcagtagctgtttatattgttcgtttatcacttacgattaataaattactgtatttctggcgtttgtaaacaataaatacctaacaaacaagtctttgtgttcagcttgttactgaagtataatccaacattggaaatg

SEQ ID NO: 118738 - DNA, 643 bp, Heterodera glycines
tcatcattttttcacttttcgcgcaacgacctagcaccacagagagccaagggcaaatttttggactcatttttggcataaatttctaattttttagataaaatatacaaaaaaattgcaaaatatgaaaagtgagggaagcaaacaaaaataataataatactaataataataatcatttgaacgctacctaacatcatgtaaatattagcgtcaacatttaaattttcccttttttatgaattactgaattaattgctttagtaaagtttataatttttagactaatatcaataaacatattttttaataattttcatcatttcctttcatttaactcattttagcaaaattttcaacaaaaaacaaacaaataataagcatatacatttacgtgtaaatattaacaaatcgattagctaagctagagaattgctttttaacattcaatgttcattttataataaaatattacatttatttttatacaatattataataatttaaaaaaagtaaatttgaaacatattaaatttgtgggataatttcttttttttgatgattattaatttcccatcaattgatctacctattcctaatagtttaatgattattaaaaatattttttcattagtctcagatg

SEQ ID NO: 118739 - DNA, 176 bp, Heterodera glycines
agcttggaatctagagcccgatcactgattacagaatgggttccccagaccaagcaaagacaggtcaaaaccgcccgaggttgatgaaagtaattttcgggtgctccaaacatcagaaacaaaccttggcacagtggaacaaagtgcgcgcgcaaatcagtcaaaaattggggatg

SEQ ID NO: 118740 - DNA, 875 bp, Heterodera glycines
  unsure (1)..(875): unsure at all n locations
tttatggcatgagacatttaaagaaagggnncgattttggaaaaatgcaaactttgtttttgtgtggatgaacaactcttattttgtgatcctaacaaataagctattaagaggtctaattttgatctattctaaattcgatactgaccattttcaagatgcaaccgaattcacgattcttacatacctatttaaatttgtaaagaaatgtaaaaaaatgtcccattaaagataaatttaaattaatattaatagaaaatttttacgccaaattaagcacaaaaataagcaccaaactagcgcaggagcgctcgattcgctcgcgccctcgcgctagataaatcaaaaaatttcttacgtttctttctcttcctctccaatatactctatttcttcttctctctagcactctctctatttcccccgctttctctctcccttttctttcaaactctctctcattctccctctctttgtctgtatctctttctctctctctgttactccctctctctttgtctcactttctttctctctctttcactttctctctctctccctttctttctctttctctctctccctttctttctctttctctctctctctttctcctctttctctctttctctttctctctcactcctcttgctctctctctctttctctctctctctctctctctcttctctacactctctcctttccctccccctctatgtattgtcattttttttttgaattttccccttttcaaagttctcccagtctttccaatccgagtgatcgacaaagcatcgactccgccctctccgttttctcattcgcaaattccgctgcttcgatcgaccgaacgcgcgcactttcattccatg

SEQ ID NO: 118741 - DNA, 473 bp, Heterodera glycines
cctggaatgttcaatgatttataacttttttatacttaagataaaaattttgtaatattatattctaaagaatacacccatagctattaaaagataccatgaaatattaatttggctcaacttgggccaagttatgaatttttatttgttacatattttttgtttagaacccattggcggatttacgaaacacgctggcggttttacgaaacgcgctggcggatttacgaaacgcgcatgggtggcggtttttaggaaatgcaccagcaccgtatttttcatgtgaaaatccggatttccaatgataaattacaattgtctaatactagagttgagcgggaccgggaccggggcgggaaatcccgggtttttcaggtcccggtcccgatcccggtttttggaaaaacagaaatcccggtcccggttttgccagtcccggtcccggcgggactaaataagcactggtaagaatg

SEQ ID NO: 118742 - DNA, 76 bp, Heterodera glycines
tgcgcctgcctatgagacgggttcgctgcgacggttcgccgacggacggacggacaccgtccgactgccaaccatg

SEQ ID NO: 118743 - DNA, 319 bp, Heterodera glycines
aatatttcttcgttttttatgccattttaaaattttcaatttttatgccataattaacggtgccatccctccatttactttttgacaattagccaatctattaatttattcttcgcccatcagttacaagctgtacactttgcatcgcaccgttggcaattgggtggaggccgggctgacgctgaaacggcacgccgatttgttgcgctggagcacttcacatcggcccgagtcgttcctttgcgggacggcacggaaaagcggtgggaccgagtttggcacggagttggagttgaaggagtacatttacaaggagatg

SEQ ID NO: 118744 - DNA, 310 bp, Heterodera glycines
ttccgaccggcggcacaggtcaaacagactgggagagaaagcaacgattttacggtcaaaaatgaatattacaaggaaaaaacatttaaaaatgaaattaaactgtcttcgagacagaggatggaagcacagccaggggaaaatggccggacaccgaaggtttctcgaacaaacaattttcctccattaagcatacacttttccaccataattaagtgaaaagtggcaagaatagggagggaaaagaaaatggaggaataaaccagcaaataatttaaataaatcttcgttattaaacgtgccaaaaatg

SEQ ID NO: 118745 - DNA, 703 bp, Heterodera glycines
atgcggtcgaggaattctctgttagggacttggatattcaaagtcgaggaataaattgaagtttcattgtagaaaaacgaagaattaagtgaaatgttactttccattcgctaaaaaaaattatgagaaaaatagtcagtaaatttttcttcggtttgcgctagttaaagcgtgacttcttcccattagtctgattcttttaagaaagtcggcaaattaactgaagaaaatgttgtcacgccaaccacctcaataaacgcaaaataattaggtatgtaagaataataaaataataatgtactgtggtgagaaattattacattattaaattattctcataaaaataattaacgttgtgcttccacaattcagttgaacaaacgaatgaaaagaatgggaataataggaattagaagagagaattggtggaacagaagcagaacccctgaggggtttgaattgaaaagggaaaagaatgaaagagaaaagaaatgcgaaaggaatgaaagggaaggaagagagcccattactgacacttccattccactttaaacatttgcttaattctttcacccgtcaaaactaacaaatcaaacaaaaagcattaaaattaaaacacaacacaaattcatattaaattaacctagtaactacctaaataaatcttgtgtttatcaaacaaaattgtatttcttacagaatg

SEQ ID NO: 118746 - DNA, 323 bp, Heterodera glycines
attggccaacttggcgagactcgcaacaacgacttgaacatttctggcgacgatggcaccgggaatacctcatgaccttgcgagagagggccggctggcatcatcctcaacgacgagtgaatgcacccggggcaccggaagtcggggacgtcgtgcttgtggaagacaaattccaccctcgcaacttatgggccatggggcgaatcgaggagctcagaggttcagacggtcacacccgcagcgtgctgatcagaatggcaaatggaaggatttgggggagacccgtaagcaaaatttgccccctggagagaagtccagaaatg

SEQ ID NO: 118747 - DNA, 75 bp, Heterodera glycines
  unsure (1)..(75): unsure at all n locations
attttggtttgtatcgatgtgcttagtagaaagatttttacgncagagtctgagtcgaagaaaagcgacnacatg

SEQ ID NO: 118748 - DNA, 109 bp, Heterodera glycines
ttttacagctccaaccgatgtgttatcaaaggacgaagttaacgccatttatcagttccattcccttccaaattgtcgtgagatttacaatgacggacttttcccaatg

SEQ ID NO: 118749 - DNA, 159 bp, Heterodera glycines
  unsure (1)..(159): unsure at all n locations
ttccaaaagtgtttggtttgttttgaatggcataaatatggtacaaaaagccnaaggcattgnatttgaatcataaaatgccattggctaaataacantgaaatggaataaagtgcaataaaaacatgaatgaatcatcatttttcagtctttttgatg

SEQ ID NO: 118750 - DNA, 107 bp, Heterodera glycines
ccttaaacatttaaaattttttttttaatttttcaaatttttttttaccacaatcaccgccttggtaatttcatcattctcctctaggccccacagttcggtgaatg

SEQ ID NO: 118751 - DNA, 406 bp, Heterodera glycines
ttcagaaaaaatgccttgtggtgaaaacaatatttcacatttcactccataactttgtgagttcggcacggatcgagaccgggataagaccattggaaagagcagctcgagctctacaagaaggtatggaaagaaaaaatagttatttctgggactttttcagaaatcagaattaattctccaatgtggcccaaattttaggcccccagccacagccctttgcttctcccagttttaagtcttggatttgtcaaataaattcaagacttcaaattaataatcaaaaattctcttaaaatttttttgaacccaattcaaaaaaggaaaaaaatttgcagtcaaaaaattattcgaatttctccaattttgtttccataatttccgaaagttattcggtatcataatg

SEQ ID NO: 118752 - DNA, 175 bp, Heterodera glycines
catccttttgttgtgcaccttaaattatgcagcaattttcggccttattttatggcgtcatcaaacaaacaaaggatcaactcagactcaacaatcaggccgcaaaatgtcctaattattcatttaaaattcaaattttaatttccacattttagcggcttctgatcgttcaatg

SEQ ID NO: 118753 - DNA, 290 bp, Heterodera glycines
ggtaattatataatacacaattaaattcaattaaaaattatttcatttaaacagaaaaattaaattaattcaataatatttagaatttcattttggcaatcaggatggcgcattaatttcagacaaaattcgtaggcgtagtgaccccgagagaggaatgttcgtttttaaacaaatttggcactcaaaattttttttgtttaattagaaaattaattgaaattgggactaccaagaaaagcatatgggaagttcaaaaaatttttgatcaattgagtgatttttacatg

SEQ ID NO: 118754 - DNA, 1003 bp, Heterodera glycines
  unsure (1)..(1003): unsure at all n locations
ccgtcgtccatttggtctaatccgtttcttttttcttcatttgggatcattgccttctttaattatgccatttttcccctcaggcgaaacgtttttacgcgtgggacgaaatgtcggcgaaacgttcgctgatccctccggagccaaacagtgcgacgaagaaattggagcaaatggaaacggagcaaagcgcggcggaggaaatgggcgaaatgccgaagttggaaacattttccgtttatatttgttaatttctgtttcctcttcatgggtggaagcgttctctgcagcagcgtcccttccctttggcacggctttttccgcgccgtcttcaagccaattgaacggattaatagtcaaatgaataaaaaaagaaaatgatgaaaacggcaaatgtaacccaaaaaggcacaaatgtttccaatttacttttattttttaatcccccattatctctttcatcgtaaaagaatttaagcttttcatcaaagtttgaaaagaattggtggacagagaaagatgaaaagcatttggcactgagaaattgagaagatatccggcacatttggggaaagaccatttcatttggcaatcacttaatgagaagaaaggggctaaatgaatgatgggaaagggggagaagagcattctgagaggggagaagaagagaaaagaagagggatcggatgaacggacagagggaaaagggaaagggaaataaggagggatacgatagtgccaagggggggagcaaagggaaggcaaacacggcaacgatgccaaggagtgccaagnggcagaggggaggggcggggggagcagaagtggcgggggtcattcactcccanattgagcaacgaatctttcccccccccccggcctatcgcacacaaaaattcccaacgtttgcgacgaaatgaatttcaatggcacaatttcgcatactttttcgctagaacttctctttaaaatgtgccaatgcgcaacgaaagcaaaagaaatg

SEQ ID NO: 118755 - DNA, 518 bp, Heterodera glycines
cagatagattttgcactaaaaatcgtcttttaaaatgaacacaaacaatgtggccgtcgcggtttgtgctcttttttgtgccgttgttaaaggcggtgtcatgcggtcggaaacagcaccactgctaattgccgagggtagaaaaaagcaaatttaatttaatttaatttctgccaaaaacaaccggttttccgaatatctaattaaattaaagttgatggtaatggaaaacgaatttagaaaccaaaaatgttgccatggtggaggcggtgttgccgaaacatcgcgaaacggtaatgaggattcaaatgggcggttaaatgggaggtaaaaaattaaaaatttcataaatggtctgagaatgtgacagcaaaacagcattcaatcgacaccaccggcccaaaattaccttaagattttcaaaatatgacctaaaaatggcaattttcggtgaaaatttgttataaatggtcaaaaattccaataaaatttattttttttagagtgtgcgtaatatg

SEQ ID NO: 118756 - DNA, 505 bp, Heterodera glycines
aaaagtattctattttaaataaaaagcttattagtcattttgtagaacgttactttacctcaaaaacggcagaaaattcgtttcgtccgttatttgcacagttgcgacaaatttcagaaaaggttttttttcaaaaattaatgggtaatgatcgaaaaaagttcaggatacattaaaccaactcgccagtaatatcggaggtaaaaataaacaaagcgaaaaatgcaaagcactcctcccccattattatagtttttctttttttgtgaaaatctgttaacaaagcacacccaaaactccaaaattttccccggcggcgcataacggcaccgccggaccccctgttcccgaaaagttttttggaaaaagcgcgccgaaaaaaacggtttttgaaaagcaaaaaaaaaagaggtcatcggcggccgaccccccttcgcaaaaatttttaccgacccacccccctttttaatgtatggttttgtttattgtaaatattttagaaatg

SEQ ID NO: 118757 - DNA, 65 bp, Heterodera glycines
cgaaaagaacaaagaacaaaaatggaaaaaacaatgcgaaaaaagaggacggcgaaaaggaaatg

SEQ ID NO: 118758 - DNA, 340 bp, Heterodera glycines
  unsure (1)..(340): unsure at all n locations
tccttattattgttgttaaatgttgatattatatcctctcagatagagagnaatatngatatgnaccagggatggctcttaatttcgcttatttccgaaaaaagtttaggcctcggaattccaaaaaaaaactggagcctcgaaatgccgccatctctgataggtgccttgcccttttgtgtttttttctgagaagctttattcctcaatttcatttacgtttccaaataaaatggttgttatattcatcgaatttttttcaaattgttcgtctacaattgaatttttatgaaaaatttgtccatttttaatttgttagagcaaaaaatcggcgaaaatg

SEQ ID NO: 118759 - DNA, 388 bp, Heterodera glycines
agttatatatatatggtcaaattattgttaaaattgatgatcacggatcaaatgttacgctctgctctctctttttacgtgtataaactaaatgctcaaaaatgctgaaagtttaatccttagacggtttgtccattttattagaatttgagaaattattaaattaagcattttgattttccaaggagctgaaaaaaatcaaacattcgtagtcctagtgaatttttttgcattcttttcctattggaaatggtattcaaatatttgttattttcttcatacagaaaaattttcaaatctttccattttttgtaattaattttttatgacttaataactccgtgtttgttgttgttgtataaattaattagagcacttatgcagaatg

SEQ ID NO: 118760 - DNA, 1003 bp, Heterodera glycines
agcaatctgactccacttttctccatattattcgacccttttaaaaatcacccatttaagttaaggggaaccgaaattttttcaaattttttattttaaaatttatttattttttaatagcttttaataattttgaatttttcattcatgttgggttaacataaaaaaacgcagcacgcgcacatcaatcactaaactgctgcctcaacatggcacatctcaattattcgtggatatacaccaccaacccacgcccatggcactgctttatttcatccactactaagctataacccattcattctttcatgcaatttttgcatagattttcagtgatttaattagattttgttttataaaaaaaaattttttaaatattaataaaaattattgtacaatttttgtttgaaacttgagcaaattagacacgattgaattaaaaagacaaatgacatcaaaaaaactttctgctgatcactagggattaaaagaatgggtgcaacccaaaacgtcgccggaagactttttggaccataactttgtttattgtcaatcgcattaagcattcttggtgttgtccgaaagctcccatgtgtttatttttatttgcaaaatttcaaaaattttcgttaaatttcaaaaaagttatggccagaaggaactcaaaaacctattttttcgaacttttttttttttgctctgaatttttgtacatgaaaaattatttttgaaattttgcatgttgatagagtttttcaaatgctttcgaacaataccccgaatatttcatttgttaaatttttctcaaaatttcttcaaaaatccattttaaatgaatgggttgttctaatagaggttttttttttgaaaaaataaataaaattaaaaataaaatatgcattaaaaatatatagaaatatgaaataaatcaaccaatgcaaaatttttaattgtttttacaattttaataaattttataaattattactttagatttgatatg

SEQ ID NO: 118761 - DNA, 1003 bp, Heterodera glycines
ttctttctactaatagcacttgataagaagcgagaaaatacaaattgaattaattaattatttcctgtttgttgaaattgaattgaattaatcagtaatgatcagttggcaagtttaaatattcatttcttatctactctaattgcgtaacaaacaattaggttttgattgtgtattccaaacagtcgatcaaaatcaaaagaatgaaaatgtgatcaaacaaaaaaaaaattgctcctggcccttatcagcgagtgacgttacgccaaaaaaacgaaaattttgttttttcttgagttggtttggtttggttgaattgtatttgttcgtcaataaaacgtcaacgaaaaaacaaagcctcaaagaatgacaccgttgtgagaaatttcatgtgacgttgaaatttgaaacttcaatcaacttcttattttaaattaaaaaaaataaatcctctttcatttagggaattttttgtgtgtaaataaacactaattacctaattaatattttattaattaataatgcaacaattttcaatttgatcatcgactggctgtacatatatccttctatgtcagatcatccacgtgaagagaaacgaatttttgagaaaatgtgagataaatttgtataaaattctaattttaatgccataattcgttaaacaaaattcagttttatctgcaatgacattttgttggattcattgcccttttgtgggcacgcaaaaatcggtttggaatttgcggttgtctcctatagatttgatgtagtggtggacactcatcttaaacgaagaaaatggaagcttggaagtttgagaattgaacgttccagcacgaatgacggagcggaaattgtcaaatgtaacagtgacaagacagttaaacggttgccaattccattaaagccgcttcctcccaatttgatcggtttcaagcggattgccgtttagtgagttttctgatcagccaaatattgattgattccgatcattccaatg

SEQ ID NO: 118762 - DNA, 191 bp, Heterodera glycines
aaaataatatatatgaataaattaattaagggctttttcgggccagtttgcaatataggtgtctgtgtggggatgaaaaattaaaaatgcacctggaaaaaggtacagggaaaaaaacgtaattaattttttaaaaactccaaggacaccaaaatgctctgtatatttcgtcaaaagtgcaaaatcaaatg

SEQ ID NO: 118763 - DNA, 124 bp, Heterodera glycines
acggcgttataaccgccggccaatgctttccattttttccaaatatggtccattagtaattttgcgaaatgcttattagcaaaacatggattcacctatttttgattttcttctttcagatatg

SEQ ID NO: 118764 - DNA, 208 bp, Heterodera glycines
tcagccatttcttttttttgctaccgggtcaaaaattctctcattgccagacggcacaacgtcatcccctgattttaagatttagctcatcaaggttttttaatgataaaaatttgtctgggttcgatctttaaaaaaaagttgtaaataccaaatttgctcaactttagggtttcaggttcctttttggcatttccagaaccggatg

SEQ ID NO: 118765 - DNA, 1003 bp, Heterodera glycines
atataagaaagtataaaggaaaatatttttagaaaaaaatggtgatcattgaaattgtttttaaattaatttcacttataaaattaactcagggatgcgatctgtcctgatttgtaagatttgtcctgatttggagggtccaaatctgataaatcagggatgcgaaatgtcctgatttatcagatttgtcctgatttggaggtagcgatcaaattttgtcctgatttcttaaataaactcacatttttgaaattttatggcataatgtcactattttattaagaaaataaaagatttgtggcaaaatttggttattttttgacaaaaatctgttaacaaatcgcattaaaatcgcaaaaatttttccccgcggcgcctatcggcaccgccggaccctccgtccatcctccaaaattttttgaaaaacgcgccgcaaaaaaagtgttttaaagcaaaaaagtcgtcgcttgacttaatttaattgaaaaaattggccttttttggtgaaagtctattaacaaatcagaacgaaattacaaaaaaattttccggcggtgcctaatagcaccgcctgaccctctcccctcgcccattcctcagaagttttttggaaaaattacgccgctaaaaaattgcattaaaatttataatttcctccccaaaattgttacaatcgttaatgggaggtgaaaaaatataatatttaatacatttttgattgaataaattgtaaaaataactgttttgaagcaatgaagcaaaatgccctgattttcgaccccaaaatctgattttttgggctcgatgttctgattttgaaaaattttcgatcgcatccctggtataaatacaattgattttttcaattttcgcacatttttgacattttttttttgtttttagcacatatatgtatttcagcattttttaacacatatttcatgatttttagcactaaaaatccgagtttaagtgataatagacccgaaaatttatttaaatg

SEQ ID NO: 118766 - DNA, 315 bp, Heterodera glycines
tgaatctcggaatgctcagggggaagttcaggtgggtctgatcccgacagaagcgagaagggcaaaactcttctgatcagtgatcaatcagaaagaaaggggagggcgagaaaatggcagggaaaaaagcacagttaggggagagggaacggaaaggacaaatctcacaaatcactaaccaaaatgagtggggggggggagggattgtcaaattgtggcacattccattcgacattttccgagcagtctaaagggaaagtcccgcgtttattgaccagtggggacatccatggataaacattttcgctcagaatg

SEQ ID NO: 118767 - DNA, 343 bp, Heterodera glycines
agagggagagagagagcgagagagagcgagagagagagaaagagagagagagagcgagagagagagagagaaagaaggaaagagagagaattaaagataatcatgggaagagaaatgagactgggaaggagaataaaaggagaggcctaaggtattcatggagttttgggataaaatttgttgggcaaaaatggttcacataacaaaccggggtcaagctaagaataagcacccagaaagggtataaatagaacccgaagatgaaaattttcaaaagcagaattttagaatcaaaagcctcattaaaagattttattccaattacaaaaaatcaaaaacaatg

SEQ ID NO: 118768 - DNA, 895 bp, Heterodera glycines
ttggctgtatattttgttccaattgacttggcaaatttgccgaatgggtaaaatagaacaaaaaattttgcatgaaatgtaatggacaaagcataaaaagggacaaagcattcattttgtttgtcagcggacaaatggccgaaagaattgcggcgagtgaatgtccatttttcgtaatatttctcattttgtgatactcaaaaaatcacatttttcctcttcctttaccaacatcattttttcatgtttgaatagctttttatattttattttacattcactaatcattggccaaattgcaagaaaaatgctcagactctttttcacatttggaaaaataattcaatttaattccttttacaaattattttaaacattttaatataaattatttatttccattttttttattgttaaagtcttcgcaaaagatgattcaacaatctcgcttttcacaataaaatgttaaaagtcaggcaatgatatttctgttgctttttggctgattttgtgagtttgccaagcaataaaattgggtcgttctatcccaaaaagagttaaagcaatggaaatattccatggttccatttctaaacttttccttaaattctttctttttaaaaatgctttccgctgctttttttatgcctttgtttttcattgccattggccaattcctccaaatttctgatgccattgactgtttttcttgcgcatcgccggcacttcacaaccaatgggaggtccaaaaaataaattcaattaattaaattaattaattcccgctaaggcaactggacttcccgaaattccgccgcccgaccgtttcgcgttccacgcgtgcgatgggacgggcactgactataaaccgtgtgccgatgtttgcatggaaatg

SEQ ID NO: 118769 - DNA, 685 bp, Heterodera glycines
gtgcatatttgagcattttttccacaaacctctattaaaacggccgcctctattaaagcgccctttcggtttctaatgaccgaaaaattttcaaaaatattttttgagtattttctaataaaaaatttaaaaatttctgccaaaaataagtcagaaaatagaaaattctccctttttacccaattttcttcaaataaattaattttacttttattttgtatttttggttttaaaatgattattcatacgatatttagctatttcagagatttttatgcttaaatttaacaaatttgaagagatttgtaaaattttgccctcaatttggaaaaatttatctacatatttttcactttttatgtgtatattttgccatttttggtgcatatttcatgcgcatattttaagattttatatgcatataattcccaaccctagttattgatttcgaaaatggttcatgtgcaaaaattataatttaagtaaataataatttaaaaaattatatgataattttgtcaaaagatttatcactttcactttttcaatacaagacgtcccctgctagactgtgttcaaaaaatacaaaaaatttcatagaaaagattctcgaatcgcgtgggaaaatcctgctggagacttggggggattaatagagagattgggcgataattagagaaaaatg

SEQ ID NO: 118770 - DNA, 524 bp, Heterodera glycines
ttttatataaaaaattaaattttttgtttaagctcatttatcattggcaataccagctaataactgtataaacaagacatgataaatggctttataaccagtaagtggaaagaatgaatggatggaataacccagcctcatccaagacaatagctattctcatcgattttactattaatgatggtcattcctagagctcgacattttgaaaaaagcctggacctggacctggattggttattctgaagtttgagttctgctcctgcgtaagcatttttttcgacgaaaattgcaaatgtttcattaaaaataattccctcatctttttcattccctcatctttttcattccctcatctttttcattccctcatctttttcattccctcatctttttcattccctcatctttttcattccctcatctttttcattccctcatctttttcatcattccctcatctttttcatcaaattgaccaatcgataaacccttttctctcctccaaaaaatcccaaaaaatg

SEQ ID NO: 118771 - DNA, 104 bp, Heterodera glycines
aaaaatgcaaatttctccaaaaagaattgcttttcctcggtcacatcatttccgcagaaggaattcgccctgacccaaaacgatcagaggctatttgcaaaatg

SEQ ID NO: 118772 - DNA, 622 bp, Heterodera glycines
ctacctcaaaattagaatatttctgataaatcagaacaattgaagccatgtaataaaatgaaaatttgtattaataatgcgcaaataccagggatacggtgcattcactaaatagacatcaattgtgcctccaaatgtccattttcgcgttttgaagtgcgtgtcgacaagcccatcaaattggagcgaaaggagtgccaaagtgaggccgacttcggcagggcaaagccacgggaaaatgtgcagccaaatgtcgtggcaaatattgctaaaaaagcagaactaaatttttcagttgaacattgatgccgttggcgcaaacatttttatttgtcatcaaaattaaataaatttggtaagaatgtaaagcgctaacttgactattgcctgcgaaatttacagtagttttaaattctttttattatataattgactgtacatatgaattttttatatttaatataatttgcataaataaaacttatagtttaagtaataatgaattaaattgtaatttttgtcaagagatatatcgctttcactttttctatacaaatatttattgtgcactcaaaaacactaacaaaggaaggtcctagggtgtccgtggaatttccgaatg

SEQ ID NO: 118773 - DNA, 72 bp, Heterodera glycines
aatttcattttatgtttcagcgtgaattggttccgcaagatttgctaatttgccctcgccggtcccacaatg

SEQ ID NO: 118774 - DNA, 610 bp, Heterodera glycines
aaatattaaaaagggattaaaattagggcttccatttttaggaaaatgcctaaaattctgcgcacttttgatacgcatagataagcacgaaaaacgcgttttcgcttggtttgggtgtctacgatgacttttataatgcctaactttgcctattttggaatttttatgcttaatgcctatttgcctatttttatgactatttcgccacttttggcgcctttttcagaattttcggaaaagtcaatgaaaaatacacccttaagaattgaaaaaagttttcacaaaaactgattcccaaaaattaattatattttcttggcaaacattttggtttaaaattgtctttatttgaaaaaacgttaaaataattgaaatataagcaaaattaagttttttgattaatttttatatgttttgctacctaaaaaaaatgttatttgcctttttttgtgcctaattaatgtaatgcctattttgcggttttttctgccttttaggtgcctatttcgcgattttttttgactaaaaatggaaaccctaattataatatttaaattcaccaaaatctccggaaacaaaaaacaccgaataattatttcgtggtaaaatg

SEQ ID NO: 118775 - DNA, 352 bp, Heterodera glycines
ttgactcgaatattgtacaaaaaagagataaaataatttttttttttgtatatatgtgttaaacattaaaaaacaatttttacagcttatattaaattgaaacatcaatttaaatttttgggagattggattttttacaaaaccgcccgccgttagtgttagagaaagccggtagggccaggatttctgagcatatgcttgaatatttgtaagcattttaattttattaaatttggcatttaattattttgctttttgaattttttttttcaaaattaaagaatgtcaattaacgttgtttgtcggtttccgtttcttcgactgtgtttaggtatttcggtctgcagaaatg

SEQ ID NO: 118776 - DNA, 237 bp, Heterodera glycines
  unsure (1)..(237): unsure at all n locations
attttatgaaattacagtatcaaatactatgntagatgatggttttcatgtctaccgtagccaaatntaaattaggttgattcccattgaatttaacaataatttggctgttcgatcattatttgactcatttataatcaaatactttatacagcaattgcaattggtcttttggatgccatccgtcggcgtgagaatggcgaattgccgtgcccggtgaagaagcatcgacagatg

SEQ ID NO: 118777 - DNA, 169 bp, Heterodera glycines
tttttttttttttttttttttttttttgttgggggggaaaaaaaaaaaaaaaaattatgtttgttgggaagggagggaaggggggtggctgttggaaagtttacataatcagttttatttattaaaaggaagggaatgaaagtcaaaatcaattattcccaagaaaatg

SEQ ID NO: 118778 - DNA, 795 bp, Heterodera glycines
agtaactaacacaaattgcgctttcgcttagcccattgtctccaccaaaggcggggcaaatgaacgcaaaaggtcctctgctgaaaatgaatgccgggcccagcggacagcggaagaaaaagtgaaagaattattaggaaatgagaaattttaatcgattattatgaatggaaaatgatctgtcaattgctcctcacatgtatttgttgcttcgttcataaaagtcccaacttttgtttgcaaacacaaaaaagaaagtgattttcctactacatatttgtcgtaattaataatgacctcattttatttttgattttatgatatttttggcattttttttaatgtttgtgatttcgtttttgttttcatttttgtcctcagactttaatttggaattgcctgacataaaataataaggctttattttgtgtgcttcaattgtgtgtaagtgctgaactgttcgacgtgctgctgagtaaaattaaattatttgtacgtggcgctcctgcaaaaaggtgtggtcgacgcgggttttatacggggaattgtagaagtaggaaattctacaaagtcttcaactactgcggcgacaaaaaagtaaaaagtgaaaagaaattcaccaacgatttgtcagctcggtaaagtaattccgtctacaaagctgattcgacaaaaagggtaaagtaattcccatcgacatttcatcttctacagaacggaaattttgtgaaattcatcagttttcttctcaccgaattcgacaagtgaaattttgtggaaaagggcgaagtaatg

SEQ ID NO: 118779 - DNA, 137 bp, Heterodera glycines
ttatcgaaattttaagagatttttaattgaatttttttctttgcgagactttacatttaaaatttgtaaatgtactaccctcgcagcagcattgttaattttctgtttcccattttaaggaatttgccgacattatg

SEQ ID NO: 118780 - DNA, 621 bp, Heterodera glycines
gcttattataaaattaaaagcatttgcataaattttttaaaataataacaaaaatttgctccttaaataatcaagtataattttattaaaatagtaaattgatttgctttttaattggttgattaatcatattcaaatataattagttaaaagattaaattaaaaaccaatataaaatatttagtttgcttaataaaatttattttgctttgcttgattgctgtggctttgtgtgtatacggtttagggccgaaacacaaataataattaatttaaataaattaacccaaagagacaccgtactgatgaggcccggtctctttcggttaaatttgcacgtttcgcgaagtgcccatttttgcactgtcgcgaaacgccccatttttacaccatttttgcactgtcgcgaagtgcccaatttttgcatttttcgcgaagtgcccaatttttgcactgtcgcgaagtgccctttttgcacttgtcgcgaaatgacgtagcaccctttcgactgcctaagcttcagacagccaatgttcgaaaaaatcaaataaattaatttaatttgaaaaaaatgcattttataataattgttttaatccaaagggccgtgtgcaagagatg

SEQ ID NO: 118781 - DNA, 414 bp, Heterodera glycines
ttatttagtaatcagaacgccaaaactttgcaaaacttaaaattttttaggggattttcccttgtaaaaatagaagagccgatctcgagttaaaaactagacagctaaaacatgaactgtttttacgacacttaaacttgaaaaaaaatttcattatgaaaaattgtaacactccaccttttattcgaattcggaacccggattaaatagttgatccgtagcgattcgatggtcccaaaaactccaagaaacatgttttaacgactattttttccaaaaatgagggggaactatcaacagtagtacagggaaaattttaattctttatttttgtttaaaatttttgttaaaaagatttcattttttatggccaaagctgagaatcgaaagctcaaaaatggcattgaaaaaatg

SEQ ID NO: 118782 - DNA, 179 bp, Heterodera glycines
tttttgttttgttccgcagtacggacaaagcacaactcaacgattttgtttcaacagcgacactctcaggaaggggttgcaacaaaacagcatcaaaagcgacactctcagaaaggggttgcgccacacagattgtggttatttgagatcaattgacaaaagggaaactgctgaaaatg

SEQ ID NO: 118783 - DNA, 112 bp, Heterodera glycines
ctcgtccatctcatcaaagcagaatcaggatttagttactcaatttctgcacctcaatgaggaagcacgcaactttttggagctggataggctgaaaaagtccgaaaaaatg

SEQ ID NO: 118784 - DNA, 1003 bp, Heterodera glycines
ttggtccttcctccaatgtcagtttttctcgagttcgttcattgaccaattcacatggcacaatttgcggattccgagcagggagcagcaggacaaaacgtcgccgggacatatcaaatttctttattacctagcctggtttggaaaaaattctagaaaaattcgaaaaaaagttattaagaaaattcaaggaagtacgttttccgttattttgaaaatcagcagatttagttttttattaacacttaggctttcaaaaaagttaagttttaaattttcttaaatttaagttgttttttcaaacgcaaattggtgccagttttgtcccaaatttgctgattggcacggagaaaagcgaggacggaatcgtcgtacctgaaaagggaatacatttgtcgtcaacaaaatgtttgaatttcaattaccaaatctgaaggtccttaaagcgaattttgtcgggcagcggaaaatcaattgaattggcatggtcaataaacacagacagttttggcatttccgcgtcagtgtcttttcgaattttgattggtctccaaattaccaatttgcttttgccatcgaaatgtttgtccactaaaacatcaaaacgtggcgaaagcaatgccaatttgaggccgagttcggcatggtcaaaaaagggaacatatccatccaaacacccgtaaaatccaactgaaatgcggggaaaataactagggcaccgatttatagtgaaaaaactctggcccacaaaaaaggaatttaccagtgtaaattttaaattagtgcgcaaaaaattacgtcagttatgctatttggcgaaatgataattttgtctaacactgcactggacttgacccatagtgaaaacggaaataatgtatataaaaggagcgcatttgcagtgttccatcacataattcattgcccacatattattgttattatatattgctcatcgtctgcaactttaatcccacgaagcgacgtgcccggcgcaacaatg

SEQ ID NO: 118785 - DNA, 682 bp, Heterodera glycines
tataaataagacacgaaaaatcatgaaattagagacgtccattaaattccgggcctgactattggttgctctgcactaactaattagggtaatgatttctgaccaacccaatttgttaaatatttgaatacataaaacaattaatttttctctcattatttcaatactaattttggtggttagcactggtttgacatctcatattccgaacggaggatcattgcaaaggtctcctctctctaattttttattttttgtatctacgtaaataataaataatttatgattttcttaaatttttatttttgtatctaaatagtgaataatttttaaatacttatgcgcaatgtaatgagtttccttcacatgccccttgcctttttccgcctgcttccgccattttttttataaaattaaaaatgccaacaaaatttccatgattaaaaaaacgatgccaaatcaaaatgtgcgtccaacagtgccatcaattttggcgcgtggtggggggggggggggcgggaagcactacaaaacacataaataggagtgcatttcttatcgaaatataaatcagtaatatccataaattttgggtaaacatttatttacgggaattaatagtaaattaataattttaaaatttaaacaatttttaatcatttagcttctaaaaaataaaatg

SEQ ID NO: 118786 - DNA, 440 bp, Heterodera glycines
  unsure (1)..(440): unsure at all n locations
tgcaggtcacaanaagagaaaaaaagttcaatttcaaatgaaaagggatcaataaaatttctctttgctttgctcgccctcccctcgcccattattttcctttgccttttcctttggtctgtctgtctcttcgtttgtctgttttctcccttttcccaccctttcctttcgtcgtcgcccttaacagctcacttctatagcacttctgcggttcatacacattcatattcatcatttcttgttgttcatttttattttccttttccattttaaatggtcatttgattaattccaacatttaattaacgtgggatgaaaattgaatagtaaaattgtccattaatgaattatattaaatgcctattttaattcgttaaacattttagtacgattattatcttgcacgaatccaattgtttcctatcttagacacttaaatg

SEQ ID NO: 118787 - DNA, 78 bp, Heterodera glycines
ataaatttgtttggcattccgttgtccctgaccaatctgtgcctggtggcacgcacatcaatcatccacccgaacatg

SEQ ID NO: 118788 - DNA, 328 bp, Heterodera glycines
attttctattattttctgccgaccaatgtttcttttcggcatattctttttcattcattcacttttattttatacaatacatacgcatatttcaatacatattctatgcatattccatataaatgtcagtgccttcttaacatatttactcttgtttacatatattcattcgcctgttctctattgtcgttgtttttgtttaaaaaattacttataaaatgttttttggcttatttgaatttaaattgtcgaaaattcgttaaaatgggaaaacatttaacgattcattagggataatcaccattcacagtttcagctgctgcttatg

SEQ ID NO: 118789 - DNA, 642 bp, Heterodera glycines
acattgactcaaggaacgtggagccagcgcgtcattcataaaaaagtcattttcagttacatattctggagttaactcaaatcaaacccccgcccccgcccccgcgggggcggaattatcgtgcccccgtccccgcccccgcgactctgacccccgccatcccccgcccccgtgaaaagccacccccgcccacggggtccgaaccctagtcttgaccgtggacatttttgattatgccggtcttgaccgtggacatttttgattatgcggtctcggtcgtggcattttttggttgtacggtcttagtcgtggcattaaatgccacggcgacgactcgtatcgtgctatggatgagttgggtttacccccccccctaaaaagagatgtttcgcctttttttctctgcactctctatttattggtacacatctcgttttttgggatggtgtgaccatttaaatatcggtcattccatatggccgtttccatattcgttgatcagcgatcccgaaaactccttggaacaagttttatgacttggcaaatatcatagaaaaaattttttgctatcaaaaggggcgcccctacaaagtgtccaagcctcgaaatgtccaagccacgaaatgtccaagccacgaaatg

SEQ ID NO: 118790 - DNA, 428 bp, Heterodera glycines
aggcaactctgctccctttcttaatatccgattttttccggagtttaattatttccgcacactgcccatatccgaaagatactctaaaaaaggattttctataataagcctatttaatgttacaattttttctgtgccttcttacccgggatactgtacaaagaacaaatggtggttacagtagtgatacggtaaccaaaaacaaaatggaataaaaaaattacataggcccaatttggcggtgttctgctcggcactttcacttccggcgccctttcggatgcgtttgggcgtcgtcccattgcaatttgtgcccttacttttggcatttcgtctgtccttgcctcaggtaatttgatttataaaaaattgcggacttttggcgcattatttaatttaattaattaattagttttcgccacaacatg

SEQ ID NO: 118791 - DNA, 264 bp, Heterodera glycines
cctgaattttatttaatttatgaatatttatttgatttggataattaaatgggttatgatttgttctgggctcataaacagcacatctttcagccaattcatctgctttttttgtctctattctgatgggagtgtcctttcccttgggtctttgaccttttccaccatttcgttaaattcaattttcaaatttcccgctaattgttcgtcgtcaaatcaaattcattttggcgaatcaccgaaaaatgatcaaatgtcaaaatg

SEQ ID NO: 118792 - DNA, 765 bp, Heterodera glycines
tcttctctagttcatttgtaacacacgcacaacaaaagtcaaagtgaaaaaatatatatgtaattattttattatgtctcaacatttttcatctgaattatttatggcaataaaaatgtttgtttttttgtctgattttttcgttgaaaataggtaattcttttttttattgccattcattgttcaccaaaagctgtattttcttataaatgttcgtttgaaattttttttattgactaaagaacaaatatacattttttcattaatcgattagtgaatttgttaaatggtcatagaaaactttttatttgttacatagttagcggacagtgccgtttctgcgccaagaattctttttgctagaccatcaaattttcataaatctgtatcattcgaacgagaggttgattgttcggtaatagttcagtttgtcccctccccctttttcgaaaagcgcttgatgccgaaacgattccgacccatttttgttaggttttcgtgtggcaaaattagccaaaaaaaaatttttccacatttggcgttgcgcttttgcctctgtttaggtgtcattcaaaaacatttaattgcattttttatttgattaaaacaaaacttttttatgtatgtataaacttgaacaattgctaaaacttaatcattcactgtaaattaattaattatccaatttgttaaattgtttatctgtgtaaattcttttacaaatttgatttaaaatttagcattttccattaaaaaaataaaatg

SEQ ID NO: 118793 - DNA, 685 bp, Heterodera glycines
tctttctatagtgaaattaattttgtctatagtcaaactcaaaagttattaaataataataaaaaagtatttattttcctctccttttggcgtactattttcatgtctctaacacattaaaaatcatgaaattcgcaaattctaataattttggttataagggtacaaaatcactttgaacatttagaatcaatagaaaaaagaataaattagcattttggttagaaagagctgcctaggacttgagttataacgtaataaaaatttggaattcccacaacttttttctgagatgtcaaattgcttagcattcacttagaaaaagattctccttttcaaaatctttttttagataccaaatttgttcatttttgttgggaatgaagcgtgttatggctgatcaaaataaaaaatacaaaaaaggcatttaccagtgtaagtgcatatactttgtttttgcgtgtgttggcgttttgttttacgccaattattttttggcaatttttttcgttttttaccgtccatgctccattttgaattctttctcgtcattcattcctcatttgactttatgctttggcagagatgccatttttctttttttatggattgtttttccacttacctatccttttgtacatttaagttgtatctgccatttgtgtacacgcatctaacgattatg

SEQ ID NO: 118794 - DNA, 406 bp, Heterodera glycines
aagagtaaaattaaaataattgttaacctgtgccatcccccccaccgaaacgaacctaaacaaaattaaataaatatgaatattaaacagtagctatagttaagaaagcataaattaaattgataagcaattagcaccatcgctgccttttttgcatttgtttttgacttggatttcatttatttttttaaacatcatgccaaaaatggcggaaaattttaattaaaatttatttattttcaaaaccataatttaaagagaacaagagaactcttattttcttcctcttcttctccctaatgattcaggaaaaattacttagaaaggaattctaaaatttaagcccttacaaaaattgcgaataaaattctgcatcgacgcatcactcactgtttgtcaaaacatg

SEQ ID NO: 118795 - DNA, 357 bp, Heterodera glycines
tctaaaaaataaaaatatattttcatctttcatttgatttctttggttaggactaaacaaaaaaataaggacatttaatgtttgcgatcatatgccaattcaggacaactctgaaaaaacaggacctttctgccccataaaattgcattatctgatatcaaaaaaatctctcaaaattactttttggacaaatctgtaaaaatttcataaaattccaacattttccctgtttttcttgctcggaattttattaagtgtttgtttctgacaaacaaaaggctgagaaattgaacataggcaatgaaaaaaaaaaatttttttttattggtttttatatctgggataaagtttcagatg

SEQ ID NO: 118796 - DNA, 1003 bp, Heterodera glycines
caataaaataacactacaaacatcatttaatttttgttattttgtggcatctttcttactaaagttaaacatattaaacataaaagctgatcggctataatataaatgaaatggtaattaaatgacaaaagaaaattacattttttcaaattttatattaacaaaacaaaacattaaaatatttttgcctaaaatcattaaaattccaaaattcttcggcaaaatgttattttatgcttttttcccgcattgaattaattttgtttatttcatagctttcatctaattttatagttaagcattttttgatattcgtctttgaataatttattaaaaggaaaaaatacatgttttctgagcatttaatttgtgcgccttttatatatattttttaaatttataaatgcgttaaccataatttaatataatataaattattttttcctgtattaaaatgaatttttccatttctttgttattcgtcggagtcatttttcttttgaatttcgtcgataaagtaattaatccgaatttaaatgtgaattaactctgaatttgcacagacttttccatgccgcgcaatggtttatccgaacggatgctgcagttactccgccttttttggctttttagagtaacatttttaatttgataaaatacttaaccaatactgcttataattgtatgtgtataatgttggtaaaaatttgagtggaatcgggaatttagacaaaaaccgggatcgggacttttcgggttgaaaaaccgggactttttagctgggaaaaccgggacttggtactcatttgtacctttttttaagtaccagtcccggtcccgtgcaaaaatattcaaagcaattagtgccatcatgcaacaaatttctgagcttgtttttttacgaaaattccaaaatttttaatctgggaaagatagcgccctaatatttaaaaatctaatatccctaataattagtcaaaatataataatggatagatagatg

SEQ ID NO: 118797 - DNA, 145 bp, Heterodera glycines
tttatttgatttattttaccatattcacaatttgatcaaaatataggtggtcaaaagtgttgtcccatttcatttttaaaatattgcttctctggatcagcattaaaaaaatctaaaaaaattcaggtaagcataactttggatg

SEQ ID NO: 118798 - DNA, 56 bp, Heterodera glycines
aggaaaaggaaaagggaaatgaaattgaaattgaaaggaaaaggaaaaagaaaatg

SEQ ID NO: 118799 - DNA, 352 bp, Heterodera glycines
tttctgcagaccgaaatacctaaacacagtcgaagaaacggaaaccgacaaacaacgttaattgacattctttaattttgaaaaaaaaaattcaaaaagcaaaataattaaatgccaaatttaataaaattaaaatgcttacaaatattcaagcatatgctcagaaatcctggccctaccggctttctctaacactaacggcgggcggttttgtaaaaaatccaatctcccaaaaatttaaattgatgtttcaatttaatataagctgtaaaaattgttttttaatgtttaacacatatatacaaaaaaaaaaattattttatctcttttttgtacaatattcgagtcaatg

SEQ ID NO: 118800 - DNA, 468 bp, Heterodera glycines
ggtgagtgaccaggctgattgattttggcagcggcttcacgtgtgacgtcattgctgaactgcatcaataattcacacaattttctatatttgaataaatatgttgtttgtgtgcatttattggttaaatttcctcgatacttttgtcacacttgaattttcacgctgactttgtttttgtagatgccatcaaagcgagaaaaggagaagaagagaaagagagaagagatgagagagagagaagagcacctgcggtggacggagcaatctgtcagcccagggagcttgcctatcccaaattgcccttctgagggcaacccactgaattcagtagataggaatcgggcggattcgctccgggtctttaataccccgaacataagtgctttgcaattaagcacaccggcttcttccattggaagtaaaaaaaggggcagaccctcaaaagccagagcggagtcagttatg

SEQ ID NO: 118801 - DNA, 197 bp, Heterodera glycines
tggtcatcagatttgaattttaattttataatacaaatttcctagggtccagattttcttttaatgttttatgaaacaaaaatatgtcgataaaattttatgaaaaatgatcaatcaaatattttaagaaacaaaaatggtcgctcagcttttaatttaaatttataaaaattttgttgaaaaaattcagttccatg

SEQ ID NO: 118802 - DNA, 1003 bp, Heterodera glycines
aaattccggcggtgccgataggcgccgccgtgggaaaattttaagaatttttaatgaattttgttaaaaaatggccaactgatttttcataaaagtcggttgattgtttcggtttttcataaaagtcggtcgattgtttcggttttttgattatttcggtcaaacggtttcggttaaaaaccgaaaaaaaccgaaaaactcaaaaatttctcggtcggtttttttcggtcaaaaaccgaaaatcgaaaaataccgaaaaaaccgaaaaaaaaccgaccggtccgatctctactataaattctcaaaaatcctcaaaatatgcaaaaaaaaaaatgaaaatatttacgaaaaagtccaaaatatgcataaaaatatgtacatatcagggatgggccaaattgaaaataaaaagcgaaatgcgaaaagcgaaatttgcgaaactgaaaaatgcgaaatgaaaaaaaagcgaaatgcgaaaagctaaaatatgcgaaagcgaaattttttctacaactttttaatagttaaaatcataaagcaaaaatcatttttaaaaattttattccaaatttaaaaatcaataaaacgcttttttgaggcgcgctttttccaaaaaaactttcgggaaaatttttcaaaatttgattaaaatttgttgacagattttcactaaaaaatgatcaaattttgtgatttttatcattttctaatgagaaataagagttttggggcgccgctgagaatagtttttcatcaaattaccaaattttgcgattttgagccattttctaagaaaaaataggagttttggggcgcggcggtgccgataggcgccgccggggaaaaaattggaaattttgatcatttataaacaggttttcactgaaaattagccaatttatatgtaaaattttgaaaaattttatgggaatttaatccaattcttaggggtgtaaaagtcgcgtttcgcgccaaaaagcgaaatgcgaaacgccaaaaaatg

SEQ ID NO: 118803 - DNA, 80 bp, Heterodera glycines
tcttcaaaaaattaccatgaaagggcaatagacaaagctgcgaattgtgagccaaaagtaagaaatgcgaaactaaaatg

SEQ ID NO: 118804 - DNA, 428 bp, Heterodera glycines
aaatatgcacaaaaatctcgaaatatgcaaataaaagtcccgacttttatacgcagacacaaaaaagaaagtgtttttctcaaatttcggcttcaaattaaaattacttattgttcgaattagtgttcagcgataccaatacgccgaaacgggtaccaaaatcgtgatcaatgatcctgaaaaccccagaaaaagtgttggcaataaaagaatgtccgaataaatggagattaaaaaatgcatgtgaaaacctcgaattgtttctcaaaagaacggtgttgaggattttaaagaatgcgatgaaacagatgtttttaacaatgatacactgtctttgggttttgaaaatttcatttcttttgcggtgagtggcaatataattaaaataatgtgactttatttttaaatggcagattaaggaattgatg

SEQ ID NO: 118805 - DNA, 239 bp, Heterodera glycines
ggtggcttttttaaattaattccttacataaaaagggatttttgaataattttttatgagagagaaaactaaaaaaagtaaaaatttgaacagatattttttaatggaataaaaaaaatttctattaaaactctcactctcataaaaacatataattgataattaatttgattaggaaggaatttactgtcgcttaattgtcggtttgcctttttaggttttccctcattaaccaaatg

SEQ ID NO: 118806 - DNA, 108 bp, Heterodera glycines
attcttgagtaatttttaaattttttttaaagtcagactataaagcacaattaatacaaaattaagcatttgttgtttttattagttgctcttcatgggatgaaaatg

SEQ ID NO: 118807 - DNA, 1003 bp, Heterodera glycines
  unsure (1)..(1003): unsure at all n locations
actttttagcaactattttcgcttataaaaatttttaacaactatttggcttgtgaaatttaaaaaaaaactattttttcaactatttctgcttttcaacaaaaaaaaattattataaaaacgtaaaaaaataaaataaaaatgcatctctaagaatcgacgttagtttttttttaaaaaacacccttttttcaaaaaatgcacccctaagaatcgaccaaaaaattttttcaaaaaatacacaccctagaatcgacataaaaaatttcaaaaatcactcctaagaaatcaaaaaaattttatcaaaaattccttttcttggcaagaatttctaatttaaaaaattatttttttaggtaattattttggttttttgannttaaaaaggggagtggtatttatttgtaattggaatnagtgaataaaaaatatttttgtttaatttttggntgaaaattatgtnattatttgtagagaccggcgcaggacaggatcctgcgcaggattttgcaggatcccagtccgcaatcctgcatattttggaaaatacaggatttacaggattaatcctgccggatcctgtcctgtaaaaaattttgaattccaatcctgcaacaggacccgcaaatttgatttttatgcaggattcagcaggatcctgcattgattttttgaaaatttttaaaaatagaatgccaaatattcagaaactttcttttttcaaaaatttttttcttaataaaaatttttcgtttaaaaacttatccttattcgaaaaaagtttatacaattgaattttttatgtgttttgctacctaaaaagcgttaataaaatttttttttactattttcgtgcctattttaggatttttctgcctttttaagtgcctatttcgcgattttttgtgcctaaaaatcccatccctatacataatggattatggcttttttgcaaagaaatttaaataaaaattattttactttaatttaagctattattatg

SEQ ID NO: 118808 - DNA, 142 bp, Heterodera glycines
agataataaggtttatcataaaatttcatttaaaaatataccctcaattattggtatgaacgatactttataaggtttatcatacaatttcatttaaaaataagccctcaattattggtgtgaacgatactttccagacatg

SEQ ID NO: 118809 - DNA, 308 bp, Heterodera glycines
  unsure (1)..(308): unsure at all n locations
ccaaatcatcatttcaacttaaccaccccccgtcagttctttaccttcaaaaaaattatccccccaaaaaaaatnanctatctanatttcttaatatggacatcaaatctgtggtcggttcttgctgggaaaggaggggggcttgaatttattagattctatgaaataataacgattattgcatctttttagtcttattttgaactgtaataatgaaaaaataaaaaattttgaaaaattgttcaaattcacatggttctgaatctcaatgcattttatggaaataaaaattaccaagtttcagaatg

SEQ ID NO: 118810 - DNA, 341 bp, Heterodera glycines
  unsure (1)..(341): unsure at all n locations
aaatttgtgacagaattttcactaaaaaatgatcaaattttgtgatttttatcatttttctaatgagaaataagagttttggcgcgccgctgagaacagtttttcatcaaattaccaaattttgcgattntgggccattttctaagaaaaaataggagttttgggggcgcggcggtgccgataggcgccgccggggggaaaaaatggaaattttgatcatttataaacagtttttcactgaaaattagccaatttataggtaaaattttgaaaaattttatgggaatttaatccaattcttaggggtgtaaaagtcgcatttcgcgccaaaaagcgaaatg

SEQ ID NO: 118811 - DNA, 218 bp, Heterodera glycines
attcccaaaagcttcattcagtcggcattcgtcccccacataaagcatttggctgctcctccatttggtgcaaaacggaacggtactgaaacgcacaacaaagggcttattgttgaatttgctgccgaaaaagggccagcaaaacctttttccaaaatcccaaatcgaactgttcgggcagtcttcgcactgtacacagccctttctccttcaaaatg

SEQ ID NO: 118812 - DNA, 268 bp, Heterodera glycines
cttcggtcacaatttcaaatacgatctgtctaaggaattttaagactttggaaatgtttgtttatacaaaccaactgaaatgttttttttctgattatcactgaatatttgagattgaattttctaagtgatcagtcagaagctccccaaattttaaaattttccgttatctttttcatttagtaaaaactagagaccggcgcgggacgggatcccgcgcgggattttgcgggatcccagtccgcaatcccgcattttttggaaaatg

SEQ ID NO: 118813 - DNA, 88 bp, Heterodera glycines; identical to SEQ ID NO: 101305

SEQ ID NO: 118814 - DNA, 110 bp, Heterodera glycines
tgtaagtaaaattaaaatttttttaattttaaataatttgttgtttcttttttgtttagtttatcgcaatttttggaatttattgcagagaaaaatataaaaagcaaatg

SEQ ID NO: 118815 - DNA, 1003 bp, Heterodera glycines
aattgcgttggaaactttatttttatggtactaccgtagagttgagcggaccgggaatgttgggcaaaaccgggaccgggacctgagaagccgggacgggaccttggttttccgggaatttttaaattcaaaaaaaattcaaattttaatttatttcaagtgaaaataacacaaaattaatttttattttgctatttattttataaaatctaaaagttaaagctaaattaaattaatgaaatttttaaacgaatttacttcagttatttcaaacaattaatcattttggactaaatgatcgaataatcttagaaatccagaattgcttttcacataatttttcggcgcgttttttccaaaaaactttttgggaagaaaggggtccggcggtgcagttaggcgccgccggggaaaaattttgaaaatttgagtgagatttgtttacgaatttcaacaaaaaggctggttttttggactactgggctcaatttgtatggattttctttaaaaaaattataaaatatgcgcaattaaaaaaaagtatgaggaagcatagcttgtcgatatgtaggaacccatgaacaaaaagaaaatcaaaatatttgaatttctgcagagtgattgaaccaagggaaagaagtagaaaatcaagaggattccatattcgtgatcattgatcagcgacctcggaaacccccggcggatacttgttttctgaactttttaaaccaaaaaaagaatttgaaaaaatgttgaccaaaaatgtggatacaaactcctgtagtaccatttttataattagagaacaaagcggaaaacaatgaaaacaaaatttgagaagctcgaaaaacacagaaaaagggaacgcaacagaagaggagaggaggaccaacaaagagaatattttgcaaaatgatgaccatttgccgggcgttttaccttatccccccacccacaaatcaatcaatcaaataatcaattggacggatagaggaaaaggatg

SEQ ID NO: 118816 - DNA, 612 bp, Heterodera glycines
tttctattcgcgctctgttcagtaatttgactgacagaagagcagcaaattccaattaattatgtttaaaaattgacaaattttgtcatgagagcgcgcatttttttattttctcgttgaaatggcagcaaaactgcgcctgctcactttattgggtgtgtgcctgctgtggggagcaccgatcgcaaaaaaaaaaaagtcacgagaatcgagagcgaagatttcgagagacaaacggaggaggaggaggaggagggggtggagggaacggaagggggaaaaggtggggtttaaaaccgtccgaaagtcgctccaaaaatgaaacgtccgttcggcgcctccaccgaatttgataaatgagcagcattttttgtgacatcatcacatgaaattgagcaaaattttagtataaaagtggggagggacagcacaatcggagacatcattttgtaaatgtaaagtcatttcagtttcacttttgttcaaaaaatagaactcatttggaaacgataaaaatattttcccattatttcggaagacggtcaatcatttaaaaatatttcaagtttttactttcttaaattttcgtcaattttaagaagtttaaaaatg

SEQ ID NO: 118817 - DNA, 169 bp, Heterodera glycines
ttcccttccttgcctatttatttattttccaatccgccacaactcgagctttttccggcaatgcccccactccaacccctctcctgggggatttccaccaccaacaacccacccaatccactcaatatattttcctcatccgtcagcgcaaaacaatgccacaagaatg

SEQ ID NO: 118818 - DNA, 523 bp, Heterodera glycines
attcaaggtccatttaatttagaaacttaggcaaatacctttttttatacaggcttattaaatcaaatttcaaaaaaaaaccggtccaggcctaggctctagacccacgttgctggatagacggctgtaatcaagaaaattcaaaatgatgtttttttttctcagaacgttttgccaacaaaaacaaaaattggcacatacaaaaataacataaaaaataatgataaaaaagttaaagttaaaaaaaattaacaacaatttttacttgttttatttatttttgtttaatctttatgtttttgaaattttattttccacttaaaagaaaaaaatcaaaatttttttttaccttttcaacttttttaaagaataaaaaaatacatctgccttttttatatagctttgccctgtaattctcttcttactctcaagtgttgtgtccattttatcaccatattttgaaattccaaaaattgttgctctgttgatttttaattgccaaaaatttggcttcattagtatg

SEQ ID NO: 118819 - DNA, 470 bp, Heterodera glycines
tgtaaattcaggaaaaaatcactttatttaatttagccgtattcatcaattttttaaccaaatttaattaggtgttgtgcttcaccaatgctgcgtgactcacgcacgatgcgtgagtttgtcaattagttaatgacacaattattgtttattataataatatgtaattgattcggactcgctcagttcggcccccacggttcggccccagcagggaaccgcctactttggcgcggccattttggcacacgttataaattggcttttttggcgccaatgtttaaatatctcaaaaaatttttaatttgccttttattgtgcataactatgatgccatttctttcatagtagcatgctaatgcagtggtgagcaattatatagaatatgatccctatttaacttttatattttgattcaaaaatactatccaatgcgttttcgagggtgctgatcagtgatcacgaatatg

SEQ ID NO: 118820 - DNA, 73 bp, Heterodera glycines
ggtgagaaagtgggagaactgctgaagacaaatgagtgcaatgattggaaatttaatgattggctaattaatg

SEQ ID NO: 118821 - DNA, 359 bp, Heterodera glycines
aagtcacgactttttgaaaaaactcctgaaaaattaggcgaaagttaaaaaatcacatttttaataatttatagaataacattttgatcgtatttttaggcacttaattttataaatagtatctaaaataggcataaaaaagagattcttccacaattaagaaaaaattcatccacattgcctttttatcgatcgaaattttatttcggaattttcttgtatttttcggcattttcttctctaaaattcaaattttgcctaaaaaagtcaaaaaaaaaatcatgaaaaaagtcgcaaaacgtcaaaaaaagccataaaaatccaaaaagtgtaaaaaaatcaaaaaagtcacaaaaatg

SEQ ID NO: 118822 - DNA, 51 bp, Heterodera glycines
ctctttttggcctcctccgttttggccgtgcttataattggcattaaaatg

SEQ ID NO: 118823 - DNA, 231 bp, Heterodera glycines
taaaaataaacatcagattcgtgatcagcacttaaaattagcctagaaaaaaattattaaaaaatatttcaggggggtggcaaaacccataagtacctcaacaaccccgtttttctagttcctaaatttttatgctgttgtgaaaagaatttgaaaattttgttgacgtaaaaatggggtgaacctcgtccagcatttgcttcaactccgattgggtgggcgcttcaaatg

SEQ ID NO: 118824 - DNA, 123 bp, Heterodera glycines
ttcgtcacttttttttgctgaggcgtggctatcctctacacttcggcgtttgctctctccgcttttctgtttctgtattgcctttttctgaaattctttcagaatttgacccgattaaagatg

SEQ ID NO: 118825 - DNA, 193 bp, Heterodera glycines
tgataccagtttgataaaaatgttaccatttaaaaataaccagataccctgttcggtggccttataaaagagagaacccgaatttaccaacaaattttgggttatgccatgggaagactaagaaatgttgttaaacaactaattaaaaaccaagcaattggaaaattatgacagaatattgcaagaacaaatg

SEQ ID NO: 118826 - DNA, 1003 bp, Heterodera glycines
ttttttacaattttggtaagtcattcgcctgtcatgtgagtaggggggggggggggggtggaatggagcagaaggaatccagggatagaaaaagaaaagcatggtggattatgaaaatgtttaatctctttttttatgatttttgcgagagcggaatgcaacttgggggtcggcaccagggccgttgcggtgccaaaatttgttaaaagttttcgccgaaaaaatctgcaaattttgcgcataattttcttataaaaaagtgatattatgccataaaatttcaaaattgtctgcatcgaaatccccgaaacgacatggccccgaaacttgatgagattttcgtttaagaccagctgtccgcatgaaactgcatgttatcgccttgaaagtgatgtttcatggatgtgctgcacgcaaaatttcagacggaaatgtgtcaaagatttttccgaggtaataaccaaaatgttgagaagaaataatgtttaaattgaaatgtaaattttaaatcaaaattatttctacaacaaatatattttttttaaatttcatgaaaaatgaagtaattaaagttttcatcgaaacaatgaatagaaaaatctaaaagccataaaaaaaattttttgttaagctcaaattaaaatattaatttaaaaaatattattttgaattaaaagaatatttttattgttaaaaatcttttttccaaaattttatcatacatataattttgaaaaatttccaagtttttttgtgggataaattatgaatatatggctcaaaattatatggagtaaaaatgtcaaatatggacataaaacatggactgaataaaaagttcaataattgccaaataaaaattgcaaaaatataagtctaaaccctcaaaaattaaaaaaacgcgtttatctcaaatattgattggatttatatttatggtatataagcaaatgtttatacctaatcaaaaaataataaataaaaatttaagattgaggcgatg

SEQ ID NO: 118827 - DNA, 517 bp, Heterodera glycines
atatagaaaagcaatcaatggaaattcagtttaattgctttattattataataatattattggcattattgactttacaaaattatatattttaaaaaacttaaataattttaaaaaatttgtcgtgttttttgtataaatattattaaacaagcacatgacatcactcgataaagaaaaatagaaaaatgtttaaaaaataatttgtcttcaaattaaaatataatttatatattaattttgaatatacaaaatagcaattatgcccaattaattaattaataataatcatttagatttcaaaaattacacctctttatttgtatccatagaaagaatattataagtacattgaaatgcattataacaaattattaatcgttctggtaaaaatattttccgatttttttcttctaatttaatgaaaaaaaatatttttcattttttctttccacagtaacagcctcccatgccggacatgcaaccgtaacatccgccactgctgtaaccgcccatg

SEQ ID NO: 118828 - DNA, 135 bp, Heterodera glycines
acatccaccgcaactcccccgtcacaaaatatcactttgccggacattcactcattttcaaccgaaaatgccgaagaatttgaggagtgggtggagcgcttccaatttgcgttggattgcgcggcggcaaatatg

SEQ ID NO: 118829 - DNA, 181 bp, Heterodera glycines
agagttggtcagtaatttatatctttagccaaatttgaatccataattttttgaatttgttttcttttcagtttctctcacaaaagtgaagaagaagagtcgcgagggcaaagaaaacattttgaaagaggcggaaaaatttttttttaattttaaacaaaaaatttcaggtcagagaatg

SEQ ID NO: 118830 - DNA, 275 bp, Heterodera glycines
gggggaggggtccgggagagggggaggggtccggagagggggaggggtccgatcatcgccgccgccctgggggaggatcgggaggaaaattatcggcacatatccaacatttgctcccatcatttcaaccgcctccgtggccgagtggttagagctcccgtttccaagggttcgagtcccccaccccgcggcgaatttaatttttattaaaattctcccgaatttaaataatttaaaaaactaaaaaaaactgcgcgagattcctgaggaggatg

SEQ ID NO: 118831 - DNA, 1003 bp, Heterodera glycines
tcttcactcatgcttcgccccctcccctccccttttcctttctctctctctcccacttttccttgggatcgccaactgtcccaaacagttgggtcgtccgtccgtccgcaaagcgttgtgtagcaagaaacgcacgaatcgcttccctccttttattatgggtggaagaaacaattgagcaaaaagagaaacttttccaggcgtttagtcaaggaaaaagcaaaacgaaaagggcaaatcttaaagttttttatgcacaccgcttgcccccctccccccgaaatttttatttttaccgacgactctcaagggtttctcttatccactctctgaatctgatttacaataaaaacgatacttgaaggagaaataattataaaaaattttttaaattttcggatggctggctcaaaggcacgaaaaaatcgattgagtgagaatgggtgagaaagttaaagagtggacaagagaaggtgagagggtttagacagaagcactcgttgtgtgccctccccccccccccccccccctccctgattgaggttcgctgatcaatccctctcccccctccctccctcaccagccggtcttgagtaaaattgggagagagtggcttaacgggcggagttactttgcggcccattctaatgggcggagattgaacaattgttgcctcgggcagaaagctgaacgtaatcgatttgtgaggttcctctccgtgcgagtgattgggatgataagagaacgatgagaatgaatgaatgcatcggaaatggggggggggggagcggatgtcaaaatgagcggtgagatgctgtttcggtgctttgtcttaagttttaaggaaggctaaagcgaatgaatgcgaagtttgctgccttccgttcattgtcatattttcgttaattatttcggctttgggcgcttttcaaaaaaacggaatcttttcttttattattattattattggctctttttgatatgtcgatgcaatttaaagatg

SEQ ID NO: 118832 - DNA, 248 bp, Heterodera glycines
ttcattcgattgttgtcaaatggaatggaatggcactctcagaaagaggcgcgtcaattgcactttgctcggcatggtcgtcgcgttcgtcggctgcaacggccctctgacggccgtaaatttggccaaagacttcggttttgcatttggcctttgttcgcttcgcattcgcccccttaggcatggaaccgcacttcttgttcagtcagccctatttgtgtccgctggtcgcccatttggtggcgatg

SEQ ID NO: 118833 - DNA, 308 bp, Heterodera glycines
agaccaaaaatgagaaattctaaaatttgaattttcgattttttgctcgattccgggatcgacctaggtcgaaattactgtcagattcggattctccgacccttaaaactcctaatataatcttttctcgaaaaaattcaaaaattttgtttttcgaaaaaggggggctaccatcggtactattaccaaaatatattttttagttaaataaaagtaattttcttttttataagaatttaaacaatagttttttttaatttaaaataataatttgtttatataagaacacataaatccccgtttcgatg

SEQ ID NO: 118834 - DNA, 175 bp, Heterodera glycines
atcattgaaagagacagcgcgaagtgatagacaattgctgagcagtgccggagccaattgacgcaaatgccgaaaagcgatggtgttcaaaattatggcacgaattgagtcgcggagcattggccaaatgttcaacaaaacaaactccgaaatgcgaacattttcagtgataatg

SEQ ID NO: 118835 - DNA, 856 bp, Heterodera glycines
tcgagttttggcaggtcgttttattgctttagcaaatagcccatgatttagggatgtttgttttttagggttggactatctcaactctaaattgtttgttcacacaaacatttgtgcctcaagtgtcttcgtggatgaccgttgttctatcaaaattggcgcctttctccacgcacgacgcattcattcaacgcaatgccatataaatattcaccgtagcttttgattttcaggaaatgggaattcactggcgaccccagccgactccccccggaggctttccgcgtcggaagttcctcccaaaacattgtcagaccgaatttcgacacttgggccattgggctttttgtgttggaaatgatcaccagaaagcaattgcaatacacgcgggagcaaatgcgacaagttgccgaacaatttgtacgcttttttaaatttttcgtttgcaatttgaccattcggtcgccttaagagcgacgggtcggagggaccaccgacgctggcggagacggaaccaagcacaattggggcaaacggacagcaggtggtgattggtatttgatggacatcggtaatgattgtcgatttggttgtttttttgcagctgtttgacccgcacatcgattcttttttggcgttgtgtttcactgccgatccctcaaaacggcctaaaccgacagagttgctgaaccattcgttcatgcgaaacaaatgcaacgaaacgaaagcgagaataaacattggaggcgaataattggggacgacacaacttgaagaaggctccccccttttagttgagccaaaaggcgaagtccaatggaattccaaacggagaagcctccgacttgacatgatg

SEQ ID NO: 118836 - DNA, 173 bp, Heterodera glycines
catcattatttaaatatcgtaaaaaaacaaattaattaaataggcaaaacaattgatttttgttttttggtaaataattaaaataaaatcagcaaaaacaattagatttttttgtttatcttaaaataaacattaactatatgttcagattaatttttattggaaataaaatg

SEQ ID NO: 118837 - DNA, 171 bp, Heterodera glycines
gaaattttcaattttctggcattttccactttcagcctgctgactggatgactgactgaccagcagggtggacatgccgccatggatgaccggcacgaacatgtgctgcaagcattggaccatccgctcctcccgggtgcccaacgaggtgagaaatgcgagcgcaacatg

SEQ ID NO: 118838 - DNA, 271 bp, Heterodera glycines
acaaaagaatcggcaaaaaagaatggagagaaaaaatggataattattttcacattaaaaaaaaattaaaaataaataaaaattgaaaaaaaataaaatttttggtcaaagaaattttagaggttattttggatgaaaatctttaagtagtcactacaatgtacgattttctgttttatttttcgaaaaaaccattatcattattaagtccgtttcagggcgaaaaattttaacaaatttatgcattttaaaaacaacaaaattcaaaatg

SEQ ID NO: 118839 - DNA, 1003 bp, Heterodera glycines
aaaaaaatgtccattttccaaaaattaaacaaattaaaataaatttcgttagccttggtcttgtgtatattttgcaagttttcttttgaagccaaggaattaataaattattttaattaaatataaaaataaatatatttaatttaatcaataaatgtaaagaaaatagaatttccaattgagtagaaaaaacactaaattaagagaaattataatgaaaaaatattgaggcacaatgacttaaataaaaaccaacagtagggaaatatattgtaaatttttttttttttgctaaatttagcttgtgaatatataattttgattgtcatcgtgaatcaatatttaactaatcaatattcaactaatcaatattcaactaatcaatattcaactacttataaaaaaggtatagaaaaataaaaattgagaaatattgtaggcaaggaagagaaaaagagtattctaataggtaatattcatatgtatgcatatattcctgcaggaacatatttataggctttagaatattttttcagaaacaagcaaataaaatatttttgatgttctttgtacagaatcgacatgaagcattttctgatagcctataaatttcagaatttaaatttttttctaattaaaaattatgaaaaaaaacttttataattattgaattttttcactcaaattcctaaagaagactaaaaatttcattgccatgtaaaattctatgctccaaaaaattttaaaagtcattcttttaccagggctcagaaattttgatttttgcgggttctaattcattcgccttaaatattcattcgccttaaatattcattcgccttaaatattcattcgccttaaatattcattcgccttaaatattcattcgccttaaatattcattcgccttaaatattcaatgacaaaaagaccctgccccgaaaccgaatattctccaatttcccaaaaaaatggtatccaccagttaattgactctcaaatg

SEQ ID NO: 118840 - DNA, 1003 bp, Heterodera glycines
taaaaaatgtccttggatgccaaggacgtccttgaaaatgaacatttagaaaagttttaaaaaaatcaaagaaatttgagaaatctttgtaattttcaacaatattttgattaaattatggcattatgtcatttaaaaatgtaatttttgagaatttttgaaattttatggcattaagtcactagtcactatttttcttaaaaaattagccaaaaatcgcaagttttggtcatttttggacaaaaatctgtaaataactcgcattaaaaattacaaatttttccggacccccctatcctcaaaaaattttttaaaaagcacgccgtaaaaaacccattttataaacaaaaaaagtcgttgcatggcttaaaatcgcaaaaattaggcagtttttggtgaaaatctgttaacaaattgcattcaaattttcaaaatttttccccggcggcgcctgtcggcaccgccagaccccccccccccccttttcccggaaatttttggaaaaagcgcgccgcaaaaaagcgtttttaaagcagaaaaaagtcgtcgtaaatgaagaaaatgataagtgaaaacaaaaaaatgttggaaaaaatccattccggtgaaaaatacaagccatttgaataaatattaaccattttgcattgcatataataaaaattttaaatgtccttggatttcatgaattttccccactatgtccttgcaaatcggcatacccgtccttggaaacggagcatggacgatggcaaccctgaataaaaactaaacatacaaccctaagaatcgtaacatatgtaagtgatttcatcagtgataattagggctgtcaaaaatatgtacaaaaaatgttaaaattttggtatctcctttttgaaaaaaacccgatttttaggggtacatacatattcaaaaaattttatttttttcacaagaatttttataaattttcaaaatttctcaaaaaaattagaaaaaatgataaaaagtccaaaatatg

SEQ ID NO: 118841 - DNA, 1003 bp, Heterodera glycines
ttggccaaggcgtacttattaaggggagccgcagcattagcaaagagaacacttttattattggccggaaatttttcaaaatttgcacagaataagttcatattttattggtcgaaaaatttttgaggtaatattttcaggagggtaaaaattttcaaaaatctacccattttttatgttttcgttccttgatccgttgactaataaatttgttttttcaaatccctttttatatgtgcttcaggtactgccccatctggtccgacatcgcaagtcccatttccacaatttgccatgcggggcctccgtcattcttggccgaaatgggtcggtccgatttgctgtttttgtattgattttccatttaattgggacttccggtccatgggatttttggtgaaaaaatttgggccaaaacttgggcgggacctaaacaaagccgaaaattctaacccccacccacctctttttaagtaagatgtgcgaggcaattaatatgtgtaattaggcctcgctgaaacttttgttgggttttttcaatgataataagtttttgttcagctacatttgggtgtcacgccatctgagcgacgacgaggcgagcaccggcggttacttggcggacacgcaattggtgccccgggagacgcgggaggccatcgcacggacggcgtgttgtatcaaattgtagaggacaagtttatttaatatttttaacgattttagattattagccggaaaaaggcctaactaaaattgggggtttcacaaaaaatgggaaaaaccgataaataattaaaattatacaatctttaatgcctttaccttttaactcaatttttcagggttttttaaattttgaaaaaatcaaatttgaaaaacgaaccaataaattataatacaaaaatacacgaaaaattttgtttttttgtcctatttcgtaacactcacaaaatttggtctgacagttggggttgttttgcaaattaaagtattctccatg

SEQ ID NO: 118842 - DNA, 177 bp, Heterodera glycines
acctcctttgttttgtgcttattctttgatttgaaaataaaaatgcaaaaattgaataattttttgaattacatatcatttttttgaagcgaatatttgaattaattcgtttttgtaaaaaattacattttaatttattttcgtgagtgtaattcgtaaatgttaaatgccaaaatg

SEQ ID NO: 118843 - DNA, 171 bp, Heterodera glycines
ggtggaaaagtgggagcaaaaagataaatagaaattgccaagtgttaggcctcggcgggtgggaattgaaccaacgcctaaaccattccctcgtgaacatttttaccactgggctatttttgggggtttctacgggttttggctgcccattcttttgttcctctcaaaatg

SEQ ID NO: 118844 - DNA, 143 bp, Heterodera glycines
ggtatgtgcaaaagccgtggccaattattcgccaattccccccccccccctcccccccccctctctctccaatcgaattgtaagacttggagtttcgagaagttcggaaaactaaaaatggaaggagtacgagcgaatgaatg

SEQ ID NO: 118845 - DNA, 451 bp, Heterodera glycines
aaattatcactctggggattttttagatcgcttaacatctgcttaatgatagtttctaaacacttagtgcttccgaataacataaattttataaaaatttgtagaaaaagaaaaaagttatgaacaaaagattagttttctagaaaattttttccagatgaatttttctcgaaatttttattattttttccattttcaaaatgattgatcagataaacgcatgcactgattttgcagagagcaaaatgcttgggcaaaaaattttttccaacccaaatatttcctatccatttcaatttgtcgtgacggaaatgcacatgaataaaaaaacgaataaaaaaaacgttgtcagacggatgcaaacaacattaataactaaaaaattataacagcaaatcaaaacagttttattcgaaatatatttctgataatttttagattcgaaaaaatg

SEQ ID NO: 118846 - DNA, 155 bp, Heterodera glycines
agaattaccaaaagaggcaaatgtgtattcacatatttctttttgggcaatgattatccttttcggattgtccgtgatccgtctaattatctaccaatttcgctcaattctttggttaaaattcactttgacggaacggtacagtaagaccaatg

SEQ ID NO: 118847 - DNA, 128 bp, Heterodera glycines
  unsure (1)..(128): unsure at all n locations
tgaatttagaaaatattatcatgccncggtggtacagttactgcttgaaaacggcgcagacccaaacttaccgggtgaaaaataattttggttgagattttctgtaattaatttgtcagatttcaatg

SEQ ID NO: 118848 - DNA, 856 bp, Heterodera glycines
atttcgacagtaaagcttattttttaaaaacttgctcataatggtatgagtctagttaaattttgaaaagtaaaatgataagcacaggttcacacattgcagagtggtttgcaattttcgaattcttctacaagagcctgcagatttgcatcttggcactcaaacccggcattagttagcagatgttcgcacacgatttcgagaatcttatatataagaaatttttttgtcttttggactatagtcagcacgagatgtttgtacagaaaaagtgaagcgataaatcttttgacaaaaataatcatacaagtcctaatttattttgcttcaattataaattttgtatatgcaattgtatgttataatattaattcataggttcaataaattatgtaaaaagtaattaaaaagtactgtcgaaaccaatcactgtcgaaaacacctggtacgattttttcaacattttgactcattttagcctgggcgacatttcgacgcagcgacattttgacgggcagcggcaccgcccgaccccccccccccccctccccccactcaccggccttgtatatgtgcagtcatttcaaaaataaacccttcaaaatggaaaactgggcatccttttgttgcaaattaataggcccgaccatttttttcaaaatttatataaaagacaaagaaaattaacaatgactaccattcacgacgatattaaaatgtgttttcttgtgaatgttctacaacttaatgtcgtcccctctttttttttaaattcttcatgttttttgaagaaaaataagccaattcaactggaaagtgccaaaaactatcgttaataatttgccacaaaaaaatg

SEQ ID NO: 118849 - DNA, 218 bp, Heterodera glycines
gcttttaaaaaaatattttggcttgtattttttaatttgttgatgtgtgcttctttagttttgtgtgtctgcggtagggccgaaacgcactttttttcttattttttgttttcttttggaagagcaccgcactgacgaggcccactcttccattagaaatttttataacaaaaaaaatttttttcatttaattttttctcaggaattgtccgcaaatg

SEQ ID NO: 118850 - DNA, 510 bp, Heterodera glycines
tgctaatgatgccttttgccgtaggtcaacattaataaaaattctttgaaataatgcctttttaccacttcaaattaatgaaaagcattggaattgcaccttttattggtcatatgttttgcttctgattacaagacgatttgtaatgtgtccagcggtgtataaattacaaaaaatgttttgagaaggtttttctgattgatcatgttcatctttcgtcgccaatcacattgaaaatccgttgccgcggcctccaaatcttcgccattttcccgttggtttatcggcgtccccatccccaacctttgaaaaaagaaattattcaaatgctaatttgttgttttatatctgcccaattaacaatataaattggcttaatcacttacaattaattttccaggcatttacgccccgccccttttgcctaattagatctcattttccggaccccttttagtctttttaattgcctgttgatgagtggcaattaataaaagcggataaaaaatg

SEQ ID NO: 118851 - DNA, 405 bp, Heterodera glycines
tccttttttcattttccgttttcccctttagctcttccctctcccctccattttccatgtgttcttctccccttctcttctcttccttcttcctcttcctccctctcacttccgcgttttattttggtgagtcatcctttcctttcccatttcattccctcccttccccccttcttttgccttcagttttgactcgttattcgcccctccaatcagctttttctctcggtagcggtgatcgctttcttccgtcaatttcgcccaaagaagtgaatccctcggacagagaatggaccgtcggaatgagcactttgggggaggaggggccaattggaggggccgaaaattgggcgaaaaaaaggggcggcggaaaaggggcgacggggaaacgaaccgcgggaaatg

SEQ ID NO: 118852 - DNA, 277 bp, Heterodera glycines
ggtaaatttggtggtactttacttaattataatttatttaattattaattattgaaaataatatttacttgttttattgcctcaatttttaatttaaaattattatggaaggcactcgaccggtcctaatttgtcttctggtttttaacagattgccaaaataaagcagctaattttctcatagatgtttaaaattgtctttaattaatttttttttgcattttccgtaaaatttctcctttcactatttattcaaaatttattaatttttaggatg

SEQ ID NO: 118853 - DNA, 291 bp, Heterodera glycines
tcccccccgtttcccttcatccttttcatcgtctttgctcccttcaatccctttatttcccgtcgttccctttgcttccctttccctttcaatcatttaccttattgctttggccacttcgttcgttcgttcccttttattttttcttttctttcttttttttttgttattttaattcctcttaccaggacgtttctattaaagttttgtttatagaattttgggactgtgctgttattctcatttcccctatgattgcctctgaaaacaatcacttagaagcccaaaatg

SEQ ID NO: 118854 - DNA, 528 bp, Heterodera glycines
caagccaaatggtagacaaaatgactcgaaacgccaaaatagggtagtgatttcggcatataaaagcacgcgacattaacattttccgccatttcatcgcgtcttcgtcttccattttcactattatcgccatcgcacattcgtcgtctccgttcaaccgcgctgattcgcacgggcaatatttttcacgtaaatccttttaacatctttgttttatttgtgattgcaacgccatgcttttaagttcaattccccccccccccccccctcccattttagagtttttttaagaagtccatcattccaccgggttttcaaagtcactttttactatttttcaggaagcacaccccctgaaaaatattttgcacaaattctgcatcagatttttccttttttcaaaaactgattttttccccacaattaaggcagatgctgaacctcccgctgctgctgatgctccggctgatgctgttgtggacaactttgagacgcgcactctccgcttcttcgacctgatcaacgatg

SEQ ID NO: 118855 - DNA, 60 bp, Heterodera glycines
ttcgccgatggcacatcgacggaacgcttttcggcaacggaaagcgacggaagggcaatg

SEQ ID NO: 118856 - DNA, 179 bp, Heterodera glycines
aatccgtgaagaaatttctgtttggcaagcagtcctttctttttaattaaaaaaagttacaatttatttttaaaataatttcctatttaattgtaatttatttttcggcactccgctgggccgacgaaaagtgccgtgaaaatggcattgaatgttcagcagagaatcgccgtcaaatg

SEQ ID NO: 118857 - DNA, 56 bp, Heterodera glycines
tggagctgtacctgaaggcctacgagcggaagaaaccaagcctggcccaggaaatg

SEQ ID NO: 118858 - DNA, 207 bp, Heterodera glycines
agaacagagattagagagtgccaattattgtgatataaatgctgtaaatatgtgataatcaactattatttatatactgttttttgtatacacataatattgattgtactctatcatatgaataagtatgtagttcgaattctctacttttttaccaataatttttctattttaaacatctttttgttgttgttgttgcagaaaatg

SEQ ID NO: 118859 - DNA, 1003 bp, Heterodera glycines
  unsure (1)..(1003): unsure at all n locations
ngaangnntaaatttaanattttttgannnagaannnnattnttannagtgtanttttggannnggtngggtaannggaanccggccaancctaattttgntaacaatggagcacaatcatttataaatttattccacaacattatgacaaaattaaatattaatcaaaattattaaaccatttattcgaaaaaacttttaatgttttacacaatgtctattgcattttcctaatacataacaaaactgtgacttccttccgttttccagtccaaattaactgcatagacataaacaaacgctgtggtattagtgactctttgaccctttatttgattgtttgaatttgtttggcataatgtttattggaattcgaaccaaatattttggttttcttcaagggtgggtggatttttggttatcgtcggtggtattttagccgttttgttggtcgtcgatttatttgtgtttttattaatttgttgttgattgaattttatttattttggattgtcttttaattatttgttgcataaatttattttgtttggtattggatttttaaagcaggttttggccaattcatagactatttgtgcaaaatttagaagcgtggcaaagaaacccccgacaaattgattcttcttttccaacatggcgctcctggtaacaaaggttagctaggtggcggacggcttggtttttcttcagtgatatttcttatatttttttttaaagcaactaatttggaaaaacactcgtgttgggttcatcgactgcttgtcaaatttttaataccctcgtgttgggtttatcgactgttcttcaaatttttaataccctcgtgttgggtttgtttttcttcatccgccttatttggtccacttttacaacttatcgtcgaaagcactcgtgttgtgctacaccaattaaattttgtaaaagctcgtgttgctttaaattggatttttgttttatctcgtgttgataaaacaaaattatg

SEQ ID NO: 118860 - DNA, 55 bp, Heterodera glycines
agcagttgctgtgttgaggaatcaactgaatactgcagttgagcagcagccaatg

SEQ ID NO: 118861 - DNA, 65 bp, Heterodera glycines
ggtaattaatgagagttgccccttaaaaatcgctaattaaatttatctaaaaattcagtgacatg

SEQ ID NO: 118862 - DNA, 382 bp, Heterodera glycines
ttggccattatttaatggcttgaggtgacgtgcgcttaatgttatttgcaattattacgaaattggcagcctcatttatgattcggtcgagtttttgtgaagtcaaaattttttgtcactttaatactcccaactccgggttttcgattttgggcatttatttattagtgattttaaacaattaaaatttgccaaacaaagggcacacgatttctgctttgctatgtcacgaatagacgcaaatatttaaaaattttcttttctgtaatagatttttcaatttcaccgtaaattccttaaaaaatcgttttttccatattaaatgatcaaaaagatttattttattcaacaaacttataaaagcatttaataaattacaatg

SEQ ID NO: 118863 - DNA, 774 bp, Heterodera glycines
cggggtggcggaatgggtgggaggacggggaaattgggagggagagagacagagaagaaaaaaagaaatagaggaacagtgagagagagagatagaaaggagaaagagagactgattgtgagacagacaaaagaataactggtcgagagcataacgccaaaatgaggggggaaggggatgatttatttttgtgatggcagaagcattgcggagtttcaagcctcggttggggagattttttgacctccaaaatttggggagagctcaatgagactggtaactatttcataaatcctggatatcagaattttagctaataaaaagcttttatcaatatataaatatatttaattgaaaagtattacgtaacagtcaaacaatttaattgatttttaatcataaaaaaatttacactcttattaacgcgcatttaaaaaaaaaattctgttagtaataaatttggcctttttattttaaataaaaatgaaagaaatgaaaatcgaattttaaaatttttattttattctctaatgaattaaaagaattttatggcaaatttacggaaaaaaagaataataattttgataggaattttaacagcaaaggttttcacaaacagtgaattaatggaggaggcggaggagaaaacggacaatttgaacaaaaaaggcaataaattcgccctggggggaaatccacggaaaagcgccgaaacgcaaaatcaattgaaccaacggacggacgaccaaagaaagaaaggaccaccggcggatg

SEQ ID NO: 118864 - DNA, 1003 bp, Heterodera glycines
ggttcaactttttttaattgcttcaaatttttgaattgtttttcttttctgttgatcatttggttctccatttgtgtttgattacttttgatattattctgatcattttgcatttgagcaattgattcgataccattttcttacttggcatattgtcccattttttgccgaatatttcatcaaaatttggttggattttgccggattccatcttattaattaagaaaaataaaaaaatattaaaagccacaaattcatgtatagtattcagaatactaatagaatgaatttatttattggctttttaatattaatattcattttattatttattttatctttaataaatctttttccaacattaaaatgtcacgtaattctgagcaatgcaatcaatttttcactcagatcttaacaaatttttttttttttttttgcaaacaaagttaatatgacaaatatttatatttttgaataaaagatttttactaaaatatttttttctgaattttttaaaagtaattggatcgcatttgttttttaacaaaattcttttggaatttcagaaaattttcaaaaatttcttatggcggcagctttggcaccctgccggaacactaatttattttgatattaatattgaattaaaaatccataaaattgctaatttttagtcgaatttctttttttaattaattttaaacttttcggaattgcccatttttatataaacctattaataaattatacaagattttgaataaaaaattaaaatattttaattttaatgctttttgatgcttggcatttttttaaatatatcatttcttctatttagtgatgtcattttgaaaaatttttccgtgcgatctccgggtgaaaaatgcgttaaattttttacattttggtgggaaaacaacagcaaaatgaagcagaaataacgacggacggacattcttttgacaaaataaaatgaaaatggtaatgataattaaaatgaatg

SEQ ID NO: 118865 - DNA, 1003 bp, Heterodera glycines
gagagaaatgattagagaaacaggaaaaaagagagagaaagtatgggagtgaatgagacagagacaaataagagagagagagataaaaataagagaagcgagagagaggggggagagagatagaaaagaggagagagagagagagatagaacagaggagagagaaagaaaaaaggagagagagaaaagaggagggagagaagaggagagagagagagaaagaaaaaaggagagagatagaaagaggagagagagagagaagaggagagaaaggaagagagaaaaagagaagagggagaaagaaagagaggagagaatggagagagagagagagagaagaggagggagagaagaggagagagagaaagaaaaaaggagagacaagaggagagagatagaaaagaggagagagagagagaaaagaggagggagagaagaggagagagagagagagaaagaaaaaaggagagagagagaaaaaaggagggagagaagaggagagagatagaaaagaggaggaagagagagagagagaaaaagaggagagggagaaagaaagagaggtgagagagagagagaagataataaattttttcaaagctcggctagcgcgaggtgcgcgagcgaagcgagcgcgcctgcgctagttcttaattaattcctctgccctttttttcagttcgccaaaaattatttaaaaaaagaattctttcagatgtaagttcaaatttgcggatcccgctgcgggattgtaactcaaaacttagaacgttttgtttttcgaccccttattctaaaagagggtactttcctgtttaggcacaccccattttttaaaacattttttaaaattggggtgtgccttcaaaacaggaaagtacctaaaagagtgcaaaaaaacacttaaaatttatccgttgatagccgaatgtttgacattataagtgattgtttttacagaagtttctgtttttctcaattttcttatacttatgcagagaatg

SEQ ID NO: 118866 - DNA, 369 bp, Heterodera glycines
ttgtttgttttttttacctatttaggttctcattttccgtttttttataccaaagaatgacctcagttataatcattaaattaatcactattttagcatttctaatgctgatttaacacaccaaacataaattatctaaattagcatcacaaaaaatgggaaaaatatcagagaattattgacaaatcaaaaatggagtcccattttatcgttatgattcattgtccgaattgaatttgtccgtctcatcccagcagcacatttttgcttccattggacagtgtgtgcacagaatttaattgagtcgccgattaagccaaattcattttaatattcattttttaaataatataaaattggagaaaaatg

SEQ ID NO: 118867 - DNA, 124 bp, Heterodera glycines
ttttcgtaccgccgttttcgtacgagtgagtatggaaaaaattgcattcaaataattttgttaatctttaagtaaaattatttttaatgttttgacaatttaagcttttattaactacaaaatg

SEQ ID NO: 118868 - DNA, 74 bp, Heterodera glycines
  unsure (1)..(74): unsure at all n locations
ctgaagaagatcgctttcacaaaaatggcaaaatgatcacaagaaggggcacaattttgcactnccaaacaatg

SEQ ID NO: 118869 - DNA, 104 bp, Heterodera glycines
tggccgagaggagagtgttggccttggggaaacccgaaaaataaatgcgaccattggcacgatggaggaaacgagaacggcatttacggacaaaatgccaaatg

SEQ ID NO: 118870 - DNA, 677 bp, Heterodera glycines
tttgatttgtagctaaacagacattttaaagttatgtttatgtatatgattgacaaacaaaagaaatttataaaaagtaattaatttgtgggtgaaaacagctaaccagactaaaacgaccccctgactaaaacggccagactaaaccgaccctctgactaaaacggccagactaaaacggccagactaaaccggccagactaaaccgacccctcccgatttattttttatttaaacataatgccaaattaaaattttaaaaaaaggaaaaaataccaccgctgccgagtaacgaggaaacggctaacaccctgctggagccaaaaagacggcggcattaattggacggaaatcgaggggaccgcttttttgttaggattactgactaccaaattaaataaacccaaagaagaataaaagcataaatggttctttaagaaatcttcaacaattattttaaattttggtttttacctccatgttctaattttgtaattttttgttatttctacaaaagtataatttgtttgacacatacaccttctgttttttacaggccttattttcacttctctgttaaatttctattgaaatggataatgaaaacttttcttcctcaaactccaaacagcaaagcagaaacggtggtggacgcgtcggttcacccttcagaaatg

SEQ ID NO: 118871 - DNA, 641 bp, Heterodera glycines
aaactagtcacgttctggtacaaaacagctacaaattcttacttttccgccccggcgctgaaaatgtataaaataacactggagaacaaaattttgacccgaagagcaaaaaaaaaaagtgtttggattcctccctccgattttttttctgactaccggcctgggttgacccccacctccccttttttcatgtatgataattttccaaaaatgcaattttgagtagcgctacgaaaattgtgttctttcacatataaagatttgtgagaacttaaatctttaaatttaattttttattttaatttagaatttttgatttctatataaataaatctttatttaaaagattgaagaaatcgttcaatgaattggaccgagaatcgctggccaagaatcttgcatttacagcaggtagcaaaacatactaacgaataatcaaatctattaccgattgatccttttctttcatagtccgtctcgacagtgatggtgttgacaaaatacagaactcatttttgcgttatttggtccaaatggaattggccaaaaaggagcgagaaacgaaaatgtgtgattcctttttttaatattttgattgaccaagctaaactatttccatttccaggcgtggaattccgatg

SEQ ID NO: 118872 - DNA, 831 bp, Heterodera glycines
  unsure (1)..(831): unsure at all n locations
cccgttcccgattcgtacaattgagtatcgtataatttccttcgaggtcaatcaagacttanaanaagnncnaaaaaanactttaatagtttctactaattttttcacgtttctttgaaatttttcccatatttttatgaaaaaatctgtcttaaatgagaatttaaaaaaaattttgaaatcaagtcattctacgaatttccatttgctctcgaggtgtcggagctcaaccctgaaccaaacaaataagtagaaatgataattatatatagaatggctaaaaaggatcaaaattaaaaccattagtaatacgtacaaaaaattttgctttctaccaacttctgaccctagcagatggtggccagctgcaagccgtggtgtggggatgtgccgaaagtgacaatgccaacatttgcaccgaatttgaacagcaattaaatgctaagcggatcaaacatgtgtcctgtgaatgcctttttggcgcccggggtgtcgatttttcaaatcaaaagatgatggtcgaccatttgtttctgccaccgtcatcatcattgaccacacttctataaatgccggttaatatatggacaagctggggaagcctttgagggaaaaactattggactggtcgaatttgacgtggcatctcgggcttcaggaccaatgttatttcatcagaacaactgacccggccctcaattatataagaccaattatctccttaattgaccttaattggtccattaatttaccgcacgggggaatcttcttcttaacttttgttataactattgttattacacagcaactcgtactaccgctaccacaatg

SEQ ID NO: 118873 - DNA, 183 bp, Heterodera glycines
cctttgggaaagtatataaaagcaatttatcctcaatgagtagaatgaggtagtaaatataattattcacgattgtaatcaattttcgcagttctcattcatcttgatattttcattagatccgactaaatagcttatgagataatttgggttatcataaaatttcaaatataattagaaatg

SEQ ID NO: 118874 - DNA, 219 bp, Heterodera glycines
ttttgcatccttcttaacattgtaataaacaaaacaaatattaatttcaataataatgaataaaatgataaattgatacaaaattctactataattatttttaaatttatttttcatttatttccaataattttttatgttattttacaaactcttagatttttattgttttttttttttgcatttatatttaattgtttattttttcagaatatcatg

SEQ ID NO: 118875 - DNA, 744 bp, Heterodera glycines
  unsure (1)..(744): unsure at all n locations
tctcttatttgaatgaaatttaattcctttttttttggtcaaaaccgacaaggnttgtttcacgacccttccaaaatctcagaaaaaacgccacgaatcgcggtccgctccacccctgctgatgtcaaattaatgtttaccccccactaaaaaccttacatacgagaaattcaaataatcaagtgaaaaaaaaagactcactactctcatccgcgatgtccttcattccctgtgtttgtatactattttccatgctttactttgttaacaaaatattccgagagtgaataaagtagcaaaaaagtggcttttacatacgtgacaatataacgtaatgaaaagggcatttgttttcacagagaagtaaaacttctttattaagagatcataatgggacaatagatttcgccaaacaacaatataagaaggaatgaaatatatattgaaaatttaaataacgctaaaaaaaattttatgaaacgaattttattttaatttgtattgaaaaaaaagaatttttcgtggttttttctttagtaagtttctgacagtgacagttatgttttggttttttagttttcaaacaaattcttttcacttgcatttacggttttttgaccattgaatccttttttcacgatgttttattttattttgataatcggtcttttacattttttcattccttttcaagaacttaatttgaggattacattggaaataaattaattagacttcaaaatg

SEQ ID NO: 118876 - DNA, 507 bp, Heterodera glycines
aaaagggggggcaaccagccatcggcaattttccttcggaaaaaatatgtttttttgtgttttacaaaattttaaatttggggttttttttttttttttttatagctcggcgccaaaacgtcggcgccaaaacgtcggcgccaaaacgaccctggcgccaaaacgatgcggacccctattttagttaactatttcggggattttttttcactaaaattcacgccctactcattatacacagcgtccggaaaatgagctcctgtaccaaaaactaaaattcgggtggggatcgttttagtctggcaagctgtttttattccacataggtagattgtattggttatttggcattttccgcccctcttttatactcaatttttttcaattccttccagcagaatcggatgtgtataaaaggagccgtctttccctccgctgcacatttctacttcttctgtcaccacactccaaccaccgaaccgcttcagtgcccaacgcaacgcaatg

SEQ ID NO: 118877 - DNA, 1003 bp, Heterodera glycines
ggtgattaaaatttgctgaaaaatgcagcaaaaaccaattaaaattcgtgtggtttgtttcgaaaattgtttttgtcaatttttctatagtcttcataacccgtataattgagatgataattaattaattaatagttaatatagtagtgaataaattaatttctaaaactaaatatatttatgattttttatgtgatcagtagaattataatttgaattatgaaaaaaaaaattattttataattattttacttattgacaatattttggtaggctttagactctaaaaaacccataaaaaaggcaaatggaaaataggctctaaaaaggctcattagggatataaaatgacaaatttttattcacaaagcaataaaattaagccaaatcagtatctcgtcaataaaataaataaataagcttttgagacgaatttttgggaaagttttttttcatttcttaggggtgcatttttgaaaatttagggtcaattcttaggggggtgtctttttctgaaatttttggggtagattcttaggggtgtacttttcttttttattgttttttaagaaattctccaaaaaatgtcaaaataatgaaaaaaaaagtcagaaaacgcaaaagtgaattttcattatgagaaaaaaaggagcacagttagttcaagttctttaattttctattaattaaaaaaattacaattactaaagaatatctgttttttcataaaaaaaactcaaaagcctcaaacttcgcccgaggctttgatccaatttttattgtttttttgtgaatagacaaaaatgcactcttatgcttccaaagtttgtaattttttgaaaaaatttcacagttacaaacaaattgattttttgtgagatttcttgtactaattcaaagcaagcccccgcccccgcgaaaagccacccccgcgcacggagctcgaaccctacttcgccccatcggctaacaaaaaagcatattttgccaattttaaaaaatg

SEQ ID NO: 118878 - DNA, 1003 bp, Heterodera glycines
ctcctccctccagactcctcataaatttaggttgtctttacattaatttacaatatttgcgagcgtattccagttcttaaaacaaaaacggggtggaaggagaacaagaggtagtgtgagaagtaaaagatggcccagaatatgcaaatacgaagaagcaaaataaaggttattgacaaatgaaaaattattaattaaataaaaaacatcaaagagaaaacataaaatataaataaaaataaaaattagcatacatttgatttaacaaatcggaaaattctaattttcaccgatctaacaaaaaaaaattccgctgttaaatgagattaaaagaattaaatgtagaaaaaaataatataaaaaataaataaacaatataacttttttcaaatgtaagctaaaatagaacattatataatactcgaaaatttacaaaaataaaaaagcctgaatcgaaaaatatgtaaaaatattaaatgaatcaaagtttaatttctacgatttaatgtttcgaagaaaactgattataaaaacaatagctaaattaagaagatgttgataaaaacaatgagtctctctgcaaaaatgcgggtaagctcgtcaagaattatttcatcggaaagcaaaaatcttaactatataatttaatgggttactattaaaataaaaaataagtagataactaactatattatatgatatatgaacaaatatagataaaaattaattaatgaagaaaaattatggcttagaaagaatgagagaataattctaaacgcatttttaatgtattatagatatttatatataaaactcgaagaattattaaaaaaaatcaatattaatgtaaatttttaacgaaggtgtataaacccaaccttatcaaaaattataaaaaatttatcattattttgaaaattcttcaagcatatttgaaaattacgtaaattttttaaattttcaaagtagaaaatgttggttccaggttcgaaccctcagcatg

SEQ ID NO: 118879 - DNA, 102 bp, Heterodera glycines
  unsure (1)..(102): unsure at all n locations
agttgaagtgtgatgagagatttctattttccgctgtgctggaggtgcgcgtcgatgtttagaaggagactacaagatgtggccacaaatgccnccatgatg

SEQ ID NO: 118880 - DNA, 381 bp, Heterodera glycines
gggtactgagtattgagacagtgcccgtgtgttatatttgcatttatgtataatatgtaggtattttttgtaataatttccttattttgcatatttggtacttatgtgtttaaagtttcattctttctagcaatttttgaatttttgcatgattccttgtatgtggttctataatattttattatgttctctagaattatttactgcacataaataagttatgctggcatggagcggactcgtacctgcacttactacccaatttatgtgggtgttttattaattgcttttaatgaaagcacttaattcttaagtagcctttcatttaatttctaactaataataataataaaaaatcatatcaattttattataataatg

SEQ ID NO: 118881 - DNA, 53 bp, Heterodera glycines
ctttgcctgtacacctacaaggtgaacatatttgttattttgatgagaatatg

SEQ ID NO: 118882 - DNA, 333 bp, Heterodera glycines
ttttaggatgcttatatttaaaattaaatttcaagttaattacctttttttaattgatccttttttggttagtatttttaattttggaatattaattgacaaaaagattttttaattaaatttattaaataaaatattaaaaataataaaaaataaataaattcctcacaaagctcagggtttcctgcattttctaatatttttataactcaccacataagaatggtatttcaattttataatttaagtcctctttcatgttcaaaaaaaaatttctcggctttatccaatgcttctgagcaaattcatttaacacattgatcagccacaatg

SEQ ID NO: 118883 - DNA, 1003 bp, Heterodera glycines
gaatttttccagcattgatttcggccgcaggccattttctggcaatcatgtcttttactggtcccgaaaaaattgttttttaaacttttctgaaaattctaataacacatttcttggggggtattttgaggtgctgagtacgaatccggcctactttttggcgaattccgaaccctgaacccgagttcgaacattttcgaaaaaattttttgtgtgctaattgacttcatttcaattttaaattattaatttctgtggcgtttcgtatatttttaagagactcaatatattttgtgatgtttttggttgttgttttatgatttaattttggagagaaattgtgctggattattttattttgtttgtcgtcgctattttattttgtttggtataaatttatttgtgttttgttttgttttgtaaagacagatcgcagagaactgttgacaatcaccgttttgacatttgaattgggaaaagtggacgcaaacaagcttttgttttcaacttttgttttgaaagccatgaaaacacatttccaagggttttcggggtaactgttcacgaatccggcatccatttcgaacaattcacgaaccccggacctaaatttgaataaaaagtcgaaaatttaaatactccgaattttaaaaatggttaaaatatgtaaataattaatgtcatccatcaatgcttcaataaaaaaatcatttaaaccacttttaaatttttaaaattaattccaaaaaattttttcgaaaaatgttcgaattcgggttcggggttcggaattcaccaaaaaggaggccggattcgtactcagcgcgtcaaaacacccctagaaacatattattaaatttttcttgaaaactaaaaaattttgttcgggaccagtaaaagacatgattgcccattttctttagtaatcttttttaaatttttcaggccaataaatactaatagcctcttgaataatatcatgaatattttattttgagggatg

SEQ ID NO: 118884 - DNA, 127 bp, Heterodera glycines
ggtagagcattttggaaaaataacaatagataattgattatttcctttaagtaaaaattggttagacattggtattcctgccgagcgtatcctcccatttggaatgaaagacaatttttgggaaatg

SEQ ID NO: 118885 - DNA, 1003 bp, Heterodera glycines
aaattaacaaaagggcatttcaaaaattttaactttgaattcgaaaatactaatatgctaataaataaattactgcatttttataaaaaaaccattttaacaaaaaattctaatttgtttataaaattgttactgaattcttagacttatgagggagggccttttcgcagaattgttttcgctagagaatgaatgaattggtcatccgccgttgttgatctcctttttctttgagacgttaataactcacataatcaatcgcagcgccggcggctatgttttttgcatagacatgaccaaataaatagtgggaagcgaccacataactgcaaagatcaaggggaactttggtgttgatcagcaaagtaaataattgagcagagatcactcattccttcacagtgactgaacccaatctgcgatacacccccaaaaatatggatcaattattcgatagtaattacctactactgtaggttggacctttcataagaattactgtgtcttttgggagctgtcatctcgtatgtgtttctaggaattgacacttttgaaagtcattacagcagaatttgcactaaaaacgatgaccatatttataaaattggtactcattttttgcacgttttttgccattatcgtgccttttggtttaattaaaatacttaaaattcagtttcttcaaaatgagaacattttaaataccattaaatcttcgccactgtttaacaaataatttttcaagtacaaataaataaatcggaaaaagggatatgtcatttaattaagtgtgtatttgaagttcggtccaaaattggcctccacttcgtctccggggttgttcaaggaaattgccggatataaatcgtcggcgtcttttgatgcgaagaagaaattggtatctgattgtgagaagggatgaggggggggataattagtattttatttttcgatttttaattaatttatttattttcccaccaaacaattcgctgccgtaatg

SEQ ID NO: 118886 - DNA, 992 bp, Heterodera glycines
ttgcgaaaacggcgagcgaattgatgtgaagaacggaagaacgaacgaacgatgagaaacggcgatgaggtcgcttttgaagtgttgttgttattgcacaatgaagggatgatgatgataaacgcaaatagttctgttctaaaaaaggaaaaaacataaaaacaatacataatgaaatgaattataaatttaaaaatagggaaattgcagtttttgtaaaaaaaatttgataaatttaggttcaaatttggtagtataggccagggaaactctgataaactttcaggtcgatgtcgataatttttggaattcgggtttggtatttactatgtctttttgaaacagtgaagtttatgaaattcacaaactgaaaattgacgaggaatcagaaaaacagagtaatcatccataaaagaaaaatgagtgaatgaaaagggaggaaaagggggcacaatatttatagtacgacgcaacaagggagggcaaaagttaggtaggtacgtaggtaggtaccattgcccaaattccaaggttttctctctatataaggaggtgttttctcattggactgacattttttgcattacgcctatatgcttttcttacttgttccctcctctattcagtccttaatgttctgatttaattttttgtgttacagagtacgcaaaatataattaacccgaatgtttccaattgttttttcaatcaaaattgactgtttctcacagaattttcctgctggacaatctaaacttggaatttaatcaaaaaaacacaaaaaattgcttttccctatttttaaaatttataattcatttcattatttatgtttttatgctttttcattttttagaacacaactatttgcgtttatcatcatcatcccttcattgtgcaacaacaacaacacttcaaaagcgacctcatcgccgtttctcatcgttcgttcgtccgtccttcacatcaattcgctcgccgttttcgcaatg

SEQ ID NO: 118887 - DNA, 413 bp, Heterodera glycines
gatttaggttttttttcgccaaaggtcgaaacaattgccaccattagtgagccattatttattactagaggtaatcttctttacagacgaattatcgaaacactgagcactaattcataaaaaggaaaaaaatttgttccataaaaatatacaaaagggaaaacaattttaaaaggaccaacggatattgaaaaaattcgggaagaatttgagcagaaaatgtataaaaatacgaagcaaaatgccaaaatgaatcaatgaaaaattttacactttttatttcgtcaacatttcataaaaatccttttcacaaaatgattgaaactcttctgattttttagaatttttatgaaaaattgaaaaaatttcaaaaaattttccatttttttcagaaaaatactgaaaaaggcatg

SEQ ID NO: 118888 - DNA, 396 bp, Heterodera glycines
agtagtgatgctcgagagtctcggtctcgactcgagaaaagtctcgggtttttttggtctcggtttcgagtctcggtctcgggttttcaagtctcggtctcgattttcgagactcgagaccgagacttttttacacccctaatgattgttggcctttggtaaacttctatttttataaatttaggttcttttttgttcaaatttgttaatatatgcgtggtcagcgggttgtgttcttggttttgttacttatttttgcgttggatcagttcccctccaagtattattttttcttctcatttttcaaaattaatgtttttttcgatgggagttcaaacacaattttaacaattaaaatcgtaaaaatgtaatttttggactaaatctattaacatg

SEQ ID NO: 118889 - DNA, 578 bp, Heterodera glycines
ttgccttggtgatgcttttttgaatgaaatgcttttattttaaagaattatgttaagaaattggtggaaaaaaatgagcaggaaaaaatgtcagcaccgcttagaataattggcttttcaataagaaaatgaagaaatattcagttaatcaattaaataaaaaaataaaaattgcttctttattgattcacttgaaataaatccacgttaatattattatgtttgcttgcatatctttaattattaatgcttgctccatgttaaaagccatatagcgagtagttatatattcttaggaatgtgttgttggtgtcctctatctgcatactaaaattcaagaagttttattcagttacaaaaaagttatggccataaatgttttccaagttggtttttattgcggcgacaaaacggaagaataattaattagttttaattaaaaattaaattgaaatttgccatatttttataaattgttttaattaccaaaatttacatttgaattcaatgaaaatttagaaaagaaattgttcaacgaaagtgctggtcactttaattcacaagtgatcctcaccatg

SEQ ID NO: 118890 - DNA, 223 bp, Heterodera glycines
ttatttgcgaatataaaaaactaaatttaaaaaaattaacgaaaagaagtaataaagtgagtaaagcagtgaaaaatatgagcgaatattaagctatttataagaattttttgttgtatttctaggttaaacaaacaataaactgtataaaaacggaaatcgtgatcattttattcatcctttattcaaaatacattgaaattaaacaactaaattaataatg

SEQ ID NO: 118891 - DNA, 169 bp, Heterodera glycines
ctaacatttagcctttcctgatcgtttattgttgttgataaatctttcgatttggttttgtttttctccattatttgcttcattttcaatcacttccgttccgttacttaaccactcacttgctgagaaagtcattcaaagaaaatatttttttgtgacgcgaaacatg

SEQ ID NO: 118892 - DNA, 206 bp, Heterodera glycines
  unsure (1)..(206): unsure at all n locations
aaaatgtcatgcaatancagtgtgtccaatggccccatctttaaacgatagaaaattttgctcctaatggatttttgattaataaaattcagtcgtccgattggttggtgtttttaggacaaaaaattgaaaggaaaaaatacaacaaaaaaaagagaaataacgggaaattacagttggatgacattaaacaaaatgacgatatg

SEQ ID NO: 118893 - DNA, 121 bp, Heterodera glycines
agaagaggtgcaacttgattaagaaaggtaaaacagtgattagaagagatacaacagtgattagaagaggtacaacagtgatagaagaggtataactgtgattagaagaggtacaataatg

SEQ ID NO: 118894 - DNA, 627 bp, Heterodera glycines
ttgtatgattttatgattatttaactcttaaagtaaaatttctcatttttttattttaaaattactaactaactaataatgcatttttaggagcttaggttttttgtgaaaaaatttatttgatctgtcaaatgataaatgcatcgagtgattcattcctttacaccgctttattttgtcatcgcttcactattattttcaaaaaaattatgcaataataattcactaaaaataataataatattttttaaattttacatattattaaacaaaaatataaaatcccaatgaaaatagtcaaaaaattattcgaaataaatttggaaaacgtacctttcaatgaatttaatgaattaaacctgatcatccttttaatcgcttttaattaattttttaattactttttattgtgtacgccacgcattaaattaaatttggtctttcagctataaaatttccccaatgccaagcatcatcattacggccacttttgtagcggtggtacttttcacttgcgcttttttggacctttgccatggtaaaaaaacattttcaatctcaatatatttaattgcttttttaataaagcattgacttgcaaaagccgttcgataatggagaaaaatg

SEQ ID NO: 118895 - DNA, 599 bp, Heterodera glycines
attcctatttttatattgtttggcattttctttttgaccaaaattgaagttgcatggaacttggaattttaggcaaaaaccgtgacagtgaattgacgggaccaaaaaattagaaccgggactatgttttaaaccggaaaccggatccaacttgtgaattgcaagaaaaaatcaaaagttttatttcttgcgtaaatttattcagctcactcatcctgttgtttatgacatgaaaataaatagaatttgtctcccttctatttatactgcaagaaatgggcatttggcgtattttttggggtatggactgaccaaaggcggtatgtcatttaaatatttatttggaaaaattttcgagcaaatataatcatttttaatttcgccgttaattataaacgggaattcaaatatgtgcttattcgacatataattttttgttcttaagctctcgagcttgctgggacaaaccgaacaaagtcaaccaaattacgcgaagactttgtacaattgagggttggcccgccatgcccagttaactttttatgtaccaattcccaaacacacccaacacgtcacacgacacccgtattatcttaatg

SEQ ID NO: 118896 - DNA, 923 bp, Heterodera glycines
tttgaaaaaaaaaaatttgttgaaattaattggattttatctgaaatatttttaaattaatttgacttatttattttcatttttatttggactaataaattgtaaaatgaatgcttttcacatttttgttcgttttccatttggcttttttaatgaatcattcactttccatcccacaaatattctttctgcagccactgttctgatgactaattgaaaatgatcaaaaaaaaaaattttatgataattattcactgggaaaatggacaaataaaaatgatttatgttaattaaatgtgcaaattattttttaattaaataaataaaaaagcaataaaaatgatttggtgccatattaattaattaaaaataattcggtgtcatattaattaatacaatacataataatttagagtgtcatattatttaattaattatcaattgagtgccattaatttcggcttcggtatttttggcacaaatgtatgaatcttaaataattttaattttaagatgttttttgtaaatttaaattttgttattttttgcttttctatccatcttttcgctgtttccaatgccaataacacaatgtaatcaaaaaaaaaattatcaaatattcaaatgatcatttactaatctgaagcaattaagcaaagtgccgttggaatttagaccattttgcacattaaaagtgaaatatgaaattcatggaaattgtgaaaggtaattaattgaaactaattaaaggcatttcaattaattaatttgctttaattaattaacccaattaagtttttcgttgtgttacaaaagtgaattattattcggcaacaaaaattattcatggaaattggcgaaaagatttaaatttgacaaaacattcactgaaaaggcaaatgaagaacaatgtggagaaaatg

SEQ ID NO: 118897 - DNA, 812 bp, Heterodera glycines
ttctttttcttcaatattcattctctctttctctttgtcgctcttctgctaatctttctccaggtatttttcattgcgaagaatcgaagaaagataatcaaagggttggaaacgaacaggcaacaaaagggacagaagaaagagaggggaagtgagaagggaaagaatgagaaaagcaatggaaagagagagagagtaagagaaatgaaagagtgcgaaagagcgatggaaaaggaaataagagaagaaagaaaagaaagggagaacgggaagagagaaagtaaaattcaatgaaaagaacttaaaaaaggaattttttgcctataagaaataggtgagtgaaaaagatgtccttttttcactctttcctcttccgtctgcattttctatgctctcttcgttcgtttgactctctcttttatattactctacttttcgctctttatcagttatttttgtcagtcttatgacttgctgtctttctcgtctcgtcttccattacagttgtctttcttgctaaatgcataatgaactctggccaactgtgtatgaatggcctgaagggggaggtgaagaaacctaatacatgattaattgctatatttttaattatttatcacttacttttactcattgtttagctatttttgtggaagaaaatgttgaaggcaaaaaaaggaagttgtcacgggaatggcaaacattgaaagtcgaaaaaaggggttgaagaaccttcaaagacatggagacggtgctcaagtatgttccattggtattaacaaaaaactcgaactttttcctgtccaagcatg

SEQ ID NO: 118898 - DNA, 175 bp, Heterodera glycines
cccaatgtggcggaatttaagaaacgacccagcacgattacgaggtctcaaaaatagcgatagacttggcctgagagaaatcacttataaattgccttaaattttagttttgattgccttctacagaagcttttatcatgtgattgggaccaatgaggccatctcacaaatcatg

SEQ ID NO: 118899 - DNA, 198 bp, Heterodera glycines
tcgctcagggccgtgatttaagggatgccgtcagggaacactcaagacaggggctgactaaccttaccgataagttacaacaatgtgggaaaggaaaaagggacctgatcactaataagaatcgaaaacgggtatatgatcagttaagtttcatctaaaggtataaatagaataaataatacaaagaattaaaaaatg

SEQ ID NO: 118900 - DNA, 89 bp, Heterodera glycines
tattacatataattattaattataaataaagaataaatagataaatattttaaaaaataaataaagaatatatttattatgtgtgtatg

SEQ ID NO: 118901 - DNA, 118 bp, Heterodera glycines
atatgttgaaggggatcctcgaatcccgttatttctggttggcatcaaaaattgggcaaaaaccagaaacattttgaatggttccggttatttaaacacattcggttggtctctcatg

SEQ ID NO: 118902 - DNA, 135 bp, Heterodera glycines
ggatgagtacctgaagatcgtcaacgatcgtggattgggaaaaagagccatccaggaggaacaactcgcagcacaattaaccgcaggacaactcgccacaagccgatcaatcgcgcagcttttttccaaggaatg

SEQ ID NO: 118903 - DNA, 339 bp, Heterodera glycines
ttcttgtcttttttggctgattttccgtttgattttaaaggcatctttcttctttgtcctgctccctattggcattcgctgaaggaatgtgccatcgaaattccgtagtgcagaattcaagaatttggtatttatttaattctgctatttatcaataggcaaaataatcaggtcacagaattggtgaatgccttgcggaactgcgcttcggagttgctgcctttgcctgatgaagcacagaaactaacgctgaagaatattggtgggtggattctatggtttgatgcaaaaaccaacatttccaatttgtgttaagaacatgataaattccgcatgatg

SEQ ID NO: 118904 - DNA, 181 bp, Heterodera glycines
ttttgtagttaataaaagcttaactgtcaaaacattaaaagtaattttaaaaaattagcaaattatttgaatgcaattttttcgatactcactcgtacgaaaacggccgtacgaaaacgtctccggtacgaaaacggcggtacgaaaacgtctcaggtacgaaaacggcggtacgaaaatg

SEQ ID NO: 118905 - DNA, 678 bp, Heterodera glycines
ttgcggcgcgcactttgcttgagaagacgcattcgctaagtggacggatcacttcagttaacagccctcgttccgtgcaaaagccaaattatttcccatttaacacacaaaaacatttcaattctttgtgacgtaaatatttttctcgctctccaagatttacttatttttctgtttttcatcgataaaattcaaattttgccttaaaaatgaaaaaaagtcattaaaaaaatatcaaaaattgcaaaaagaaaaaaaagaaaaaaaaggaaaatttttgagcatttttggatatcttgccaagaatttgagtgcaaaaaagctactttcgtaaaaaataaaaataaaatttccaaaaaatccccaaaatatgtgctaaaaaaattagtgaattaatgacatcagatgagaacgaaaatgtgatatttgtgatagttaccttaaaaatctccataattatagttatctcatattaattactacccaattcgctgataaaaggaaaatttaataattgaattattataaaaatgttgtatcaaattaatgaaataatgattaaatgtggttaatattgattgaagaaaaattaagccatgctataaaattaataattacaaaattcattgcgaaaaatatttttataaaaataattcattatatttttacaaaaaaatg

SEQ ID NO: 118906 - DNA, 286 bp, Heterodera glycines
  unsure (1)..(286): unsure at all n locations
cctttggacgatgccaatttcgcgaccagtcatcactttgttcgtttcggctccgcactcattcaataatttgtaagttcacaaatggtaagcttcaccacttttttggccagcttggcctttanctcggccaatcccagcgttattcactctttgcatgcgatgaatattaattggatttttgacaatttgccgtataaaagggagggcaaacgaaggcaaaagcacacgccgtccacaccattcaatcaaaaccaaccaaatccccactcattagctcattatg

SEQ ID NO: 118907 - DNA, 198 bp, Heterodera glycines
ttacctccggcggaccgctcaagcatcgtaagaataccttcgagtgttaaggacagtccttcgaaaacggaaaagggcaaaccgcccgaaaaataacccaatcccaaactccgatcatttccctccggcggactcgactgatcaggcgtggtcagatcaatttcgggaaggaattttgaaaaaaaaaaatcaggaatg

SEQ ID NO: 118908 - DNA, 1003 bp, Heterodera glycines
ttttgcattcttctggccatgttgaatttggttgacaaagaaaaaaagttatagtccaaaaaccacgctgaggccgggcccaactgaactaaaccgttttatggcttgttcaaataataataatggacctttttttaagaatattattttgaataatttgatcaatttccgctaaaatcatttttgttttatttcgtagtgaccgtttggggctgtgccgtgccgtcttgtccgagaggcgtgtactcaaagccgaatggcctggaatgccacagcacttcgtgttgcgagggcaactattgcaatggcgcggctgggccgtacaattttggcatttttgccacggtttttatcaccaccatgacaagtggtatacaaatagtatatagtatagaataggcccggaaatttcaaattagcgtatctcgctgcggaatttgaattcaaaatcctttgcgggatgggattctgcggttaatcccgcaaaatcacgatttctaaaaaaatggcgggattggtgggctgggatttcgcaaaatcccgcgcgagatctccgtccctgtatagattattaatgattgtaaaatctaagaatactgtagtacaaaagttaaactttttaagaatttcgttataaaaattctatgaaaggcgaaaatttgaaaaattaccaaaatctataaaaaaaacaaataaaaatatactgtaattggattattgtaaatttgtttccaacattcaattcatgtttaaattttaaatcaccaatttgttaccgtattttcttgttttcagacaattctgattcacttacactttccattggtcaaaaggggaggttttctctgtaaaaatctcgccaaaaattccataattttttttggcatcgccttgacatttttccacacaaatttacgattaaaaattcttgaaaatcggggaattttcgggtaaaatctttgttaataatttttgattttagtgattttcattcgtcacaatg

SEQ ID NO: 118909 - DNA, 492 bp, Heterodera glycines
tttaaattctaaaaaactatttaccttacttagttaagttattaatttttgtcagatccattttcactcatttctctatcaactttactccaactgcattggtattttaatgtaattgaaatttaaaaagattttattcgaaattaatggccaaaatttgtaatctctaacattaaaataagcaatttaaatttcttcatgaactgctcgcttcagctgatgcgccccgttctactccccattttcagtacacatcggcagtctgaaaaattgaattttatccacataactattttatttttatttcatttttgtcacttaattatgtcatttaagaaatttttatttttgcagtgccattaattgggactttataacaaacattccaagcaacaaaagcaaagggcgttatttttattcaataattaatttcgtttttgaaaaaaaaatgtttgtctaactttttatttatgtattttctctttcagcatg

SEQ ID NO: 118910 - DNA, 529 bp, Heterodera glycines
tgaattatttaatgaaataattatattaaaatgtttattttaataaaaattaattaaagtttgtatttatcgcttagatttatttatttatttttgaattataattttcaagctttttagctttttaattttcttcaacttttcactttattaattcactttttcaggtttttttaaattttctataattatttattccaataataactaaataaaaataaaataactttattttttgataaattttattcttttacattatttaattattatgcataaaacagcactttcacaatgaatcatcaaatcatcagaatcggttcggtcgtccgtcgctcgacaaccaattcattcactttcattctcctcttattttcattgatcatcatcaaaaagcattcgatgttaagctaattctggtcggaattcatttattattattattgctttattaaaaaataaagttaataataataataataattttctacagataatttaaatttaaaaacaaaaccccctcaaaatg

SEQ ID NO: 118911 - DNA, 1003 bp, Heterodera glycines
aacttaattaacatacttgttagtctgtccacgacaattttgtctgttggcggcacatctttttcacatatttggcacaacgggcttttgaaatctctggagctcagacaaaaactcattttttttctaaatataatttcttaaaatggctcatggacaaaatggtcagcctatactactgatacagtatatttttttgtcgtaatatacatatcgtatctttgacgcattttttcggacaaacgtaattaaaaaataaaaattccgttaaagcaaatttgtattcaatttgactgaacaattcaatgtgctttctctcaatttgttttaagccacaatttgtttttgagtcagtgaacagctgtttgagtaagtaaaatgaacacattgcttttgaaagaaaaatttttttttattttttatatttattttgcctaatcaataaggaaaagcattgatagttgaaaatatttgaaaagttgaaaaaatgaatgaaaaaaaattagtttaaataaattaattaatttgatggattaaatatagtgagtgagtagattcaaacatatatatatatatatatgtattagaggtatttatatatttttttaattaaaatttaggaaattattttcaaaaatcttctcgtccaaaacaacaaaaataatttctgcctttttggaagagcaattaaaaattaattttgtgtccttcatcatggacttcttgtccataataagcatactttttgtcttagaatgaatgtgtcgataaaataaattggcacccacattttttttttgttcttggcaatttattttgacgagaaatttttatgtttccctggagattggaagggcaaggcgaattttaggagtaaaaattaaaaacaaaaattattgccaaaaaatttttttttggcaatatcttcaatgagcttaaaagcagtcatttttgaacattacttctaaaaaacaaaaaaaaaatttcagctctctccaagatg

SEQ ID NO: 118912 - DNA, 742 bp, Heterodera glycines
gttccacacttttatgatgccccactcccttaggaggttgactacgtggtgcaaaagtgtgtccgggacgcgctccgtctgcgcgaaatgtcgccgctgtgggaaatggtgcaggagggcgtcgacctgaagaccatcaaatggacgcagcactgaataagctgcccattctcctctctctctctattcattttttgttgtcgccatcatttttaatggcccaaaaatatttgttttgtttttgtcgccccgtgtgattatttagactaaacaatcactcacaatatgatgctcctctctctctctctcctctctgtacaagggcatagcaatgttaaaaaaaatccaaaatgcatactcgaaagaaaacaaatttttgaaaactaaaaattttcgagaaattttcatatttcggctaaaatcctcccctcctcattttcataaaataaataatttgaacataaaaaaggcatcccctcgggggtttttggggctcctatcggaagtaaaaaattggcctatggctatgtcctttattctcctcaataatatgcattctctcttctctcgtccgctgaatttattttttatttgctcatatttatttttgagtcatttaaaaatgttttaaaaaggcatgctaattactttaatattaccgtttttctcaattacgctatttttcttccttttttttttgttcctaatttacatttttatttgccaaaaagcaatcactatg

SEQ ID NO: 118913 - DNA, 1003 bp, Heterodera glycines
atatgaatttttgataaaattttccatttctcaggggtgtatttttcgtttttattgcatttttgttaataatttttttcaaaatagcagaaaatattttacaaaaaattcttcaaaatgaaaaagagcacaaaaaagcaataaatttattattattaacaggttatatcgctccaatttgattcggttttttttcggtttttgaaaaaagtcggtcggttttttcggttttttgattatttcggtcggtcggtttcggtataaaaaccgaaaccgaaaaaaaccgaaaaactcaaaaaattttcggtcggtcggtttcggttaaaaaaccgaaaccgaaaaccgaaaaataccgaaaaataccgaaaaaaaaccgaccggtccgatctctactttaaaccctcaaaaactccaaaaaatgtgtatttattcaatttttggttaaacaaagttaaaaaatacactaaaaagcttaaattaaaaaaacaaataaaatatttattttatattagtctaaatttttggcttttcaactccaaaagttgctaaaacacctcctaaaatttgggacgtttaagacaaagaaagaagaccagctcattgaatattacaattcttctcttcattggattcatcattaattttccgtcatcattatcatttctaaaatttcttgctttctttatccccactgtttctcctctaattgtccctctcattttccccttctcccaaaggggggccaaccatcgaaaattggagttggcattggcattgctcattcggtgggcgtgggggacacttggtaccctctgctgtccgcttctcctcctcctcctttaggcccttcccttccccccccccccggccaatgccaatttccctcttctcgactcctccgccgaaatgagcctgatttgattaccatccgtccttcctgtggccatggcgtggcccacttatattttgacaagggctatagcacactttttagtccaccatg

SEQ ID NO: 118914 - DNA, 67 bp, Heterodera glycines
aatgccatcaaagtttactgctggaacaaatttgcaagaacaccaacaaatatcgtatccacaaatg

SEQ ID NO: 118915 - DNA, 731 bp, Heterodera glycines
ttttttattagaatctgaaatttctttgtttagaagaaaatttgaaatgacataaaaatgaaatgaatgatttatttgatgcaaaaacattatagatattgtatattctctctttttattttctctttgacattatgtatttccaataggcgaaatgaatgtttctggcttagtaggcgaaatgaatgtttttggtttggtaggcgaaatgaatatttttggtttggtaggcgaaataaatagtaggcgaaatgtcagtaggcgaaatgaatagtaggcgaaatgacagtaggcgaaatgttcggttttgggttagtaagcgaaatgaatgtttttggcttagtaggcgaaatgtcatcgtgccagcagaatcactgccttagcattttccctcattttcgtttgtgccagtgtttatttgttagttcggcttttccattataacttttttatttgtcacccaaatgcaacaatcttggtatcattcggaagctcatatgtttcgtgcgtttcataccatagggataaaaacctaaaatataagccctaactatgaacttttgaatgtttcctaatttgtccgggttttaccgtttgaaaaagttaagagtgcatccatttagtccattatgtatttcgatttaaaaacttcataaatcgtcttttttcgttatcatagcgattcacactccgtattcaatcgatatacctttcaatttatctttactatg

SEQ ID NO: 118916 - DNA, 185 bp, Heterodera glycines
tgagttggacgtgagtaggggtgtaaatgtcaggtcaaaaaatcggaaaaaagggggcggtcgaaacgtcgcggaaaattttgacgaaaattaatatctgacaattgtttaacttaggaaagctcttaccaattcttaaaatatcgaatgttttaaagacacaatttcaggacgcgaccgaaatg

SEQ ID NO: 118917 - DNA, 212 bp, Heterodera glycines
tttttcaaaaaattagttttaatgaatgattaaagtgtatacttaagcatacaatctgcacttaaataggctgctatgtacgattttttgaagcgaattttttagcgcaaaatttgaatacaaattttgagggtgtgtagtgagtgattcgaccattcattctttcaaaaagcacgcattcacttttcgtgtaactaactcctgctcagatg

SEQ ID NO: 118918 - DNA, 76 bp, Heterodera glycines
aaaagcattcaataaaataatataaatctttttttgaatttaaccatttaaaaaaaatatcaaactcgacaaaatg

SEQ ID NO: 118919 - DNA, 171 bp, Heterodera glycines
tcctcgccccgccgaatctccccaaggacatcgacttggggattttcaaaaagccgattgccttatgtttgtagtcagtaattaaacaacattttcttaaattattctcaaatttagggtcgagattggagcgaggactgtgccacttgtgcggcattcatgggcgccatg

SEQ ID NO: 118920 - DNA, 680 bp, Heterodera glycines
attttaaaggaaattcagtcacttagttttggtaactccctccctcccacttgggcaaaaatgtttgataatttataaataaagaaaactcatttatgaaatatctttttttgaaaggttattcggcaatttgccagtcgaccagttgccaccaccaagcaatttaattggttttaaagagatttacatcaggtagataaatacttttattttgtatataaaaaattcttatcccccatgctgcccctataaaaaatgtaagaaaaattaaaaacaaaataccttattatgtatatagcacatgtttcggaacctaaatgaattcgactcaatccaattttaaatttcaacaataatttttgctagattttttaaaaaggaggacacgtagagctctagctgcctgcttcttacaataccaagattgattatttgattaaatttagctaaattatgatttattattttgcaaacaaataatataataattaaatttaaaatattactatcattgatacttttgtaacttcttctctccacggacaccacaccggtggtccgggggtttggagatttagtaaataaataaactaaattaataacatttaaccggcacgttcagttactttgacaactctgtgctctcattgctccattgcttaacgccgcttttcaaaatg

SEQ ID NO: 118921 - DNA, 67 bp, Heterodera glycines
gaagatttttgtaatttattttattttttagatttttgtaatttggttttattttttctagtcaatg

SEQ ID NO: 118922 - DNA, 552 bp, Heterodera glycines
tgattccactcgttccaagcaccccaccaaaagcaaaacgatataaccaaaatataagtaaaaattttttctccatcttcctttttgatactaaagcatcagagtgctaaaattaagttgtaaataaaattttggtgcactttagagcactttctgaaaaaaatatttatcgaaacaaaaaaatcgattttttcaagtgtccgtttggggtactcaaacatttatggggagcaaaaatccaacgcagaattaaagtacaggctatagggaagctattcccgagggattcggtctccccataaatctgggcgcatcggttcggggggactgaccgaaaacaaaaaaatcgattttttcaagtgtccgtttggggtactcaaacaattatggggagcaaaaatccaaagcagaattaaagtacaggctatagggaagctattcccgagggattcggtctccccataaatctgggcgcatcggttcggtgggactgaccgaaaacaaaaaaatcgattttttcaagtgtccgtttggggtactcaaacaattatg

SEQ ID NO: 118923 - DNA, 110 bp, Heterodera glycines; identical to SEQ ID NO: 98226

SEQ ID NO: 118924 - DNA, 461 bp, Heterodera glycines
tagaatcttccaaattaaacattcttggaatcatcaatagccctaagagtcctcaattagtttgtaaaattaaaaaaatagttgtttgtttcaaaaaatttacggtcaaaaatgtccgggaaacgagttttttgaagtttacaagccttaacttttttgatagactaaaagaggactcttacagctatcgaatgacaccaagaatgtttaatttaggtgattctataaatgatcccttaaattctgggctttgttcctgttttggctctatggttcctttagttagtttagaaaaatgcatagctaccgacaggcgcccacataatttcatgttgcaatggcttttccttttagactttcttcatccatcaaatggaattttttatcattgtgcatgcgttgagcatccaatttcgttggacgaagcgctgcggcgcggtttcatcaaattgccgagcatg

SEQ ID NO: 118925 - DNA, 254 bp, Heterodera glycines
tccgccaacggcggttccgcgcttcggccgcgtgcttttcttacggatgcgcaagtgaaaattctggcggaacaattccgccgcaattccttgccgagcaaataccaactgtcggaaatggcggaacagatcggagtgaacaaaagagtggtgcaggtgggcgcgggaagaagaaaggcatgggcggataatgagtgcttaattaatccattggaatcgctttttcgacttcacaggtttggttccaaaatatg

SEQ ID NO: 118926 - DNA, 233 bp, Heterodera glycines
aaaaataattgccataattgtgagaaagaagtgtttgttcatttgaaatatttgaatcactgtcgataatgagaccaaacatttaatttatacactttttacatgtgacttttatgtacaataaacaaatgaaaatggatattttactaaattgttttttgaatcgttttgccttttcacttcatattttctcattgtgctctttccacgttcgttaattctgtttctcgatg

SEQ ID NO: 118927 - DNA, 1003 bp, Heterodera glycines
tttttcgtcatcttgagggtgtccttacaaattagtatctttgcccctctacccccccccacatttataaattttgtacgattggcaaatgatttgtcgcttttgctcatttgcctcggttccattatgcccaaaaggcatatttttagttcaccaatttcatcgcaaaattctgaacaattatgctttttcgcactttcgttttccacttaatgtaatgtcgatttgcttgtcataattagtctagtttaattaaaattagaaattttatttgttaaaaaagttaataattcatatttgtcttttaattaaaatgtttttgtatttaaaaaatttttataataaaagcataaaagccattaattatttaaatattaatttatataaatttcttaattaatctaactttttcaaatattgacaagataaaatttagtacaccaatgacgatttttggtcatttgagatcatcaacagattccgcaaatccttgaccgcgattttttacggaagataaaataatgggtcaaagcgtccgaccgtcgtaagctatttttgaacggtgaatgaacgaaattttggtaattaattaattgatgcgattacacacatttgttccaatttttgcaaataaatacgcactgaaaaccgatgagattattcagtgtcatttcattcagttaattaattttcttttaattaatttaaaattttttttttcgaaaatttttcgagttaatttattttgaagataaaataaaataaaagaaattgaatttgtttttgtttttttaagaattatttaacataatgaattcaatttcagcaacataaactgcatttaataacacatttaaaaatatttaattttgccaaaaccgttatccgaaatttcgataaaaattatctttttcctaataagattctctttaaatacaaaactaattattcaccaataattaatatttcttagaaaacattttccagaccaaaaaaaagcatg

SEQ ID NO: 118928 - DNA, 95 bp, Heterodera glycines
  unsure (1)..(95): unsure at all n locations
atatttttaaanttgaagcaaaaattggggacaaacacgttcccccgagcttcttctcgcaaaataaggacgacattaatatggtcacaaaaatg

SEQ ID NO: 118929 - DNA, 163 bp, Heterodera glycines
tgatcgcggatcgggcgattctgtccgagcaggagcccattgagcgggcatgacgtgccagcgaagccgaggcggaagcgcaacgcgcaaaactatcccagctgagggtttgtggggttgtgccatttcaggcgcaattcgcttgccaatgttgaaaaatatg

SEQ ID NO: 118930 - DNA, 637 bp, Heterodera glycines
attgcttttatgatgtttattgtttagcatctgctaaatgaatgttatcataaaatgagcaacatttggtggatcttgtttgtggattatgcagatttctcgcctaatgtgggggttggcttgtcatcccacggggtgggtcgcctgcaggaggaacttgctccggcccaccccacggggtggggcgcccagcgaccaacccctctgtccttggggctagaccacgcccacttggctgggcgacccctataaaagggcagccattttgtctcagtgatcattctcaacaattcatttttgttgtcatgtgggggttatgtgggggttggcttgtcatcccacggggtgggtcgcctgcaggaggaacttgctccggcccaccccacggggtgggtcgcctttcaagtgctccagtttctttaaattttttagattattaggtgatatgcgtatgcttaaagctattttaacagccaatataccaaattaattattgactttattcatctgtcttcattacaactgggttttcattgtagagaatttaccatccgaaggattttcctccgactgtatcatttccatccgacggacagacaactggtacaactattccatccgagggcagacaaacatg

SEQ ID NO: 118931 - DNA, 172 bp, Heterodera glycines
  unsure (1)..(172): unsure at all n locations
aaagtatcattncatttaattattcttttacntatataaggggtacaaatanttatgggattaattgagaaatatacnacatttgaagaaatataattaaattaaatattaaattttctttgtataacttaattttataattattcttttaaaaaaatttcagatatcaatg

SEQ ID NO: 118932 - DNA, 105 bp, Heterodera glycines
ttttctatgcaacaaacgctctcgaacatgaaacgaagtgcggggcgccgtggccattttatttttcaaataatttttaaatttaatacatattccagaaaaatg

SEQ ID NO: 118933 - DNA, 1003 bp, Heterodera glycines
gttggattggacaacagtaccgactaatattaaaccggcaatgcaaaaaaggctggaggagaacagcggagaattttggtaattaatcagtagagaccggatttttcaccatcaaaaaatgataattaagcacataattcagcataaaaaaatactaaaataagcacaaaatcagcatgaaaatggtaaaattattttaaatgtatttttcaagaaaaaaaaattttggggattaattttcgagaaaattttccatttttaggagtgtattttttgaaattttgaagtccattataggggtgtatttttcgtttttattgttgggagacagtgttttagtcaaaattttataataccaatcaagcaaaaaataagcacgaaaatgctaaattcagcacaaaaattacatgcgcaacattaagcatgaaaatactatttaagcaaaaaccagcatgaaaaagttggaccaagaagcttcaaaccaagttttaaatacttttttcatacttattagcacgccccgggttagcaaaaaatttcagaaaatgctgcaaaatccgggttctagtaatctgtttcacattttaaacttaaattattaaatgctatcattttaccatatttatatgcatttaacaatgttttttaagtcgctagggtttttgggaaaatttgggtttacatttttgtcagtttaataattttttaaatgattttaaaagatcataactttgaaaaagtggtcaggtttaaatttttggaccatatttaaaagagattaggtttatttttttgcaaatgccataaatgtggtaaaatagcaggttacattaaatgtcatcttttgccaattggattttattaaaaaattaaatggaacaatttgctagggtttcattggacgacttgatccgatggtttgcaagaattcatatttgctttttggagccttcggcaatttgggaagtgaataagatgttaccgaacagtaacattcaaaatg

SEQ ID NO: 118934 - DNA, 311 bp, Heterodera glycines
attcttttacattaatttaaaagtagtgacaaatttgtagtgacctttatttctacttaaacaatttatcactttttaaaaaattttatatttcctacaaacctagatcagccctattatggcacctttaaccaattaataaaagcatttacaggtataaagctttcagatttttgaaattactatttttaaattctaaagaaaaaattaattgcttcttggtatcggagaatgccggattaatagggcttaaaaataaatgcatataaaaacctctaaaaattattttaggaaaaactttgtaaaacatg

SEQ ID NO: 118935 - DNA, 1003 bp, Heterodera glycines
gtcgctcatcaaacttcgatcaatttgtcgtcctccgttcgaattgagctttttcattcgatcgctttgcaatttattcgcttttccttttgtccaaacccatcgaccaacagaagttgccttattaaattaatgggtgccaaaaataacggcgacagcaatttgaaacggcgcactcggctgatcatcgacttggcctaccgatcggcgcttcttttattgctggccaatcagcggcacttggcacgaacaacattcagtaaaattcagtaaaaatatgtcagaaacatttaaaatcgaaatttgtttcctttttttacttcgatgcttttcattccgtcaattgcttttgcttctttttccgtccgtttcccttttcatttttcgatgctttcgcactttctcaggttggcccagggcgcgcattccctttgaggacgacccgcggctgctggtcgacccggaccaagcggttgcactgaacaacgcccgcatggacctgcaggtacgcacctgcgtccgcttagtgccgcgtcgtgccgaggcggattatgtgttcttcagcgacctcggcccgcacattgagtgagctttaggcattttaaatttgaaatcattaattggtcttgatcaactcattattatttatcgtttcgatttattataaaagccaatttgtgctgcttcagatgctggaatatgttcgaaccgttcccgccgaaagggcgaattctggtcaatgccggtacttcctgccttgagccgatgcgccgtccccaccggccacggcgcgtattcagcgattgtgagttgatttttaatatgtttgaatgtcactgtttctacacaatgccaacacattggttcaggtgacattgagtacattaaccatttgtacaattgcccacggcggagaaagtcttcgcccatttgcccagcggggcgactaattatggcaaaaccgatggaactgcgccagctgcagcaccacacaacgccaatg

SEQ ID NO: 118936 - DNA, 357 bp, Heterodera glycines
tttttttcgtccatattataatccatattttggctttttttgtcaatggtccctactaattaggtatgtatctaattaaaagttggttctcggtgacggtgatttagtcgtcagtgaatgatctcgtaatttaaatttttctgttcccatgtctgcctttttgaaatgcagagacgcatattttgagtgtctctctccattctctccaatacaaacaatggaacagagaaaacaaattgtgaaaatagtgtgtggaaagacaatttctgccgttcaaaataatttcgccaaaagtgggacaccaaacttaacaaaaaaaactacttgaaaaataatttataaagccaatcgctaatg

SEQ ID NO: 118937 - DNA, 293 bp, Heterodera glycines
gatttccttttttctaatctctttaaattcaagatcttctaagatatattttattcatctaaaaaaatgtgcttttcttgtctgagttattctgtttgtggttgaatttttaaaatgagtcggcccattaataattaattaggctagacaaacccattcaaaacggcaattattgttattattattatttgttccctttaaattttccccaaaatcttggccatttttctttttgccaatggaatttaaaattttgtccatttgaagagttaaacaaaaaattggaataaatg

SEQ ID NO: 118938 - DNA, 74 bp, Heterodera glycines
ataatttgggtttggctaatgagtatattggtaaactgagtcgagacaatgcaatccgtaaggaagcggaaatg

SEQ ID NO: 118939 - DNA, 878 bp, Heterodera glycines
attattatttattaataagtgtgaaaaatattatattttaacaaaatcgatatagttattactttttctttttcctataaatttaacttaaaatacatatttatcctaattattgaaaaatagtagaatttaaactaatccaattaaaactcagggagattctggttcggctcttgttgtggacatttcttctcgttcttacgcagttggacttttttcaatgcttaccactaactcgtccttccgcaacgttcaggcaggcatgtttttcaaggcttttcaaataaattttgagcgcatttttatgtatttctatattttcacaaccttcggataattgacatgcaaattattagttttagtttgtttttatttcttcatttaaaatcttttgagcccgggaatcggcactttggcactgatcaaaaaaataggccaaatttctacccgctcttacaatttaacttgaagaaaaaaaaagcgagcgggcaaaacagcattcaaaaaaatccggttttgccaattgagcgccagcagaggttttaaaaacttgaattttcataaaataatcggattttgttcatatttggcaagttcaatgataataaaaagacatttttgttttcttatttataattattgagttaaaacgaaaatcgtgagttagtgccgaaatcccagttccgcgggcttcaatattttacttccttcaattaacttattttccatgaaactttttcatgcttttaattaaatttgtttaagcatttataaaattggatatggttttttgtgaaatacaaccttaatatgcaccttacatatttatcagattttgcatcccaatctcagatgtgtttattcgtagctcagagatg

SEQ ID NO: 118940 - DNA, 333 bp, Heterodera glycines
  unsure (1)..(333): unsure at all n locations
aattccggcactcttcnagcctgaaaaagggcaagcgcgccctaattctatttttcctacacatttctgacctatttacatcgattctgaccctttttgagcaattttgagtttgggacctaaaagcatattttcctaaattttgttaaaaaaggcttttgaacctttttttttattaaaaaagctttttacaaaataaaaaatgatctataagattgataatgttgccaaatttcataaccccatttttatctgtgcttatttggaaccctgactcgaggaaaaacagatacaggatgtgatttgaattttcgaaaaacttaaacttagatg

SEQ ID NO: 118941 - DNA, 1003 bp, Heterodera glycines
ggttaggttaaacaaatattaggagctataaaatcaaaaaaattcgtgatattattgtccattcattcattcattcattcattattaacatatcccaccagcccattcattatctcaatgctccaaaacgaagattcctgcatgaatgagccaaaacaagaagtcaacatttcatcaccaaaagttcaatcctggaaactttttcgtccaaaatacatgttgacttaccgcttgtgcgactgtaagtttatcaaattagcaaaaatatttgactttgtggtttaagtatgtctttcggctctttggtccaacaaaaacaaattcacgactaacgaagaacgatcagtgatcagttttgaactctgtgagaagtgcaccattgacaattgccgagcgactgatgttttggccccgtacagaccaaagaaataactcttcataagaatgcaatagttagggacaaatcaatatttttcattcagtacatcattaaatttgttatttaatttctcaaataaaatgtcaatattcggaattccctctcaattattttccccgattaatcggcacctttcagtcttccattgctctcgagttccttaatgtttgcacaaatattgccgagaaaattttcctctccgcgattagcaattgccctttcccgtcatttgaattacgcttgcccttccgcgcagagagtgtttatattagttgagcattaggagctaatcggcggtagctaaaaaaggattttcgctcggcagttcaagcactcttcggcaaaaaacgacgatgagcagagaagaaatctgagatgtcagaatggcttccaatattaggtcgactgtatggggcgggaccaacaaaaatggtaaaccgagaggaacgacaattttagtcatttttgttagatttttgcgaaccaaaattgtttgttttatcgtttcgcccattctatttaattgaataataaattttaattttcagatagcaagcaaaaatg

SEQ ID NO: 118942 - DNA, 1003 bp, Heterodera glycines
aaaaggaaaaacataggaaaagtgacgacaaaaatttaaatgttttaactatgtctagtgtagaacataaaaggtaactcgcccggtgggactcgaacccacgaccccagcaatccgtgccgtgctctaaccaactgagctacgggcgcctcttttagaggttcttcaggtcctttatcccactttctcccacactccgttccttctggcatcacactaggccaaaatttcattttgaaaaaatttaaaaatttaacgaaaatgaaatgaataaaatttttgttgaaaattttggcagaggagagatgttttttagttttatattttaatggacattttgtcatttgatgaacaatttattttaattgctttttttggatatttgattctaaaaaaaacaaaattttatttttaaatacaactaaatgatattcattttaccaaaattccgaattaaccaattcaaaactttaacaaaatttttgtcatgactaaaactatttttttgcgtattttaagattttgttgatcgacaaaaagcggcttttgcgccatcggtgccgataggcgccgccgagggaaaaattgagaattttgaccatatttttagcagattttcattaaaaaattcttaatttttggtttttttttgggaaaaaattgattctattttcgttttgatgctctattaaaaacccaaattattaaataattgtcaaacattatgccaatttatcaaaatttaaaaagattctgaggattttccccaaaagcctcaaaaatcctcaaaattctcaaaaaattcacaaaaatcctcaaatcctcattttccaaaaaaaaatcctcattgacctatcaaaaagccacaaaatgaggataaatcctcagatctgggagccctggatatcatagtgcttcaaatatgtttcacattgcaaaactttatcttctcaatattttactcagatccccattcttacaggtgcatatttttttgcctatg

SEQ ID NO: 118943 - DNA, 217 bp, Heterodera glycines
ttttctaagaaaaaataggagttttgggggcgcggcggtgccgataggcgccgccggggaaaaaattggaaattttgatcatttataaacaggttttcactgaaaattagccaatttataggtaaaattttgaaaaattttatggcaatttaatccaattcttaggggtgtaaaagtcgcgtttcgcgccaaaaagcgaaatgcgaaaagcgaaatg

SEQ ID NO: 118944 - DNA, 627 bp, Heterodera glycines
aaaattttaaaatttgtttcaaattttatgaattgagggggaggaaaaaacaacaattaccccagacaaaatgcacaaccaaatcattttcttaaaaagggcttggaaaactggattttttattattgtataataaaaacaacacactttaaaaatgatgtgctctcaacaaataaaaaagtccaaaaaattaaaaaataaataattaaaggataaaaaaaatgcaaagtttttgtgacaatgaatgatccaaaattattaattgaccatcattgttaattggataatgaaaatttcgcacataactttcaggattaaaagtacaagtttttgactgaacggttttccggaattttttaactgtattttataggaaattttttatgatttatggaaaaaaaaatttggatagccgtggattactaaggctttaaggaattaatgaattaattaattttttagctcatcgacaaccattcgagcagctcatcccaacggcggttgtgcccaccaattctcagcgaagtgccatcaccgctcggcaatactgtagcgcaacagtcgctcggcacaactactgtatcgagggattcctaccgtatccaaataaacactttccaatcaatg

SEQ ID NO: 118945 - DNA, 128 bp, Heterodera glycines
taatcactaacctaacatcagttttggtcaattgcgaacctcggacccgaatttaaacaaaagtcgaaaattaatttttcaccaaatttcttgaactctgcttatacatatctgttttagcgtttatg

SEQ ID NO: 118946 - DNA, 63 bp, Heterodera glycines
ttgatcaactcgtcctgcgaaaatgccgatctgtcgctgagcaaagaggagctcaaatgcatg

SEQ ID NO: 118947 - DNA, 1003 bp, Heterodera glycines
agacattaaaatggaaaaattttctttgaaaataacggaatcggaaagattgttgcaatttattcaacgggaaagggacttcaaaaaagataatgagctcgtcttagaggaccaaagcacactttgtaaggcagcaaaaacaaaaagggcgataaaaaaacgcataattggtaataaaaagtaattacttaattaggtagatagatatgtacctaagtacatcgattaatgcactaaccaaccattaaatcacaatgcaacgatcaaatcaacaaacttatgaatgatcaaacatcaagcatttcactagagccctggagattgaagctaaactacatataatgctcgagatcgggcttattgttgttagacaattaagccgctcgataaaattccatcgaaaatgaaaagtgtttttctctgcagtctctctatttattggttcattttttgttttttgactcggtgtgaaaaacagtcgggggttttctttgtctataaaaatggggatgttcaatgtttctttacatttctaacgttcataattttttttttataattttcatttcttttcgtttggatgagtgtgtagtgagtgagtgccctttcctttttggggtttttgttgaataggcagtcccctccccccttttttgaatataaaatttgcattgattgtatgtacctcgtcagttacatgtactttttagaaaaacaccaaatcttttaagccttttaaagaattgaattgctcatttctttccgaataccaaaatatttaaattcatggtttccttagttttttcaatttgtttttcttttggatgggcgtgtcgtgcccttcttccctgtttgctttttgttgagtaggcggatcccctcatttttgaatataaaatttgcacagtttctctctctctctctcatcttcattttgcttttagaaaatcaatcatttgcttctctcaacaaatcttctctcttctttcattcaaataaaatg

SEQ ID NO: 118948 - DNA, 381 bp, Heterodera glycines
aagaaaatcatcgccttcaaaaaggtgaggaggcgttaaaaaaataaataatcagaaatcgtatataaatgtcaatcaaataaccatataatctaaataataaaagaagaattatcgagtttcttaagctttcgtatatttaaaaatgaaaaaattatttattaaatttacacgaaattattgtttttgatttattttttatcccaaaaaaaacgaataaccacaaaaagtgccaaaattaaatgtcatcttaataaaaacaataacaaattacattataattttactttaataataatatttattcgtataaattttcttgtaaagttatgatttgaataaataaattaactaattagtccataattatgtcgcggaatg

SEQ ID NO: 118949 - DNA, 1003 bp, Heterodera glycines
  unsure (1)..(1003): unsure at all n locations
gtgatcagcgacccaattttccccggcggcgcctatcggcatgtgggagccctgttaatgtatgacataattgcaaaaaaatttgagattttaatatcacagtacgaattggctttttaccattcatttcattgccattgttcgtcccaaaatcgattaatcgtttaaccgttggccatcccttccattcattgcctattttttcttcagaatttgnacatcttcgcccccccccacccctccccctttttctctaattgttttgtcattttgattttcccctttctcttttccatcaaatgcaaattcgtcctccccttcgctccaaattttgacatttgccaacaaataaaaatcataccaatcaattgtaatgcttttgttactttcaatttttacaatccactgacaaatgaagcacatatgtataaaaattttctgtctcccgtttcaatgctgcaacttagtgcgaaagctctaaattttcatgctaaacctccttgagccatttaaaattaagaataattttttgtagcctttagccagaatttagttaaacaaaaactcggctctgttctagtttacgcgtccattgagtaaccaccaccaccctcatttttttagatcataacttttttcttacttagtcaatccaaacattcttggtatcattcgaatgcgtagagtttagttatgacctaagtaacgtagagtggtcattgatgggacgcctaaattgtgatagagccatatcgtcaacctttttgttaagagcatcaaattaggcctaaaaatttttgtgaaaaatcaattactgaaatggccgccaaacccctctcttctgtggatcgcatgaaattgttgctgagttcgggggatggggcggacgttcactttttggtgggccaaagggacccaaaagaggcgagtgccgtggaaattcaaagcattacaaaattgttttggcttttagcttttgtcggctcacaaactcattctgatg

SEQ ID NO: 118950 - DNA, 494 bp, Heterodera glycines
taattgtccactatatgctgcaaagagtgtgacgtcaccaccgcgaggggtacggtagtccggtgaaaattcgcaataaattctgccgcaggcaagcggattcgaacttttgctctgccaccaaaaccaacacacaaccactctgccacgcgaccagttgccagaaaaaggataattgtccactatatgctgcaaagatgatgacgtcaccactgcgaggggtaccgtagtccagggaaaaaactttgaaaatacgcaaaacaagacaaaacgccacaatatatacataacgccataatttattgagacgaaaacctttcgcattagattcaaattcaaaatttggcgggaaaagtggcttggcgtcgttttttttgtttctatccttaatcctacccttttttcaaaatcattcttatcttctttcattatttattaacatgaatattttctgtttctgtcttttacaatgctgtttagccaaaccaactatg

SEQ ID NO: 118951 - DNA, 95 bp, Heterodera glycines
agtttgcaaattcgtattccattttagaaaaataaacaaaaaataaaattcggagaaataaatttattttcagagaataattttggagaattatg

SEQ ID NO: 118952 - DNA, 197 bp, Heterodera glycines
taaatggagtgagttatccttccgtagcgatttgctcactttgctatttggcggcccatcgccctcggcattgtccccctcccaagaaatggggaacattcctaaattcaagccgaaaaatgggtttctccaatacggtttcgtccattaaattaaaaaatccctccgctgaatagggtcgtctcaatcaaatgatg

SEQ ID NO: 118953 - DNA, 863 bp, Heterodera glycines
tccccccagtttgtccccctccttttccgacaaactttctggtgccacgacccgggaacacaaacccttcaccattcaattcactttcgaccatccatcactcttctctctgccgccagccgaccctttaggctcccggcaactcaacccttcgccgtccgccgaccatcttaggcctccggcactcaactcaagtcgccagccgccccctcttaggctcccgacaaaccctcaccgagtcgtcagccgcccctttcaggctttcgaccattcatcactcctctctgccgccagccgaccctttaggctcccggcaactcaacccttcgctgtccgccgaccatcttaggcctccggcactcatcactcaactcaagtcgccagccgcccttttaggctcccgacaaccgacaaaccctcaccgagtcgtcagccgcccatttcaggctttcgaccattcatcactcttctccaagccgccagccgccctttcaggctcccggctttcatcactcaactctttgtcgccagcccccctttaggcttccgacaagccctcaattgagtcgtcagccgtcctcttaagccgaccctttaggctcccggctttcaccactcaactcttatcgtcagccgtccctctcgggctctcggctaatctccactcaacccaccaaccgacagccgccttctctaggctctcgaccaaccaagcccgactcttgcgtccagccgccaatcctagactttcgtaaatgtcggaactcattcgtcaacgtctcaccgccgaagtccgaaccctttcggacctcgtcaagcgcctccgacaaagggtcgggaggctcactgaattcaccaggatg

SEQ ID NO: 118954 - DNA, 178 bp, Heterodera glycines
atggtgccctttttttgctcaaccaattaatcaagtcgaaaatttcctgcgctatttttcaaactttaaatagagataaatcgatgatccgactgtggttttctcaaagattaacttgttaagctaaatgacaaaaattaaaaataaacaaaccgtttttaggtgtatctctgcgatg

SEQ ID NO: 118955 - DNA, 696 bp, Heterodera glycines
atgggccaaattgaaaaataaaaagcgaactgcgaaaattgcgaaactgaaaaatgcgaaatgaaaaaaaagcgaaatgcgaaaagccaaaatatgcgaaaagcgaaacgcgaaatttttttcaaaaattttaccaatagtaaaatcatagattttgtggttgtgatgcaaaaaaaaaaacaaaaatctctgcattttccggttcaatctttttctcacatcacaaaaaatgacaaattctacccattttgtggttaaaatttcaaaaatcatggtaaaatgagggtccggcggtgccgtcaggcgcccccggaaaatttttttttggaaattgtaataaaatatgatatgtaggaaaagttgcaaaaatttcaaaaaatttactatttatttcaaaaaaatactgaaaaaggcatgaaaaaggcacaaaggtcaaaaaaggcaccaaaatcgcaaaaaggcaaaaaaatgcacctaaaagttcaaactagaagcttaaaaccaagttaaaaacgcgtttttcgtgcgtattagaccataacaagttagcaaaaaaggtaattattaatcctctgcagcccaaaataataataaactgaagcattcgttttaaaaattaaattttcaaatatattcattcttaggagtggaaatttcgcatttcgcgccaaagagcgaaatgtaaaaagcgaaatg

SEQ ID NO: 118956 - DNA, 82 bp, Heterodera glycines
tgtgggtatttaacatacaaatttaattggtaattaaatatgattcctaaatgaatattttaggttactctatcaaacaatg

SEQ ID NO: 118957 - DNA, 772 bp, Heterodera glycines
tgggacaggctgaaatatgttgaaagtatttatgaagaaaattgtgtgagtccaactcaaaacaaattcggaaattaggtaccaataaaggagcgcaccttcggtatgccgttgaaattcggaggagaagtcacgaaatgaagtgaacaaaagtgcggaggagaaagaaacggaaggaagagaaggatgaggagagattgaacgagataacagcgaaacgatcggtcgatacaatgacataaatgaaatgttaagtgaatgacgagggggggggggggggaaggacggacgatggggcgactgaaaagagcagggaaaagagggaggaaagagagaaagacccaaattggatgatcggattggagaggaaaattggaagggagttgctgattagaaggtaaactcagaaaaaagggaggacaaaatcggaagagttggagggagcgacaaattaagacacgaacaaatacaaaacataaaagtgttcgggttggggtgtttgcgttcagcaacttttgcattgagcggtggagagatgttgtttcagtacaaagaatgggccgatatatttaaagtacatgaaacatatacatacaacagaaactaatgaaagacacaaaatgttccgattttttaatttaaaatattttaaaatggcaattttttgtctatgcgtcgtatttttctcagagatggcaaatttgaaatttgtaattcaatagttttgtttttaatgcttttcagctctttcttttggccgtcctttcaaatg

SEQ ID NO: 118958 - DNA, 74 bp, Heterodera glycines
cgctgtccaaagaacaactcatcttctaatacgaagcgcgtctccgaaaacgcctacaaaacccagctccgatg

SEQ ID NO: 118959 - DNA, 602 bp, Heterodera glycines
aatggttggaacgatttctgtctcccggataatgctaacttaaaagagaagcaaatcccaatccatacacctggaatatgccagcctttagatgtttttttccggtagttttgttgccaaaaataaaataaaaaatagttttagaatttggaagcaatttacgagaaaaatatcggaatttgtaatgatttatgatgtgaaaataaatttgcacgacagggataacattgttaaattacaatcgttaatccataatcaggttcaagcagaacgttttcatggatggattaattttgcctggagaaaatcgggttattacggggacgagcctctgccaaatttttgccatcccgttaaatactgctttgaagtgccaaaaaatgacatgtgtcagaaattaaattgtgaatgttttattttattacggtgtgcttattgtgaattatatttatgctttaaccatttttttaatgattaccatttgtgtgaagatgaataaaattgaatgaaaaaggagaatttttgacccgatggaattgatttcaatggccattaatttgcataaaatcaaaaataaaacggggaaaataaattaacatatg

SEQ ID NO: 118960 - DNA, 1003 bp, Heterodera glycines
tgatcgttttatgtccaaaataagcaaaaaagctaaattttgcttttcaggttgatttttctaaattttaagctgtattgggtttttttcttctaaaatgatttttagtaccatattttatccatttttgtaagtcttactttgcgtttagcgaataaagaaattttgagaaattacaacatcaatttggaaaattttatgtgcatattttcactttttatgtgcatattttgccattttcggtgcatattttgcgattttatatgcatataattctatgcctgccctaatcatcattaatcaaagatgtctgtctctctcttctctctcttgattggaaacggcaacactaaaatgccttcctactcctttttttcatattgattcgaatggcacttttggttcttattttttcaccttctcttcttccccttcttcatcattcttttctgggtcagccaaagctccattaattaatttgtaaaatgcattcgatgtgattttcgttttctattcataaatttctaatgtttttattacttatttctctgaaaaatgcttttttaaaacataaaacccgggtaattcaaattaaaattcaacataattccgtttcaaattaatcggccccaatttgtttaattggttttcgttttggccattcattcttttacatacagtagtagtatcttttctcactctctctctctgtcactccatttttatttttaattttttaaatttaaataaatattagcggtcattgtgcctcacgacattcaaatcgttcaaaatgttcacaattgtacaacgtcacagcaagtatattttttgcagtttcaagaccgataataaaattaattttaaaaattggtcggtgtcacttagagagacaaagaaaaaatatttttttggatatttttgtgtttatttcttcttcttaatcaaaaaagagcatgctctcgactagaatcgggtgttgatctaatatattcacaggatg

SEQ ID NO: 118961 - DNA, 228 bp, Heterodera glycines
aggctattagcaaaataataaaaataataagccgactaataaatataatgttgatatttcttaataaaaattaaaaaaagtttctgatttttaacaaaaaaaaaagctccaaagaagcttaaattaagagttttattttttgtttgaggctatttttattttcttcaatttgtaagaaattatttttaattttattttccgtttttagaaaatttaagtgtcaaaatg

SEQ ID NO: 118962 - DNA, 939 bp, Heterodera glycines
  unsure (1)..(939): unsure at all n locations
ataaatttcttagattttatttaaaatgccaaaaaaatttggctttgattcatggataattaacctgacgagtcctgtctcgattatttttctgatttttttaataaattaaaataaaatggtgcaaagttttcatttataataaattctttcaaatttgattttctttaaaatttaattaatttaaaaagtttaaatttaattaagaatcgattgattgaatccatgcgaatcttcagcaccatttgcaactcgcgttggttcatcaagacttgcttcatcttattcctcaacaagcgtgatttgtttgagcaaaaaattcgacagggccaatcgatcagtgtgtgcttcaaaaattattttggtacagcttgtttggtttaacagatcctagtaggatttctttaaaaattttaatcagacagaggcattatgccattaccgaaccaaaattccggatttttaataatatttatagggataagatttttaggcacgaaaacgcaaaaaaattattattttcattaaaatttttaggtagcaaaaaaaagctaaattatgctatttcaatagtaaatgaataaattcaataataaaaatttttatgaaaatttttggcgtcaagaaaaaataaaataaatttttgtggtaaggaatttttcggaaatgggtataaaaaaaatgagaaaatttgcactaaaataagatgactaaggcattaatttgtaagcagaaaaaggccaaaataggcaaaaattggcattataaaaatcagccgaaaagtttttaaccaagattaaaactagtttttcttgcttatctcanagtattaagtgngcaataattttagacattttcctaaaaatttgatccctaattattaattatgaaaaataaataaaaattgaaaataattatagagagaaaaaaccctaaatg

SEQ ID NO: 118963 - DNA, 146 bp, Heterodera glycines
gctgtggggggattggaattgttttaatttttgatgggggaagttttgggatgaaaaggaacaatcaaaagagtaccgaaacattttttgttgcccgggtgagtaataccaaaattgtaagcgtattaaattttcaggtcccgatg

SEQ ID NO: 118964 - DNA, 141 bp, Heterodera glycines
tatcggagcagccaaaattgcagcacgggaatcggacaatacgacggtgtgcagcgacggttcgccacaaatccggcgggagtgatcggcagcgaggccaatttccgacgcagcaaagagataaaacatccgaagccaatg

SEQ ID NO: 118965 - DNA, 352 bp, Heterodera glycines
tttccctgtattaaaccgattttgaagaaaaacactaattcggaaattctcgacttcttgttcgaattcgggttcgaggttcgaaattatgaacgctattcttatagaattatacttctatattacaataccaatactacagaacttaatattaaaatatttacatcactgacgcattttctactgacgcattttccggtcacgtcccgtccctaatgatgataattagttaattggttaagatttgcatttgagtcgcaaatgttcggcaacccttcgaattgtatcgcaaaagagcggagtgtgtgatttcaagaagaaattcggtggcaaaatttttaacaataaaatg

SEQ ID NO: 118966 - DNA, 96 bp, Heterodera glycines
  unsure (1)..(96): unsure at all n locations
tcccgtngggagtccaaaatcaaacagatcgaatccccttcggctcggtcgtctcttcctacttcattttcctccgttgggtgttgggaatgaatg

SEQ ID NO: 118967 - DNA, 75 bp, Heterodera glycines
gaagaggaggggaaaggtgaaaaaattaatttaaaaacatttaaaaaaataaatattttaggcgccagtgaaatg

SEQ ID NO: 118968 - DNA, 174 bp, Heterodera glycines
gtgccgttagcaagggcaactacagccaccaacaatcggtctacgagcgaccaatcggtctacgagcgaccaacgagcacgaattcgagaagctaacggcaaactggtgccgttagcagggggctccagcgaaacatttcggtcgacgaacagaacaggcggaaacgaaaaatg

SEQ ID NO: 118969 - DNA, 294 bp, Heterodera glycines
  unsure (1)..(294): unsure at all n locations
attatttcgttttaaataaaaaagtgtaaaaataaaatcttacttggaggngnngggnttnnnatnggnngggaaagccctttcggaagttatttngagaaaattngggaaannggatttgtattngaanaaaaagtnaaaattgttgtaangtgtgttgaattatgtaaaaatggttaaaaagaatgataattaattatttttatttttgtagattaaataattaatagggttgnaagaattaaatgaaattttaaaaattgaatttngattgttgttngaatttnggatatg

SEQ ID NO: 118970 - DNA, 283 bp, Heterodera glycines
aaattttataaatttttcttaatttaacgcatttttattatgaatttgtaatttatatatttatttgcatacgagaagttatgtttttttattcaaaaaaaaaaaaattaaaacaaaattgaaaaattgaaaaaacaaaaggttgtcaaaatttaatatttttaaatacaaagcttttattttattaaaaaaggcataaaaattaattttcaaaaaataaaataaatttcttcaatttcacagggaatcagctgttttgttggaaatttattatgaacaaatg

SEQ ID NO: 118971 - DNA, 385 bp, Heterodera glycines
aaaaaagcaaaaaaaaaaaaaatgttgtttatccccggagaaaaacattttttgctatgcctaaaattttcccgaattgtaggaaaaatgccaaaacggggtaatttttttttaaattagtcataaaaatttactggcataaagttggcactatgttttacttattgttagatagggcacttgcgaaatagaatattgctattataaaacttgaacattagcaaaaaaaaaaaaaaaatttttttttgttcaattttcaggcaaaaaaattgttgaatattttttaggaaaaaaaattcgaggttttatttgtaaaatttaaaaaaatgtgtccaaattgccattgattgaccgttttttccaggcccctgaagtgattcgcatg

SEQ ID NO: 118972 - DNA, 117 bp, Heterodera glycines
taccgggaataatagtaattgcaatatattgctaattatttattaatttatcttttgctgaacaattgtcccttcaatcggaattgaccactgcaattagtgaagaaagcggaaatg

SEQ ID NO: 118973 - DNA, 1003 bp, Heterodera glycines
gaattgaaatgtattgctcacccattgcattttttgtcatataagcattagggctgcttattttatgtaaatacatatttttttcctggtttctccatgctctaaatagtaggaaaaacactttattttttgtgtttgcgaacaaaagttgggacttttatttacatattttgggatttttctacatattaaatatgtacatatttttatacatattttggactttttcgtacatattttgcaatttttcgtacatatttttcatttttttacatattttgaggatttaggatttttgagaatttatagaaattttttgtaaaaaatttaaaatttttttttgaaaatgtatcactaaaaatcgatttttttcaaaaaatgatatatcaaaaattaatttgtaaaatattcaaatgtgattctaagcctattttgtatacatattttatttacataattcgcaaattttcttacataaaattagcagccctataaataaataaatgttcccaatttccaatttcaaaattcatttgtctttttggcaaagtgtttgtcccccttttcatttgcataatctcctctaattttggttattcaacagatgtcggcaaacattgctaagaaataagccccggttaagcagctaatagtaagaagcattgaatcctttctgctgtttgttaagccattgagagttcatttgcattttttcttctaaaattttctaattaatgccaataattttaatcatttccaaaaagtgaaataatttcaaataaatatttccgcaatatatttttaatttaccctattatttcctcaaagtattaatttgccattgtaaacatatgtgcacatataataaaataaatatcattggagaccatttatttcttttttatgattctaattttaaaatattttgaaagataaataccgtaaacagtgactaattactgtaattatggccgccacaattgcgtcccatgcgccccaaatg

SEQ ID NO: 118974 - DNA, 535 bp, Heterodera glycines
tagggttgagcggtaccggtaccggtaccggtactggccggtaattaccggtttttttggtacctgtaccggtaccggtaccggtaccggtaccggttttttcaaaaatgaaattaccgttaccggtttgtctagtaccggtaccgccggtaaaaatttgcactggtaagaatgggggtctggtcgagaaaagagtaggaaattggtgaagaaggagaaatttttgagaaaaaattaaattttatttcatttagtcatggaattacacacatgcacatgtggtgtagtggttaaactttctacctttcataatttttcgcctgggttcaattccccacttggatagaataatttacatggccggagaccccttcgcaaaattggaaaattggctgctgaccccttgttttgcaataatctgaattttgaggtctatatctgaattttagtgttctatgtcctgaatttgaaaaaaaaacttggtcaacctgaatatacatatacttctgaatagagaccggaattctcaaaaatg

SEQ ID NO: 118975 - DNA, 229 bp, Heterodera glycines
ataaaagttccattagccttgattttcctggattttaagattagggatgatgaaaaaatattttattgagaaccgttttaccgcaattgcatttccattctttcacaaaatgcgaaataattttaatttaatgaaattaaaaacttacaattttttagctatgaaaaaaatttcttctggcattcaatcgtgtttatattggtttaatattaatctgtccgagtaaatg

SEQ ID NO: 118976 - DNA, 261 bp, Heterodera glycines
agtgcgtcaccgttgacgccttcgggaaggtcgtccgtaagcagagcaacctcatctgatagggacgaagaaacgaaaggcggcagaagacgaacaaaaaagcggtgagttttgacagggccaattatttttttcgatgataaactttcaaccccttttttaaactctagggaatatatttctggttccgtcgacaatggcaccgcggatgctgctgctgttcagcatcggtttagtgatggcatttccgtctcgtcaatg

SEQ ID NO: 118977 - DNA, 1003 bp, Heterodera glycines
cccgatcagatttgattgatcaaagaactcgaaaggtattgaaaagtaaataattaagggtttctgattctgaaaatgccattcctactaattaccaaaaaaaaacacaagaaaaatttgtaaaaaattcaatttttttaaattaagttttaggaaaaaacttttaaaaaaatgaaagttttaaaaacatttttaaatagaaattttttttatgaaaatgttttattttttcttgaaatttttgcttgaaaaatattaaaaacaatcaaaggtcttgttttaaatttaaattttttcactaatttataaagtagttagaacaagttttcctatggcgaagtgttcggtgcaaacggttatttcaaattgtaattaaaaaacgatgcaattaaattacttaaaattaaattatttcaatttttctttaaaacaaattcactttattatacaacatggcacttgtgaagttgtattaaaatatttgtgatattaaaaatgaaaatttattatattttattgccactaattatttgtatcaaatatttggattaaaaatgaattattatattttattggcactttgtagtttgtataaaatattaaaaataattatttttttttattgtatattattgaatatgtataataaattttttattttaaacaaatatttgatacaaactacaaaatgcagataaattataataaattttcatttttaatatccaaatatttgatactatacaaattatatattttaatgcgaactatattattagcgccaataaaacaccaaaaattgtcggatatattattattctctcataaattttttaatatttatgaaaaataagagaatgttcaacccagtttctgctatattctttataattattttcctccatttttcattttcaatttcaaatgaaaatccatcggtgaattttgacttttttttaaataattttttttaatccattttaattaggctgatgacaaaatg

SEQ ID NO: 118978 - DNA, 334 bp, Heterodera glycines
aaattttcccggcggcgcctatcggcaccgccggacccccaatttactttagttttttggaattttagccacaaaattgccaaaatttgacagtttttgacgcaaaaacggctacaagtccctattttttttgctctcgggtgctgaatttttaatggaaaaattttttttgcccgaagagcaaaaaaggtcttcaggttccccccccccccaaaatttttctggctacgggcttgataacaattttaaagactgactttggcacccaaattgaatcgaataaaattttaaacaaatttttaatctaatttaaaacatttccttctcagacatg

SEQ ID NO: 118979 - DNA, 960 bp, Heterodera glycines
tgaaaagaaagaggtcaagtggaaaaagagggaggaggaggagagaggaatggaagtgaagagcaaatgaggaaggaagaggggacaagctttgctagtgaaccattttctgtttgtttgtttgttttgtttaatcttaagtttaaacgaattgaacttttctttgcatcattgcttctccctttgcattatttgcataatggtggctcattccttccgtcgttggcaattgtcgaacttcattctctccccatttgtcccttttcccacccccccccccatccgtccgtcctccgccctttgtgccatccatcgcttcgtcctccggcagcccttttctttcaattggccaagcctatctatcgacatctcacgtatattgtcccgaacgagaatgaatgaggggacacaatttctctgaatgccttcccccgaggggattcctctgctttctcttcgtgctctgtcccactcagccctttccctccgtttttccgccttttggttttggaagaaaaataccccttgaatttttcataggaaaaacgaaggcaaaaaatgccatcagtcaatgagagagaaaaggccgtaaggaaacggaagagaaaatggggcggagaaaaaagaaaagttaaaaaacaactaaatttttatgacaaaatttatgaatttattattgccagtttctaaatgaagaagtctttcccccttaattttatcatttttttgttcatttcgcctgcgtttagtccaaattgccctttccttccctcgtcattttcatctttcaattcgtcaaacaatggccattccggcatcttttcccgaacacagtgccttttccaataagcccaaatcgacggaatgcctttgcggtgaaatggaaaagggccaaaatgcccccgggggaagaaagacaaaagtttattttgcggtacgaacaaattgtgcgaggccatg

SEQ ID NO: 118980 - DNA, 396 bp, Heterodera glycines
atttaaaaaaaccaaacttttatatgggaataaaagcacatgactgccagagatatgatgatttatcatcatcattagggcttccaaaaatatggatataaaatggcgaaatatggccataaaacatggaccaaaaatatggacataaccgcgaaatatggatatagagagtagaaacccaccctagaagcttaaaaccaagctaaaaacatgtttttcatacgtttcaggccacccacagtccaggaaaaaatatggattggatttccatataattggaagagctaatcatcatttttgctaattccaaggtgtcgatgaatgattttttctgtttaaaataatgatttccaaagcacaaaattgcaaattttcagtgaaaatctgtttaaaatg

SEQ ID NO: 118981 - DNA, 340 bp, Heterodera glycines
aaaataataagaaaataatattttcaaaaatacaccaccataaaatgcgagtcttctcaaaaaaagaatatttcattgacgaataccgaaatttagctctttttaattgcagttaaatccgatccccattaataactctgtgaaaaaatattttaattgacaaagaaaattggattaaataatacaaagaaagaaaaattggattaaataaattcgaaaattggattaaatcatacaaagaaaacaataggattaaataaattcgatctcaaaaatttttggttttttttttctcattttcctccaatttgtccatatttttcattgttccactgaaatg

SEQ ID NO: 118982 - DNA, 662 bp, Heterodera glycines
tcatgtgaagaaggtagattaaaaataaatttgagcaacttcccaagtagtaaattaatcattgagttttgtctttttgtcctagctcagatttggcaatcactaaggctgtgaatttaagtccgcaaaatttaaaaaattcaacgaaatccccaaaatcacgaaaaaattcaaaaaggcacaaaaatgcaaaaaacctaaaaatttaggtaaatgttaaaaaattctaatttttaacaatttatagaatagcattttataaatagagactggattttgaggcaaatttaatgcataatataaaattttcgcgcaatgattccataaattttcagaatttgatgaactcctaatactctgtgaccagcgagcagctgtctcttgggccaatttggagcaatcaacaaggtaattgttgtgaaaatatgtacaaaaaatgacaaaatcaaatttatggagaaatttcgaaaaattaacaaacgaccaaaaaaatgatcgcgtaaaaaaattgttcatcgcattttagttctttcgacaattggtcaaaaattggcgagggggcatttggagaagtctttaaaattgattccatcgcagtgaaggttttactcataatttttgcattatttcaaatattttatcaaatatttttcaaggtcatg

SEQ ID NO: 118983 - DNA, 520 bp, Heterodera glycines
agagataaataaatatttgtttgttctctcaaaagggtcaacagaatccggcacaatttgacaatccatcgacgaagaagacaaaaagttatgccgaagtcgtgcgagtcaaattggctgacggaggaaacagtgacgagccaatgatggagtgggaagggcaacagaatcagtgggaggactcaacgcatggcgacggcactctatcggacaatggtaagaaaaaaaagggattccgtatttgctctttttatcatcccggggggattatttttcgacagatttatttgtcaaatatttttgaaaatttgtaaaaatttcgccaaaaaatgtcatcgcgtcaaaaataaatcattttttatttcatttttgttaaagaattccaaaattttacatgaaaattctaaaaatgcttataatatttaaaaaatattgaaaaacacaaacatatttttccgacccctaattcgccaaaaatttaataataatcaaataaaataaaatatgtttttacagaatg

SEQ ID NO: 118984 - DNA, 165 bp, Heterodera glycines
atgaatgtgccaaactcttccaacacttcaccaggatttttcgagaacttggcccagtcgttacttgacctcaaaattcaggacaatcgcaattacaaaaatgaggaaccaagatctggggcaatgaatacgctcacacacatcaaacccaaaacaacagcaatg

SEQ ID NO: 118985 - DNA, 1003 bp, Heterodera glycines
tttttgtttgctttgttattttttatccatcgatgaattaattttgcaaaaattaaacttcagctatttttttgatattaatttgatgacttttaaagttgcgcagaaaggtagtgcaattaaaagtgtaattaatggtgagaaattgtcattgcgcagcagcgaccgaccgacccaaaaggggcggcgatccaaccgaagatcagtcaattaagaaatcaaatgataatgactttgttcggtctgatcactgaaagttaactgtaaaaagtgatgaacaaataaatgttcaattggctgctgcaaattttaatgacccattaattggaaagcaaattaattaacaaccgcaaaccaaaccaagttcaataaccaaaaatagaaccaaattcgactcattatcaggtgtcacacaaaaaaaaatcctcaaaattgttagatttagcaaaatctatacagagaaaattaatcaagcattttcagatgaagccacaggttcattacccctaaaaaccacccattaaattcaattggcaattatttcttttttttccaaaggcaattaaattttaaaaattgtcaaatttcctttcccttaaaatttactttttttttttgctatttgaataattttccttttcatgtctaatccagctgattttttctgttttttaggtggcacttttcgaattgctggcctaaaatgccatcttgccatttttgaatcaatacattagcgtttacttccttaaaataatgaaaataataagcacgataatgcaatatatatatatatatatattttggtaacaaattttattatttttatgcattaaaacagaattaagtatattcaaaaatcagtgtaaacccaaatgaataattaaattgtttcttttcatatttgtagtgacttttctcatgtcacataacattaaaatattaatttgtaaatatatccaattttaatcacttaattaactaatacatattcagagtaatg

SEQ ID NO: 118986 - DNA, 76 bp, Heterodera glycines
aaaatcccctttttatctttttcaataattttctctttttttaattttagcaactccaacaggacgaccaaagatg

SEQ ID NO: 118987 - DNA, 1003 bp, Heterodera glycines
tttctttccaaatgaattcactgtccaaatgtccggatacgcattctcgacccaattcggcgaatttccaatgtattctgttgcaatcgaaatcggatgagagtgtgtttaaatgaatttcaaagacttttttttattaaaaaaatattttatctttttttacgagtgagttttaatgaaaattttctccacgacaatttttaaattactccaagccatcccagacaaatttcagtttttcacgaaagaaacgtgtccactaattaactcatcggcatttcaaagcgcaattgaacaccaaaaatgcgggttgatccagctatttctcgctaatggtcagctcgacgtgaatggcacatggacattgattccacaacattataatgtgcggccaattagaatttgcaatattttctcaccattacagaacccaactatgcatatacagtaatcaataggtcgtgacgggacttcagttttctaaaaaagcccttttctgttaataatacttacttctttgactgtgaacgaaaaaatttggcatataagaatttaattcgggcttttagctcccaatttttcatttaatctgcaaatttctaatgcagcacataaaattagccgtagacgaccaaaaaaaggacattagagattaaatggaaaattaatgtgaattttttattgatttttctactaatttggcattttttttatagcaaatttggggcaatctgttcaacaagcttaacgtgcttaaacttcaatcggacggtgaagagtacaaatattttatcgccttctcatcgaaaaaagtagagagacactgcacattaatcacccttgttaagtttaattgggcacaaaatgccacaaaattctttattaaatttcaaagaaaatcaatttaattaattttttgtactaattacatgagtaatttttgtacaaattaccattatgtgttggacatgcggtaaacgcggaacgcaatttgacccaaatg

SEQ ID NO: 118988 - DNA, 294 bp, Heterodera glycines
aataataattttttttattaattttattaattaattaaggttccaaaaaacgcgtaatttgccaatttcaatggacaaaataatggacataaaaaagaaaacgccatattttctcatcgaatttggccaaaacgagcaaaaaagtgcaatccgagaaaagggcgacggagaaaattttggcggcaaatggaacaatgaggcaaaaaatgcattaatttgaatcaattttaattgcattgattaatttagaatgatggcatcggctccattctcaaagacattgcgccacaaatg

SEQ ID NO: 118989 - DNA, 624 bp, Heterodera glycines
agatacgtcacgtacatacaaacagcagtattcccagactgtaatatttaaaattggttacggtagtgatgatactatatttttcgaaatcggactttgcctagaatttagttggttctctttcatttatgaatatactttggctattgtaatttgatgataaattaaatccgagtttttataattaataaaacaatgcaaaattttaattttcattaaagaaagaacaaatttcctatttttcaaaattgagttggcattttgagattccaaatatttttcaatttttagattttttaaaaagttgacatttgcgattcaatgttttaaatttgtcattttgcggttcaaaatatcaaaatttacttccattatttttaaaaatctttttcaaaataatttttattattttttttttgcttgcagcagcaggtgtcacccattacacataatccatcgcatgtgtgcttttctcggcaaagaagtttcgggaaaacaaatgttttctcttcaataaattttaccacattcatcagaagcatgaaagcaaatcatttagttaaattaaataattattttgtttaaatatattttattaaattagaccaaaaactttttaaaatg

SEQ ID NO: 118990 - DNA, 97 bp, Heterodera glycines
aactttgttcttctcacttagtttttactctgccaaacaattgttgcaaagtgaggaggacatacggcgtgaagagcaggcccattttttggcaatg

SEQ ID NO: 118991 - DNA, 222 bp, Heterodera glycines
aaacggttgcttttgctcattatgctggacggttcgactcacatttcgtccttcgtgtgctgacagaaagggggcttaacaccgaactgatgatggccaaagaccttagggctgagcatcccggcaaagttgtactttcctcataagtacaataaaaatgagaattttgggaagagattgtcacacctgccgccttttgatgattacaatccaaatgctatg

SEQ ID NO: 118992 - DNA, 136 bp, Heterodera glycines
ttgaatatttttttccgcgcatctttcgatttggcattgtattataaatcgaattcattcgaaaaatatttggaattttcattaattcataattaaatttgttcaaatgaattctttctgatgtgtttaaacaatg

SEQ ID NO: 118993 - DNA, 124 bp, Heterodera glycines
catgccgtacacactacaattaaaatcctaatttcattttttcatagcgctcttttaatagtaatggccgagaatatttaaatgttaatttgagttctagtcaacattaaactttttagaaatg

SEQ ID NO: 118994 - DNA, 134 bp, Heterodera glycines
agtgagaaaaagggagagaggggaaatatggccaatacgggggacacttacccaaactaaattttccaatttttagacccgccaaatcagccgttggtgtggccgcttcaagtgacaaacaattcggtgcaatg

SEQ ID NO: 118995 - DNA, 725 bp, Heterodera glycines
ggtaaggaaagaattcgaaaaatgtgccaatttacccattcaaaaggtgctattggcatggatgcccaagctgcttccctgacgatgcggcaattgtgggcggtggtgagacagcaggagccctccgggcccgggacgcaaaacggactcgtgacattgcgcgggagttcgaggtggaaatcatctgggagtgccacttgaacgcaatgctggaggacaacccggctatgaaagcgtacttcgacaactgccctgattcaggcccaattgacttccacgacgccttctttggcggtaccttttccatttaatttttaactaattttccggcacaggtcgaactgggcccgaatacttgggcgcttcggtgatcaaccctgagacgggcgactggaaaagccgcacaatcaaagtgaaggactttaacagtctttatccgtcgcggtaagaaatgtcggaaaaaaatgaatagttgaaaaatcttttgcactttaaggaatatgttcaccaattatccggttggccacccgaccgtggtgcagtttgacaaggacgtggaatggaggcgtccagaggacgttgttggcgacgacggcatccgccttgagggcatcatcaagtgcttcgtagtgccgccccgccactgccactacgatatcccggtccttccgtaccggctcaacaaccgcacgctgtttcccctctgccggacgtgttccgaaatg

SEQ ID NO: 118996 - DNA, 196 bp, Heterodera glycines
gagtttatagagcatcgctagaaatatctcctagtttcttttgtccacaaaaaaggtccagagatctctagcgacttacaaataaaatcccaaatcagcttttgatcccggcaggatcggtgttttacgaaatccctcccgccgtcaaaccccaattaaaccattttccctctgttaggtctgtggcgctttcatg

SEQ ID NO: 118997 - DNA, 215 bp, Heterodera glycines
gttccaattatgggagcccctggtaaagagtagatcgaggaaagtattctgcatattaagcattaaatcgtcaagtatcagtaaaaggggtttttcctgttctttaatcttattcatgtccggaatcccgttaaaagtctcaacgccctccccgattaatcctaaaatactatcattcatctcaccataacaataaagaattttttcaggcgatg

SEQ ID NO: 118998 - DNA, 467 bp, Heterodera glycines
tgagctctcaagaaaaagtgggcgaatggaagagaatgggagaggaaggaaagagcttttaaagcaaaaatgcgtcaataaacgaccgtttaataaaatcgtgtaaaaatggcaaaaaaattagtataaaagtggttgctcttcctccgccacgtttcattattttccattcgccatttcgtcgactttttctcgctgacaatgccttcaaaaatgaatttgtacgtttttcacatttttttcacaattttacgcctttccttcacattttttagtctgttgggtgtgttgttttaacacacaaagacaaaaattattccataaaattgaccatttcaatggcttttttcctcttcaattttttataatgaaattctgagcagatttaaataattttaatcttttttgctaagctaaattaaatcagtcgaagaaaattgtcttaataatttcccctcaaaaaaatg

SEQ ID NO: 118999 - DNA, 476 bp, Heterodera glycines
aaattatgtcattatggacttttcgccactatctttgccactattttggcatttgtagtacttttactgtcgattttgtttgtttttttgaaaaaaattgacggcatataattttctgaaaattctatttatccccctgggggatcattggagattgggggattaatggagattgggggataattagagcaaatacggtatacggtggcatctgaaaatgtatgttaaaagtatcatgtaaaggaaacaagggcaatctttcggaattgtggtcccgaaaattttttaatttgtatggcactttttctaggcttaaaaatatgctaatcacgaatatgaactcggatttgcccaattccgaaccccggacccgaattctaataaaaacttgaatttttttttttcaaaaatatacgttaaaatcgatcaaattttggcgtaaaccgcggatttttatccaattaacaatttgaatg

SEQ ID NO: 119000 - DNA, 381 bp, Heterodera glycines
tattattggttacggtattcctctaccgctttaccactttttcatagttataccgttaaattttcaacccaatccgatgggactgatgagttcggttccgttgggatctttcttgcccccccccctccgcccccaccagaaaaattttttaaaattattttcaaatttggaattcagtcgttgatggcacgcccggatggcaggtcaaagagcaatttgcaaattttaaattaaaatttttgatttttgtttctcgcttgattagcttctatttgcatccctccgacctgtccgacgccttcgcaatggccgtcgcattggccgacacgcagacgggcgaacccattgaccagacactgcaggcgttcatcttcagagatg

SEQ ID NO: 119001 - DNA, 171 bp, Heterodera glycines
tgtaagttttgaaatggattttttatatccattaacacaaaacggagtcgggaggggtggggcagtgaaatttcgagggaggaacgagtgaaattatgaaaaaaatttttttttaaatttcctcatttgttagtaaatcaaaaaaaaggtgcatttttttagttgcaaatg

SEQ ID NO: 119002 - DNA, 470 bp, Heterodera glycines
atgagccacagcacacaaaattgttttttgtaagcaacaaacaaaaaacttggtttaacttcaatttctattcattttcaggtgctgtatttgcaacaaaattgttgatgagacaaaaattgttttttgtaagcaaatcactttttttggttcattaattcttatttttattttaaagtgttttggtttttggtcccggattgaactggagcgaaaaaactccaaaaaaactttttatttaaattctttaatacttgtgtttaaataattgtcacaagttttattgaatttgaataaatttgtttaaatatttcaacatttgtctctactaattaaaatgttattgcgtcacaatattatctgcttgcaattcattccgtcttttcttcattccttgcttccttttttcccttccttccttcctcccttcctttcttccttccttaattattcaatttttagataaaatg

SEQ ID NO: 119003 - DNA, 461 bp, Heterodera glycines
tgtatacgtcagctgctgaataggggttagagattgcacaaagatgcaaaacatttaaattttttaaaaattccatttggcataatgttttaaattcttagcacttttttaaataataaaactgcaaaaaataatcgtagtaatttacgcgctgcgaccaaaaatgcccaatcccgcttttatcctctcaaaaaagtccggtatccataagaatgaacgagaaaaaaaatttccctaaagcaaaggacgagaaatacaaaaataaaccgtaattcatagattaaaaagaaattctccccaaatttacttgttttcaaacgcttaattcagaaaaagaattgttttgcggttaatttctgttgaccccattcccggcttttgctcaacaacagatggtggatttgtacgagttcaaccggcagcgaccgttgagcagcaacagcaaaagtcggccccaaatg

SEQ ID NO: 119004 - DNA, 261 bp, Heterodera glycines
cgccgccgcgtagcaaatgccgtcgtctttacgacattgttttgtgctggtggcaatgcgactcatcctcaaaaagcatgcccttttcggcaccaaaaaaatcccactcttcgaatactgtgggcccgaaccggacggtgagcaaatggaaagagtgagggacacaatttggcactaattaaaagaaaagacaaatgaactaattaaatattggacaattttaaaacagctgatcccgccgcgggacaccttcgaatgatg

SEQ ID NO: 119005 - DNA, 186 bp, Heterodera glycines
  unsure (1)..(186): unsure at all n locations
ctaaaaatcaaaattantttgttgccaactaaattcgcttncacttgggagagtacaattaacaaccaaacaataaaaaattatattgttgctaatgcgatacaaaactcagcaaaaaaaaaaaaaaaaaaactgcacttttcccccattttgtagcccattgttttggcaaagtcacaaaaaatg

SEQ ID NO: 119006 - DNA, 952 bp, Heterodera glycines
tttgagggtttgacaaattttttgatcaaaatttcataaaattcctaatagcaaatcgagctgaaaatttggggtcctgctgccagttcgtacaatgggcggtttgtacaacggagttagtacacaatagacagtttttacaaaagctttgaataaacataagctttcaaactaagcttgagcctaggcttaagcctaagcataaacttgcttgggcttaggtataagcttaggcttaggcattgttttgtaaaaatctctattgtataaactgctattgacccaaaaatttagcaaaagactcactgatttaattccatttaaaatgattttgaacggaacggtccgttctgctgaaggtgaataataaaacacggaaactttaataaagatgtttattaacattttcaaaacatttaatattaaatattttattttgttttttcatttcaaaaaagaaaaattaaagaaaaataataaagaaaaaaaatttaaaaaagcataaatggaaaatatgggaaatgaccaatgcgaattccattccattcaagtaaattcaaaccatagccccagtaccaaatccataatgttaattacaattaatagattgttttaatgtacgtgaaaaaagaaatccaaaaaaatttgaaatcggcaatttgcccttagggaatggagtgagtgatctttcgcccttacacaaatttcctttaatctctttcaaattgcttttttgatttatttattcttcttagagaattcaaactaattcaacgttattcatttacaaacattcaccacaaataagtttgaacattgattaatgagacaataatatttgtgaataatacaattaattacaatagtattgtaattagcgtattaattgcttttttcaaaaaaaaaataatattttattataaaataaaaataatttaatctagtgcaaatg

SEQ ID NO: 119007 - DNA, 647 bp, Heterodera glycines
aattcgatttcctttactcatattgtagttacagtaccaatcagtgtatcagcaacatttgcaaaaaaaaatgaaaatttgaatttttcaaaatgttcgagttcgggtcaggggttcgaaattggtcgaaatgcatgtcatattcgtgctcagcgcatcaaataacccttaaaaatgtgttttttggatttttattcctttttttttgtgggaccaatgatctgcacaattgccaaatggcacttgtcagtgtaattttgaattagcgcgcaaaaaattacgccaattagctctttgacgttatgagaaaattttgtctaacactgggcttaacccataatgctcaaatggcatctgatcaacttctttcatcccgagatagatttttctcattcagagttttagattcataaataatatatttgtcctggtccatccacaaaaaaataaccacaacatgaggctaaatcttaacatttgggtacactgataattttattgatgaattaatttccatctatttttcatgtcgattaaggcatattttggttaatgtacctatttatgtcgaacctctactgactccccattttcgcgcatctccaaaaataaaatttgaaaaatacgcctccaaaagacgacagatg

SEQ ID NO: 119008 - DNA, 1003 bp, Heterodera glycines
caccgccgaccccaaccattgcaatttcaaataattgtgtaatttttgcttttgccaaaggccacatattagtgtcttcactcattcattcggccattttcatttaatttttgtcagtcccaactgacagctgctggcgaattgggcatgccaaatgcattggcttcgaattcccccccccccccccgggggatggccaatgtaaagacggcgttgtccattccctcccctcactttagcagtgtttcattgtgagtttatcattcccttttaagcccttcagaaaagggtcactctcccgcagaattcgtcattctcattcatttattattcgtaaaatcccatcaaaaccatcaatatttctaaggttaattaaacacaccgtccgaaaaaacgagatgtgtaccaataaatagagagtgccacagaaaaacattatctttttttctctaattttttgtctccttttggcgtactatctaatatttttattattaggaaaaacaacatttacttcgctatgtttagcttcttttctatatgttagatccacaggaaattttgcatatcgttagagaaaaaaattctgcatcgattaatgctgaatttatttttgttaatgctctatttcaaaagttataagaaaaacaaaattttaaagcctcatagcttttctctggtacaccaaatcgcttagcatttgcttagaaaaagcttctcattatcaagagctttcgaaagataccaagattatccaatttggttggcaaaaaccttcaaaaataattcccaaatatcgtgattttttaatattttggacaaaaataaatgaaaatattcatgttgcacaacggactcgaaccaccaccctttgtccctttactatcttacaaaaaccactgagccacacatgcaaatcttttctggcacaggagctcatttcccggacgctgtgtttaataaaccctccaaattaatgaaaatcaactatcaaattgagatg

SEQ ID NO: 119009 - DNA, 144 bp, Heterodera glycines
acatacgatgtcctgtaagagccgttgtcaccaatgtgaaaaagttactaatttaatccaacaaattaatttgatatttcctacagttggaccgcaatatccttgcataagagtgcaaggtgtctgtctacactgtcaacaatg

SEQ ID NO: 119010 - DNA, 431 bp, Heterodera glycines
  unsure (1)..(431): unsure at all n locations
ggtgacggtgtgccttacagcccgcgacacgggacaaaaactcaacccatacgtgctggtcacaganaagcgatcgatgccgcagattgtcaccaaatttgctagaaattggtgataaatttcgctggctcgatatggatgaacgatgacacaacggaggactacctgcacaaaatcatcggggcaaagctgttcgttggcgaacgcctcttggtttgggtgcgtttggcagccacaagagcgagagaactacgaaggtggtgaagggattgggagtgaaaacggtttttgtccctggtggctgcaccaaattcattcaggtaactaaatcatccttcacaacgaaattcatttttcttccctaggctcccgatgtctcgtggaataagccgttcaaggagcgaattcggcacttctacagcatttggatg

SEQ ID NO: 119011 - DNA, 55 bp, Heterodera glycines; identical to SEQ ID NO: 116214

SEQ ID NO: 119012 - DNA, 689 bp, Heterodera glycines
tgctgttcggcttgtgctaaaaaaatgccaaacaaatttttgtaaccaaaaaatgccaaacaaatttttgtaaccaaaaaatgccaaacaaatttttgtaaccaaaaaatgccaaacaaattttgtaaccaaaaaatgccaaacaaattttgttttatctttttttgtttgactttttggatcagaaagtgtcaacatttattttattgatataaaaaatatatatacaattaaaataaatgggatcagtttgttatcccccaccaacctgaatttttttaatctcgaagttagaaaatttttcaaaaaaaaaaacataggtaaaatttttataagaaaatttttgaaaaatctagtgatttttcaaaatttaatgtttttcaaaaaattttcccaaaaatgcttaaatttttcataattttttttccttctaattttcttataaaaaatttatttgttgaaaattttttaatattttacgggtggtgggaggacttagtgcacccaaaataataaatggactaaaattattataaaatatattttaaaatgtgaatgaaattcattatttaaaattattaatttatacccgtccccgcacaaaaatgtgacacttcttctgcagtttcatcccaccataatttgcaccattgtcattttcatcagcaaaaggtgcttcaaaggcaatg

SEQ ID NO: 119013 - DNA, 1003 bp, Heterodera glycines
aaatttatttatatttttaaagagccgaaaatttttaagctaatgaaaattaaaaaaaacccacaaaataaaatttaaaaaattggaaaacgaaaaaatatctattgtagaagcttccctttttgacaacataagcaaaaaacataaaacttcatccaaacacttaattttagttatatttcaattgttttaaagttttttcgaataaggaaaatttttaaacccaaaaaattttatcaaaaaaaaaaaaattaaattaggggtcaatttttgtgaacatttttttcaattcttaggggtgtatttttgaaattttttcggacatttcttaggggtgtatttttcgtttttattgcattttggttaaggatttattcgaaaatcctgaaaataggtggcaaattggcgtaattggcacaaaaataggcatttaggcattaaacacaaaaagttcaaaataggcaaatgcctaaaaaacgaagccctaacaattataacctcaaagaatttaaattgaacaaaaagtatttaatgaaaagccgagtggaaaataaaaaagatttcataaaaattaaattcgtaaaaaatccaaaatataaaaaaaattatataatatttccttataaataaaaacaattaaaattattaaactgactatgtgattaaaaattgcgttttttgttaaaaaatatgtctaatggcttcattttaagcaagggaaccatcctaaaaatacgttaaaaaaataatagtaaaaacaacaacttataattaaacttctcataattaaattgttatttttacgaacagtataatgaatgaaatgtaaataaaaacaaaaataaaccaggaaaaagaataaaatgaattgaatttatacatttatatttaggtttattttatcggatttaaaagaaataaataaaaacatttataaacgttgaaatcattccttgtatatgaaatattccgtcatttgttataataacattccagaaatatg

SEQ ID NO: 119014 - DNA, 88 bp, Heterodera glycines
ataaaatgacaaaaagagagtatttcacttgccaaacattctagagttgttagatctgatgggggcaaagaaattttacacgtgcatg

SEQ ID NO: 119015 - DNA, 381 bp, Heterodera glycines
ttttccggtctttcttttttggcgtcaaaacggaccctaattttcaaaaacatcggaagcgctcttcaaaataagctgatgtgctggcaaaacctttaaaaaacgtggataattaatgaaattgcaattgaaaaataaaattaaatttttatttttaattaaactcgcctctttttttgagttttttttttcaaaaaattagcaatttttgtacaatttatgttaataaattgcatagaaattttcaatttttttccgacggcacctatcggcaccgccggactcaaaaaaacttaattttcttgagaatttttaatttctgtttttaatttctgtttgtattttctattactggaagttgaaagaagaacatggaaaatg

SEQ ID NO: 119016 - DNA, 1003 bp, Heterodera glycines
attttaaggaaaaaattgatttttaaaaaatttttactttgaattacctatttttcaagtgaaaatattttaaattgtttaaaaatttctttatgtaaattagagttgagcgagaccgggactggtactgaaaaaacgggtacaactgagtacccagtcccggttttgacaaattttgaccggtaccgggaaattcccgggtttttcccggttttcacaaccaaaaattccggtcctggtttttgtcaaaattcccggtcccgctcagctctaatttaaatgattgagtatttttaaatttaatggactaaaaatttccaggtccaggcaaaactggaaaaacctggatttcctggacattagaatttttatttcaaatgaccgatgttttttcaaaaaaatgtttaaatagatttaaaaacagattattagtgtaattagtagaggccgagatttccaaaagtgccggaccggaccggtctgatattttcagaagcaaccggtttccgggcccggcctctcaaaaccggtgaaaaaagacacgaccataaaatatttttgaaactttaatacactataactttttagagaaccatccaaattaagcattattggtattatttgatagccctaagtgtcctctatcaaaaactttggttgtgtttcaaaaaagttgtggcttgtaaatttcaaaaattgatttggtaaacctcttgaccacaacttctttgaaactcatgaaatttttttaaatatacagaaaaatagaggacactttaggcttcaaatggtaccaagaatgtttaatttggttgcttcaagaaaaaattatgatgcactaaacttgcaaaaaaatttttatggtcgtgtgaaataaaaaattcaacagaaaagttcaaaaaaattgataacattatgccaaaggaatattttccaaaggaaaatgaacaaaaatcaagaattttaggctttgtcataaaccggtaaaaaccggtccaaaatg

SEQ ID NO: 119017 - DNA, 605 bp, Heterodera glycines
tattaaaaccgcagaaaaaataagtaaaaaccgaatcctcaccctacccattaatacgcaaaaactatacatactaaacatgccttaattgtcaatttcaatttttttgtttaataatttttcttggcagattttgattcattagatttgatggcaggcgtatctttgtgtgctagtctcttctccctctttcttgttgcccccccccccccccccccgctctctctctctctctgccctctgttctctctcctttctttgccttgtctctttctctctccctctccttcgccgtttctctttcgtcacactttcgtcagcactgtccatttcaaccaatgggcgtgtaacatgttgggtttttgtggattcgttttcattcatcagatagatgaagcgcgctctcaccattcgcttctttgaaaagagatcgttgagcttcgcaatacttaagtggcaaagcaaacagtcgaagtctattacaacactttttaatttgttatttttacattgacactcacaatcaatcagacatttcttcattttcgtttaagcatgaataacattaaaaatactaaattttatttcattttagaaagactatg

SEQ ID NO: 119018 - DNA, 166 bp, Heterodera glycines
agtcatcgacataaacggaaagaaagtgaagtgctatggaattgtttctctgccaattgagcgcgggcctttaaacacgaaaattcgtgtattcgtcgcagagtcatcttttgggtacgatttgattttcggcacgaatgccttgaatcaattgggcttaaaaatg

SEQ ID NO: 119019 - DNA, 130 bp, Heterodera glycines
tttttgaatttataaaaacgagtttttgatatcacttttttaaatttttagaggtacattttcaaaaaaattaaatttttcacaaaaattttttaatttagggagaaatgctaaaaaaatccaaaatatg

SEQ ID NO: 119020 - DNA, 1003 bp, Heterodera glycines
taagcggataaagggataaccactagaccacacatcttcccaaaaatatgctttatatgccaaaatatatgtgttattttaaatgaaaacctacaattatatcttatatatgacaaaccctagagaatactataaaaaaatgcaaaatatgaaaatatggtaatttctgtataaggatcgaacacaatgtaaaaataaggaaagtctaaaagaatagccactaggctatttgcacaattgtcaacattacttttgaagaatttattaatatatttttaaaattttttccttttaactccaattttctttactaatttttcactcagacccccattcttaccagtgtttgtttttcccgtttgccctaccgggaccgggacctgagcttttcaaaatcgggaccggtaccgggacctcggatgaccgggaattcccggcccggtcccgcttcactctagtattgcgctaaaaaaccgccgcacactcgactacggctacgggctatggaagaagtccgcgcgtgatccgcagtcaaccgctgtggcgctcgtcagactttttcctccgccctccgtctcgccccactacttgctccgtcttcgcatgctcccttttatttcttttggtactgaattgtccattttcactgggacttagttgccccagtgcctggatggcatcggttcgaatttataccttgttttttagatttagctgatcaagagctttcgtatgatatcaaatttgtctgaatttgaccattttaagggtcagtggcccccccttttcactcaatttttcgagttttaaaccggttcaacaaccgattttttggcatttccgcaactggagacgtattttttcgtgcagagctcgtcgagacaaatcgattggtatatcatttttgccgttttttacggtggtttactattgtacacccttattttgctatctgtgtgacattattcctaataaggcaaattgtgctaattgccacaaaatg

SEQ ID NO: 119021 - DNA, 137 bp, Heterodera glycines
cgtcagcaaccgaaggttggccggaaagtcgccgcatttcagcgttggaaagcaaaataagtggaaaagcagaacgtgcctttggcgccgccatgaagcataggccgaacaaattcaacgaaatttgtcgcagaatg

SEQ ID NO: 119022 - DNA, 570 bp, Heterodera glycines
aataagcatatctcacatggaattttttaatgggttcactcactggtggactgttatgtttttgcaaaaaattgttgcctttatttagattttaaaattaaatttccattttttttttgctccatttactgtactttttttgaaaatttttaagaaaactccccagtcctttgatcttatgtaagaagtaaataaaaaattgtttgttacacattcattgtttgtttacatattattgcttattagtttcaaaataagagaaaagaaatgcaaattgagtgtatattttaagaatgttctctttgtatttatttatcaattatattaataataaataaattataaaattaaattttaattactttttgtacaattcaataccattatgttcattatccacagcttgttattggcattaagtttccattcttaaaaattggttttcttagattttagatttgcattttattttgcctctttttgttgtataaaaaaaaatcggttttttataattatatttgttattcctttataaaatttagatttaatcaaatccaaattttcactatg

SEQ ID NO: 119023 - DNA, 511 bp, Heterodera glycines
ttgggtagtgcctgtcctcccctccccccgaaaagcgttcaacaatgcacggcacataaggaaagtgcagctttatgcggtggcgggcgtaaaaatgagcagccacattgatgttgaacgggttgcgcaagtggccataagcgggaagaaatgctgcgccccgtgccgaaatcccagcaatgaagaatgttttggtgagcccgttacggtcgttgtaggtggtgcgcactttgcgcccaattaggtgtttcagcacgagtgcgcggtcctcggggtggttgagccggtctcgcaacaatttgacagggcaatcgagcagctgagcgcaaaatacgcttacgagaaccattgcaggagaaaatgaaagtcagatgtgcatggatttcacttttatatccggaaaagtggtgccacgcccacaccaaatttttttaccctgacacgcccactcccaaccaaaatatttcacccggtcaaaactcaaaatcattctaccaatttttccaaaatg

SEQ ID NO: 119024 - DNA, 1003 bp, Heterodera glycines
cggtccgagccgactttgccttacgcaaattttcagttaaattctgttcaaattcatgcgaattgtgtgtgtttttctgcaaagacttcttccattgttccaccttctcatttgttcattcgacagatgcattcgaattgcaattttgtgggttaataagttacattaatccaaaattgatcatttttagctcgactcatttgcccttttcattgctcaccatcggaccaatccctccctccgtctttacacggctccaatttcgacattttttgatttggttttctgttggagtgaaggcaccctttttgaacgggaaacggacaagcaaattgaagaaatcagaagtaagtttagtcattttcagtctcagcgactctaaaatcataattttccgggtgagtcgcaatttgcaatattccaaaatttcagagcggaatttttaactttttatattaaacactattgttatttactttcaattccctttcagcttttcctccttcctttgcttccaatgctcaaaaacccttccttttttgccctccaaaaagacgtctttgcgcttctcttccttctcggcctccgtctttgcttgaactgatgtttttacaagaatccacctctgctgaagagaaaatgaaaattttaaggaaaggagaagggcgttttggaggaaataattgcggaagagaacggtgctttatccgtagttttaatataacagaaataagggttcatgattaatttcagtccattttcccgtttctcaacaacgtttttacccatgggcgatttgccagtgccaatgcttccaaattatctgaaacgaatgcggcgacgaaaatgcaaaagtggcggaagtgaaatgccttcaaactctgaaattgctacagaccatttttttgacccaacatctgcttcattgaggcgatttaattaaaaaaccaaaaaatatataaagttttttttataatttagtgatgtgtcttctttatcaatg

SEQ ID NO: 119025 - DNA, 184 bp, Heterodera glycines
ctcacaaactgaaccgaaggatggtggaactgcctgaacgatgcacgttgagaaatcggatcatctgatttttttgtatgtaaatcccatttcacttgatgaactccctcaaactgttgtcatttcaattggttaatctcattttataaatggtttatttttctagataaaattagaaaaaatg

SEQ ID NO: 119026 - DNA, 223 bp, Heterodera glycines
  unsure (1)..(223): unsure at all n locations
catgaagaaatgcgcaanngatggaaaatttgggcagaaaagatgcttctcgcctacaggacaccccgannattcggcactcaacggactttcgcccgatcaattgttcttcggtcgaaggcttcgaactcagctgtctctcgtccatccgaaggaagaacaagccgaagtcatcgacccagccaaaatccgcaaatcacaagctgattatgcgcgaaaaatg

SEQ ID NO: 119027 - DNA, 569 bp, Heterodera glycines
ttttatagaaataaatttattatgatttaatttcttctaattataaaaaacggtacaaatatgtcaaaagttccctgacattcttttcatggtcgagacacgctttttttattttcagctttctaaaatttattttttaaattattatgagtttttgagtccttcattatttatttaaacattaacatatatattatatttaaaatgaatacaaaaaataatttgaattatttaatttctgaaagtcgcttatttttaaattaattttattcgagcagcagccgggctggtagggcagtagcagctcatgcgcagatgcatcagtgcggcgttggtgaggcggggggcgtgaaggcgcgggagggatgcaggctagaggcggggaacggggaggcagaggatagaattttacgaagggcgctttgcgccacccccacccccgccctcctcccgtgtgtaccagaattatcaaaaacattctgacgtttaccagaattttcagaacaattcagatgtttaccagaatttacagaaccattctgacgtttaccagaattttcagaacaatg

SEQ ID NO: 119028 - DNA, 238 bp, Heterodera glycines
ttgttgctgctgatcctttctttagcttcaaaccttagttcaccagcaaatccatgctgtccaatgttttgttattttattttgctaacctttcccccccccctttttaacaaaaaataccacaactttttgtttaaatatttggtcttttttaaatatttcgttttcataatttcagtttatttccaattcgttggaagagcttcgaaatgagaatttgacgcttaaacaaaaaatg

SEQ ID NO: 119029 - DNA, 113 bp, Heterodera glycines
aaaaatgttaattattagctcacttttcaagtttcaaaatcctcgacccatccgccggcgccgttgcgtccgccaatggcatttccgtccggcacccgccctttgcctggatg

SEQ ID NO: 119030 - DNA, 137 bp, Heterodera glycines
attgggaagccaaagatttgttaaataaggtcggattattggcaaaacgaaagggaaagggcatttacgattttgaggaaacggttaaatatttgagccaacaatattcagcctatcttggcattgtgtatttgatg

SEQ ID NO: 119031 - DNA, 1003 bp, Heterodera glycines
aagactcttgaacatctcgaggtatagaggggaaagtttttatgtgccttcaggcgctggtttatttattttcccaattcggattggaaaattttttcttttgtttgaagtcataatgaaattaaaaaaaaaacaaaaaatgtgctaaaaataaataataaattaaataaacattacaacgtattcaaatcatttcggtctccgagttttataatttactgttacaatgacttttaattataatttttgtcctttttcagaaaattgctgattccaagtacaatcttggaaataaatcaaatttgaaaatttctaagcattagggcctatttcaaaaagtgctaggtcgatccaaaaaaaactcagtgattgatcggtgtcaatgaatttaagtatacgattataatttaattataaattaaaaaaggaataatataaaaatttgccattttaataaatttattattttaatgattctgaaaaaatattaataagtccaacctaattaagattttgcttgtccaagaataacctcgaagtaaataaattattcatttttttaaattttaaaattaaaaaatcttcaataattgatgaatataataattatatgaatttagagaatcgaataattaaatttaattattttatcgatcactgagttttttgttcgactcagcacggttcaaagtacgtaaatggcatccaaatacatatgtcaacactgtcgaaaattcaaataacagtgccaatgaacaaatttaagggacaaaaaatgcccccgtcccaaaaattggcatttcgccttttcattttacaaatttttcggcgactttttgtcatccaaaattagagaagcgcttcaattcattagtatgaaatattgtcatacgctgcaaaaacagcaaataaacgaagcttttggcgacaattcatcaacacggcacggcactcggagatattggaaaggataaacggcaatgtttaaaacagcaaatagatg

SEQ ID NO: 119032 - DNA, 310 bp, Heterodera glycines
ggtgcattttcgaatcaattaattaatatttaattaaatcgattatttttgttcattagttttatatttgttgccaggttttttgaaatttagtcacgatttgtcaatgaatatgtttggccaaaaatgggatgtaaaattctgaaagtttttgttgcatttgtgtcatactgtgtcgacaaaacgcgaggaaaattttgataaattttcattttttaatcacaaaaaagcgataatttgcaaaaaagcctaaaaataaatattatttttagacaaatactctccgaccctaacttccaaaaaaaaaatg

SEQ ID NO: 119033 - DNA, 258 bp, Heterodera glycines
aggtttccaacattttattataaggtatgtgaaggcctctttacgttatatttttgcaataagctgtcatagattattaatcaattaatgataccaagttcataacgatgggctgactcaaatgaatttttcactgaagaatttgaattcgatcagacggactttgaatgtgcaatgggccggagaaaatttaaaaggcaaacaaaagagcaagagatatatggtttgttactcacagaacacctatttttaattatg

SEQ ID NO: 119034 - DNA, 73 bp, Heterodera glycines
cgctagacattcgctctttccggaatcagctttatctggcattttctactttgaagttttggtcaaatctatg

SEQ ID NO: 119035 - DNA, 67 bp, Heterodera glycines
tttcccaattaaaatataattataatttttgaattaaaaggaaatacaatttgttccactcaaaatg

SEQ ID NO: 119036 - DNA, 291 bp, Heterodera glycines
ttttcaaataatttttaaatttaatagatatccagaaaaatggctatctattttttgagaaattttctatgcaacaaacgctctcgaacatgaaacgaagtgcggtgcgccgtggccattttatttttcaaataatttttaatttaatagatattccagaaaaatggctatctattttttgagaaattttctatgcaacaaacgctctcgaacatgaaacgaagtgcggtgcgccgtggccattttatttttcaaataatttttatatttaatagatattccagaaaaatg

SEQ ID NO: 119037 - DNA, 1003 bp, Heterodera glycines
atgagaatgtcaatagtccgaattattaataaggaattataataatgggaggatttgattgctggactgtttgaatttgtgtttggaatgtggtgggaatgccccatttacacaacacacacacacattaatcgatgaacgacgaagacaatggtgttgtaaagttgttgaggaatggacgaacaaaaataaggagagagggaaatttaattaatcggaggaaaatgccgaaagccatcgaaaggagggcaaagaaagaataaattgaaaatgtcatttcggctcagtcggttcacaggaagtggtaaaactccgaaaatgatcctttcttattctaatgttacataccaaatgaatttttcgaaaaattttccattgtgtgagaatctggccaaatgcctttctcgctgtggcagtggctgctgataagccccactcatccgaccgctatgtattcatttcctccctccctcttttcgtcccattcattcgcgaccggcagaagttccatcgagccataaattttctcgaatgactaacacacaatggaggggggggggggggtcataatggctggtggtgacgacgatgggcagaagaatatataatgaatgtgtaaataaacaactgacggtacacagacggacaacaaaatcggaaaacggggcctcattcacacagaagcggagaaagtgtcgaaaattagtgattggatggaattaattcaaattaactatgtaaaatcccgaaaaatctgatttaccaatctttataccagggatggcattctgaggcccaaaaattttcggaaatcgaaaccaaaaaatatcggaattccgtgccatcctagttctataccctaattatattgttgcctaatttttagcgccaggaatgtccgttaaaaaattgtaataattccacgaacgctattctaaatttacattattttgtttaattgagcaaagcactcaaattcaataaacaattgcagactaaaatg

SEQ ID NO: 119038 - DNA, 329 bp, Heterodera glycines
tgatttttggaaatcgttgtgtcggcccatttcactctcctcgctgtcaatttgtcattctgtaatttagagttctttttcaaaacaatgctttacaagcgaacatttagcccaaatgaagacataaaaaaacattcagaagggtttagagccaagtaggaaaagttttgggcatctctttcgaaattcaggcattaaatcattaaaattcggcatcccgaccctcaaaaaattatgaggaaactgaatcatcattccagaaatttgcgcgtacatatgaaaattaatatcaattatcatcattattttagcttttattattcatgatg

SEQ ID NO: 119039 - DNA, 82 bp, Heterodera glycines
acaagtggaaatagggattaaacaagcaacaaaaattagattgcttgtcaattttaatgttgacacatttggcaacgcaatg

SEQ ID NO: 119040 - DNA, 756 bp, Heterodera glycines
ggggtgctgttagttttcgacagtggtgatctcgacagtgttggtttcgacagtgattgatttcgacagtaaagcttgtttttaaaaaaacaattaaaaattactgtcgaaaacacctggtacggttcttagattacaaaaatttaaaaaataaaattagtcttttcgttttgataatttcgtttcccttttccttttcttattatttttctccaagtatttctgcaaatgttttttttaacttttttcttttccattccagttttaatttgaacaattaaaaatgcaattgaaaagaataatagacacaatttcattattgacaaatattcataaaaattaaatgtgtttttcgtgaattttttggcgaatttttaaaaaagaataaaaattttacgtggtgttccgaactaggcttttgaagggaaaggctgtatattcagtcccaaaattattataataaattctttaattgttttaatttacttttccttataattataaattttaatatttaccaaaaacaattattcgcagagattggacataatctgttaaatagccataacaaaattttttttacatctataaaaaatatatttgttagaaaaatatccaaaagtgttttttgaaaattgttggaagtttagatatttggatttttaagtacccaataaaaattcttgagaaaattctacttctcgagcctcggggatgagtctctgtttaaaaaaaacattttattttttggaaatg

SEQ ID NO: 119041 - DNA, 228 bp, Heterodera glycines
tgccattaatttgattgctaactgagtttgttgtatgatattgttgtaagtttcctgatttggatgttgctgatgatgctgagcgcctgcttcttgatctgggagccaagcatttaaggatactgaactatccgatgtggcttgaacatttgtgttcttcctggttgcatcatttccggttaagctctagtcaacggaactgaactgagctcgcggaaccttgtaatg

SEQ ID NO: 119042 - DNA, 1003 bp, Heterodera glycines
ttgtctgtcacttgttgtattaaattttggtctaaaatcgaatagtttttgaaacaaaaaataaattaaataaaaataggagtgattgaggaattcctagagttttaggatcacagagtgattatattaattgaaaattaattaacggagaggagcatcttacaggagaagcagatccatttttctcatttttcaaatactaattttagtggaatgtactcaaaattctgtccagaaaagtttgtacgttaatcctttaaaatagccatcagaaatttaattttacagtttgtctctaatcccaatcaactctaaaaatcgaaaaaatttcaattttataatgactgtcatgttcagaaaatagtttttattttattttttctattgccccattgaatagagtgtttggtggtgtgtttacaatttaatgcctattagctcattatcataatcatcatcatcatcattagcagcaccatcagcagtttgcctgctgctgttcagtggtcacagaagtgggtaaattttttcactgctctgctgcttattcatcattatttttaaattttcgatcggacggaccgttgtgaaaagagaaaaaaatgaataaattaccattttttacattagccatccattaataaaattagaaaaaaataaaaaaaaatgaaaattaatttgtaataaacaaaaattcttaaaaatattaagaaataggtgaatgaaattttttttttaataaattgatgcattgaacggtttaaattggcatcagagaatcggtttttcgatattctgtaaaaaaattttgagaaaatctggatttgtataaaatgtatttatgaaaatttggtcgtattctttcgtatggctatattttgataagcctttattagcatacgctaatttactaaactactcgagatttatttggtgaaattattaaattatttattataatataaattaaaggtaaaattaaatttacaattttttagccatg

SEQ ID NO: 119043 - DNA, 341 bp, Heterodera glycines
tttttcatttatttccccgccacttccgacaaacaatgagtaataatacaacaagcattgaaaggaatggaaagaagagctgctgagaaattacaattattcgcctttattaaatgccaaaggatgatatgaaaagggcaacgtttttatttatcaataaaaatggcatttcaattattttttaagggattattaaatcaattattttgcaatttttttaaaattaaattaaaaaaggctttgaataaatcaacttcagctgtcttaataaacattttgctgacagcagcagatccgtcctctgctgcacactgattttcttcttcttaggctagcaaatg

SEQ ID NO: 119044 - DNA, 161 bp, Heterodera glycines
agaaaactttgcctaatttcgaaaatgattttcagatgaattttcacttttttaccatcactcggacactcggcgcaaaaatgctgctcccctaaataattgtaaaataaattagaatttgtttgttggacgaattcacttgtgaaacggccgtacaaatg

SEQ ID NO: 119045 - DNA, 314 bp, Heterodera glycines
ctctataagtctacaaaatttaaaaaaatttcgttaagtttcaaaaaaattatggctagaggaactcaaaaaaccttggttttcgagcattttttgagcatctttggccctaactcttttgaaacttaatgaaattttttgaaattttgtagactaatagagaacacttaggactatcgaataatatcaagaattaaaaattttgttacttttcagctaagttataaataatttttcatcaaatcataatgatggttttttaaataaaacatagcaccttctaatataatttctctaatttagattgcgaaatg

SEQ ID NO: 119046 - DNA, 115 bp, Heterodera glycines
ggttggcacatattccgaattttgatttaccgaaccaaataaaaattgctacaattttagaagccattggagtggccgatgttctctcaccagtggaccatatgcaatttgtatg

SEQ ID NO: 119047 - DNA, 388 bp, Heterodera glycines
ttttgtcgtcgaaatgtggagaggcgaaggttttgttgaagagagctggtgaatcgattcgtttgctttctaatgaaagtggggaatggggcacagtgagcccttttatgtcgctaaagtggagggaacgcccatcccattgacagacaatgcaaatccccggtgggagcagagaaaaatggacgagagagagtgtgtgagagagaaagtaagacggcgtcactttttgaaatggatttttttcaacacgaaaggagtctccgcgtgcctgcacattttagccgccattttttcttagcataaatagcgcccacggtcattctattcctcacttttcttcttttgctcatttgaatttgctcatccatccaactaccaagcaaaaatg

SEQ ID NO: 119048 - DNA, 80 bp, Heterodera glycines
ttgtaagcaaaaataattaaaagaatggcacacttttagtccattgtcagcaattactgttaatttatcgtcaggtcatg

SEQ ID NO: 119049 - DNA, 88 bp, Heterodera glycines
ggtaatttttcacaagcttttccaaaaaaaattattcctttaatttgaaggggaacaaattgttgcggcgggcggtggccaatcaatg

SEQ ID NO: 119050 - DNA, 830 bp, Heterodera glycines
attaattcaaggcaaattttttttattaaataatttttctttattttgatgttttttaaaagattcatattaaacaaaacaattattaactttattattattttttcaattgtgaccaaataattaattaggtctgaaagtttcttaaaattcataaatgaaacttttgaaaaaaattttgctttatatcatttttggtggaggcttttactcgaactttagatttttttgtaatggatttaaaaaggtcttaatatttttttgaggaattttggctgaaaatttttcaggttattctggccctataaccaaaagaattggattgaaaatgcctaaaaataaaggatcctcagaagcaaaaataaaatcattttaatttatttgataattggtctaaattaaataaatattgaaaaatgccgaatattgagttcacacccgccaaaaatcagaaatttgatcaaaatcgctaaaaatttttaaaggaaccttcggaacccagcacctcccgaattctaagaaattttttttgttttatatcggtattttttgcagaaacatttaaattttttggtcgccgttactaaattttggttgaaaatggcacaagttttctaaataaacctcagatcaaacatcaaccggaattttattaaaatatttgaattttcaatgaaaaaatttagtaacaatgataaactcacaattagcgcaggtagtgcttcttgagaatgtcgacgattacgcaggcgaacattgtgaggccctcgggaaattgcaaagcgactgaaaatctttgaatttttgatttcatttcagtaaaagaaatg

SEQ ID NO: 119051 - DNA, 892 bp, Heterodera glycines
tttttatgggacaaagatttttggactctcttttcaaattatcatattcggaggatttaaatgaattttcaaataatctgattgaaatggcactaattttgagtcaatttcagatgttcgtcagaggtttcttcaaaagggcgggcgtttggcgctttgccgaaaaatggcaccgtttcggctgtttgatggtcagcgctgaaaaaagaaacaaaaaattgcgaagcaaatgtttaagttttcttctgcctcgaagttttcacattggcgaaagttcggtggtgcttttgttgcggctttgaagggcaaaggtgattagtaagcaataaatcaatattaacatactatatgttacagtatttcattgcttcccttccctttaattgtctaagtcgcctttttctcgcttgtctttctctcccccttctttctcatgctctctcctctttcctccctcactctctcctctttctctctctctttctctttatttatctcgttttctcttcctttttattttctttctttccctcttaaatatgttaacatatgtagaaccacaccgtactttgcacccattcactttttaaaaggctcatttgtttgtctatccatccgcagtgcacgcattcgtcacaaactacgtgttgttttcctccgtctcttccccctccgctttgggtgcattcacccctctccttccccccttccccatttggtctctctcacattcattacttttgtttatttgtttacttctcctaacaaataagtgcattggtcccccctttacccgctcatcattctctcgatcattcatttcccacaaatcttttaattccttaaatagttcaactaaaaaaattaactaaaattaacttaattaatgatg

SEQ ID NO: 119052 - DNA, 1003 bp, Heterodera glycines
aaattaatgtaaaatatttctgcttttggatgaaatttatatttttgatcgtcctaattaattatatcggatcataaaagaaaaagctgcaaaaacctcttttaagaaaatatttggtaaaaatggaatattttttaaatttttatttgaagacaccaaaatgaatatcaaaatatgcctattattcatttataactgtctgagctgcagtatgcacaaattaacaaaaatttaaatttaaaaattcgagcctttaggcaattgaaaaaaataggtgacagattttttcagctatttaacatattgcctttttgcattaaagatcatcattttacagttattaaattaattttttttattctatttaaattatccataatgaaaatgcttttttctttaaaaaataaaaataaatttttcctttttattcttttatgagaaaatttaatcttattagtaaaagaataacatttaaagattttaaaatgaaacgagaaaaacccgaaaaggcattaaattttatggcttaatcgaactttttaaacttcattacatttttgtattgccataaaaatatgacacatttaattccttaatttaaagattctttattattcagttaaattttaaaaattttaagtttaaaaaaagtttgggacaaaaatattgagtctcgaatttcgaactttttagttatattttttgcaaatttttgttagaatcaattaaaaacatttcatatttttcaatatgtcctgatttttcacgtttttttcctgtgtatgaattctatatgcattttttgttgtaaattaatgtaaaatgattctcttttggatgaaaatcattgataattgtactgatttttttcatttgtacttttataatcaatccaaacaaataaattctcattttcttcatttattaaaaaatagcaaaaaatttcataatttccgttatcaaattgtaataataaacaaaaatttattgccaattgaaaatg

SEQ ID NO: 119053 - DNA, 827 bp, Heterodera glycines
ttctggtagagccctgaaaaagcgccattatgggcgtttcgtaaagtgccaattgcacagattttcgagaaaaacttgtcataaccgggatgggattcatagttttgtttttatttttgcaccaaaaaacctaaaaaaaaattaaaaaacttttttcaactatttaggcattttgccaaagattattaacaaaaatgcaataaaacgaaaaaaaaccccaagaaacgacccaaaaaaatttcagaaaaatataccccctgagaaatgaaaaattttttaaaaattaatttccaaaatttatttattattttctgacaagaatttttaatttaaaaattatctcaatactgattggcttaatttgttacttttttggataattttacgattttacacccctaatttgagtttttcgcaactattttcccatttttagctcctatttttaattatttttttttagaacctaaaaattaactatttggcagtttttaaattactccctactaaaaacttttcttaaaacagaagaaaattaatttttgagcatttttggtcacaacttcatgaaaataaaaaattttttaaaattttccacgctaacaacagctaccatatgctatcaaaaaaaatgaaattactgtaatggtgagttttctctaaaaatcgataaaattggcacttttacgaaacgctcattttgtgcaactttttatgaaacgacctagcaaaaaagagctaaagcattgatacttgactttttgggtctcgaatttcgtgaaattttttgccttagaaatccaaaaatgaatacaatttcagaaatg

SEQ ID NO: 119054 - DNA, 438 bp, Heterodera glycines
gcaaaatgagtcattatatgcaaattataccatacccagaagtaaacttcaaaaaatttaaactttcgactatgttagaactttggtccggggttcggaattggtccaaatggatatcttattcgtgtgatcagcgaccttgaaaaactcaggaaagacttttatttagataaaaaaaaaattatttttaagtaaaaaaatttaaaaaattgtttgaatccgggttcggggttcgaaacaaagtcaaaaaagatcaaattcgtgctcagcgcatcaaataacccctaaaatatgttttttttttggatttttattctttttttttgtgggaccaataatcttcacaattgccaacttccttgcctttttaaggtgtgcaatttgttgcaaaaaaacggagcagcagcgacggatcaatttaaaggacaaacaaaaatg

SEQ ID NO: 119055 - DNA, 58 bp, Heterodera glycines
ttataataaatacatcattcattcaaatttggcactccgctctctgatatgacaaatg

SEQ ID NO: 119056 - DNA, 76 bp, Heterodera glycines
cctaaatcaaatcatattgtcggacactttcaaatgtcgccgataatttgagagggcagtaaaaagccaaaaaatg

SEQ ID NO: 119057 - DNA, 477 bp, Heterodera glycines
aaaaataatttttttttatcattttcccttttttgcaccctttttaattggcaaatattggaaaacaattattatttttcttaaaatttcttttaaattaaaattttaatttaaaaaaatcctggcgaagccaatccgtgatacgtatccctgcatgccatcataaatttgtctgcaaattttcaaaagtgactattttggcgcaatataagttccatgaaaacaaaaaaaaatcgtcgcctgggggtggggtacccccaccaagccgaaattctgggactgtccctacccaatggagcagctcgttccccctccccctgcccgaaaaaattttcagcaagtctttcaaaaaaaatttccagaaaaatcgtttaaaattagaaaaaaaaatttctctgcttaaaaattccttgattagatttttgtaaaattctgttattttcttctctgttgcagctgatcttctgatcaaaaatg

SEQ ID NO: 119058 - DNA, 140 bp, Heterodera glycines
aactggcagtttgtcgccaatttcgaacaatcgagaatgtattttcacaaatctcgagtcaaattcagattcagaacaccgctgactgagtaagagaattggaaggttcgataaaggaactcgagaactttacagaaatg

SEQ ID NO: 119059 - DNA, 333 bp, Heterodera glycines
ttttgacccaaacagagcatacgacccaaattcacttgtatttatttcgtaatacatttattttgcttccattatctttgctttttttctttgtagtcaatggagaaaagagtttctggacggccgataccgatccaaacaaccaacccctccttcccccccgcgtgccccatcgcccagctttccaatcccggtcatcgttggtaatttaaatttcagtttttttttggattttgcaaatattccgtttacaggaaatcgtccacaggatgaaaattgtttggttttccacaaatatcttgtctgattttttccattttagggcggcagatg

SEQ ID NO: 119060 - DNA, 381 bp, Heterodera glycines
tggtaagacggacacttcagcttcgtttaagtacagttgccaaatgcacttcctcttcagtgtttatgagttttgtcctctgttctgagtttatcccggcaacgaatgcgaacgaaaacggcagaagcgcgccgtgggggacggagaggtgagaggaaacagaggcagtggataaagcgaaacgaagcggaagaattcgggggggggggggggtcaaatggagagacaacgaaacgaacatccggggagacaaaccgaaccaacgaacacacagctgcttaaggagccttcaaagtcatcgcctttcgtccaaggcgtgccttggacattttggaatcggatggttttggcggatttcggaaaagagcattggatgtgatg

SEQ ID NO: 119061 - DNA, 118 bp, Heterodera glycines
aagcaccgatcaatgtgaacggcacaacaattggtttcatcctggacagaggtgcggaaatcatcatcatcaatgaagatgattacaacgcaatgggccgaccaccaattcaaatatg

SEQ ID NO: 119062 - DNA, 105 bp, Heterodera glycines
aagaggactgctgatcgatatatgttacaaatgatccaaatcattagtatgtattattagaaaaaaatttcttgtaaaaaattatagggaaataaatgaataatg

SEQ ID NO: 119063 - DNA, 406 bp, Heterodera glycines
tttggcttttctccgttagatcagtcgcctttctctcgacggtccgttgggagtgcaccggcgcatcgattcgtccgtctcccaaagttgcggtccccagcgcgaattcaacttcgaccttttgctgggtcctctatggcccggcaatgggctccacagcgacgcgtgttttcagttggaagacggacgcggcaccaatttgggttgttcctgttcgaatgttcgtgcgggcaaattaaatccatcgcagtgattccctttgcttgtgtagaatggctgcaaccggctgattccataccccatcgacttgtctcgaaaaagggtcaaatgccatttggacggcccattattcgccccttcccgtgccgacttttgtcttggacatttctgttttactcaaagaatg

SEQ ID NO: 119064 - DNA, 111 bp, Heterodera glycines
tacggagggttattttcttcacatttgactccgtctcagaaatcactttaaaatagatatggggcggcaagttacggtggatacggtggtgccggaggatacggcagcatg

SEQ ID NO: 119065 - DNA, 1003 bp, Heterodera glycines
catgtacatgtgagctatttataccccacacatttgtcttgtcctctttctctttggaggggggtgggttcgcacaggacacggcggcacattcgacactgtgtgggtgtgttaccgagaagaacctatgtgttttatggttgcttatgtatggatggatgatggatgggtgccattttttatgaaatttaagcgaagagtagagcgaaaacgggggaggacaatgaatgttctctctcggcgcatgctcactcatggtgccaaaatttgtatgtatgtgagtgtgcgcgtgtgtgccgtgccgtccgtccgtccatccatcattcatcataccattcattcattcaccgctcacgcagcagcagcagagaggcaaccgaccggacagggccgcattgttagttggcttcttcatcaaaaaataagtgtaatacaaaaagggcgacggcactcatcacgcacattggcgagatgaatgaaaatgccatcattgcacatacacgtccgcacagcagcggcgcaattcacacacacttgaaaaaaaaatttttttcattaattcctttctctatgacaaccctttgccctcctccctccgctcggctgaacacacaaattgcttcttcgtattattatcacaattgaactgttagtgccccctggggaattttaatctggccctcatttcagtttttgatgggggtttttttagtaagatcttttcaatgcccaattaatcattgttgcaaaatacaataattgtaatctaataatccgtcggggatgatccttaatctcttgataaatccattttaagaccgcttcttccattataatttccttgtattctttggattaaacaccggattaattttgaaattaaattacaccctttttataatttttttttttgcttcagccataattaatttatccaaaaaattctacaaaaatagctcctgatcaatcattgttgccagaaaaaaaaagttaaaaaaatatg

SEQ ID NO: 119066 - DNA, 481 bp, Heterodera glycines
ggttgacccccccccttcccttttttcatgtatgataatttttcaaaaaatgcaattttgagtagcgctacggaaaattgtgttctttcacatataaagatttgtgagaacttaaatcctttaaatttaatttttaattttaatttataatttttgatttctatataaataaatctttatttaaaagattgaagaaatcgttcaatgaattggaccgagaatcgctggccaagaatcttgcatttacagcaggtagcaaaacatactaacgaataacaaatctattaccgattgatccttttctttcatagtccgtctcgacagtgatggtgttgacaaaatacagaactcatttttgcgttatttggtccaaatggaattggccaaaaaggagcgagaaacgaaaatgtgtgattcctttttttaatattttgattgaccaagctaaactatttccatttccaggcgtggaattccgatg

SEQ ID NO: 119067 - DNA, 108 bp, Heterodera glycines
ggagaggtacaacagtgattaaaagaggaagaacagtgatcagaagaggtacaactgtgattagaagaggtacaactgtgattgattagaagaggcacaacagtgatg

SEQ ID NO: 119068 - DNA, 616 bp, Heterodera glycines
tatttttaatttgaagctttgttcggaaaatctttggcctccgacgaacactccgatgggtcggtcatttgccactgatttaacggaaaaagcggccgatcgatttctgccaatggttggaaaatcagcaaaagcaaaggcggaaattctttcactttcatatgacaaagtgccatcgccaaatggcttaatcaaaatcagtgaataaaacaagcaaatttctcctctttatttatttattaattatttttaaatgctttcgcattttataaaggacggtaaatttaataaaaaagtttaacatttgtttttttcacttttttcattcccagcagataatttttatttaacattaatagagcaaaagatattttttatgaaaaatgtaagaggataaaaaacattctcttctgcttaatgatgacaaattaaatgtcatttatcataaaaatgtagtttaaatattaaaaatatatgatttgtgaacaattcaaaggcatcgaaagtcattgctttaatatcactcctgaaacctttagtttataaatttgtgcactttcctggaagtacgactcataataattcattcttttcagaataattatctataaaaatg

SEQ ID NO: 119069 - DNA, 69 bp, Heterodera glycines
acaaaattggaagttgagactgaaaatgttcgggtttcggagttccttctgctcaacatttggccaatg

SEQ ID NO: 119070 - DNA, 724 bp, Heterodera glycines
aatgatcggacgaacgggcaagggccaataggtccgaatatcttcttacggattttcgtaatccattttatcacagtttattatcccggaagaggaagtaaaaaaatgttaaaaatctgtttaaatgtaatcagttattattttttaaattgtaatcaaaaaaaggaaaagaaaatagattttaaataaaaaatgaattttaatttcaataaatcataaaactataattataaaaaatttaaattattgcataaaaatttcaaaatgctagaaaaaattaaatgaaagattgtttgaaacacataattttgtattattacatcataatttcataaaaaaatgatcaattggtcaaacattaacgatttggaaattgatgattcaattaaaaatgtgaattcattcattaactgacaaaagaaaattgctttgcaattgtacgaaaaagtgataaacgacaattcaatcaaattttgtcgttatattttatgcgataacgatactcttcaatcaaatttcgtcgttattttgtgggctgcataactttttacattttttgtggccaagacagaaaacgcctgccttcaatcagcacagcagcagccttgtcccattcttttatttaaattgtcaaaaaaattttataaaagcaatcatttgcttctcatgcccatttacattaatttttcttttttatttttatttttaaattatttaggaaatg

SEQ ID NO: 119071 - DNA, 1003 bp, Heterodera glycines
ttttgctcaatttttggctgaaaattatgtcactattcgtcactatttcggaatgtttgccactattttgtcactattttaacatttttaccaactattttagttaactatttcgggattttttgtcactaaaattcacagccctaataataacccatttaattggctcggtttttatgggtttaataagtacgaatgataaaataaatttatctttaatttttatgttatttaaaccaaaacaatttaaaatccttttattcgcactttaaaattgattaaacattttaaaagcaaattactgtatttaactttagtatttttgaattagcaattttgcacaattctgttaacatttcccactaaaattttcaaaatttttctccgtcggacttcattgatttgtgatatatgtgttaaatatattgatatcaagaatcttaataatcgtaaagttaaaaaatttttgctcattcattactgtgtttgataaattttagctcattttcagaattttggcctttagacttgttgttccaattcaattcgggtatttcaatttgtcgaaatggatgtcgtaatctgcaccctgaaaaccccagacaaaattctgacaatacaaaaatgatgataaatggatagtgaatataggatttagcaattttcgccattatggaatcaaattctgcaaaaaatacaaatattgggtctggtctgtgccaagtgaccccgacggggtaatagtcaagtcggcaaaattaatgcagcattgttgtgcgaaagagcggacgtaatttgaacaaattaatcaattcatcaattaatcatggataattaatttccaaacaattaattattttaattattatttttcctcatttttttaagattcccgtcaaagtgtccgccctgaggaatcaagtctacaaggtgcagcagaacaaaaagatatcaccgaaacggggtaattaatttattttagggcatttacacgccattgatg

SEQ ID NO: 119072 - DNA, 59 bp, Heterodera glycines
aggggatggttcccatattaggtttacttgggaatgtgattcgtttcgttaaaacaatg

SEQ ID NO: 119073 - DNA, 1003 bp, Heterodera glycines
gaaaaagaaaagaaaagtgggcacagaataaaggacgagtgatggaacagcaaataagtatacagtaaacggactaagttattcccatctctgagtaatggcactcttctgtaaatgctgtttattggtttaaaatgccattttggcaaacattttttgtgctgtttttttgctagcatagattgtatccatcgacatttccatcgatttttctctgattttttatgtattggcatttttctctgcttttccaattgattaatttcacaattcattgccatttcgtattttaataaaatatttttttttgcctttttagagacactcattcaatcaagtcagtttcaaagtgatcagagtaaaccgtcttttgatttttcaacttttttctgcgaaatgaccgccctttctccggtggtaattcgcctttcgtcgtctccattatgaaaagcttttccccctcttctcgacccctcccccttcacattggtctcgtcattgtcgtcactttcaactccattttcttaattttcctcttttttggtatttttgtttttcgtataaaatgcttttgtctccctttttagtgccttttgtctcttccaaattgagctcctttcccccgccgccaatggccgtggcatcacttaagaaagtgcacttgaaaaaattagtgtcccattcgcatgcgatgccgacgaaatcggcacattttggcaccaaaactaatcggccaattcgggcacggaaaatgcgacttcggcgcattagcgttaatacattaaaggggattaagggcaaaaaactgagacgagtgcgattggtaccaatgccaatgcaaatgattccaatttaccatccgccgctgccggtgataatcagaagaattaggaggatacaaattcaaaaaaggcacagaaaacgggggacaaaaggcagaaaaaggcgaacggagaaggaaaggcacagcaaaaagaaaaagccaaacaacgggaggaaaatg

SEQ ID NO: 119074 - DNA, 124 bp, Heterodera glycines
caaaaaaattagttaaataaagattgaaaatttatagacgaaagatttttttcttattcatagcgcttgctttttgccattcagaacaattctgttgatttatattgaattgacaaattaaatg

SEQ ID NO: 119075 - DNA, 59 bp, Heterodera glycines
actaaattgaaaaaaataataattatatattttattacaaaaaataaacatacagtatg

SEQ ID NO: 119076 - DNA, 1003 bp, Heterodera glycines
ctttcatcgtgaaattgagaaataagcagactctatatttataaaaatgctatttttatatttatatgaagattagtgacctcatattcgtttagcgtgttgttaagattttcatctagtgctaaatataatttatttcttggtctaggtttcgatttcccatttttaatttttatgatgcggtcatctatttcagacataactgtttggaaaaaatttaaaaaaacgggtaccgtcgcattacgaacactgcttggttcccttccctaaaaccttttagttgcatttgttcatggagtttttttaatgttttaatttctttattttgatagcgtttgacaagttctatagctttgtgattttttataaattcttcaaaaccggaattggtagaggtcgaatactcaaatcgaaataacaaaaaaataaaaataaaagtcttattcattttctaaattataattttattaaacatataaaaatttattgtattaattttacattttcagtggtagcccaaaattatatgtattgatggttattgatttcaacgtggatgttaccaatacaataattaaatttattattttaaatttattattttattttatcaatcactgagctttttgtggaacgcccacactgagctttttttgtggaacgcccacactgagctttttgtggaacgcccacactgagcttttttgtggatcgacctagcaccgaaatgttctatttatttacaaattttatttttcctacaatttttttaagtaaaatgtattgttgttaattttgattttggctttttaataatgtatatggaagattttattgccggaattcagtatataaagatataattattaaaaatttttacgtgaaaatttaatcctttttcgatttttctgggtttacatattctataccaattgatttccgtactctccattcattcactacaagtagcttatatttttgttttttattagtgtaatacatg

SEQ ID NO: 119077 - DNA, 324 bp, Heterodera glycines
gcagtgccgataggcgccgccgggaaaattttttgaaaattggaatgcaatttgttaacaaattttgtacaaaaaatgaacaaaatttgcgatcttgggctaaattttaagaaaaaagataggaattttgggggccggcagtgccgataggcgctgccgggggaaaattttaagaatttatatgaattttgttaacttagccaaaattttcagaaattttcctcttttagatgaaaataaggcattacccccaaattagaacatttcttagaaataagaacataaagaaaccctgtattaatcagaaaaaaataaatacaaatg

SEQ ID NO: 119078 - DNA, 60 bp, Heterodera glycines
aatacccatcgacattgttattttgtatgcttccatcattcattcatttgacaaaatatg

SEQ ID NO: 119079 - DNA, 165 bp, Heterodera glycines
ttttgctttgtgtgcttcactttctgattagcatttaatgcacaaatattttacatctcatttccgttttgaaattttacggggagaggggcaataatcaatttttttttttaattattattgacattccgtcgtgacttttcccgaaaaatgttttaggtaatg

SEQ ID NO: 119080 - DNA, 459 bp, Heterodera glycines
tattttggcaattaggggattttataaattttgttttgacatcctaagattttttttttttgcattcatatttttcgcttcatggtaacgacacgggccaaatgaagcaacacaaaacttgaacattttgtgaaaattgagtttaagagggaaactttagtaaaattctataatataaaaactgtccaatttcgtttttgtgtcccttaaacttcgctcgaattgggtaaataatagcgtataatattaataattcagggaccaaaaaatggcattgcatttctttttacaaatattttttcggaaatctttttttcatttcttgtcagattcgactcttcgtccagctcttcatcgtcctcctcctcctcctcagatgaagcggatgaatggggggcggccaacacaaatgggaacagcggtggtagtgcaaaacaaattcagcagcagccgaggatg

SEQ ID NO: 119081 - DNA, 120 bp, Heterodera glycines
ctcatttgtgcctctccacttcaaattcgctgttcatttaccctcaggcgctttcatcatttcatgccgatttagtgaattagaaataggattaattcattctttaaattttgcagaatg

SEQ ID NO: 119082 - DNA, 467 bp, Heterodera glycines
aaaatttctaataaatgagaaatctgacagttaaattcggttaatttttaaaaataaaatcccgttaaaaagagaaagatcatttcactactataccgtagtgagttcttttcattacctagactagactggcgccggaccagaatcagcttggtttatctgctgcgacttatacgcttgctttaataattaattttagaaaaatacaaatttttaaatatcactttttttcttatctcagtgctcacaaaaccgaacatttgtacaaaagagccagtaaaggtaacaacttagttaaaatccttaatattggaattctaataaaaatttaaaaaatgtcgttttgatatatgaaatttctattttctaaataaataactttattaagcttagagatttattgtaattgaaatgatttttcattttagtttttagatggatcgttctcaaacaaaatcagcaaaatg

SEQ ID NO: 119083 - DNA, 361 bp, Heterodera glycines
tctcgtgtccaagtcctgtgatcagggattagcttagtcgatcggaccaatgatcagagtaagccaaaaaatagtaaattgaaccaaaagtaaatattccccaccgccgctgatctgtcactgactgatccttttttatcacagacccgaaaaaacacctctctcacccaccaaattctcgaactcgagattttagaggctatcactaatggaattgtggcattaatttattctcaaccattggtttctggaattggaaaggaaaataaaaggcttggcttgcttattgttaacctaaatctagcttacataaccagtttaggtgtttttcaaacacaaaaaaacttgaagcaatacgatg

SEQ ID NO: 119084 - DNA, 1003 bp, Heterodera glycines
tttaatgtccttgaaaataaggatgagtcggtgccgtgacattagtcaaataaccatcaaatgaaaatactttttgatataactttgctcaaaaacaatcaagttttaaaatattgatatcattccatagctccaagtgttttcaattatcctgcaaaatttttaaaaatttcgtttactttcaaggaagttatgatttttttggaacttaacgaattttttttttgaaacttttgcgggataatagaacacacttagggctatcgaataataccaatatttaaaaatttggggtcatttgggcgaagttatgaataattttctgtcaaaaattttccatttgatggtccttgcttgactatccgtcaacggcaccgatgagtcttgtgccttccggttttgaaatttaaaaatattttcgtccttgattttctctaattatatgcccgtctccattagtctgcccgtctccaattatctcctcctttctgaggaggttgaaaaataatactcgggcatataattcgataaaatacggtaggataaaaataggtgcctaggcattaagcagaaaaagccaaaaataggcaaaaataggcattatataagtcatcgtaaactccctaaactaaacggaaaatgctttttttcgtgcttatctctgagtgtatcatgtgcgcagaaattttatccgtgatttttggttttttaaagaaaaatatacaaaactcgaaatataaacagaactttagttcatacaggttttgggcgctgttttagataaaaagaatacaataagccgtacgatttaatagtattataaaaagccttaatttataaaaaaaataaagtgtattcaatataacattttaattccatttgtttttaaataatatataataattcaatttttatatattttaactataaaatttccattgaataggaagtgtcattcgaattgccttttgccgaatctaatgaccgtaaaaagaaaataatg

SEQ ID NO: 119085 - DNA, 1003 bp, Heterodera glycines
atacctctaaattgttgtggctttccggtttatttctgtattttgtttgtttttatcaagaaatggaaaaacaaaatatttagaaagatataaaaatagcatacaaaatgagttgatccaattaacgaatatctatcctttaaactattataattataatttttgggattagaagattttttgattattaattttgttaaactcgaaattctaagaattaaatattttaataaatttatttgtttagattaaatatttcaaaatctcttaaaatgatcttctggagtattttgaagtgtcatttttattatttttatcttttttgaatttattcttttactttgaatttgttttttatttgtttttcttgtctttggttttttaaaatcaattttcattcagttcaatcaaatcaaagattttaattattgttttgaattttacttcttatccatccctttaataatgatatacaaatgcaataaaaaaatgacaaaacattatcaattagatgcaataacattttgaacaaaaaaaaaatatataaaatttttaaagtgtttaaatttatttcaattttaaatatgttatttttaaagcatttttttgtgaaaaattgtttaatatttagcagatgtgaaggtcatatgggatacaataatatttaatgaattgtgtgctacttaagcataggaaaaatagatccaaatcatattgctaaattaaataaataatatacatcataattaatggcactgctcatctatatgtaagaatgcttttttattaaattatattaatgtaaataaatttattttaaattgttttttcattaataatcacttgtttctgcaacgcttattttctatttgttggagacattttaataatcacattttttataattttgactaataaaaaataatcaaaatattggagggaaaatatatatagaactaattcattaattattatttttaaattcaaaaattagacttacatg

SEQ ID NO: 119086 - DNA, 413 bp, Heterodera glycines
tatttgtactttgttctccacgccctttccccccttctcattgtgtttataaggagaccattcccctcctttttggactcttccctcattcattcgtttttattattatttgcatttgtccaccgaccgatcaataaatatttttattctttgtgtgttcaattggaggaacacaacaacaattaaattatttatgtcattttaaaatgaatatgaaaattgaccacgttcattttttatttttggtgctacaaatgacgaaattaaaatttttttacagaatacatttgggaaaattaattttttttttttctgaagaaaagtatattttttttaaatcggtgaaacaattgtttttagaagtaaactaatttttgtggtcttacttgaataattatgaaattgaggaaatg

SEQ ID NO: 119087 - DNA, 55 bp, Heterodera glycines; identical to SEQ ID NO: 99576

SEQ ID NO: 119088 - DNA, 542 bp, Heterodera glycines
attctgaaatagttaaataaatattcaaaagccaaaaatttttgcaatattgaaaacaaataactttaagtgacaatattaataaaaatgaattatggttgataattttcctatttttaggcgttttttgtaaaaaaaaaaaatgctgaagttatcgttttatttttttattgtgaatattctataaaaatatccttacaatttatttaaattgttatttgcgaagtaaattatatttaaatttaattgttattttactttttcttgccaatatttgttcagtagaatttcattttaatttgagaataaaataacagataatgtgaaatcgatgggagatgagaaggaccaccgattgaaaacagcacaattattcatccgctttgtgttgagggatatgcatacattgaatcaatcgttcatttctctctctccaatttttcgttccaattaattagtcatccattgattcttatattatttaaaaaactttaaaaacattaaaatactttatttaaacttaaatttgcctcttaaatatg

SEQ ID NO: 119089 - DNA, 116 bp, Heterodera glycines
aaatgggcgttgtctaagttttgtattaagttataattcaaccgaattcacctttaatatttaaattatgttatttgaaatagttactgagcacaactccttcttcgaatgtcatg

SEQ ID NO: 119090 - DNA, 274 bp, Heterodera glycines
gtgatggacaaaaatttcccaaaaaatgtctcttgacattttctttttgattggttgactcattcctacaatttgtttaattgaaaaacaatttggcgaacttatcaattaactagcatatgtatatgtttttatttacctgctcctgatggattgatttccttcccccaattaaacgttaattaccgctcgacaaattagccaaaaatgctcccccccccctccggcgacgcccccgccgttcgcgtgcccctcccaattttttgagcacatg

SEQ ID NO: 119091 - DNA, 304 bp, Heterodera glycines
accagtcgaaggctctcctctctcttggacgctttgaccataaaaaagctaactgtagccgaattctctgccgatttgttcaaaagccgcagaaaaaaattgttgagagaatttcaaagcggtgcggtgagtgccgagtttatcctttggacacagcgtccggaaacagctcctgtaccaaaaaagatttgcatgtgtggctcagtggtttttgtaggaaagtcaagggacaaagggcggaggttcgagtccgttgtgctacatgaatatttttatttatttttgtgcaaaaaattaaaaaatg

SEQ ID NO: 119092 - DNA, 905 bp, Heterodera glycines
tctaccgtataacattaatctaccatagtcatgtagacaacgtacgcatcaagaataaatatgtgttgatggacgtacgcatttctggagcgttgaatatcgtgagtatgtggatgcgtacgcacgcatctaccgtaaaacattaatctaccatagtcatgtagacaacgtaggcatcaagaataaatatgtgttgatggacgtacgcatttctggagcattgaatatcgtgagtatgtggatgcgtacgcacgcatctaccgtataacattaatctaccatagtcatgtagacaacgtacgcatcaagaataaatatgtgttgatggacgtacgcatttctggagcgttgaatatcgtgagtatgtggatacgtacgcacgcatctaccgtatacattaatctaccgtagacatgtagtcaacgtacgtatcaagaatacgtatgcgaagatggacgtacgcatttatggagtgttgaatatcgattggatgcttacgcacgcatctaccgtagacaacgtacgcattaagaatacgtatgcgttgatggagtttctgcgtacgcacgtagaacctttcatatatagaatccggaggaggcggcccgcaaaaagtttttaaatcgattagtcgctcattttttttttgttgccgcaggaaggtgtacaagactatatcgattggttgattggtttataagaaggtgggagttcacctttcttctcattcgttcatttttttaatactaaatttcgtctccctgtcctctattaatattttaattaaaaattttaagcattaaaaagaattaaatcaatgtcaactcgacccaatagctttttcaacgccgccatgccgccccttggacaggtagaacaacttgttcaacccatgttcatcaatg

SEQ ID NO: 119093 - DNA, 222 bp, Heterodera glycines
ccccccccctccccccaaagattccttcgcacgtgaaatttaaaaactacaaaataatagcaatgaaaatcaaaaaaaaaaaaaggttgtcgcccaggggtgtccccccccccccaagccgaaatgccgggaccgttcctggcacatcatttaaatatggcaaggaaaatttttaattaattttttttagcataatttattaaaaatttaagttttcaaatg

SEQ ID NO: 119094 - DNA, 178 bp, Heterodera glycines
cggtgtagcgacggacggaggaacgcccaattcgatgtccggctctttcgcgtcgtcttccgcatcgtcggcatgtcgtgcagcgacttccagggccggccaccagcagcagcagccgcaatttgagcagaccaaaaggggcggcacggcacagccgggcgaagggaacgcactgatg

SEQ ID NO: 119095 - DNA, 554 bp, Heterodera glycines
cctcatcttttctctctccctcctcgctctctatcctctaatctctcctctcctcaatctctctctatcgtttcctctcttctctattacttctcttctcctttatctcctctctctctcttcattttaacaaagaatgggcaaccgttgggttggcaaaaataataaattaaatttaaatttttggtgatggaaatgcatttttttaagacaccgtcgatttgtttgtttgtccgtccgctctaattcggtcgctttcattaattcattttgtcatttaaaagttttttttgtctgtcatttgttaatttattcatttatttatgcattcattcattttgcttttgctgcatttatcacattttctcatctcattgtccaatgatttattccgtccaattgatttggccttacattttttactatttagtccaaattccatttattcaaaagacaaattgactaataacctaaaaagcctataattagttaattacatttaattatttaacactaaattaggtgaataattataattacgcttttaaaatatg

SEQ ID NO: 119096 - DNA, 385 bp, Heterodera glycines
cgagcaaaaagaagcgcaatcgaattgccgggtacggcaaatattttgtttgttttcgtttccgaactttagtggttcaggtttcgtttaatgtaagctgtagtaaaattcatggctttgacaatttaaaaggaagaccaaaaaataaaaatgttatgacttaaaatgtatatacttgtaaatccggtgatgtacagtctgattcaatagtttgtttaggtcttaaaacaaattggatttctaacatttttttgtcctattacaaattgtaaaaaaataggacgagaggtactcaattcttttgttgaaaaaattattttgtagggtcattcaatgatttgaagtaaaacacttgggactttgcaggtttatcacccatttgatg

SEQ ID NO: 119097 - DNA, 157 bp, Heterodera glycines
tgtaagcaatcgggataagagacgacccgacagacgacgcggatgcgcaagcagtgatacaattcgaacgatcagtgcgccaactcaacgacgggcgctactccattcgattgccatggcgggagtgccaccccgctttgccaccaatttcagcatg

SEQ ID NO: 119098 - DNA, 628 bp, Heterodera glycines
ttgtagtgaaaaaaaagaaatgaatgaataaatgcatgcataggttggctttaggatgcatgataccagaaggcgatgccgttccctcgggaatcagtgaaaatttgaattggctttgaaaattatcgattgtttgcaaacatctgttaccatatggcatttcccagagggaaatgcaaattgattcgccgaaaagttatcgattaatgggcggagacaccagctttaaaagcgagactgtacagagaatttttcatttgttccttacccttaattatattcttaataaaaattttccatttccaattttgctgttaaccagggcggtagctcgacctacagagtaccgtttatcctggcagcaattttgttaatttgttttttagatcttgaggtaatgcttttgacttgtctaattcccagagctgtttaggtgccctgtcgtcttgtgcttcatggatggcagtgcgcggctcatcaggccaagattggtttatttaagtgttaaatttcactcaatttcatcacttttccttccccattttgtatttgttacgagctcggctcatataaatatgcccttcctattgttgatttatcattttaataaagcattagattaaaaatg

SEQ ID NO: 119099 - DNA, 383 bp, Heterodera glycines
aattttgatcatttataaacaggttttcactgaaaattagccaatttataggtaaaattttgaaaaattttatgggaatttaatccaattcttagggatgtaaaagtcgcttttcgcgccaaaaagcgaaatgcgaaacgctaaaaaatgcgaataatgcgaaaagcgaaacctaggcacatccctgttatgtacatatttggaccatttttgtacatatttttggcagccctactcgaatgccgtcaaaaccgataaatttcatcatattatttttttaataagcaaactaaaaattgttggcgatatttacaaagcgtagtattttgaaaaaatttttcacttttttttctttgttttttttttgttttttacacataatg

SEQ ID NO: 119100 - DNA, 313 bp, Heterodera glycines
  unsure (1)..(313): unsure at all n locations
cccccccccctcncttcccttccccttccccctcatattccgtatcaattttccgatttcaaaacataatattgcacaaatgtttagcttctttcaaagatttgtaatcgtaaaattaattaactggcgctttaatacaattggcctgttttttgaatctgtttttatttttgattttctaccttgagaatttttttggtgttgcacagttaaaatccaaatatgagtatttaaaaataataaatttgtagaaatttttataattattatttattctgtcaaatgaatttgattgctcaaaaaacaaagaatg

SEQ ID NO: 119101 - DNA, 784 bp, Heterodera glycines
taggtaagaaaaatctcagaataggtacttaaataggtaaaaaaaaatctcaaaataggtattaaataggtataaaaattccaaaataggtaccaaaataggtaaaaaaaaatttttattaacgattttttagtggaaaaaagcaaacaaagagggaaaattttggttctacatatctctttgtaaacgaaaatttaaatatattaatattttcttagataatattgacattttaaattaaaaattttgtcaatagaaaaaataaataaattttgggataaatttttgagaaatttttccaattcttagggtgcatttttgaaaatttttttggtcgattcttatgggtatattttttgattttattgcatttttgttaagaattttttgaaaatccttaaaataggtaaccaaaatgccgaaataggtataaaaataggtacctaggtaataggtagaaaaatcccgaaataggtaaaaataggtattataaaagtgggtgtagaagctccaaaccaagctaaaaactcgttttttatgcttatctcaacgttacaagtgcgcaaaaattttaggtatttacctaaaaatcgaagccctatttatcagacagaatgacaatttaaaatttctatcttgttgaattggcatcacttgaaaaataaatatgaaagcaaacaccttaatttatgtcttgtacatatttaatcatttctcgtccaattataatttttctaaaattaatttgaatacaaatttaaaccatttttattttggcagaatg

SEQ ID NO: 119102 - DNA, 795 bp, Heterodera glycines
aaattgacattgttttaattttgaaatatctcaaattaaaatcataaaatttatgtaatattttggaaaataataaataaatttaaatatctttaattaaatgaaattattttgagcgcaataaatggtaccggaagccatgcaagagaaattacagtactcatgtgttttttagttcttggtaattcttttcgacatttattcgggtttataaaatgtcttattaattccattggtaggaagccacttacaaaagaaattacagtataccaagtgtttttgagttcttgataattccattcgacatttattcggtataaaatatcttattaattccatctaattataaataagtattcactttttacacaattcaactttacattgctcaattccacaaacacacagtatcactgccgcattttcgcttttcccattttggcactgatttttaatatttcactaaattcaaaaaaaaaaaatttgacacaaatttctctttcgtaaggtttcttttttgtccatccctttctttattcatcgcttttacattttgtcaccctatcaaataaattttcttgcttgcatattaagctttttgctgattcattacttttttctgcttccattttttcctccgttggccgtctttttaagtcatcttctgccgccgatggcgaaacaaatatttcttcttttcctcacattctatcattcatatatgtacataaaattgtaattttatttatttatttaaatttttatttatttatttttctttttttagcaaaaatg

SEQ ID NO: 119103 - DNA, 153 bp, Heterodera glycines
gaaatttgatacgtgcgcaaataaataattatagttttgcgagggatcttcagcacagcagcggtactttatggggcacctttccattgaacttaaaagggtgtggcgctggggtcactataatgaaaagttttggacggaaatttaacaatg

SEQ ID NO: 119104 - DNA, 1003 bp, Heterodera glycines
ttggtgtcttaaaattgtaaaattcaaaaattacaaatttctcctcacacggaatggcgcggacggcgccgctgcaaagtgtgcacagccgactctccccccccccccccccggcgacatttggccccttcctccggcgcacggctaattatttacgcttgttaaaaataaacaaaaaaaaaattggctaaacgaggtgctgacctgtgcacattatttagacaatgaatgtgcattttggtcattgttttggcactacgattttttgacaaaaatgcttttaaaatattaatatgcttttaagtcacaaattgagccaagagtaacggcataaaaaagtgaaaattagttaaaaatttaatactgttaaatttatatttatatatcatcataaatttcatacagaatatctaaattttagaaagttttaggaaagttaataaatttttcagctaataaaattatttttttaaatttcttttcaattaattaaacacaaaaggcaccaaaaatgccaaagaaaaggcaatttatttttggaataataaaaattcattcccgtgttctggcattcattcattgtctgtgtttacattccaattaattaaatgttggcgcgcaaatgccattcatctgtcaaaataggccataattattcgaaagcaaatgccaacaaaagtcaaattgttcgacgtgggcacaaatgtttctttaggccatagattgtgctgtggtttttccacatttggccaaaagatcaccgttatgctattaatattgttctgtttctaaaaatgccatggcaaaagaaatgccaaatgtttgaatgcttttcacatggcaccgcaatcggttgcatataaatacgtcagacggagacagccaaacaaatcattctgactcaaaatttgaaaaacttttctttcctaaaaccaaaaatgtttgccccaaaatttttcttatttttctggtctgtgttgcttttgccattggtcatccaatg

SEQ ID NO: 119105 - DNA, 916 bp, Heterodera glycines
tgtaacccacgaatctgaaagaattttttgacaaaaattaaattgaaaaaagttgtgggacctcaaaatcgttaaaactatttttaaaccagtagtcagtgaatttagcttattgcgctaaaacgtgctgagtcgaagcacgaaaaagtgcaaagtgaacaaattaaagcaaaataattattaataaattaaaagcaaaataattattttaaataataataataatctacttaattaatgcgtttattttataatatttttaaatctcaataaaactaacatttatagttttctcattttttattaaaaacaaaaaatcagagacttttagagggatggggtcatttcagtacagaaaattatattaataaataaatttaattattttaaatgtatttttaaatattttccatattggttcgaggcaataaaatccatcaatatattttttgcccattaagtggattgcacttttatttttattcacaattgtatctttatataagcttttttgccatgccagccgaccactttttaacgagacgtaggaaaagccgacgaaaggaaagcaaatgctaattacagaaatttatctcgatcttaattttttcttctctcactgattttttgtttttaataaaaaatttttgaaaaatggaggccaaaatggcaaaaaaaaattaattttttggcgaaaaacggcgaaaaattttgtaaaatacaccccataattcaggatttcaaaaaaccaaaaatacacccctaaaaatcgacttaaaaaagaaaaatacacacctaaaaatcgaattttagacttcagcccccccccccaaagccaagggtctggctacgcccttggacgacggtaaggaattaattattaatataaaaaaattacaattttggtctccaaatg

SEQ ID NO: 119106 - DNA, 111 bp, Heterodera glycines
cctaaataatttcttttttatttctcaattattttgtgaataaaatattaaaaaaatttttttagatttttccaaaaatttcgaaaccataccttgtgaaccattgcaatg

SEQ ID NO: 119107 - DNA, 199 bp, Heterodera glycines
aaaattaaataggaaataccaatttagaagggatctctcttctcgacatcaaatcccgagtctcgacagtatgatttgaatcaggcccgtatcagaaaatttttctgggggggggggcaccgaagcgctcttttttcttgctgttcgggccaaaaaatatttttcccagtgttatttttcaaaattttcaggattgatg

SEQ ID NO: 119108 - DNA, 219 bp, Heterodera glycines
ggaagaaccgaccgaggacgactttgaatggatgaagcaaatcatcggcgaattcgtcgaggaaaccgactcgaaaattggcacgcgcattttaaacctttggcagatggaaaagaccaaattcattaaggttgggtttgacgatttacaaattggacaatctaattttgctgttcccagattttcccgaaggactacaaaaaggcattagcccaaatg

SEQ ID NO: 119109 - DNA, 271 bp, Heterodera glycines
aatttttttttttaaaattatttataaaaatttttttttaaaatattcaaaaaaaaaaatttttaaaaaaacaatttgacgaacaaacattaattattggataaaaaaattattattattttaagtacttttgatgcagcaaaaaatgataaaacgtcaaaatcaccacaaaaaaaatatttgactattttggagctcggcgaaagagattttggaagaagaattatgcaaacttgatcgacgattatcccttgaagagtataaaaaaatg

SEQ ID NO: 119110 - DNA, 295 bp, Heterodera glycines
tctaaagagcagaaatggtcgttgacaaatgttttaacgttaattgcctcattagaaattattaaaatattataatttatttatcacacaattttatacggttagactctaaccgttagagaaaggattttgggacatgcaattattcaaataaaagtcataaaatgacaacaaacaaaaaaaattgaaaaagggtaataaaattagcattttcctcaaaatgaaagcttttctaagatttatataaaataattcttcaattttaaagataacgtccaaattgaacaccaaaatg

SEQ ID NO: 119111 - DNA, 1003 bp, Heterodera glycines
ttattacataaaattcccattcctaattattagtttttttctccacctgtatgtaaattcgggcaaattcaatgtaaaagaaaaattttttatttcaaaaaaaattcaaatatgtataaaagaaaacgtatttttctctgcgctctctttttatttcgttttgatttagtagtatacatatcaaatcattttgacaggattatgtgttctttaacgatacaatttaacgatttttattattacagtacataaacggatggaagtgggattttgcacacttctctgaacatatgggttttttaagtatgactcaactacagtatgctcttaccatatatggtaataacattttttttaaaaatatgttttattttttcaaggctatagttttactaccccgttttttaacattctgctacaccatttcgatcgaactaaatctggtattttttttttgctttaaaaatacatccttcaaaaggacgaatttacttcgatgattttattcatcttggcataactctaaagcgtcttacgccacccttccgtaatgctgacacggaccgtgacgggcgcgtaaatatacgtaagcaaaattttatctcatttttaggtgccaactcgttaatttttagtaataacataaaatttttcctccaattttttttttgcactaaataaaaatctaaatcagtttgcatctaaataaaatatttttcaacgaattatttaattttgtaaatctttgaagatttcgaggatttcatcttaatggtcttgaccgctgaagtttgatttctctacacaacccaatataaatagggatgatttgattaaaaatatcacttattctatttatctgtataaaattcttaattttaaaatcaaaaaaagcaattgcaaatatataaaaatatatttatgatatttaatacttatatggcaaatcatacacttgctaattcaatgtttacaccctcgtacccattaagcaaaaaaaatg

SEQ ID NO: 119112 - DNA, 696 bp, Heterodera glycines
agaagagaatgaagataaagatgattcgttaaaactataaataaaaatctttaatgataattaaaaaaaaatgaattttttatctgtgttaattttattctttttggtggtaaggggggagggttgttgttgtctttcaaaagaagaaaaacagcaattggatatctccagaagggctgttgaagaagcaattaaagatataattaggtaactaatgaggccaaagacttttcattttctgctcataatacaattgttgaagctcaaaatattaaggatagaaatcgggaaaatctgaaatcatatgttggcatgaaaaactattaaatggagtaagaaaaatacactcacaatttgataaaataaaaaatgaggaaaagaatataaaaaatattaaaaaggcatggaaaaatgtctagacagaaaggacccagtgatgtgtcaagaaaatgctgaagatgtcaaacaatcaatagaaatagctaaaaatataggcatgaaattggacagacttatcgtaactcttattcacagccagatttgggaattggaaacatggccaataaaataaaagaaataatgcgagaaaatcaaataaattttgaaaagccaaggcccccagcagaatttagagacgaattcattgcctataaaatataattaggcatagaaaatagaaataaataaataaaaatg

SEQ ID NO: 119113 - DNA, 76 bp, Heterodera glycines
ggtaatggcatggcgtccaaattgatcgccgttgtgtgtttgacactctgaccacatcattttttcagcgagaatg

SEQ ID NO: 119114 - DNA, 51 bp, Heterodera glycines
caatggagcgtgtttcggggagaaggatttgaagtattggacgacaaaatg

SEQ ID NO: 119115 - DNA, 435 bp, Heterodera glycines
tgtaattaacaaataccagcagaagttaataagctcgaataatgcacaggtcggaagttatactcaatggaaggacagagtcttcgcgtgacatttaaacgctaaaaaagcaacattttgtagtgaccacaataaatccgtatgtaataaactttcaaaagaaacctcgaacattatccaagaagatattgtcgtaacatcataataaaaatcaattctcttgacaaaattcattgtgtccttaacacttccaaaataaaattatttcactttagtatttgggttattttatacatttacatataatgccaagaaattataaaaatgacgtagctaacaataaacctataactagctagctacaatttgcatgtgcataaatcaacaatatttgtggatttgattacagaattaaatagttaaattgatcaaatg

SEQ ID NO: 119116 - DNA, 561 bp, Heterodera glycines
accatttgcagtcgcggcttgagaaactgcgaaacacgcgaagaccgatttgaacaaacttttaccaaagagagagagaggcaccggaggaatttggcgggaaatggattgtgatgtgacttttcattccgtcttagggtattcgttgcccctgaaaattggcaaattaccgggcaaaatgattttaatggatgggatgcaaaatgtatcatcctttgggatggaattgccaaattaacttcgaatttaatcgctattttccgtctttctgtgcctcactttcgtttctcttcccttcaatttttgctctccaattctttccgcgtgcatttccccgaattctgtgccttttgtcccttaatcatagaatccccaacaaagatgcttagtttgtccttttattttgtctataattggcgtaaaatgataattaaactaatttagaagaattggttaacaataagttttataaatggaatttaattttttcaaatttactttacgtttaataattaagcggacattaattggcaattaattaagtcgttttgtttttaaatg

SEQ ID NO: 119117 - DNA, 138 bp, Heterodera glycines
tatgctctattagtcttactgaaaattgactatttctaggataaattttctaaaaattaataattgctctgacaaaaggccaaaaaatttaattttttttttcataaaatctacatttttacttcatacgcaaaaatg

SEQ ID NO: 119118 - DNA, 350 bp, Heterodera glycines
aaaggtgattagaaaaggtacaacagtgattagaagaggtacaacagtgatcagaagaggtacaaaagtcattagaagaggtacaccggtgattaaaaaggtacaaatgtgattagaagaagtacaaaagtgattaaaagaggtacaacggtgattaaaagaggtacaaaagtgattagaagaggtacaacagtgattagaagaggtacgacagtgatttgaagaggtacaacagtgattagaagaggtacaacggagattaaaagaggtacaacagtgattaaaagaggtacaacagtgattaggagaggtacaacggtgattaaaagaggtacaaaagtgattaaatg

SEQ ID NO: 119119 - DNA, 702 bp, Heterodera glycines
  unsure (1)..(702): unsure at all n locations
aaatgcaaaatgacaatttacgcncaaattacaaaaaatataaaatttagcttttcagaaaaccattcgaaaaaaataatttttaaagtaacacattaattaaggttcaaattgggggaaatttttgctgttaattacatgaaatgacactattttgatcatattattttttccaatattttgagaaatatgcaaacaaataaatgctcgtaatatatcaacaaaagagaatataatgttttcatggtcaagcgattgattgcttctgatcactgctgatcattgcgtccacgcgacttgaacaatttgttggaggccaacgcgcgtctgagttagtaccgcgccaccgcacgcttcataaacgaaatgtcgcgcgcacgcgctttaactgacgcctctgaataaaataaaataatttaaaaaatgttattgtctctttcaaatgcaattgctttaactttttctgccggtggccgaacgtttcgtcactgaacctttcgtcactaaacttttcgtcactgaacctttcgtcactgaaataaaataaagaattatttattagtgaaaactatttttttttaaataaagttatgtatttgaaattttggagtgtctgatcagtgatcaccgtaaaaaatttttaatggacgtcaaaatttctcgtttcccaaacatgagtgcctaaatgtaattccccaaatg

SEQ ID NO: 119120 - DNA, 354 bp, Heterodera glycines
aatttcaaaatttggaaaaaatcgtcacgggttttaaattcaaaaaaaatagctaccaaaaaagtaacaaaattcttcaatattaccaaaatataaaatcattttatttttttaatttttttagcatcaatatatcccgacaattttcgataaaatttgcactttaagtcaaaagactgactaaaaattctgttctcctctcctccacacccctccaatcgttttaccacctccaattgtttattctgcccaacagtcaacatttccccgtcccaccatttttcataaaaagaaattggtgtctcgattgacaaacaaacaaaacacattataatgttgtgtatggaaaatatg

SEQ ID NO: 119121 - DNA, 337 bp, Heterodera glycines
acacaaaaaataatatggccatctttcacaatttaatagtttatatagttttctctctccgtcaggacgccgatttctacaccctctaatacccggattttgagatttcttaagacaaaaacgaaatcttttagttttgcatttttgagaatttggatttccaataataatttaaggaattccaaaaatcaagagtgttcatcggacgaattctatttttttttttggcaaattttatttgaaggaaccgattaaattccatatttttgagctatttcaattaagaataatgctttgttgttttgatcaaatttaagctgccagtaatttttaaatg

SEQ ID NO: 119122 - DNA, 266 bp, Heterodera glycines
ggtaattattcattctgtgcattatgcccaaaaaggcattttgtcattgtctgcccattaattgcgtaattaactaattaattaacccaagggaattgccccgcgggagagattcgcaccgattgtcggccggtgtgtggtgaaaagaattgcgcagacgttctatcgccggacagtgcgaggggcaattgcttttcgttgcgctgtttcccggggtgcgtttgtgcgagcggaattcggcactttgggaagggcggcggcgaatg

SEQ ID NO: 119123 - DNA, 1003 bp, Heterodera glycines
ccacaaaacatattttatgcctataattctaaaaaatgaaaaaaatacttgaagaaaatcaaagacttgacaaaaaaatcaaagattagatgatgtcatatgacaattatgatatcatattcgtgatcagcggcctcgataaccctcgaatagaacgaataatcgtaaaaggccgtctttttatttcctttttttatgggaccagtaaaagtcattattaccggaaattttaaaaattttgagcggtttttttctgctcttatttaatcttaaaaaaaaattttttttttttggaaatttccaaacatttaaaaatagatttttcaatacttttcaagcctttagaaggtcaggaaaaagtaggacaaatcttaaaaatccatgtctaacaagtttaatgggttcaactttgggtaatggtggagatcatgagactatgaatatcacaacataactgcatctccttccttctcagtcgtttccgacattcgccacaaaattatattaagaactttgctgttcttttagcaatacatggacgaatatatgtgccgccagttttatggaaaaaaacccttttggcattcgaaaatatttttgtccatattggtcagttttatgttgtcaatgcttaaatattgtgcatttttcgtgcaataaacaagccgagctcatttttgagctaaataattgagttagaattggaaaaaatacttgatgaaaaatcatagacatggcgaaaaatcatagatttgatgtcgtcatatgacaaatctgatggcatattcttgctcagcaccctcgataacccccgggtgaagtgcaaaatcattaaaatcgggctttttttccctttttttatgggaccaatgatctccaccaactttgtacatagctttttctatagttaggaaatcctaataaagttgtttttacgtgtgtgtatgtgtgtatttaaatgttttattaaattaatttaagaaaagtttattttaaagcgatg

SEQ ID NO: 119124 - DNA, 103 bp, Heterodera glycines
ttttgggtcattaggaggttttaattataaccgtaatttttcgatttcagttaattcctcgaagggttgcgatatcagccaattgaattggtgtgcagatatg

SEQ ID NO: 119125 - DNA, 310 bp, Heterodera glycines
aataacaaatttagattttgaacgaataaaatgatgtttaatgctttttgaagtaaattggtcaagtttacgaatacatttcggttggaacttttttggggaggaagatgaagattgggctttagagacacgcttcatatttattagtttttattaattgattgggtaaaatatggatatatgaataaaggaaagtttttaaattttatgaagtaaagtttttataaaaattttatgatttaattaagtttattggagtttttatatttttcaaattgagggatttatattaaaattaagtggtgaaatg

SEQ ID NO: 119126 - DNA, 53 bp, Heterodera glycines
acggtatcaaattgccgactgaaggagaccatcccatttcgagagtaggaatg

SEQ ID NO: 119127 - DNA, 729 bp, Heterodera glycines
tgcatttttgtgaaaaaattatattttttctattatttatatttattattcttgtaacaaaagaactgacaagtgtgtcaggtgttgttattcttaaatccccccccctcccccatcgctccttttttcttatgccgtctaagttttcttcttcctataattccatcttttaataaacattcaaattgttattttattttaaaaatttacctctctaacaattcaacttttatttttgagtctaaattaattcactaagtttttattcttattttttaaaattaatccgcgcattgccattaaacaattttctcttttggattaaaataccgcaaattatgcgtttgttttgaatgaaaagtgcgtaaagaacatgcaatcacagcggggaagcagcagccggtcgaagacgacgacgacactatggaataatttatatttatgtgaattgggggggacggaattatgggcaagacaaattggacgggggggggggggggaaagtgcgcatgaaaaaaatgggaaaagcaaaaaataaattaaaaagggaaaataatttaaaaataccaaaaatatttaaaatataaagggatgttgacaattgctaattaattttaagaagcttaaaacactcctaatcacataacataaaatggtaattgttgtgttgtctttttgcccatttctccaatttcgttttttgttattattgtgtaattaaggctaatg

SEQ ID NO: 119128 - DNA, 651 bp, Heterodera glycines
  unsure (1)..(651): unsure at all n locations
agaataaaataataaaataagagaaaccanacggaagaaagaaattataatttaattagtgtgatgtttttaaaaataaaataattaaaactctcataaatatttacatattttggataattctactgaaggataagccattttatcatgtgaaattgggctgaataagatcaccccacccacgtacatcagcagctaaaaattgattcgtttataaagcaattcgatatgacacttttttaaattattaattaaatttcttaataatttaagcatttataatttcattcatttgcttataatttggcttgaaaaaaaatttgaaatatatttaatgcaacaacaattatatctttaaatttttctgatacaatagagcatcaatttaaatttatttagggagagttggaatatttcagtaaaataatattatcgaaaaaatttgcattggatcagcaaattcagaaagtcaaaaccacaaaattatgctctctaattcaaatacaaattaataaataaattacgtgaaattataatttaaaaaatttccattttttttttgccaaattgccaattctttcccaaaccgctcataaacagcacatttaaaaaatccgtaaaaaaaataatttgttttctgcagcttctatg

SEQ ID NO: 119129 - DNA, 107 bp, Heterodera glycines
ggttttgcattgctttttcgacattattttacgagtgggaataatgtattaggcactaattagggaaatgaataatttccccccccccccaaaaaaaatttgagatg

SEQ ID NO: 119130 - DNA, 188 bp, Heterodera glycines
ttagtcaccataattggcatatttttgccattttttcccattgttggcacattttgtccctttattgccatagttggtccaatttttcaccacaagttggcgtatttttcatcaaaatttggccaactttttcaccaaaatctgacccaatttttcactcacccacaaggagttggagacggatgatg

SEQ ID NO: 119131 - DNA, 1003 bp, Heterodera glycines
ttgttaactatttctttataattatttgcaaaaaaaatgtttccaaaaactacattttcattccttttggctttctgaattgtgccatttttatttttattttttaatctacattattttaattaggtataaatgataattataattaatattttaatgtgccaatttggaatgtataaataattttatattaagaatccaataaattttcctgcttccaacccacataaaagtaaaataatttatattgattttaatagaaaacatgtattttaaaaaggctctacccgtatttcgtaaacaaaaactcaggaaaaccaaggcccaggaaaacccaggatgaaaaaaattcctgaactatggtccgtaaaacccaggacgggatcaatgaccctcgtttatttctagttttaaagcctgcacccgaattttgtatagaaaaattcaggtaaatccagtcacagtaaaaagtcagggtgccaaaaaaatcatgaacttcacgaattttttgccaaatattttttgcgtaaaaaacaaactcgatgtttatctggcatatggcaacaggaaatttgtcgtagtgatctgtgtcaattaaaaaggtgtgtaatttaacttcattatgtaatttgggaacaattaattaattgcatgctaattgttacaaaatgccaaactcggccctttcaataaaaaaagataatattttccgtcaaaaaaaaagatcaattatgaagcaaataatgttaaattttttattaaaaaataatcaatcaaaaatggagctctcattaatcgcgaaatatggcaaattataggaatattagttataatatatattttttatttatattttatatgtcataaataaaaatattttaataaaataaatatcatcgtttttacataatatttttatttttatttctgatttagaagataatccatgaaattgactcataataataataataattttaggcaaagtatcattacaagaatg

SEQ ID NO: 119132 - DNA, 683 bp, Heterodera glycines
tttttctttttattaaaatattttcattttatcataatatgtcaattatttctattaatctattactttttaaaaggtgctttttaaattgaaagctttcaaaagcccacaattaaataattaaagaatgggcggcttcttttcttgttttgagactccgaccgtttcttttgtttgtattgtttacaattagtcgggtcattagtgaacagtcgtcactttgaagtggacaccatcattattctgttctcattgcagacaggaaatcccacacattttgttgcaattagtgatgatcaatttacattaattgctttggtattatggtcatttctgaatattcaaaatcatttggataattttttgataaaattgccatgaaattgtcgattaattatttctgtatcattcattttgttaccgcgtgcactccgacggctaaaattatgggaggagaaataatcatgacgacgatggaaggcaataaaatgaatattttgacaatttttcattgtttcctccctttttcctttttagcatttgcttcacctgccccaattaccaataggccaactgacggcaatcaaagtgtgccgatgccaatcatttcgccaacaacaaattcattgaccacaaccaccggtggtgaatcatcaagcacatccacggggatttctacaatg

SEQ ID NO: 119133 - DNA, 1003 bp, Heterodera glycines
tcagtaatataagaattcgtattttctttgtcaattttaaaaagtttttcccatttttgtagcacttcttcaattttttcattcattccttaaattttttgattgtcttttttccgttttatttatttatttttattgcaaattgctgttaaagttttgtaaaatcaaattaatgaacatttttggtactaaatttagtcacattattcgggatggatttaatatattctattctaaatttattctaattttcactggcctataataattattaaagtaattatgccattatcaacttgccaatttccaaattttttgtttctgctttttctctgctctgcctttttgattttgactttccaactccctaaaaaatgcattgataagtcattctctcagctgatttggaatttttggcccaatttattcttaaaattttgcaaattttttttatatttttagtctattttttctcaaaaataacgacattgagtctcggtggtgagggaaaaaggatccatccaaaaaaggaatttaaattgaaaaatatataaaaaggattatttctatggattatttaaagcaacctgcacaattaaagtgaaagaatacaaatataagagaatggcaagtgttagatgaccaataataagcattttaagcaaaaaattaatacggaattctcaaaaatatttataacgacgatttttggagatgaaaattcgtaaaatgggatgaatttagttaaaacaaatggagcaaattttcttcaaatttttcagattgatataaaataggatcgatttacacattgaaaatgtaaaaaaaatttatagaatacaagtgcattcattcttcatataattgatattttttagtaattttttttttgctgaacaaaaaaaagaaatttacaaaataataaaatgcaaattaaaagttaaaaataatgcatcattaaaaaatcaaagtgaaaattattattaatttagccaaacgaatg

SEQ ID NO: 119134 - DNA, 858 bp, Heterodera glycines
attgttcacaacttttaggacgacatgtgttatgttcatttaacgtgaagtaataaaaccattattatccgagtcgattaattgttgttaagtaatctttgcttatcaccattttggttctccgtttattcgctttaaatggtttccgttcaccgctaatgtaagaaaacctaaaagtgaaagggtttgttggtttaataattaataaatttttcgtgtttgattaagtctcgattgttgacttgactaaaaacaaaatttcattctttagctatacataaatataattttattgtgtcaatttgaaaaatgtcaaatcgtaaaaggatgggaatgttcgaccatgccaaatattctaagccggttcttcgcagcattactgagcctgtccaaagggcggtcggttcttttcgtttccgtcattttttgtttcctcttgtgacttggtaaaggtcaaacgcgacatcaacaaactgttggactatggcgcggcgtcggtgcgcttccgccagcccgaaaaatttgattcggaagtgagcgtggtggaggacagctttgagcagcagcagcaactggaagaggaggaggaagcggagagagaggcgaagcagcagcagtgccggaagaagttttgtccggaaattatcgacttggacaaggcgagactattggttgacaacgggcggactattctaacagtttgtcataattcacttccttaagccgcccatcgtttgggcctcttccttgcgcccgcccgaaaaatcgttcgccttgggccgtgacccgtcattcgctgcggttcgggacgcgctgctgagagcggcccctgcccgggggagagagtcgccgaaaatg

SEQ ID NO: 119135 - DNA, 322 bp, Heterodera glycines
gaaatgcctttgtcagaatttccccccccccccccgttaaaatttgagtaggaaatgaaccagcatctttcacgctcacccgacgaccgaaccccacagccgacctgatgaaatggactttgatcagataagtgccgttgggggggtcgaccctcctttcaaattttttgtcaccaatttgtgcaattttggaaatttctaaaatgtcctcataacggggttttgagcagtgttgttcttttcccaccaaaacagggactgacctttggtcattcggcgcccgaaaaccggaccacactgacgcggcatttccatcgaaatg

SEQ ID NO: 119136 - DNA, 389 bp, Heterodera glycines
attaattaattaaaatcattgttcggtactgaaatgacccgcctcttctgatcatcactcattcgcacttttgtcacttcgcccacattcggcactttgtcactttgacccagcaccgaccaaatcatgtaaaagttaaaaaaatccattcaattggcataattttgatggatacgcacgcattcacagaaaacatttgctatattcgacgtgggaatatgcgcgaaggcatcaataatcagatatttctacatcaaaaatgtggaattttctgaagaagccagcaattaaattgtaaattttaatttattttatttttttgttttatatatgacatttataaaacataaatatttggaagaaataaaattaaatttatagacaaaatg

SEQ ID NO: 119137 - DNA, 659 bp, Heterodera glycines
  unsure (1)..(659): unsure at all n locations
aatgcaaaaatggccaaatatgcattattctcgaaaacccccaaaaattaagcattatatgcactaaaaccttgaccaaatcaaaaattntaacgcagaaatgctattttgggcccctttcttcatagcatatgcgcagaaaaaatatgcaaaagcatataatttatagccctagttataaatattgagcaacctaaacatcattttcaatttactaaataaataaatatggacaaacaatgaaaaatcaacgattgcaaaaatcattgctttttaaaatcacttaacaaatttctgacggcaaattcggcaattttcattattgagtttgggtttgaaaagatgagaaaataattttttccaaattcccgaatagaaaaaaaatcgttagtttttgagcaaataatttttttcccaattcccgaatagaaaaaaatcgttaattttttccaaaaatccacaaaaactaacaaattttcacgagatccgttacaaaaaaacaaatttttttccgcgcaaatctttaattcaaattctttaaatttttttaattttccaggtccgtctctttcatacgcccaaattgtgcggcctcctcaaaagtgcgttgcccgaacggaccaacgaaatgttggcctacagcacatgaaagaggaatg

SEQ ID NO: 119138 - DNA, 148 bp, Heterodera glycines
  unsure (1)..(148): unsure at all n locations
atgaaaaaaataaatntcattgatttaaaatattttaatcatcacatataaattaattctatctgtatagtgaattgagaatcgagctcaatttagcaatttctttttgatttgttaccttatacaaacatcaaattcttaaaaaatg

SEQ ID NO: 119139 - DNA, 885 bp, Heterodera glycines
ccaaaatattttattaatagaatgtccaaaatatgttttttattttataaaaaatcgctctgattgaaaagaaaactcgtaaaaagctaagtttgagcttttcatgcgataaaatattagcaacaacaaaaaaaaacatataaaaaattaaatccgagccctgtggttatggcaatgttaattaattttttaaattcttattatcattcgaaagttcttgacgactttaatttttttttaactttttggaatgtcgaactgtaaaaagaaatataaaaattctcactttttttttgcattttgagttgcataataaaatagtttggcctgagttttaccaaagcgcgagatttttgttctcaaatcattccccaattttcaataaaagttcacaaaaaacaagaaattaaaaatattttaataaaaatggctgggaaccaaacaaaaattcggcaataaaaagtaaaaacgagaagtttatttttaaaactttttgttattctttaataaaaagggttcaaaataaaagcccctccattagaagcccctccccctcataagtgggcttgttaaattgaagccccggggtttatagcctgctggtgagccaacaaaataaatgacaacaaaatttaaaaaagaaaaataaatccaaaaatcaccgaaagttatgaattaaaaaaaagtaaaaactgagaccgacagagtttattttgcacaccctaactaaagaatttgaccattgttaaaaatttgaagaaggcaattggtcaaattttaccgaacgtaattggaaaagctccaattgatgccgaattaattcagcaaattcaaattggtgacaaatcgaaggaaaacccaacgactgaatttgataaaaaaatg

SEQ ID NO: 119140 - DNA, 94 bp, Heterodera glycines
  unsure (1)..(94): unsure at all n locations
gacaaatggcactccaacgagacgttacgattcattgtttatagaaactccattctttgttcgatntaaggttcaaattgaagttgagacgatg

SEQ ID NO: 119141 - DNA, 166 bp, Heterodera glycines
tgatcagaacagaacataaataataaatagccatccaaatgttttcatttcccattaattctttgaaccactcgctgcaaattaaaaggcaaaaatttttaatcaaaattaaaactaattaaattgggttattttaagactcgtgtttaagccaaacgcacaaatg

SEQ ID NO: 119142 - DNA, 1003 bp, Heterodera glycines
taccttactaactttttgctttgaccgtctctcttacactctcttttcccattcttttctctaaccttcggattgacatttagtttctatgccacattttctttcgtcgccttaaggctgcttcttcttcctcttcctttttttcactcgtctgaccatctttttgctttgtccgtctctcttacactcttttctcccgtccttttctctgattttaacaaaaaaaaaatcggtcggattaaaatgttgtctgtccattcgcttaaatcttgcgttctctctgtctctcactttaaacagtctctcggacagtggcagtcatcactttctttgatttgtgctgcttgggcttgggcttgggctgggcgagggcacagaaagtggggcaagtcgacgtgtcgcatcgctacgcattttctccacacaaattatacgtggccatcccatcgcatcgacccgtcccctttccatcgcattttattcgggaattttcttccttctcgtcagcacagatgacccatttaaatttgattttctttatttgatttgtcactcactgttttcaattagtattttatgaaaacaagttggactaatttgggcatattttaattatacatgttacaactcgggcttcaacctgtgcatacgggccttaatttcttcctcagatgcaacataatagcaattttttcattttgatagtaagacatttaaaaaaaggcttggatttttgcataagaatgcttcctgggttttttgtctagaaaatccaggttcgagagggctctatttttgctaatgtaaccccattttttgatttttttttaggtctcccgaattaaaatttcattgctttcgctttgaattccttttttaattgaaaaatgaaatttagatttcaaacttgatacttgttgttgttgaacatatttctatacctcacagttcgtccacattttgactttcggacaaaaacaaaagacaaaaaacggtggcaatg

SEQ ID NO: 119143 - DNA, 53 bp, Heterodera glycines
agtaaatcacaatcaaaaaacatccagtacggttaatttttaaggaaacaatg

SEQ ID NO: 119144 - DNA, 1003 bp, Heterodera glycines
caattcccaaattttgtaaggattgattcgttcgtacttaatgagctcatgacttaaagtaaaagctcttttccctcatattgcgccaaaaagatggatttcctttaagaaaaaggcatttttaatcccccatttgccataatcggttattcattagcacagaacataaacattatgggcttttatgcattcgctttatgacctaaaagccccccaaaaatagtttcgataatattttcttcttccttctgaattaaatgttcaaaaattttctacattaaaaaacaacaaaatcttcattacagattttgtcttaaattgccacataggcaaatatttgtgctcaattcttctctagctgcttcattaaacagaattgagatttcattaagcattttaattagggaaatttcctggctcaaaaattttgtgccataaaatagttattattcaattttattaaataataagacaaataatatgtgtttcacctgccaaaataatctgtctgacaatgagattattaatgtttcttcaattttttcatggctctcaattcgcatgctctcaataaaatttaaattaataagatgatttgtttaaaaaattttaattatttgctgacatcattctcatgtcacaattttctgttgtatgaatttccaaaaaaattccacaacctttcctaatttctgataaaattttaattgtccgcaaattcgagtccataattgagagagacaatttatgcatgtttcttcaagattaaatcaaatcagtggaggagacatggaaatgttttctaatatcgatgccacgcagttatcgccttctttgatagctgttcaacacacaatagggccaaatgttgatcagccacagcggcaggcaataaaaaattatttaaaaaatgaaacaaaaatataaataaattaataaatattttataactaataaacataggaatttaaaaattaatttgtaaaaaaaaagaaaacaaatg

SEQ ID NO: 119145 - DNA, 1003 bp, Heterodera glycines
tttcaaaaattttccccggcggcgcctatcggcaccgccggcacccaaaaccttatttttataaaaagttggctcaaaatcgcaaaaaattggccttttttggtgaaaatctgttaacaaatcagaattaaattacaaaaatttttccggcggcgcctttcggcaccgccggaccccctcccctcgcacttcccaaaagttttttgaaaaatgcgccgcaaaaaattgttaaaaatctgattttttttatcccgaatgcactaaaattttatgatttgctaatttcctccccaaaattactaaaatcgttacaaaaatatactatatgacacatttttgatcgaataaattgtaaaaataactgtgttcgactgatgaccccgagagagagagacatttatattattttatttacgttatttccctctctctgtctcccgcactatttctctcattttattgtgtctgtgctgcctttgtaaggtcaaacacatctttcctccccgactttgtgacccccgctcatttccaacattcattctgtcttcctgttaatttcccactttttcctccaattgtcctccgccctgctgatttgaagcaatttccttattttgacccaaaaatcttattttttggccttgatgttcttattttgaaaaattttcgatccgagccctgattttcagaccacttcgaactgtattcgaaaaactggtcaaaaaaggcaacaattttcaaaaaacaaatatgtttgggcacatctacaaactcttggctttctaatgacaccagggttgttttggtccgggtccggaaagtgccctgaaaagggaggacaagcacttttggtcggcatttcttccaaaaaaaaaggaaaagggaattaaaattatgattcatttccaaaaatataagccttctccctaattaaaccatcttttattatttattctaagtgcattaaacaaattaaaataaatttttagttaaaattaaaatg

SEQ ID NO: 119146 - protein, 625 aa, Heterodera glycines
HTKSLHNATTTTRMKNATTTTSMTKNATTTTSMTKKCTTTRTTKTTTTTRMTTTTTTSMTKTTTTTSMTKKSTTTTRTTKNATTTTSMTKTTTTTSMTKKCTTTTRTTKKSTTTTRTTKTTTTTSMTKKSTTTNRMKNATTTTSMTKKCTTTTRMKNATTTTRTTKNATTTTRMTKKCTTTTRTKNATTTTRMTKKSTTTTRTTKKCTTTTRTTKTTTTTRMTTTTTTRMTKKCTTTTRMTKKSTTTTRTTKKCTTTTRMTKKSTTTTRMTKNATTTTRMNKKCTTTTRTTKTTTTTRMTTTTTTRMTKNATTTTRMTTTTTTRMTTTTTTRMNKKCNDDSTTTTRMTKTTTTTRMTKTTTTTSMPKNATTTTRTTKKSTTTTRMTKKCTTTTSMTKNATTTTSMTKTTTTTRTTKKCTTTTRMTKNATTTTRTTKTTTTTRMTKTTTTTRMTKTTTTTRTTTTTTTRMTKKCTTTTRMTKTTTTTRTTTTTTTRMTKKCTTTTRMTKTTTTTRTTKKCTTTTRMTKTTTTTRMTKKCTTTTRTKNATTTTRMTKKCTTTTRMPKNATTTTAQPKNATTTTRMTKKCTTTTRMTKKCPTTTRMNKKCNDDSLALCPKEKTVELCN

SEQ ID NO: 119147 - protein, 188 aa, Heterodera glycines
NSDDAKIVIFNYYFSDGVAKIVISKAPLKFIFLNFAWKSWTRQILTALSYLHSCDPPIVHANLTCNSVFIQQNGLVKIGCVAPKTIHHHVKTFRENIKNVHYLAPEYDHLDQTETTIQADIYSFGVCALEMATTGALQSGCFNGAPPGAVTENHQMAPVVPWHPQPRPVHCRRRSATGQPRLHQLHHY

SEQ ID NO: 119148 - protein, 375 aa, Heterodera glycines
FLMDIKTKKNRRYEKIKHLGEGQFANVYQAKGEGQFANVYQAKDIETGTIVAVKKIKLGIKLGSRHEARDGVNRTAIREIKLLMEIRHDNIITLLDVIGHRTSIQLVFDFMETDLEAIIKDSETILQHSHIKNMLLQVFLGLEHLHLLFILHRDLKPNNLLDLKPNNLLMNTSGRIKIADFGLARYFGSPNRYYTHQVVTRWYRAPELLYGARAYSTGVDIWAMGCIIGELLLRVPVFQGESDLDQLMQIYKVLGIPTETDWPGMTSLPDYVQYGMTSLPDYVQYKIVPGHELTAVFPAASSDLIELIGQCLRFDPLKRWNSTQALQSDYFRSQPFACDDSELPVAGRRKRKQQSLRENVEAGDEPPFSRRRLDF

SEQ ID NO: 119149 - protein, 161 aa, Heterodera glycines
MFFGEEITKIPREVGKEDVCKAISHQIEAIDIDQCNLNMYLKPDTGVISLDQFQAMGSKRLTMLRKLEMLKEKFGNANSQDEYKKAFREGAGLSLEGSLEFFRMEFTKKMNNEKFSKEYSYNIRHMYGREGSRIDQRPLSCASIILGSLPTALDCHGCPYK

SEQ ID NO: 119150 - protein, 178 aa, Heterodera glycines
MLDEREQQQMEEEEEDSCYWVTVFGFSPDHLQHILELFSRHGDIMAQKTPKRGNWVHIRYSTPIHAKQALGRNGSIFEGQMIGVVPCQDREALEDDLSLSRSATPLIPRHSVTPHDTSRQNGSLLDGNYSIHDDSQMVPSTSQYKTNGLPSRARLSISSRAGMRPLNASAISDGPNQS

SEQ ID NO: 119151 - protein, 174 aa, Heterodera glycines
MASIVDSAKVNNFGIGTVVEPILVNKNGSTGGGGRRKKKTLFGISQAVHAEHPQQQLSEFAGGISPVDAVPMPTAANDCNNNSIEDIQSDRRRGPIDPTNFDHLVRLSELIRSMADLGTLQPEFGIICGSGLGAIADQMEGARILPFSEVPGFPQPSVIGHKGKTNQRRLINCR

SEQ ID NO: 119152 - protein, 517 aa, Heterodera glycines
LLLMEVRAKLGPFKNSRMPLISPLTSALRMPLISPLTSALLRPALSNHMICFTPESVLHPFYPTPIRLNVDGDPFPSATHLVAQMAIKFLGVNQSCMEWIMFLGVNQSCMEWIMEPTDGPECWWRLHSVICEQIQLPLEKVQQWYMEERQKALKEAMKIQFDQHPTLLRVLLDTQDAFLVCCCRFSDAFLVCCCRFSAVEAELNIGMRERDLRLWLTQIRQNTKQLMDLCLRPMAFRPPFLMDLCLRPMAFRPPFFGGNRIGLLLMELRREFILNGAFANHLPELPLNVDTILGSDSPMENFVTTAPFDVLNPLNFTAIWATTAPFDVLNPLNFTAIWASTAQMHIVQIGPLLAQIPTFKHPPLLIKHPPLLISRDDTFVENTLEEMSHEMLRTLYIKVVSVRFFFVSFNKMCSHFRTQISELDEMQQQINVRSRESSRLQELRRTLERTRDQVDEIPTQEGSFAVSPLSSTFPSTPNVLGPFRGHPMDGAVKIPSLFSQELSPLPHSASLSASTQR

SEQ ID NO: 119153 - protein, 319 aa, Heterodera glycines
MEKLLSPNIANAQSTSTTTTSATASSNNKEENSKEKDAEQICHWIRELREHEKRENALLQISKRREGVEDLAVWLWFSYGTVRCCSNLIPTETAFPSAFSVLLQEIISIYPFILPPTLTAAQSNRVCNALALMQCIASHRNTRKQFLDAKVPLYLYPFLHTTSDSRPFEYLRLTSLGVLGALVKTDEKDVVKFLLSTEIIPICLRIMEQGTELSRTVATFILQKILLDDIGLSYVCQTYERFSHVAIVLGKMVIQLSKEPSHRLLKHLIRCYHRLSENNRALQALAQCLPDQLKDDTFKNLLDQDRPTKHWWKMLMKNL

SEQ ID NO: 119154 - protein, 37 aa, Heterodera glycines
MMEITVNDRLGKKVRIKCNPTDTIGDLKKLVSTQVGT

SEQ ID NO: 119155 - protein, 93 aa, Heterodera glycines
MSNQNSSTGGADSRKIDHLFNKYARDAKDKAQKIGPDRIGPNGMVRFLRDLNIEPTSRAVMVLAWKMGAQKQCEFTVQEFRDGISTLMFVSLF

SEQ ID NO: 119156 - protein, 188 aa, Heterodera glycines
KNGECKFCLFVCFDINLFPPPGAQIYLCFECVPPRNLCNDVRLYNHRTKFHRGQNSGFKCNLCNQKFLTPRKLRKHKKMSHVFTKTYQCHFCEELFISETAVTTHERIHTGIIKFECKICDYKCNRFLNMEDHVKEDHGYLCSICQSKLSEWGDLKNHMLMDHGGYLSSDAVSGYIESPRVWLMFKGD

SEQ ID NO: 119157 - protein, 175 aa, Heterodera glycines
MEWREENKAQIIPGVLFVDEVHMFDLECFSFINRYIESDLSPILVMATNRGIVNIRGTSVESPHGVPLDLLDRSLIIRTSSYKENEIGEILKIRASDELVEMEDASIAVLVQIALETSMRYCMQLISTADILRQRRKGEKVTEEDVRKARSLFIDVKRCRKEMEKHGDSFINDFN

SEQ ID NO: 119158 - protein, 470 aa, Heterodera glycines
MSNPSFFQARNVHKQGCTLSWKPPEDDGGAPIVGYVVEKMDTSRGTWQEVGQFPDCEAKVNRLVPGKAYMFRVKAVNVYGESKPLEGDKEIVAKNPFDVPDAPDAPAIIDFDENRIDVAWKPPTNDGGAPIKEYIVERREKGSSSWIEVGHTPATSFSCTGLRKGQEYEFRVLAVNEAGPSAPSAPSASQICKARFLKPQIITAQRKWKVRAGNTLTLDIEFVGTPDPSVGWVKAGGAGTLPPELIMDVRRPGNTSIFFPAAKRSETGIYELRLKNEVGETEGHFEVLVQDRPAPPKGPLVVDNVTRDSCTLSWQPPEDDGGSEVTNYVVERRDVGSQVWVPVNNFVVGTSSTVPKLQEGHEYEFRVCAENAFGRSDPLNTDSAVLAKDPYGRPGKPGRPEITDHDNNHISIKWTPPTDTGGSPITHYDVQRKDAKTGRWIKVNTHPVYDCAYTDERVQPGHGYEYRIVA

SEQ ID NO: 119159 - protein, 148 aa, Heterodera glycines
MSGVTTCLRFPGQLNADLRKLAVNMVPFPRLHFFMPGFAPLSAKGAAAYQALSVSELTKQMFDAKNMMAACDPRHGRYLTVAAMFRGRMSMREVDDQMMSVQNKNSSYFVEWIPNNVKTAQCFAVRHFSIGTLAKEWTKWNLPKRSQT

SEQ ID NO: 119160 - protein, 492 aa, Heterodera glycines
FCQESQYGFVYGVSGPVVTAEKMSGAAMYVTAEKMSGAAMYELVRVGHSELVGEIIRLEGDYATIQVYEETSSVTIGDPVLRTGQPLSVTIGDPVLRTGQPLSVELGPGIMGSIFDGIQRPLHDISEMTKSIYIPKGVNVKALNRAVNVKALNRAKRWEFMPRKDLRVGDHVTGGDIIGMVHESALVKHKIMVEPKACGTVKFIAPQGQYTVEDTILEVEFAGHTQKLTMMHIWPVRNPRPSAEKLAANFPLLCGQRVLDALFPCVQGGTTAIPGAFGCGKTVISQSLSKYSNSDAIIYVGCGERGNEMSEVLRDFPELTMEVDGVTTSIMERTALVANTSNMPVAAREASIYTGITLAITLAEYFRDMGLNVAMMADSTSRWAEALREISGRLGEMPADSGYPAYLAARLASFYERAGKVKCFGSPEREGSVTIVGAVSPPGGDFVSPPGGDFADPVTSATLGIVQVFWGLDKKLAQRKHFPSINWLISYR

SEQ ID NO: 119161 - protein, 353 aa, Heterodera glycines
MHSPLFGSMLDNKEYSRHIENFRSSISPPKGITNGLHCHDFRSPSDFDVLVKLAKDPAGVGNRELQQRMDQDQQFRQQVLCAIVNGGKERFLQLCIDCNGCFVIQKLVENGSKETNQMLLNLVRPLAFKMVLNRFACRIVQKVKKDGAGQNSAAETQPTKTQPRHNSALVVNLSGSQVRQLFCQQFKGHENTLVTDQNGNHFVQCVVDHFAPDVYGPFILALANCPTRLSAVFENKYGCRVIQFVLENVVQLVHGTANANNSLENRNVYHLSLLKYSSHVVEQAFKHAEDRCNCLAMLFREVLEGYKPSTDGKQRTALYEMLFNQVNLTYSMTFCMGISLRVPFSTAITSFRG

SEQ ID NO: 119162 - protein, 318 aa, Heterodera glycines
IDIVARCQGGNNAGHTVLANGREYHFHLLPSGLASEKVLNIVGNGVVVNLDALFEELESNKIEDSADRLFVSDSAHLVLPVHIATDIMRENALGQNSKLGTTKRGIGPAYSSKCFRNGIRLGELLHQPEKFEQNYRSLVAHFKTLFPDIELDTESDVKQLKVPIRSSLRPIPPSAVASPALAFRRQPSVASSAWSKPTKRVSAPVHSRLNCLTPILAVTKVDILDQFHEIKIAIGYELNGRQIEYPPATVDDWANLCVHYKTFEGWQSPTTSARQWEQLPDKCRAYLEFIQNQLGVPVEYIGVGKGREQLIVCTNNGG

SEQ ID NO: 119163 - protein, 233 aa, Heterodera glycines
GLEISTEKCFVSYLGKNNMKKEYFINSKKISESDNVRDLGIIIDSKLNFSEHISKIVRNAYLRSFQILRVLKSREIKTLTAAYKTFVRPQLQYATEVWNPNLKKDIDKIERVQKFFTRKVFRKCGFVYKKYVERLKIAGLHKLEERRKINDLTTAFKIIKGFASLEAEQNFFFSERPRRPLLLRVKRHTAKTQNNFFHRIVRNWNNLPVVAVQINKAKEFRGLLNALSIHFLP

SEQ ID NO: 119164 - protein, 328 aa, Heterodera glycines
DNEMNKDHSIRQRRGLKQADSSESKLPPKQSSKALTKIILAVIFCIVGDNVKFSWLAHDGRTFGRQVIEDNDLAMQVDWMANGRKSWKVHLSANSTNNYALLFYLALQDKASHFVLQDQQYRKSSNNFGYGFLDGYSHILGQFAMNMNIQGVFSSEAVSKIAYKMTPILDVRHVDELIKVSIGQTEGKLGLQLTQNPEIPDEEANFAAIQFDFSKNIHIELEMLAEGDAKIANFDHIFTRKLETFSNKFDEIFPIDHQEGSDSFNRLGKIALSNLLGGIGVWHGYSLVKIDESDHINSYGPLSLISAVPSRPFFPRGFLWDEDFGFLA

SEQ ID NO: 119165 - protein, 149 aa, Heterodera glycines
SSSEGQRIDVGLVRFDLRPVVGIPTKFIPVLLWHESASVAFYTASLFRYTFTLHSTWLINSVAHIVGYRPYDVSISSTESVWTTVLAGGEGGHNYHHTFPQDYRTSEMRTLLNFTKAPNNRKLALFTFAIHFRHSSICLRKSDGPTICE

SEQ ID NO: 119166 - protein, 275 aa, Heterodera glycines
MFFAKGLRAKFTPHVLLVVPVIFDKFKEKKQLLRDALVECIDVIAAYTSFDHLSKALLEAMTSKQNPSQKSQTDLFIYRVFRSLPAKDIPKGLLKDLVAILSKHGSDADSEVRDSSFAALGAIMKCIGEKALGCFISPELAKDANKMAKIAENRDKALTDSPNGPNDRVELFANANPSSRPVADSAKKRDASTSRLNQTINSTADDPNATKRARSASGRRRSVAVLPNNSMLNDNTDEGNPRAPRRSHFVGSGGLSSAVSYSSNLNTTMTLQSQN

SEQ ID NO: 119167 - protein, 413 aa, Heterodera glycines
MIGLLTRYARTQFTSPFKNSETNNEQKELYSSGEESEEKDGGRQFQNEQMHLDPDYNLLIASVRPLLQSRNPAVVMPFLKSFFVRNSDTIHVKRMKLYVLSSLVTEANVQLVVRELQAFHLVPQMLGQLLLIAPMARSCILWLVGTHIDKVPKLAPDLLRIVAKTFCEEADFVKALNLAVRIWAIDSENREGKCALLIKYVFQLARYDRSYDIRDRCRFLRNFLFDKDQNSLKFPLDIFLQERPAPAKCNGYTELPDFPSEQPDPTIRRSAYPLPSDGIVQGTEIAMDEAEEEEEEDSLDEEESEEDEEDEDEEEDEEEEEEEEESEGEKVPDEKITSNIFETEKLMNVLIDTSTATDWNVRMVALLPLVAKNASKNDGQKELRSEHLLLLDIDFAQTTAQSPNEEGEDKMKD

SEQ ID NO: 119168 - protein, 389 aa, Heterodera glycines
MPQILPPILLAHFPPKSNPDSTTIPTDNIQKAPRKQQQQLQLICCDHFGSSLPFLLHKVLCNDAFGNLPAKPTFMRQADPPRAVPQAATRHLPSPAKQSAPIDVAAMAERSSVPPSSATNGQQAVSTSNPIAALQPVLPLNPVQQKFNPREDATPPPAPPRIPGLTGNHPEGFAGAVKELRSAGIPVQGIPLEHIGGQTVHAPQNEALVQANPKFGNELNTFIESAKAPFNPSGSSAPLPDAKPGENGLIGLLSSSVRKIVKDTGMADALSNSLPNLLGTNTGPNGAADTKSIASALANAAESVSSSAGTSSSSSAAGGGGASSTSGNGIRRQQSPAERAIAGFASALGGGGNANGPAHAGLPRIPGIPILPGGIPRNSQGQIDVVQLI

SEQ ID NO: 119169 - protein, 155 aa, Heterodera glycines
KVTQKAAVLELKPSEEHLRTEKGEESTKNEDEIHTEEAEENEEKGSEASEREGPKSEECSVDEKDSDEEEKERLYEEQMEKEKQKTIALTIWIEVILNVNHSVDIEEDEEYEDEPQAEMEPESVPVSLPHFTISITKNNQSMFFALEMVKTEDGG

SEQ ID NO: 119170 - protein, 287 aa, Heterodera glycines
AIVPFDVEYQQLKKTNTPAKLYEFKLDMFQSQALKCLDNQQSVLVSAHTSAGKTVVALYAIAMALRDKQRVIYTSPIKALSNQKYRELVEEFEDVGLVTGDVTLNPNASCVVMTTEILRSMLYRGCEIVREVGWVIFDEIHYMRDKERGVVWEETLILLPKTTNLVFLSATIPNAKQFTEWICYLQHKQCNIIYTDYRPVPLQHLVYSAGSDGLWEVGEFKQDNFAKAMSCLEERQPMGGEVRPQHGRRSGANDATQKSNVVKIIRTIRERDMLPCIIFSFSRKECE

SEQ ID NO: 119171 - protein, 205 aa, Heterodera glycines
MHFLTGNEQSFDSEGQEALLDSALKVVKNESFEMKRALDRNELMEGLKHAAQMLCELRTSLLTPKFYYRFDRYLGEERKYSVAELYETVQYTGNIIPRLYLLITVGTTYIKSGESSTSNILNDLVEMCRGVQHPLRGLFLRNYLLTSTKELLPDIPSTSSEKSAQNFAASEEEEEQSLGTQINGGTVRDTIEFIMTNFAEMNKLW

SEQ ID NO: 119172 - protein, 353 aa, Heterodera glycines
MTFHKIDNDSVNSITNALDFFRIPPTNVSVSSSKVFELLPSNPLTDTPYHFKLHSSQNYIDLSKCYLLTEFRIRKENANGQLMDLTIDDENIAPIQMIGQTFIRNIKMSINGREVFNANALMAYKTYFSHELSYSTTAKDSHLNAAGYYRDTGETLETGPGCIQRRDLFAESKTAQFIAKIDTDLFNQPLYLINFCELDVEILPNDNDFVLIAPAIGGVVPRYRFEVMGLKMYVKKVSLMDGLALDIARKLEIKPARYAVRKTMMKSMFISQGRFEFTANLFMDQIPRRITMGLVSNADYSGTITRSPFNFQPFNVREIAIIANGRSYPQAPYDLDYPHGKYVRNVNDMNEAV

SEQ ID NO: 119173 - protein, 114 aa, Heterodera glycines
MTFSHCIATPVLFIMFAILSGQSGETFSFQAEMPLIINTYSNKEIFLRELISDSSDALDKIHYQALTDPSQMESGKELFIKIVPNKADLVNNHKPGTEAFIEALQVLFFRLVNP

SEQ ID NO: 119174 - protein, 126 aa, Heterodera glycines
MAQLPPEDVATMPTQKVVFNAPFDNKATYYMRVINPGTKRIGYAFKTTKPKRINMNPPNGVLGPKESVNVAVSCDAFDPGSEDTKGDRVTVEWTNTPDPAATAFKLEWFQGDGMVRRKNLPIEYNV

SEQ ID NO: 119175 - protein, 126 aa, Heterodera glycines; identical to SEQ ID NO: 119174

SEQ ID NO: 119176 - protein, 337 aa, Heterodera glycines
RINQNKSLYDYKGPVAIPTCKWDIGGLEEAKELLSEALAGEENEENASRLRRRTGILLYGPPGCGKTMLAKAVANQAGLSFVSVKGPELLSQFTMLAKAVANQAGLSFVSVKGPELLSQFVGESERNLREVFSKAKRTAPSVLFFDELDSLVPARGANSDSGGVMDRMVSQFLTELDSCHWTRNKAVFIMGATNRPDLLDPCLLSPGRFDKLVPINPANDPIAKERILRSGRFDKLVPINPANDPIAKERILRSLCKKIKLEDGLSITEIAKKCPEAAKKCPEAMSGAELAGLVSKLGIPADVIMFYHLAVGKTPNEQKDKRTELLQRVRMFLEDTI

SEQ ID NO: 119177 - protein, 259 aa, Heterodera glycines
NEFGTFCRNLSIPASVFWHFSSHKWHYFYGIFTISTNYFNDEVEKNIARRDLGTDGSFGGGKGRIKAKKRPVIFVHGLTNLAGELDYVRRLFREKGGYRDSELYATTYGYGMKGWKWLRDAMKCDHVKMWILLATVWDEEQLGPPLTHLVHTFIGVGGANREAVHLCRLFEWAMPCNPVNGMRCHSQFLDDINSKVGYEATTRIFVIRSMDDGTVGTRDCEGRSVSAIDGQNDEIVLRNYSHQMVIFGTGEQQLKLLTF

SEQ ID NO: 119178 - protein, 592 aa, Heterodera glycines
LMAKTPPPADFRSLVSIERVAYLLFFSLYGRYLSVGKFHNVFNREFFKYTSAGDSERVAFLKICRITFEEYKRRVICRITFEEYKRRVIEHNKRAYKLSQKHLFPSLRKIFRNEVKDIIASIKIIQTNHSKLLDNEIEVFEFLTLRISVRGSELVEMDPRKTLGNIVDPTRSVSTVCIEDLKRFIDAEGRRYVEILESFKGPLLVGHTPSQTPLLFIPLLVGHTPSQTPLLFIQCQINRLLQSDVYPNPSSGDANDCLLIWSLLEMLIRQHGKVTGPDLARLLCSNQPNLRSSSAISRQDSADARSSSAISRQDSADAEPSLDISAIERMTHFLLGGHIDEAIDSAISDGLLFDALLLAHRLFRDIDEAIDSAISDGLLFDALLLAHRLFRDDKDRLEAVEGRLMAYRSPDHPITTLLSVAADQPVPLLTNPTTNPTSYETNGWRSHIAIVLANLQSPTAMNAVYQLGLALAQKEFNSAADFCFLAVNLLYGFDCFSPPYNSSDQRHFARGQIHSLRVLGSIDLLRNTLFFSAGILDYQATELFDFALQLANPNSPTLLSKSHYYAKVRLQYAQLLDELGGFKHDYFNCCFI

SEQ ID NO: 119179 - protein, 386 aa, Heterodera glycines
LLKYHASVDATTHSGLAPLHVAAFMGCINIVIFLIQQGANVDCETVRGETPLHLAARANQTDIDIVRVLVRNKANVDAQARELQTPLHIAARLGNADIVMILLSAHANPNAATRDQYTPLHIAAKEGQEEVVQLLLEKKSNKTLLTKKGFSPLHLAAKYGNYAVVRLLLERGTPVDIEGKNQVTPLHVATHYNNERVAQLLLERGARADACARNGYTPLHIAAKKNQMEIAHALLAYRAVPNAESRAGFTPLHLASEEGHLQMAALLTENGSEVNARAKNGLTPMHLCAQEDRVQVADHLFNNEADINAQTNAGYTPLHVACHFGQMNMVRWLVSHGANVNAETKSNYTPLHQAAQQGHNHVVQFLLDNGASPNTRTAVRFSYFFA

SEQ ID NO: 119180 - protein, 339 aa, Heterodera glycines
ENQNTSESLALSAFVQSSSCSANDQDNNLDGRNSLHENYDNYDSPSVGAPGNRILSETNLYIRGLDETNLYIRGLDEECTDERLRQMCSRFGKIVSTKAILDKATKKCKGYGFVDFESSASARDAIEGLEKEGISAQMAKQQEQDPTNLYIANLPPEYNEDKLTDKQQEQDPTNLYIANLPPEYNEDKLTDLLKEFGMVISSRVLRSQNGSSRGVGGSSRGVGFCRMGCTDSCDSIIAKYNGRKLPKYNGRKLPNAQAHLIVKFADSSSRKFKRSTPSLGPSTRSRAINPKGVFLRFDNTVHTGKPTNSNLYVNSVFRPFGYQFGGTLPNPSAHYGPSF

SEQ ID NO: 119181 - protein, 85 aa, Heterodera glycines
MTVDETSKKKKESIVDLSRFIDKKVRVKFQGGREAAGILKGYDQLLNLVLDNATEFLRDPEDPLRITDETRNLGLIVARGKNIKE

SEQ ID NO: 119182 - protein, 257 aa, Heterodera glycines
MAATSLQQQLKRLKSAPTGALAVERDYSSLLFTKKAAAALDRDEFYKIGLAGLSGMKKIDNAFDTYAPELFWKDKKRFNRAMLQKDEAEQFDRRIETFLLRLAAHFHHQCCRQVLEWLIHNYQVLDIHTYNAEALLLAFLPYHSVNSFGRLLHILKFNSTAWDWLTEYQRDAAPIPMNILCRACQVGRSYGLVSTLSNFVQMAIEQLGSTYANDKMQNYFTFLVSLFGILIENSTADGTVDDQLLARLMPFLSVALK

SEQ ID NO: 119183 - protein, 276 aa, Heterodera glycines
MKNREIEKQISKEIQNFVSPKINPIKKEAINHLKLNIKTSVEKWTAQFTAIKPRLLVGGSLLMNGFVDGSDMDLLCVLPDEIEFDQLFGEEDKCLYKFLKKNLNDVISVNWLQGKVNILRIDHQQIEVDFLPVIVPGKYLLEKDIHIEDDQLIKQMTEETSIYPLADKQIYSGIFGYLNGATLSVMASKICILFPDAPLTFLLYQFFSHFANWDWSQAVLLKKLTPVTMNKIVRKWPPLFGISPMTVITPKFPEQNSTFNVNTYTIETIIDELKMG

SEQ ID NO: 119184 - protein, 445 aa, Heterodera glycines
LMHANLPAAVIDCGTGYTKLGYAGNSEPQFIIPSAYTKLGYAGNSEPQFIIPSAIAVKDRIFKVGGKIPDLDFFIGDEALSPLAANYFVKYPIRHGIVDDWDLMYPIRHGIVDDWDLMERFWEHCIFKYLRAEPEDHYFLLTEPPLNTPENREFTAEIMFETEPPLNTPENREFTAEIMFESFNVPGLYIAVQALLALAASWQTREFNHRSLTGLVVDSGDGVTHCIVVDSGDGVTHCIPVCDGYVIGSCIKHIPIAGRDITYFLQQMLRDREVNVPSEQSYMLRDREVNVPSEQSYEVAKAIKEQFCYVCPDIHKEFVKYDSEPEKWLNTYNGVNNITKKPFAVDVGYERFMGPEIFFHPEFVSSDYKMSISEVVFVSSDYKMSISEVVDQVIQQCPIDVRRGLYENIVLSGGSTMFKDFPRRHQRDDFPRRHQRDVKRLSDQR

SEQ ID NO: 119185 - protein, 223 aa, Heterodera glycines
QRVNHFPRSWILTRKDQLYESIERASVLYGSDWFNFIPEFFCTPMSSAARHSMGQKFQGANLGSDAKFIVKPADGSLGRGIYFLDNGNLNETLETDKKLVVSRYIDRPFLINGLNDGLARFAVHKYDEKDEIDKVEGGVDMNKHLTNYSLNKMSAEFIRNTDCREENMGHKWTLSALLRELEKRGEDVGLLMVRIEDIVIKSLLSVQNSIAAMCRKCKHSVGE

SEQ ID NO: 119186 - protein, 173 aa, Heterodera glycines
MAETTVLINKTSKLPYKLGSLLMGKKRKIRTGAGDVVPVPGPLLKQIEKDKFAKPKSHLHLGNNQKKEDEQGKFIDAALSTKILREASKQWKAEEKKSGEEKALEIEEKSDDEEDICKQAQELAEQIAIDGVNPAVVALFTEVGAVMAKYRSGKVTKAFKMIPAMANWEQILE

SEQ ID NO: 119187 - protein, 298 aa, Heterodera glycines
PPPPPRLTSTVCRVFERILSSTVCRVFERILSSKILEFLNNIRFFDKEQFGFLKNRSTTTQILKTMDDIYNSIQMNQQIDIIYIDFVKFLKNRSFNVKIGEELSDSFRIFSGVPQGSVLGPLLFLIFINDLPSFIANEAASVGIKMYADDVKLYYAHENDDHSNQLDKAIEALEKWSKINGLEISTEKCFVLYLGKNNMKKEYFINSKKISESDNVRDLGIIIDSKLNFSEHISKIVRNAYLRSFQILSVEKQGNKTLTADYKTFVRPQLEYSTEVWNPNLKKDIDKIERVQKFFTRK

SEQ ID NO: 119188 - protein, 176 aa, Heterodera glycines
CPHFGQLIALFNRLRSQTVSTRYLHVDENAFVASSTKWGAFHINVVLHVDENAFVASSTKWGAFHINVVDQPEFGGQQSQQQQQQHTVTYGSVIQLVDSQTEMRLPLMRIRKVDKQHVLLDPAGQGEPGEPVSQLHKCAFQMVDVASNGAELFYLCLSQDKIIQFQAQTFQWERRK

SEQ ID NO: 119189 - protein, 90 aa, Heterodera glycines
MSLMLLRLLLVLLMFAVEAAHQQQLGTPVIGGICKLDTPDVHIGGKQTQFFLRCEPNTDSAQGEGVWVVKSRHAGSTAANKYFGMYFLDF

SEQ ID NO: 119190 - protein, 214 aa, Heterodera glycines
MLAAAQFSLEHVGRLSTYGLTLPTRRVPTIAQGTLVAQMLRRVTKNLDLGAEYIYHRDERFPGKQSNTLSYALRYIQPTWIFSGFPGKQSNTLSYALRYIQPTWIFSGTLAPTELHLCYYHKQSEHLQFGVEFEANFKLQEVNTTFAYEVNTTFAYQIEVPDSLTLRACCDTNWKVGAVLEKKLSKQLPFSLAISGVLDHVKAQGKFGIGLLIG

SEQ ID NO: 119191 - protein, 341 aa, Heterodera glycines
MTIVVLSGLTVEEVVFGKEPGLEGRPTGEGFVRFSTADEAERALQQNNQHMGNRTGYEQRAAGGRPMGRGGYGAGGGGPASHRYSPYPSYPNYGYGTPRQPGGAGGAGGGGYGAGRGGGAAAAAAAMGGGGYDDGYGGYGGGYNANPNAGPTKLYMRGIPFRLTANDIERFFSPLVCVDIQVGTMPDGRSSGDGIVEFQTPADARQAMSKDRECIGNRYVELFPSLSAKIPPHVTYESIGGKGGGGGGRGGAAVGPVMPSAAQQYAQAVQQQVAAFASGNYPPSGASAGGMSGGVGAMAAAGQHHQYGQYPGDYSTAYYGAYGGGDVGAGAQPKTDYNWLV

SEQ ID NO: 119192 - protein, 186 aa, Heterodera glycines
NAVNSLRALIKGSVLGPLLFLIYINDLPDALPSVRIKLYADDVKLYISDTEIMHKALHNLSEWANKWQIRISIKKTFVLHLGNKNPKEIYKIDGNIINVVDTIRDLGINIDNKLQFSNHVAQIIKNAYLRMRSLFRVIKSKSSRIWIILNLCRPLLEYAQEVWNPSLLKILKEKEKCQKYFTKRVL

SEQ ID NO: 119193 - protein, 455 aa, Heterodera glycines
MSVIKKIDKDSVEGLEGSLSLFSLPPTNVAINKTNVRELLPLSALNQTGPYLFRLFSDSQFCDLSKTYMYLLSSIERKNDAGEWVALSDTDPNDKHVGVIQNFASSFVRSLKVNISGIEVFDSSIYYHYRDYIMKELGYSQEIRKAFHEASCYYADDDDQNSATNPGFTARAARFSGGRQCETMVKLNFDLARQSALMLNNQDVIFTIHRNNDSFLLLTPPYKKPDGTQQENKKEYRIRVHDMRLYVRTVDVTPSLNLAISRQLESTSAKYPLRKIEMRSIFLGTGRTELAHNVFTSTLPRRLICTFVSTDAYSGNRKMSPYKFEHANVRSISVEANGQTFPSTPYLLSFDGVQPRFVRAFVDMYAGLGLDDSDTKTVSIGMQRFLNGWAFFVIPLTSTLEDTPGFELIRQGTCTIKVQFEQPIKADGYEMLVLGEFDSVLSINADRVLSTDGSV

SEQ ID NO: 119194 - protein, 224 aa, Heterodera glycines
MSAKLETTSPDGAKVSINIHDRNEEKALINSKAVHVIDPAEAANSLGTFKEQEPAAQRIALRTYPRRWAVLAVVALLNCFNTMIWIAFSPISNHVSNFYGEKDSATYFSGIFIFVTIPVGLVAMWSGGRFGLRSSILVAAWANGIGAAIRLASSFLPDSMIHLRFPVGITGQGVAALAYPFIMFLPTKVAAVWFPDTERTLATTIGVKMGKINRKKARLIELTF

SEQ ID NO: 119195 - protein, 304 aa, Heterodera glycines
SRGEIDIKVLVHQSHAGAIIGRNGSKIKEFREQTQCRFKVFQECCPVSSDRVCLITGDPSKLPCAVKQLVDFVKEIPFKLITGDPSKLPCAVKQLVDFVKEIPFKGPHQPYDPHNYNPHMCHAYGGFEGQSMGSAFIDALLLPMEGGPPPPMPPPHFDYPPHHGPPNAPHQPGVGYAGFGPGGPPPHHHGGPPPMGYPGPGGENDHNTGMFFNPDQNVLIKYFKVTIPSKLSGTIIGKRGECINRIRNESGARIEIDTQSDVFGTDERIITITGSPHQIQLAQFLLQQRWFGSIRSRERNGGDT

SEQ ID NO: 119196 - protein, 413 aa, Heterodera glycines
CHAKAPIIDDVQHEQSWQRIQEIEAPKEPLPEPEPAPKVAPKFTSPVLTPGEVNEGQPTHFETTVEPIDDNELKIQWFVNGAPVPDSSRLKQIADFGWVILNINDTELRDAGDWECVATNSVGEARASAKLNVLPRDRLLLEPINQSSLAQIEQLEAPRAGPAEPEAPVYEAPTFTAQLQAPDGLAEGDSAHLEAHYTPVADPKTRVEWYKDGQPIYHSNRQRMVNDFGFGILDILYLLAHDSGEYQIKVINDQGEASSSVQLEVAPTESLLLQPQSEQKAKAVGDLEERLAFRPTKEEVAREGRMPVFVAPLSAPSESEQGDRAHFTARYEPMDDNQLKIQWFLNNKPLLTGSRVKTFLNNKPLLTGSRVKTIDEFGVVVLEIYPVYPEDSGDYVCKATNAQGEAVTSTSLK

SEQ ID NO: 119197 - protein, 258 aa, Heterodera glycines
MMGGKRKKKGKKAELSEEEKEAVIANWEPSPLVPLYSEREQNDPNYRPRSIEGRMGKFVVIDDKRCVNLASTDFFGFIGNQKIEIVRFGGTFTLYCHTVIVIQIDSSWAVKRPFCTATDSPPSQVPSQLIQGGAMSFLRTKVPGSRPIICWPWKIKAMFLGVNFAIQSGLMASRSDILWFEHNDMADLERKMVELEEKDKMNPKRKASIRRLIVVEGIYTNSGDICPLPKLIELKWRHKVRIFIDESFSFGVLGKHGK

SEQ ID NO: 119198 - protein, 283 aa, Heterodera glycines
MMAKKKEEEELIGQLKRTFRGERREVFSLLIHLPLSSDEEVEEESIAADEVSVQEPAPPKEEEPAPEAEAEAPPAEEKEEEEEEEPGSPGGAGDAPKEEFRRTSVTESVAPTAQLRRAPPPQPKPAEESMTEAEAAMLAVKKRHEEEEEAKMRDNDERRRQELAAVEDELRVLKERQAERRAEREKEEAEFAERRRQDEDRRRKDEEERKARLEAEKAKRDEEKRKRHLMMAGGFGGFVAADAEGAGKNFVVPEKSEKGAQQGMPGQTSKPRGLSKEQHEEAK

SEQ ID NO: 119199 - protein, 365 aa, Heterodera glycines
MPKMLFVRHQNPFDCLESRRGFSPILFVLFSYTPDFLLTSNEATLQLYMHMNGTPWTFNLVATIPPQLLSVCHAALPRPPFESMMYYTCVLALTLFWRTLNFILFLFSYIWPLVRGGNKAPPMATIGRRKAARATMARKAQQQQQQKIVLAKTQLVDGGQQHDDKDGQKQLQPQKGDDRLSVGDKNAKETAAAKIGTGRVAEKVPTERRTTAPIVTALKYDENDDEDADDDDEEEEEEDDDDEDNDDEDDDVVQHPKDPEHMSNNTTEDAIKNQNVADRHATATAVVHENDGHGPDQDGVDADLLDLSDPYLYMKLCPFFFGCGEKEKRRTVGQGKSGGGEWRKKAAAETAPHFDQQQQYDEDEQ

SEQ ID NO: 119200 - protein, 107 aa, Heterodera glycines
MTRVKTHELRAKKKEELMKMLEEQKTELASLQVSKVTNGAVSKLSNIHVVRKNIARILTVINQAQKMNLLKFYKGKKYRPIDLRFKKTRAMRRELTKHELSLKTHKQ

SEQ ID NO: 119201 - protein, 251 aa, Heterodera glycines
LKIDEILLILNRNVSYKYDVDDTPAIRCTDRRVEFSINTRNPFRGNLYVQGEFGLTECRREFYNNEAPFASLEVRLGDCGMIREKRPHGMSDFCIGYSLILITNFHPRFVTRVDRAYKIFCAYQQAERPVGVDLEVGSVPEESVSSDALMVPECEYTMRIGDLNGPLATGTEVGDLIYHRWECQRSDAHGMLVKNCRVFDGNDNVTLLDERGLGLSEKEFIKQIQRPKGLKIKYIKLEIKSFKFKFNLQMT

SEQ ID NO: 119202 - protein, 280 aa, Heterodera glycines
VFEEIRRLYPRHLNGMEIYSTALWQLHDSKKLSALASKMAEIARNQPQTWCIAANCFSVEKQHETAIECLERSIRLDHRFAYAYSLLGHELIDMNDFGRAAQAFRKAVQFSPNDYRAWYGLGLVNFKEEQLQMARMNLLRAVGINPNNNVLLCQLAVIEQALHNTDAAMQYLESALAMQYLESALKHSPNNVPCRFHKARLLFDIGKYEAARAELEELRVLSPDEAHVFFLLGRVNRKLGNTHMALLNFRHGFTPKILGTNNLLQQKLKNSVYKEISSEK

SEQ ID NO: 119203 - protein, 115 aa, Heterodera glycines
IYAGQLAVLPKTHRLVPIIEQMRREERHHLDEMERLIVKYGHYNDQIKELMADDANANRELMEKLAQFRDEELEHHDTGVQHQGLEAPFYDGSGHNYAPNAIAPKFSALKTIIQT

SEQ ID NO: 119204 - protein, 210 aa, Heterodera glycines
RPGNGGAPTKTCQFKLVLLGESAVGKSSLVLRFVKGQFHEYQESTIGAAFLTQTICLDDATVKFEIWDTAGQERYHSLAPMYYRGAQAAIVVYDITNQESFAKARNWVRELQRQASPNIVIALAGNKADLAAKRMVEYEEAQAYAEDNGLLFMETSAKSSMNVNDIFLAIAKKLPKTEGGGGPSGHGRSGVDISAAEAAAQQRRGTCCSK

SEQ ID NO: 119205 - protein, 173 aa, Heterodera glycines
MSDWSFVGDRIQHPFNLAIMQIFVKTLTGKTITLEVEASDTIENVKAKIQDKEGIPPDQQRLIFAGKQLEDGRTLADYNIQKESTLHLVLRLRGGMQIFVKTLTGKTITLEVEASDTIENVKAKIQDKEGIPPDQQRLIFAGKQLEDGRTLADYNIQKESTLHLVLRLRGGKN

SEQ ID NO: 119206 - protein, 134 aa, Heterodera glycines
MGQFIFDDLLLLLMESPFSDCPRGQRKVILLKGVSRQKWELAHSTITQGAELGKGAFGVVKRGVFRDPTIGQPVQMAIKEVSQTSTKAQIKEFMNEARIMRHLEHKNVIKFYGVAVGREPLMVLMELASNGSLD

SEQ ID NO: 119207 - protein, 442 aa, Heterodera glycines
MAFHKIDNDSANSITNALDFFRIPPTNVSVSSAKVFELLPSNPLTDTPYHFKLHSSQNFIDLSKCYLQSEFRIRKENEHGQLIDLAADEVAPIQMIGQTFIRNIKMSINGREVFNSNSLMAYKTYFSHELSYSNTAKDSHLNAAGYYRDTGGTLETGDGCIARRNLFAGSRTAQFMAKIDADLFNQPLYLINFCELDIEILPNDNDFVLITTPSVAQGVAAAPRYRFEVVSLKMYVKKVSLMDGLALDVARKLEVKPARYAVRKTLMKSMFISHGRFEFTANLFMDQIPRRITMGLVANADYIGTISRSPFNFQPFNVREISIIANGRSFPQAPYDLDFPNWKYVRPFNDMNEAVGFANSLESNGISYEQFGKTHCIYVFNLTNSGDDQAALFDLIKNGTTAVSIKFNQAVPAGGIMLVVMGECDSLVMLDKNRSISTDITI

SEQ ID NO: 119208 - protein, 53 aa, Heterodera glycines
VHFREIPSHVLQKVCHYFAYKARYTNSATEIPEFFVAPEVALELLMAANFLDC

SEQ ID NO: 119209 - protein, 298 aa, Heterodera glycines
YGHQQHFGSWWWNDVCGYVCGNLMQGFSLGGWKEQHNVHHAAPNVDGRDGDLDLLPLWATIGTQLKRIDRIDSASPLAHLLPFQHLYWSFALPLLRFSWLLQSVQFVCQMRHSFYDIHRQRALVEQCSLALHWSLIHRQRALVEQCSLALHWSLVLVQLYFLPDNLARLQYFLVSNLFAGFLIAHVVTYNHYSTDKFAYDDPILENFACLQLYTTRNMRPGPFIDWLWGGLNYQIEHHLFPTMPRHNLNQQVMPLVKEFCAENDIPYMVDDYFTGFRLVIEHLRRVAEAATETLVSHH

SEQ ID NO: 119210 - protein, 375 aa, Heterodera glycines
SINFCHVFLFFSFEQFFTVTISFLISRILANPALQHVCNSFFKHPTTTTPMGNALVKFLLNKLSELGANSEKASLHLMLFKLIFQTVSFYSSESENLLKPFLHRIVQDSMPFLHRIVQDSMQLASTSRECTNYFLLLRALFRSIGTGTHDLLYQQFLPLLPSILQQLNRLQNGAHRQSVHELFVELCLTIPVRLSSLLPYLSLLMDPLVCALNGSPALVQQGLRTLELCVDNLQPEYLDNLQPEYLYDHMMPVRAALMSGLWRTVYASDTQSAVAALRILGKFGGSNRKALLDPQTWTSSTDCCSTTVVVASAAHRSAPSDGAVDEHHRAISSPSSFVCADKISRDIFVEAIRLFIAVFNSDTKNKFCLFKMFTK

SEQ ID NO: 119211 - protein, 106 aa, Heterodera glycines
MAPARKVPRLHDKAVLVKSGTKFVDGRKQEFVVGKEIGQGGFGRIYEGVQSGSRHAVAIKMEPPSNGPLFTEMHVYMRVLKPEHLDKWKKDKVKKKCSCYPAVEKK

SEQ ID NO: 119212 - protein, 240 aa, Heterodera glycines
MAKISKKKTHSLQALIPDLDDNGVEILRPGLLNDTLPSPYKNNKAAAAANSGALPPDLSLIMWAREGAEDYVFHLLTGYGFDAPAGIDVEEGKAFNPYFPNGCVLAMPQQLFDEGIDYEDGTPATMSQQAKDICTFLRWAGEQWHDTRKRWAWKVSQFAVVICGVDHAVATAHVCATVRQAQCVGTDEDGEGDLPATARPRVDARVVGAKAAQGRAGAEGDRAAAEAGRLIGPFILISDG

SEQ ID NO: 119213 - protein, 119 aa, Heterodera glycines
MANDANIFVAASATKCVMLFAKGFGAKFTPHHSFVVPVIFDKFKVEKRLLRDALVECIDVIAAFRSLRAKDVPKGLLKDLVAILSKVCIGERDLRCFISLELAKDANKMAKIAEKRVTA

SEQ ID NO: 119214 - protein, 243 aa, Heterodera glycines
MAKLIAVNSAKGQFCDGYCYHKHKMTKNKTWWKCELYQQGCKGWGFESNDDQVQQQRVHLDDEGQNGTLELDADQFAHSSSTNTDTDSDEIVNVARKKPTVFEYFCMEVSRRYSLQNEKEQYAEKRRKVYAFLRIPVELEKFIYYGFRQCLDAFCHTFTILPIRVLFNLFACSVRLKRWSAADTCDILKLIIIFCASWFMQFVDTSVVYHIVRGQGIIKLYIFYNMLEVADKLFSSFGQVRAC

SEQ ID NO: 119215 - protein, 218 aa, Heterodera glycines
MAQAVAAVAPAPNANAASAQTTQPQVMAPSYPLASLYVGDLHPDVTEAMLFERFSNAGPVLSIRVCRDAITRRSLGYAYVNFQQPADAERALDTMNFDMILNKPIRIMWSQRDPSIRRSGAGNIFIKNLGKEIDTKAIYDTFSMFGSILSCKIATDIEGGSKGYGFIHFETEEAANSAIAKVNGMLLDGKKVFVGKFVPRTAREKQIGDPSRKSPMFM

SEQ ID NO: 119216 - protein, 46 aa, Heterodera glycines
GGGQLAHTILGVDYNVRLGDCQFLVLDPHYTGTENLSEILNGGWCA

SEQ ID NO: 119217 - protein, 150 aa, Heterodera glycines
MRESFPNLKCTKLRKAEWREIRRLIGKPRRCSQTFLDEECEALEAKRQKIRAIYNGTCTSLDEEFIDLPTHLPRPPIVEYLFIFCQVRTPRDGIYSATVDAITEDGYRVVFDREDILPAAYIKDYEVMFDQPSELLSVNYFLEQNRANGA

SEQ ID NO: 119218 - protein, 90 aa, Heterodera glycines
MGISDNDVQKQLRHMMAFIEQEANEKAEEIDAKAEEEFNIEKVKIDNEYFLSPESAGGVELLAKDGKIRVSSTLEARLDLIADKVSGKLA

SEQ ID NO: 119219 - protein, 308 aa, Heterodera glycines
MYTVDLNSDKGFRTIERFVDHYLRTGTSVTSERFVTLRKAVHRANWELSHSSITVSAELGRGAFGVVKKAVLTERNGNNSQVAVKEVSQTSTKEQIKEFMNEARIMRQLDHPNVIRFHGVAVGQEPLMIVIELASDGSLTDYLKTQRRSARTRLFMCVGAAAGLTHIHSKGIIHCDIAARNCLYSNGVVKISDFGMAHRGPVKKMEPNARVPVKWLSPEALAERCFTAKSDTWAYGVMCWEIFTNGEVPYSQMVGSDVAVSLINGQRLDFPRDAPSKFVEFILQHIWDAETSGRYSMAAVHDWLKRHT

SEQ ID NO: 119220 - protein, 367 aa, Heterodera glycines
DLRTIPLGQSCIAADLTANPSKNRFTNILPYDHSRVKLKPIDDDDGSDYVNASYIPGFNSRREFIAAQGPLPSTRDHFWRLIWEHQVPAVVALTKCIEKGRDKCHQYWPDNNSRSVLYADIEVTLLTESIEYDEFTIRELRLTNMAEPNQPARTVQHLHYQVDQQPYTGVGRSGTFIALDRLVQHIESGRPIDVFGTVYEMRLERCHMVQNEQQYIFIHHCLQYLLENFYPFLLCPSSQQLQQQQQHTVGHRPLSSPNPHAPFGSSISSPICADYFGCGSSSSVLSNASRGDGGGWSSKVPMTSSSNNSGAGINCYWPPTSAQNKSTDSCDGIVTTIKHSPPKIEVHHPQRNDGFLEDDEGIAESGL

SEQ ID NO: 119221 - protein, 70 aa, Heterodera glycines
NDAFEEQDLINALEPFLMAERDRSVLRIMKRNRELENEVMKDVPGWKTGTWYGEPVYFTLGDKWIEPNAM

SEQ ID NO: 119222 - protein, 232 aa, Heterodera glycines
MYADDVKLYIFHQNDSNTNDLSEAIKILEKWSKSNGLEISVEKSQTLYIGKNNSKKEYFLNGKIIPSLEKVKDLGVIIDSKLSFADHINKIIKNAYLKAYHILRIMKTRELKTIIRMYKTYVRPQLEYAVEIWNPNLKKDIERIEKVQKFFTRKAFKKCGLLHRSYSERLEICQLIELAKRRNIADLTTAFKIMKGFTSLDATKNWNKLPIVPIQADKANQFRALLKAMYEF

SEQ ID NO: 119223 - protein, 155 aa, Heterodera glycines
KTIIRMYKTYVRPQLEYAVEIWNPNLKKDIERIEKVQKFFTRKAFKKCGLLHRSYSERLEICQLIELAKRRNIADLTTAFKIMKGFTSLDASKLFTFSDRPTRRPLLLRMRRTTTKSKNNFFNRIAKNWNKLPIVPIQADKANQFRALLKAMYEF

SEQ ID NO: 119224 - protein, 319 aa, Heterodera glycines
MLMPQGDRKKIYEHLFEDGVCIAKKDYCLKSHPEIKGVKNLYVIKALKSLASRGLVKEQYAWHHYYFYLQPEGIVHLRAYLGLPDDVLPNTHKQRTDAIQKAFADKGGRGPIRADTDRGGYRAAADKQAEAGPGAAPISHRQGFGRGGAIHPNYGTLVNLDTEIFAKEQQAKDAKRMPPPAPPKPSPPQTVAAAPGGPRFVSTQDPNYATLGQLDPNIFEKNAPTKPPQQKQQQTKEGQMIFVSTRNPNYPTLAKLDPDICVKNNAPTKTAPIKQQAKGGGRGYATTTDPNYATPGQVDSKIFDKNNEKTGTDDDSESS

SEQ ID NO: 119225 - protein, 727 aa, Heterodera glycines
GVVAETVSSSQIRLSWADPNENAFNQMYTIKYGISNSDESQHKQLNITETEHIFDGLRPDTLYEFAVRLVQSSHWSLNALNRTHPAPPSSPPRDLTVIGPQFNNQHENADPGTITLTWQPPKYANGEIQEYIMLFSDRPHLPDRDWSMESVKGDRLSIELRNLRPRLTYHFKLQARNVKGYGPFTPVTSVTTADTFTSNPTSNGPRNSVNAGSNSEAFEILMGQFLSGLRWSSIAQMHTISHLRCLHRSNLVFVLIGIVVAVVVLLLFIALCSLCFYHNKNSASSTAAAANRPQQRSKKEQRNKRSKHHQQAYIPGRKMSVSTPSAVAELDDDLWLVHQQRNSAANPGGARFATIVNASNVDGYGSSVDDETGILLIDGQQRAFFAPANAAGRTEDREKGISVGGGEFYGGGSLMESFHSMTTVGDSPKSSNKSRKLHRNSLPPHICPSNSTTMSPPFATNNKSPQPNQHWQHNCHAFGKHDHFGIRGGTQNIAETKFGRRSDSPYGTRFPCQQGVAGIRTHCCGHLSSLNALDLSISPRLGHTLRQTNGPNSIERTAALLNELDEKHETVLPLQRFRVGIGLPSMPLQVKQAKRKTTAHYEATTAVTRKQAAPTKSVNFASKLVIVSSDDDDNGGYNKWSKKTKRQWNGSKDDKGISFIDNSLVDDVDEDYKYANADTENRQQKETEIENANTTMKKQQRNAADEKLNGCDDGSKNVPPPSVVDLA

SEQ ID NO: 119226 - protein, 204 aa, Heterodera glycines
QIEQLHRFFFTTANRFVQTLEMFINGDFRFSALFGQLFGLGPAPEGMLSDGRLERDCFNMRKVIVVSTLPGTLFGISNENGHLLWSLYLGNDFAPYHNERHSVEAAREGKVPLLIQRGTAFYQWPSQAAAVFNAKDSADSVVLFFNPITGTQIERVRLGHKVEFSADGNARLSEQWMTQLPWSDSESIYAIVGKSANGEPKSTH

SEQ ID NO: 119227 - protein, 130 aa, Heterodera glycines
MNLALFVAICQFLLLFFGTFPPTNGTISTAFSQFLRNYFNDEVEKNIARRDLGTDGSFGGGKGRIKAKKRPVIFVHGLTNLAGELDYVRRLFREKGGYRDSELYSTTYGYGMKGWKWLRDAMKCDHVKMS

SEQ ID NO: 119228 - protein, 192 aa, Heterodera glycines
YTTGCMLLSFSEFKEAFSLFDKDGDGTITTKELGTVMRSLGQNPTEAELQDMINEVDADGNGTIDFPEFLTMMARKMNGTIDFPEFLTMMARKMKDTDSEEEIREAFRVFDKDGNGFIVFDKDGNGFISAAELRHVMTNLGEKLTDEEVDEMIREADIDGDGQVNYEEIREADIDGDGQVNYEEFVTMMTTK

SEQ ID NO: 119229 - protein, 262 aa, Heterodera glycines
MAFGQHKQVLIDGDLHTLRFGAPSRELFMGNFPFKGAFGGPPIIATINQRRHEIRLCGPPPEVRIDPEPSYELMRYMPAVRQQQPTMVQPTKTDGTEGDRKRKRESPPIDVSRLLKRLKETGLLTQPPNEAERNQRKKQVEIEANAAPIPSNHRLDNIERRATPMSGLEQFSMRSLIMSVFGVCRYDSVIDAIHRPRVVCQYCGIAFQKLYNEAYQRHADWHLQKTIRIEDQKLNKGPKVVKGTSSQPWYMVEVGNATRKWR

SEQ ID NO: 119230 - protein, 261 aa, Heterodera glycines
LYADDVKLYISDTEIMHKALHNLFEWANKWQIRVSVQKTFVLYLGSKNPKETYKFDGNTINAVDTIRDLGVNIDNKLQFSDHVNKITRNAYLRMRSLFRIIKSKSSKIWITLYKTYIRPLLEYAPEVWNPSLQKNIKKIEKCQKYFTKRVFFKCSLPPIPYQNRLEYLQLPTLENRRKLFDLFMAHKIVYGRTDLKLFSIFKHALTSPFTDLTQNIKAKNSFPLPGGTKLWNQLDKELIKTNSLNQFKTKLNVFPLYSILT

SEQ ID NO: 119231 - protein, 162 aa, Heterodera glycines
MNRGGGFHITIQAPVNIALIKYWGKRNEELVLPLNDSIAITIDELSATTHITIGPDVSTDSVTLNGVGIDIAGSSRFRNQIREYSNRKRKLKGEHASKGWHTKAAGFAAIAFGLGKIFRLPERDIVRMARMGSGSACRSIQGGFVHWKAGTHQQNDSDCLCE

SEQ ID NO: 119232 - protein, 436 aa, Heterodera glycines
MAFHKIDTDSVNSITNALDFFRIPPTNVSVSSSKVFELLPSNPLTDTPYHFKLHSCQNYIDLSKCYLLTEFRIQKENANGQLVNLTIDDINIAPIQMIGQTFIRNIKMSINGREIFNANALMAYKTYFSHELSYSTTAKDSHLNAAGYYRDTGDSLEMGDGCTARRDLFANSNVAQFIAKIDTDLFNQPLYLINFCELDIEILPNDNEFVLIAPTGGRYRFEVVGLKLYVKKVSLMDGLALDIARKLEVKPARYAVRKTMMKSVFISPGRYEFTANLFMDQIPRRVTMGLVANTDYVGSIRRSPFNFQPFNVREISIVANGRSYPQAPYDLDYPNGKYVRPFNDMNEAVGFANSSESNGITFAQYGKTHCIYVFNLTNSGDDQAALFDLIKNGTTAVSVKFNHPVPEGGIMLVVMGECDSLVMLDKNRSISTDTTI

SEQ ID NO: 119233 - protein, 449 aa, Heterodera glycines
PVWVTESKRFSAPFGGDTDNEQKVDNLRPEFLHVLQKSISFWFPVQRFVLPTLLQMANSAHAIWSFAHQPVISYIFPILIFFPQGSGKTLCYVLPILNALRICPFSTSSVFALVVAPVRNLAEQIFKVFPRRKIPENFALFAMAPTAMAPTKSFNSNSFRSVLFPNGMKSSKAHVIVTTPGRFVEHLMDENGHLDLFVEHLMDENGHLDLSMLRYLVVDEADRMQDTARMEWLGFVEKYANGKFIFSDFHTIFSSVPSVCTLNVSCLRIIPTTILQRILVSATLSMDVHSLHKWNLRCPILFQAKEIKVNQQTENSAEPAVLLPNSLTHKLVQIDLNFDKWNRIIVFVNKKFVVYLTMVNFRQTSRRLSSLLDALSKITVAEFSADLFKSRRKKLLREFQSGAVRVLIACDVLSRGIDVLDVDCVINYDLPINERIYVHRAGRTARARK

SEQ ID NO: 119234 - protein, 143 aa, Heterodera glycines
PVFVPQVSQDSNFSHHHDIDLEQRNREAIKSNAERQAAQQLENAKYNPVLFAVQTNVDFDGTIDDDAPVHGCAVSFKAKEFLHIKEKYNNDWWIEKYNNDWWIGRLVKESCELGFIPSPAKLEAVRQAQQGGKFMLTNKCTNC

SEQ ID NO: 119235 - protein, 360 aa, Heterodera glycines
MHFRQGNSPGIELLQLRASDGDLGKNGRVEFRLAVETDLLSVDPDSGLVRAERTFDREELGDRVTVPVMALDRGTPSRATFANLTILLTDQNDEAPQCGKETHRFSVAEDAPNGQLVGTFNNFLVNYIPKVGCLDAYDSDEFGTSNSQIRFELAQSDANGPFRVHAETGCLFLDLPGLPLDFEQRSTYNLSVRLKDMGKPPLEAVKPCQVQILLEDVEENAFPPQFNAMALEASVEENAPAHTEVIRVHAEDPEGAAVRYRLVAGNGLCCFQIDPKSGVISTKKELDHELQQHYWLTVRAEDTPFSAIGRMLRAHLQLFIRVLNQNDRLPLFSQPIYRIGIAENSEENKAKTALMQRCQI

SEQ ID NO: 119236 - protein, 363 aa, Heterodera glycines
MKNLLAADDVSCCQLIGHTLWKNCRMSINGTQVFEGNDLMAYKSVMDYELTYPDTVKRSYLNVAGYYADDENSQLAGDGYTARRQLLALSRTAQFMARLDVDPCNQPRYIVNQCEVDIELLPNSSQFVLLAPNAPQAPPDQVRRYHLEVISCKLYVKKAEVMDSLALDISKRLELRPARYPLRKTSLKALFISENRTEFTANLWSDQVPKRVVLGLVSNESYVGTIGTSPFNFQPFDVRDISICANGRNYPQAPYSLDFPNGRFARAYHDMHEAIGYAGTVESNGISVKRYAEGGQCFFVFNLTPSAESSADTFDLIRKGTTAIRISFNTPVPARGIVLIAMAEIDSLIMLYKNRSVATDVQV

SEQ ID NO: 119237 - protein, 197 aa, Heterodera glycines
MTLVGRPLDKLLREAGDRFSPGTTIGISIQMLNAIKTLHKVGFLHRDVKPGNSAIGLVESNEQRLLYLIDFGMARSYIRSDGQQRRPRATSQFRGTPIYAPISAHTRRDYSRKDDVESWFYVMVKFFKGTLPWKHIAGGRDEDALQLEDRPCYEMIELLLRGYLAQNNIEEHPYDWEIGRRNSDREKTQIEKPAEKQ

SEQ ID NO: 119238 - protein, 171 aa, Heterodera glycines
MKEVRIMRQLQHPNVVQFIGVAVGQEPLMIVMELATDLRRYLDMSRRHRLNMRAKLFMCLGAAAGLDHIHSKDIIHCDIAAKNCLYADRMQGAVLERVINLVHHESSSENDNQQIAAPFSASSSSSGTENAPQNDQLLLITGGEMPSHGSDSGSATAGQVPSHVSESAIAE

SEQ ID NO: 119239 - protein, 89 aa, Heterodera glycines
MEKFFTDEPQRVAALRDVFTGLWGLENDDAVTNAVIEDAIQRPRDYVLKAQMGAGKGNFFDDEMVEKLKTMSLEERRAYILMKKNWPVA

SEQ ID NO: 119240 - protein, 374 aa, Heterodera glycines
IKFAVLIWLTVQNAVHALLLRYSRVRDVPAMYFSTVAVFWTEVIKLVRDVPAMYFSTVAVFWTEVIKLSVCLIMVCHHSNGGIFEWVLRRQVFDQPRDTLKVCLPSMLYILQNNLFYTAASHLNAATFMIVSQLKIFSAAIFSILLLNRSLARAQWVSLCVLFVGVCFVQFQPEEPRKSENRKHFSGFIAASIACGLSGFSGVFFEKILKGSAPVSLWMRNVQMSVFAIPASFFAAIVQDGSKIREHGFMYGWDSVVWLTIVQDGSKIREHGFMYGWDSVVWLTSFWYAVGGLSVAVCIKYADNIAKNFATSVAIILATLGSIQFFGFQPNLLFTLGALLVIMSIFLYSSSSIFLRHFNIYGSSSASRPSYFSS

SEQ ID NO: 119241 - protein, 244 aa, Heterodera glycines
KMSSDDQSDKEVECPLCMEAFDIDDINFYPCNCQSDKEVECPLCMEAFDIDDINFYPCNCQYQICRFCWHRIRTNENGLCPACRQSYPEDPVNFQPLSSADVRKIKSEKKQKVQQQKNKVVESRKHLAEFRVLQKNLVYAVGLSHRMADPELLKKPEFFGKFGKIIKIAVGAAPAINSAQPAVHTAYITYTRSEDALRAIHAVTNMMVEGRFLKASLGTTKYCSNFLKGQACHKPASFSIKHIS

SEQ ID NO: 119242 - protein, 440 aa, Heterodera glycines
MTFHKIDNDSVNSITNALDFFRIPPTNVSVFSSKVFELLPSNPLTDTPYHFKLHSSQNYIDLSKCYLLTEFRIRKENVNGQLMDLTIDDENIAPIQMIGQTFIRNIKMSINGREVFNANALMAYKTYFSHELSYSTTAKDSHLNAAGYYRDMGETLETGPGCIQRRDLFAESKTAQFIAKIDTDLFNQPLYLINFCELDVEIWPNDNDFVLIAPAIGGVVPRYRFEVMGLKMYVKKVSLMDGLALDIARKLEIKPARYAVRKTMMKSMFISQGRFEFTANLFMDQIPRRITMGLVSNADYSGTITRSPFNFQPFNVREIAIIANGRSYPQAPYDLDYPHGKYVRAFNDMNEAVGFANSSESNGITFPQFGKTHCIYVFNLTSSGDDQAALFDLIKNGTTAVSIKFNRAVPVGGLMLVVMGECDSLVMLDKNRSISTDTTI

SEQ ID NO: 119243 - protein, 127 aa, Heterodera glycines
YSFVTLGLALFCGHVRTEDRAEVDIRVSGACSPIYLSRRGIELSKYRPLIRFNPEKIRLVPKNPVIPGCVKIKAEGVEILRPIRNLLAEVEMRIGGTPDPNNPTLPCTKKIDDKVNQCPCAKAEGTC

SEQ ID NO: 119244 - protein, 289 aa, Heterodera glycines
MASSEGEADHNVELWKIKRLIKSLEMAKGNGTSMISLIIPPRDQIARIQKMLGDEFGTASNIKSRVNRLSVLGAITSVQARLKLYTRALLADDNKFGFIVMDGNGSLFVTLQGNAREAKIIKTVDISYGGENGFNQAIDLAADALADVKFIKEKKLISAFFDEISQDTNKAIYGVKETLTAIGNGRHRNSDLLGEFGSDKPDEKDRSNFVDPETGTDYEIESSTPLLEWLANNYKRFGAALEIVTDKSQEGAQFVRGFGGLGGVLRYSVDIPQLDELENGVDEIDLSEY

SEQ ID NO: 119245 - protein, 313 aa, Heterodera glycines
MYVDPTAYADPTEVLAEFTNEICASNIEVNAKTAVIFFPSFLSLFCYLNSKVTRTIGTGEFGEVCCGRLTVEDHYGHKQQQIVAVKTLLPGSDPKAKANFLMEASIMGQFEHENVIHLIGVVTKTEPVMILTEYMLYGSLDQFLRSNSNGRLSICQMTKLLQGVASGMKYLNDKGYVHRDLAARNVLVDDRLTCKIADFGLSRGLRKFVSGNDCDGCAPFEQQGEYTTQQGGKIPIRWTAPEAIMQHKYTTASDVWSFGVVMWEVMSFGERPYWDWTNHKVIHEVVQNGFRLPPPQDTPKRLYEMMLACWQAE

SEQ ID NO: 119246 - protein, 656 aa, Heterodera glycines
LLQKHALLESDLNIVADQIQLVSREAEHFTREEGPDGKGYKPVEPAVVQEYKPVEPAVVQERVQFLDQRYQELLELAARRKANLEANKRLCQFNWDLTDLDTHFREQEQVLAQKDKGRDIVSVNRLLAKHKNAENNLADLGRGLDQSVNRLLAKHKNAENNLADLGRGLDQLQQQGQQLVDEQIPGSGPVPLRLAETRTYYDHLRRLADERRKELEGAVEYYQFFHDADDVEAYFFHDADDVEAYLLDTLRVVSTDDVGHDESSVNLLIKKHDGVSDELERFDRERFDRQIQQLETQADALPEEARAHPNIASRINGTQQRKSDLVEVANIASRINGTQQRKSDLVEVARLRKQRLLDALSFYKLVADLVADIESVESWIDEKGKLLKTLIPGPDLEEVEIMKHRFETLQNDMHNQKAKVDTINTMARDMQKAEHPNSDDILARQNAAEHPNSDDILARQNALNARWAQLSDMVSQKKEELNKAHRMETFRIDCQETITWIEEKTRVLEDTDEMTGDLTGAMVLEDTDEMTGDLTGAMKPRPLSMMERDLAAIQAKLHSLLHSLPTQSNAIERQKPQETAPNPQNMTRIHSLADLLNPLVREQECKLLNPLVREQECKLIYAGDLSRSLLHSHIKAKILMFRPYIVAPSIPSAISA

SEQ ID NO: 119247 - protein, 265 aa, Heterodera glycines
MTFPSSPSAVFLLLPVHLLLMLQNGEALPPPPTQFTMVGGVPVALSPAQTAAGVQFVPKNDSKYETLASLDANIFVKSGSPQPAPNDFQSKVAGSKFAPNPNPQQAKAGGSQFAPKHDPKYETLARVDPNIFAKNAPPAAPKPQQSKAPQQLVKDSKYQTLAGLDANIFVKNAPPAAAPKPQQSKAPQQLGQGKRNRSNFNQILMSVVPSFSVKDSKYQTLAGLDANIFVKNAPATPAKAAPQAPVKDSKYQTLAGLDHNIFVKK

SEQ ID NO: 119248 - protein, 234 aa, Heterodera glycines
MLNRVQEARKQAKDTTLALAAANLESNGRIQLRNRRILRGHMAKIYAMHWASDSRNLVSASQDGKLIVWDSYTTNKVHAIPLLSSWVMTCAYAPSGSFVACGGLDNICSIYSLKTREGNVRVSRELPGHTGYLSCCRFLDDNQIVTSSGDMTCALWDIETGQQVTAFTGHTGDVMSLSLSPDMRTFISGACDASAKLWDIREGMCKQTFPGHESDINAVSVRTISNENAVDWET

SEQ ID NO: 119249 - protein, 421 aa, Heterodera glycines
MTCAKRISQQSALAFNSALNIFAVPPTNVSVARSFFRELLPLSTISQEGPYLFRMYNDSLWADLSRVYLYLELSVEKANAQGIMEPIDSVVDKEVGVCQSIGQTFVQQLKVEVQNTELYDSGTLYPFKAYISNELSFPANAKSHFMASNGYYVSRTHDDANDDGFKKRCARFSGGCKAEFISRLDFDLGNQELYLLNNMDVLFTIYRSKDAFLVHSLGAGAAATSYALRVHDIKLRPPMLYDARRFKSCFLTAGRTEMDHNIFSAAIPRRLTIALVANRAFNGAYAHTPFNFRPYDIRAISVHAGGNTYPAIPHRMNFVGAAYVRPFVDMYEALGMANSERSMDITLEQFRDGWTFFVVPMTSTLDDSCGFELLRSGTTSVRLQFNREIPQGGVEMICLGEFDQLIMIDYNRHIVTDSKIA

SEQ ID NO: 119250 - protein, 300 aa, Heterodera glycines
MQMEHSAGVGSPDDESIHLAALFHTRRPQSEKAHRQQFFNGDGLLEEDELVDLQELGTLSDGDLCMGRQLVANSMALANERAENEGTKKSESVAEQQRHLISEQLQHQQRSERVPNIAAEDCLGRFVPVVKAEFLPTEAVEQFLLGMNSNGYGEEGQAMAAGAASAMSEETPQGEQSEQQPKEKKQKRASSSEESRTAARSPSSEFSAPPPPPIIISPQDVDNLSITLEKNQQCACKDCGKLFNSVWYLKQHAVKHSNDRPFKCRFCMKTYKFRSNLYQHKCPERSRLLLTGEFNMVGHP

SEQ ID NO: 119251 - protein, 310 aa, Heterodera glycines
MPSARTFVRNCASHPCRKCHTECALVLLAAAQTFAATCHQMERGMPCHIRAKELGLKCTFVTRDGVETSNRISVRFGSFFDKSHLSMNQVLRLAYFWAEHPTSTFGAIKREMNINTDHTVVDFYNFMRDLCQGWADRIQTNELLGGVGRVVEIDETKYFRAKYNRGRMLNRNHDWIFGILERNTNKVRLFPVAKRDANTLLPIISANVAPGTLIISDGWAAYGGIRNLQQQFEHRWVNHRLFFVDPQDPQVHTQGIEATWRAVKNGLRHLHGTNPEPLQSYLYQYMFRRSNNNEKIFQQILEEIRIQYPV

SEQ ID NO: 119252 - protein, 254 aa, Heterodera glycines
MIGEELTDVDKARIASDILLQSPPGEFNEVFNDARIASDILLQSPPGEFNEVFNDVRTLLQNDALLEKGVCLEAVRRYNKAQFVPVNPEPGAEHPALITEHNELPDGRFVDPKTGRVFKYDHLRKEAADAQPSGPKEIDEKLEPWRKALQKELDEYIYEHYLTGVATVFTPLQHQKAKLILCIESHQFQPKNYWNGRWRSENGRWRSEWHFPNFDGSSKTAECTGKLRLQVHYYEDGNVQLISEKEATVEVKMT

SEQ ID NO: 119253 - protein, 152 aa, Heterodera glycines
MLILYHHSFNCPAGPQGQPGPIGRTGPKGHPGAKGQPGHGGRDGNPGPPGESGAPGPAGQVGPPGLPGEKGRDTEQQIGRQGPRGPRGLQGAEGIAGESGLNAPPGLPGPAGEAGTQGVPGVQGAQGRPGEEGPTGRPGPDAEYCPCPQRSG

SEQ ID NO: 119254 - protein, 69 aa, Heterodera glycines
MSEEERSRLLTEIAMQESRVSEMRFEVKLLTKELDNARDERAITDFDVLHMENKKQGRDRYKTLRQIRS

SEQ ID NO: 119255 - protein, 64 aa, Heterodera glycines
TIRRNPDTQWITKPVQKHREQRGLTSAGRKSRGLGKGMKHTKTIGGSRKKCWKRQNTVEFHRKR

SEQ ID NO: 119256 - protein, 159 aa, Heterodera glycines
QSLPVDQHRSEFISALEKHKFVCVIGSTGCGKSTRIPAFCVNWETGTKNAVVCTMPRRIAATTVASRVRHEIGMQRTVEFGNALNVGYSVRFDSRGMKNAELFYCTDGILLNMIREDYYLGKFAVVIVDEIHERSINSDLLIALLKTFLEARTRLSSIT

SEQ ID NO: 119257 - protein, 559 aa, Heterodera glycines
APYTEFISSVFHVEKREEEVSFEKLVAKQQKESTAAEFVFNDLAQRFVLITGAGVVHVDVSKHLAYVLGFDNTRLFHGEQARYMPDLSGGVKQLYVYAPKLIEECIIVQTTLMSVIKKIDKDSVEGVEGSLSLFSLPPTNVAINKTNVRELLPLSALNQTGPYLFRLFSDSQYCDLSKTYLYLLSSIERKNGAEPEDKRVGVIQNFGSSFVRSLKINISGIEVFDSSIYYHYRDYIMKELGYSHEIRKAFHEAACYYTDEDDGQDSGTNDGFIARASRFSNGKQCETMVKLNFDLAHQNALMLNNQDVIFTIHRNNDSFLLLTPPWKKADGTLQENSKEYRIRVHDLRVYVRTVDVTPSLNLAISRQLESTSAKYPLRKIEMRSIFLGKGRTELAHNVFTSTLPRRLICCFVSTDAYSGNRRLSPFKFEHANVRSICAEANGQAFPSTPYLLSFDDAQQRFVRAFVDMYAGLGLDDSDTKTVSIGMQRFLSGWAFFVIPMTSTLDDTPGFELIRQGTCTLKVQLEKPIKEDGYEMLILGEFDSVLSINADRVLSTDGSV

SEQ ID NO: 119258 - protein, 284 aa, Heterodera glycines
IRCSSATEADAWFEAIHSCADTLLTQALAQVNLILGQSPQVLRMGWMAEQVVPNGQMWRAVFVALTVWRAVFVALTVNDLLLYESVPAVKQEWANEWANPSFTRPLIATRVVQTTARSFPVIMGVQTTARSFPVIMGLSDIISFSTRTGTQEGVRTHLFRLETHRELASWVKAIIQNAIIQNTYVACEAIQQVSAPCVWNDQQCELSIQLDRGIKLSTSDGQMLWQYPFEAIRATGDDGQQFLWMDFGEPIGEQEVDLLCSPKAVVFILHSFLATKVYQLCLYA

SEQ ID NO: 119259 - protein, 109 aa, Heterodera glycines
MDCLYAKVVPYISDCVLGELEKMGRRFKLALKIIKDNRFQRLQCTHKGIYADDCIVQRVTQHKCYIVATCDKDLRQRIRKIPGVPIMYVRDHRYTIERMPDAYGAPKLG

SEQ ID NO: 119260 - protein, 334 aa, Heterodera glycines
LKISPLFSIKALKEMGLRTVLVNPNVVTVQTTKGFADRVYFLPIIKEYVTEVIKKERPTGILCTFGGQTALNCAVIKKERPTGILCTFGGQTALNCAVDLHNTGVLSEYGVTVLGTSIETIMRTEDRELFKEFVLKIGEKEFVLKIGEKVADCRAANTIEEAEKAAEQIGYPVLVRAAYALGGLGSGFAETRDELMAIARQALAHSKQVLIDKSFQGWKEIEYEVVRDAYDNCITVCNMENVDPLGIHTGDSVVVAPSQSVVVAPSQTLNNEEYFRMRQTALKVIRGLGIIGECNIQYALNPNKMEVGFSSQSAKSNGSLSLFLLIILKIVQKK

SEQ ID NO: 119261 - protein, 171 aa, Heterodera glycines
MTISATADVDKLQDAANRMRISSIEQTCAANSGHPTSSCSAAEIVATLFFAEMRYDVKDPRSASADRFILSKGHACPILYAAWEEAGLLSRDQVLSLRKIDSDIEGHPTPRLNFIDVATGSLGQGLSCAAGMAYTGKYVDHSSYRVYCLMGDGESAEGSVWEAAGELKIHG

SEQ ID NO: 119262 - protein, 89 aa, Heterodera glycines
MAPYTQVLYFNSNIIYVCAEEKSDLSVFRIFSLDGTNEHEHIIDGKVQSVAISQNGDLYMTKQPTHGTEESAIWRQCIKWVATKDCRII

SEQ ID NO: 119263 - protein, 173 aa, Heterodera glycines
MEMSTSFLDSLPGFSVVDFNGSHEKRTCVPVSSGYHAGNGCYEFHGSICASLAGFLHVYSLRDSQDTETNIVEVRRNIDERSNVLPSQGKIVTARVELHKFVQPGDIILARVLGYGEAHTSYLLTIAEAELGVVIGRSQNGERLLPENSEIMKVPGSEYRETRKVAQLPIVNK

SEQ ID NO: 119264 - protein, 152 aa, Heterodera glycines
VIDTAGRVLEIAHLLDQLWQNKEAGLMTYNLVKEAGLMTYNLVMMSAVASSVIESAKSQVEWMSDKILRIFETGRHNPFQFKHVKFCHTLTDLNRVRSPKVVLVSGVVLVSGLDMESGFSRELFLEWCTDTKNMVIVSECGLREILWLIITF

SEQ ID NO: 119265 - protein, 314 aa, Heterodera glycines
MPRILAKVEGKGNGIKTVIANMPEIAKALSRPPTYPTKYFGCELGAQTNFDLKNERYIVNGEHDANKLQDILDGFIRKFVLCPSCDNPETVLTVKRQVINGKCKACGHAFIVDPKQKLSTFILKNPPPPDNIESEKEVKSDGGLPAEESNDVPVVDNSGGCDAGSNGEDDEDWAPEPVEDEEKLSGQIGKLVIDKDLDKSVDERLDLLHQFFLKAVKNNTIQPSKKFADKEVVKEMIKVAQPVLKWLKEAEEGSDESEDDDLDVAFDDRSRNIGMTVEVEKGAKDGVTRVQNGQIATNGKMDDGNADDIDIDNI

SEQ ID NO: 119266 - protein, 258 aa, Heterodera glycines
MDNETSLMDQQQKRYDRQIRLWGDDGQLSIQQARVCVFGSNSLAAETLKSLVLAGIGSFHIIDKALVDHADFGQNFFVEEGSLGSSRAECLVKALKELNHSVHGQHHPISFGEFKRQDFQMLLQFSLVIGTSLTANEARQLDQFLFEHAIPFVYANVCGMMGHLRLSFREHYIFENHAENAAYDLRQTKANDKALFPDITSFKTRKEFEQILMKMRQPDDKGSLDEQNFTEAKQNLLKGMRKSNVRINESYGNYRNMS

SEQ ID NO: 119267 - protein, 142 aa, Heterodera glycines
MRKLFSDAEEEWRRCGPNSGLHIIIFDEIDAICKQRGSMAGSSTGVHDTVVNQLLTKMDGVEQLNNILVIGMTNRKDMIDEALLRPGRMEVQLEISLPDEYGRVQILKIHTARMREYNKLDTGVNVEDIAKRTKNFSGAELE

SEQ ID NO: 119268 - protein, 147 aa, Heterodera glycines
LDLIRKNVPKAVLETSGLISQSTSHAKDLAARVQFALERVLPEGFKSYREELESELLVNCRGVLEFLDSTLIPNATTNLEAKVFYLKMKGDYSRYISEIALGEDRTTAIEEAKQSYNQAAEHAAQLTPSDPTRLAVALNMSVFYHSS

SEQ ID NO: 119269 - protein, 93 aa, Heterodera glycines
MASCKAIGIDLGTTYSCVGVYQHGKVEIIANDQGNKTTPSVVAFTDTERLIGDPAKDQMARNPTNTIFEAKRLIGRPWDDPMVQRDIRQWPFK

SEQ ID NO: 119270 - protein, 88 aa, Heterodera glycines
MAKGVKFDHDNAFVRFCRYYLWHYCWSGRQYGLQFYDQAFEPHPVVQEALRRLRLKDPYQTLCCERLGAEEKHIAFVGTVAGEKLIDE

SEQ ID NO: 119271 - protein, 242 aa, Heterodera glycines
QSAWRSFAETAMTNGNIELAVRIFVRIFRHLGDVAMVWALEQLLNIEDQQTLSGHVAALLGNFDEADDFFSNSSQPKLALEMRRDVQHWERALELARQTAPDELPGIAKEYAVQLEFAGQHAEAFRYYEEALITSSSGNASKMSEEQREEHNWVCSAGLARMALHMGDLKRGGVEIALKLPSRLAKRDCGIVLEQLRQFDEAGSVYEAGQFYDRAAVEQLRQFDEAGSVYEAGQFYDRAAVL

SEQ ID NO: 119272 - protein, 75 aa, Heterodera glycines
PPPPMGGGGSKSIRLWDIECGNCLRVLEGHEELVRCIRFDSKRIVSGAYDGKIMIWDLAAALDPMTPPNSICIKT

SEQ ID NO: 119273 - protein, 124 aa, Heterodera glycines
MATYNPNYESIGQAFVQHFYTKFDVPDGPTRTVGLHDLYDAEHSFMTFEGNQVKGRQAILDKYGALPFRTIQHGITKVFSKLVFCLSFFSTDSQPLPDGSILVTVIGQLKVSFTVVYLFNCSLL

SEQ ID NO: 119274 - protein, 210 aa, Heterodera glycines
VGTTNGRVFLDASLDYVLGEGLDHGLPDGVDKALKRMDRGEKSRVTLKGFGYGKCPPAELGLGIYEEIVFMLHLKDYEKVKATWELTDEEKLDRVKAYKDRGTDFLHQGKFALALAKYDTVIYMMEFAKNQSATGRSNLMVLSQLNSALAHLRMGDPIETIKHCEKVLERQPNNVKAIYRKAQVCRSYIFEGGRPPPPPPSLAKGASEGG

SEQ ID NO: 119275 - protein, 346 aa, Heterodera glycines
IGNEQISLKGRLKNHTFDSGEKIAAKIRECAGLEVLEMRGNTLGVGATAPIAEALECQSNLKRALWSDMFTGRLKEEIPRTLRALWSDMFTGRLKEEIPRTLKTLCDAMILSGARLKTLCDAMILSGARLTELDLSDNAIGPMAVPGIKEFLAGEAAFALKTLKLNNCGLGIAGKVTIAHCLIECHRRSVSHGTPLTIAHCLIECHRRSVSHGTPLCLKIFVAGRNRLEYTSTAALAEAFQIIGTLEEISIIGTLEEISMPQNGISAEGILKLSESVRQNASLKILNLGDNTFGESGASAMASALEKLARLEIVDFSDCLCRDRGSVLIARSMAASKSPLTELNLS

SEQ ID NO: 119276 - protein, 452 aa, Heterodera glycines
MRNSVRDGKTVSNEVISLTVKGPSLPRMVLVDLPGVISTVTTDMARETKEDIAKMCKQHMENPNAIILCIQGIAANLSHSFPFLSDGSVDAERSNVTDLVTNVDPDGQRTILVLTKVDLAEKNLSNPHRIKKILDGKLFPMKALGYFGVVTGMDKRDASIAEIRKYEEDFFESSKLFRDGVLKATQMTTRNMSLAARGEVLDEVVNLSLVSADEWEVLLRAHLWNAICPQVFDQILMPASTVESTSSFNTVVDIKLKHWAEKELANRSVQVGWETLSQIFRRQVSGEERGGQTLKSNRTHGSQKSPDGGNLLKALKAAVVSAVLEQHRWDSKALDYLVIGHRLSLQIILVGVQRVIQLNAVADQVVPDRRAWDQSCAFLANAASDRIRELKKTLEESRGPSGWSRWFGWGSPTPEQLVNQTVQDELRALLVNNPVASLNPSPKLIVNESVTK

SEQ ID NO: 119277 - protein, 184 aa, Heterodera glycines
KKAYYRQSILWHPDRFASAQHDETTRELAKQKFQVIGRAYVILGDSEKRKAYDETGSQEEIDEVKEAYQKHKGNMDKIMQSVVGAEHPDEDRIREIVRHGIERGELRAYARFVNEPASARTRRAARAQREEVEAQQALEELRQREDVSKGTDGDDSLGALIRAKQRKRAEKNGSVCCFRTLERF

SEQ ID NO: 119278 - protein, 160 aa, Heterodera glycines
MERYDRAITIFSPDGRLFQVDYAQEAVKKGSTAKSIPTLQDERTIRKIHALDSRYTQTTGRRPFGISMLVGGFDSDGTPHLFKTEPSGVYYELLAGSIGRNEKIVKEYLEKEYGNDNTADEESTLKLMLKSLAPVVQSGAQNIEIAVNTKIHVNLLAIHF

SEQ ID NO: 119279 - protein, 316 aa, Heterodera glycines
KKWIRFCPKLSASATVVAHSKDINSVDISANDRLCVTASMDKTAKLWHIDRKTGQLSAGGTLGGHIRNIAVLEFSYVFLVATCSGDIAVLEFSYVFLVATCSGDLTIKLFSLLDKTCTRTLEGHQFAVLSILFIDNGSKLVSVILFIDNGSKLVSVDGGGLIKLWDVKKGICVRTEEAHSDKIWSLRELPPAEEFMTGATDGQFAIWTDISEEVKAEKRAEQTKRTEDEQRLSNLLDQDRLGDALLLTLDLGQPFQCVFLAMDGPQSEESDAKLLALFRRLSAAQLSILLDYAAQWNTNTRTYAVAQLVLNCVLKC

SEQ ID NO: 119280 - protein, 274 aa, Heterodera glycines
MTKEESEDPPAFRESKRKQHEEKRRKEEEIVAESALKEFEPVRLEVEQALLKRFKRSPYAKMIANGLVDDTVPELSQASDMLQEEVIDTVYQLAEEHQQQPGAISNSGHYALYGPSLASLGISKDQNQQRTQQHQQISSFPSSDSPAICPPTVGNQSNDTIISNEDLDLTGIDDNEINSYILTDVETTIKEKYWMKQNSKHLEVMEERKRQRQEEQEQRQNKESGPKRRKRAPNVRKREVNAVTHNDAMLHVIQERNLSSKINYDILKQLDDES

SEQ ID NO: 119281 - protein, 94 aa, Heterodera glycines
GINPGRKRIGYAFKSTNRKRINMNPPNGVLGPKESVNVAVSCDAFDPGSEDTKGDRVTVEWTNTPDPAATAFKLEWFQGDGMVRRKNLPIEYNV

SEQ ID NO: 119282 - protein, 227 aa, Heterodera glycines
MLPNSSSMLLFHNLRKQSVNALPLGRQAVHNDVQFPNFDAYRNELTKDPAQPSHVTEDRRKGVSSFIFYGVGGAITLMTAKFAVRKAVTYKWMPRDQAAMAATEIDLSLVPLGKTKTFEWRGKPVFVKHRTAKEIERERAVEVGKLRHPERDEDRVLKPEWSVLIGVCTHLGCIPLSGKGEFGGYFCPCHGSHYDASGRIRKGPAPLNLEVPKYEFLSDTLIKVGSD

SEQ ID NO: 119283 - protein, 328 aa, Heterodera glycines
VTVSDLFQPQILAAIQQYYIQQHTQQNIQRENVSSILRAIFFTIFHFQAAAVGALLQAVTTKSAGAASSSGNATPIPFLPPASSTTSAAAAASTAFLSNLMAAAVAKREEEEGQQTVEGEGDGDELSDRLIVVDGDEACEPAAKRDPKARKDRCTFCQKVFTNRSNLIVHLRSHTGEKPYKCQLCPYACAQSSKCQLCPYACAQSSKLTRHMRTHGQQGKEVYNCNICQMPFSVHSTLEKHVRKSIERERRERKNIGERGEIVEEEDGAEGDCDRTAPLATASATAGAPLPANIAQSNRLVLNWLQVVNHMIGSGSIISKIGRHERSK

SEQ ID NO: 119284 - protein, 218 aa, Heterodera glycines
MANTNYGIRIDEHHWVPVVRQPPYKAEMRDFVPDEPEQQIKGHGTGPLEDVARRQTTGVIMPSPDGSHRPRTEFDGARKPPAGGFVPHAPNVVRRARTRAPHADEAAMIHYETDTVTPRRRRHAAASDSARVRHASAAPSTARGAVMQRRHDVHSEDDDYDHDHYQRLQQQQHPPADDWDAAPEMPRRHPRRQHTSTIVTLGPLPCADVRRKIRAIEG

SEQ ID NO: 119285 - protein, 168 aa, Heterodera glycines
ALSDQSAPGRVLFSGNFFLNNAVAGAIELPTLIFCVYLMKYGRKRSQIFTLVAAAIFILCAMASMSANRSMLSLGLMLLGKIFIQGGFNILYIFTSELYPTVIRNRYARPVPMIARFGSGVSSYIAILSDVTLSIVPMIIFATFSLFAGTLVMLLPETRDQPLPDTLQ

SEQ ID NO: 119286 - protein, 263 aa, Heterodera glycines
VQRFGDYHKEDPASLKLTDKFSLFPQFMFHLRRSQFLQVFNNSPDETVYYRHILMGENVFESTTMIQPQLFSYSFNGPPEPVLLDSSSILPDRILLMDDFFHVLIYHGQTIAAWRKANYQNDPQYASFKQLLDAPVQDATAIIQDRFPVPRYIVTEYEGSQARFLLSKVNPVVDTQQPVFSGGRCPRVHGRRFHASVHGTPAKVGSFRFVMSVALTVEVMLDVLKFMDYYQNCKMELTSIGFRSVIDRYRNELALCQFFQIQL

SEQ ID NO: 119287 - protein, 65 aa, Heterodera glycines
LQFYDQAFEPHPEVQEALRRRRLRLKDPYQYDLRLQRILLASQLGSKNERLPKNMWTKWDDETFT

SEQ ID NO: 119288 - protein, 432 aa, Heterodera glycines
MALAHYGFLAPKRRIEPAGISYEFSLIKDRLILGLSTLPVLQIVFQNSRTTDGDDIDGAADSVDWLDRDDSKFRKYISRLDPNEWKKQDHYKVLGLSKLRYQATAAQLKTAYRRKVLKYHPDKGKATETEDKLLRNEAVFACIQKAYEQLGLSEERRRAFDSVDPQFDDSMPDSVDTANFFELLGPVKQQRKKAMAAQRRQLRTMASNANYWMENGTALDNRRMASIAEQIERICLSAEFDELTALCEGLAIVQTFDEAQKLLVECAIKKDFADGKAGGEGPSTNAQNKAPVASKIWSMNELQLLIKAVNLFPPGTNERWKVKLLKSNPSSNLAPPPTVVTKNAETNASATLTAPSAASDDQEWSAEQQKQLERALKATISVDAKERWDKIATMVDGKDKKECIRRYKMVAQLVKKAKMDGGGGQQQQQQQK

SEQ ID NO: 119289 - protein, 1078 aa, Heterodera glycines
MDGHPVDGRVSAYHHVSSNIGTPSGPKDTITTKLTSIFKKTTAHEDEYPPKTEPFLGPVAQTDRQRELEAVPVVDRIERIPKGFYEEGELHPVVVHEEKELTPSEAEKRPGTLERITHLFKRTATEGEWPMVTEPFTGPHAETSRKGELEARPLGELVAAYASGRSDEVGPMQTIETQAATTTAREHYPATVSYEGPLSATTRKWELEGAPLNSHVTVYHHGRSDLAAAEQQQPVAEKVTTKISSLFKRKPHHEDFPVSEPFTGQLEETARVSELFHEPIDARVSVYSAGRSDEHVVVQPTTIAEAEPVPLVEYPRTTAYDGPLQSTSKGAEMEGQPLDAHVSAYHHGRSDMAPPAAPKETITTKLTSIFKKTTAHEDEYPPKTEPFLGPVAQTDRQRELEAVPVVDRIERIPKGFYEEGELHPVVVHEEKELTPSEAEKRPGTLERITHLFKRTATEGEWPMVTEPFTGPHAETSRKGELEARPLGELVAAYASGRSDEVGPMQTIETQAATTTAREHYPATVSYEGPLSATTRKWELEGAPLNSHVTVYHHGRSDLAAPEQQQPVAEKVTTKISSLFKRKPHHEDFPVSEPFTGQLDETARVSELFHEPIDARVSVYSAGRSDEHVVVQPTTIAEAEPVPLVEYPRTTAYDGPLQSTSKGAEMEGQPLDAHVSAYHHGRSDMAPPAAPKETITTKLTSIFKKTTAHEDEYPPKTEPFLGPVAQTDRQRELEAVPVVDRIERIPKGFYEEGELHPVVVHEEKELTPSEAEKRPGTLERITHLFKRTATEGEWPMVTEPFTGPHAETSRKGELEARPLGELVAAYASGRSDEVGPMQTIETQAATTTAREHYPATVSYEGPLSATTRKWELEGAPLNSHVTVYHHGRSDLAAPEQQQPVAEKVTTKISSLFKRKPHHEDFPVSEPFTGQLDETARVTELFHEPIDASVSVYSAGRSDEHVVVQPTTIAEAEPVPLVEYPRTTAYDGPLQSTSKGAEMEGQPLDAHVSAYHHGRSDMAPPAAPKETITTKLTSIFKKTTAHEDEYPPKTQPFLGPVAQTNRQRELETVPVVDRIERIPK

SEQ ID NO: 119290 - protein, 51 aa, Heterodera glycines
LVVVGDGGVGKSALTIQLIQGQFIEEYDPTIEDSYRKQEEYSAMRDQYMRT

SEQ ID NO: 119291 - protein, 118 aa, Heterodera glycines
MSDIWLSEQLDLRMVLFRCLPTGSKKGLVFKLIFKALENFRRSCAGWCVATYVLGIGDRHNDNILVTTNGHVFHIDFGKYMGDWQMAAGFKRCAIIVIKIHSLKFKNSKMELIYSIGL

SEQ ID NO: 119292 - protein, 110 aa, Heterodera glycines
MLFTQMIMDSLQSKFPRLNFLAHTLAQFRGNPLGGRSEDMNRLSFISELYNEKNEGRLESVHVNSYEKWKNPEKIYRLFALSDEVAHSELVYTFMHSIYRDTEPEAHKQS

SEQ ID NO: 119293 - protein, 433 aa, Heterodera glycines
QNPGPGTGTSDDREFPARSRGTLVLSYNFSKQSSRIPYLALAKTLERIEATSSRLENIRILSGFFGAAIRLSPSDLSPAVHLCLNKLGPSYEGLELGIAEAYLIKALAGATGRTVNMIKKDLKVKGDLGIVAQQSRSTQRMLAKPPPLTVPLVFNRLREIAKMAGISSMDKKVKAIQALLVPCIECEARFLVRCLQAKLRIGLAEQSLIVALANAFTKTELREKSDLLSQMKCTNDEKLKDRMAEDAQTLKTVYSTNDEKLKDRMAEDAQTLKTVYSECPNFDRIIEVALRSGISSLADECRLTPGIPLKPMLAHPTKGIQELLDRFGTAEFACEWKYDGERCQIHLLSDGTFKIFSRNQEIHLLSDGTFKIFSRNQEDHTGKFPDVARRLDALKRGEVTDFIADGEVVAWDPKQKQILPVVAWDPKQKQILP

SEQ ID NO: 119294 - protein, 80 aa, Heterodera glycines
MRPPVDEDYRPIRVLGQGAYGEVWLVTSKENEREQIADFGLSRNYGLHATFTTEVVTLWYRSPELLLQCKYGTAVDLWSA

SEQ ID NO: 119295 - protein, 339 aa, Heterodera glycines
QLLLMIHQMNGIQHEKRVKKLLQKARESSPTLPTFESRSGSFHVRSGSFHVDEYGFRHSFAEIPLAVHFIATQLNQHYQSKSTGHAQLKANWRVLLREQPNALSDRSREIRLLCREIRLLCRRGIPRALRPRVWRLLINQQVADLKEKHGQYYYKNLCSSQGTAAEKHYSSAHQKQVNLDLLYSSAHQKQVNLDLLRTMPSNVHFMSASCKGVTHLQSVLRAFCLHNPSIGYCQGMNFLVATALLFMGPEDAFWFLVAVTEFLVAVTERYFDSSYFDQTLTGAQADQEVLKEIEVLKEIVEQKFPRLAQHLDECEIDLTTVTLNWFIALTVTLNWFIAL

SEQ ID NO: 119296 - protein, 341 aa, Heterodera glycines
MEELVALSPGIRVGRWTITKKLGAGAFGAVYLCVNDQGEQAALKTEPVNTPHPLLVMEAHVMTKLDALRDGDGKHFCRCLDLGRDEQRDQQSGQMKKFNYIVMSLVGRGLDGVVKDAGGRLSLGSAVGVSIQMLAALRGLHTVGYLHRDIKPGNSTIGRPESNEIRLLYLIDFGMARKYTRDDGSQHRPRAVTNFRGSPRYAAISAHLGREYSRKDDIESWFYCMIELLKGALPWANVGEMKAIGEAKIKRQKKQPEAVRRQAIADLLSGCPNEFGQVLKYIDDMKYTDKPDYDWIIATLRSSLSNAGVQEFPYDWETGKRNAAPGAGGGGGGGGGDSYFN

SEQ ID NO: 119297 - protein, 337 aa, Heterodera glycines
LRVNLPVTRFFCGLKVTRSFCVLANSAEGLLREKCELCDPSVAQLAHPAALLTDLNNANNLTCWVSEPTTAFPHNVSLTLSLGKKFEITYVSLHFCGRLADSLAIFKSANEITYVSLHFCGRLADSLAIFKSANRGRTWTPMQFYSTECEKVYQRTKEVPISKENEQVARCTDSHILSPLSDRIAFATLEGRPSAMEFEQSPVLQDWVTATDIRVVFNRLSMDQAILNQDWVTATDIRVVFNRLSMDQAILNRIRRDNGSVLELPDDRVRERYFYAMAELAVGGRCKCNGHASRCVIDRMGRYSCDCKHATTGLDCEKCRPFHFDRPWARATADDAC

SEQ ID NO: 119298 - protein, 307 aa, Heterodera glycines
TSCEILYERMKKLGSDVPELIILPVYGALPSEMQTRIFEPAPPGTRKVVIATNIAEVVIATNIAETSLTIDGIYYVVDPGFVKQKIYNPKSGMDSLVVTPISQAQAAQRAGRAGRTGPGKCYRLYTERAYRDEMLPTPVPEIQDEMLPTPVPEIQRTNLASTLLQLKAMGINNLLEFDFMDAPPAEAMITALYQLYQLSALDEDGLLTRLGRRMAEFPLMAEFPLEPSLAKMLIMSVELGCADDILTIVSMLSVQNVFYRPKEKQELADEKKSKFHQPEGDHCTLLAVYNAWKHHHYSPQWCQEHFV

SEQ ID NO: 119299 - protein, 376 aa, Heterodera glycines
MVRTSRKIPTDWIKYQPLWIKYQPLGASIEGSRIFAFKTPLLPELQTSIPKECRFSTLTLLQQLAFSNRSLGLAFSNRSLGLVINCNNTKRYFCRRDIEGLGICYKEIPCPGRGFLYRTDAVKTFIKTIDDFLELNSDNDLLLLIAVCCSNGINRSGYLICNYLINRLGWSSHDALNAFESARGYSIERGSYVQALHKVDRERRSKTYWFSANNSIDNMLQFFLQEFKQVAETAAHSSANSSPALVASTAPQQQNTALPSQKSGAANSTISARQSLKITAKKREKTLNQSVSSSSAILNQPDIGVEQAEIGDTECVSDEEYDEDNSSSPNTAITKSQMRRQRRQKREKMFAVMKRGHFWEINEMRKEMQELHICTT

SEQ ID NO: 119300 - protein, 175 aa, Heterodera glycines
MRTPAKSIDEIVTNQIARTGPPGCGKTTSVWALARDMLGEKVRDACLELNASDERGIDVVRDRIKRFASTKVTLPENTHKIVILDEADSMTEGAQQALRRIMEALNNLQCTAAGYGTITKDYVYRVCDEPHPEKMCNIFDCCINGRTQEAFDLIDELCCLGYSVDDLVGVMFKTA

SEQ ID NO: 119301 - protein, 58 aa, Heterodera glycines
MWGWTLWSVELPISEATIRNGRMELVCKATDRSYNTQPETGIALWNVRGLLHNAWHRV

SEQ ID NO: 119302 - protein, 81 aa, Heterodera glycines
KFIEFTFLFGFVRQQEMAKRTKKVGIVGKYGTRYGASLRKTVKKMEVSQHAKYTCAFCGKVCIPHIMLQFASDKKTDTIKH

SEQ ID NO: 119303 - protein, 311 aa, Heterodera glycines
MSLLQTQQVNSTAVTTTTTANANCPTWTAATTTMSTVANISGTTMAIAAKPGALKSGLLGIGGASVRGQLTSGSTMVFSGAKTVPTATNAVQQHNQKILANGTISSATTKFAAVVPQRVGSVVAPLTPPIEAKEPQREYTTSTSSITCTTFTTTTEMSASSLDKFADTVNRVAAGTEISPPHPSMQQQIVVAYSSAATATTLASSTAILTTTTTASSTAAAIQPPIATMAKGQPPQLGTERGQQMLKPKAPKKKKAPAAPKAKNGATNGIDEGAEQRNTTTISVVDMQQQQQLQQASKGNCSARATRKLLG

SEQ ID NO: 119304 - protein, 196 aa, Heterodera glycines
MAYNFMKRNSDDSDNLGLTYVWKSAKIILKMKFLIRILARQCITLAKALAKIVKDSPFCSNVGFLMAGKWAGTITTGQLQPNTECYWRIIPHKHEQRIKITITKLEFPCSDACSSYLEVKAKKKKISTGARLCCGTPTTIFSDVDTDVILILKVSNNLNGTFHGANFEYKSVKASITVPQTIQVMYKFNFENLLFF

SEQ ID NO: 119305 - protein, 246 aa, Heterodera glycines
VLLFEYQTKEAANAVLPIRDGHRLDKNHTFSAYPFTAIRSMKEPEKDWKKPERQPYVDLGDPWSWLQNPKCLDQFGLLYESGQGGTLRLDVFWNVRNGEPTPVDNASRENWSNDLFKWSPHGTYLATMNNDKRNQRLGAVIWGGEKFDRFQRFSHEGVNYLDFSPNEKFLVTYACDQNSTRDNENCLRIFEVFTGELKKAFSPSLRSAGRLHDWPFLKWSHDEKFFAFCRLRGNCVNNCSTDDFML

SEQ ID NO: 119306 - protein, 1246 aa, Heterodera glycines
MEDFYIVLPSNTPGPGNTASNFTVRLPHTLELDSKWSVALSAIIYPYSFPSISVDEDDSISVKLVNPNYREDAGNSDEESQKFINLSVKIPNVQFQSVQSLQKTLNQIIQNAYDTKFGGSSSLNDGTTNKRAKRQTELSETGAGVIEVENFFTRNPFDYWQQIGELRKKHYQLRERVEKMAKEYNSTADGERKTFLSTELGVFQGRETFLKEHLHLIEEEAKRRDGEQQEANEQRLIDRFFARYPDNYREQLDEWRSSYLRDVLDLQTKMGEYEGVKDLKRLEELNSQTERMRNSIHVFGRKMEILNNAALQRDQKRSQEEFERTSHEQNLTFVQEFFQANPVNYWQAIQKNYEALQLEYTKKRELREKLEFETDATERESLQRQIESIQRLIDYRRKRFAALEYEAKKRDAQTGKTNSGLSAVAEGSNSTSSTPIDSFSPADEPANPDEENATNSKNNHQQNITTTATATLSSETPAEQILADQDNSIDEKDEAGTPPSSGLGQSGDASATSVTQVEDGRNLPQAAALTSNNPKIVAKQSTVATERRKEKIIEKLIDEQVDRMVDGTHAQQKMLQEEGKDNESQHRISTYKLIEEVLHGEHGQLMSQQRESKMAAEFAYNEITQRFGIRMGPGVMHVDLSKQLSYVLGFDRKTRIYNNQSAKYPPDLSGGVRQLYVYAPKLVEDSIIGDRMAPLLRVVNVSGTPGLDMPERGGGLLQNISRFLMPVATNLLKSASKEGISAGTRMLDDLAQGKAFKESLKTQAKQGFENLAEKLNQCGKEKHTNQKTQWKMSVIKKIDKDSVEGLEGSLSLFSLPPTNVAINKTNVRELLPLSALNQTGPYLFRLFSDSQFCDLSKTYMYLLSSIERKNDAGEWVALSDTDPNDKHVGVIQNFASSFVRSLKVNISGIEVFDSSIYYHYRDYIMKELGYSQEIRKAFHEASCYYADDDDQNSATNPGFTARAARFSGGKQCETMVKLNFDLARQSALMLNNQDVIFTIHRNNDSFLLLTPPYKKPDGTQQENKKEYRIRVHDMRLYVRTVDVTPSLNLAISRQLESTSAKYPLRKIEMRSIFLGTGRTELAHNVFTSTLPRRLICTFVSTDAYSGNRKMSPYKFEHANVRSISVEANGQTFPSTPYLLSFDGVQPRFVRAFVDMYAGLGLDDSDTKTVSIGMQRFLNGWAFFVIPLTSTLEDTPGFELIRQGTCTIKVQFEQPIKTDGYEMLVLGEFDSVLSINADRVLSTDGSV

SEQ ID NO: 119307 - protein, 106 aa, Heterodera glycines
MGHSFGAASSLSACAEYPSLFNACVLLDAWLYPVERRMYPATVQPVLMLNASKWQWPRNVRRMQRLLAKATTSTNDDKTATETTTTTAPQQQSQDGAATTAALPQP

SEQ ID NO: 119308 - protein, 436 aa, Heterodera glycines
MAFHKIDNDSVNSITNALDFFRIPPTNVSVSSSKVFELLPSNPLTDTPYHFKLHSSQNYIDLSKCYLLTEFRIRKENANGQLINLDIDDINIAPIQMIGQTFIRNIKMSINGREIFNANALMAYKSYFSHELSYSTTAKDSHLNAAGYYRDTGDTLEMGGGCTARRNLFAGSNVAQFIVKIDTDLFNQPLYLINFCELDIEILPNDNDFVLIAPTGGRYRFEVVGLKMYVKKVSLMDGLALDIARKLELKPARYAVRKTMMKSMFISQGRYEFTANLFMDQIPRRVTMGLVANTDYAGTILRSPFNFQPFNVREISISANGRPYPQAPYDLDYRNGKYVRPFNDMNEAVGFANSTESNGITFAQYGKTHCIYVFNLTNSGDDQAALFDLIKNGTTAVSIKFNQPVPVGGIMLVVMGECDSLVMLDKNRSISTDTTI

SEQ ID NO: 119309 - protein, 1051 aa, Heterodera glycines
MRPNFHQKPEAALQRAYEFLSVGKQKDALQALHDLIKDRRHKQWTQTYEQIMMLDRRHKQWTQTYEQIMMLYIELCVILRNSPLAKDGLYQYKIITQQVSVKSLESVLEKFLQLAEQKAVEAQKHSIEKIEEIDDLDVADVPEKCLLLSVSGAVAQDRMDRTVLSPWLRFLWDAYRNCLDLLRNNVYVENLYHQIARQSFAFCTKYQRRNEFRKLCEMLRQHLVQIQKAQQSTALHPLRIRLSNTESLGHMLETRLIQLDTAIPLRIRLSNTESLGHMLETRLIQLDTAINMDLWQEAFKSAEDLHSFMQLGKEKDKKIIRPTSYANYYEKISLVFWKGGNILFHAASLLQISLVFWKGGNILFHAASLLQRFCIFKDMRRQFGGEEAMDQATRVLLATLSIPEGAESASMLTKHLDIEEQHSANIRILSSLLRLPITPSRSGILKEIVRLNIPELASPAAYALYKCVEMELNPLRTAVNVQMHLSDIEKLGHLEYNQYAEPVKDVVTARVFKQLSALYETLSLTRLLSALYETLSLTRLHKLIPFYEVIELEHRLVNVCKQQSLKARVDHRTKCVRFGHIENGFANDLDEVDTNTSEVGKSFFLGFEGRSHLEEMYKELSGKSFFLGFEGRSHLEEMYKELSQFNTKERSIMQEKVHSKRLENKIFIYQNQKDADFERILARRKRIELYKETNEQVKREKLQKEQAQANKQEEQRRREELKKLQEENKENERRRKLNEQEEIQRKLQSEKLKKYQAHPEEIQRKLQSEKLKKYQAHPFFQQLVKEHGEAIFDKVDPDKLIREKRIRFDAERREQQTKLQNLRIRFDAERREQQTKLQNLEKKYDHTVRAFHLEEMALWKHLSDERQRIYPGLHEAYETKRIEKAVKERELSFEKYAYLKERELSFEKYAYLVSAKEGAKEFMRSVIQSHAEEFKEQQAAWKQRVEEARNKTLKDRAERRKEQRKKEAREAEQQQEHRRRRKRRRSKDRRNSHKSRGKSSSSKRHRHSNSPRRQEDEQQQQAAQSQQQPQKEPTPAKGPKFGPAFYQLSAF

SEQ ID NO: 119310 - protein, 420 aa, Heterodera glycines
MFFRKVVPYKIVKASNGDAWLEAQGKLYSPSQIGAFVLMKMKETAESFLGTSVANSVVTVPAYFNDSQRQATKDAGKIAGLHVLRVINEPTAAALAYGLDKAEDKVIAVYDLGGGTFDISILEIQKGVFEVKSTNGDTFLGGEDFDNVLVHHLVAEFKREQGIDLTKDPMAMQRVREAAEKAKCELSSTTQTDINLPYVTVDSSGPKHMNVKLSRAKFEQLTADLIKRTIEPCKKAMHDAEVKPSDIKEILLVGGMTRMPKVQQTVQEVFGKQPSKAVNPDEAVAIGAAIQGGVLAGHVTDLLLLDVTPLSLGIETLGGVFTKLITRNTTIPTKKSQVFSTAADGQTQVEIKVFQGERDMALDNKMLGQFSLVGIPPAPRGVPQIEVAFDIDANGIVNVSARDRGTGKEQQSLTLRYEEL

SEQ ID NO: 119311 - protein, 333 aa, Heterodera glycines
MYLTGMVDKRTLEKYEKEAKEKGRESWYLSWALDTNEEEREKGKTVEVGRAFFETDQKHFTILDAPGHRSFVPNMIAGAAQADLAVLVISARKGEFETGFDRGGQTREHVMLAKTTGVKHMIILVNKMDDPTVNWDVGRYSQIQEELTPFLRKCGFNPKNDIMFMPCSGLTGAFLKERPSSDLCPWYTGMCFLEYIDSLPLIARDFNGPDMGTVVSGKLESGSISKGQTLTLMPNRVSVQVLNSFVNDVETELVYAGDSFQLKIKGVEDTEIMSGFVLCTSDSPCPIGRIFDAEVLILDYKSIITSGFGCVLHIHEAVEEVTVKVTDQFVWPL

SEQ ID NO: 119312 - protein, 183 aa, Heterodera glycines
MSKTSKKNFVTKQLVKEIVIPADNEFVGKILASRGNNLHEVETDEGENFLVSMPTRFRKKLWVRRGTYVISMPTRFRKKLWVRRGTYVILQSIEEGDKVRAEIVHVLDPENIAFLMEKEVWPERFIVEAAQLTKRGQRTEENDDSDPENSAEESSSLVSEDVALNGQTNAKDETTIKKFNFVA

SEQ ID NO: 119313 - protein, 197 aa, Heterodera glycines
MSTESTTRPLIATSTSHNVRKELETEENRGKKTKLRKKYSDKFNLFAFLFKNVRNFWVQVFIQKDWRADADAVKRRYRDKFLKFLALLLIEISHQKLPIKPGAAEIYHHGPIACGVAATPRFDNYSGGIYKERTNEVVGWGKDAASGVPYWIGRNSWGTAWGEQGWFRVVTSEYRDAGNKYNLKIEEDCTWGEPIII

SEQ ID NO: 119314 - protein, 361 aa, Heterodera glycines
QEKLDKKNLVNQQISVVLKRNKLKDFVVHSQFLGVSHLIILSRTELSTHLRIIRNPQGPTLHFRVEKYSLARDVLSVQKRPVIYEELFQHAPLVVMNGFSSEDGSKKHLQLVQTVVQNMFPSIDVDRVKLASIRRTLLLNYDTEDGLMIDVDRVKLASIRRTLLLNYDTEDGLMEFRQYSIKSVPAGVSRSAKKLMQSKSIKSVPAGVSRSAKKLMQSKVPDLSKYKDISDFMLKPEQLSDSEFEGEPEQLSDSEFEGEQTELELTQDIGGRGKKRGQQTKLRLMEIGPRMTLRLMKIEEGVNLMEIGPRMTLRLMKIEEGVNAGTALYRVEHSRFATVNFRLFWHTASGSEKSDQSFEKS

SEQ ID NO: 119315 - protein, 216 aa, Heterodera glycines
WKGCERGDAPSPAIYMLVQHFRGHTGEKPYKCEWASCEKRYARLENLKTHQRTHTGERPFQCTICGRSFTNISDKMKHEKRVHHEKRVHKKKKQYSCVVLGCANAYTDPSSLRKHTLRSHGTNPWMEYKARRSKVPPNRRRRKRKRSTEANGRISERETVQRELKGQEKGKRKCKRKECKRKRLRQSNPSEKPTFDFFLVDPVSGPSPLFPASLST

SEQ ID NO: 119316 - protein, 115 aa, Heterodera glycines
MAPYVKTIAISEILSRTPELIFLNIVTLENESYCVELTQRGWRLEMHVTYYDAIEQLLDSLSEQYRENFGAALSSKLAALQTEQKQRQQDGESEGNGGGAAERSDAGQRTDDEPN

SEQ ID NO: 119317 - protein, 270 aa, Heterodera glycines
RAIGRCAIKVEHSAERCVNTLLELIQTKVNYVVQEAVVVIKDIFRKYPDIFRKYPNRYEGIISTLCENLDTLDEPEARASMIWIIGEYAERIDNADEIIGEYAERIDNADELLESFVEGFHDENTQVQLQLLTAVVKLFLKRPTDTQQLVQRVLTLTAVVKLFLKRPTDTQQLVQRVLTLATQDSDNDSDNPDLRDRGYIYWRLLSADPQAAKEVVLAEKPLISEETDLLEPSLLNQLVCHIGSLVCHIGSLASVYHKPPSSFVDSTIIL

SEQ ID NO: 119318 - protein, 223 aa, Heterodera glycines
LYTLDVFVPCSSAVCHISPSTDYSNGTSKFNALIEKGVDVVPDLRELIFRAVGSTNDEKIIAALKNLMETSGYAQVELSCVLGLGQCSDLKMLEDIFNYGVIQGKIRDQDLYLLFAATEMAPMACCGHFAWDFFKNNFALLIEKYGSVNSNVFLHCFDCVTSGFCSNAMAEDIMEFFKKELDEHSLKTLERPLRQAVESIKVKESLLKNNVPDLDKYLQNVGY

SEQ ID NO: 119319 - protein, 122 aa, Heterodera glycines
KNMKFKNFLFLMGYMFYHFQVFLNIFQVNEYWFNWSQLLFLIWNAINDPLFGYLQDVGGTWMKDRGKIFTYFGPFLVLSFLITWFPWRSAPNSLEGLHLIVSLFLYDAFFSNFSAFFLAKFD

SEQ ID NO: 119320 - protein, 138 aa, Heterodera glycines
MTSSVHNSPNSVVLPQLPSDYVLRPLSLNDVNFGFIELLEQLTSVKPLSVEQFKERFNQLNEQKPRAYHIYVIEKESTKKIVATATLVLEWKFIHSCGARGRIEDVVVDSEERGKHFGHILNEYLNYKSYTRRSVMNK

SEQ ID NO: 119321 - protein, 76 aa, Heterodera glycines
MPELLFKTITQQSFTIEVEETATIGEVKRKIQQVKGAEYPAENQKLIFNGRMLEDAMLVSELNFAAPKFIVIMVMR

SEQ ID NO: 119322 - protein, 177 aa, Heterodera glycines
FAQFLGHHRHRPTTPLHLRSTNQEDAPRFNRAASINIGALEAERVGCDYMAIHDVDIVPLNPNLSYHYPEDGHIMHVAAGQYHPMYDYKNFIGSVLVITLADFKKVDGMSVDGMSNEFWGWGLEDDDFYLMAGMANKIRRPSNLSTNRSNTFLHLHTRSRQRDFSVDEYRKNKRKGK

SEQ ID NO: 119323 - protein, 232 aa, Heterodera glycines
VHTFRAVAGVAQQFRAFKIYVISFLVSLPIFRWCRFLWRHLLSLLRVRPRNYANSEAIWTNIHQQQQSRAPLSSVPFSSPNFASLFFWLIALGGPFLLFKCVLRLAEREAEANKWTTGQTEHYTAQALFDFCALFDFCAANANELSLTAFDVIRIAPKSAQPNVKDWLLASTLDGSKVGLVPTLDGSKVGLVPINYIKLIGKCNDSANHMTSPNIGLTDNSILFHFVNLNVS

SEQ ID NO: 119324 - protein, 354 aa, Heterodera glycines
MTECCSSAVSDNGTAPSSSSWAELGLSAATLNALGTMKSRRFSINNFLNYLFSSFSFPFPTPIQNAVIPIAVKLKKDIIGAAETGSGKTLAFAIPILEHWLTNAIATNAQHSPAKGSLFALIISPTRELAVQVDSCICFSLQIAFLTQFSLFCQIKEVLIALSVQIVPRAPKIVAIVGGMSEQKQQRLLKAKDKKEQKIRISIASDQTADPSDGIALPPLQTLIFSATLTFTHHIPLRRGKKEAQQMATDPKQKDSNLLYLLKRHGGRTLVFANSISAIRRMHSLLKKLALPNTALLHGRMKEKERLKTSDDSVLLATDVAARGLDFYGVQNIVHYQCPKTTEVRKNWICSFPV

SEQ ID NO: 119325 - protein, 117 aa, Heterodera glycines
SFFNKQKKVRLFHTPKLRGLLKSALPERTNEIVGLQHMKFFVFDDTVLITGANLSDQYFVNRRDRYLLIEDCPLLADFFVDLFRLVGDNSFRLLADGRVEFTAGATHPETGTKMGRG

SEQ ID NO: 119326 - protein, 225 aa, Heterodera glycines
PNAMFGNSSSEPSAPSLPTSLSLSSAVSSSTSSSSPSSSIYSSGSVNFRPMPNNENQGWCRNKKYIQIVKKGYRCLVCNKVYGRYNSVSYRCLVCNKVYGRYNSVSYHVTIYHRNPPIRCEEEGCQFTTREARYIHFHKYYRHQIALPESEARYIHFHKYYRHQIALPESIDLGNRKCPLLGCKHVSKSPAMLDKHIHRHVADCLKGGAKGQQLMSDRKNDQVGG

SEQ ID NO: 119327 - protein, 229 aa, Heterodera glycines
MEPPSVASSDYRSAISSRPYFSRPRPLSPTRYSSDGGGTRVLKMVSESSSISSRPLSPYPASTTATAIRDAREREKKEMSELNDRLATYIEKVRFLEAQNRKLATDLDFLNKRWGKDTSNVREMYETDLRQAKKLLEETQRQKDELEKKAKAMEEEMDTLKKKNANAVTAHEGDKKLMEELLQSLSSLEAELAMLKRRLEILDEDLKALRRENQHLNGEMQKARTDLDQ

SEQ ID NO: 119328 - protein, 166 aa, Heterodera glycines
LQICALLSFVASPRPICRISLPFGIAERPKPAKIQLPPPGNEKGHWHYEREYSRDTRYTKPLRGGEFPRSILLEPIKHKELYPMFALPIFAVTLGSVVLLISAFKIEVWLDRTGNTPPWDWARVRDKYWKLPTQMYDPTGVTHERLLVMEQLEDELVEAAQKRGTR

SEQ ID NO: 119329 - protein, 74 aa, Heterodera glycines
MKRIERGPVRGISIKLQEEERERRDNYMPEISYLDAQNHQTISTDQETKDMIEYLGLGLNLEVKGPVPTGAGRR

SEQ ID NO: 119330 - protein, 103 aa, Heterodera glycines
MSGRGKGGKGLGKGGAKRHRKVLRDNIQGITKPAIRRLARRGGVKRISGLIYEETRSVLKVFLENVIRDAVTYCEHAKRKTVTAMDVVYALKRQGRTLYGFGG

SEQ ID NO: 119331 - protein, 213 aa, Heterodera glycines
MGPYISDDNSEIQQPLTMDMALAEPPKHLTDVEEMLIEQRGVRELPFPGMDKSGRGVCLKNEVKACMFGALCPLRHIIKDKQVVCKHWLRGLCKKGDQCEFLHEYDLSRMPECFFFSKYLACSNRECPFRHIDPESKIKDCPWYDRGFCRHGPFCKNRHRRRVLCQFYLLGFCTDGPVCKFSHPSFNLPMPEPAPKLNFRPNYAVTCHNCHER

SEQ ID NO: 119332 - protein, 279 aa, Heterodera glycines
SLSGVFTCPTRNLSRKCKVRKMRNSFIWPFPQLAYKREKPHLNVGTIGHVDHGKTTLSAAITKVLSRQKKARFVSYEDIDKGAEERARGVTINIAHIEYESDNRHYAHTDCPGHIDFIKNMITGTAQMDSAVLVIAADDGVMDFIKNMITGTAQMDSAVLVIAADDGVMPQTREHLLLAKQIGLREIIVFVNKTDLVDTDVMELVEIEAREIEARELLTAYGFDGENAKIVFGENAKIVFGSALRALADDDDKCILELINALDGLEEPVRTEVLLGLRM

SEQ ID NO: 119333 - protein, 229 aa, Heterodera glycines
MATNSAFERLDDYIWGRADEGEFLRGVVADERLDTEKLLSRVQNIQREMNSRLRQGVEENYPSLLEQVSTIEQLDSAHSHVQREMDAVVRRADALAKTMEEQVNNGEAAIGCEELVDAWRAETDLIRRTEHITEVNAIVKANDKLRHLKWLQYRCLFSLSEMNSRTRQDLVVQLRSALRSLNASGVSAVVKALQQLLVGRSLGTGEDSQTVAAVGQQIAHAIGTVSIVG

SEQ ID NO: 119334 - protein, 295 aa, Heterodera glycines
MDGLALDIARKLEVKPARYAVRKTMMKSMFISQGRYEFTSNLFMDQIPRRVTMGLVANADYVGTIRRSPFNFQPFNVREISIVANGRSYAQAPYDLDYPSRKYVRPFNDMNEAVGFAISSESNGITFAQYGKTHCIYVFNLTNSGDDQAALFDLIKNGTTAVSIKFNHPVPDGGIMLVVMGECDSLSACHIILFHKINKMFSKKLGLILFLLRVSLPIVSSSSSSSLREQHTENIYSDYLKNLTLSRHQHEPDYSYSEYLRRLSLFKRTTAIVSTTPAPLTNSSPKSDKLIDERG

SEQ ID NO: 119335 - protein, 432 aa, Heterodera glycines
EFAAQPAEKTPSVDPHHYKPSQSSCYDERTQPQRCVPDFINVAFNLEVEVTNTCGVRQPTRFCVQTVTNTCGVRQPTRFCVQTGHIGKGQTSKVCDTTFKAFAHPASTTFKAFAHPASYLTDFNIKDNETWWQSETMAWQSETMAEGIQYPQTVNLEGIQYPQTVNLTLHMHKRYDITYIRLKFASPRPESFVVYKKNRAEDDWIPWQYYSGSCRSTFKLQDKAPILPGSCRSTFKLQDKAPILPGNEAVAQCTREFSDISPLTGGDIAFSTLDGRPSAENFEESEVLQWVAAEQIRISLVRMNTFGDEIFGDSRVLRSYYYGISDFAVGGRCKCNGHANQCVKSTDGEEQLVCDCQHNTAGVDCQQEQLVCDCQHNTAGVDCQQCAPFFVDRPWRPATSMEANECLRRFGLRILTAFDSFVFPSFCTHFCA

SEQ ID NO: 119336 - protein, 54 aa, Heterodera glycines
HQRRFHPNDKTAPHGGITAFPGEGGKVLGLRNKRLLREYRPKKHWYEFEDVVFD

SEQ ID NO: 119337 - protein, 256 aa, Heterodera glycines
MQPTLVRIHPPAVIVGDIHGQFADLKKIFSTHGLPPEQQYVFLGDYVDRGPQSMETIILLFCYKVKYPSNFMLLRGNHECANINRVYGFYDEIDRRYPRPGARRLFDLFNQVFAWMPFVGLVGEKILCMHGGISNQIRSLDQLSNLLRPQTEPLLRSLEIDLLWADPSTSITGVAPNNRGAGVMFGADVVESVRNLLGIDYIVRAHQLVMDGVEYFANRHLITLFSAPRYTGKNNTGATLLIAPDLSHTITRFPPA

SEQ ID NO: 119338 - protein, 341 aa, Heterodera glycines
MEELVALSPGIRVGRWTITKKLGAGAFGAVYLCVNDQGEQAALKTEPVNTPHPLLVMEAHVMTKLDTLRDGDGKHFCRCLDLGRDEQKDQQSGQMKKFNYIVMSLVGRGLDGVVKDAGGRLSLGSAVGVSIQMLAALRGLHTVGYLHRDIKPGNATIGRPESNEIRLLYLIDFGMARKYTRDDGSHHRPRTATNFRGSPRYAAISAHLGREYSRKDDIESWFYCMIELFKGALPWASVVGMNEIGEAKVKRQKKQPEAVRRQAIADLLSGCPNEFGQVLKYIDDMKYTDKPDYDWIIATLRSSLSNAGVQEFPYDWETGKRNAAPGGGGGGGGGGGDSYFN

SEQ ID NO: 119339 - protein, 206 aa, Heterodera glycines
LLSNAEIDADLLIETDQLDKLLELVKEPKFADMDYGRICLYLLSCVPFMPDPENTKLIKVAKELYLNYGKQIEALRCAMKMNDVGAVSAIFGECKDRTLKMQMAMMLGRQQIFLELPDGEDGLLGELNANSHLHKHFLALARELDIMTPKSPDDVYKMHLEQARPFTHQVGTTARVYSSIFNTFYENLYVFLPDSKKLKKECMYVY

SEQ ID NO: 119340 - protein, 379 aa, Heterodera glycines
IHPITSYVDLSKVFVCTEFKLKKVADDGVVVDVPANAAVGLIQMPGATFIRNLKVHINQREVYDSNQLYSYKVFLDTELSYPVTAKDSYFGVAGYFRDSDPTKVNDRRKKAVEESKGFQAISKLSADIFNQDLYMISNVEIDIELALQSDDFMIHQEAANRDKYTLEIVDCRLIVKTVDLMDGLSLDIAKKLDLEPARYGIRKTLMKSLFITGGRYDFSANLFTEEVPRRVIIGLVPNQNYIGHNQKNPFYFNHHNVRDIELTASGRTYPQFPYNLDYKNNRYARAYHDTQEHLGMACTTESNGISYSMFKTAYCLYVFQMTNAQEDSPGFELIKEGCTAVNIRFAEAVPNEGVTLIAYAEADGLILIDRNRSITSDLT

SEQ ID NO: 119341 - protein, 177 aa, Heterodera glycines
MSDYFEGAKPADEQCFLHNSRGLEYGHCGRDVEGRRKSSVRAYGREQNGQAKVADEEDCGKDEGTAGRAIKFGQMPSYREEKMKRKANKKIYGALQRITEANEGVGTFAAPPPRLPHIQMLMRRLEGSMGEEFDVDEEGHISSRTPSVGGNIPCPAASTDSGHPGSNFDVSGMERVP

SEQ ID NO: 119342 - protein, 155 aa, Heterodera glycines
MFKTYGPRPESFTLDDGERYYVGADVGQYLKYHRGTLYKRYPQLWKRMASVEEKKKIQELGCATSYINSNIMLVKANEVEDIFDGQEEKYRASVSGGSAYGRAEGTVPGFFLGGGTAALGDDLLFLLLNLHEEGLGGRTNKENRKVLVRSRFVLS

SEQ ID NO: 119343 - protein, 188 aa, Heterodera glycines
TIRYLSLYDNKYLRYFGGHSKKVVTLCMSPLDDLFLSGSMDKTIRLWDLKSSNCQGLMQLVSRPIAAFDPEGLIFGAGIGNDVIKLYDLRSFDKGPFNTFKINDTGLNCNWTGMKFSPDGKSILIMTDGGMLRLVDAYYGNVTHTLSHENPKESGRKIREIPTSHSGNIEQVAFNPKYFMLASACTQL

SEQ ID NO: 119344 - protein, 171 aa, Heterodera glycines
MIEKFVNFCKQKDFLHCANFDDEIFMVTEDEIDEGHEEDVEVPKAMGDIFESVAGAVYLDCGMDLDIVWRVFYGLMHEVIEKCCTNPPQSPVRELFERKNCKAKFAKLERKLETGKVRVTVTVNDNLQFTGMGRGYRIAKCTAAKRALQHLRKLDAEKIKKEADKNVPSTI

SEQ ID NO: 119345 - protein, 557 aa, Heterodera glycines
DEILKAAIMKYGKNQWSRIASLLHRKSAKQCKARWYEWLDPRIKKTEWSREEDEKLLHLAKIMPTQWRTIAPIVGRTAAQCLERYEHYEHLLDEAQRRAEGIDEADTMKEAKKLKPGDVDPTPETKPARPDPIDMDEDELEMLSEARARLANTQLEMLSEARARLANTQGKKAKRKAREKQLGEARRLASLQKRRELRAAGIMIGSGFAYKMRRHRLLDYNAEVPFEKEVPAGFHDPGEDFDKRQRTMVEDRRRDWQERDDRRKDKDKLRKRKYCLTGIALIQTKSQTKHEKKRSKLLLPEPQISDKELDDIIKIGHASDSVRELVDDNPTRLSFFSTLLHDYNESSRVSAISARTQRTTRLSFFSTLLHDYNESSRVSAISARTQRTPAGAIDSVARAADDLLALTNVETPAADDLLALTNVETPLKGGLNTPLHTLDFSAPGTTRQPIATPNTVLSSVAATPKNINSGLSAQFGLRPTPAHSSTVINSGLSAQFGLRPTPAHSSTVAGTPFRDQLNINPSEGRMNRKELQKQFETLPKPRNEFELAPIAEDEEER

SEQ ID NO: 119346 - protein, 380 aa, Heterodera glycines
MLSLYTMLEFSLLVLNGIAIINRERVLNKYLKNRQHSFGAESEQSVVFRLVNLIFAVQTVLRVTERLNLCQSINKAMHIAMEEDKNTICFGEDVAFGGRERVFNTPLCEQGIVGFGIGYAVAGHRAIAEIQFADYIFPAFDQVPCRQIYLTIKCPFPQIVNEAAKFRYRSGNQWACGGLTIRATWGAVGHGALYHSQSPEAYFGHTPGLKVVIPRGPIQAKGLLLSCIESPDPNAVEEVPIDKYLLPLGKAEVVKLGTDVTLVGWGTQLHVLLETAELAQQRLGVSCEVIDLQTILPWDVETVAESVAKCGRLLVSHEAPITSGFAAEIASTIQQRCFLSLEAPIARVCGWDTPFPHVYEPFYLPSKWRCLEAIRGLIDY

SEQ ID NO: 119347 - protein, 889 aa, Heterodera glycines
MATTTAAEIPRKSPQQRKREEMAQLLESRKVDQGATFVEPRKPSGTAGQKGRMKLITNAHILKLLGTQAIYHYEVTINAVSSRSDRKFCVSEPSGPRDRDDFPLLNRRDKCREVFSAFYRTMEQSLKDTGNLLYYDLSKTIFTLKKLQIESEGKFMFNIGTVPTAERPDAARFKHYEFIIRPATGFEVNDLSFITNDVSKMERSLEQFLDIATAQKANMDGKQFIGFTSSRVYLLAPTDYGFGANECPVFDSNHSFLGVGVNKGCRIVEENQGRFETGDFTQSDYEALCNGLVGIYAEPRYGTSGRFFRISDITKPNTGNGLNSENTYITHQVSGKISVKQYFEDTYQKTLQYPKAPLLVNYRRIGDPAYYPMEEMIKETAIPPTVLRVHNERVKESLQLVNNEYLTKASVHFDTTPLHVDYRVLGPPATLYRNNHRVTPAASNCEWRPGDALVNAQIGNWVAYAFGNPAGEMRNKGIVCVPPVRVSFCWFTSVNEVLNVLHKEALNGVEFCLIGHAKGFEGDDVHVTIKAFEQQTEIVTQAITFDVLKDVLDKGSPLTVANCIHKTNVKMGGLNYALHMDDPSVAQLFDGQTLFLGFAMNFPGGFAPSESAAPINGANGSVPSGSKAGPTLQNGANGVAATGANTIPLGSNGNVVPSAPVPRVGSSLPPPSCIGWAATIGKRHKDEYIGDFVYQAPRREEKIDVIASVVRRCIESFKKNRNKLPYEIPLVKKELEELGCTAKLTVIVPNRLQDVRFLRQDAKPEDKSNEQNIPPGTVVDTVVVHPKRSEFFLNSHVAIKGTACTPHYTVLRDENDMSMDTLQTMVHYLCFGHQIVTKPTSLPSPVYIADEYLFAKNKGVEWPLRTYADMTKVLSFLNTTYLRELRINA

SEQ ID NO: 119348 - protein, 199 aa, Heterodera glycines
MSSSSKAFIGKPAPNFMADAVVNGDFQTISLEQFKGQYVVLFFYPLDFTFVCPTEIIAFSDKAGEFKKIGVQLIACSTDSKFCHLEWINKPRKQGGLGEMNIPVLADTSHKISRDYGVLMEEAGIAYRGLFIIDDKGVLRQITINDLPVGRSVDETLRLVQAFQYTDKHGEVCPANWQPGTDTIKPDPKGSQAYFDKKG

SEQ ID NO: 119349 - protein, 106 aa, Heterodera glycines
MADEAQSPPKDGGGKNMQWMYEGAKSVVNREDYLLGKKIDKNFEMFSDVVVHDQEEEKRDAFFQQSLLKPSTSAHTAAPFVARNQHKVSALDTRVVRTEDPLVALK

SEQ ID NO: 119350 - protein, 313 aa, Heterodera glycines
TDQSAYDSDHSAAYRPRTKRTAFGNNFEYFFRFFKPKCQFPSREVLQKLEFRGNKLTDQSLNEGGAAGEGGQQQGMFGALKNLQELSLETNGLSAVPSVALSAQRGTLTNLNLGLNQIKEVPVGALNFPELTSLSLEFNGLPMIVPHAFQHVPRLQYLYLTGNKFPAWSPDMFRFVPDLRTLGIGETPISVIPANAFIVCLFGLILKDGHSFQHTPNLMRLEMSEAAVDSIEPGAFQRTPMIQAIVLNKNRLTRQWSMSILNIQQLFRVRADIFQGLGELYSLDLQGNRLEEVEPRGFANLAALRHLDIRSGF

SEQ ID NO: 119351 - protein, 1849 aa, Heterodera glycines
MEDFYIVLPSNTPGPGNTASNFTVRLPHTLELDSKWSVALSALIYPYSFPSISVDEDDSISVKLVNPNYREDAGNSDEESQKFINLSVKIPNVQFQSVQSLQKTLNQIIQNAYDTKFGGSSSLNDGTTNKRAKRQTELSETGAGVIEVENFFTRNPFDYWQQIGELRKKHYQLRERVEKMAKEYNSTVDGERKTFLSTELGVFQGRETFLKERLHLIEEEAKRRDGEQQEANEQRLIDRFFARYPDNYREQLDEWRSSYLRDVLDLQTKMGEYEGVKDLKRLEELNSQTERMRNSIHVFERKMEILNNAALQRDQKRSQEEFERTSHEQNLTFVQEFFQTNPVNYWQAIQKNYEALQLEYTKKRELREKLEFETDATERKSLQRQIESIQRLIDYRRKRFAALEYEAKKRDAQTGKTNSGLSAVAEGSNSTSSTAPDSFSPADEPANPDEENATNTDQDNSIDEKDEAGTPPPSSGLGQSDAAATSVTQVEDGRNLPQAAALTSNNPKIVAKQSTVATERRKEKIIEKLIDEQVDRMVDGTHAQQKMLQEEGKENESQHRISTYKLIEEVLHGEHGQLMSQQRESKMAAEFAYNEITQRFGIRMGPGVMHVDLSKQLSYVLGFDRKTRIYNNQSAKYPPDLSGGVRQLYVYAPKLVEDSIIGDRMAPLLRVVNVSGTPGLDMPERGGGLLQNISRFLMPVATNLLKSASKEGISAGTRMLDDLAQGKAFKESLKTQAKQGFENLAEKLNQCGKEKHTNQKTQWKMSVIKKIDKDSVEGLEGSLSLFSLPPTNVAINKTNVRELLPLSALNQTGPYLFRLFSDSQFCDLSKTYMYLLSSIERKNDAGEWVALSDTDPNDKHVGVIQNFASSFVRSLKVNISGIEVFDSSIYYHYRDYIMKELGYSQEIRKAFHEASCYYADDDDQNSATNPGFTARAARFSGGKQCETMVKLNFDLARQSALMLNNQDVIFTIHRNNDSFLLLTPPYKKPDGTQQENKKEYRIRVHDMRLYVRTVDVTPSLNLAISRQLESTSAKYPLRKIEMRSIFLGTGRTELAHNVFTSTLTRRLICTFVSTDAYSGNRKMSPYKFEHANVRSISVEANGQTFPSTPYLLSFDGVQPRFVRAFVDMYAGLGLDDSDTKTVSIGMQRFLNGWAFFVIPLTSTLEDTPGFELIRQGTCTIKVQFEQPIKADGYEMLVLGEFDSVLSINADRVLSTDGTQLEIILKRLHPTKNKFIGVFPSDRIPKRVSKFPHCMVVNTDKEGTRGLVLSRVPSLLQSELINVDLTVDNQNYFDSGKYRTFSKDATAAQHFGYSWNTACRIEKCERDSEWAVSLQNVYTLHSYQSVFFEMKSLVKMSPLACFEYNGHSFTFFEDSESGETTIFRGHQHKIVQRLSKHGRIVFDHLSGRLFLIDKYQRRISEIELEYLEHWWLRKNQSSAHTILKSNFVAFLPPDKSDFTMVDNHVFVIRDQRIYKFYIADYAKGNRALTFVTNSNDVRFNYLIYKPKDQNASRGVFAHLRMSDAWIPISYLFNLFLIVLCTYILKQLRRVDRKSPLNVSDSADYYSSPFIDDAYSSQHQQLLNIPYKSYFISIIVTIYLPGYCMQRAIRYLIDSYGLSSVDDLYTCLKEEIKSGPEGGNCLYPNPLCAVDCVHISNEDYPNQPVHIDGSLELIADVELYSTCYPKRKFEGIERTSVCGAEGPEDLSGRLAAVSITPFRTTEQQQQQHEPDSRRAGSIQLLERRRTRKRDYNLVRVLCRFNNCGPYRLAKQLQKRRMENLTYLNQLDIETAHLRKNIKVIPDALCPNGANRVFAYRGFLGITVQQHLYSRHRVTLKYPGLPCVVQFGGGYH

SEQ ID NO: 119352 - protein, 566 aa, Heterodera glycines
MDSDLYDEFGNYIGPELDSDDDEEIQPVGGNEEEEEQKDDIMEQVNLIVQTKNHFHKRRMRKRTENRQLFLAVKLCCTRTRNIMPLPWKWPALLFRRKTINVSKCQAQEHLLPETVYKKDFLVDMTNHPELIRNIAIAGNFHHGKTAFIDCMVEQTHPDFFRYEDRDVRFTDTLFIEQQRGCSIKALPITLVMQNSRNKSFLLNIFDTPGHVNFSDECTAAFRLVDGVVIMVDVHEGLMMNTERLLRHAIQEHLPITICLNKIDRLILELKLPPADAYAKLKFTLDQINNFVQTFGEDDIPLFSPLMGNVIFASGRYSICFSLESFANIYAAKHSQLNAEKFSRRLWGDMFFDTALKKFTKKPQLGGATPTPRSFVVGDVDTCLPKLQQHLGIKLNKEEQRMNVRPLITLICQRFFGSFTSFVDLVVNNIKSPIENGPRKVQHCYSGDATSQLPTELANCSPNGPLYIHTTKNYATQDTTAFHVLGRVFSGTIHSGDEVKILGENYSIQDEEDCRVMTVGRLWLPVARYTVEVNSVGAGCLVLMEGIDQPVTKTCTIVEKDYDQDE

SEQ ID NO: 119353 - protein, 149 aa, Heterodera glycines
MARTKQTARKTQSQKGFSSSSGSQHMQSQLHNLRKQLATKRPNPKRGIGYKELPPVKIAQKRHHKKGALALKEIRKYQKSVNLLIPRRPFMRLVREVTQDMSQSTDLRWQGLALLAIQVFANPSSLSVVTQTGQSCFISTENFFETRKF

SEQ ID NO: 119354 - protein, 231 aa, Heterodera glycines
SARPKVFFDVMVGGKSTGRIVMELFSDIRIVMELFSDIVPKTAENFRALCTGEKGMGKSGKPLHYKGSKFHRVIPSFMLQSGKPLHYKGSKFHRVIPSFMLQGGGGDFTRGNGTGGESIYGEKFPDENFKEKHEKFPDENFKEKHTVPGLLSMANASMANAGPNTNGSQFFITTVKTEWLDGKHVVFGRVVEGMDVVKQVEAQGNQSGKTANEITIADCGQLITIADCGQL

SEQ ID NO: 119355 - protein, 136 aa, Heterodera glycines
AALNCDFEGQPCCWANVPTPTDDQIDWVQIAYATSASPSDEAQLSSCAIACASSSIRVRARHMQTTNVLLQVCQRESFPPSLGFNPLLNCQEFPTSSDRMINTELVLPKASYVDIIIVASNFINERGDIALLDDIQ

SEQ ID NO: 119356 - protein, 300 aa, Heterodera glycines
MPLKALRGISPCTKSTYDREEKEELRAALKKEEEAKKKLEIRKKMSVVVERVNDDGTEGWSDNVPITKARMAELIRHFYNLGWMRDNGAGMAVRFKCPKTGELLILNSSNSLAKEIFNENEHFVMKSAGTILKRPADPDRTPTAPYYLLRDNPDLVCVVHTHTKWGNLITQLIQGDKFMISGQEMIQVKPSRTDGQNWASFLFQLRGAKTVRPNAEWKMLTLWWCRSSKRKSTTSTDEDFVQISRSEWRSRPGARLLRIRQQHVATDQNDVGVLRISVRVGLRNAALEVPLVKNDEDQNT

SEQ ID NO: 119357 - protein, 86 aa, Heterodera glycines
FQVRIKRLDIVGSWRWVDGKEDACGICRTPFETCCMDCKFPGDECPLVLGQCKHPFHMHCIVKWTNTQSGQKPACPLCRQEWKFAT

SEQ ID NO: 119358 - protein, 173 aa, Heterodera glycines
MDCGNKRPRTTISAKSLETLKLAYQDSKKPARHVREQLASQTGLDMRVVQVWFQFHCPQKDNERRLAAAHHQHQHGGGGAGVGADPHHRSGSGSTVSSSGGGGCGGGPGSVSGSSGMPMGTGAMLFGRSGGSGGGALGDSDSGASNEAESPFYAYTNPEASSDVDGHSMSEFY

SEQ ID NO: 119359 - protein, 96 aa, Heterodera glycines
MEDSNLKDKISEDDKKKVLEKCGEVLAWLDANQAAEKEEFEHQQKELEGICNPIITKLYQAGGAMPGGPMPGGGMPGGGGAAGAGGAGGPTIEEVD

SEQ ID NO: 119360 - protein, 123 aa, Heterodera glycines
MVQQYKLYYFDLRGVVEPIRLLLHYVGQPFEDIRFKDFEEWEKTYKPKFFYGKAPVLEVDGKPLAQSSAILRYLAEKFGLAGKDECEKAKANEIIDFQKDANSELMPYLMVKIGRQEGDLVKK

SEQ ID NO: 119361 - protein, 117 aa, Heterodera glycines
  unsure (1)..(117): unsure at all Xaa locations
MPFTPRRSPPRDARMDMTSEERDERTVFILQVGSSFSDYXEILLIKLARQTRPRDLEEFFSSVGHVRDVRVITDTKTRRSKGIAYVEFWEREAVPLVTFFLLKWANPHKEFACIPPT

SEQ ID NO: 119362 - protein, 208 aa, Heterodera glycines
MAEDEVDDLLEEAFKNVDEGFVARAKAAFSVREQQKKTQIVLSYMELICNFSSRDRRRSRSRSRDRRRSPISRRRSRSRSPLEKRRSPAPRRLPGPERRDVLDSLSMPFTPRRSPPRDARMDMTSEERDERTVFILQLARQTRPRDLEEFFSSVGHVRDVRVITDTKTRRSKGIAYVEFWEREAVPLVTFFLLKWANPHKEFACIPPT

SEQ ID NO: 119363 - protein, 368 aa, Heterodera glycines
IENILIDQRNAHEKSTYILCDFGSSTTKVLSKEHYTHAFMEEEIQRYTTLSYRAPEMIDLYSGIPIDTKSDIWALGILLYKLCYFSLPFGESALAIQNGLFTFPESPPISDQIKAIISGFIKSLRIELSEAVQILKMRNKLGSDYARLYEKAFNDFEAQRRRHTAPSVGRGPGEVIEERHSRDGMQRTFVAGIKPSELPGHRTDDCSAVCSSSSALLAASEGMIVNTASSHCTETHRRATTTSVNPRLRPKPQAVLVNSTPMSQRKETADERGEMPLSGQQQLKQQTVANAPCMSTIDHHMDDNAFGECFDEMRRSCVVEQQSDFQSEINRPNILGLDLTSMEQQISDDPFGNAPPLLPYQFFRKPLD

SEQ ID NO: 119364 - protein, 290 aa, Heterodera glycines
MNERFDVDFFRQFSLVMNALDNKGGSLILKWICLTKGLGGSRPNEDENEHWGVSKWAELFEDSLFALAERYRGAVKEKRMLIWDKDDEPAMQFVAACANLRAYIFGIGTKPLFDLKAMAGNIIPAIATTNACVAGMIVVEALKIVSGQLSKCRTVIVHVNLNEMLLRTFRQNVLVGALNMLKPDVMDLCQNHRILLSSEEGETDSILDRSLGLLGVLNGTQLECDDYAQQLNFKLILFNDNTLTGEQFKKVEDQATKGAKSISDDKQKRENEIDEEEGVPVKKAKILCET

SEQ ID NO: 119365 - protein, 368 aa, Heterodera glycines
PPLSTYAVKQHCSITSKKSNPDNMLIAKNGHIKLADFGTCVKMNTDGLVRCSSAVGTPDYISPEVLRSQGGEGVYGREVDWWSVGIFLYEMLVGETPFYSDSLEVDWWSVGIFLYEMLVGETPFYSDSLVNTYSKIMDHDRQLQFPADVRISAHAKDIIRKFLSEPNERLGKSGIDPIKKHPFFGNSNWTFDTIQHATPPFVPELKSDDDTSHFEDVEQAEAVNPDNFQIPKAFTGNQLPFIGFTYSSEQGSDVPLINGNQITNCAEIEQLKEEKRLLEVRFGDLQDQWTQSVRHRDKRWANRENGTDRTINDLIRLKLQRDKNILEESATELKEQLERTKNEVRRGKGKANGEMVGQVQVEQLKTDK

SEQ ID NO: 119366 - protein, 952 aa, Heterodera glycines
KVCDLFIVNALQIAIVTLVNDTIPSLFKGRMKSYIKCKNVDFGSSREECFYDLQLNVKGKSNVLESFRDYIQLEILDLESFRDYIQLEILDGENKYDAGDFGLQPAEKGLKFLSFFGLQPAEKGLKFLSFPPVLHLQLMRFQYDPMMDSNVKINDRFEFSEIMDLNEFAESEGDFEFSEIMDLNEFAESEGDDEAQKNDYTYLLYAVLVHSGDFHGGHYVAFINTNLKGSWCKFDWCKFDDDVVSRVTSRDAVTANFGGENPEGVGRSFTNAYMLVYIKKSATGEVLGSVSEEDIPDHLKVRFESSATGEVLGSVSEEDIPDHLKVRFESEKKREMERRIEREEANNYCEITLILDEDMNAHHEFELFDGRKITLILDEDMNAHHEFELFDGRKIQARKLKVQKSMTYMELYKFVATNMGLKEREFRLWDFQSDNNGLKEREFRLWDFQSDNNQREMMHRFRVENTRPHLELCRGHVGDELGFPNYDKNRNFFLAKTAHIDDLDDVLAFVKFFTAERKVPEFKGTLILTMSSDFPTIAAAINKVLGQPPDTKLNLYVEIKPDKIIQLQSATVKNEIKPDKIIQLQSATVKNSQQYMQQDGVIIIAELDQVSEEASVMQFFKTLYNRIEVIFKKLLNKSYTVEAHLQEFGRVCSWLGSELNYDPAKIMLYKSEFDLFSRFKFAFVLSDVLHGDKPQRIFKFFYAKLPLPMVDFDNHAHVLLHLMNEKFQLTEMSIFVDKNAEMSIFVDKNASVQTLLDEARKEFRFSSMGTKTLRILTKQRHTKIFFRLVQASADGTFRVLRVEEIPKDQLEVTGEYLLPVAHFDREPNRTFGVPFFIKICNGEKVSSIRERIREMLDVPKKEFEKYKFCIVRQGRYKFCIVRQGRVMREFDNQDEAAVNLSEIPCPYNLSQSAPFLGIQHQSAPFLGIQHFRKNANKRPKNLRLKPLVLVQN

SEQ ID NO: 119367 - protein, 461 aa, Heterodera glycines
MLKRAALGRMVKLLRRQKSSFEYLEQVRQHLSRLPSIDPNTRTLILCGFPNVGKSSFINKVTRADVEVQPYAFTTKSLYVGHLDYRYLRWQVIDTPGILDHPLEQRNTIEMQAITALAHLKASILYMMDISEQCGRTLEEQIHLFESIQPLFSNKPVFVGLNKIDLITRKDLIAEKEAILREKLETAGVPVVELSTLTQQGITELRDKACDALLAQRVEKKLQVKGIAQGGSVISRLFVAYPTPRDDKVRAPHIPETVLKRHAEMEVEDGEKPKRKLERELELEQGREYKLDLNKHYLLKNEGEKYDTIPEIWEGHNIADFIDPKIVEKLLKLRDEEKKREEAGFYDSDMDEDDEETRKLLREAEKITQKEQMRRMEFREKKSTNQPKMSRKIGRKRERSMARLEEELGDLGVDIASKKMRHLSEEQNREQRGKKIRVGRSPSVKAPPKTPRDVQGIPDKK

SEQ ID NO: 119368 - protein, 138 aa, Heterodera glycines
MSKSDKVSKWPVNPLEKIVLDLGSLPPGSVVADLGCGDAEIAKRLGERLRVHSFDLVASNERVLAADMADLPLEAESVDVCVYCLSLMGTNLAQFFREAHRVLKTHGKIKIAEITSRLRSVSLFVLALEKMGFQLKRK

SEQ ID NO: 119369 - protein, 88 aa, Heterodera glycines
GVCTNFLADRAPGVSTAPVFVRKSTLRLPHRVQQPVIMVGPGTGFAPFRGFLHDRLWHKQQGKEVGEMHLFFGCRHPDHDHIYKEEME

SEQ ID NO: 119370 - protein, 166 aa, Heterodera glycines
CVFRAYLCVLSAQKVSICLKIASLLNSRVMLLSKIPPPFCIALRAASTNPPARGPSVKTFEIYRYNPEKPEQKPFLQKYDVDLNQCGPMKYDVDLNQCGPMVLDALIKIKNEMDPTLTFRRSCREGICGSCAMNIGGENTLACICNIEKKTKYSTKIYPLPHMVGK

SEQ ID NO: 119371 - protein, 276 aa, Heterodera glycines
PQTAAEHQKDINESSSSSSDSSSSSSSSDSESDGDESDAGERGGATAEERRRTSHSHGSMQSLNFTSVKHSICLHMVYLRLFFRSLKVSASAVVLPTRVLPPRPKRTLRWANRGTEVGGCLEWSNPRSTTHNFCLDCQCLLVTSRSTPIKEGPTLKAVDEDGAGAKQRKSKGREGRGVRALVAHSTIGAAAVPSATNSTGGSPLLSHAPLPLNNAINHAWPTPKTYGAINPDGKSPHFLVGSDENIGDSSNEAAYYHPTTTFPTRHRRKKTVLSEN

SEQ ID NO: 119372 - protein, 205 aa, Heterodera glycines
CILWMIALKSNLFKIILPLKCAIVSYAQLEMIKVERVGADDVVALITLNRPKALNALCSQLMDELAHSLTYLDKDDGVHAIVLTGSERAFAAGADIKEMVPKKFAEVFGGADIKEMVPKKFAEVFGGGFLENWSQVATVRKPTIAAVNGHALGGGCELAMMCDLAMMCDIIYAGEKAMFGQPEIKIGTIPGTLGQFCYIKLFQEP

SEQ ID NO: 119373 - protein, 65 aa, Heterodera glycines
SNPINEIVDVDEDMMRMMGFSNFDTTKNKHVEGNASGESKINRARKYRQYMNRRGGFNRPLDYVA

SEQ ID NO: 119374 - protein, 368 aa, Heterodera glycines
FKCIIYKNYFFMVCKRHCTKNSALTCSKINDKITFMKYIDCIYVDFRKAFDSLPINILINKLHNIGIKGKLLSWLSEFLRDRFYRVKINNKSSNLHPIQSGVPQGSVLGPLLFLIYINDLPQVIPSGVSIKLFADDVKIYGDERSKLNIALENIGKWANAFGLNISQNKTFILFIGKNNSKQQYKLFNNIINEVESISDLGILIDNKLRFSNHYTKITKAAYLRIRNIAKILKSRSIRIWTKVYKTYIRPLLEYAPEIWNPTNKKDINKLERCQKYFTKIALFKCRLPYIPYKQRLDLFKLEERRKTIDLVQAFKIIISKRHIPTISGHIPYNLRRKVVLKSQSSKTSNSFINRTELIWCRMKKDIID

SEQ ID NO: 119375 - protein, 73 aa, Heterodera glycines
MIEITVNDRLGKKVRIKCNPTDTIGDLKKLVSAQIGTRWDKLILKKWYTTYKDHITLQDYEIHDGFNFELYYQ

SEQ ID NO: 119376 - protein, 135 aa, Heterodera glycines
MESYARGCELWVSGKLRGQRAKAMKFVDGVMIHSGNPVTEYIQEAVRHVQMRQGVLGIKVKIMLPHDPKGQMGPRNPLPDHIQVKEPPIDVAPTTPYSEHREPMTTGMPPQTQMPPAHQQQQLPMVGQVPSPAQF

SEQ ID NO: 119377 - protein, 495 aa, Heterodera glycines
MRKAFKSCNIIDQHSLDRQTLPQSLLEQYQNCDPPPQLNQLNPYREDEKEALCYYTDPSYFFELWRNKTLKECDGGLAEKKRAGRSSTSPSRQRRRQQQQQHNFPQHNDLSAHHVSSRSTDYSRFEPQIGHQNGKSQQHKLRHGFGPAHFSVSSVAADVLHFPAEYQTPQSLMIGNRITHNQHPPPGMSMVTTNEGTVTQQHHKQIKPNEHSPFNLSSNHSSGNSNQQFRVKERTIDGKADAMNTTQTDNTSKNDAAHAVASRMDVMFLDDEDDELPPPPQNILSSTVNTRNFPRIAPSVSSSSPVGSTNSSLAAPTNEPLKSKFEFISTNGSTETSELGTTRHITNEQQSINVAVIEQRPNQLHSIQQIPPSVCNAPAPPPPPPPPPPNFSLKIANEGTKTFGGQNENEQPKDLQRKSSNTSGAQDNRSLLLMQIQEGVKLRKVRQQEELEEKRAVATSNDVAAILRKRMEHCLGDSDSSSEGSPSPEDNEWDD

SEQ ID NO: 119378 - protein, 281 aa, Heterodera glycines
MSVSHSNDHSKSEKCGNSEGQFLSMEVDELQELEEKAKKTQFKTQIVWRNVTQFKTQIVWRNVILYLILQTGALIGVYQLFTSSKWLTVFWCLFLWMVSGVGITAGPHRLWSHKSYKAKWPLKALLVAMNCVSFQNDIIEWSRDHRCHHKWTDTDADPHNINRGFFFAHMGWHNINRGFFFAHMGWLLVKKHPLVKEKGASLDMSDLTSDPLLMFQRKYYLPLVGIFYYLPLVGIFCFLLPTAIPVYLWSESVWVSFCTSALFRYCLNKHATWFINSAAHT

SEQ ID NO: 119379 - protein, 708 aa, Heterodera glycines
GSSNVTDKEYIRTCVVTSLEDKFMTEVSMCLVCGSIGRGTEGSMITCSCCAQSFHTYCVLMHDKVGGDHSFSLPFVNRTFFHSSSYQKKFKTLLFQLNWLKSNFISQLNPTVMKRGWRCLDCTVCEGCGSGEDEPNLLLCDECDISYHTYCLEPPLDCIPRGSWRCKWCIPRGSWRCKWCATCSRCGAQIKLGSDMQRLEGFCEICYSLRKCVKCQASYEIGDLMLKCGRCLRWLHARCEGLTTEEQAENAAENAFRCSFCRPQIFRKFCFPRLQTVTNNFVRKSKTVRVIFGRHTFTQLANGLVNVTHIKSAFLCYLKDDMELSDELQEQLIASVFAGRGRGCGSGGGRGGGPGRRMLKMGVGGFYVRTPKSRLPFLMGSGANMTPMNSTEPRIRRPRPRIRRPRKLKRPLLEDAYPPQIQESFFGVAAVDSRTLAEQTVDEPTLSDYKKVLPVVSGTKFASELSEHSAELLRTQEMDMLGDIPLVENIMDGLDMEGLDSDLIVGEEDEPMTVESSSNTIDPISGHLPSPIFGTLFPCSFQMDNAGSSSNLVAHSVVSEVFSPSPAHQSERPVGVRARTTANGGGVLNGDGSLTTERWEEDEPLGDKATKAAVLYANVHHTYLKDKFPIVHHTYLKDKFPIWTDRVRMISRIWRDLNPEKRQELVNHSTTTNGATGSSPKPTTTNAKNSISVLIGQQQPDAPFQGAA

SEQ ID NO: 119380 - protein, 134 aa, Heterodera glycines
MPPTSKKTGKAVAKAVEAKKKLAKGQHIVRKKNMRTSVHFYRPRTLKLARSPKFPRKAVPKRNKLDSFSIIKHPLTTESAMKKIEDTNTLVFIVDVKANKHQIKSAVNKLYNIEAQKVCPLFVLVKKIEYMQIG

SEQ ID NO: 119381 - protein, 378 aa, Heterodera glycines
MVDLEPTVIGCHLLFFVGLSAVLDEIRTGTYKHLFHPEQLITGKEDAANNYARGHYTVGKEIIDPVLDRIRRIADNCTGLQGFLIFHSFGGGTGSGFTSLLMERLSVDYGKKSKLEFSIYPAPQVSTAVVEPYNSVLTTHTTLEHSDCAFMVDNEAIYDICRRNLDVERPSYTNLNRLISQVVSSITASLRFDGALNVDLTEFQTNLVPYPRIHFPLATYSPVISAEKAYHESLSVSEITNMCFEPSNQMVKCDPRHGKYMAVCLLYRGDVVPKDVNAAIASIKTNRSIQFVDWCPTGFKVGINYQPPTVVPGGDVAKVPRAVCMLSNTTAIAEAWSRLDHKFDLMYAKRAFVHWYVGEGMEEGEFSEAREDLAALEK

SEQ ID NO: 119382 - protein, 35 aa, Heterodera glycines
GHAVGDIPGVRFKVVKVANTSLLALFRGKKERPRS

SEQ ID NO: 119383 - protein, 115 aa, Heterodera glycines
GVHNELQLEGCNFLRQHIVFSLLTGRTITITKIRSYDDNPGLKEFERIFLSMIKRLTNGTELKLSKNGTELSFRPGLITELSFRPGLIHGGELEFDCGVQRCISYFLEPLILMAP

SEQ ID NO: 119384 - protein, 272 aa, Heterodera glycines
MAHPAGDVTDAQVLEMSSDQIDERVRQLDEEIRVMRDEMRKIAYNIKTMGTKTKENNKQMQKYMKMPWLVANVVEILDLADDQAEGEEGSSSDLDARQKKGAVIKISKGLVMFLPRIGRVGPDELKPGDLVGIDNDTYHIIAKLPPHFDRRVKAMEVVERPTETYSEIGGCETQIKELQEAIVLPMTKKELFIKIGIHPPKGVLIKNVNFVELSRCIEDFNGAQCRAVCVEAGMVALRRDSTKILHEDFMDGILEVLKNRIIAKNEKKCQKN

SEQ ID NO: 119385 - protein, 329 aa, Heterodera glycines
MHPFKSFLWLLPRHVSIAFAFATLFGLLAAAGAPRQIVVQILQIGIILKGHLKQIPTPKCWRCLPTKLTNAYDRQLDEEIRVMRDEMRKIAYNIKTMGTKTKENNKQMQKYMKMPWLVANVVEILDLADDQAEGEEGSSSDLDARQKKGAVIKISKGLVMFLPRIGLVGPDELKPGDLVGIDNDTYHIIAKLPPHFDRRVKAMEVVERATETYSEIGGCETQIKELQEAIVLPMTKKELFIKIGIHPPKGVLMYGPPGTGKTLLARAVASQTKATFLRLSGTLLNQVGLGDGAKMVQNAFELSKQKAPTISFIVELDTMGARIGEFDAR

SEQ ID NO: 119386 - protein, 93 aa, Heterodera glycines
MSGGGKDRIAVFPSRMAQTVMKTRLKGAQKGHSLLKKKADALNMRFREILKKITEGKKCADSEYENPGVFRASDHESDIRFAKIIDFENHRFS

SEQ ID NO: 119387 - protein, 833 aa, Heterodera glycines
NLRKSMIEDLATAVFSEDIQEEANSYFQQIYAPDGRVSVNDFIAKLKGFRQIYAPDGRVSVNDFIAKLKGFRHSGNIKERELLLCVVKNLFDEYRFFREYPERELRTTAEVYGGIIREEIILNIQFANIQFATAIRRVIESLNDEPGSVLWTFGIVALSACRACLYKYPKVCHMIINTNSYGRFPPGLKDYVSAGALGQLPMNHSAAHDVGLFSSNQQPQPFFPPSSVIQRPNSADGENSMPGLEGNSILNVTNVDTLISATEREGNQVKQPPQQLFEKVAFTCNNLCANNLLDKTQELTQLIRENGDEFTQELTQLIRENGDEFLEWFAQYLVMKRVTVEHNYQQLYNSFLVLINNTSLDNDRQLLKNLGHWIGIITIGRDRPILNKDLDMKYLLFEAFYKGQHELLYIVPFVVKCITASAKSQLFGPHCGWVYAILKVLAEIHNEPDLKLNLRFEIEVLCKELNVNLGSIEVGSYLKEQRRLVSVKQKKIPIKISFKPRLVPPSKLGTAAASSTLAQCQLPPIQPPHIGAYTPGGSQQQVSSITAHQSPPSTTRTLLCNLVHIYPYLIITNFTFGILQIIVIPPHLMLFQVHPQLKTTCKIAINHAIKDFLGGVADRAISFLGGVADRAISVAIAATEQICRKDFSLDSNEQNLRRGAHQMMRSMTAAIASITCREPLSQQMNSILRMYLTDAMGNVVPGSDQAKMVEEAATAVTDTNINIATNFVVKNACEKAVADIEKGLESEYMSRKTASDDRPFQVDADMAEMSEKIPEMIRLKEGPISEAMLKVYDDFSSKICGFKPFAPEDRFIKICGFKPFAPEDRFIGFTKPG

SEQ ID NO: 119388 - protein, 163 aa, Heterodera glycines
FVLAKGRCWCPEHFVCANSACGRRLLESGFVEEPQENYCPICYECLMAPVCRKCFLPLMENCLNALGDKWHNECFTCTHCRKPFGTLSFFVEDGKPYCEEDWNLLFTTKCSDCLKPIKVGQKWLEALGGQFHADCFKCATCGTGLEGKTYFERDQQPFCRVHA

SEQ ID NO: 119389 - protein, 200 aa, Heterodera glycines
MGAEVVSSVLTKCFSDSAADEANAWHGGCLALAELCRRGCLLPCQVPMVIVDLLPRALTFEQFQLGFMQAVNVRDAACYICWAFARAYEAQLLRDHLPSLAGVLLSVALGFIYFSVAQFGEYIRPMMDHLCELKSIHWDEMVRKLAADAIQRIASFDLDYAYEKIFPVFCARLRSSDSVVKHGAFLGVSALLFALNGTHD

SEQ ID NO: 119390 - protein, 612 aa, Heterodera glycines
LYPVVLDGDFVGFIPRKKAAFIERQLRAMKVASHDDRVPAFTELTLIRHSPDSENIQMQFAAFFIYSGLGRLMRPVRNLLFDQIEQIGIFEQVYLSIIIFEQVYLSIIIDPEEAEPGVTMHQELHPSSLFSFALHPSSLFSFAGNLIPFPDHNQSPRNVYQCQMGKQTMGVPVHAWQTRTDNKMYVPVHAWQTRTDNKMYKLQTAQKPLLKLEAHDKYEMDEYPLGTNACVAVISYTGYDMEDYDMEDAMVINKASYQRGFAHGTVVKVQASYQRGFAHGTVVKVQRYEFFESKNAEMVFLGKPNSKNAEMVFLGKPNERNYGIGADGLPIEGRLYQQGDCYYGTFNLVSGQFNEHKFTNSEPLVSGQFNEHKFTNSEPAYCGLVRIVQEADHKNKNVQHVLIQWRIQRNPIIGDKFASRHGQKGINSFLWPPESMPFSESGMVPDIIFNPHGFPFPSRMTIGMMIESMAGKAAAMHGTSYDASPFVFNEQNTAIEHFGKLLAKEQNTAIEHFGKLLAKSGYNYYGNETMYSGIDGREMKVKIFFGIVYYQRLRHMIADKFQVKVKIFFGIVYYQRLRHMIADKFQVRRGPVDPSEFNDHKKLIKNNLLVYS

SEQ ID NO: 119391 - protein, 231 aa, Heterodera glycines
MKVEINGASTTGFAFSDLTTKLHKNVLSNLGLNMANHVESDTISLTVDALYYAWQKFADTKAIVLIIVAKNRPNYYESWIIKKKLHDKYAINSVVLSLFQCAKMLTLNIKDFSLRLNKQIVVAVVFNQQTMLNENTYQMKARLIIERSTAIKAPSLIAVLAYSKKIQQVIPIKLFWDTALAQPGMVERFFPNPEEAPLIKAIRDTEAKIWTIERDNDKFAEMMKVKNFEFK

SEQ ID NO: 119392 - protein, 964 aa, Heterodera glycines
GLISGVPPQQQVLSPAQYQQMGYYYKGPGPPPGMMPLGHAEMMSASAHSREEQQQQQKQQHFQQAQQQQQMFQHQHYLLQQQQQQQPPPQGILYTSQQQGTTVAAAGAQQQSNFGAGYGMQQQQQQQAKQAASAAKAAAAAQQMIKSGGGSATAPGAGGGGQSAAAAQPYNQQQQQPMFYNTGQQPQPYQAQQPQQQQQQQQAAAAGQYPMMGMPSQPSAAGYPQMQYPTSADYTQQMAMQRQAYYLQQQQQMLAAAAAGGGGGGTAVPSSAAAAAHIAGGGGAGAGGAPTTAFYHQSYMNPQQHHQQQQYMMQQQQQQFYRELYECDQQLNALLPQAQQNAEAAMRMHRSYLQGHLIQLQQQAAAVAASMASSSNIVPPSLSTAGMVPMQQQQPTATSAGADIIASPSNASSREQPPQQQFMGAQPTAAGTQYAAPSSAYGIAAQPPQQQQPQHGHFPGATGQQQQQPVAAGQIPVQQKLQPSSNQQPTSAPQHQFGGGTSSAPSSYMPPTPQTVVGAAAGYSSPAAGGGTPQQQHQQPTSVGMVVPQQQQQPQGITASHQQQQQQAPQPQFTQQHLAPPSVAVMSASSQVQVNIRPEMPGRTLISVYHSQDMAPPTVVSSSAAPVASLHQQQPQQHAATYSLSSTADASSAAASAIMAQNLAMAAAAAAVKDSIPPEPVPSNIVQEQKRRQQQMLLLQQREEEDQQQQQQQQLEQQQLQKFKQYQQQQQQQQQKQQSFNLGASTMPTKTSSLSTSPPPNAPISPATKARDNEAVQQDAAQHRFRSASSTQMAPSAAPFRHRSHTSAMVPQPEIAVEQLQQQRQHSQQKSPSPYWSSSSQQQRATTPPEFTMPSSHGHARHRQQQSYAGGGGSTMFGNSSKVPTPPSPAVVVRAPPPPPPLLPPAVVVVQNAKVALHFVAKHAASSFASCATVRRIVARESVAGTVKIVPRKPPPEVKKDAAK

SEQ ID NO: 119393 - protein, 149 aa, Heterodera glycines
MNSLYFEDLFTVKNIDPDGKKFDRVSRLFCDSESFKMDLILDVNTQLYAMGINDKFRLMLCTSIRDDGLTEEGEYDKSIENIPRVRMFEYVMYGKIYRIENDEGTAETSRLTAYASFGGLLMRIQGEANNLTGFEQDKNIYLLLKKVPN

SEQ ID NO: 119394 - protein, 209 aa, Heterodera glycines
MNIENVFPQILLILILGIRFLDSAPPKNESAGKYISSSSSGKYTVNAYMGDIEKQLNTFQTEKLIDEVKRWAENMGLKIKLFDQRIGNNGIENLIRRKPGFHSANSNGFLKCERATKLHSFSAMLQVAPFTLFPSPFSGTYFDQAYNAQTAFNLLYFRIMRDYEFLREVYQGLIGHDEIISSAFDIMDQVHSDGIKQPLTLLFQRAVNL

SEQ ID NO: 119395 - protein, 320 aa, Heterodera glycines
MAYKTYLSHELSQSLEAKVSHLTAAGYDREDASNLQNANSEGFKSRRQRYLGGRTAQYIAKIDADLFNVPQYLINHCEIDITIQPHDDNFLLIDTLDPPGQPYSLELVGLKLYCKKVSLMDGLALELAKKLEMKPARYAVRKTMMKALFISPGRYEFNANLFMDQVPRRVTMGLVANSDYVGNIKRSPFNFQHFNVRELSVVANGRSYPQAPYDIDYENWKFVRPYNDTQEALGFANSTYGNGIDYFSFLHTHCIYVFNMTNSGDDHGGLFDLIKKGCTAVNIKFKKPVPDGGITLIVMGEADSIYFLDKNRTIATDTTI

SEQ ID NO: 119396 - protein, 365 aa, Heterodera glycines
MTFHKIDASSIDSITNAVDFFSIPPTNVTVSSSKVFEILPSNPLTDTPYHFKIHSSQNYIDLSKCYLLTEFRMRKLTPPNGEWGHLDATDQVVPIQLIGHTFMRDLKIAINGREIFNSNSLMAYKTYLSHELSQSLEAKVSHLTAAGYDREDASNLQNANSEGFKSRRQRLELVGLKLYCKKVSLMDGLALELAKKLEMKPARYAVRKTMMKALFISPGRYEFNANLFMDQVPRRVTMGLVANSDYVGNIKSSPFNFQHFNVRELSVVANGRSYPQAPYDIDYENWKFVRPYNDTQEALGFANSTYGNGIDYFSFLHTHCIYVFNMTNSGDDHGGLFDLIKKGCKAVNIQFKKQYPMVEYTYCDA

SEQ ID NO: 119397 - protein, 119 aa, Heterodera glycines
LPSWIFCTRYSDRPSSGRGPRTRKSKRGPRTRKSKRRELTEEEKRPRTAFTTEQLERLKTQFVHSRYLTEKKRQELAHELGLNECQIKIWFQNKRAKLKKSAQRVNPTPHGLLEQPLFK

SEQ ID NO: 119398 - protein, 168 aa, Heterodera glycines
MRKSKQKLEAGPSSEVAAVQHVVRLRHIPYGFFEKQIHGYFSQFGDVKRVRVMRNKKVRLISLILSDSANRHSILICQGGHNGTAFVEFKEAAVAKIAARAMDNYLLAENRLRCKVLGQEEVPKCIRKGRCFVKIPKIAEKRVKQAKEQNEQRTPEKEKRRMVGKLRK

SEQ ID NO: 119399 - protein, 224 aa, Heterodera glycines
QYSYIIPFIRLLTKSSSAVPCSVLALSDSSRVAVLALHNNYRSQLAKGTAANLTGTMPAGSNLIQQKYNTSIESVAQNWANGCSMSHSSSSGMGENLYMTSSSTISEADALKQACDMWWAELKQYGFQSSLVLDMDQFNKGIGHWSQQAWANTAQIQAWANTAQIGCAMARCPSSTWKTWVVCNYKEAGNYLNQLVYKKGTACSQCSDYNGASCNSTGGLCVLP

SEQ ID NO: 119400 - protein, 141 aa, Heterodera glycines
FKKLIFTNTFYGMGNTKSKIGELQLWKGRAPFSPQQLDEYQDCTFFTRKDILRLYKRFHQLDSRIVPANIQGGQAQTVKLSMEQISQMPELRENPFKERICQVFSEDGQNLSFDDFLDMFSVFSEMAPLQLKLKYAFQIYE

SEQ ID NO: 119401 - protein, 261 aa, Heterodera glycines
MSLSEKSQFEVTALLKSKSVGDVIELLISRNVAEEPKQMNAKNEKEDTLEHHQSSDLIFDSLNAHFSGSTDLELHCLEIPLNDTPGAGLGLSLKAQRVGATDAGLFIRSILHGSAAFKDGRLQVNDRLVGIETQNLLNYELNGEALEAFMRTISQLPQSKHSLRSISEKRSLVTRRDPSQLRTYQGIVHQRQISAPALSSTAVANSTRSRRSLYDELRRVRSTHSGPSAKKQRPKTMFYVDESGAAVTSESSLIPNFIVTN

SEQ ID NO: 119402 - protein, 209 aa, Heterodera glycines
YLFAELKTSESKDNVSEVLTQISKIDPEFDKSEWLRFCEKEMIPNILESTYQMNFEILRDWCYEKAFNLIAFNLIANSIKEYEKIGFNTRDSRIIDVSKVELVTGNMTDQGPTLVIQFQVLVTGNMTDQGPTLVIQFQVFMTNVVKNSEGKIVQGDPEKAVRVRHIWVICRDMEEFNPATVICRDMEEFNPATAWKLLELHMIKEDLFV

SEQ ID NO: 119403 - protein, 224 aa, Heterodera glycines
KTFVLHLGNKNPKEIYKIDGNIINVVDTIRDLGINIDNKLQFSNHVTQIIKNAYLRMRSLFRVIKSKSTRIWIILYKTYVRPLLEYAPEVWNPSLLKNIKKIEKCQKYFTKRVLFKCSLPPIPYQQRLEYLQLPTLESRRKLSDLFMAHKIIYGRTEIPLKYSNLLNALTFPFIDLTRNINAKKPFAGRVTKIWNQLDKRLIEINSLNFKNKIKTISIPVKTGK

SEQ ID NO: 119404 - protein, 372 aa, Heterodera glycines
KSTLRPVAFAAVVFSTVAISSCLLTFPLVFHYVQTLQATVQGEVGEVEYCKSRSRDMWREMVDVEMATLDTEDELGMARRQRRQAEALGMARRQRRQAEALCCTCQQGPPGPDGDPANLGKDGAPGEGPGPPGAPGVDAELHDRVLPVPPQCPCQAPPGPPGPPGPPGNDPPGNDGLPGGPGRNGEDGATGPIGPAGPVGEDGATGPIGPAGPVGPPGQPGPPGQRGPPGEPGQLIQRGPPGEPGQLIPGEKPPPGPPGQPGRPPPGQPGRPGPPGPPGKPGQGPPGPPGKPGQVGKDGENGPVGKDGENGPPGPPGEPGQRGPPGPSGPPGLPGQVPPGPSGPPGLPGQVGQAGAGGSCDHCPTPRLAPGY

SEQ ID NO: 119405 - protein, 493 aa, Heterodera glycines
PELIAYWGYPVEVHTVTTEDGYVLQLHRIPYGRSHSAVPSSPRPHSAVPSSPRPVFFLQHGLIASSADWVTNLPSQSLAFILADAGFDVWMGNVRGNFYSDAHINWTKLEKKFWEFTWDEMAFKDLPAMVEKSLNISGQEFTWDEMAFKDLPAMVEKSLNISGQPFLYYVGHSQGTSIIFAKLASENETFAKKIRKVFALAPVASVKNIRKVFALAPVASVKNIDGLIAFLGRYFGRNLWASAAVFGTHDFLPHNWMSIMFAKIIAVFGTHDFLPHNWMSIMFAKIICGMSWRNVLCENVAFQIAGPESNQMNQSRLMVYAEHIPAGTSTWSRLMVYAEHIPAGTSTWNIIHWAQMRNSGKMQMFDFGDKAQMRNSGKMQMFDFGDKRINRKHYGQANPPLYNLSRISVPPLYNLSRISVPIYLYYSDTDWLADARDIEETIETILRSVRPQFIKRALKVTKFNHFDFVWGLLAPEKIYKEIIGTVKRHEKAI

SEQ ID NO: 119406 - protein, 238 aa, Heterodera glycines
MADESATNAGGAGAAGGAQPAEYIKLKVVGQDSNEVHFRVKYGTSMGKLKKAYAERTGVQVRLLDCGSFAGITLHKPVCSHEVDFTTSPSSSFGHQNELENVQIRAKTLDLPSISQQNGGVHRHSVTCFATEQLPLPGRRNSLSEESNRTISKPQQTHQLGLVENNGNQRGEYDDEQEEENEERLLGSNEVGNGGHDEGGQIGFVEKDPQPFKFSCCIPFDSKQTGMLEVVVKTRNIQ

SEQ ID NO: 119407 - protein, 313 aa, Heterodera glycines
MQPFVHWSKCIFKRPFSNSSKLFSSSFSMGFNFEFTEEQKQLQAAVKKFTQDEIIPKASHYDKTMEFPWEVIKKAHANGFMNVDIPSDCGGLDLELVSNVLISEVIGYGCTGIGTAILGNDLAATPLVIGAKEEVKKKFLSRLIDEPIMASYCVTEPGAGSDVAALKTKAEKKGDEWVINGSKMWITNGGVASWYFVLARTDPDPKASTGKAFTAFVVDGNTPGIVRGKKEINMGQRCSDTRAISFEDVVVPNAQVIGAPNEGFKVAMKTFDKTRPIVAALSVGLAARALDEASKYALERKTFGVPIAQVDKS

SEQ ID NO: 119408 - protein, 168 aa, Heterodera glycines
MPPTSKKTGKAVAKAVEAKKKLAKGQHIVRKKKMRTSVHFYRPRTLKLARSPKFPRKAVPKRNKLDSFSIIKHPLTTESAMKKIEDTNTLVFIVDVKANKHQIKSAVNKLYNIEAQKGRVIRIVNTLYLTVYSSKVNTLVTPDHTKKAYVRLAADYDALDVANKIGII

SEQ ID NO: 119409 - protein, 629 aa, Heterodera glycines
HSYNRAYFVMAADNFDAQRILNILAERDNFQSNELADQLAIDHQRLIGAIKSLQVKEGLVCTSEVKIKRIELTTEGEEIIQKGSHEFNVYKIVGEKGISKSEIEKTSFGPIGLGKAMQCGWVGMKTSFGPIGLGKAMQCGWVGMDTTRRSALVVRKVANAEDGAKEQLKLVRKGDQLTAQCVAQLKKRKWIMESAIKALSVAKGPNAIKALSVAKGPNFTTTVQKQELDLTSEMIASGSWRGGSWRGKQFKQYNFSAMGVPPPSGHLHPLLKVRAEFRDIFFQMGFSEMPTNRFVESFWNFDALLQPQQHPLLQPQQHPARDSHDTFFFHGPALGPALSTEFPEDYLESVRKVHSEGGFGSIGYRYDWKLEEAQKNLLRYRYDWKLEEAQKNLLRTHTTAVSARQLYLLAQKPFQPSPFQPSKMFRIDRVFRNETLDAAHLAEFHQVEGVVAERNLSLAHVIGLFTEFFRKCGIENLRFKPTIENLRFKPTYNPYTEPSMEIYAFHTGLNKWVEIGNSGMFRPEMLLPMGLPEDVAPEMLLPMGLPEDVAVAGFGLSRTRPTMIRYGISNIRELFRPTMIRYGISNIRELFGHKIDLEMIYRNPLCRLEQGHKIDLEMIYRNPLCRLEQ

SEQ ID NO: 119410 - protein, 369 aa, Heterodera glycines
GPTANKGYRPDEALRIFGSKLTPYEHTELFNYQRVYFVGSQAKKRLCVAGGANNSNFDDENGSYALVSHDHIAYRYEILKVIGKGSFGQVKMEITQFAIQQFSVRQVIKAYDHKHQQYVALKLVRNEKRFHRQAEEEIRILDHLKKQDGDGSHNVIHMLDHFTFRNHKCITFELMSINLYELIKKNKFQGFNLTLVRKFAHSMLQCLELLHRNHLIHCDLKPENVLLKMPNRSSIKVIDFGSSCFDDQLILGAKYGMPIDMWSLGCILAELLTGYPLLPGEDENDQVDWFTFGPFSVSIGHRTFGNAKSETIGGRKAISELLFIQGTPALLPSHSAYGRHHRSDWGTIKKGQTEGTARVTNNAERTEKS

SEQ ID NO: 119411 - protein, 511 aa, Heterodera glycines
RKWNDRNQAQSHRDDCSFEKGYVAISLYYLDGPMSTVNLKAQVNRKSKNKVGDVGDLPIRKCAGNALSVFRGHECELSFKDRAHLTEYIRHNAQLFRTDTYLNVLSPTAQLFRTDTYLNVLSPTPYHSFLTANYRARIGSKVWRKRSKKVSERVKAGERKSSQGTGREVPRMAILWSGHKKLDLETVFIHVMGQENGQMRRCSASGQRNADSHQALLLFKKLLVACCDSCERRASLITVRRNAEIDTKANDEEGETKREEGETEEETVRRNAEIDTKANDEEGETKREEGETEEEDRETEEENTFECDEEAKTEVHDTANMYFNTVYFNTVVLPEMEYVEDFVDFLIDAELSDLPVLKRACERYLCGELDSKKELMKKELMTSLILDFFFIAMVFSLPVMKSMTLLPVMKSMTLTELCDRYAELEIVDKLLEQEEYRNVDKRIRQICGERNLHDLVDEEYRNVDKRIRQICGERNLHDLVDECKRFREQCTRVKKVELNKEKASEKGGEGE

SEQ ID NO: 119412 - protein, 352 aa, Heterodera glycines
MPEKRAEDDDDAVSQSPGTASAERKDSYDLVSLSAGTRVSGGRWTIIKELGQGAFGTVFLCSGNTDAGRREAAMKTERADEEPFLWKEAEIMRKVSTVRVGQGSEHFCRCFDEGRDVQRDTQSGELVTFNYVVMSLIGRGLFDLLSKAGDVFSPGTAIGVSLQLLDALRALHKVGYLHLDVKPENATIGRAETNERRRIFLIDFGLARRYISQSGRFRRERSKTHFRGTPMYASIAAHARADYCRADDIESWFYTLVDMYTGKLPWTHVTSERRTGKMKRLRLSHKPKEVQQRALHALLKKCPPIFYDILLHIRPKYEWIDRVLRDYLNTNGIHEFPYDWEKEANRRTRSAT

SEQ ID NO: 119413 - protein, 185 aa, Heterodera glycines
RYVVKDLVPDMTLFYEQYASVQPWLQKNKPTKLGEAENFQSQAERTKLDGLYECILCACCSTSCDGLYECILCACCSTSCPSYWWNSDKYMGPAALLQSYRWIIDSRDDKANERLERLTDPFSVFKCHTILNCTKTCPKHLNPAKAHLNPAKAIGEIKKLLTGMETKPAPKQATNTKPAPKQATN

SEQ ID NO: 119414 - protein, 88 aa, Heterodera glycines
MFSFECQSKGVDAAEMVAVGCVTNGGEHRRIGHQWQDGDFLFYCKRKAAGLCEKSCLGCLLQGRRLYDGDRFRHGRTVFQCEIRPKRH

SEQ ID NO: 119415 - protein, 522 aa, Heterodera glycines
SAWATVFHGRRGGRSKSLRVQLLLCFSAARNMKKLVQMPKDLQSTITCMFGLRFLSMVSTITCMFGLRFLSMVWTLVGHSFIFIQAFLSNVDEFKDDLVDHFWNQWITNFTLSVNQWITNFTLSVDVFLVLSGTLTAYSWFRRAQQSHSDESRVGWASWPYWLRFYRHRLVRLWPAYIYTLFAVTTRVSVTHYHPMWPPTDPAVQCPKHWLENVLFINSLTDNRCLPWTWYIGYIGTEFIFYLLSPVFLLALRHSALYGLSLVGLVSAASALANLIIMLQYNFPPTQMLWKQPSNFSPDFIKHHLVIYIHHLVIYIKPWYRIGPYLVGLVLGYVLASPQRKRSDGTHSARFVWVGWSPQRKRSDGTHSARFVWVGWATAGCAGFWSVFGLYPALQGWDCLFRPLYHLFYGSCARTIFALALWDCLFRPLYHLFYGSCARTIFALALGWLIYACHTGIGGPINWVLSLSPLVLSLSPLLPLSVLSYSVYLFHMIPVVFTYMFHMIPVVFTYMIRTPIHYNSII

SEQ ID NO: 119416 - protein, 193 aa, Heterodera glycines
MPQNFCQNGTQFPGHAQTPSNGVVGSIDQALYQYIGRYMDLCCASTGDTDYKDRPFVQRLSRFESEFGDTEGNQIHEKRAVAQDYRELMDGNVDDCFRLGIGLAKKCLKLYTPFNESDFILCSPLGLKMLLDETAPEGDETTPKKQKRQKASAPFLRLGTEKRRKTDEATNDDDGGPNDFLASIELLIVERVI

SEQ ID NO: 119417 - protein, 426 aa, Heterodera glycines
KYCHLLIFLKPFKDPSIVNGPQTQSTQNKIKLSDIELNAGIIWNILRRLPRRNSTSPDNVPYILLKNCAEPITKILADIFRLILDSGQIPEIWRTSLVVPIFKKGEKTDPLNYRPVSLTSTVCRVFERILSSKILEFLNSTIDKEQFGFLKNRSTTTQILKTMDDIYNSIQKNQQIDIIYIDFVKAFDSVPIDLLLKIKKIGIEGKIQNFLTNFLKNRSFKVKIGEELSESFKIFSGVPQGSVLGPLLFLIFINDLPSFITIDGIKMYADDVKLYYAHENDDHSNQLDKAIEALEKWSKINGLEISTGKCFVLYRDMKKEYFINSKKISESDNVRDLGIIIDSKLNFSEHIKKIVRNAYLRIFQISRVLKSREIKTLTAAYKTFVRPQLEYATEVWNPNLKKDIDKIERVQKFFKRKALRKCGFVY

SEQ ID NO: 119418 - protein, 131 aa, Heterodera glycines
CKSRNTCPAGPAGPPGDIGPSGVPGIPGKDGIPGQAAEDSQNAPLKGCFNCPAGPTNCPAGPTGTPGTAGRPGIRGMRGPKGYPGQPGRDGVPGLPGLPGEQGQVGENGLDGRLGPTGFKGKDEEKQLGRK

SEQ ID NO: 119419 - protein, 153 aa, Heterodera glycines
DQLRTESPTSQEKDKFPAKAHLALAKHKVFAAAVPFEFGGMNFCQKDMLQLSECLGGQDLNLLSTYGAFSLATSLIIQYGTTEQKEHYLPGIASGQWRPAVCIDDETTGPQSNEHVFSAKGQQQFLSATKINVQNAHNANLFIVFANRTVGDV

SEQ ID NO: 119420 - protein, 309 aa, Heterodera glycines
MVGITELAEATKKAFGAGPLIAANCATAENAKSGNEVEFGSMKFYGLCGIGGILSCGITHTAIVPLDLVKCRIQVDPAKYKGIIGGFKVTLQEEGVRGLAKGWAPTAIGYSMQGLGKFGLYEMFKNVYAGMIGEELAYSCRTYLYLAASASAEFFADMMLAPMEATKVRIQTSPGAPPTLRGCAPFIYRTEGLMGFYKGLPPLWMRQIPYTMMKFACFERTVELLYKHVVPKPRAECTKPEQLVVTFIAGYIAGVFCAIVSHPADTLVSQLNKDASADAMGILKKLGPLGVWGGLLPRIIMIGTLTALQ

SEQ ID NO: 119421 - protein, 262 aa, Heterodera glycines
MAYKTYFSHELSYSTTAKDSHLNAAGYYRDPGDVLETGDGCTARRDLFALSNVAQFIAKIDTDLFNQPLYLINFCELDIEILPNDNEFVLIAPLAGAPRYRFEVVGLKLYVKKVSLMDGLALDIARKLEVKPARYAVRKTMMKSLFISQGRYEFTANLFMDQIPRRVTMGLVANADYVGSIRRSPFNFQPFNVREISIVANGRSYPQAPYDLEYPNGRYVRPFNDMNEAVGFANSSESNGITFAQYGKTHCIYVFNLTNSGG

SEQ ID NO: 119422 - protein, 112 aa, Heterodera glycines
MSYRGLTKDVPKDEKIPFKWSAPEVWTQNSYTLKSDTWSYGVLSWEIFCDGAEPFHGMNMEAVMRVVNDGYRLQFLDNAPANFINLINDHVWDFDQRNRYSMKRVYELLKEM

SEQ ID NO: 119423 - protein, 752 aa, Heterodera glycines
MDGGHVWHNISQQEEEPEEAPLNPLKNRTKLDQLRLKHERDKKEREEEDKRRQQREEQQQRKQREQQRKQREEQQRKQREEQQRKQQGEQQQKQQEKEQEKAKKSEAERLAKEKKTEKERLATEEVERLAKEKAEEERLANVKKEDERLAREKKEKEDEQLAMEAEEDRLAKLKQRELELLKELKPWRGGYMRLVHGKDPTPDVHYLHEKDDYHFVNAVHKYIVRHPELPWDSPEFNPSANIQQNIAEFWEIFEREVFDENYELKTREEKNELIELVKGFRFYFADELGRFTLRIFSDKISHITLTDQLAYVLGYEQQQEIHNEDQAKYAVDLAGGVSHLCIYLNSGIIESMIFGNSFANLLQVIAVEVFVQIHPITSYIDLSKVFVCTEFKLKKIAEDGVVVDVSANVAVGLIQMPGATFIRNLKVHINQREVYDSNQLYSYKVYLDTELSYPAAAKDAYFGVAGYFRDSDSTKVNEKRKKAVEESKSFQTISKLSADIFNQDLYMISNVEIDIELALQSDDFMVHQDDANKDKYTLEIVDCRLIVKTVDLMNGLSLDIARKLDTEPARYGIRKSFMKSLFVTGGRYDFSANLFTEEVPRRVVIGLVSNQNYIGHNQKNPFYFNHHNVRDIELTASDRTYPQYPYNLDYENNRYARAYHDAQEHLGMACTTESNGISYSMFKTAYCLYVFQMTNAQEDSPGFELIKEGCTAVNIRFAVAVPNEGVTLIAYAEADGLILIDRNRSITSDLTV

SEQ ID NO: 119424 - protein, 96 aa, Heterodera glycines
MAPPTNKVQKVMVQPINLIFRCLQSRSRIQIWLYENASSRIEGYIIGFDEYMNVFDEYMNVVIDEAEEVQLKSLNRHKLGRILLKGDNITLIQTIQ

SEQ ID NO: 119425 - protein, 50 aa, Heterodera glycines
LPNAHFHKHWQRRIKTWFNQPARKERRRAARSAKAARLAPRPAGGLLRPV

SEQ ID NO: 119426 - protein, 252 aa, Heterodera glycines
MNLKRPLFLRPNLRINTSRGPFHLIRFLNKFVFSEKIVGYKNLKVSVLYSDPTLFLTSLYECEQKEDDSTKCDDIEYRIKDALPQTQLNAYLTIEKFRQKLSEQKNFVPFGELITKFCLKDSEIEHNFILYKFEKKQQNDAQFDQGYKFLERVQALAHWYIDAVSYTDNDDHRYFNYFLFAVRPSSDGDGSSVHRFAGYVNLYRFYHHPDKERVRIAQILVPPTYRRIGLGPRLLRAVYNDLCRAERVFDIT

SEQ ID NO: 119427 - protein, 285 aa, Heterodera glycines
EIVVQAQSADPEVQMLAVTQARKLLSSDRNPPIDDLISSGILPILVNCLESPNATLQFEAAWALTNIASGTSDQTRAVVQAGAVPHFLKLLESPNMNVCEQAVWALGNIIGDGPHFRDYCIELGIVQPLLKFVAPEIPLNFLRNVTWVMVNLCRSKDPPPNRQIVQMLLPMLAILIHHQDTSILVDTVWALSYLTDGGNDQIQLVIDSGVRFLLKLTTANIWLKTGCPIFGPSAWPSGSQSANGRTACSWQHCDRDGRSDAIGVGLWGPPNDAGTSLSPKGKDQQ

SEQ ID NO: 119428 - protein, 234 aa, Heterodera glycines
ELADEQIHLNAKLQLMLEAETEKRTSETLLKQIREEKQCIDRKKDEVERELAMVKPEVEKAKSAIAGIRKAQLVEVRSMASPPNAVKIAMEAICLLLGETQTEWKSIRAMMFKGDFISRILQFNTDSITPEIMEKMEQYEGNPEWEFEKVNRASVACGPMVKWARAQLSYAKMLRKIEALENKIQELKEQQLTMIRDGNGDMPCPSSQKRLNDNGEIQCPSSSTSSTFAASTSD

SEQ ID NO: 119429 - protein, 413 aa, Heterodera glycines
SPCPIVFSSDNECVLSFSYKKGNKERNREKRKDWFTRATLLYTAADKILMYDQNHLLGRAYFCLLEGNKVEQADAQFNFVINQSQGNEGRVIPAMMGKACIAFNRKDYKAALHQYKRCLKQNPNSPADVRVGMGHCFARLGHMDKAKLAFERALQIDPNNVPSIIALAVLELNSGIPEGIRNGIQALGQAYHREPENPMVLNHLANHFFYKQDIEKTHNLASAAHQLADNDAMRAESMYHLARCYHKKQDYHHAFQFYYQATTLSHPKFVLPYFGLGQIYIYREEYENAIVAFEKVLKMVPNDIDTLAVLGSLYTNVPHKDPKIVVERREKAREYLTKLVDSQTERAPVEALIELAQLLEQQDPQVSLNLYTRVANLLKDDIGVDIPAEILNNIGSLHFMLNQLDEAKAIKLT

SEQ ID NO: 119430 - protein, 554 aa, Heterodera glycines
AIFSNFRSLTITICQHFISKFRSILADGYLGKFRTTIFFLSLLYAVGQCVLCFASTLNGTSSLHPFLDILGLVIIGVGTGGIKPCVCSFGGDQFEPHQQKMLSVFFSAFYFAINAGAMISTFISPMFRAMPCLGQDSCMPCLGQDSCYPLSFGVPAALMVLATILFMSASFWYIKRPPKENIFREVYQVGKVTLVNKWRSKGNKKRGSHWLDFYFDSHLCDSDPKCEELRTLKDNPNECHKRRLVSDVRGLLRVLVVYLPAPVFWALYDQQGSRWLIQSVMMDCRLVMMDCRLWGDTLLLPDQMLTLNSVLILLFIPMFQVIVYPMVSLLAKITPLRKMVAGGLFAALAFVLSAPLRKMVAGGLFAALAFVLSAIVQFQINTTLPDIPMDGRAFVSAITTLPDIPMDGRAFVSAINAFDNSFKCAQRMEKGQKSVEWSHKSKADKGQHSQNPFRHQIRTEKGRKCSNWTGDSESGTLKGRGETAGGSIRGRGGPGVECRTHLLDDGQSNGRSVWETDTLKPTGGKGEFKVGVPKLEGGGPPKGGWTGKSRREGS

SEQ ID NO: 119431 - protein, 350 aa, Heterodera glycines
QMSVPGSQPPQQGEDAEERLINEEYKIWKKNCPFLYDMVMTHALEWPSLTVQWLPDVQRQEGADYTIHRLILGTHTSDEQGEFGGFGTVTGKIEVEIKMNHEGEVNRARYMPQNPVLIGTKSPSSEVYVFDYTKLMRSFSSIITNLIKSGLSWNNNLPGHLLSASDDMTVCLWDIQAATANANFLDAKSIFTAHTAVVNCLSFNPYSEFILATGSADKTVALWDLRNLKLKLHSFESHRDEIFQVQWSPHNETILASSGTDRRLHIWDLSKIGDEQSPEDAEDGPPELLFIHGGHTAKISDFSWNPNEPWVICSVSEDNIMQIWQMADNIYNEEELDPAMVEGVAAASGA

SEQ ID NO: 119432 - protein, 100 aa, Heterodera glycines
FCEMLANGAQRYVDRETLVPFLVADNDQWFSYDDVESIRNKLSWIRQNSFGGAFVWTLDFDDFNGQCPGSQLGRYPLIRTIAQELGGIQLSQTPVSALSN

SEQ ID NO: 119433 - protein, 279 aa, Heterodera glycines
AFHHLNGINVRAYDPADLPSDWQPKGMYSRVNALKAFDPVLKTLLSFGGWSFGTRLFQGMSSNEANRKVEANRKVFIDSSILFVRKYGFDGIDIDWEYPNGEAERQNFIAFLQELKDAVGAEASSSGKPRLLITAAVAAGTENIDNGYDIPTVGKLLDFVLLMSYDFHGSWEQQTGMNAPLYGRSKDVPEKRLWNVAGAANYWAEKGMPKSKIIIGIPIIIGIPTYGRGWTLSNPQQFRGLDRGWTLSNPQQFRGLDAPGQAAKATKFVQLAGTGAYFE

SEQ ID NO: 119434 - protein, 230 aa, Heterodera glycines
RAEFMTIFSKFLLDVLYKILLIFRVRIFKNFKIWQINSLFPVLFIYERARASTVRLGPYPAIDSMIAENRFTVLTRLMRVVTHFISHMAPEVTHFISHMAPEVICPSLCRSLLYICRSGFSFQESDLRHRVMRERASVEVFADFSKKARIRVVSPFLVESINGVNFALLNGHADIALRALDAAHQRAQYEMMADVLLVCRPIIFTLSICLRRQRRRRSWRRHQKGGDHAS

SEQ ID NO: 119435 - protein, 382 aa, Heterodera glycines
SSNFNLLFDRRLSFKEPSLNTLQQFSVVIGTEKWLTENEIPTENYLMETLHAERQSGNILTLCAVNGKVAAVISIVDQAKREAPLAKVAAVISIVDQAKREAPLAVWALYQMGMKVVLLTGDNAKTAEATAKRVGIREVYAEVLPNQKKDKIKQLQFQNQVVAMVGDGVNDSPALAAANVGIAIARGSDVAIESAGIVLVKNNLVDVVNNLVDVVSAIKLSRKVVRRIRLNLFFAFVYNAIGVPLAAGVFSPWGVHIQPWMAAAAMALSSVSVVSSSLLLRRFKKPTEHSLSSTEFKPTEHSLSSTEFKRYRRNLNDQNGIEVNVYKGLDKREGKRNTEQTDLSAFLSSGSDLSDDDGPNLSDRANARAKLFENVRTEELAQ

SEQ ID NO: 119436 - protein, 308 aa, Heterodera glycines
MYTVDNNSDKGFRTIERFVDHYLRTGTSVTSERFVTLRNAVHRANWELSHSSITISAELGRGAFGTVYRAKLTERNGNNSQVAVKEVSQTSTKEQIKEFMNEARIMRQLDHPNVIRFHGVAVGQEPLMIVIELASDGSLIDYLKTQRRSARTRLFMCVGAAAGLAHIHSKGIIHCDIAARNCLYSNGVVKISDFGMAHRGPVKKMEPNARVPVKWLSPEALAERCFTAKSDTWAYGVMCWEIFTNGEVPYSQMAGSDVAVSLINGQRLNFPRDAPSKLVEFILQHIWDAETSGRYSMAAVYDWLKRHT

SEQ ID NO: 119437 - protein, 345 aa, Heterodera glycines
LSNAYLPVQKPEFINVSLPVDTMMPKVGNSQDSGETESKNIEMDSNYQPITQREEADFRRLLSKSNLQIGQAKQFATVLSEQLAQLDTANLSTIMENKQNVGGLIELVDTAIELAECIERQLDEYDTLLSFVRDSVELIEEKDSLRHIEQQNNKRLFDELKDFVFLMEMVHDQHIDALKSANLSDPTGYLLSLFSCAITISQNQLVLSSCSRGRPFSEQKNATQWDESVSDKSGIAEQIDGGSHSLSADNAISSLKPYTDLTETAVAECRTVVESEQKFSIRFFHLNIDILSQVGVEMNKNQNDGRKTVEKQLNDQIKFAIGDIFDSLPTYFYALVSTFKDHNLV

SEQ ID NO: 119438 - protein, 151 aa, Heterodera glycines
PQGDHHLPVNSLVSLVIWFCCLLYASIRTSSYTALGKIGGAISSGEASMSVEEGDRGTTGRNVYDNEKGSVAYSYSFFHFIFALASLYVMMTLTSWYTPSDDLRYLNPSDDLRYLNDNMASLWVRVISSWLCAALYLWTLLAPVLFPDRDF

SEQ ID NO: 119439 - protein, 140 aa, Heterodera glycines
MVHIVFDPSIAQYDDQNYIDLSKCYLLTEFRIRKENVNGQLVNLTVDDADIAPIQMIGQTFIRNIKMSINGREIFNANALMAYKTYFSHELSYSTTAKDSHLNAAGYYRDTGEVLETGNGCIARRNLFAGSNVAQFIAEN

SEQ ID NO: 119440 - protein, 154 aa, Heterodera glycines
FAIVWLLHCATADPYDLIEPVDISSKLNINFESPKWQERKEALDALQQLLSQTPRLADSPNYREVIERLAKTVASDANIIVAASATKCVMLTVASDANIIVAASATKCVMLFAKGLRAKFTPHVSLVVPVIFDKFKEKKQLLRDALVECIDVIA

SEQ ID NO: 119441 - protein, 259 aa, Heterodera glycines
ADDVKLYSDTEIMHKALHNLFEWANNWQIKVSIQKTFVLYLGSKNPKETYKFDGNTINAVDTIRDLGVNIDNKLQFSDHINQITRNAYLRMRLFRIIKSKSSKIWITLYKTYIRPLLEYAPEVWNPSLQKNIKKIEKCQKYFTKRVFFKCSLPPIPYQNRLEYLQLPTLENRRKLFDLFMAHKIAYGRTDLKLFSIFNPSTRFHPLLQILKITGQKIHSLCWEGNKLWNQLDKEIIKINSLNQFKIKLKSSLGSVRPGK

SEQ ID NO: 119442 - protein, 118 aa, Heterodera glycines
MIDRNSPLHMFVFANRLATFEGRWNYKEGCTAEKMARAGFFCTEKRKKPSDAAKCYICLHEMYWDPEDEPWEEHKKHRPDCPLVTIGKQNEEEFTVREVLLLLAYEHSTKMVGANAIE

SEQ ID NO: 119443 - protein, 87 aa, Heterodera glycines
KDSKYQTLAGLDANIFVKNAPPAAAPKPQQSKAPQQLVKDSKYQTLAGLDANIFVKNAPATPAKAAPQAPVKDSKYQTLAGLDITSL

SEQ ID NO: 119444 - protein, 197 aa, Heterodera glycines
FAIRRMPKVIMITPPPHLSTLGQDQIIADLGRLIVENCPPMLCTGLDCAVVTERNGCQLDCAVVTERNGCQLCACPIGSPARGCDPMPFVLWHDLILCACPIGSPARGCDPMPFVLWHDLIVNGCPNITVNTRDSAQKVHRWFRRVNRFSNTDQCEVNRFSNTDQCEPPYIFPYCPELDFNLWRSPRTKQECELVSL

SEQ ID NO: 119445 - protein, 136 aa, Heterodera glycines
HITLQLIFLDGEEAFHEWSHLDSIYGARHLADTWERKWYPSTDGSAFELSREIDRIDVFVLLDLLGAKNPHIQSVPGHGAASLFEQLPYTGENWPKLNLLWPKLNLLNRIPRIFYPGTSYFGAVEDDHLAFMRKGI

SEQ ID NO: 119446 - protein, 290 aa, Heterodera glycines
YLEACRRRVVDDLRLVRTSLSACFPPEYNIYDRYVKYYHDSISLHIKKLASDALEKNELVQLLSWIQSYTGEQMLGHPKLGIQAQALVHEFPLLPKSTTNHLHDRFIEMTRRDMHEWLDKTMMQEKDDWYKQVPPETDSNKFFYTQLPSILFGMVEDTVSLSKEISQEIVPRVIDVAVDEFIIFSNKYKEAATAYKGKHFEDRSHFQSYTSTVIAIANNLDICVDSTDKLEKHIRLTMESGSIDGLSSPEPTIAYGPPSARSVGFSVINRQELIGKMEQLKKKWQFGIQF

SEQ ID NO: 119447 - protein, 350 aa, Heterodera glycines
SLRAKERREIERLEEEERERQRQDEERRERERRERERLEAMERERQRQLEEQRERDRIAALEASAIERRALRAREEQRARERADLDRRAEELREQEKRERERRDRERAEEERRLAELREAEQRNAGQRERERREAQEREERRRNEGWRSRDRLEQLARERDERERWEAEKRRLLSDYEQGARKRQELTSKETLERLTRKPYYSRENLTQLGTGGEPTEYRGKGIEPPEFTTKVGEASSWHLPFVHSVPGRTTSDRTRRPHFVDRAGDDARLRRIASGELRLFRQHRRHFSVSVGRIGRKHARAHVQPTRRGLSAPRGFTTDVEIPRTNGKSTEGFSAGNGRRRGTISAKC

SEQ ID NO: 119448 - protein, 176 aa, Heterodera glycines
MGYPSFTKYMFLGDMVDRGNQSVETIVLLLLYKVRYPTKFYVLRGNHECASINRTYGFYDEINERYGHHNVRPLWERFNMTFAWLPFVGLVSDCILCMHGGIAPEMTNIQQLRMLRRPYIDPPVPSLELDLLWADPSTAVEGTAPNPRGVSILFGADVVASVCKKLNIELVVRAHQ

SEQ ID NO: 119449 - protein, 102 aa, Heterodera glycines
YLTMIDNDAPCCICNDGEDSNANQIIFCDICNIAVHQECYGVPYIPEGQWLCRRCQMECYGVPYIPEGQWLCRRCQMSPSIPVNCALCPCSSGAFKQTSDGR

SEQ ID NO: 119450 - protein, 253 aa, Heterodera glycines
MAFYTGEAMATTTALIGRHQHNSHSNNNSTNGEADRSNGTGTTVAKIGSPSAAAVEQKRHNSNSSVGRGGGGGTAAQTATGGGGTVAAAAEATVRLQHHGMERRAPATGAENPYEVLGPICSRLAAAGSGQIQLWQFLLELLSNPLNAEMITWEGTHGEFKLCEPDEVARRWGERKSKPHMNYDKMSRALRYYYEKQIMSKVHGKRYAYKFDFDGKNHNSYAYHATFSMALFRTIFLSKWLYDLLCCGWQAFF

SEQ ID NO: 119451 - protein, 220 aa, Heterodera glycines
MERILSQNIYNFLLKNNKISEYQFGFVRNRSTTSQLITVVEDWYEAIINGKNVDCIYIDFQKAFDSVPHNLLLYKLEKIGIKGKLLMWIKGFLSNRTFRVKIGDSLSSSKKVTSGVPQGSVLGPLLFLIYINDLPDALPSGVKIKLYADDVKLYICYKARADTEIMHKALHNLFEWANKWQIKVSIQKTFVLYLGSKNPKETYKFDGNTINAVDTTRDLG

SEQ ID NO: 119452 - protein, 141 aa, Heterodera glycines
FRCSVKGRSVRASKCFQRGEFVVEYKGDLISVKTAQLDLISVKTAQLREQRYAKDENVGSFMYYFRHRDNVFCIDATDETPYKGRLINHSYLNNLKTRVFIIGRTFLVLVAMRDIDNGEELLYDYGERRPSVLAVNPWILG

SEQ ID NO: 119453 - protein, 353 aa, Heterodera glycines
MADELVALAPGTRVSGRWTILKKLGAGAFGAVYLCKDGKGTVAALKTEPIDTRQPLLVMEATVLDTLGKKLKNADGQHFCRLLDLGRSEQRNATSGDTVFNYVVMTVVGTPLDKLIRDAGDRFSPGTAIGMSIQLLSAIKALHNVGFLHRDIKPANTAIGRAETNEHRLLYLIDFGMARQFLRPDGTQRRPRASANFRGTPIYAPISAHIKRDYSRKDDVESWFYVMVKFYKGAVPWKFANDVKEIGRMKCRRMEGQPDEIRQQAITELIGGCPPEFTQILAHIDGLQLEDRPNYEMIETMLREHLTRSRVPEHPYDWEVGRRNAMAQAQSEAARRKKDNTKEGGGGKNNTQG

SEQ ID NO: 119454 - protein, 542 aa, Heterodera glycines
EVLIEPIVKESEEGAICWRLLALIEEEADLRRLLLRSLIFLHKDKSLPPRLVPRLLSRCSANPELTFPCWMLLSELSKFLDVSPNEAVSYWSDYLTLTHQNRLIGYMADLIANRAKVLSFQQRRFLRESVSGALQQFKIHPTYISSVYHLFARIVNGIGQDASGKAELTKFNQQWFSKCLVELDLLVYANAPPEVDDAESVNSQGSNSTELPGSQRRASQIDNCEKIIRLITSIGECLQYTPALINKQIVNLLQVIIASDVLNRIYQAHNDNEHGDKLGVPSPQRLFSPNTSFHTELPADGPGGTQSNAASEAGGVAASDQNQRHFHMRIKKRIFRGELMSREVRASGVLAIGKLCLLDEQLAKKCIPVFVRQLRENPDHFVRNNIVVVICDLCIRYTSEVDRYSTILASCLWDSSILIRRQTLLLLTNLIKEQYLKWEGTTDILLPQFRERMFFHHFLECMFNFNGVRHVSWIPSAGYELSEEVQKRCSLEGRELFDSRMRLYKYMLNTFEDQQKVYILEKIGLEIFVPIVEGRLKLSDVK

SEQ ID NO: 119455 - protein, 109 aa, Heterodera glycines
SSFLKFVSAPPKTNLKTWSSKRKAAHRCAHPGCGKAYSKSSHLKAHLRTHSGEKPFRCDWKDCGWCFARSDELTRHYRRHTGYRPFQCAYCSRRFARSDHLKSHVKNRH

SEQ ID NO: 119456 - protein, 149 aa, Heterodera glycines
DRMPMLFANHLFQQMFLLFMISSFHAQLVAVDNLNPRPRQIVNEGDQKVAIQLANGQVLVCGTHAFSPQCRQYEFSQSESRFVERSQFNGQGISPYDPRQNATFAYSNELNAIFIGAISDFSATDPLIYRRKLSNGETMRTQKDDRVLD

SEQ ID NO: 119457 - protein, 129 aa, Heterodera glycines
LFRFAHRIILKQNIMFQIFVKTLTGKTITLEVEASDPIENVKAKIQDKEGIPPDQQRLIFAGKQLEDARTMADYNIQKESKQLEDARTMADYNIQKESTLQLCLKLFGGARTGKTAHYSRSVSHDYHKR

SEQ ID NO: 119458 - protein, 123 aa, Heterodera glycines
MNVTVGIEILYVPFGISIFGLLGNTVAFLTIILSDLRKNYVNIYLLVLLCSDSVLLLDIFVQPLFRFDVLTFWTCAITEYLFNASAFVSSFAIISLTGERFFSIIFPLRHLKVHFYLDSFIYI

SEQ ID NO: 119459 - protein, 219 aa, Heterodera glycines
MELYLFRPTDYQRLYNCSSYKIDDIPLVNRTHTVLGISFIMQFVLFQLCYIPCMFSIWKHRDQACYKFMFFIGLIDILCLFINCLMHGYFAITGVVFCSYPDLIYLSGIVGFFFWVAESSADILLAVNRCVEMISPVWGERLYHGGRAWLWLIPPLLYATYIAITQMPVLFSGIYFSWFFNPHVGYIDDFGTIVRNAFLYYNSCKSKWCFILVFIMVLG

SEQ ID NO: 119460 - protein, 312 aa, Heterodera glycines
SCVAHMCSIFVLLRLPYPLRCFLASVDCCLFLLLLILFSTSVSNVSAPIISCSAPIISCQMTIILVNIIALFLLLLFIARITEYERKVEASCNVAFTEYERKVEASCNVAFKNEERDVQLMQDINKLLIENILPSSVAAKFLSHERVIELYARDHDNVCVMFASIPNFKNYWSECDQARKLECLRLLNEIVCEFDKLLSKPKFSCIEKIKTVASTYMAAAGLTDSDTADNSGVYLLSTFCMGVNNALQFPNEPNEALISVQKMVELAQAMAAVLDQLNVDSFQNFQLRIGLNVGLNVGPVIAGVLGQKPQYD

SEQ ID NO: 119461 - protein, 335 aa, Heterodera glycines
STVFLDIIKAFDKVPHELLIYKIEKIGIKGNLLNWLKDFLTNRTFKVRINQQFSKEFPIKSGVPQGSVLGPILFLIFINDLSPVIPEGISLKLFADDTKIYLCYDTEFQRKKLNEALHCVCQWAQMWGLQFSPEKSASLYLGKDNFKVPYQFNKTIKETQTIRDLGILIDNKLTFKSHISSILQKAYLRSRTLFQKIKSKSSKTWIKVYKSYIRPLLEYSSENWNPHIKKEIIRLEKFQKFFTKKVFLKCHLPVLQYSDRLKYLNISTLENRRKYLDLITAFKIIKQETHLNPLKLYNLSQRRNSPFLRLITKSKITKTEHSFINRTTKNLQELS

SEQ ID NO: 119462 - protein, 271 aa, Heterodera glycines
NVFLTGLRKLKNNKISESQFGFVRNRSTTNQLITVVEDWYEAIINGKVDCIYIDFQKAFDSVPHNLLLDKLKKIGIQGKLLNWIKFLSNRTFRVKIGDALSSNKKVGSGVPQGSVLGPLLFLIYINDLPDALPSGVKIKLYADDVKLYISDTEIMHKALHNLFEWANKWQIKVSIQKTFVLYLGSKNPKETYKFDGNTINAVDTIRDLGVNIDNKLQFSDHVNQITRNAYLRMRSLFRIIKSKSSKIWITLYKTYIRPLLEYAPEVWNPSL

SEQ ID NO: 119463 - protein, 312 aa, Heterodera glycines
RFYEDHENVVENLEDWTSESPNKLHFIRQPQKWALFRHPQHFLIADRNRNNEFPPVESIGEWDTEQKQRLLNAFLREDGGTRVPELEGWLMLKADGKKSWRRHFFVLRSSGLYYVPKAGKPRGPARDLNCLMSVFNNQVYMCTDWRKKYKAPTEFGFAIKHPRIQLKTSKYIKYICCDDEFTFRQWLTALRITKNGCPALYKDFRAAQSRECPLVGPASPARAEVPQVSLQRLSALDSNFATVSSASPRHRPALHLGDFACSSFSTRASSSTPGGSSREGLISRIASPAPSMAFNVFDQDECNTIKRHPEGV

SEQ ID NO: 119464 - protein, 90 aa, Heterodera glycines
ICVLTLQINKVKTLRTSPSNDELLEIYALYKQATCGDNNTCKPGTFDFRGKAKWEAWKKKQGISQEKISQEKARIDYVKIVEKMVAKYGV

SEQ ID NO: 119465 - protein, 173 aa, Heterodera glycines
ICPKSVDHQSTGSFGAHKWYAILLDRTAELEGNKARIAKAMEVKTHFERALELNPTDATTWHLLGVWHYELADLSTHKRWLASLVYGSPPETTYDEALRCFERAETLAPCPCFYSANNYYLALVYEKMNRKEEAVKQFKLAYNAPMAEPDDLEYHNKVGEDAKKKIFLIQKSI

SEQ ID NO: 119466 - protein, 108 aa, Heterodera glycines
MQQYINDNNELLRKRIVKQQKPKECIIISRGATTFAAPAKNDNCGPTFAAPAKNDNCAPDFSPPSPDVVELSAFLGQELSKSERPELGGAKIVISGGRGLKSGENFSL

SEQ ID NO: 119467 - protein, 56 aa, Heterodera glycines
MRKSLKHQLLVAEVLNQLTTRFQPKVPIIKKCIDSLIEKEYLKRSEEDSDLYEYLA

SEQ ID NO: 119468 - protein, 69 aa, Heterodera glycines
MIRELSAMLTAVKHEQEYMQVRDRVHRSINENTNSRVVVWAVFEAILLICMTIGQIYYLKRFFEVRRVV

SEQ ID NO: 119469 - protein, 193 aa, Heterodera glycines
MAERAQKHVEDNRSRKLTREEKAAKAIRKIGEDTTLAVHVTVFKIKSLANPAKKFKVMMNAKQLQMTGVVIVLEDINVVVMEGGPKQQKFFKNLMLNRIRWSAEIAGQKHDRRATHNRANEMGEGTEDGPAEEKRNECVLIWEGVVQKRAFTGEPRFTPVTNHKQARELLEKYGVPHYWDLCYSTTVLLNDET

SEQ ID NO: 119470 - protein, 94 aa, Heterodera glycines
MPPYEITFFFRPLTKPSLVEAIKRQATLLMDKGAVITKLESLGYRDLPYSRLDRFAKKNVHYANSILMNSSMSVKTMNDARTLFSNDKELVGLL

SEQ ID NO: 119471 - protein, 140 aa, Heterodera glycines
ILPTRSAILPHLTDTYNFKTFRLQNNDVERTWKNYKEEQLKNGLLDWQDYRNLIYGKPQEGQEISNLIYGKPQEGQEISPEYVKMIERDERRWKVADYNSDGKMDRTEYGCFMHPEDCDHMRDIVVQETVEDIDKDGFVD

SEQ ID NO: 119472 - protein, 220 aa, Heterodera glycines
MTEEISGTERVYALSVNVGGLLNHVIFRRHKGMFTVDLNSDKGFRTIERFVDNYLRTGVSVTTQQYVALIRAVPRAHWELSHTSIILGNELGRGTFGIVKSGVYVDQQGTRAAVAIKEVSQTSTKEQIKEFMNEARVMRQLRHPNVIQFYGVAVGQEPLMIVMELATDGSLTNYLKQQRRSARVKLYMCLGAAGGLDHIHSKGIIHCDVAARNCLYTDGV

SEQ ID NO: 119473 - protein, 287 aa, Heterodera glycines
PQNMDLYGLKTFTKSTKLLMWIKDFLSNRTFRVKIGDDLSSSKVGSGVPQGSVLGPLLFLIYINDLPDALPSGVRIKLYADDVKLYICYRKNRNSMHKALHNLSEWANKWQIIISIKKTFVLYLGNKNPKEIYKIDGNIINVVDTIRDLGINIDNKLQFSNHVAQIIKNAYLRMRSFRIIKSKSSRIWIILYKTYVRPLLEYAPEVWNPSLLKNIKIEKCQKYFTKRVFFKCNLPPIPYQQRLEYLQLSTLESRRKLSDLFMAHKIIYGRTDMSLLIFKLLTLYIPF

SEQ ID NO: 119474 - protein, 211 aa, Heterodera glycines
LVPLSNCSRYSKQLFVDCANGVGALWVNKYFDAITDGTPFSAPAKGLSVAASTDSVQLHALNTDTESLLLNHEGIEPVITKTGVKHLEEAALNFDIGLYFEANGHGTVCFSDRFYAYLEEISGNEIIPRHIQLLSMFSQLVNETAADRETVLIRPEGMQAKIDAIISEFDKARAFIRPSGTEPIVRIYAEAETTEKVNEIAERLVELVLPF

SEQ ID NO: 119475 - protein, 118 aa, Heterodera glycines
MEDSEQNITEQSVSAPTTDHDEYEELCKLVNPISKPLANRKLAKKVYKLVKKAAKEKGFLRHGLADVMKAFRKNEKGIIVLAGYKRPAIVLLVKRHDSFAELFDQTHESTYALVVEPE

SEQ ID NO: 119476 - protein, 202 aa, Heterodera glycines
MELRWSGRKGRTVATTKVKWSNGEFPESLKTSRSRFLYFVFILSLVSSLKIRENCSQYKQIAEKWDLSDEHPGIAVNPSLDSIIRQKYRPIGTVFPLFPKILAWPRFWDKPMNEGCFEKGLALAKYSLPITWIAYAGALRGYDPPATNVGRFEAVEFVIQSFRGWLFSSRMILPAFYSFTFGLTSCTSATFRDEDDSWNWIA

SEQ ID NO: 119477 - protein, 136 aa, Heterodera glycines
MKCIGEKALGCFISPELAKDANKMAKIAEYQDKAMAEAAVITQNQASAHANDLSGTSSSNQQSDECGTQQNACENEVDPWDLMEPVDISSKLNINFESPKWQERKEALDALQQLLLQSPRLSDSPNYREVIERLAK

SEQ ID NO: 119478 - protein, 221 aa, Heterodera glycines
MQQRLDVAKRDGLLDNFDGDGTTTATTNSSSISAAATTPKAKHHSPDLQIAYSLACSYGQNYDCARAGTVRLIDESGTINTEGFYNYLYGWHEYEQMFYAVSQASFYPRLRKLRQGPPGPMKYRYFIPPAPKPLFSRIPFYCDGLRDTPTIMRMIREIRAISENYSRAGLPNYPEGVAFTFWEQYLHLDYYLVLAIGIISVSVFCVISTIIFNPWAAALVG

SEQ ID NO: 119479 - protein, 267 aa, Heterodera glycines
GDGHCAGPSIRYISCNLEPCPADAMDFRAEQCAAHNDDPVADKYYKWVPHTSKNKCELTCRPEGDSFYYNWAEKVIDGTKCDAYGEEICVDGICLPVGCDGKLGSEAKRDKCGVCQGDGSQCKTVEGLFDERALSSGYHDIIALPVGATAIHIEELRPSSNVFAIKNATGFFYLNGNFQIQVLDKNILAGGVPFKYEKGNGGTERLTANGPLQESVTVSLLLQRTGAKQSAVKYEYSVPLEKDVKYLYKPGEWSQCSVTCGRGKKMG

SEQ ID NO: 119480 - protein, 105 aa, Heterodera glycines
YKDIHCVDPFNACIAGKCQCAPGTHRDSSKGRCFAVCPDGIAPCPDGIAPLQTCRRLFINDVDMLDNAATTDSCPIGYRCVTYGSPYIGHCCKVRCPYGEPDLRL

SEQ ID NO: 119481 - protein, 59 aa, Heterodera glycines
MAGIVAIYGLVVAVIISGRLEAAGPGYTIDRGFSQFAAGLVCGLCGLGAGYAIGVCSLS

SEQ ID NO: 119482 - protein, 178 aa, Heterodera glycines
TLDVDVSNVKELYRQLPHPTPTQRAAHDNMVQRWQDIWELSRMYVERLKGLESVLNGLDEVTDIVRRHEITLASFDDMPAALERLRGVHAQLLELNMVLQQQENIVKKLNRDTATLRQHVARTRFGAANHPDVDQIEDRVSQITVRWDNVNSQVAERLRIAEEAQQTQMVYRSQYTEE

SEQ ID NO: 119483 - protein, 247 aa, Heterodera glycines
EAQIMKQCNHPKLVRLYAVCTKGEPYYIVTEYMRNGSLLEYLRDTNNSLRLHALVDMAAQIASGMMYLESRKLVHRDLAARNVLVGDKISGVPEVKVADFGLARKLMDENIYEAATGAKFPVKWTAPEAQRCGNFTVKSDVWSFGILLYEIFSLGHTPYPGVQNHDVLRDLDQGKRMACPKNCPDEIYQEMLNCWDQNPDRRPTFEYLFTFFDDFFISSQPNYVPPSVDGTSFDAQAIDGIEGEQSG

SEQ ID NO: 119484 - protein, 80 aa, Heterodera glycines
MSHSEGTIFVNRTVHLQDIKLFGFDMDYTLAEYVSPTMEDQTFELCLDYLIQKTGYPKEIAAFKYDPMFSIRGLWFDLKF

SEQ ID NO: 119485 - protein, 209 aa, Heterodera glycines
LVPVHRIVLARIFQIGHSPFFAYASLLFVTRRHQPSAASGRRFGEPSEEDAHRQLEERLPFFSLRFPPSIDGISPQIVERILSNLKTNAQKRLTSPFDVHATLMDAMRLVPNSDLMKYSGVKDADGFVPDLKGNVKTTFATYQIGFQTQPGNAKYEATLFFDGQRRITVDMTAISHVNKYGDTPHCIIDKNYFLATYCVCYDKIDDGET

SEQ ID NO: 119486 - protein, 374 aa, Heterodera glycines
MLDETSASRAIGSNETAVMINSDEHELDTDPGIQGSDNGASSSMQRQLSAAMQAVVEEPTFNLRLIDAVRQSHCLYDASDKQYRSADYKIKVWNRLVHVLGFQGDARTLYNRWKQLRDKYGKEKKKLKYSGEQHSQWQYFKVFKTFCKKEQRQIVITDPNFALHLINQVRTQPCLYDIKDTKYRHTEYRNQAWAEIAKNLAFPGDVSALYKQWKKIRDRYVREKRKLRMTNGTENEEPNWELYRELVWIDRYLDERAAQVKRKQESSDLSGEEFIEDAYSTQNASGLSNSLPGNSATPLDSAHPHHHPQQHHYANVLMPNSGQPIEETAIVGHQLQQLVKLQPQQQIVGATLQNSTRSRVSDVGTTLLGAGPIG

SEQ ID NO: 119487 - protein, 129 aa, Heterodera glycines
IKFNTEKVQHILKNPGVVHAIVEKSAVKGTDTVLEVGPGTGNLSMKLLDRAGRLIAYELDPKMVAELQKRVVGTPVQYKLRIIAGDVIKAAEWPPFDVRRADAAEGIRRSTVGQAGQAWTGSGSRRDCP

SEQ ID NO: 119488 - protein, 154 aa, Heterodera glycines
MGAYKYMQELWRKKQSEVMRYLLRIRCWQYRQMEAIHRCTRPTRPEKARRLGYKAKQGFLIYRVRIRRGGRKRQVTKGQTYGKPKTHGVNQLKNTRSLQAVAEARAGRRLGELRVLNSYWVGQDSTYKFFEVILVDPSHKVRFGFCLFVLLRSF

SEQ ID NO: 119489 - protein, 287 aa, Heterodera glycines
GLPIDITETELKQAFHKCVSRRFGSLLVDWPNRSSDSHFVKKEHYSGAASRVTGYAFLIFLEEASVQRLIAKCYSEGDRFYMLMSSQTVREKPVQVRPWRLADMDYMPRPSAHLDPRRTVRDHRLTPLGPKPSHSKIFIGGVPRPTKASELAFVLEAAFGPVCYAGIDVDPEMKYPKGAARVTFSTFKSYAAAMAGRFVQIPHSDNTKRVEIKPYLVNDQMCDNCHGKLCQDRYAPYFCGDVACLQYYCEICWDRLHYGSGNRSREMHKPFVRMGEQIKIKIPQREF

SEQ ID NO: 119490 - protein, 283 aa, Heterodera glycines
MGKGTDGVVFFSMGSIMRSSDMPESFRRHIFEAFSQLKNYHFIVKVEKDDNYSENLAKNLDNVFFTSWAPQLDILGHPRLRLFITHGGFNSLLEAANAGVPVLLMGFFADQHRNGRVAERNGWGKVVEKRQLLEGSENFRAAIQKVLEDQRQFTLYYQIPYGITVFPLQLRCQRKKNPSTVGNKGWHFVIHFLSIEFVPSVLKPFTAKERLLKNIRFLEMNGGQFPELLSESRHMGWVQLHNFDLAVLAALSALTFLFVLRYLAKFTLALAIWTKNMLQKKYK

SEQ ID NO: 119491 - protein, 658 aa, Heterodera glycines
SVNFSSHLLGDVILLISVPPAISRESAELNPRLPLGRSLTFFCDVIGKPPPNIRWTKDEKSLKEDANVQLGEGNRSLLIQNISLSDRGVYRCEATNHVGNDSVEYRLDVFQAPIIAKGGTEQAVEGKVAVLDCVASGEPAPLISWQRNGVLQRNGVLVEVGVRYVLEGSRLKVIDTRSSDSGIYVCEATNEAGTDQQAFTLEVLIPPKLTSESARQMAVLRGGNGTLSCTARGYPTPQVIWSAESTNVLKVLKRNAQYELSEYGQTLHLFGLSQGTRLFRCSAVNNAGIDQLEFGIGIIRAPTLSRKGILTINGILTINVTEGGPLLIPCGVIGTGKEWRANPMDLNGRALAGEGPTKSIGKVTRAQGGNYTCTMKNKAGNASSTVIVHVGVAPKIREDEARARGRVIVEKGATAELWCEAVGIPPPKIWLRDDQPLTKCGSVQSADTRRSTAVFGEVQPQHAGVYTCEADNWAGKANKTVDLVVLIPPSILPEREQIEVEPPSILPEREQIEVESGQMVVLQCNATGIPEPLVSWEKADDTAAADISEYQLLYQLLGTSLAIREVEKKDEGIYQCIAKSDAGQTIGVRQVIVKKKSEATAIFVECDANGKPVKHSFARVRGDRPKGSRLWPWKSLPSLGISHSVTHPPPPQSNRYKT

SEQ ID NO: 119492 - protein, 227 aa, Heterodera glycines
HLLSILRQAVSEAFPDAIAQGSSQVIGMVGYPNVGKSMTINRLLGTKKTAVSSTPGKTKHFQTLIIDEGLVLCDCPGLVMPQFGISDADMILNGILPIAHMRDYFGPIQLLCERVPRQYFQQRYSVLLPKSIGSLNGHDLLTAVAFLKGFMNASGIPVRHAFGTSNAFLFPLKDCSRAARLILADVIDGSLKWVAAPSNVSQRQFDQWTFKTIELSKAHQQEQQRQQ

SEQ ID NO: 119493 - protein, 89 aa, Heterodera glycines
MPRHRAKPRSFHAGLKFPVGRVHRKMKKGPYAKRLANGVPVYMTAVLEHITGELLKKIGEITQAEGMKRLSAFHIRTAARDDDEVEEGQ

SEQ ID NO: 119494 - protein, 99 aa, Heterodera glycines
MRKAVLGPFINRASLITASAGPQQSFFPVDVSPWEALPTEEEIEKHEKTKKKKDQKKMKKKKETDELEEEEDEEEEAEEDGRIFPNLDTIDQKILMKLM

SEQ ID NO: 119495 - protein, 599 aa, Heterodera glycines
RIKVKMKSIFVEFSLAQRQHTFVETNSVRYVYQPMDNIYMVLITTKASNILEDLVLITTKASNILEDLETLRLFSRVIPEYCRSNDESEITDKAFDLIFAFDEIVVLGYRESVNLAQIRTFTEMDSHEERVFNQIQIAQQRAAHTLMKEAQQRAAHTLMKEKEKEIKRQEKNYLNYSKKGTAASANYLNYSKKGTAASATGISSSQARTELTSVVKAPRPFLPGGPICGGGKALKLGAKSGGPICGGGKALKLGAKSANEDAFLQQLRHEGEKVLDKVNEMPNCVKSRKTIPLSRNRRVKAGAVHFKCVEKINAVLSRGGGLNSSDIFGSISLCVSDPKFNSVAIRIFGSISLCVSDPKFNSVAIRVLNNITSKNSQNVHPNLDKSSWQSKSLLRLKSEQKPYPVGVDVGVLKWSIKLPDEDALPLTLNCWPNESSEGVTVNIEYNCWPNESSEGVTVNIEYTLQREDLQLKNVRIVIPLPPATAPPATAPVISECEGAYEYLKSKGQLLWSIPLVERGNKTGTLEFTTANGNADHFFPVQVHFSSTDSFSKITVESVETMQGDDVEFTDEVESVETMQGDDVEFTDEVNLFPEKYEII

SEQ ID NO: 119496 - protein, 140 aa, Heterodera glycines
ALTRVVKREVISIHVGQAGVQIGNACWELYCLEHGIQPDGKMPSDQNNQDDSFSTFFSETGNGRHVPRAVMVDLEPTVIDEIRTGTYKHLFHPEQLIEIRTGTYKHLFHPEQLITGKEDAANNYARGHGDGKEIIDRLDR

SEQ ID NO: 119497 - protein, 383 aa, Heterodera glycines
MEPFEQCQICDRKWHRICALHSNKIHPGGFVCEQCRVEKNRTRQENKFTAKSTFFGSLWPIKSDGMIVYHSNLLPELPHYNLSRHIEDRVNNFLRRKLTDSDPEVEVIIRVLCSADKEVEVKPAMLKKYASEGYTDRFPYRSKAVFAFEVVKDPDTGASHEVCFFGLYVQEYGTNCQQPNQRRVYIAYLDSVHFFQPRSLRTSVYYEILLGYLDYAKTLGYTMAHIWACPPSEGDDYIFHCHPPEQKIPKPKRLQDWYKTMLNNGQMEGTVYSYKDIYNQARDDGLDTPMKLPYFEGDYWPRIIDECIIGAEKEEEQEKRMKQHQQFQSAEERRRYRKGGGSAATASLSDDDTFQTDDGFPVVKQKQQPQQQQKASSNKKKTT

SEQ ID NO: 119498 - protein, 161 aa, Heterodera glycines
YNIIMVVSKLFGVNYLSQQQLAGFDQYKYSCIDNSPISTYISHPFWNWVVQVVCKISKNFFFQFYPRWLAPNVLTFAGALIVMCCYGLVVCFDPGLSANSATGPAELNIPRWVWLVCGVGTFLAHLLDGTDGKQARRVGASGPTGELCKYAVLKIFQNKFI

SEQ ID NO: 119499 - protein, 144 aa, Heterodera glycines
MPLHWTSVDTRNALLCAAVPSIGAFVGSTMAIKDQELVQFLKNQNFPSFARCCKYNYLLANTAVTIPFGYASYLVYKIGGGVSCTDSKIALGLYGATLLSGCFLVPTLKKHDTKALTANAVVLAGLSVATSVAFYNIDKISAYW

SEQ ID NO: 119500 - protein, 171 aa, Heterodera glycines
MDPAELNLLRYEYYHGLIVQEDLQERLQKDGDFLLRRTQDKDETRTFTLSINTNGELLDVHFYENADGTFMRDNENINSIEGFIEYHQRSEDSLISGRCVVLKRGVKHADWEIKHNQLTLGEELGRGKYGVVLGGLLARTPKQKKRVAVKRLLETANKQKVTFVGDGRVFD

SEQ ID NO: 119501 - protein, 197 aa, Heterodera glycines
MYADDVKLYYAHENDDHSNQLDKAIEALEKWSKINGVLKSREIKTLTAAYKTFVRPQLEYATEVWNPNLKKDIDKIERVQKFFTRKALRKCGFVYKKYGERLKITGLHKLEERRKINDLTTAFKIIKGFTSLDAGKSFFFSERLRRPLLLRVKRHTAKTQNNFFNRIVKSWNNLPVVAVQINKAKEFRGLLKAMSSE

SEQ ID NO: 119502 - protein, 255 aa, Heterodera glycines
MTTIWQLCEDATNVLRDQASLVETKPPLVMCGDIHGQFVDLKRIFNKMGYPPFTKYMFLGDIVDRGNQRPISLPPPNFKVRYPTEFYILRGNHECASINRIYGFYDEINERYGHHNVRPLWERFNMTFAWLPFVGLVSDCILCMHGGIAPEMTNIQQLRMLRRPYIDPPVPSLELDLLWADPSTVVEGTAPNPRGVSILFDADVVANVCKKLNIELVVRAHQCVPFGVSFFANSYMLTLFSAPMYQTEKNVGAVL

SEQ ID NO: 119503 - protein, 113 aa, Heterodera glycines
MNIPKQQHGAMPIIYKDQLRLGVIGAGLMGAGIANVSIDKGIHTTLVDTKQEALDRGLKQITAQMEGQLKRRKINAAEHAICLSKLKPTNRGFLGQSNHIKIFCIKIWVQLQF

SEQ ID NO: 119504 - protein, 251 aa, Heterodera glycines
MRLIGQFNNAFLIVRLRSDVFIIDQHAADEKYNFERLLAHNVIKSQTLIRPKRLRLGNVNAALMRDNLHVFHANGFDFQFYNGATSENAKWCWENGAAAAGNKDDAIVIEDTENNDVEPILLNDDDYDDNDEQERGEDELDKLGTVLLTAVPVLHGWQLDRDGQSEIRSNDFLEFGMPILDIFADIDQLLSMLSELPGIVHRPSKVRKIFASKACRHSVMFGKALTQREMETIIFNMGSMDQPWVKQLKLK

SEQ ID NO: 119505 - protein, 240 aa, Heterodera glycines
PSKIHEGVFAIVRKVGGEHIRLCRLISGQRVLIERLSFNPKDAIGHFYGIFEVSNGGDMLCPIEFASKPFKTEFSNGNSAGDRGHGNESTQQLTSNQIMSLKEDGITTNELVSKLVSGNCHFQSRTKFSKEKYMRKKVQKHSDRVVILQPNIRLLADCYYRKDPERLGHLRIDQLGLMLQLSGLHSGKCNAFVFDQVLGLLGAAVLERINPFGHCIFLHRGDWPQSIPCLDSFTTDAQVK

SEQ ID NO: 119506 - protein, 127 aa, Heterodera glycines
MIRLSQLVVPYLEKTKGSIFPAVTYYCISKAAVDKFTECLSMELAPKGIRVNAVNPALIVTELHLRSGMPEEQYSDFVRRGAQTHALGRVGTPEEVASSILFLARDATFTTGQLLKIDGGKALMTPR

SEQ ID NO: 119507 - protein, 178 aa, Heterodera glycines
APFKGAIYAAEKFSTCSQVVENAKQISITFPPPNVSPACGTTIKDGKLEALVVVSLDGVLPHQVTTEWDRFYRVSCDVNMDKPGFEGTVIVTTIFETKEAEPQVLSAGTPPPITAQLSFLDKDNQPLEKASIGDQLHLVVNSEQAGPHNMMVTECVATRVGGEGEPVPFTIIDNGRRS

SEQ ID NO: 119508 - protein, 321 aa, Heterodera glycines
VVWLSSTVSHARKNADCIYIDFRKAFDSVPHNLLLYKLEKIGIRGKLLMWIKSFLSNRTFRVKIGDALSSNKKVGSGVPQGSVLGPLLFLIYINDLPDALPSGVKIKLYADDVKLSRADTEIMHKALHNLSEWANKWQIKVSVQKTFVLYLGSKNPKETYKFDGNTINAVDTIRDLGVNIDNKLQFSDHVNKITRNAYLRMRSLFRIIKSKSSKIWITLYKTYIRPLLEYAPEVWNPSLQKNIKKIEKCQKYFTKRVFFKCSLPPIPYQNRLKYLQLPTLENRRKLFDLFMAHKIVYGRTDLKLFSIFNPSTRFNIPFYRF

SEQ ID NO: 119509 - protein, 77 aa, Heterodera glycines
WSDVRFLTAALQRAFDEGGDLGSLTYLRDFDSASQRRNGPIIFAIDCLNRLYSTDHPFCTLFRSVGLNILDRILPAK

SEQ ID NO: 119510 - protein, 264 aa, Heterodera glycines
MADDAPSTNVQQQSNPSSTLSPQSIISNVPSSIMVQDVIIVPSSSQHKQQNATCPLPCFMKSSCQSCIDSQWCPSNQRCVSMDTYMVSFPYGQCQSWVTAANTHKACQTRLGKCVEGTNSGALDPSQCPAERWYFTGEPGQVLLNANATGTAIARKMSLIGDCDVRNVSIERGVNIVNFVSSASSATHGMVGPVKRDTDVQFSITCEGDTGAKVTINLTTQLLEGRPPHTKHLMAGQLCTASGIKRTYSSTDPAVSLFFSLLRD

SEQ ID NO: 119511 - protein, 203 aa, Heterodera glycines
NSLDIKCLHNSAVSELMRSIRANVSSFLGEETAHEMNAMRLGVAHSIGRYKVKFNPEKIDTMIVQAVSLLDDLDKELNNYVMRCREWYGWHFPELGKLIADAQAYAKCVKAIGMKANAQNADLSAILPEELAEKVRQEAEISMGTDISELDLIHIVELCDQIVELAQYRAQLHDYLKNRMNALAPNLTVLLGELIGARLVSKA

SEQ ID NO: 119512 - protein, 107 aa, Heterodera glycines
KIISRSARAGLQFPVGRIHRFLKKRTTSTGRVGATAAVYSAAILEYLTAEVLELAGNASKDLKVKRVTPRHLHLAIRGDEEPPSQLNHSQQQNHSQQQMTNVGNGDN

SEQ ID NO: 119513 - protein, 246 aa, Heterodera glycines
AGSALDSKEEKSSDILWKMEEKLRIKADDEDSPLPNKVTQGKMNWMCQSFPSVSQQVHLQFGCRSARCVARGCGDGLGDGGESAAVFFNNCHFIVHRLSTLSADILQNILTVSKITGQDCAFTDLFTELRILAATTLEQHITQARRQLSATIGEHDIFVGLRDDRTNKHCVKLLNGCVMQLEQTASVWREVLSDFVLTHCVGELVSYLLSAMANIILAKEDIASSDAEISANLLTTTVDRCKKLME

SEQ ID NO: 119514 - protein, 147 aa, Heterodera glycines
MSDKFNNKKKQHFSSLLTKIQKKKKKLFLEQIRDYDEKPSPAAVLSHCDDMEGISLLVKAADFAARRHRFQKRKDERTPYINHPIGVALLISVAVAKVYDPATLAAAYLHDLVEDQTTFEELEFRRVAEIVRECTDDKNLPKDVQRK

SEQ ID NO: 119515 - protein, 149 aa, Heterodera glycines
TAQLSAAPPTHYRPSEQKKRKNQTAGSSTQQAEKRASDSVTHLRRSNGASNRSADGVKESGGKERYQCRYCQKVFPRSANLTRHLRTHTGEQPYKCQYCERSFSISSNLQRHVRNIHNKEKPFRCHYCDRCFGQQTNLDRHLKKHENEN

SEQ ID NO: 119516 - protein, 257 aa, Heterodera glycines
LMGFVPVQDNPISECRMAELVRHFFALGWMCDNGSGMAVRVKDERTGEHLILNSSNSLENDLNDLFVMMNGEILKSPSKSDRSPTAPFYLLRDTDLACVIHTHSKWADLACVIHTHSKWANLITQLIRGDEFKISNQEMIQGCENRLTKGRLDNIDVLVVPIVQTEINEHMLYPILLRTLNQNAGASGILVRPILLRTLNQNAGASGILVRGHGFFCFGSNTANSVPSKNSRIFLKINLSLTKFYEWETKNDKFWLY

SEQ ID NO: 119517 - protein, 492 aa, Heterodera glycines
TKRVKGINNLIGKLNLQKKKKIFEFITSNPDLIESLRKQKFDVVIEEQLNFCGAGLGHLLAIPIHILISSCPLQEHVASLFGLPFPFSYLPSLMDADLPDKMSLSERFDNLLRTFVGYVYLWHGIDPLTNIFRKHFGNDFPDLRDIVKNSPFVNDFPDLRDIVKNSPFVFVSVDELLDFPRPLFPNMVNIGGIGMDKLDKNAKLEEPFKSEMSKGKEGVVFVSMGTIIRSSDLPAKFRRNLLETFAKFSDYHFIMRIEKGDNYSAEIAAKFGNIYSAEIAAKFGNIFLTPWAPQPAILADPRLKLFITHGGYNSLLEATRGGVPVLAMGFFADQHRNARAAERNGWARSFDKLKLVEGTAQFEALLGEMLNNEKYAVGAKRIQNLMSTKYAVGAKRIQNLMSTKPFPAEERLPFPAEERLTKSIRFLEQNGGKLPELLSESRNMGTISLYNIDLALIGIVLLVLAFALTFFCANGFWHYKINGQNEGTTKAK

SEQ ID NO: 119518 - protein, 102 aa, Heterodera glycines
VAPAELEDLLLSHAGIKDCAVVGVADELAGEVPKAFVVRADQTLTESELKRFVREKVASYKQLGKVASYKQLGSVEFVDEIPKSASGKILRRVLREKDTKKS

SEQ ID NO: 119519 - protein, 110 aa, Heterodera glycines
MLMISNDDEKGASVFSIDPAGHYISVRGYGIGVKQQQINGFLEKKLKSKDRKFGDTEVIQLALEALQTGLGIDLKADEVEVIVATKTDPKGVKVSDKSIEEHLTAIAERD

SEQ ID NO: 119520 - protein, 239 aa, Heterodera glycines
MCFTSSHAWDSSHAWLSGEEKSRLEVVQREWRLSRTASAQAKVEEEVPIPATALKPQTSLELDEVKKEAESRRESAEDYDEDYDEEKPIDKSPGVAVAWCELQEQKLNKAERQRFREEAEMLKGLQHPNIVKFYDYWERTDGKKKLGLYFLHTRPTPVIHRDLKCDNIFITGTTGSVKIGDLGLATLKNKSHAKSVIGTPEFMAPEMYEEQYDESVDGGTIWHSSGHSEQRPGFEQCQQ

SEQ ID NO: 119521 - protein, 123 aa, Heterodera glycines
MPPKPSGKGAKKAVKSTKTVRTADKKRKKSRKESYSVYIYRVLKQVHPDTGISSKAMSIMNSFVNDVFERIAAEASRLAHYNKRSTISSREIQTAVRLILPGELAKHAVSEGTKAVTKYTSSK

SEQ ID NO: 119522 - protein, 137 aa, Heterodera glycines
MLPSNPDKIDEVDKILSKLDGKIERKMDKIERKMDPLMCRHNPRQKCTNCLPLDPYDEKFLHEKDIKHLSFHAHVHKLTDLHGRGTRSNNVLENVCCKLRPNCAGGHLPYPKGICTRCRPSTLTLNRQNFRLFVRIR

SEQ ID NO: 119523 - protein, 195 aa, Heterodera glycines
QKGRKGFEEKEQKEWGYDGTKRQNPKAFKFRSAIKAQKLIRRAADLSEKKKHIPIVDAADLSEKKKHIPIVDRSPDVLPPLLVALVGPPGVGKSTLLRCLVKNYVKQSLSEIKGPVTVVTSKKRRVTFFEVPNDIKGPVTVVTSKKRRVTFFEVPNDINAMVDAAKIADLVGIIIDASFGFEMIIIDASFGFEME

SEQ ID NO: 119524 - protein, 293 aa, Heterodera glycines
QLWRSFIFREMDFSRRISLFFVWTGLMQSVGASRKVFEYIDRKPDIDTNGTYAPDKLEGRIEFQNVHFAYPTRPDNPILRGLSFTVEPGLSFTVEPGEVVALVGPSGSGKSSCIALLEGKSSCIALLEHFYAPEGGKVLVDGVPIGEFDHHYIHNKLALVGQEPILALVGQEPILFARSVAENIAYGLERCTIVDVVEAAKMANAHTFIQQTRDQYETNVGEKGSQMSGGQKQRIAIARALVRRPAILLLDEATSALDTESEHLVQEAIYKNLKGRSVILRAHRLSTVEKVLG

SEQ ID NO: 119525 - protein, 553 aa, Heterodera glycines
QQPPQSSSATHQGGHHRHTSSGHHRSSGMTASSSRAPNRTPGDDLHIGKYKLLKTIGKGNFAKVKLAKHVPTGVEVAIKIIVKLAKHVPTGVEVAIKIIDKTALNQSSLQKLFREVRIMKQLFREVRIMKQLDHPNIVKLYQVIESETTLFLVMEYASGGELFDYLVAHGRMKEKEARAKFRQIVSAVQYLHSKNVIHRDLKAENLLLDADMNIKIAAENLLLDADMNIKIADFGFSNTFSPGNKLDTFCGSPPYAAPELFQGKKYDGPEVDVWSLGVILYTLVSGSLPFDGQNLKELRERVLRGKYRVPFYMSTDQNLKELRERVLRGKYRVPFYMSTDCENLLKCENLLKKFLVLNPIRRGTLEMIMRDKWMNMGYEEDELKPYTEPTKDVRDERRILKLQAFGYTLQQIHESLERERFDEIFGTYLLMKEAKKHDAQGQLVLAFHVINHIKPTVSNAKNSRRSSSNAEQIQPQQHAITSHSVINQQSAAPIQQISATPQAIPSRQSQTSGTSDVQNGTIHQSPTDSQRSTTRKRLKLSKNLLWYYFLFLL

SEQ ID NO: 119526 - protein, 455 aa, Heterodera glycines
MSVIKKIDKDSVEGLEGSLSLFSLPPTNVAINKTNVRELLPLSALNQTGPYLFRLFSDSQYCDLSKTYMYLLSSIERKNDAGEWVALSDTDPNDKHVGVIQNFGSSFVRSLKVNISGIEVFDSSIYYHYRDYIMKELGYSQEIRKAFHEASCYYPDDDDQNSATNPGFTARAARFSGGKQCETMVKLNFDLARQNALMLNNQDVIFTIHRNNDSFLLLTPPYKKPDGTLQENKKEYRIRVHDMRLYVRTVDVTPSLNLAISRQLESTSAKYPLRKIEMRSIFLGTGRTELAHNVFTSTLPRRLICTFVSTDAYSGNRKMSPYKFEHANVRSISVEANGQTFPSTPYLLSFDGAQPRFVRAFVDMYAGLGLDDSDTKTVSIGMQRFLNGWAFFVIPLTSTLEDTPGFELIRQGTCTIKVQFEQPIKADGYEMLVLGEFDSVLSINADRVLSTDGSV

SEQ ID NO: 119527 - protein, 368 aa, Heterodera glycines
MKKTHPPQIVTIDPNLAALGLPAYPPLPPTTEPAKVEEIRRTVYVGNLPKGCDGEEVLNFFNACIGEVMYLRMAAGNDYLPCDYAYVEFSQQSSVPLALQNSDSLEFQGRPLRIQHSKVAIIKPQRKTADQALEEVEEAIKSGSDGRTTTDTGTNSMLLGEYANVEQLETEQRIKTALKQIMQSVDLDDVTSQDIRRRLSEQISVDQRRYKEFIDHQMLVILGQLDLPSKIFDYLYLGTEWNASNWEELKANGVQYILNVTKEVDNFFPTQFTYLKIWVSDETTTELLMHWQRTYDFIKEAKEKGAKVLVHCKKGISRSASTVIAYAMKAYGWGLDEALEYVKRKRDCITPNPGFMEQLGTFHGMMQA

SEQ ID NO: 119528 - protein, 143 aa, Heterodera glycines
MERTKYEKQKGFAAEAQKWEEDIDRFMEALAERGKNVRSSNSEKKFDFEKWCEEIDKHPAFARDLKPTEDGQYSMEMQAIQAMKYDEDNPTECANAYKEEGNRHFEKRNYRWAIDAYTKGIKLRCSDVRLNSVLFANRSAAHR

SEQ ID NO: 119529 - protein, 251 aa, Heterodera glycines
RNEHTPMSLYRVVSQLAQEGFVDIFTLFTLIAPTRKELLEEHKSLTDLVKLRSNRAETISSNVVGLLASVTESFPIASILNAANDSSLDQPSPASAISFSAATQCQLNEDRKLAGSRFDDTVLNKNQKLGLLCALLEFGDLEKAQKLLEFFPDGYPFGVCQRISMAFANIIGFCIEPFYRLKAASNYECLPNSSATGVSDWLSFFADACPIAFQLGPYIGARHEVAIKMIRLLNTYYSDEEAQSSVTEVDS

SEQ ID NO: 119530 - protein, 94 aa, Heterodera glycines
MASTTIRFCSLFKRLPAKTFVSCRTLSTSRPMFADILYTDKHEWLSLDEARSVGTVGITNHAQESLGDVVYVELPEIGKKLDSGGTAGAIESVK

SEQ ID NO: 119531 - protein, 288 aa, Heterodera glycines
NVTNAIQGMFIVGLPFAVKIGGWCAILALTGVAWICYRTGLILIECLYEDCPTEKFSYREVAEAVRPGLGKFVLIAQLTELASTCILYIVLAGDLLQGCFPSVDRPAWMMLTTVVLLATAFLDDLRVVSNLSMANAVSHLVINGIMVHCCFSQFSEWRFSSLPIVPNFRLFPTVIGTVVFGYTSHIFLPALEGSMQDADEFKPMLALSHSAADADEFKPMLALSHSAAAVFKALFGLIGFLTFAEFTQKEISNSLPNQGFKVWRSAIWDNAKTDSIPAMFKALSRFFF

SEQ ID NO: 119532 - protein, 190 aa, Heterodera glycines
DYGPRVNFKYQRVNSAKFFGLPDYVDHLLLRMGQMRGVDGFRPVELCNLDYSSERLSSIDLHKDEWIWGERLVVDLMNIRVLQYFSLLSTVFPLPILYVAAFTVSLNSDCVFTLEHPGRKLLVFVPVPRRSLLCLSGEVRSEWNHGIFPCHIFGRRVVITLRELASPFLVSLFLIFDLICDLFGFKDDPK

SEQ ID NO: 119533 - protein, 145 aa, Heterodera glycines
LITQRQQVSLLVRKGLIERALDFNIILDDVAITELAFSPQYSAAVEAKQVAAQEAQRASFMVEKAIQQRQEKIVQAEGEAQAAKLLGESMKNDPGFLKLRKIRAAQKIARFIANSSNRVYLPSDGLFLNLADEDYLSLATNKGRR

SEQ ID NO: 119534 - protein, 154 aa, Heterodera glycines
MASIDPKDFFNKFAKPSKGAGVGAGLMTAAAVAGYALYKSMYTIEAGHRAIMFNRIGGLGDEVYREGLHFRIPWFQYPIVYDIRARPNQIRSPTGSKDLQMVNIGLRVLSRPDPGQLQTICRMLGTNWEERVLPSICNEVTDGVIMGRDSNNII

SEQ ID NO: 119535 - protein, 399 aa, Heterodera glycines
EIDRFYKRVEELEVQREDEHEELNEQSALRSDIEMIDEQIERWKMVNELEKKKENIVESVATKFEQKPNFDPVEMSDDDDSDITLFRFAQMNFMRRAFIASINFPRLRNNVLRSVVPYVLIGGELWWFADEASIDSLSHTNPTSSTGRRRYAFYEADGFYLPPDKLDEWEHGGVGLIRGAKVVKVDTEGSFVLLEDGRKIEFGKCLIATGSDAWLHTQLEHLPELDDFVTTLGKASDFRKIYSKVDKMAVAENGTQNVIVVLGGGLLGTELAYSLNRRYARDQENPALKIVQLCQEPGILSEILPDALSDYSTDMLRYQGIEVLTDTRIDSASVKGRDEKRRRICLNTTAATTSDGPKERKQVMADFVIIALGAEPNIELVDEKSSIKLDKVIRSKFTN

SEQ ID NO: 119536 - protein, 169 aa, Heterodera glycines
MSVELTEEERTLLSAAYRRAISTRRSAWRVIESHVKKSTIMDKQKQGVKVLQKKVESEAEEKGREILTLLDNQLIPKAADPEAKVFYMRMKGDFHRYLAEIKPSEADDLRKAQKAYQEAYSIAQEKLRPSHPIRLGVALNFSVFYEELLKSTEEARRIAQKVVGRISLF

SEQ ID NO: 119537 - protein, 165 aa, Heterodera glycines
MMRHKLQNGLDVIAILFFLREFTMRQDCTLTIFRNEHREICSWLYPSGGSSTLLITIQLTLLEKLGPYAFVTDMTQSELKILYSLRQQAYQANTAAGVPQGSVLGPLLFLIFINDRPSFITNEAASVGIKMYADDVNLYYAHENDDHSNQLDKEIEALEKWSKIN

SEQ ID NO: 119538 - protein, 179 aa, Heterodera glycines
MDRTAKLWHLHRNECLCSFQHIDFVTCLAFLPKDDRYFISGSLDGKIRLWHIPEKKVAIWNEVEQVNKFITAMTFVKNGKFVVIGTFLGRCFFYSTDQLKYHTVIDVRSSRGKNSVGHKITSLAVHGDKLLVASDDSRIRIYDLRDMDLCCKFKAFKRCPNQSEFNPRCLFARWFACDQ

SEQ ID NO: 119539 - protein, 400 aa, Heterodera glycines
QVYIDLVKTRMQNQRTGSYLGEVMYKNSYDCFKKVIKFEGYDCFKKVIKFEGVLGLYRVLGLYRGLLPQIIGVAPEKAIKLTMNDFMRDKLTSDGRISLSSEILAGGCAGASQVVFTNPLEIVKIRLQTAGEIINGPKVNVFTVLRELGFGGLYRGAQACFLRDIPFSAIYFPVYAHMKMKTADEQGYNRPWSLFVSAFIAGGYNRPWSLFVSAFIAGAPAAALVTPADVIKTRLQVAARTDVIKTRLQVAARTGQTTYNGLIDCSRKILREEGPSILREEGPSAFWKGAAARVCRSSPQFAVTLLRVCRSSPQFAVTLLTYELLQRIFYVDFGGTRPSGSEVSTHTTILDQASVSTHTTILDQASENPHHIGGYKLAAATFSGIEHKFGLFMPRFEPKL

SEQ ID NO: 119540 - protein, 382 aa, Heterodera glycines
QVHSMARFAHNDFAFCERSVNDIESAAPNARSVNDIESAAPNAAFVLKNRTRREADYAGYSPSILPTNGPLFQECPACCIPGECCIPGERGPTGDPGLPGLPGAPGPDGAQGRPGTTPNASCIPERVFEPPPCLPCPQGPRGPPGHPGFPGEHPGFPGEPGDRGIPGRPGDRGIPGRPGQDGLPGKPGEDGPPGPDGAPGQPGPYGDKGPTPEAHIIPGPPGDPGETGPWGPPGHPGPPGEDGGPPGHPGPPGEDGYPGGSGEKGWPGPPGPPGPMGTPGLPGPMGEAGPIGTPGTCVCQDTTPGTCVCQDTEVVLTEKRPLSPSSAGGADGRRLRPPGGRDGLSPSVALRRRPLPLNSCSSTLVSDHPLIGWVAHFSSFPK

SEQ ID NO: 119541 - protein, 104 aa, Heterodera glycines
MDADLNTKRMSPEALRDRSFTQKSDTWAYGVLCWEVFMDGASPPRMLNGHRLQFPHDAPQKFVEFIMLHIWDPKDKNRYSMGAVYDWLKQHTEEGEEGRGKRLN

SEQ ID NO: 119542 - protein, 90 aa, Heterodera glycines
MDANLLQNVATDNNNDRQFGQQQILLGQTFDWTQFKNRLALDRCVCMGHSFGAASSLSACAEYPSLFNACVLLDAWLYPVERRMFPATVQ

SEQ ID NO: 119543 - protein, 657 aa, Heterodera glycines
ASNPGQFEQPDQDLNWRQGQHGSLAFPGQVCIGAGGDKPIENASLTVYGNIATTGNITRPSDRRVKEDIAEVSTAEAMARVAQMRLVEFAYKPDIAQRWGLTEQDRHRELAEVLPEAVKDNGEFLTVDDTRVFYDTVAAAQELYRLTGNLGSKLDQVEKISQKLARYAQKRRQLGSMASGLSDFSTFFGTKSLLDGAGIGGGADGDKQSCVSYSRTSLASAVTTMPTTTHYDNDDIVQEKAKKQHIGIEDHHHPTVTIIVVAPIRRPRHTVTGPITVALVEAVVRALVVDSPLCTSKFTQGTIVTLVIIMALCLVTMCTLYVMDWYNRTYVFPVRLIDSYNGLPHHHHHPSSPSSPDSAAADHGRQPHQQQIEPGKMVKPFVEWKLPDRPQNVPPLTVFCGGAGTVMASLSSLIPVPLVGHGTCPHYCCGINSKLAATSKENFGEKLSKSVDEWVALASKVAENVVPPAPQLLLTQDQQNGIGQMNTLANGAKFEVLNMNFTIDARYCFNESCDARNGYFNLFVPVSEHFPTIPLQIRISTDDLTLFVDDCGGLNGFQYKPCQQYGNKQLQLEDDSERKSYRFRIGHSANLCERDERQRGRAFDEYNLFFYRTCALKATATATEAENGAETRSRTRTAAAETAKEGAAQQNGGGGVA

SEQ ID NO: 119544 - protein, 405 aa, Heterodera glycines
LSGVLVYVNNVERGQPEVYVVLEEAQIGVRIRESYAVDIDRMPMYQESMGMLDIALSVPPQYGVQPDGDKTREQETRQPDGDKTREQETRQRYNLPRVSGLMRPFPDTSTGSIYSTLTLNEVNSEAIRQQIINYYRIPGSGERFTDYQQQALNQFQIPTDNMFTTSKEEDKKFEAFPEASIKSEPIYKTAAIYETPQYRFVPRTPQYRFVPRTGAVLMQMLQQCNDLANRETSDLQPYQGQMYWDWASQCPDNPGKILQECGDNVPCLYDYTLLNAEVLGNEVKDTWNAFFHDRWSAIQNYNSCGPINIENSCGPINIEYPEYLIKTPALSSGYLQGDIARFECFQTHWIKGDAEFKCDEIRSTIKTWDMSFDSFDWARDIRNNLMKFILPNIDNLITVTVIGSK

SEQ ID NO: 119545 - protein, 157 aa, Heterodera glycines
MSGNAEDHGYANNPSDIIRDLNVEKKTKTVSDVTTNEQIDIKPKIEVRKSYEEKKKKRHHYSSEEEEEGTEEKKPEPIDQEQLLVNMREEHNLKFKTGILIGLRADEHIKVGTTLKFRAYQSITFQKMSAMVGGGEEKTFEAFLKGLDEKKRRKLMK

SEQ ID NO: 119546 - protein, 226 aa, Heterodera glycines
PEMKYIGNMHGNEAIGRELLLRLAQFLCDGWRQGQRSVVEMLNSTNIHIMPSMNPDGFELTFELTLKTKPEQRGWVTGRTNAHGVDLNRNFPDLDAIFYKANAQRLPFFDHLLEVFHDSDNGQPEVPEVTAVANWVLSWPFVISANLHEGDLVANYPFDESLNPNELRAYSKGDLVANYPFDESLNPNELRAYSKSPDDVTFRYIAETYARAHAYIAETYARAHAH

SEQ ID NO: 119547 - protein, 349 aa, Heterodera glycines
TLLVSLASLSCMAFLIYSVSVTRSLVLTGLAWLSVFSLFVIFSTIVAFICAASSSNKYTFGLARAPVLAVFSTTYTFGLARAPVLAVFSTTVLAQLSAVFLTKEAVERLFDSGHHHGGDAAPLSGGDILKTEHHGGDAAPLSGGDILKTEYLFYPAALASSSTMLIVAYALANQPFNYVLKHAQSSVIQHFADICAAVCYFVPGLARLLHFADICAAVCYFVPGLARLLLPRINSLTLLAFISTCCAIFVHWFRLEFPWVDSVASMVLSFTIFTSMAPLSSYTGRILLQTTPPHVQNLIDRSISEASTIDGVLESISEASTIDGVLELINTHFWQLNFNTIIGTVDVLV

SEQ ID NO: 119548 - protein, 254 aa, Heterodera glycines
DDHSNQLDKAIDVLEWSKINGLEISTEKCFVLYLGKNNMKKEYFINSQRISESDNVRDLGIIIDSKLNFSEHISKIIRNAYLRSFQILRVLKSREIKTLTAAYKTFVRPQLEYATEVWNPNLKKDIDKIERVQKFFTRKAFQKCGFVYKKYMERLKITDLHKLEERRKINDLTTAFKIIKGFTSLEAEQNFFFSERRRPLLLRVKRHTAKTQNNFFHRIVRNWNNLPVLAVQINKAKEFRGLLKAMSSEEISVP

SEQ ID NO: 119549 - protein, 174 aa, Heterodera glycines
MSAVSPSSVVHLGLPRPVDASQLFSLERHFLPLGKCGGHPAWLNPATIPQSAELACQVCGSPMAFLLVCGSPMAFLLQVYCPDEPSHAFHRTIFIFVCRKGNCSKINATPNFAINATPNFAAFRCQLSRENAFFSAESALCPSVVGEVSEPLRPLPFRAPLLRCGCRAASRCAR

SEQ ID NO: 119550 - protein, 153 aa, Heterodera glycines
MVVSRQFIADIASYLSQPSLNTALIKGIGEAVLTQLHVGLFRHFVLIKLLKCTNCPPQARALAYEEQSTQIRMILANALERDRQFEQSARTLMGIPIETGQRGYRHEFKMELYLRITELFLEADNVEEADRHVKRASLLQQDVKEEALVIKYK

SEQ ID NO: 119551 - protein, 202 aa, Heterodera glycines
EMKVNWAIQPGTQQKIDTSKHFHIFVGDLSPEIDNKTLKDAFVPFGDVSDSKVIRDPTTLMSKGYGFVSFPKREEAERAIEQMNGQWLGRRTIRTNWATRKPGAMGGGVEYSSKPTVDEIMAQTSPENTSVYVGGVPPGATEEDIRSTFRRFGNIVDIRYFKPQGYAFVKYETKLAAGKAIHEMNSNEFMGQTLRLNWGKVD

SEQ ID NO: 119552 - protein, 43 aa, Heterodera glycines
MDQRSIQELARSFGIPFIETSAKTRRHVDEAFHALVREIRKHK

SEQ ID NO: 119553 - protein, 119 aa, Heterodera glycines
IMNAMEQDFDENILRKLIRKFDADGSGKLEFDEFCALVYTVANTVDKDTLRKELREAFRLFDKEGNGYISRPTLKGLLHEIAPDLSDKDLEAAVDEIDEDGSGKIEFEEFWELMAGETD

SEQ ID NO: 119554 - protein, 163 aa, Heterodera glycines
FQQRRTFAAAVPNEIPVEPNNGQQPDLANSKDAKPTESFCMNLFLGRAQLGQVFPYPLRLDDEQRETLQMVVTPSAKFLDESIGYKGILLYGTDAQKDKYLPDLATGKKFASFCLTEPSSGSDANSIRTRAEKSACGKFYTLSGGKIWISNGGFADVFTVFAK

SEQ ID NO: 119555 - protein, 351 aa, Heterodera glycines
QMFGVRCCECDRFIAGRVLEAGGYKFHPTCARCSRCQLPFDDGAVLEAGGYKFHPTCARCSRCQLPFDDGAEMYMQGNEIWHPNCEHYRTTENIAVRRRRGQKRRRGSKFQSQFGSKFQSQFGQHLTYMYMLPETEQTLLKHPIAYMLPETEQTLLKHPIANPPQPTQYHTPQGPVIKIRKSRYSMLKTGMQRLTEDLERTEDLERTRPRSRSSSVDNDEPIELAHFPGAKVPDKDAVPPIDREDFPAPREDFPAPPYPYAVEELKRRLSSSSVENDDEEEEEEAVKLAHQNKAEKVMNRAQKVLDDIEQHSSIAHVIKQKLVEDSERKQRLRLHWRLHWDPRNCGRGGGN

SEQ ID NO: 119556 - protein, 212 aa, Heterodera glycines
MHLINLIALFFMLFGPSVQQYTKTPTNEDKEAAVNCHNKFRSQLALGNADNKSGGKKMPKAGNMRKFEWDENLAKLADEWANKCTLSHSWNGWAGENLAMNGGTFSNKDGFEYACGRWWDELNRYGFNPDLIMTGENFSGIGHWTQMAWADTDRIGCAMAQNCPNTNWKTYVVCWYYTGGNYFGAPVYLAGEPCSKCKANDKCDKATGLCSQ

SEQ ID NO: 119557 - protein, 167 aa, Heterodera glycines
RRFKNPAAIIVSIVHKEYSYWHFLKRYDEYEIDELTKYKAKVVYLTVFECGNYLTLDDDLTLRLKGDPVAVVYANVVMTGHKMLPETLALFKMIERSTAFYSSTVCADLSQTKIVQQVLTRPGMVEKFFPSPGEAPMVTAIRKTFAKIWALDNDDDDTKAIIAQNET

SEQ ID NO: 119558 - protein, 142 aa, Heterodera glycines
MKKEYFINSKKISESDNILRVLKSREIKTLTAAYKTFVRPQLEYATEVWNPNLKKDIDKIERVQKFFTRKALRKCGFVYKKYGERLKIAGLHKLEERRKINDLTTAFKIIKGFTSLEADLFLRKAQEAFTFASKAPHGQNTK

SEQ ID NO: 119559 - protein, 198 aa, Heterodera glycines
FLQPRKSFQCLSNVFVLPLPVSCSSAFVRPVRVRFAPSPTGELHLGSVRTALFNFSVRTALFNFLWARKYNGKFVLRIEDTDRERLVEGSEQRIEQTLSHFGLTPDESPIEQTLSHFGLTPDESPLRGGQFGSYYQSERLPLYRELADQLVDIGHSYKCFCSQERRLDFLRRKANSERIPFRYDGICRQLSTEETRAR

SEQ ID NO: 119560 - protein, 112 aa, Heterodera glycines
NGHILQKKSAENINARLGMVTKSGKYCLGYKQSLKTLRSGKAKLVIISSNTPSLRRSEIEYYAMLSKTGVHEYHGNNIELGTACGKLFRVSMLSITDPGDSDIIRSMPTEAA

SEQ ID NO: 119561 - protein, 31 aa, Heterodera glycines
RRSEIEYYAMLSKTGVHEYHGNNIELGTAWA

SEQ ID NO: 119562 - protein, 220 aa, Heterodera glycines
PPPPPLRLSPSECFFNHFNLEFELLYMDEFVDNLLREDHYCDIQLPRLQKRQALEEKDQLELYASALDEDLERLSTDSEDEQETRKARPNVRIESLFLGRLLGMRFLVKYLKFCAFNTHRARKKHFPLGFGCLRQIVSRRRSRQIVSRRRSRSRSRGRSRKSRERRRRSLSTDGRRSAAKDTEREIEENNALRSAAKDTEREIEENNALRKKLGLAPLER

SEQ ID NO: 119563 - protein, 178 aa, Heterodera glycines
EGGSFGELALIYGTPRAATVVAKTNTVKLWAIDRITYRAILMGSTMRKRKMYDEFLSKVQILADLDKWERANVADALEQCQFPSGTHVVEQGHPGDEFFIIVEGEAEVLQRPNDDAPFEVVGKLGPSDYFGRFWHSLLRCINYRLIKGEIALLLDRPRAATVVAKTLLKCLKLDRARF

SEQ ID NO: 119564 - protein, 395 aa, Heterodera glycines
FSATTVLLLLAILMVHNDLQQIWLEDTEMDQIKLETDDLWTMDQIKLETDDLWTDLLAMGAGTPSNRERRQVKSRYGGYAASGVQPPAPAVAAPVQVASGPLSVGTNNCPAGTQGQPGKPGPPGIPGVPGKDGVPGFSAEDVPGKDGVPGFSAEDAHNAPFKGCTNCPQGPQGVPGENCPQGPQGVPGEAGKPGIRGMRGPTGQPGMPGRDGVPGFPGETGAEGADGVPGFPGETGAEGALGLPGAAGSPGEKGEDQKKEIGLKGLGLPGAAGSPGEKGEDQKKEIGLKGPRGPTGDKFCQGPEGPVGLPGNAAPPGPRGPTGDKFCQGPEGPVGLPGNAAPPGREGVYGLTGPPGPAGVPGAEGEYGGPGSAGQPGKDAEYCKCPGRDAPADNA

SEQ ID NO: 119565 - protein, 144 aa, Heterodera glycines
MALKRIQKELQDLGRDPPAQCSAGPVGDDLFRIQKELQDLGRDPPAQCSAGPVGDDLFHWQATIMGPPESPYQGGVFFLTIHFPTDYPFKPPKVAFTTRIYHPNINSNGSICLDILRSQWSPALTISKVLLSICSLLCDPNPDD

SEQ ID NO: 119566 - protein, 415 aa, Heterodera glycines
RPENTAHCRVMERILSQNIYNFLLKNNKISEYQFGFVRNRSTTSQLITVVEDWYEAIINGKVDCIYIDFQKAFDSVPHNLLLYKLEKIGIRGKLLMRIKGFLSNRTFRVKIGDSLSSSKKVTSGVPQGSVLGPLLFLIYINDLPDALPSGVKIKLYADDVKLYISDTEIMHKALHNLFEWANKWQIKVSIQKTFVLYLGSKNPKETYKFDGNTINAVDTTRDLGVIIDNKLQFSDHINQITRNAYLRMRSLFRIIKSKSSKIWITLYKTYIRPLLEYAPEVWNPSLQKNIKKIEKCQKYFTKRVFFKCSLPPIPYQNRLEYLQLPTLENRRKLFDLFMAHKIVYGRTDLKLFSIFKHALTSPFIDLTQNTNWAKNSFPLLGGTKLWNQLDKELIKTNSYLNIFGLKYLPRNRIFS

SEQ ID NO: 119567 - protein, 200 aa, Heterodera glycines
MTELATKNSITLKGSAQMVQQFFHYGIHSILYQRGIYPSDNFTRDKKYGMTLLVNKDPKLEQFLNPLLQHVETMLTKQMLKKLVLVITDISSKEALERWQFDIETTPEGENGYGSKDEKRIKQEISDVLRQITASVAFLPLLEQRCSFDVLVYTFRDTELPEGWADSSECHIDNAEQVQLRSFSSSIHTVHTRVQYKADL

SEQ ID NO: 119568 - protein, 164 aa, Heterodera glycines
MHVESGTSIDMPGGQNGTTMLMIAAASGRVGKKCVSKYFPFVKVDFARYLLTRGATVGRLDNTGSVFALILAAETGSLEMCRLLVEEWAAEVNQQAIDGTTPLMGASSEGRLNVVTYLIDHGAEVQHTDADGYNALMHAVKNGKTEVARHLLTNGASTDQMGTD

SEQ ID NO: 119569 - protein, 1644 aa, Heterodera glycines
PTQPNGPLHHYTVYFALEADDDSYKRWTRLTVPLPDGGGHFQVVLDRETYNILAQREYRLRVTAANDMNEGPPSAVARFTTGTGETPPTVAIVPADNPAEVQPLDDYSVHCDATGVPPPTLWWTLGTDEERQPGGAHLLLRKLRKDTTATCATCHAENNAGKAQLVLELRVLGPGTPPNELVVLPMPDQVLNVEWTAPDEPNGKLVGYIIHYAELADGQLEPPSDAWQQIRVGADVNRHRLTELRPKTIYTIRLQAVSDRGPGVLSDPVMARTLPLAPKAPEVMPVMVHDNNTVMVQFLPSDDPEEVGKKVQTYRIHYTKGDPSLEDAQWNEMTWSIPPGADTTKEMNVFLDGENFEPETKYHVRVIPIGVIEGPPSQPKDFDTKLGVVAPDKPMIHVDVEDNILRVPAGTDYTVACTANGFPATANGFPAPQIKWVDKEGNLISEGGMLRVSDIRQAKDFVCVAENEGGRTENGFTIFVAGPGSAPENIRLAATRPKSISVTWDPPQIANGNITRYIIYYIALDDQSRDLLVGQVPSKPISEWMSNHVMGKDLGVGEKQALITDFVEADTAYAVVVQAANQDGPGPYSNQHNIRTMSRARAAPPTQLQVEPINQTSVEVHWKPAEVLEESPLSYEIYYVPAEKKIEEDELLSLPKWSKVEVPDPSKNSHIIWNALEPDTEYVFKIRALYPSGPGIFSEPCIYPSGPGIFSEPCIAKTLPEGDAPFIVVSSGSRGTAGESVIQLLPGSDYTVFCRASGRPQPAVRWIRGGDIPIDPSTVKEDHTGTKWSLFVSNITEPSTFNCVARNPLGVANWTIRLEMMSDLSADWRDQLVRVESRRGQIYLHFADTLPNSLRRANQWTLRYTDDPNKERILWSVLESEDRTLEAPAAPMEPGVTYYLVVENANEGVRSPVFTILVPKAPGDLRVGSNINDEMVVDFRPAISGPQQPVREYSVRYWPAADAAQMADAAQMSTIRVEGNRTVGIRVPDLPRDVEFYFQAVAELSDGQELAGPPVRIRTPAKEIRCDCSHACKLLETDSVQVVRVECYCPDGWLLDEDEKTCSQVEPTGGAGTVVEVRNNRAIETEAGDDLGATVHVLPTDSLGREIRPVVMFNGTPLRTDGHGNYYDAMERKVERDEEQRALGPDGQVLKMNSDGNWVYPPLDKYGQPMPTGANMYPIYSVVDDDGVSMRRDEEGKILDHEGKPLPTDAYGQPMGPDSSPLPTNFYGQFVLGQRLEEEDKVLPTDTMGFPIYPIVYPVPTASSGLFLDSERGDEVQRDEQGIPVDTDGKTLPKNEEGMFVLPKATTTSTARPTVVEVIGPDGLPLSTTREGLVLDRAGSPLPTRGDGLLIGADGQPLPTDSLGRFIHVTVPPGGAETLPTDDYGHDIHPMVDQFGIAMPTDASGHYVDAGGAQIETDEFGRPVDSAGHLLPQGEQGQFIYTRPEGPVVASLGGGTLEPAATARGQIVVVDSAGQPLDRDEQGGCVGGERKPLATSADGLLLGPDGSPLPTNAEGQFVYAWSAEQEQERKLAPVTDSSGHLLMPVVDAEGTPLARDPASGRYLDPADGTPIAVDDQGRPLDRSGNVLSKNIYDEYVWLDVGLVSGRASGTDAGGRIGAEATTATLHDDHAVDGAELVPSDEGGP

SEQ ID NO: 119570 - protein, 225 aa, Heterodera glycines
MALIRLDLRNWNNIFKQHCSIISKRHPLNPTPTKENFLWIRSIAKFETDLVQFKTRISQPDNGQSADVRTVLVRKLLESAKEVLSDWLDVTRGNTVTKHDIFAKLARKYENEFLCDMNALNVLEPDVLTRVSEYIPEIIDYVQQIIRNGYAYVSDGSEKRSPSDFALWKASKDGEPFWESPWGKGRPGWHIECSAMSGAICGDKLDIHAGGFDLKFPHHDNEIAQ

SEQ ID NO: 119571 - protein, 140 aa, Heterodera glycines
MSNSFRILSLFCPLFLLLFVPETSRALYFHIAETEKKCFIEEIPDETMVMGRYKVQLYDPNTKAYGDYPTIGMHVEAKDPEEKVILSKLYTSEGMFTFTSHSPGEHLICLYSNSSAWFSGAQLRVHLDIQVGEHAQDYEQ

SEQ ID NO: 119572 - protein, 301 aa, Heterodera glycines
MAVPFSLQVDGLIYRVRNSTYGQFPLDVTEHDLRQLCDATMDVFRQQQTLVRIQPPVNVCGDIHGQFTDLLRIFSTLGPPPEKKYLFLGDYVDRGPQSLETVVLLFCYKVKYPESVTLLRGNHECSNINRVYGFYSEIEQRYHQADTRRLFDMFNQTFAWMPYVGLIGDRILCMHGGISDRITSLQQLNELRRPLLTLPSPSLEMDLLWADPMLDIRGVEPSPRGAGVVFGEDVVFRICELLNLNYIIRAHELVHEGIEYFADERLVTVFSVPRYHNQMNTGAALTIAEDLSHDVTFFPPN

SEQ ID NO: 119573 - protein, 419 aa, Heterodera glycines
GNMLIGVPGGHDGPSGVIVCCENYLVYKNLGDQPDIRCPIPRRRNDLDESERPIMIVCAATHKMKNLYFFLVQSEQGDVFKVTLDSDADIVTEMRIKYFDTLPVANSICILKTGFLFVASEFGNHHLYQIAHLGDNDDEPEFSSRIPLDEGETFFYDTRGLQNLILVDQIDSLNPMITSHVPFNAFPTFGICYVLCSLKIADLANEDAPQIYALCGRGPRSTLRVLRNGLEVSEMAVSELPGNPTAVWTVKKNVDDPFHAHIIVSFTNATLVLSIGETVEEVTDSGFLGTTPTLGCGLIGEDSLLQVYPSGIRHIRADRRVNEWRAPPKRPISKCAMNRRQVSGNIDILTKKETVVLLKVVISLLGGEIVYFELDMNNQLREYSERREMTSEVLCMSLSEVPEGELRSRFLTVGMADRT

SEQ ID NO: 119574 - protein, 532 aa, Heterodera glycines
MENAHTKSEDELFRFFGTGPDGLTEEQADELRDKYGYNEMPAEEGMPAEEGKKLWELILEQFDDLLVKILLLAAIISFVLALFEEHDDQTSAVVLALFEEHDDQTSAVTAFVEPFVILLILIANATVGVWQERNAESAIEALKEYEPERNAESAIEALKEYEPEMAKVIRAGKHGIQMIRAKELVPGDLVEVSVGDKIPADLRLVKIYSTTIRIDQSILTGESVSVIKNLDVVPDPRAVNQDKKNCLFSGTNVASGKARGIVFGTGGTNVASGKARGIVFGTGLSTEIGKIRTEMAETESDKTPLQQKLDEFSEQLSKVISIICVAVWAINIGHFNDPAHGGSHFNDPAHGGSWLKGAIYYFKIAVALAVAAIPEGLPAVITTCLALGTRRMAKKNAIVRSLPSVETLGCTSVICSDKTGTLTTNQMSVSTLTTNQMSVSKMFVVEHAHGDQITFGEEFTISGSTYEPTGQIMYNGVQINCATDQHKALTELATICSLCNDSSVDYNEMKHAYEKVGEATMKHAYEKVGEAT

SEQ ID NO: 119575 - protein, 117 aa, Heterodera glycines
MKKKFLLARRRHLMDRMAQRRERLKESYRLHSFDRDCDEMLGWIQSYLDPTNIRGKLQKHGNFEQELRANRNRLDETNAPGQELIQSGHYANEHIQKLFSGFSFVTSTGLKNCLSLL

SEQ ID NO: 119576 - protein, 159 aa, Heterodera glycines
LDNVLLDAEGHIKLTDFGMCKENIGPGDGTSTFCGTPNYIAPEILMGEEYGFSVDFWALGVLMFEMMAGRSPFHLPTTEEDEQTAEDLLFSPSERLGCKTDLEEGLADIKMNSFFKSNIDWELLEQRQIAPPYNPNVSGDRDLQRFDTSFTNGNPSLTP

SEQ ID NO: 119577 - protein, 306 aa, Heterodera glycines
MVINRLEKLFVTNDAVSILNELEVQHPAARILVMAAQMQEKQIGDNTNTVVILAASFLEHALQLLDMGITAVEIASGYEFALQKVEELLPGLVVSTAEDLYDIVKVRSYLKSSLISKQTDHYELISDLVAKACVQIMPKNNTTAFNVDNIRICKILGAGVASSYVTNGMLFRRGAEGEVKGASNARVVVFACPFDLTQTETKVVVFDKKSEVGKVATIVVRGSSQSLVDDIERAIDDAVNTYKALTRDNKLLPGAGATEVELSHQIEIIGEKESGLRQYAIKKYATALDILPKQLAENAGLKVNIF

SEQ ID NO: 119578 - protein, 84 aa, Heterodera glycines
MQNDAGDFVDLYVPRKCSSSSRIISAKDHASIQLEVVEVDQATGRMITGKTTKYAICGKLRFMGESDDCILRLAQRDGIIPQNL

SEQ ID NO: 119579 - protein, 176 aa, Heterodera glycines
MASLKGHHSPEFTNFIFACGLDVPTRKNRFEVIYALLSHRFNARIRVRTYTDEVAPIDSITPVFSGAEWYEREIYDMYGVWFNNHPDLRRILTDYGHPQRKDFPLSGYVELRWDHELNRVIYEPTEMTQEFRKFDLNTPWEVFPAFRDESITSGYNVIQKAGKIEAKKLDDASKKP

SEQ ID NO: 119580 - protein, 366 aa, Heterodera glycines
MHWTDICTTRQGGCPTVLMTAITSIKFNQVEVQNTELYDSGTLYPYKAYLTNELSFPNSAKGHFMASAGYHPSRKHDDATDAGFLARCARFAGGRKARFLSRLDFDLGNQELYLLNNMDVLFTIYRAKDAFLLQSLAPAAAAAAAGQHYALYLHDIKLYVKMVEVQPSLNLSIYKTLEKQPATYAVRKTEVKSVFLTAGRTEMDHNIFSAAIPRRLTIALVANGAFNGQLALSPFNFKPYAIREISVHAAGHVYPAVPHRMDFSGCAYIRPFVDMYEALGMANSERSMDITLEQFHDGWTIFVVPMTSTLDDSCGFELLRSGTTSIRLAFNEAIPAGGVEMVVLGEFDQLIMIDYNRHIVSDSKIA

SEQ ID NO: 119581 - protein, 326 aa, Heterodera glycines
CLLPRRGVDSEYDGTCREIEHCKEQLEAYLGWASKKLKCTPKFVGTGRNSHQLEIPESACHNLTDDFQFTSQRKGYKRYTTNNLQKLVDKLNGYKRYTTNNLQKLVDKLNDAETNCATISAEVTRRVFADLDVRSDKWASIVHQIATFDCDKWASIVHQIATFDCLMALSLYAQSSQMCFPEFVSNLTWFNNTLIVYSTIVLGCGSNTAHTMLLTGPNMGGKSTFMRQVATLVALAHIGSMVPADSMRLGSMVPADSMRLTPVDRIFCRIGASDRLSAGQSTQSTFFVELSETNTILSQATRHSLVLIDELGRRTSSFDTEARIVK

SEQ ID NO: 119582 - protein, 170 aa, Heterodera glycines
PTDERKFELYRQCDSVIYTPPNEHFGIVPIEALEQRRPVIVNNSGGPAETVLEDITGTRIADTCGVLLANAMASHMGRKEWPQLDKDELYAKQRIRFDEKRIRFDEKFSWKGFGRRVDEAIAELFSVDHPPTEEMAREVPATIGSKSSAFSAVLTNGHRNTALHRRHSEA

SEQ ID NO: 119583 - protein, 144 aa, Heterodera glycines
MRFALLGAAIGARLEVCRLLVDEWAADVNQEAIDGTTPLLDASGEGHVDVVNFLIERGANLDHTDMDGYNALMCAVKKRRTEMARHLVAIGTSTDQIGTDGKRARDLAEESENAEMRDIFRAVAAEQQRENIDGQQNEQQQRRM

SEQ ID NO: 119584 - protein, 222 aa, Heterodera glycines
MCSYENGLAHHPCWYGNVFGSSVAAADEEDNFEERTRQFFAFVNQGNIGQLRALVDSLDADELSILLEMNQPDVQHARPALVNAILNRHTETAVFLVKFPPTFRRQQFDFPPFFFIQLEKGADPHQTMIGQLNGLNMNVTPLWAAVVFVNLELCRALIAHGANIEMGTDSGHSPLLCACFNGNLEIATFLVENGANANLADTDGMTPLIVTSFSGQVEELDG

SEQ ID NO: 119585 - protein, 135 aa, Heterodera glycines
LIRNYAAEAVKSEEELAELVEAAVDLAHEFGLIKRLSDDESRQRRTTDLASIQPFSLFPSPFPRSLFHRAIAVHKGMQKLFFRVSCDYEFLAKATEQLAKTNKTYERMVGLMDQVRREGHQQPYTLLLTRAVSCF

SEQ ID NO: 119586 - protein, 283 aa, Heterodera glycines
LLMWIKGFLSNRTFRVKIGDSLSSSKVTSGVPQGSVLGPLLFLIYINDLPDALPSGVKIKLYADDVKLYISDTEIMHKALHNLFEWANKWQIKVSIQKTFVLLGSNNPKETYKFDGNTINAVDTTRDLGVIIDNKLQFSDHINQITRNAYLRMRSLFRIIKSKSSKIWITLYKTYIRPLLEYAPEVWNPSLQKNIKKIEKCQKYFTKRVFFKCSLPPIPYQNRLEYLQLPTLENRRKLFDLFMAHKIVYGRTDLHEMSKRVKTHEMSKIFQNLKQNESNLGFL

SEQ ID NO: 119587 - protein, 99 aa, Heterodera glycines
PKSPRYLEDDVFVCEYQIDRNQRSFEKIPPKNRYYINTEPFVFNFFEKKLTMKRDFTVAEFGVRLLKDQCPKNCGWHWHQQKHCLTIITDQQQQWPLID

SEQ ID NO: 119588 - protein, 951 aa, Heterodera glycines
RGYVVMDHWIASKECDDFFNNLVLCNFKENREETLEALEMLADKLLDRAEIKHHYGLGGMFREILAEVSRNGNYVQPLREGFERVKKVVITPSRIIPCGHEILMGNRALRFDRDNFPLLRVIFRDENWERVRKNQVNGWLLEKFVLERLVCGISFAGQVYSFVGTSNSQMRDGGCYFLQISLDCYRNLCLYRLLIMEGVDEFRNRLGQFSLVPTIPKMMSRLGLCFTQGRETAVDMRLRMLVWDFTGMGCKNDEEEPYNFSDGCGCLSMSAARKISFLIGLDEHAPSCFQFFRYAGYKGVLAVNPVLDQNKQFFDTCVVDLRQSEAEFMAVDFLFRPSQKKFEVWQEYEDECRLDVVKCSAPTTVVLNKPFINILDQVSEMQSVRCHKRICSRIHSLVSEMQSVRCHKRICSRIHSLLDRHIFAVCASLTDEVFARRRLQELPRLIDYGAMNSVQFTREPFFRLVLRAAAKVAIHRVCQKLAITIPPELGRMMFGVIDETGILQYGQVFVQYSYGQVFVQYSPTKKPTKKRILTGRERFCPNITSFGEGPILITKNPSVVGGDVRMFEAVDVMALRHLVDVLVFPRYGPRPHSDEMAGSDLDGDEYTVIWDDEMAGSDLDGDEYTVIWDEELLLDSTQPAADYSALKGSQAVTEDMTPFEYQSQMASFLVNYLNNDSVGQISNSHLANSDLYGINSDVCSTIAKKHSQAVDFPVCSTIAKKHSQAVDFPKTGVAPTQLTIQWEAADIPPEKYERTPDFMGKMSNEPHYVSNPHYVSNRLNAQLYRRIKTLSDFLSYAISDESVKLPHMDELLSSDEHSEFIELAAVHYQKYAYSIRSLMDSYGIQCEGELFSSSYSSLCNSLMDSYGIQCEGELFSSSYSSLCNRISDRENEDMSFFTTSRVIEQRLWSFFTTSRVIEQRLWDIRQAARKTFFASYGGDMEVILPEIFEKG

SEQ ID NO: 119589 - protein, 278 aa, Heterodera glycines
RISINFPFHIGNSIKQFQLKMNCQIWFGQLMCIMLLMVSTDYVVSQDDSSTSSSSSTSTSTSTSTSTSTSTTTPSTTSTSTSTSTATTPTSTSTSTSTTPTSTSSTSTSTSTTPTSTSTSTSTTPTSSSTSTSTSTSSSTSTSTSTSTTTPTSTSTSTSTTPTSASTSTSTSTTPTSTSTSTSTSTSTSTSTTPTSTSSSTSTSTSTTTPTTTSTSSTTTNPSSSSCTTCNMCPSTTSSTSTTTSTSTSTSSTTTKASVTNSEKNPPCLTFGPDQKSL

SEQ ID NO: 119590 - protein, 243 aa, Heterodera glycines
FKYLFCKTVLVLLLSLGTTLVSSHWFSSHSSEEETTSTSSTSSSSTSTTSTTTSSTSTPTGTTSTSTSTSSTTTSTSTSTTPTTSSSSSTSTTPTTSSSSSTSTSTTLTPTTSSSTTSSTSTATAPTTSSSTTTPTMTSSTSTTPTTSSSTTTPTTTSSTSTSTTPTTSSSSSSTSTTSTTTSTTPTTTTSSTSTSTTPSTTTSSTSTSTTPTTESTTETTLTSTSSSTTTTLPSSSCTDSAA

SEQ ID NO: 119591 - protein, 171 aa, Heterodera glycines
YFLFLGCLVSALQDDTLHLWNFRQRIPEIAHSLRMSKERISTIYLPFQSRWLYVGTEKGNVYFVCLATFELSTYVIQWNKAVDISCRTHPGAIKSLESCRTHPGAIKSLEVSPIDPTKLLIVFYRGQLVLWNIQTREVDRFRLDDQPMTAVSWHFDGKQLMAGHHDGRRYC

SEQ ID NO: 119592 - protein, 235 aa, Heterodera glycines
MLVLLMQRPTDDSIEVTVTLLKECGAMLLKVTPKGSIAVFERLRAVLNDCDSIHERTQYMIETMFHIRKTKFENYPTMLEELDLIDEDDQIAHLVQLNPEDGRPYDPEINLNVFKYDPDFEKNEADYEEIRKEIIGDADESEGEGADEEEEGDEQQPAESECQTEDILKREHKFAFSDHRHGNFGHDGTGHGGISTQRLFDHPIVIGLPRSGSQTDQKRIEAQIRGNGRLSGIIN

SEQ ID NO: 119593 - protein, 234 aa, Heterodera glycines
MDSSNGHPDSRANLFEADKYNKRKIKDLLIVLDGLEDTRKLMLLFEEINSQGESNAPPLLNECLSANYKEMVEDLGFFKGAFDRENALERGVILPRRGVDSEYDGTCREIEHCKEQLEAYLGWASKKLKCTPKFVGTGRNSHQLEIPESACHNLTDDFQFTSQRKPFVDIQRGFHPSLADLKSASAGSFNYIPNSCVLGCGSNTAHTMLLTGPNMGGKSTFMRQVATLVALAHI

SEQ ID NO: 119594 - protein, 295 aa, Heterodera glycines
ISAEVTRRVFADLDVRSDKWDKWSSIVHQMAFDCLMALSLYAQSSPHKMCFPEFVFEFDTPFVDIQRGPFVDIQRGFHPSLADLKSASAGSFNYIPNSCVLGCGSNTAHTMLLTGPNMGGKSTFMRQVATLVALAHIGSMVPADSMRLTPVDRIFCGSMVPADSMRLTPVDRIFCRIGASDRLSAGQSTFFVELSEQSTFFVELSETNTILSQATRHSLVLIDELGRGTSTDGTAIACAVFKHIMRSITDGTAIACAVFKHIMRSIGCRTLFSTHYHSLCNFVATDPRIALAHKK

SEQ ID NO: 119595 - protein, 392 aa, Heterodera glycines
PNEITFNGKSNIARKFYPPAPPQQSLLNKYNYLISRLRRLPNNFTSTAAYYSGQIHANSTPEFVRQFKAIKIAEKQSKAVAAVSGDSKVGQPQHLQRTKQQQQQQEFVTFRYTWPVRITERLIGAGESAILNVSPAFCTAFNGVQFTWLLRICEEEILPADISDQSEGDISMDSSYFASGGDDDELEMVQQQQQQRKVNITLYYKEGPARDVKLSGGNISIRNSEGILFDNMPLRNLEYTKGGGWSPISDEGLGGRQRDEQRKFSEFIHDHVGKQITVRVQMKMPASLFQPLQYLPSIESPQSDKLSALCAVFAHYYFNTVIVREAECFEDFLEALDASRHVQFPALRRECERFICTEVMAEFADLAFVKKMLLLAERFNLSVLKMVHALAN

SEQ ID NO: 119596 - protein, 109 aa, Heterodera glycines
VSYAIAISKPLSITVISYGTSPLTEQELLQIVNDNFDLRPGVIIEELGLKRAIYSRTAANGHFGHADFPWEKAKPLEIRPELMEKLIAYRKSEHIPNGCFKGTHIHAHH

SEQ ID NO: 119597 - protein, 89 aa, Heterodera glycines
MFQIFVKTLTGKTITLEVEASDTIENVKAKIQDKQGIPPDQQRLIFAGKQLEDARTMVDYNIQNESTLQHCLKLFGGARTGKTAHYSRS

SEQ ID NO: 119598 - protein, 257 aa, Heterodera glycines
MEFLEKSQRRRAGDDVQWEGLDPAGKRVIILGGGDTATDCIGTSLRLNAKTVQAFEILPQPAEIRKLENPWPQWPLIFRVDYGHEEAKVRDGKDPRTYAISTKVGRNGAGQAAKPYDLQEFITEEKNGVHVLVGLKTVNIEWEKDENGAWKMVELEGTEKVYDCDLCIMAMGFIGPEKTVIDQLRLDYDPRQNIKTPNEKYNTNCARVFAAGDCRRGQSLVVWAIHEGRQAARQVDHYLMGKTTLAGYGGIVLAPIA

SEQ ID NO: 119599 - protein, 206 aa, Heterodera glycines
MPMPAPEKGMVGPNKATADERGKLLLAVQYNIQQGSLFVSIRRCAELLGMDSTGFSDPYCKVSLTPLSTKAHRQRTTIKKRTLNPEFNETLQFIVPFKDLPRKTLVIGVYDYDVGRHDDYIGKREGKGRIAKTFPRPPPPFRWNCSVHRRTRRKGPTMATSDGKPRQNIRTLAPIGSGRVSGRRHERKAHRTRSSKCLQQMRTPIR

SEQ ID NO: 119600 - protein, 111 aa, Heterodera glycines
MGKEKIHINIVVIGHVDSGKSTTTGHLIYKCGGIDKRTIEKFEKEAQEMGKGSFKYAWVLDKLKAERERGITIDIALWKFETSKYYVTIIDAPGHRDFIKNMITGSVLQYL

SEQ ID NO: 119601 - protein, 336 aa, Heterodera glycines
DSQIGRDVEIRLSRTFQVKKAWIRKAGLEGRVEPANNGVFQQDGRVEPANNGVFQQDLLLTEQQANVLITEINQNSSAQFQSPSFHSRRQSLFFEASPTQKWPVGQPILYMFDQSVPESDKGSVRAAVQEIQSKSCLSFQEASRKPAGNHLYYVKINNPQFCGLSYVGRISPANPVYLSFCGNAVGIAIHETMHALGLQHEQLRVDRDLFININWANINPQNYDTFARSELVKYTSYGVRYDYGSIMHYASNIASKSAGLKTMTAKVSNQANDAQMGQRRGLSATDVEELRRMYCMPEGCADANVYCGVWATNNLCQLASTRPWMMQNCRKSCSLC

SEQ ID NO: 119602 - protein, 100 aa, Heterodera glycines
RDNKLAIEDMEGGTFTISNGGVFGSLFGTPIINPPQSAILGMHGIFDRPVAVDGKVVEIRPMMYIALTYDHRLIDGREAVTFLRKIKQAVEDPLTILLDL

SEQ ID NO: 119603 - protein, 229 aa, Heterodera glycines
MAENFLLEFFNFYDGPNGEQTRQQLLNAYDANATFTYSMCFLADTHPTGNRDRSDHQELIGLYIRSSHNIIQQHKWQSYRDKIIYRGPMDIAVALSKLPPTEHIKQSFLLDFNFTSDNLIVLSLQGIFRDGKEVSDGSTNFLNMKFFTRQFAIVPKTEGIAIISDILQITPISNARMERYNNLLKNATVAQVQQSALVPGGVLASAVQQQIDGMAPPPPSPQTQPVLMI

SEQ ID NO: 119604 - protein, 187 aa, Heterodera glycines
QRSQRSHIKHPQSQPDNSDKNINAQLPPEDIATMHTQKVVFNAPFDNGGTAWVRVINPGTERIGYAFKTTKPRRLGDAVKTTKAQRININPPNGTGRSAQRSSSTWASPATPSTPAPRATVEWTNTPHPDATVFKPEWFQGDGWCAARTCQSSTTSDGRMLRHHNMDMIGSHPTVPKLSFCPPSFKL

SEQ ID NO: 119605 - protein, 168 aa, Heterodera glycines
LIKLDPNLTLEERISLSTAYKGAMASRRTSWRALVSIEERTGASLSDAQQQVLENYREKVQNELVNTCQELLTCINEVLFPKASDVEQKVFYLKMKADYYRYISEVATDEDRSGVVELAKVAYQEAIDMAGDKIPATNPTRLGLALNFAVFNYEILNSVTEARKVIQT

SEQ ID NO: 119606 - protein, 327 aa, Heterodera glycines
KCSVSGPRHILDKLSEFRADFLHSKSARLASSPSFVQVTFLQLVAKLFPSEARFHPILTPTIAFASELVGNTRICSVDQCARLIFLCAQMCDWFCRRPRFFPEVLAFLLGALQLCCESKNEAKEVPFPSMNFPISLPHRQMLFVAPKESTTTSTTGTFGNLSLGQIFHPNIGDLETENGGILDEEENGGGATSTDEDKCRLRLATVRALFATIGQYARKYGTTTAADESVAAAGDQPTNDGGTMCPAFNACFGPFHRICLHLPVANYPAQLADEAARLTQLLAKLMAQNGRVMQMKRISKRGTTTTTNRIPSVENRYEIPWIRSFSF

SEQ ID NO: 119607 - protein, 420 aa, Heterodera glycines
MEKSRLLYVVLFHTVFASFGEIEANLLNYLTVPVRQFFADSLLQRYGIVPYSSQFEFVYSMVASIFFIGAIFGGAIMGPCMEHFGRRATAVYLRSFLGALSAICMLLSKWLTIVELFAIGHFIAGIIAAWKIAMIIYLAECAPDHSRGWSTSLIGSGSTLALLFMASLCLPSVFGTAQLWWLLPAFALLLSTFHLCFAAHFPESPKHLFCGDRRNKTGGNCHERAKLSIKFYHGSATDVFKVMNQFEQEQQLLASREHFRWSDFWKIPELRHSLFITLLTSWVFAFSLSNLKSQYLESMLMRYGLTQTGAMISTMAMIAVTAPCCFLSPVLIERWGRRPLFLLVTSFSVAELALITGAQFASDQTASGGSAATAALALIGFTLGQSSANLGILYMTPILVGELIPHAARSATIQVHLMAE

SEQ ID NO: 119608 - protein, 84 aa, Heterodera glycines
MAELRLSDKYLEQRNKMLRNYPLPKDWVEIYDPGMHRHYYWNQMTDEVSWLSPKHPKAVISEAAAKSAKGPGSEDWRGCDGVWA

SEQ ID NO: 119609 - protein, 142 aa, Heterodera glycines
MPRHRAKPRSFHAGLKFPVGRVHRKMKKGPYAKRLANGVPVYMTAVLEHITGELLKKIGEITQAEGMKRLSAFHIRTAARDDDELRKLFSGVSLAEVCVLPELESDVEQSSEGSGESDSDEESTEGSASGSQEGGGAAAAQQ

SEQ ID NO: 119610 - protein, 131 aa, Heterodera glycines
MADRAGFQSGFGGAAPPSARGRGGPRGRGRGAARGRGRGKDAEKEWVPVTKLGRLVKDRKVLTIEEIYLHSLPIKEFEIIDLLLSGLKDEVLKIMPVQKQTRAVRRGYWGNKIGKPHTVPCKVSPSYSVVF

SEQ ID NO: 119611 - protein, 196 aa, Heterodera glycines
MVKWARAQLSYAKMLNKIEPLNNELKRLEKDAEEKTVKGEELKHKIEALENRIQELKDEYAQLIGEAEHIKQDLQVVQEKVNRSIHLLKSLRVECDRWEAGRERFAQQNETLVGDVLLSAAFLSYSGYYDQLLRDTIFKNGWEYVILHKLCSVMSLLALSICQLRTSAYNGTIMECRRTNYARRMPLCSGSSTVSR

SEQ ID NO: 119612 - protein, 284 aa, Heterodera glycines
LNRLLYGGLCLWGDCVSRVLEEGRLLIKAAAPDTRGFVRALLTGPPNTGKSFLAAQIPPNTGKSFLAAQIAKDSEFPFIKVCTPEEMVGYSEAEKCAKIRKIFEDAYKSPLSCVIIIFEDAYKSPLSCVIIDNVERLMDYSPIGPRYSNMVLQTLLVLLAKRPPQNHRLLMLATTSNHRLLMLATTSNEQFLYEADMLSVFSKVIRVEQLHTVNHVMAVLGEANIFSEEEIRQIEDELRSSDVSIGIKRMLELLDFVKQSEQKHRVQLLLDGIREAGLKYFFVN

SEQ ID NO: 119613 - protein, 293 aa, Heterodera glycines
KFHQQMCRIALPHICLYVLLCLYLLAGAWAFARIEHNAERAEQAKKLERIGWWWWATILTDTTGYGPTTPLTPLGQWLSIGYGLLGIPPLTVLAAVDIGRFLSDVVLISYDKFLVFALLTSLTYLFILSQQRTAKSLLAFCGVRCRTGKVISHVETKALQSLNRLQQTINVPSGKRRLPLSVNAAILLLFCMLGGVVYIAAAGNHNFIEGFFVTFNLVANLTMSEMPTDISRLMTLIYIFVFVTFVEMPTDISRLMTLIYIFVFVTFVLSMCADLAASELKWVFLKVFLKIHY

SEQ ID NO: 119614 - protein, 107 aa, Heterodera glycines
MATQLASILDAMEQDYDEKTLRKLIRKFDADGSGKLEFDEFCALVFTVGNSVDKETLRNELKEAFRLFDKEGNGYISTQTLKELLHEIAPDLSDNELDAAVDEIDED

SEQ ID NO: 119615 - protein, 141 aa, Heterodera glycines
MFDRSRNGYIMATQLASILDAMEQDYDEKTLRKLIRKFDADGSGKLEFDEFCALVFTVGNSVDKETLRNELKEAFRLFDKEGNGYISTQTLKELLHEIAPDLSDNELDAAVDEIDEDGSGKIEFEGKAKSNKYNYLIKTQL

SEQ ID NO: 119616 - protein, 124 aa, Heterodera glycines
AFAAEGRAVRVHKAILAARSPVFAAMLQHVDTSESKTGVLGVLEIKDVEYGVVKEMLNFIYCGKSSSAELNEIASDLLIAADKYRLEELEELKTHCEHCLIQAINFDNACQLLIIADLGFRPKL

SEQ ID NO: 119617 - protein, 117 aa, Heterodera glycines
MPEKHHRSIAHNYFKNSYKENKLKQTRKIMEKEEAAELAREKKREEEERRKKKWEEAERALREEEKREEEHRRKLVEERKHREKAMQREWEQRETEQMKKHREKTYKIGGKKKKDKK

SEQ ID NO: 119618 - protein, 60 aa, Heterodera glycines
MLTMVCLVAKNGMTNEEKGLIQINNWKPINFETITDNPEELVSNLFREISTHITLKILAK

SEQ ID NO: 119619 - protein, 230 aa, Heterodera glycines
QVGETYFKAVAIKALKEMGLRTVLVNPNVATVQTTKGFADRVYFLPIIKEYVTEVIKKERVIKKERPTGILCTFGGQTALNCAVDLHNSGVLSEYGVTVLGTSIETIMRTEDRELFKEFVLKIGEKVADEFVLKIGEKVADCRAANTIEEAEKAAEQIGYPVLVRAAYALGGLGSGFAETRDELMAIARQALAHSKQVLIDKSFQGWKEERRRLNDYIFLSRTANNFPNL

SEQ ID NO: 119620 - protein, 86 aa, Heterodera glycines
MTIFGNYFWRFLPTKLVHHGIIRKLLVRVLIACDVLSRGIDVLDVDCVINYDLPINERIFVHRAGRTARAMKEGLLVSLTTKEEVC

SEQ ID NO: 119621 - protein, 129 aa, Heterodera glycines
MALTTISLHSIEDEFLRDGYTDENIHQPELRADPEHRCCAFTVYGRHLAVVPFNIVELVRQQPSAVSSREEAKLYNQQQQQQQMLLQSYTIKMRLLDERLDNVLDMCFLHGYYEPTLLFLYEPIQTTAG

SEQ ID NO: 119622 - protein, 233 aa, Heterodera glycines
MGRGSSARRTIGAMSERTRRPPFAAAEVGKARKHEKTMVVHLCSHSPDGDPCEQPLAEGIGQFKLTRFHFDASSRRCRAFVYRGLRGNANNFLLAEDCELVCQAEPTMPSFRVNPCPRGIPLTDDQNEPLVCGNSLAAPDLAQFGPLTAAHQNQLETGCPSGFWCHVGSSPDTTNCCPQLADVNFCPHGEPKWERKAWGHGQKKPQKCGPNNECPEGFVCHLNSDIGMALCCE

SEQ ID NO: 119623 - protein, 357 aa, Heterodera glycines
SDYCFGFWCHGSSPDTTNCCGGKRPCDLPLGGKRPCDLPLEYGTGEQKLDRWYFDVDSQTGEQKLDRWYFDVDSQMCRHFRYSGIKGNANNFVSRDHCIKGNANNFVSRDHCQQKCPSANPCLFGDLLRDEDGNVLKCEQNEDKGCPEDTHFCHVGHRLTQSGCCPRTRSDPCLLPVSRGIGTVAHIRWHFNANTKHCEAFDYAGQKGNENNFMTKRQCEEQCDQQKNFCPHGEPKWERKAWGHGRKKPQKCGPNNECPEGFVCHLNSDIGMALCCENPAHFCLQSRERGPCNPAHFCLQSRERGPCGARELRYGYNPLTDTCVQFHYGGCGGTLNNFESIDRCREICCRQYQRRNK

SEQ ID NO: 119624 - protein, 401 aa, Heterodera glycines
LPISTDKRHDTVIVPIFGIPTPFHISMIKNISQPTNEGDFTYLRINFTHPGSQIGKESAQFPNAFAKYLKELTFKSRTFKSRNVRPGERETPSVNLQTAARLIKEMQKRFRTQEAEEREKEGAVKQDKLIISTNGKGNPKLKDLYVRPNIIAKRISGDLYVRPNIIAKRISGTLEAHVNGFRYTSLRGDKIEVMYNNIKHAFFQPCDNEMIILLHFHLKNPVLWGKKKYSDVQFFTEVNPVLWGKKKYSDVQFFTEVGEITTDLGKYHHMQDRDDIQSEQMEREMRKKLNMAFQNMEREMRKKLNMAFQNFCDKVFRMTNEQVDFDTPFNDLSFIGAPHRSTVSLKPTSSCLVHLTEWPPFVVTLDEVELVHPPFVVTLDEVELVHFERVSSNTSTFDTVI

SEQ ID NO: 119625 - protein, 232 aa, Heterodera glycines
MEIDEEDDDEEGERETNNQLDNGQRATKSTAKVVANPDNLNKLFMPLPKLNEQLLRDEVDVDQLEHQLTELEKRKRKQSVANLTLVLDFFAKVDGLTQLVDSLDPFAEGIAFNVRPPKKSWKQITNLSGGEKTLASLSLVFGLHKYKPTPLYVMDEIDAALDFRNVSIIANYLLERTRNAQFIVISLRNQMYEKANRLIGIYKVRDCTKNVVVNPSAMSKAFEQDKKRNSNP

SEQ ID NO: 119626 - protein, 315 aa, Heterodera glycines
VTHFPFSSFLSVVITTQFQFVNSFFTHRRDDFFKIGDPFHPLFSSAFSFPPPPIQRTRRATSNTASTTATAGRRRSRSRRRTRAEQVREATRRALRQNNGGNATRTRKKRGAAMRRPPKLKPLRGRPRGSRKSRAAPRTAGQKRGRGRPRTVKKGRARRGRSAAQRQTTTTADAATNTDAHWVTIAELRAATNTEVTAATTPATMTTTADGAVATNTDATGATTATTDAATAATTPAATTTADGATVTNANEPGATTATNTEAPAATTPATTTNADGATVTNANEPGATTTAAATNTETTAATAPATTTATADGT

SEQ ID NO: 119627 - protein, 166 aa, Heterodera glycines
SGSNDFTLKMFDYSKTAVKRAMKTITEVEPITAVSFHPSGEEVEPITAVSFHPSGEFFLCATRHPTLRLYSAETQQCFVSTIPKDQHSDSITDVCYSENARMFVTGSRDGNVKVWDGVSNRCIETFTRAHDGAPICSAQFTRNGKYVLTVGMAVCPNYGNCPPIAV

SEQ ID NO: 119628 - protein, 127 aa, Heterodera glycines
MLLSWPKKAGQPPQKVVSKDSAPPAKKADAEEDFDLFGDEDSDDEEKKRITEERLKAYAEKKAKKPGPVAKSNVIYDVKPWDDTIDIKDIEANVRSIECEGLIGCCVVDEKVSTDWLEEQITGKHYN

SEQ ID NO: 119629 - protein, 165 aa, Heterodera glycines
LCFQIADFGLSRNYGLHATFTTEVVTLWYRSPELLLQCKYGTAVDLWSAGCILAELYTRDALFRGDTEAEQLRIIFEKLGTPKLGTPSVSVWPADAIVPHSFYAENSPHITPPFANQMPQYLPASGVELLTAILQFNPHERPTAVECLQHKYFVSLIAGNVHFRF

SEQ ID NO: 119630 - protein, 180 aa, Heterodera glycines
MGVKVAITGGSGFLAAHLIKRLRADANVDEIRTIDRKPFRQLGTIDDCPPSSVGFPSLIHFQCDLLDIAKLEKALDGVDVLFHLARKAFEYIFFADQKALNDRYSRDNLEATHSLLNTIFKCSVPRLVHVGGQPFHALFLRPTFVYGEGEKRLPMALKKVAERHGQINEIAGPSNGMLQY

SEQ ID NO: 119631 - protein, 389 aa, Heterodera glycines
QVSHARRRSVGHNAKLSQDKDIIAYVEQMTGYKRLKRGYRPLADYKRLKRGYRPLADRLQKQLDFTSVQSPTDPLYPFQWQSPTDPLYPFQWYLKNDGQSNGKPRLDLNVEKAKNDGQSNGKPRLDLNVEKAWALGYTGKNITTAIMDDGVDYMHADLRFNFNAEASYDFSSNDPYPYPRYTDDWFNFNSHGTRCAGEISAARDNGICGVGVAYDSKVAGIRMLDQPYMTDLIEANSMGHEPNKIHIYSASWGPANSMGHEPNKIHIYSASWGPTDDGKTVDGPRNATMRAIVKGVNETDDGKTVDGPRNATMRAIVKGVNEGRFGLGSIFVWASGDGGEDDDCNCDGYAASMWAISIFSAFHLGENAHYFWAISIFSAFHLGENAHYF

SEQ ID NO: 119632 - protein, 92 aa, Heterodera glycines
PPDWLSVDELKRMIVAEAEQRAFAPIPECFFELSNLLMLNAREDVEQYEQYEIGHAQLDNLTRMEICCARATLIEGSKQLDRLTATLHSVRD

SEQ ID NO: 119633 - protein, 332 aa, Heterodera glycines
MTSQGVENYLKDQTISDIPTIAEGFQNLMNLYINKLWNQLSAEASQLVRNKLFVSTVNLFQFYEEFVRDFERRIEPLQLIELITPIAEDIFERDRQSAYTFLDNFDKVIKQDKRAIVRLEASKIQLRLRDKPTAEAKCCNDPALVRKMLEEAKTMVDQLVEVGSVHAAYYGCSAEYQFQMGDHDRYYEELAHPILNDLSDTPNAWLNELLHAVNAGDWDGFLKHKEKLVAAYSEAGQKIEALERKLRLQCLIELAHRLPAQRRDLNFGDIARVVRADEDAVELLVMKAVANKLIDAKIDDPSRVVNVSWVQPRVLSIEQVKNDAGNEVKGVE

SEQ ID NO: 119634 - protein, 398 aa, Heterodera glycines
QPGLPGTKGELGMPGFPGTKGEPGVPGRDGFPGMDGEKGDAGYPGQPGQYGPQGLPGPKGNAGLPGIPGLSGQSLGGVKGEPGLPGLPGRDGVPGPSGEKGDSGVPGVPGFDGEKGSVGAPGFPGQKGESGLPGIPGQRGQDGMPGSPGFPGPVGEPGPLGEPCLAGGPGMPGQPGFPGTKGELGMPGFPGEKGEPGFAGQPGVPGLPGAKGDAGLPGHPGPQGHPGQDGPQGPAGMAGPEPLTQHGQKGLPGAPGVPGLRGEKGQPGLDGPPGPSGIPGYRGEKGESGYPGQPGFPGEKGAAGLPGFPGTEGQSGPPGPSGLPGGPGPAGPALRDGFVVVTHSQTTQVPNCPQGTEKLWDGFSLLYIEGNERAHNQDLVMLHAMTNRIGYPPAKQLS

SEQ ID NO: 119635 - protein, 56 aa, Heterodera glycines
MELTRLGDEPTTRWTLLNIRILVESAEVGEGQQMVHPLQINFLHQMVQEKLDTANE

SEQ ID NO: 119636 - protein, 524 aa, Heterodera glycines
MTISYTLDVSKSTWGGFFRILSRWRGSVWKAVMGQLIVWTIIYMLISLVYRRLLNTRSQETFEHLVHTFEHLVHYLNYGLDSTIPLTFMLGFFVTQVVSRWQSVLNGLGWIDNSAMNFANYIRGTDTETRITRRTLIRYMVLCQALVLRDISVQVRKRFPTLDTLVAAGISKPELEQLDREVHDKYSRYWTPIHWCNSILYEARLHGKIASDFLLDSIINDIQHFRHGLASLDIQHFRHGLASLMKYDWVPIPLLYPQIVFLAVRLYFLICLISRQFIYRKEAKHHAEIDLFVPIGTMIQFIVYVGWMKVAEALLNPLGEDDDDLECNYVIDKNLITGPNMDLSFKNHQPILRHFGFSLVDLATKRTPEQSRDVFWDNDHIAPLYSMEAAQRTVHPLIGSASKINMAKGKKTITMAPHKSKLSKMDERTRLAHIRLVDTMEHNVKHAEELKADKANNENKALGELRKRQSQKKRENPRRSAHGRDAVDAKCTRFGTRRVPSPSREHEHSPSHHRPNGTSLTSPH

SEQ ID NO: 119637 - protein, 307 aa, Heterodera glycines
RKYWYFELLHYFVKLRSLIEQLYHANGNRKVIVLAHSMGNPMANFFYNKIVDKNWKDTFLLSNWKDTFLLSHISLAGAWGGSAQIVKLFASGYNMDYFRVLLPPSRLRAMQYNMDYFRVLLPPSRLRAMQRSFTSSAFLFPSAALWKSDEILATTPRQNYSLSNLDKFFANYSLSNLDKFFADIQYPQGFDQWKSASEASGILSDLPLKVHCIFGVGVDTPDQFQWAHNWFFPDYQPYIRYGDGDGTVYGDGDGTVNIRSLEVCERWAKETADGTVEVHRVNGTDHMGILNDQRTLELIRDILTKGE

SEQ ID NO: 119638 - protein, 232 aa, Heterodera glycines
KLFTRCHFTFISLFSSINLFRMWYKCAHCPEAFRWLSALIRHERTHTGEKPFKCDQCGKDFARANTLNIHQRIHTGEKPYQCHLCDARFCHLCDARFTQDGQLKTHILIHTGEKPYKCTYCPQKFTRAGNLTTHLRRHTEKKPFMVCRSGQKSNYLKMNFHFFLKFFKCSHCGKQFAESSNLQIHLLTHYRKRKANGQLSNEMNCHKKLSFFELFNLYFLSILLLGLQKYSF

SEQ ID NO: 119639 - protein, 307 aa, Heterodera glycines
ESSVAIFITSITDVVSFAAGTYSDILAVRGFCMMTAACMMFTFLYQITFFAALMVISSRLQMQQRNACNACLPCCLLAKDPFEFEEGKTELNNNNNNSKNDKSSKAMDYEERDEKGFQKKIKNNTSAPISSSSSSALSASEFNLAMRQKGPMGKFFRNFYVNFYVDFLLDWRTKFAVGTIFFVYLAISLWGIVSMQGLDYEKLLLSSDPLVRKLEEIELFHGSDQVEIAVVRAPDLRMRENRARVEQLVADFERLPNSVGSAGTEFWLREYVRYANATGARLHDDHWSWVRGVFDWSQLFAFYKLWS

SEQ ID NO: 119640 - protein, 133 aa, Heterodera glycines
WVWTEAGQQPDLEQSFGIGGFGYPAMVAVNTRKLKYSTMTGSFGQSGISEFLRDLSYGKGKTSSVPGANMPSLADVPAWDGRDAELPPMEDVDDIDLSDVSLDDEEEEMSTKEAKKGVDEEEKKKKGTKTEEE

SEQ ID NO: 119641 - protein, 88 aa, Heterodera glycines
MALLSPEDVATMPTQKVVFNAPFDNKVTYYMRVINPGTKRIGYAFKTTKPKRINMNPPNFTKVVLPISLPVTHFVWNSNVSRPNLEIN

SEQ ID NO: 119642 - protein, 387 aa, Heterodera glycines
MYLLSSIERKNDAGEWVALSDTDANDKHAGVIQNFGSSFVRSLKVNISGIEVFDSSIYYHYRDYIMKELGYSQEIRKAFHEASCYYPDDDDQNSATNPGFTARAARFSGGKQCETMVKLNFDLARQNALMLNNQDVIFTIHRNNDSFLLLTPPYKKPDGTLQENKKEYRIRVHDMRLYVRTVDVTPNLNLAISRQLESTSAKYPLRKIEMRSIFLGTGRTELAHNVFTSTLPRRLICTFVSTDAYSGNRKMSPYKFEHANLRSISVEANGQTFPSTPYLLSFDGAQPRFVRAFVDMYAGLGLDDSDTKTVSIGMQRFLNGWAFFVIPLTSTLEDTPGFELIRQGTCTIKVQFEQPIKADGYEMLVLGEFDSVLSINADRVLSTDGSV

SEQ ID NO: 119643 - protein, 198 aa, Heterodera glycines
MDFTYNVHCGIGHTRWATHGKPKDENAHPQRSNFDNDFVVVHNGIITNYKEIKDYLLTKGYKFESETDTEVIAKLTQHIHQRHPHYGLRQLVEIVVQQLEGAFALAFKSRRFPGQLVATRRGSPLLVGIKSQSKLTTDHFPVFYSRPRRGPVSLVFDESCTTAMETPNKLNASDMFASFSAPFNGCHWVFQITLIYLF

SEQ ID NO: 119644 - protein, 467 aa, Heterodera glycines
RESWGQFPDYPEFFNIHLSVNCSYFFFSKCFRDETGAVIRPMPRIKKVLSEPVLLYQLVQLLLTYDPSIVQRVATLVNDVMQDNPYISRLYLSGIFFFILMYNGSNILPVARFLKDTHLKQAFRSTLSKSELASRSVLCPMLPEANIFYLEEYGAEKYAEVFLGEFENPECIWNSEMEEYGAEKYAEVFLGEFENPECIWNSEMRRNMIEKIALHVSDFSSRLSSNVKALYRYCPIPPIDYPQLKYCPIPPIDYPQLKEELFCHFYYLRHLTDNHRFPNWPIREPVEFLRACLSAWHDEITRKPAKMSVEQACERLGLSTTDPRWKDASAVRRAYFKLAQKYHPDKNPDGREQFEQINYAYEFLTSTLVRANSSSTPDMNRIVIIIRAQSIVYKRNLQVLSPYKYAGYTQLITIDLESSLQVLSPYKYAGYTQLITIDLESSDDTLFAREGRGQLLCAREYAWTLRS

SEQ ID NO: 119645 - protein, 180 aa, Heterodera glycines
MAKKQYDLLFKLLLIGDSGVGKTCILYRFSDDAFNTSFISTIGIDFKIKTIELRGKKIKLQIWDTAGQERFHTITTSYYRGAMGIMMVYDITNAKSFDNIAKWLRYIDEHASEDVVHASEDVVKMLLGNKCDMSDRRVVPKERGEKIAIDHGIRFLETSAKANINIEKAFYDLAEAILDK

SEQ ID NO: 119646 - protein, 105 aa, Heterodera glycines
MVRPNFYFYVNPKIKAKKSTKKKVAALPAAIKKTETKKPAKSTLFERRPRNFSIGQDIQPKRDLTRFVRWPKYILLQRQRAVLEKRLKIPPPINQFKFALDKPNS

SEQ ID NO: 119647 - protein, 356 aa, Heterodera glycines
EDRNALKNLADVAVTNFNERGDELRKNWGGAIMSQRSQARQAKIEKARQKDVGQKKQQVKLRPPQPPIYLFVFDVGSAAIDCGYLNTFAEQLSLDIDKLPGQERAFIGFIGFDSALHFFQFDENEREPRHIIEFDVEESFAPVFSGLFVELNVFKEKIAFTPQIDFYKSLALECTGKQIAIDLFVVGCQNVDLRTLSDMSRFSSGTVYHFPEYHFLRDQVEVKRFQMILRRYFIRKLGLEAVLRIRCSRGLSLHTFYGNFFVRSTDLLALPNVSPDSAMGVQIKHDEVITASQVCFQAALLYTSTKGFPYPLFEMSKSQVTVVFASTHFVSPCSHKLHMYFLRWTLTRQYRYFQRW

SEQ ID NO: 119648 - protein, 303 aa, Heterodera glycines
MPGATFIRNLKVHINQREVYDSNQLYSYKVFLDTELSYPVTAKDHTLAWQAISVTVTRPNNVEIDIELALQSDDFMIHQEAANRDKYTLEIVDCRLIVKTVDLMDGLSLDIAKKLDLEPARYGIRKTLMKSLFITGGRYDFSANLFTEEVPRRVIIGLVPNQNYIGHNQKNPFYFNHHNVRDIELTASGRTYPQFPYNLDYKNNRYARAYHDTQEHLGMACTTESNGISYSMFKTAYCLYVFQMTNAQEDSPGFELIKEGCTAVNIRFAEAVPNEGVTLIAYAEADGLILIDRNRSITSDLTV

SEQ ID NO: 119649 - protein, 178 aa, Heterodera glycines
MSLRNVRIYRKILGNGTSSTLVDSSANEGFLLLQCGGMNRTLSFPFERFGVSIDDWLVKCICGSVLVRTIYVGHRTAKVALISRLSCDYVGTRFNVRGINTAINLSKLHSDVRFVSFDYHAEVKQSKENAKRLISEIDSFIDHCSFFFSHGSFQKGVIRTNCLDCLDRTNCVQTVLFC

SEQ ID NO: 119650 - protein, 214 aa, Heterodera glycines
IDIVARCQGGNNAGHTVLANGREYHFHLLPSGLASEKVLNIVGNGVVVNLDALFEELESNKIEDSADRLFVSDSAHLVLPVHIATDIMRENALGQNSKLGTTKRGIGPAYSSKCFRNGIRLGELLNQPEKFEQNYRSLVAHFKTLFPDIELDTESDVKQLKVPIRSSLRPIPPSAVASPALAFRRQPSVASSAWSKPTKRVSAPVHSRLNCLTP

SEQ ID NO: 119651 - protein, 294 aa, Heterodera glycines
FWCSFISPVRNQLIACSLISFAGIHYLKWWMRDRKPFELRNFLVFWNAGLAIFSTFGALRFSEEFLYVMKNRSFQDSVCLSISPTQPAALWAFLFSFQDSVCLSISPTQPAALWAFLFSLSKVAEFGDTVLLVLRKRPLIFLHWFHHSVVLIYSWHWHSATELTAAGRWFIQLNYSVHAIGRWFIQLNYSVHAIMYTYYTFASLGIRFPKWVSMTVTTLQTTQMLIMLIGVFISLYVARLKLFSSRPTVCQQSVENMCICFSIYTAFAFLFIRFFVNSYLLGKKPTAAKAVAKK

SEQ ID NO: 119652 - protein, 252 aa, Heterodera glycines
MSLLKSVDSKLGDEILTTIVETTDIRLDDIEGNAMAKLALEESVVLPALNPKLFTGLRAPCTGILLFGPPGNGKTMLAKAVANECNSTFFSISAATIMSKWVGDGERLVKALFQVARNAQPSIIFIDEVDSMLCQRFEQEDGAARRVKTEFLVQLDGCSSEKKANGHVLVLAATNRPQELDEGILRRFPQRIFIDLPDKKARFQMIRRTFELNSTNLQIEDAELEKIATMTDNYSYSDLKALCRAAAKFPVQ

SEQ ID NO: 119653 - protein, 371 aa, Heterodera glycines
FKHKDLSIVRATAGQMQPKPLGTVDLKFGHHFSDHMMEVDWSDTAGWNQPEISPLHSVQLHPGAKVLHYAIELFEGMKAYRGIDDRIRLFRPEMNIARMKRTAARAALPDFDAEEMLKVIAELVRLDREWVPYSASSSLYIRPTLIGTDPTLGVAHSRTAKMFILTGPVGTFFPTGFKSISLFADPSYARAFPGGVGAYKMGCNYAPTLLIGKHAHDLGYQQVLWLTGPDEKITEVGAMNIFIYWRNECGELELVTPPLNDGLILPGVVRDSVLSIAREWGEFRVTERYPTMAELRRALHERRLLQMFGCGTACVISPIGRIAYVERGTGRIDELHIPTMASKATVMQRMYDTINDIQYGRMDRPDWVRIV

SEQ ID NO: 119654 - protein, 209 aa, Heterodera glycines
MVYGTPFEKLEDEGRNAISKRPKGIQEEIVTDERGKRRFHGAFTGGFSAGYFNTAGSKHGWVPQTFKSSREDRADKVQNTAEDFMDEEDLGEFGIAARKLRPKMDFIDSLMATPGEKCLLAWELIDSREAGRHGQFDEEAVLEVEEQLRSHFPIEFSPDDVSMVELSAKENVHGLGYKPLAEGAVLSQKYGVMESALKITKKSKGIRGQ

SEQ ID NO: 119655 - protein, 150 aa, Heterodera glycines
MEGVVLEETMEENVMDTELDDLKKGAAVKRGRGFEGSQKSAVQVYETLDEEGSVGGPQRSVEGWIVFVTNVHEEAQEDEVKDLFKEFGNVMNMHLNLDRRTGYFKGYTIVQYESQEEAAEAIAGLNGYDFLGQELRVDWCFVKGGRERKR

SEQ ID NO: 119656 - protein, 90 aa, Heterodera glycines
QEVNEKLVDKQFAIWRVDAPWLPRVRRPPSTKKGGGKGPIHHYETPVRTGRVILELGGYITEQEVMAARSILMHLYLHMPFPEEICQPRT

SEQ ID NO: 119657 - protein, 232 aa, Heterodera glycines
QSVDSLYPFFVKHARCVFPHLECLKELQVISDLTQPHNWYPLAREINRKIIFHAGPTNSGKTYEALEHFKKAKSALYCGPLRLLAYEVYMKMNEAGKTNVVKGIEKRCLYFIGIPCDMITGENRLFAVDSDNPSAHTSATIEIMSPEHRIELCVIDEIQMLRDPQRGAAWTRALMGAPADEIHLCGEESAYDIVCRLLDPIGEHVDLRRYERKGKLVVIVTHGLRDLSLTKV

SEQ ID NO: 119658 - protein, 257 aa, Heterodera glycines
MYEKLGRMVGRSYEETFQSLAKWMKSAESSARVEIWHTMAKMVKGLGAGAFPIYKEIYKSLAKSLADRVLSVRAAAAKCLVSLVAEPDSPLFAQFDLESMCTLCIKSLNCANFEVRQAIAQVFAKMAARVAAQTKQIGSKSLGQLATSVSSPAGGPSLGPCGSKQTAGTLEDILRCLANGMQRGGVGGFLKTAAKTATGYNPRGQRETRIGIAEAYVAMAHELGPRWLKKNIPFWSKHLLELVAKCATDPPNAKQSV

SEQ ID NO: 119659 - protein, 206 aa, Heterodera glycines
MIFSVLQVPDTNYLFLGDFVDRGFYSVETFLLLLALKVRYPDRMMLIRGNHESRQITQVYGFYDECFRKYGSAVVWFYDECFRKYGSAVVWRCCTEVFDCLRCCTEVFDCLSLSAVINGRIFCVHGGLSPSIETIDQIRTIDRKQEVPHDGPMCDLLWSDPEEESVGYGVSPRGESVGYGVSPRGAGLFGSDVVKTFCEKNGIDMI

SEQ ID NO: 119660 - protein, 101 aa, Heterodera glycines
LTRSKKLLATINKNFGTLAFCRRWLDRLGETKYLMSLRDLCEKDIVAPYPPLCDQVQSPWQINAFFTCFTFLQKGCYTAQWEHTILLRPTCKEVVSRGEDY

SEQ ID NO: 119661 - protein, 101 aa, Heterodera glycines
TSHYMKNYDLHEEHIPLRLTRSKKLLATINKNFGTLAFCRRWLDRLGETKYLMSLRDLCEKDIVAPYPPLCDQKGCYTAQWEHTILLRPTCKEVVSRGEDY

SEQ ID NO: 119662 - protein, 573 aa, Heterodera glycines
KRENNIISSGQKALTNYVKKIKSKKLNSLLIDNSGNICFDEKEKCKLLAETFQKVFIKNNQIFDYSENNSPREKLSDIEINVGIVWNLLRKLPGCSTSPDNLPYILLKNCSETLAVILCDIFRLTLDSGQIPKIWRTSIIVPIYKKGEKSNPENYRPISLTSTVCRVFERILAKKITEFLNKNNFFANEQFGSLKNRSTTTQLLQTLNVFYEAIQNQKEVDVIYIDFSKAFDSVPIDLLLAKIKNAGIVGKILMFLRNFLLQRSFRVKIEDYYSESYILIHGVPQGSVLGPLLFLIFINDLPANIPKNVKIKMYADDVKLYIFHQNDSNTNDLSEAIKILEKWAKSNGLEISVEKSQTLHIGKNNSKKEYFLNGKIIPSVEKVKDLGVIIDSKLSFAEHINKIVKNAYLKAYHILRIMKTRELKTIIRMYKTYVRPQLEYAVEIWNPNLKKDIERIEKVQKFFTRKAFKNADFYIDHIQKDLKFVSIELDERRNIDDLTTAFKIMKGFTNLDASNFTYSIDLLVGHYFESAAHNRKKEIFLTVPRIGIIYQLFQFSQIRQINSGLGKFRKHSA

SEQ ID NO: 119663 - protein, 276 aa, Heterodera glycines
MERILSQNIYNFLLKNNKISEYQFGFVRNRSTTSQLITVVEDWYEAIINGKNVDCIYIDFQKAFDSVPHNLLLYKLEKIGIKGKLLMWIKGFLSNRTFRVKIGDSLSSSKKVTSGVPQGSVLGPLLFLIYINDLPDALPSGVKIKLYADDVKLYICYKARADTEIMHKALHNLFEWANKWQIKVSVQKTFVLYLGSKNPKETYKFDGNTINAVDTIRNLGVNIDNKLQFSDHVNKITRNAYLRMRSLFRIIKSKSSKIWITLYKTYIRPLLEYAPE

SEQ ID NO: 119664 - protein, 59 aa, Heterodera glycines
LIARIQAGFAGDDAPRAVFPSIVGRPRHQGVMVGMGQKDSYVGDEAQSKRGILTLKYPI

SEQ ID NO: 119665 - protein, 78 aa, Heterodera glycines
MATLSCRFYADEFPEIDDPVMVKIDKIEEVGAYVTLSEYDNKEGMLQLSELSRRRIRSVNKLIKVGRSECVVVVRVEK

SEQ ID NO: 119666 - protein, 174 aa, Heterodera glycines
MVSPDFECRVCHAYATGHHFGAQSCQACCAFFRRSVVLKRNYLCQKLSKIGANCPIVYTEKVLCRSCRMVKCLTIGMNKNAVQLPEKRGGDHAKKGRAYFTKSGLLRNKRFANNAFGLCCDGLPTAPRRSADSPLSSAASAHSADCPSSSSASSSSASLTIHPSSTFDHSFSTS

SEQ ID NO: 119667 - protein, 71 aa, Heterodera glycines
FVRWVISMGSCANGGGYYHYSYSVLRGCDRVIPVDIYVPGCPPSAEALLYGVLQLQKKIKRLKKVQMWYRK

SEQ ID NO: 119668 - protein, 122 aa, Heterodera glycines
MDLNSDGQVDELELREHINFMQKRYVVADYNSDGKMDRTEYGCFMHPEDCDHMRDIVVQETVEDIDKDKDGFVDMAEYFGDMYRPDDYPGLKGKEPEWVESEREMFREHRDKDKDGKLNKAR

SEQ ID NO: 119669 - protein, 1119 aa, Heterodera glycines
MFFSNLFQFKVFCRVRPLNESEKKNSSTNIVKFQSKDTIVVGGKPYAYDHVFEPSGKPYAYDHVFEPSSNQEAVYSTAARHIVQDVLTGYNGTIFAYGQTSSGKTHTMEGVIGDSEKQGIIPRIVNDIFTHEGVIGDSEKQGIIPRIVNDIFTHIYNVDTEMEFLIKVDTEMEFLIKVSYFEIYNERIRDLLDITKTNLAIHEDKNRIPFVKNITEMFVTNPDEVLAYIEEGKTNRQVAVTNMNEHSSRSHSVFQIQVQQDNVAVTNMNEHSSRSHSVFQIQVQQDNKTTLKKLTGKLYLVDLAGSEKVSKTGAEGAVLEEAKNINKSLSAKVSKTGAEGAVLEEAKNINKSLSALGNVISALAEGTKSHVPYRDSKLTRKSHVPYRDSKLTRILQESLGGNSRTTIVICCSPASYNEGETKSTLLFGQRAKTIAKTIKNVVVVNEELTAEEWKRRYERDEKVTRLRQQAQQMEQELRRWRAGDRVSESDWADLSANMQSEPPSTTQQPLLSSREGPIVDEERRKYEEERSKLYAQLDEKDDEIQVQSQMAESLKQQLMEQEKEIKQQRQDKDTLMAELQKAQEQVNKTHEEGEELFSAIQELALNLDQKKAECTQLVTDNERLADDISKKNLESTLINTKKRVYDSIQSMVKEMADLGETNFAFSMQTDLADKNMQTDLADKNKPIDDETLTHARISISKLASDFRANRQKLSLLETGTDDTMKKLDDKLSLLETGTDDTMKKLDDVTKELADCRLQIQQMDAKNKSLRETIDGQEKQKRQLENELDGLNAKLANAKNSLGRRQQRTAAAASEAGDAAQGPDRTEEQSDQTVDGEFWHKRRHFIGLIESLQELELSREQLQQDFERLKNDETEKEKRLKSLSALSDKREQAKQDLKGLEETVNKELQTLHNLRKVFVGLEETVNKELQTLHNLRKVFVQDLAQRMKKTPTGPEDEEFLSSPIQKQKIIFLENNLEQLTSVHKQLVRDNAELRCELPKLELVRDNAELRCELPKLEKRYRASSERIKSLEVALRETKENAMKDRKKYQYEVERIKEAVRQRNLARRGQIAKPIRPKPIRPGQHYGTSPCERSVLFPFAFGFLCLPPFAANPSSDLFTDS

SEQ ID NO: 119670 - protein, 318 aa, Heterodera glycines
IRSSFAGHRTGVNCIAFSADSLTLASGGKDSSIVVWDLVNESGICRLGGHKSTITHLQFAQRDRFLVSSSKDSQLKFWCLTTKSCFYTLASSSSEVYTFALIDDDRLLLVGNAEIELLVFELCWQGQDGWEDERTERNEENEDEGEKRPRTTLVGHDQLLLLDSVEKGDAFDTEQQANRILRCIKRGALIRQAKGRALQLAVSSDEAIVCCVGSDSMLDIYRSIGSICYSFTFLLRHFTVEESKKRYQKKLRKLRLRADSQPMESEKETNEAMESEVSRDVTTLITRIGDFRADSKLKWVDLCEGFAELNNKNVREYR

SEQ ID NO: 119671 - protein, 257 aa, Heterodera glycines
MAFHKIDNDSVNSITNALDFFRIPPTNVSVSSSKVFELLPSNPLTDTPYHFKLHSSQNYIDLSKCYLLSEFRIRKENANGQLVDLAADEVAPIQLVGHTFIRNIKMSINGREVFNANSLMAYKSYFSHELSYSTAAKDSHLNAAGYYRDTGGVLEVGDGCTARRNLFVGSRTAQFIAKIDADLFNQPLYLINFCELDIEILPNDNDFVLITPPGVAAATRYHFEVVGLKMYVKKVSLMDGLALDIARKLELKPARYA

SEQ ID NO: 119672 - protein, 113 aa, Heterodera glycines
MTFSHAAPVLFIMFAILSGQSGETFAFQAEMPLIINTFYSNKEIFLRELISNSSDALDKIHYQALTDPSQMESGKELFIKIVPNKADLVNNHKPGTEAFIEALQVLFFRLVNP

SEQ ID NO: 119673 - protein, 441 aa, Heterodera glycines
MTCLQKISDSSPLAINSGLNIFSVPPTNVSVVRSFFRQVLPLATITQESPYLFRLYSDNLWTDLSRVYLYLEVSIEKPGANDKWVAIEDGDTHVSAIQGIGQTFVQQLKVTVGNTEVYDSGNLYPFKAYITNELSFPINAKKNFLGSTGYYHTVNQDDSTDEGFKERCKIFKGGKNAQFLSRLDFDLGNQELYLLNNLDLLFTIYKAKDVFLLQTLKANDSTKYRLTVHDVKIYAKMVEVQPSLNMSLYKTLEKQPATYAVRKTEIKSSFISVGRYEFEYNVFSATIPRRVTIALVGNSAFHGDYKLSPFMFEPFDLREISVHAGGVVYPAVPYKLNFSNDHFVSAFVDMYEALGMANSERSFDISMAQFKKGWTFFVIPLTSTLDDSCGFELLRSGTTNVRATFNSPIPLGGVEMIVLGEFDQMIMVDYNRHIVTDSKLG

SEQ ID NO: 119674 - protein, 224 aa, Heterodera glycines
RTSSTPSAMGRPLPRPAKVRPISPKRGRPLLLVKGRPLPLASSASSIPTFCSTRLSSSSAKTSAASTSSSAAAKSQDRKRPYLCPTCDSRFGSKMELEEHQNSHTRIRPPRLKVCQSPPRLKVCQSRFNRRSTLWNHKRIHSDAKPFKCTVCQMQFKWKNSLKCHKEMHEMHLRKNELSQGTMPDTDSQLLTYATAAKKTMAQQTEEIAALPGTSTTPTSAATL

SEQ ID NO: 119675 - protein, 309 aa, Heterodera glycines
CAIALSIGIFYVVHKNEFLSFHQQIAANCTGAQFFSFALLLNNWSRPNCFGYLWHFGLDWQCHLIAPFLLHLLFRRQSVGLIVVAVLIIGSMCLRAFKCVSNGICNKSDVDIPVVPLPMRQFVSVRPEHVSLVQMYMRPMTKCGPFLVGLLLGVFSVSHRFIAVKTQQKKLFCAGFCLAVGCVYGILPEYWYPNDGVTLYNTLYTASFRTLFACGIGLMMLSCLLSIKSRLIHRIFAVFARLTFSVALTHMPIVFLFTRITAFQETESPFSLIIALPPAILMSFTVATIFYCFIHWPISQIISRIIKII

SEQ ID NO: 119676 - protein, 346 aa, Heterodera glycines
MRIVLSSRRSWRCLAKCAIPPLVFKRQVHNTAKSIHLWDSEYLDEAGIKLTTEPIALDISALFQEASQSGIAFMLCIHADGDDLAHHFIKKCERDYQIISQCVRAGTVRNVAAKQQRLTVDNILNKTNVKLGGINYNLPRSPFVTSTDMLIIGISTNHPGGGIGERPMAEAETLRSETLSVSSEESIVAGPPSVVGRARREEKVNIIESIVGKCVGYFKEVRGSLPRRVVIYRNGCSEGQFKMVLDINSFWCIIYFKILKFEVPLIQCALRSAGCDNVGLTLIVSNKLQNVRFFSKQVYIANEYAKRGRNLFNYYDAPRDMETFADLNQKLCLEHAGWIAPHRVNA

SEQ ID NO: 119677 - protein, 147 aa, Heterodera glycines
MNTYFSIFAQVRLYDNNAERDRIDNMAELYAMVNALECLEKVFSRDYIHAKEYTAECSKLLVQIKVALRLVPRMTIDEFFRSYYIQCPAALERIRESTLPDDFDAKLRVKSWHDKLQGMAAHEEITDEVARQVILEGNKNSYDDSLT

SEQ ID NO: 119678 - protein, 674 aa, Heterodera glycines
MICPVDNSGCFTDLVPDFKGLFVKDADKQIIKMLKEKGLLVKQEQHKHSYPFCYRSQTPLIYRAVPSWFIRVESLVDRLMTNNEETYWVPSFVRDKRFANWLRDARDWCVSRNRFWGTPINLWVSDDFQEMECPGSIDELERLTGTKVTDLHREKYNFGMSTIDHLQIPSKTGHGMLKRVTEVFDCWFESGSMPYAQQHYPFENSEVFEHNFPADFIAEGIDQTRGWFYTLLVISTALFDRPPFKNLVCNGLVLASDGSKMSKSKKNFPNPLDVVRKYGADALRLYLINSPVVRGENLRFQEEGVAEVSKQVLNPWFNAYKFLSTAMSIYESNDKQFELRSAGFSNVMDLWILSFTNSLIAFVRKEMKLYHLYAVVTPLVSYFETLTNTYIRLNRSRIKGTVAGASADDQMLALSTLSHVLLQITRLMAPFTPFFSEFMWQRLKPLIGDAAEKSVHFTMLPLAEAQFIDKVVERRVAAMRIVVEIVRTLRERKGISVKYPLKEMVVINRNQQFLDDLSSLREYILSECNVEEMTVSQDKQKYGVQLKAEPNFKVLGAKLKTNLKANQVTEVELEALLADGSLTVLGHELTTEEVTVSFTVNPGNATKSNDKWETATANSCVVMVNTTEDDSLLSRGFAREIINRVQKLRKQVLTVGQLQFSKIIFVMAGQIGRD

SEQ ID NO: 119679 - protein, 554 aa, Heterodera glycines
IAKFETDLVQFKTRISQPDNGQSADVRTVLVRKLVESAKEVLSDWLDVTRGNTVTKHDIFAKLARKYENEFLCDMNALNVLEPDVLTRVSEYIPEIIDYVQQIIRNGYAYVSDGSVYFNTAQFASKPNHSYAKLLPEAYADAESAEKHLREGEGELSVAVDNLKEKRSPSDFALWKASKDGEPFWESPWGKGRPGWHIECSAMSGAICGDKLDIHAGGFDLKFPHHDNEIAQCEAYNDNDHWVNFFLHCGTLRIEGLKMSKSLKNFVTIREALNKYTARQLRLLFLMHNWTDNLDYSESTMEHAIHFEKCFCEFFLNVKDIIRKQIKEVDELSQCFKKYGEEEMEVLNKFNAIKVSVHLAMCDSIDTRAVLDKIRTIISLLNTYIMVRKQEEAVLNCQLLTKCANFVRELLCIFGVQPDVGKYEFFTKDCCATSDDREAIIMPYLEILAQFREVVRSEARAQKNIGILKECDRLRDEILPELGVRLEDHSKDTCVKLVDRETLIKEREQKEAAQREKEQRKIQLQKEKEMKRQAKEEQKRKTRETQQKNERENQ

SEQ ID NO: 119680 - protein, 244 aa, Heterodera glycines
TNNKYNTKTIVFKLAENGDSERLHTLNTLNTEQYLLNVKEPRENGRNMLIIAARNGHIKVVELLLKLGADPHETGTVTFDGEQITVVELLLKLGADPHETGTVTFDGEQITRVPPLWAAAAAGHLEVCKQLVARGVNVNQTTSTNSTPLRGACYDGNLDIVKFLVESGADIEIKFLVESGADIEIPNRHGHTALMIASYREKVEVVRYLLSVGAQTDRTSTKGFFCVLLFMNLKIVIIIIYFHF

SEQ ID NO: 119681 - protein, 211 aa, Heterodera glycines
MVFKTERERPPHCVHDNLAFYVKERQLRRLDMNTSKDVALAQVKLNKLTQPYYSLHYNPAENCFLLVTRPAANIENSTYDLYKVEYTGAVDDIFYAGTGLLLLKNADSVQMYDLQQKRVLASVKATKVKYVIWSKNMECAALLSKHTVTLVTKRLEVLGTVQESTRVKSGAWDAGNEAFLYTTSNHIKYALTTGGDHGIIRTMDIPRYILA

SEQ ID NO: 119682 - protein, 408 aa, Heterodera glycines
MAATINHISASNGNDQKRRHLASGNEPLQRFGEAKKWMTDIYGQLDGHVGELLEFYLGLVKNGQKFVPPAQIDEIGHFRDSVRAIREVIGRDKMKVVFFGRTSNGKSSVINAMLSCRVLPQGMGHTTCCFLQVEGGSEQDKYFMMEDGAKHFPIAELDSVGHALGSEGMGSLGRDSLIHIFYPKSASKLLQNDVLIVDRYKIMANLTISLEKNFFIRVSKKLSRPNIFILCNRWDASATETDESRAQIRAQHEQRFEDFLANELKRMNVLSRQGHNDGARIGHGQQRPDKREVDAFLSNIVVQSATYLMNGSVGVTIAGLVIYKNVDWRWVVGGVGLVAGLYAFERLRWNNGAKEERLKTQFRQHLEQRHSIRFHLFENKLKFSLHQTESIHTSSCEQQVTRELDQVN

SEQ ID NO: 119683 - protein, 146 aa, Heterodera glycines
VQCRPNSVSPSAFNSNWHFSVAERRLPDCLIIGVRKGGTRALLDALALHPRIRVARHEVHFFDRTELFRHGIEWYRKQMPLAKTDEVVVEKTPAYFVVVEKTPAYFTSPAVPKRVHSLNPGMKMILIVREPVTRTISDFTQAKNDF

SEQ ID NO: 119684 - protein, 308 aa, Heterodera glycines
FRRRMNPQIDRVHRVDNFLSIWVLEAKGVPAKRRFFCELSLDGQLKARTSLSLDGQLKARTSTKVREKRCFWGESFEFGSLPPSRLLCIDLFRELDAKKDRQTLIGLVHIPLAELDRQTLIGLVHIPLAELAGRQPVEKWYSVSSNELNGNGSSGASTNANCADSLPSIRIKARYQSVHIFPLRAYAPLREYLRLHFLPLYLRLHFLPLCATFEPILGVKAKEDFASALVRVLQHERRAAEALADLAMVEVDGQENDHLLFRGNSLHLLFRGNSLATKAVEAYMKLVANDYLQSVLGDFIRHLLATNL

SEQ ID NO: 119685 - protein, 173 aa, Heterodera glycines
MIVKPVKNFFQKNVTKVWLKPPPHDTFIEPWFPYALILKPIGRAFQRLGVYTYNNFIARTTFGLYPREWNPRVHGPYVHYRYYGTNNDIPLMEVKVNDLAAYIARRDKSPRAIWREFMRNFYKLQYFYFSGPEFGNPLTMIWRYLVIFIVGFFLTLRVVTGADTRFRHALYHW

SEQ ID NO: 119686 - protein, 360 aa, Heterodera glycines
MSGAGSGRQKRGKTEAPRRPTRRSTQQTRQADTQQQQRRAPATQEQSVLAPQPTLRRWEDTAEFFFALERFVNDTTPRSVQDLVSEFTELNAAPRPEPSPEFTRNLECNRDRDVICTEINRVRLHSGRYIHANWISTFGENRFICTQGPLETTCDDFWTMIVQENIEGIVMLCDTIEQNRIKCHQYWPTADNKLMRFANNQIIVKFGREYHVEGALYRTDLIVGAPQMRQGHLRVQHFHWRQWPDRGVPHSDLAPLRLLYHVIGVPRAVVHCSAGIGRTGTLVAVYLANQTLHLGQPLNIFALIRDLRRQRSQSIQTLDQYLYIYFVILRYAQNKASKLNINVNALNALVQALNSTMRRG

SEQ ID NO: 119687 - protein, 218 aa, Heterodera glycines
MSFEKAYAFYRKKNDTAALGVIRKLDGSVPRVMELKAQILYRMEQYQEALELFKKLIRTHSDEFDDIRRANLIAVKARLQSQGDSQELDLANLESFETMYNTSCHMIACQKFDDALRLLEKTAVECERSLNADGLGKEEIQQEMAPILAQKAFTLQKLDQKKEALKLYQNVLKTKALNWKLKAAIVENLEADYVKFGKKWRPMKSAHGDEEEPMEEDG

SEQ ID NO: 119688 - protein, 118 aa, Heterodera glycines
MNRLLSGRSLLPKIMRNFSHSNRLAASEADPEHYGYFPDPTEQTWGLEREMLAARLKGEDRYSPKIYYRAEHSTKDVPNVVHVHLEDKVVGCLCEHDGDHVNYWHIRKGDTKRCECGH

SEQ ID NO: 119689 - protein, 408 aa, Heterodera glycines
MTTLKKIDTASEDGLEGGLSLFDIPPTNVAINKSNNQFCDLNKTFLYLSTSIERKDKSNWIPITKDSEADQHVGVESYDSGIYYAFRAYMMNELGFSEDVKKGLCEASCYYVDDVDQDDYTNSGFKNRASRFADGAKCETMVKLNFDLGRQPNLLLNNSDVIFSIHRNTDDFLIMAPPYVSGNAVIANPHTYRINIHDIRIYVKTVDITQSLNNVISNQLQTTSAKYPMRKIEIRSLFIPRGTSDLSHNVFTSIVPRRLIVGFVSTGAYTGNPKESPFVFEHAKIRSIGVEANGNIFPGSPYSLNFDRNKYIRAFVDMYTGLGMDDGERTMSINIQKFVNGWCFFVIPMTSTLEDTPGFELIRNGTTSIKVQFNEPIKDGGYEMIVLGEFDSILSINANRVLSSDGSI

SEQ ID NO: 119690 - protein, 271 aa, Heterodera glycines
DVIPSGVNIKLYADDVKISRTETEIMHKALHNLFEWANKWQIKVSIQKTFVLYLGSKNPKETYKFDGNTINAVDTIRDLGVNIDNKLQFSNHVNHITRNAYLRMRSLFRIIKSKSSKIWITLYKTYIRPLLEYAPEVWNPSLQKNIKKIEKCQKYFTKRVFFKCSLPPIPYQNRLEYLQLPTLEKRRKLFDLFMAHKIVYGRTDLDILKIFKPSERFNVPFYRLTQNINAKNLFPAGRATKLWNQLDKEIIKINSLNQFKTKIKLLNVNDR

SEQ ID NO: 119691 - protein, 89 aa, Heterodera glycines
MIYVRKQGEEIFTPLHLVPPSLGGLARAVSEKYNLDESKIEAFYKQCQKGLTVKIDDDMLRHYTNQDTFQIELKQSELDRSVDNETGPR

SEQ ID NO: 119692 - protein, 147 aa, Heterodera glycines
SQVSELQQTGRQMLMVSSGAVAFGRQKLRQELVMSMSMRQTLRGPAGMQTDKRACAASGMPGLMSLYEQLFQQYGITVAQVLLTKPDIDDPVLLTKPDIDDPQRRKNLQATIESLLRLNIIPIVNANDAVAPDPKLNMKIWTFDFLF

SEQ ID NO: 119693 - protein, 163 aa, Heterodera glycines
MSVGLSSIVDDSHQRQSHFWAEILPPGVGHPNDISGDAIWTLSSCKEGLGVHQLLNDREDTYWQSDGLQPHSITIEFQRKTEVDFLLMFLDYKLDESYTPSKIQVQTGASVLDLDEPKSLSFTEPSGWQMIDLRHAGTKRPANVFVIVVQIIQNHQNGRDTHI

SEQ ID NO: 119694 - protein, 124 aa, Heterodera glycines
LQNTSNFVVRNLKCLIVDEADRIFDIGFEQEMHQIVKLLPKKRQSMLFSATCSPKVDELVKTALKTDPLKIGVMEQQRDPNDMATVEGLEQGYVVCPSEKRFLLLFTFLKKKREQKVFMFFSFN

SEQ ID NO: 119695 - protein, 51 aa, Heterodera glycines
DFLGDSHSSIFDVGACISLNPHFVKLVSWYDNEFGYSCRLVDLITHCASKA

SEQ ID NO: 119696 - protein, 88 aa, Heterodera glycines
MRLSLLRASEKHFGNLSKAYGWYYVRIAPVEQKVWKGFFFDAFVKPVKEQLPHWWMFFFPVVTYFLVTDWAKKEYRRLGRIKEFTDEE

SEQ ID NO: 119697 - protein, 159 aa, Heterodera glycines
MAQFVPFTLYPSPFPRELFDQAMDVNKTLLLMYFRASLPSNFEFLKELHKSVLAVSPSLRYTADLIERKHKEGIRQPLMLICIRADYMASEEIDEKSNEKKYALKQIELNGGSIGGYGTPQPLTALHRRMLSNVGIDNSISVMPENLTSEMLATAMYRA

SEQ ID NO: 119698 - protein, 97 aa, Heterodera glycines
MILMTASSTAYSHNPNKTVEERYEIGIEELQNGKWVPFQGKDVQLEFVRIDPFVRVTLKNNSLCPTIETHAIRTVQSLRLPLLCVRIFNDGWGEQIC

SEQ ID NO: 119699 - protein, 218 aa, Heterodera glycines
MRYIECLERVGFVDIQVKDERTAGIGSDSDKLLQVVYEKIDKKGNPNGESNAREIQLIFARKPMLPLLEENWSNWAQFERQMAEETELRKLAEEDQDEVRQIAAGKTLRELEKELMEHFLWTDEEMVLIASALPYVNNVPHLGNIIWGPCNYCRMREYQSLFICGTDEYGTATEMKALSEGLTPRQLCDKFYELHKKTYDWFSIDFDFFGRTSNPNQT

SEQ ID NO: 119700 - protein, 101 aa, Heterodera glycines
NEMPLAEDLLYPDPQKERQKHKLKRLVQHPNSFFMDVKCPGCYKITTVFMDVKCPGCYKITTVFSHAQTVVVCVGCSTVLCQPTGGKARLVEGCSFRKKGH

SEQ ID NO: 119701 - protein, 197 aa, Heterodera glycines
GDCASCNQAVIGPVVIALGKMWHPEHFCCAHCGDSIENRNFFERQGKAYCESDYHDLFSPRCSLFSPRCSYCNGPIKERRCVTALGGKNFHVEHFVCAECGKSFGDGHFVCAECGKSFGDGRFHEKSNSAYCRDCFYRTYAPKCQSCRFHEKSNSAYCRDCFYRTYAPKCQSCKQPITHKFITALNTHWHPECFCCQ

SEQ ID NO: 119702 - protein, 142 aa, Heterodera glycines
MIEIIILYVLFYSIIMRLCHRITAKKTTFIQIFVKTLGGMTLTIFAHSLDTIENVKAKIQDKEGIPPDQHRLIFCGKTLKDGQTIADYNIQESTLYLRLSLIGGARTRRQQAQEVAGHSHLTAGALLARRALCSPDGGRIAR

SEQ ID NO: 119703 - protein, 209 aa, Heterodera glycines
LKMPKKKNGTTDQGCLLITNYFPIRRSKRITTKELEDIKLKELKELIDTGFNEDHLEVFRCSVKGRSVRASKCFQRGEFVVEYKGDLISVKTAQLREQRYAKDEDLISVKTAQLREQRYAKDENVGSFMYYFRHRDNVFCIDATDETPYKGRLINHSYLNNLKTRVFIIGRTFHLVLVAMRDIDNGEELLYDYGERRPSVLAVNPWILG

SEQ ID NO: 119704 - protein, 470 aa, Heterodera glycines
PIKACADKLVREIEQFGNPPVFGYQSSEEIAKQEEEVDQIIKDKSKGKKSKALAKTVAAKFQWQIMQSKALAKTVAAKFQWQIMQSLGLNDAEIAEFSKSEHWLTYFPPKCMADLRKMGLAVDWRRAFITTEANAYFDSFVQWQFRKLRSENLIQFGKRYTYTIYSPKDGQPCMDHDRSTGEGVGPQEYTLIKMQILEPKPKVLSNVSEILEPKPKVLSNVSEPMFLVAATLRPETMYGQTNCFIHPDITYSVFFVGTNDFIHPDITYSVFFVGTNDQEIFIATERAARNMAYQGMTAAARNMAYQGMTAENGKIRFVPGVERVKGAELIGCALKAPLTSFERIYALPMLTIKDDKGTGIVTSVPSDAPDDFAALMDLKKKKPLREKYGILDEMVMPFEPIPILEIPEYGRLAAVHMCEKLGINSQNDRLKLEEAKKELYLKGFYQGVMLVENYHGSVMLVENYHGSEDG

SEQ ID NO: 119705 - protein, 203 aa, Heterodera glycines
MPENAPVRSVVVQVQAHNEADQSLFYAFGVSEDSRSTNLFSLDTVSGEIRLAKALDRETQPKHVLKRLDPSQLATVSVIVEVIDIQDNAPSFEKSTYIAEIREDAPIGTTVLSVFARDFDDGANGEVKYSLDNVKEAAEQSNGTACAVNVTEDAPVPSVILRPRARDADAGANADQSKGRRPTISFFDFAMLRHNNRRQRPFT

SEQ ID NO: 119706 - protein, 121 aa, Heterodera glycines
MAYSRSPSPNRERSHRSTRKRSRDRSNERRHKAPRSSHKERHRDRDRRGDRDRDRDRERERHSSGGDKNREHRSKKKDNVAHATKSNPINEIVDVDEDMMRMMGFSNFDTTKNKHVEGNAS

SEQ ID NO: 119707 - protein, 43 aa, Heterodera glycines
AFITMATEIKNRMGPLQQAGGNASAVRIGPSQPVRDKKTGGCC

SEQ ID NO: 119708 - protein, 128 aa, Heterodera glycines
MTERQRHGQMNKCEQNIVLCVMCSIMRMRRKRSKRIDELMAAMNPEYDYLFKLLLIGDSGVGKSCLLLRFADDTYTESYISTIGDSFNNVKQWLQEIDRYASESVNKLLVGNKCDLTTKRAIETNVAK

SEQ ID NO: 119709 - protein, 166 aa, Heterodera glycines
MGRRIRAQRKGRGGIFKSHSKHRKGPAKLRPVDYSERHGFIRGIVKDIIHDPGRGAPLAIVQFRDPYKYRVKKETMIAAEGLHTGQFIYCGKKAQVQIGNVMPIGELPEGTTVCNLEEKAGDRGRLARTSGNYAIIVAHNPDTKRTRIRLPSGAKKVVPSANRAMI

SEQ ID NO: 119710 - protein, 426 aa, Heterodera glycines
MAGLIYNKPEDPIQFLENAIQKIRTNPGMAFKWDSFVTPPQPNKMSEEKTATNSSEKGDIGTTTASSAVDENMGKKKRGEESVAVKRHQSTDNETADGARPPVASAVVAPHATALSPKSSKRASRDASHPSRKRHCFKFETFFKLKKELFRLNSFQCVYSSTQQQNGTRSRVNSWSNSSRPSSLVQAAKDACIAPDAPIILFMGGPGGGKTRYAAKLQEELRDEGLAHICMPDLIRTSIARYKDRSSEWRVAAERYQRGELIPNELAQQLVKAEMGRQPYAKAYFIEGFPREARQVEDFERNVRPVDMALILDYDEDVLRRHMQSRGLFPERLLHLIPGEKDDALIIERMRKLIVRAMRAGVGAGAVTGAASSAGSAHSSTGGTAGKTEHQQKNGFGQSPAANEAENSTKEAEKVAATKCSAAESN

SEQ ID NO: 119711 - protein, 141 aa, Heterodera glycines
MSDNKEELVQRAKLAEQAERYDDMAQSMKKVTELGAELSNEERNLLSVAYKNVVGARRSSWRVISSIEQKTEGSEKKQQMAKEYREKVEQELREICHDVLDLLDKFLIPKAGNPESKVFYLKMKGDYYRYLAEVATGDDRN

SEQ ID NO: 119712 - protein, 233 aa, Heterodera glycines
LQVPQFLLDNASLWRPTRIFCTQPRRLPAIAIARRVASERGERFGATVGYHIRLESNCSAETLLTYCTSGVLLRKLTNDELATEATHVILDEVHERETNTDYLLIADEVHERETNTDYLLIALREALKKRKDLKVVLMSATMGDNRNKFMRYFRETGIKCVDVPTQLFSVEVYHLAEMLAMTPTQLFSVEVYHLAEMLAMTGYMPSSHYGGISTAKWKEEFWTILKIISRKIK

SEQ ID NO: 119713 - protein, 342 aa, Heterodera glycines
TASNPHLILINSHLHLPSTFLLLRLFFHFLLLFLMRLPSVHFIVLLPPLPHPFFHLSFLCFSISGSSSSAFPHHSPQSFAFSWVRGGNYGKFVEVSTRIFISMDGTLFFSYNVREDEDSFACTLSLPATQSAQLGPFFRLLLPLGHINPHAFAPRIDEFQPQIFPEPHAFAPRIDEFQPQIFPEMPTRGDTVFLECFAYGFPVPTYHWSRVDGYPLPRFRHRLLSFGRVLRLDRAEIGDSGRYRCSVQNRLGMDSAEIRLTIHCWFTSASSINDYLICSGHSITFKCLADGVGMVSQVEWFLNGVPLVPLLMDQSDRQRFKMASDGHEYVHSNVTKRGPSPF

SEQ ID NO: 119714 - protein, 488 aa, Heterodera glycines
MGFSGKRCQIKVLQLDDIGVAKACQCQIRTICVTRTPCLNAGQCVDTLFDRHCVCRQGWTGAFCEQELNECEQNPCKNGATCRDLENGFECECAPGFHGFQCQYMVDHCAVSPCRNNGTCVNHGPTYECQCRLGFDGMHCEHNLNECETMSPCDATGTERCEDIVNGYRCHCRPGYAGTLCERHVNQCESAPCANNGTCVDLGAGFQCDCSPGWKGQRCEQMESVCEERKPCQNAGRCVPLVDDYFCVCPEGVSGKNCELAPNRCLGEPCRNGGVCGDFGSHSECACPQGFGGPGCQYRLDVCRAGTCRNGGTCVEVEDHQQQTTALPEGGPRGFKCICPPGFTGNECETDIDECRPSPCPMVAQCVDLVNGFHCKCPFNMTGANCEKRIDPDFDLRFVESAQQPSRAALSIPFRFTSASLTLSIWVRFEHGAWRGGRSLQPQRAPALFFGLFNSENPNQPSNLTELIRISADALLVRLFPDKEMAPS

SEQ ID NO: 119715 - protein, 198 aa, Heterodera glycines
MGERKGQNHYYPPDFNYQTHKTLNRYHGVHALRERGKRANEGILTIRFEMPFNVWCLGCNNHVGMSVRYNAEKRKVGMYYTTPIYEFRMKCHLCDNYFTIRTDPKNFDYELVEGVRRQEIRFDPSTIDNLAPVDRTMSLKLGADAMFKAEHTVDDKKKLASADDQIHRLEAIQTRLYDDYTANSVLRGSFRKKQLENH

SEQ ID NO: 119716 - protein, 69 aa, Heterodera glycines
MVEVFDSLSKLYADYQRTTAKKLKIIDAYMVYIFLTGVFQFVYCLLVGTFPFNAFLAGFISTVACFVLA

SEQ ID NO: 119717 - protein, 260 aa, Heterodera glycines
SGIFDKFLIRLRPPGLTPQDPTWIGAWWMGFLLIGLMMIVPSITLFFFPESSKKCKFIKIKITNLKIKIKKNKIKCKLNTFLRSYSAVLSSKVYVGASIARVLDVFAFKGYFVFLPKFLENHYGIPQYLVHLYIALFGVTGFALGTGSGGVIMRKLRLNGRKAAYYVLIASTINTALVMAKSMLGCHSVVNNIGRDGIVTAFNFTRECNMACGCAPDTAKLYPVCDVQGNAFYSPCHAGCRHAEAPDDELVRDFFSCLTN

SEQ ID NO: 119718 - protein, 68 aa, Heterodera glycines
MAFRVPTPNVSVVDLTARLEKPAPLDAIKEAVKKAANGKLKGILAYTEDQVVSTDFLGDSHSSIFDAG

SEQ ID NO: 119719 - protein, 123 aa, Heterodera glycines
MSLFGKIFGGKKQEAAPSTQEVLQKLQEREDMFQKKQEFLEKKIETEIATARAQAANKRVALQALRRKKGYGKQLEHIAGVLNTIHHAKTALENASMNSDVLGVIGESAKAVKKAHNEMDADK

SEQ ID NO: 119720 - protein, 401 aa, Heterodera glycines
QRECVSIHIGQAGVQIGNACWELYNLEHGIGNDGHLLKKDDGTCSGESNTFYTESSNGKYVPRAIFVDLEPTVIDEVRAGPYRHLFHPEQLITGKEDAANNYARGHYTIGKEQIDRVLERVRKQIGKEQIDRVLERVRKQAENCAGLQGFLVFHSFGGGTGSGFSSLLMERLSVEYGKKSKLEFSIYPAPQVATAVVEPYNSILTTHTTLNHSDCSFMVDNEAIYDICRKSLDVEMPSYANLNRMPSYANLNRLIAQIVSSITASLRFDGALNVIAQIVSSITASLRFDGALNVDLTEFQTNLVPYPRIHFPLATYAPVISADKAYHEALAYHEALSVSEITHMCFEPANQMVKCDSRKGKYMAVCLLYRGDVVPKDVNAAIASVKAKRGIHFVDWSVTGM

SEQ ID NO: 119721 - protein, 361 aa, Heterodera glycines
MSPHCLMIDSEDLEDTQISGFDLTKRTLWAGNLSLPGTRLLQITSERVQMLSGDGFTSKWCPDPPCRISLASVNHAQLLLSSGPRLFYLRVDSDQIMLLHRLECADEVACLDISPLGVLFSGVCIFSIGFWSEHSVAVYALKPGTVLCIFSIGFWSEHSVAVYALKPGTVLAEERLSSEFVPRSMLMVTMVTMEGSHFLFVALGDGTVIHFRVDSLTGALSAQKKFTLGTQPTSLCLFQSPKTLNVFACSDRPTVIYSSNHKLSFSNVNLRSVTQICPLNSEFYRDCLALSDGENLVIGTIDDIQKLHIRTVPLGETVHRLAYQPESNLVAILTTRCMTFSLPIASAVRPSISVDWAKSYG

SEQ ID NO: 119722 - protein, 107 aa, Heterodera glycines
MTIHSRKVVAYYYDGPFFNQIGLINSVTGDVGNYYYGQGHPMKPHRIRMTHNLLLNYGLYRKMEVFRPKAASLEEMTKYHSDDYMCFLKSIKPDNIADFGRQMQRFN

SEQ ID NO: 119723 - protein, 319 aa, Heterodera glycines
HNLLLYKLEKIGPPGKLLMWIKGFLSRTFRVKIGDLSKKVSPLLFLIYINDLPDALPSGVKIKLYADDLLSKSDTEIMHKALHNLFEWANKWQIRISIKTFVLYLGSKNPKETYKFDGNTINAVDTIRDLGVNIDNKLQFSGHVNQITRNAYLRMRSLFRIIKSKSSKIWITLYKTYIRPLLEYAPEVWNPSLQKNIKQIERCQKYFTKRVFFKCSLPPIPYQNRLEYLQLPTLENRRKLFDLFMAHKIAYGRTDLKLFSIFKRALTSPFTDLTQNTNAKNSFPLLGGTKLWNQLDKGKTNSLNQFKTKLRSSLGYVRP

SEQ ID NO: 119724 - protein, 124 aa, Heterodera glycines
HESFNYFDQFRFPNLNLNKKSFENKISIFIRVRVRDRNDIGYIFKTRPKCINMNPPNGGLGPKESGKVDGSCDAFDPGSEDTKGDRVTVEWTNAPNPAATAVKVEGFQGDGMVSRKNLSIEYSG

SEQ ID NO: 119725 - protein, 130 aa, Heterodera glycines
MDGRTADEAIVATVSKVGENIQLARASVISSSPANKLFGQTHPKEEFNGVQLGRFISLVSLGHKSDESVSDFPTAQLGQVICQHIIGMAPESLGEPRKKGAKRATQMEIVDESDTGEEEDLNASQVDQSE

SEQ ID NO: 119726 - protein, 1151 aa, Heterodera glycines
MTNWGHFQQIDASVAHVQTLFAMYKQQQNEQQQTQCIYDKAVALGALGNAGLDIALADLERIIKDTREARVVRMMAIDATRRMRTQMPHSVRAMLLPVFLNTGEQPQVRITAFANILGAQPTAEVVDQLVYAIGKEPNREVQAYCYRTMKTMANSQKPDETQIAKHVKSSLKQLANAVDEQQLRTSGKWQFEQLYNNAQREGVFMSFVNAVSSRSALPAYAHVQLDSHFNDHYTYNKLNIYMVQQEAEQWYERAMNSFGNSKRKQKQQQHGSKQLSSIYEQLGIKSHRSDFGTVPTAADNDNEAYQQHQQQQQQNNMRPFAMLGLRSNNVDKAFIALDEHTIGEQTRRMLNGEEMKPNWAAILFGHGAQQQHLDMAIVQNMGEKEAKIATSAGVPLRILSTTPMMANVEGRVGAKAAPKMGPSAAGHGLSAQFEFSAMSARMAQIQKMELITPFAASGVESIRSLHINLPLQGELSLVNSEQQQGISIKVKLPQRGTQLASAHSLPFTFIAKAEPSAQFVREPRQIIAVHDPKLDQQQREVNSVLGQKALALPLQIRGHYHVPAEPSNLLQFAQLLMATENAVHVQYQPNEESPRELTIRASGEHFRKAAQMQLPDTPQLHNFYAQQFHSSSSCDSDDSVNAANCEENDATEQQQGENGGEQYISNDNQQQQLNSFISAYKPRQQYAHALRLSAQTSGGARDATAHANIQAQCDERMRYCTVQADANKNQQWTLSAQAQVVMPDTVPSVEQLQQPTMLKQFIALAKAQWGDQQDKQHMNVRIRGTQAHTEQTRAVMAQIQQQHEGKRHGFSAQQQRKMLQRSAFLNQFHVEATYALKAYAQNMMNRGIELLKSVYFWNTKSQLLGGPNAPKNGKPSNANVTIRTPAQQLHMQQIQMPAAVGRPFPLIRQQSAQQTHSLAQLFYKQFSLKSRAQCIVDGRNVDTFDGFAFTAPLSSNCFSVLAKHCSSPMEEQHQQQPQFVVMLKKVPGKQNANKSAQKADKEREEFKNDDNFQKKVLKVITAEQQIECQPKTAQGKKGQMICKVNGQPISGDEQCQDELQHQQCVQFNDPRQTDVTIRTGPIAVRFNGRKAWLKVSQAYKNAQCGLCGHYDDADEQEQELRMANGQIGGFGGLNLAKLVDEVDQWTKQKAA

SEQ ID NO: 119727 - protein, 346 aa, Heterodera glycines
MNLMSNPQVADAILGNRMFNHYDRASIGQLCEKAGLPQRALEHFTDLYDIKRTVVHTQHFNSEWLVSYFGRLNVQDSLECLKAMLQANLRQNLQIVVQIASKYCEQLGTQSLIDIFESFKSYEGLFYFLGSIVNFSQDSEVHFKYIQAATRTGQIKEVERICRESNCYDPERVKNYLKEAKLADQLPLIIVCDRHDMVQDLVLYLYRSNLMKSIEVFVSKVNPKRLPIVVGALLNVDCSEDQIKQLIQITRGKFDIDELVEEVEKRNRLKLLNSWLESRVHEGNQDQATHNALAKIYIDSNNNPERFLRENQFYDSRVIGKYCEKRDPHYALLAYERGRCDSELIA

SEQ ID NO: 119728 - protein, 353 aa, Heterodera glycines
LKNFKKLKDLGRGAFGICALYKVKRIFLKVVIKVVIKRVSLECQSENDKRAISYEASLLKKLSHPNVIRFYDSFVELEQLCILMEYLDGGTMERMIQERKGIKMGQDVLYYFTQIVLALDHMHALKILHRDIKTANIFLNRKMTIVKVGDFGISKVGDFGISKELNSKCAQELNSKCAQASTFVGTMNYVSPEICEGRAYGPKSDVWAVGCVLYELVELHKAFDGDSLHKAFDGDSIQLLLLRIARGQHGPISSTVTSGGQHGPISSTVTSGMRELIENVMEIDENRRPNTTEILLKPMVLQKWMEIHTNLGREILLKPMVLQKWMEIHTNLGRLENYTTKKDSEKQKIRRQG

SEQ ID NO: 119729 - protein, 194 aa, Heterodera glycines
AYNFVNTRSNKTILCSGDEGSDKEDAAEEFVPDVHYEPVVPLPPEVEVSTGEEEEEVIFSVIFSARCKLYRFDKDARENKERGLGDIKVIYPNFSRYRCVMRREQVFKLSRYRCVMRREQVFKLCANFPIYPDLKIHPREHMPTVYTWACRDFSDEDFSDEPSQGDDVTFSARFKDKVCEKGFKWFLGFRQSPG

SEQ ID NO: 119730 - protein, 126 aa, Heterodera glycines
MDSSSDFDKHAAQREAESLRTLAFFGVCLSTVATVIAVISVPFAYQHFQQLGTQMQNEVDFCKMRSGNMWREVTRTQAYSKVSHDRRHKRQAGSCCVCGVSPPGPPGPPGPSGQPGGDGQPRRLTT

SEQ ID NO: 119731 - protein, 325 aa, Heterodera glycines
AANLVKADHDDDVDEVVESLDKFDSFGKSGAKEDALEIIQSIFPLGGRPFTALHPQLVPQYFEEPLELFDEFGFRLAQETENDPAADGGPNAGEPLESSSHRMRWLALIESAHSQVEDELCWAKVDMQRLRHTPKFMPMVNDGGIPHSLRPFLWPRLCSAAEKRKKSPCDYAKIVRKCTKDRACINVQIEKDLLRTLPAHFCFGRPHSVGIAPLRRVLRALAFLFPEIGYCQGMAFVVASLLLVCCEENTFWMCSLIEGILTPSLYAPSLLGVRADERVMRHLMRTDFPGSGIKPDDFKLSECVENFNWTPCGSLLIPLLLITVY

SEQ ID NO: 119732 - protein, 172 aa, Heterodera glycines
MSANGKFRMGLNVRKSVETAVGPKKTANIFGDESDDDEQQNAAEKFERKYAASAGTKAREQRIVEKELAKNPDIFDYDTHYEEIQQQRDQKVAAQKEADKEKKPKYAHLLAKAHKQRELSKLLVEENTYKKEREKEAGQFEDEEVFVTGAYRQQIEERERHKTEMEREEALE

SEQ ID NO: 119733 - protein, 166 aa, Heterodera glycines
MTTEKESSSGSDDVINASEFASEETFYSPPAQKSVKEIIEADHNDESLKKYKEQLLGENASGPVLVEPDNPKNVLVRRISLVSDDQVKHSMDLPAKGDFVFCVKESCTYRIRFEFVVQREIICGLKYAHKVSRLGVGVPKELYMLGSYGPRHEPYTYETSPEEAPS

SEQ ID NO: 119734 - protein, 249 aa, Heterodera glycines
MSSDIVEKKETNPNETDDKTKEIKSLDEDEIAALSNYNMGPYADQLKQAEKDIDEIQKRINTLCGVKESDTGLAPPILWDIAADKMAMSHEQPLQKGVLFFGPPGTGKTLCARAVANRTDACFIRVIGSELVKKYVGEGARMVRELFSLAKTKKACILFFDEVDAIGGARFDDGKGGDNEVQRTMLELVNQLDGFDSRGAIKVLMATNRPDTLDPALIRPGRIDRRIEFSLVTNENKCRSDNEYTHCSL

SEQ ID NO: 119735 - protein, 101 aa, Heterodera glycines
TMPRQITDIKQFLLTARRKDAKSVKQFLLTARRKDAKSVKIKKNKENTKFKVRCTRFLYTLVVDDKVRCTRFLYTLVVDDKEKAEKLKQSLPPGLQVKELK

SEQ ID NO: 119736 - protein, 296 aa, Heterodera glycines
GLQPRRRGWKIRGSGLEVSGFGVGVFQFLPYRLATHLSLAFILYGIFLWNGLSHLFTPNNVHSKSPAIKKFRGMVHGHSKSPAIKKFRGMVHGNKLMIFMTIIIGAFVAGLDAAFVAGLDAGLVYNSWPKYADRWIPEGVLSHTPNWKNFIENPATVQFLHRNMAYLTLILATLTWIKGIRTPLGFRRNMAYLTLILATLTWIKGIRTPLGFRSRLALHSLLVTAWLQLALGISTLLHHVPVSLASMHQNGALLLYSSSTLLHHVPVSLASMHQNGALLLYSSVIWLSNELRKIPK

SEQ ID NO: 119737 - protein, 80 aa, Heterodera glycines
MPEISKTNLLYFLLLLLCWEGCIALATILKPFLSFFLSRLPIGDRWPRRNVPWLLVMKRGKREMKEGQLERAAKKDAVRL

SEQ ID NO: 119738 - protein, 240 aa, Heterodera glycines
EFVLVFYHDELSIVQATGQELKPKPFVNGQLKFGQNFSDHMMEVDWSDAKGWGKPLISPLHPLQLHPGAKALHYAIEALHYAIELFEGMKAYRGQDNHIRLFRPEKNIARMRRTAARLMLPDFDGNELLKIIDELVRTDQDWVPSSDEASLYIRPTMIGTDPTLIEGWSTGSKLFIVTGPTGNIGEAGPKPIALLADPNLARTSPGGVGQYKMGCEKSAVNWIGKSRKKRCCNGLQWWNS

SEQ ID NO: 119739 - protein, 34 aa, Heterodera glycines
MKRENVVVIIPKIENTLTYIVTELDEMEREEFFR

SEQ ID NO: 119740 - protein, 189 aa, Heterodera glycines
MHISFVSRQATAFLGVASRNGLPRVAAEAPPAPLTYLSEDEVALKHSVKQFSESVIRPLVKEMDVKSEMDRRVIEGVFANGLMGIEIAEKFGGSESSFFNVALTVEELAKVDPSVAVLVDVQNTLVAPLIIENGTEEQKHKYLTRIVKDWELLLQNMRTNSALEQVRHVLSISTRSESRKVPFLANMAK

SEQ ID NO: 119741 - protein, 181 aa, Heterodera glycines
MVERFFPNPEEAPLIKAIRDTYANIWRIEENENNEPFSEIIERVKKQPNNFVMKLTEYALWDAWIKKDVEKVYFGKEILEALANFDADKRLAYILMEKLRPMSVKNHIIWAEDGEESSGEDFLEDVTPELGIFGTLLGNIVNGEVLYNAQFGHQLKTKLASENEGGIASGNSAYDSAYLVD

SEQ ID NO: 119742 - protein, 211 aa, Heterodera glycines
PNIFGHDEIKRGLLCLLFGGTRKAVDPTDDASRVRLRSDVNILLCGDPGTAKSQLLQYVFQLVPRSQYTSGKVAIVGSSAVGLSASITRDSDSKSVVLQTGALVLADNGVCCIDEFDKMSDGTRSILHEVTKKWVMEQQTLSIAKAGIICQLNARTSVLAAANPIDSKWNKRKNIVKNVNLPHTLLSRFDLIFLVLDPQDEAYDRRLARHL

SEQ ID NO: 119743 - protein, 128 aa, Heterodera glycines
MLSYNRKATGSEAFHLYCLNSGANRQVAILCNHQRAVPKTHEKSMENLENKIKEKKQEYKELKDQLKKSKSDENKQIALGTSKLNYLDPRISVAWCKKNDVPVEKIFSKTQRDKFRWALDMAKEDFIF

SEQ ID NO: 119744 - protein, 388 aa, Heterodera glycines
LPSMASFMPNAVSGHYPGWRGRFPSSHKRRSEPEWSVKELIRMNPLHLFFLGFVPPFLGAIGSIVFFLGFVPPFLGAIGSIVTALLLHNDEISNYNWQCGNYNWQCGRARLPSLSRIIRARLPSLSRIINLPMERIFWQITFLFHIPLRAVEIFWQITFLFHIPLRAVEIAVGFFRYGRLRSVHCNWPRLFRYGRLRSVHCNWPRLYSLCRHFYLWLGSLELIFLVALSVVGEREFISYHVIYHVIFFYAFGAFAIGFFLTNVICHSQSLYYLNPYGRISYHFKIVVTILGRISYHFKIVVTILYVISYVISVPVLFGAFVLYWRKCITIMYDVFAVAEYIDVFLTIAYHCCAFFDIRYKVIFSVREVRERKMQEKEKKRTEERTNES

SEQ ID NO: 119745 - protein, 122 aa, Heterodera glycines
MLLSFIILLFLPNAFPLIQDKKSEAKMVNPKGYRRGTRYMFARPFRKHGVEPLSTFYRVYKRGDIVTVKGNGAFQKGMPFKAYHGKTGRVFNVTKHALGVVVNKRVRLVFLDMLVGVQFGIV

SEQ ID NO: 119746 - protein, 286 aa, Heterodera glycines
KLGNEAKTAAQGNSLFAEVHFYSNIFYTHLMFFRYLRKIFCIPISNGNCFGQKRGQKRTDLRQVTDHDRTTLSLKMQRDKLRQACQRYERNIAKDAERARALLRDGRKDRALLRALLLLKRKRFQETMINRIGGFMEQVERTITDMEMAQINREVFDNLRLGTEALKALNETITISLDEVERLMEESKEAQEFQEELSTILGQQMSEEDNDMVEELSTILGQQMSEEDNDMVEEEFERMLSEQMPQCQRSNRRTQKRDGKQRTKRGQRVREEKEPKRRREAVAQEA

SEQ ID NO: 119747 - protein, 168 aa, Heterodera glycines
MGLPKKLLLPIRKSTNYFHLELGHFTHSCENDIVCLTTCGKIPYFNAPVYFQNKEQIGKIDEIFGGPKDNGFSVKLNEGLKSSSFKKEQKLFIDPAKLLPLERFLGGNQSGGGGGFRGGGRGGGGFRGASGGQGGNFRGQRGGGGGFKRPFEGTPAAGGLSKRKKFNE

SEQ ID NO: 119748 - protein, 201 aa, Heterodera glycines
IILCVKAGRRSIFIVCVRRGREEAGRVEDEREYGMLSLPRIRLDGEGVGGVGHISRDCPNAGRSGGGGGGGGGSRGGGGETKCYNCGRSGHFARECRDAGDRDRGRGGGGGGGGRGGDDRGSKCYNCGGYGHFARECRDERSASGGGRGGRDDRDDRGNKCYNCGKSGHFSRECPEGSDRRGGGGGGRDRDDRRCYNCNEP

SEQ ID NO: 119749 - protein, 140 aa, Heterodera glycines
QNYLRLSSSSSLHCAITTTLQKRPHRRFSSFIRPSVLHINSLAVFAMARRRIQKEMAELHQELVTTGYTAAPMDDGRDLYHWKASIKGPPESPYEGGTFHLDIVFRRDYPFTPPNVKFDTIIYHPNVGERGDICLDILKQ

SEQ ID NO: 119750 - protein, 132 aa, Heterodera glycines
QASKFNDQEGKLILDWVKKLSGENFSTDGSRENFYKLLKDGTLLCKLVTFRGILLMRKPAYLIRLANGIQPGSVKKIQQPTGNFACMENINAFVSFAKAQGVPTEETFQSVDLFEARDLYSVCVTVLSLGRI

SEQ ID NO: 119751 - protein, 163 aa, Heterodera glycines
MNEEYCFSASTAVAQSWAQTNFRPVDEQPNSLVDTLIAKLSRTTFEQFTSEVSAQDIHKLCDITVSVLQQQSMLIRLQPPVVLCGDIHGQFRDLLRIFTTMGFPPDKKHLFLGDYVDRGTQSLETMVLLFCYKVKYPDSVILLRGNHECSNMNRAYGFFEEVE

SEQ ID NO: 119752 - protein, 123 aa, Heterodera glycines
IFGLANNFAFVVMLSAAKDIIKGPTKESANLNNATTNLSSENLCRHVLPKPSCNSISTGAILLAIIIPALVIKLMCPFVFDRVPFGFRHFLVCIMQALSFIIVAFSNSFTQSLIGVIFTSLGG

SEQ ID NO: 119753 - protein, 441 aa, Heterodera glycines
MTCPQKISDSSPLAINSGLNIFSVPPTNVSVVRSFFRQVLPLATITQESPYLFRLYSDNLWTDLSRVYLYLELSIEKPGANDKWVAIDDADTSVSAIQGIGQTFVQQLKVTVGNTEVYDSGNLYTFKAYITNELSFPINAKKNFLGSTGYYHTVNQDDSTDDGFKERCKIFKGGKNAQFLSRLDFDLGNQELYLLNNLDLLFTIYKAKDVFLLQTLKANDSTKYRLTVHDVKIYAKMVEVQPSLNMSLYKTLEKQPATYAVRKTEIKSSFISVGRYEFEYNVFSATIPRRVTIALVGNSAFHGDYKLSPFMFEPFDLREISVHAGGVVYPAVPYKLNFSNDHFVSAFVDMYEALGMANSERSFDISMAQFKKGWTFFVIPLTSTLDDSCGFELLRNGTTNVRATFNSPIPHGGVEMIVLGEFDQMIMVDYNRHIVTDSKLG

SEQ ID NO: 119754 - protein, 537 aa, Heterodera glycines
MAAHFPHIRSRIISEQISLIEEIIDKLFDYLNNSYNGHLGPVKNGKENQEIEITNSLSVELMRTTSILIGLLRAFGRYCNDISFPLISLIYPLPYNLPRKPTDESIHRKSNACHVKKLLSLDLLSKLDSIAGQVFLSSELRKFPYKTVSETLILVSVTLLRDILSPLSIGSGGNEVLECFAGELNEFVLSLFKHGQDSIAQKSQIDERNASSVDRDRSLPLKQQINDKEIAVNRVKMLVIANSICLELIVWSAVDESDGDMICGTISEKMWLPHRHVLAHMPVNVMALEALGSMAEKFPTLSSTLIIRLLSKFLTDPCPILLKIASELKPKDQQHQQLNAREELLSTRRKIGLASLRSAAINSLSRALKSALLIDQSSLQACLASLSSRLYTVASENDSKALLVSENLIQTLGKLGVSFVNDASSSELVLQIFLQRFSNPPSQQDNLIISSLADMWIAGANSIHDKTMKLFTRVTIESSSRVYSSDALPDSRYLHVSLAVDNALAKIANSLDSEEQQTLFLFRLLELFIQLGLEGQR

SEQ ID NO: 119755 - protein, 497 aa, Heterodera glycines
CSIRSLVRTQTRVIQNLSPFQTQLPNSYEVLRDRGDTAELSQLKNGFRVASYANGRPTVTVGVWLNAGSRIVGVWLNAGSRIETNENNGIASLFEGLLHKGSGKRNSVQLQTELAKLGARLRSFTTREHSAFFVECLKSDTDKVVELLADALLNQNFDASKVELLADALLNQNFDASKIEEQRAVALDRLQGREGRHSRLMLDNLHATAFQGTPLRLSPLGTTKALNSLTKESVSEFADDILKASGMVLTAVGGVDHEKMSDLAEKHFGHLGNSYNRKVPPHKGYRFTAGEFLYRDDNKGYRFTAGEFLYRDDNYPLMHGAIAVEGIGRNHLDYIAMLVANAYVGTWDRSFAASLNAPKSTVQKMCANDDLIGYENFNISYDITGLFGFYIVMKGHSDEVTGLFGFYIVMKGHSDEVTGEATRAVLHAWKHLAMGITDEEVDAAKNALKARLFLGLENNSQIATHIASEVGHLTKWEEGGGRGKYDDLEIISFFCRP

SEQ ID NO: 119756 - protein, 57 aa, Heterodera glycines
MSSQEDEYDYLFKVVLIGDPGVGKSNLLSRFTRNEFNLESKSAAGVDLFFEFSPSIK

SEQ ID NO: 119757 - protein, 46 aa, Heterodera glycines
FFAVPKNFKLVAAPLFELYDNSAGYGPLIASLPQILSRFNFLYNYA

SEQ ID NO: 119758 - protein, 127 aa, Heterodera glycines
MGCYKRLSNHWVIFRCRQRQWANIFPAMHGDSLLILDKTGRIQKFTREGHFVEISAKIDDYIGNGFTIREDEAVIACSGIVKDEVTVGETKDEFMCCTMRNVQEGKTMCDDWVENIRLDGSRWTEEA

SEQ ID NO: 119759 - protein, 115 aa, Heterodera glycines
MAQYVPCAGALLPFALVLIIAGLLLLHCGWAAHLLDVGEGMPYGEYSTTKTVSTSTRTKRTAPKGEEEPVFEEIEGKQPPPEIKQGFWQFDEREAWQTVANPYPIKWTNLHGPSL

SEQ ID NO: 119760 - protein, 107 aa, Heterodera glycines
MPERLTYRRRLCYNTKSNKTKVVKTPGGRNVFHYRNKLGSIPKCGDTGVPLKGIKAARPRQLAKMTKRKKTVTRAYGGCLSAAAVRQRIIRAFLVRTYHWTQRIVLC

SEQ ID NO: 119761 - protein, 153 aa, Heterodera glycines
IDIASFKGYVLRISGGNDKQGFPMKQGVITNSRVRLLLSKGHSCYRQRKKGERKRKSVRGCIVDSNMSVLALVVVKKGEQEIEGLTDRVVPRRLGPKRATKIRRLFNLNKEDDVRKYVIRRTLPAKEGKPSLKTDYVFGIKDFLRIPLRPRRH

SEQ ID NO: 119762 - protein, 84 aa, Heterodera glycines
MLSKKLFQSILNKSPKTAFSTSARLSASSAEVSRILEEKILGQASQINLEETGRVLSIGDGIARVYGLKNIQAEEMVEFDSGMK

SEQ ID NO: 119763 - protein, 95 aa, Heterodera glycines
MEQEQQQNVHHSGREIPHEDPTLLFTNAGMNQFKPIFQETVDPNSDMAKLKRAVNTQKCIRAGGKHNDLDDVGKDVYHHTFFEMLGNWSFGDNFK

SEQ ID NO: 119764 - protein, 415 aa, Heterodera glycines
MTDSLVELSPGALVSGRWTVIKKLGAGAFGAVYLCQDQDGITKGALKTEPINAPFPLLALEAIVLRSFDTLRASSGKHFCRCMDLGRDQQLDAASGRTLEFNFIVMSLVGRPFDKLLQESGDCFSPGTAIGAALQLLKALQALHEVGYLHRDIKPANFAIGLPETNEQRLLYLLDFGMSRKYLKDDGTIRRQRASANFRGTPIYAPISAHIKRDYSRGDDIESWFYVLIKFYKGAVPWKFIKDINEIGQYKCRRLKDEPAKVRKEALEELTGGCPPEFNKILAHIDGLEPEDRPDYEMIEKTLRGCLKKLDVREHPYDWEVGRQNVPLQQRQASSDQEKKKKGGSSHKKSGSSDKKSASSHKKKKSNSAEDKKKSQAPQKKRKSNSEEEKKKKSQAPQKKRKSNSEERKKPSKKK

SEQ ID NO: 119765 - protein, 173 aa, Heterodera glycines
SVSQQCKFVFGAAAEIGPYMPTCRRLWCSVSFGYQMGCRTQHMPWADGTPCGDHMPWADGTPCGDNMWCHRGQCVGMSPMQRQPVDGGWGEWKPWRECSRTCGGGVQKSFRECDSPPPENSGKYCIGGVQKSFRECDSPPPENSGKYCIGQRERYRPCNIQNGPWETPFRELQ

SEQ ID NO: 119766 - protein, 852 aa, Heterodera glycines
MSDSELMDTLEGGLNPDDELNDTVGDPDSMEEDEEQEEREQDGADEDPMLESTSGQADDLSKKSRKFAGGKKKGRKGKRSARSGGSREQLPDAYTHSSTELCTMLSMTNAEFEYSEDDFKNITSGKTVNSRFHQTLQELNPKASWARLQCVMTAKYNEYQKMLADQGRQMPKKVPSRSSAVGNAGGATPKESMASSSPSFVKHLPSGSSATIAEKVAPLKIRLSARKKRRNDDSEEDMNSDQEFESLLKEHERQLDEQDKEKEEKKQARVAAKKARDTTKQQQKVKRRKEEGGEEAEGELQQEHQDYCEVCQQGGEIILCDTCPRAYHLVCFDPDLEEPPEGFWSCPHCEQNGVPKTADGGDANAAPGNMEKCRVCNTKEPKNRPEKILSWRWIEYKYPEQVSEEDALKEGEQPANIEDEARRVRLFLHPQKEMKPRREREFFIKWKYMSYWHCEWVPELVLELYFTQTLRMYWRKMDPEVPPEVDDGSNEDMKTGKIDDREKEDDPHNLEQKFYRYGIKPEWMQVHRVISHVYYEKNLFDYLVKWRELVYDQATWERDDFDIPGLEEAIFKYWMHRCQLQFMQQKTMFRERMSGEAMPKYILKKLNKKRAEQGFVTFEEDEKKRKKREGKATIDIKKKYDVQPDFVSETGGTLHPYQLEGINWLRHCWANGIDAILADEMGLGKTIQSLEFIYSLVKEGHSKGPFLIAAPLSTLINWEREAEFWAPDLYVVTYIGDKESRSVVREHEFSFIEGATRGGPKASRLRTDQGIKFHVMLTSYELVSIDKAILSSIDWAVLVVDEAHRLKNNQSLFFRTLREFNIGYRLLLTGTPLQNNLEELFHLLNFLSPDRF

SEQ ID NO: 119767 - protein, 159 aa, Heterodera glycines
MRFMEVPQRLQTLLQQPDPLIIHHVIRWDGSGSSVGAAAAADGSPTENKNTACYDVDVELDDPIKQQQSAFLQSNANVQELMALDHKIYNTVEEINELKVRRDFFASFVENPQAFVEKWLISQSRDLKNLSEISADYEMERRADNYYQPVVQEGVFRYM

SEQ ID NO: 119768 - protein, 83 aa, Heterodera glycines
VAKALEHIEQMNTVPERLIRVRFNADVNSSMQWKFKPVQNEIYVNPGETALAFFTAENPSDRPIVGISTYNLTPFQAAYYFNK

SEQ ID NO: 119769 - protein, 94 aa, Heterodera glycines
GLEGHENEVKCVAFSASGEHLATCSRDKSVWVWQMDDAGDFQVISILQHHTADVKFVLWHPREELLVSGGYDGSVRFYASDGEDWCTGHSVNGD

SEQ ID NO: 119770 - protein, 241 aa, Heterodera glycines
QEEEEDEDDEEYGDDDEEEEPETTADAKAEQDPYFKDDPQGNEHERFRDAEERLEKRHRKKVTKVITEWSELFERYSTMKEKDPKGAEQYKRNMTAKFRKTVAATAKFRKTVAALEAENKEQRKQIEELHDERVQTALNEKKRQATHEYRAALAVQVGQTNRQNVLRTLKNYIRAEEKDRQHMLNRYRHLLRSDPEAALSFEPILLHRAALSFEPILLHRLRYIDLRINGTLAMLRDFSSL

SEQ ID NO: 119771 - protein, 438 aa, Heterodera glycines
MAFHKIDNDSVNSITNALDFFRIPPTNVSVSSSKVFELLPSNPLTDTPYHFKLHSSQNYIDLSKCYLLSEFRIRKENANGQLVDLAADEVAPIQLIGHTFIRNIKMSINGREVFNANSLMAYKSYFSHELSYSTAAKDSHLNAAGYYRDTGGVLEVGDGCTARRNLFVGSRTAQFIAKIDADLFNQPLYLINFCELDIEILPNDNDFVLITPPGVAAATRYHFEVVGLKMYVKKVSLMDGLALDIARKLELKPARYAVRKTLMKSLFISHGRFEFTSNLFMDQIPRRITMGLVANADYVGTVSRSPFNFQPFNVREISIIANGRSYPQAAYDLDYPNGKYVRPFNDMNEAVGFANSSESNGITLAQFGTTHCIYMFNLTSSGDDQAALFDLIRNGTTAVSIKFNQAVPAGGIMLVVMGECDSLVMLDKNRSISTDITI

SEQ ID NO: 119772 - protein, 130 aa, Heterodera glycines
FLSIFLSSSISTTMTTSTSSTSTSSTSTTTLSTSTATTPTSTTSSSSTSSTPSSSTSSTSSTSSTLSSSTSSASSTSSTPSCSSTSTDSTPSSSTTSTPSSSSISTSSTASTSTSSTPSSSTTSTSTPST

SEQ ID NO: 119773 - protein, 220 aa, Heterodera glycines
MATLSNTDSEEIPQKRPRENDKKDLTTSAEKNNSANGGSSEVVATQSALNFFDAADTQEIVYDDRDEWNMWKKRGDPVLHIGKVNFMIESQQIQLYKELRKWADSMLVAPLDANSLAKIANGICDNLVTSVVRAWDQRKPLYFAPAMNTAMWENPLTYQHLKTLKELLLYREIPPIEKEMMCGDKGYGAMASVQMIASIISSDIKNKYAVYSYSSENASS

SEQ ID NO: 119774 - protein, 100 aa, Heterodera glycines
MREMKANGQNGKEEAFDWRIYNQWNRISHVVNCNAQLGDGSANAYSNIQADVILKYTPDEARILKNSGQLPESTKLNEVGEEQNEGEVEFSEFNSKQQFT

SEQ ID NO: 119775 - protein, 73 aa, Heterodera glycines
CLSTHSVLGVCTSKHDEELCKAGGDACEFVIDGYYISVAICVVVGLLWYRIFYRRIKYFQKIPRQDWRVIKTK

SEQ ID NO: 119776 - protein, 159 aa, Heterodera glycines
MSGRGKGGKAKSGGKAKSRSSRAGLQFPVGRLHRLLRKGHYAERVGAGAPVHYAERVGAGAPVYLAAVLEYLAAEVLELAGNASRDNKKTRINPRHLQLAVRNDEELNKLLSGVTIAQGGVLPNIQAVLLLSGVTIAQGGVLPNIQAVLLPKKTHGESQ

SEQ ID NO: 119777 - protein, 176 aa, Heterodera glycines
SSLVFGPLIKLFGRMPLLMFGAVINLLMIITLMIWVVNPGDRTLFNAVIWVVNPGDRTLFNAVAGVWGMADGVWNTQLNGFWVALLGPGRDQLEVAFANYRFWMSFGLALGFFLIRATSIDTFLLISFAFLLMGILGYFLVELFEIIAVKSKFELGLKETFLQMKLELERRTTEVI

SEQ ID NO: 119778 - protein, 175 aa, Heterodera glycines
MKLGKMVKNKWILKVLKTREIKTLTTAYKTFVRPQLEYATEVWNPNLKKDIDKIERVQKFFTRKAFRKCGFLYRKYKERLKITDLHKLEERRKINDLTTAFKIIKGFTSLDAEKSFFFSERPRRPLLLRVKRHTAKTQNNFFNRIVKSWNNLPVVAVQINKAKEFRGLLKAMSSE

SEQ ID NO: 119779 - protein, 64 aa, Heterodera glycines
AVSPSFNFLRRPLPLLVFRRSLFKPPLDSPFCGIYRTNGEICRTDDILVCQHKMNYHPGANVPR

SEQ ID NO: 119780 - protein, 172 aa, Heterodera glycines
ELIGLYIRSSHNIIQQHKWQSYRDKIIYRGPMDIAVALSKLPPTEHIKQSFLLDFNFTSDNLIVLSLQGIFRDGKEVSDGSTNFLNMKFFTRQFAIVPKTEGIAIISDILQITPISNARMERYNNLLKNATVAQVQQSALVPGGVLASAVQQQIDGMAPPPPSPQTQPVLMI

SEQ ID NO: 119781 - protein, 146 aa, Heterodera glycines
VLNASGTPINGAFTFWSAPSTAAPAATASVSNLSATTTVISSEPDLTPLTPSTSDVTVNGHSSNVKVLKPVPLVIRTQSADEIAGAVAHPTKPSEIRKLIRSKMVRCRICRNRFLDKHIYERHLRDRHPKEHAAYLSQQEDEVRQQ

SEQ ID NO: 119782 - protein, 181 aa, Heterodera glycines
MAMGPNGALVYCMEYLADNLDWLHSHLNEGEDDYFLFDCPGQIELYSHLPVMCQIVQALREWNFNVCSTFVMDTTFCLDSTKFMSATLTALSTTVSLQTPAVNVLSKMDLLRPEDRRTVEEIVDGELQNAMEKQGKSQWEEKHRQLTDALSTVINDYSMVRFIPLELQDEQSIEGGRMNEE

SEQ ID NO: 119783 - protein, 156 aa, Heterodera glycines
MATRKLSFPEKIANILGVIYRYHEPRLPRYKDILKKVCVRELAPPTPKDWPQVYTFFNIYIFSYIKIKADYAKLDTVMRTQAYRQFKLKEFLVYSAVFVEVLCWFFVGEIIGRGSLTGYIVRSSFVDPKAAKKMAHFKWDDHHELKVENDEEQSGH

SEQ ID NO: 119784 - protein, 303 aa, Heterodera glycines
FDSGFRYFVHEKFSMPYLSTEGISVSPGIKVFSAISPTHYILLPHEMWGNCSDQWPEDLRSPLRYSSLKCKTLCSPLRYSSLKCKTLCRAKYFNELCGCSPFSYNIDEFFSVCTPYEIYKCLGSTVLNDTKLFFSVCTPYEIYKCLGSTVLNDTKLSQNEQILPNCPQCKIEQILPNCPQCKIECQRWVYHTYNSYTEAFVRKPKDKWRRKAEQWQMFKMKTIDSLKVDHRLLNIFYRDMAYTEYKQVQSLSMTEILSDIGGNMGLFLGMSLISLIEFVTYICKISWLFVSKRRRDHMARNEI

SEQ ID NO: 119785 - protein, 392 aa, Heterodera glycines
MTASSQGRPLPDGNFGNHAGPPHPRRRKALPTSDDVTEQPTTHPTMSPAPFVPTRQPAQPLTDDGTGNFFMSAYAMSAQRIASDSEWKKTPLGQTGLFNMGNTCFMNATLQPLFHTPGFSQLFQEKSAQRFVNGNNSFGTNGMISGSFSALIDLIWSGKFNALRPTTFLEFFARRVNTEMADRQQHDAQEFQLYLLDALHEDTNRVNKRQSFEQNYDDTDLGASASDFNERSKLFSSSPVNDLFNLTNISMVQCSTCNTTSVRFEVVNQLSLELPTNTDDLTLKDCLEAHFSSASLEDKWDCPKCKSKQPATRSTKIWEIPKVLIVHLKRFSLNDGHYVKNNVEVTFDVAELDLAPFLHEKSPHHNTALSLYGITSKHAFLLYYKRMNSKAT

SEQ ID NO: 119786 - protein, 260 aa, Heterodera glycines
THSSVLHMRLALTVTHLLLVSLGSVNLLVIFVILIRPYMRSVNLLVIFVILIRPYMRSITNVYMISLCLADFIYLTNLTLVAVTISLCLADFIYLTNLTLVAVTQLNDKSWPFSSFLCTLYHGTETTGYHGTETTGKYASVMFVVLLAVDRYCAMCKSNWCARYRTYRGAVLVSLAAWLFAALAASPLYFFAEVALLTLRSPVSPANRRELHKLCIAKWPNSDVARWYITISSVLYITISSVLIFALPLAVIFFCYYHIL

SEQ ID NO: 119787 - protein, 166 aa, Heterodera glycines
MSHDNGNNAFPAASSIYPSLPSALCDEKPSPAAVLSHCDDMEGISLLVKAADFAARRHRFQKRKDERTPYINHPIGVAFLLISVAKVYDPATLAAAYLHDLVEDTKTTFEELEQLFGREVAEIVRECTDDKNLPKDVQRKKQVEKAAGSSYKVKRKSERRKKHCAD

SEQ ID NO: 119788 - protein, 106 aa, Heterodera glycines
MGMAPPSLLQQQQQQTPFTQQKPTPIAPLAVPPAATAPQQQQAVSPPPLSQQAQQSNSDNLDEEQQAQMLIRVLQLTDEQIRMLPPTERAQVIELRNQLRSADANA

SEQ ID NO: 119789 - protein, 302 aa, Heterodera glycines
IDTNFREELSRIREKVEDIYTYEGNKVGRGTYGHVYKTYGHVYKAILRNSPSGMDGKAYALKLIEGQGFSMSACREVALLRELNHPNLIKHPNLIKLLRVFLTTEKRVWLLFDYAEHDLWHIIKYHRSAKQRRQPVMVPKVPKGMVKSLLYQILDGIHYLHNNWIMHRDLKPANILVMGEGTGIERGRVPANILVMGEGTGIERGRVKIADMGFARVFHNPLKFARVFHNPLKPLSELDPVVVTFWYRAPELLLCSKHYTTAIDIWAIGCIFAELLAIDIWAIGCIFAELLTSEPIFVCTEV

SEQ ID NO: 119790 - protein, 225 aa, Heterodera glycines
MDPYDLIEPVDISSKLNINFESQKWQERKEALDALQQLLLQSPRLADSPNYREVIEHLTKAMANDANIIVAASATKCVMFFAKGLRSKFTPYVSLVVPVIFTKFKEKKQLLRDALVECIDGIATYTSFDHLCKAVLEALSSKQNPSQKSQTDLFIYRVFRTLPANEIPKGLLKDLHGFDADSEVRDSSFAALGAIMKCTGEKALGCFISPELAKDTNKMPKIAEN

SEQ ID NO: 119791 - protein, 237 aa, Heterodera glycines
TPQELWHNKCPSPKVAHSALTVATNPFPTSDESQRKLKPPQNGNVHSSQNKAIPEIKLTGFVGFDSLPYQLVRKCQESGFQFNLLCVFQFNLLCVGETGMGKTTLLESLFNMKMEFEQCNRELKTVELREKTFDVQEGAVKVQEGAVKVKLRVVETAGFGDQLDKEKSAQIIVNYINDQFEAYLKEELKVKRNLSSYEDRRIHACIYFISPTGHGIKALDLITLREIKALDLITLRE

SEQ ID NO: 119792 - protein, 239 aa, Heterodera glycines
MRAFLAFEMRRKNVDEQKAREKEFAVLLEDCNKWLQTGLYLDKPHPRTGATALHVAASKGYNKLIGMLIRAGADVNAQDFEGWTPLHAAAHWGERDACRILMENGANLDALTHTVRKWQILNGWGGGHTVFSLADKSISDYLVNLQENFNQLRSEALQHQQQQQQNGATHNQPSNGSAVLQDMANLTLGKDKESSVDSERASKRSSSVYSSSEQDPSCDGQGGKCLANQEKKGFINEKR

SEQ ID NO: 119793 - protein, 194 aa, Heterodera glycines
MSGIGNFEIRNVSKVERIGAHSHITGLGLKANFEPIFISDGMVGQCAARKAAGLIRLLKDGQIAGRALLIVGEPGTGKTAVAMGISKSIGGDTPFISISASEVFSMDLSKPEALTQSFRKAIGVRIKEETEVLCGEVVQLEIDRPQSGAGPRVGKLTLKTTDMEAIYDIGNKMTESVIKERITAGDVIQIDKAT

SEQ ID NO: 119794 - protein, 247 aa, Heterodera glycines
SASKSLPGKRPPNRNLTDASHSSHDAHSDTMDVGEGLPIESMIDKDSPIKGWETPPQASISEFFNTFFESVNGMVQPRVVPPVGKPTRWTNQLDFIMKDLLKQAKNHKHAWPFVRPVDAIKLSIPDYHKVIKRPMDLGTIEDYHKVIKRPMDLGTIERRLKNMYYYSASECLKDIMTVFNDCYLFNPPHFVYNMAKELEQFMLTLTKIPPNVSSFCDFEQIFNCYKFNQCEDDVTLMCKNVENLYRD

SEQ ID NO: 119795 - protein, 179 aa, Heterodera glycines
MVPGESVYGEKRISSQQTENAPIAAITPKTEETTNGSNGVSAPTAAAAGPAPPVEYRVWNPFRSKLAAAVMAGIEDTHIYPGARVLYLGAASGTSVSHVSDIVGPEGMVYAVEFSHRSGRDLLGMAKKRPNVVPIVDDARHPHKYSMMVTLEPYERDHAVVVAEYRAAKKKVKKEKMEE

SEQ ID NO: 119796 - protein, 507 aa, Heterodera glycines
LRANSSASYIIQVEERLGEERDRCQIYLDNTTMDSLMEACDTALIKQHLELFHDKFESLLTRQQNDHLGRMSLLTRQQNDHLGRMYTLCSRVPYTLCSRVPNGLAKLKEILEEYIEREGKASIQQIAREAFNDPKQYISCILKMHELYNRLVVDSFKTDHGFVQAMDLKMHELYNRLVVDSFKTDHGFVQAMDCAFRKFINNNEITAMARNASKSPQLLVLYCDQLLRKSARNMEDEKMDENLEQVGFVWTCQMCQMTVFKYIDDKDMFQAFFHKFLCKRLVYDTSASEEQERCMIAKLKHMCGFEYTSKLERLLTDVALSRDHSEQFKQVANEPRTSNVDFSPRTSNVDFSVIVVMSNVWPLQQPVKFEIPRPLLDCIDSYTQYYTNRFNYTQYYTNRFNGRKLTWALQMCRGELVSTLFKNCFFLQCNTQQIAVLMQYNERNTYTLGELHVALGTDFPGDQLCAVVQSLVKTNLLKLTSADGNLTETKLKQRAEIQRNPGFQNSK

SEQ ID NO: 119797 - protein, 254 aa, Heterodera glycines
MNNHPVRFETIWKDLLPGLESIFKTQERMAPQRYMEYYTLVFNYCTNQQNDFTHETTNNRARRGNRTTAGTAGAEFVGEELYTRLRHFVEEYTRKLLQECQRLSGDQLLDYYTEQWTKFQFSSTVVNGIFSYLNRHWIRRNIDEAVRPGILEVYNLAVSIWKSVIFDELHHNITSAALALVEKDRNGERITTRLISGVVASYIELGINEHDPAADVGGPATAAVAQQQQQNSVVHRPSVKYQVDRNYFEQRFLE

SEQ ID NO: 119798 - protein, 301 aa, Heterodera glycines
MQETHIVLGIASVCSLLAIIATVVTLPSLYSEMSQMNSKVRNGVEAFRVNTDSAWTDLMDVQVVVTPPSKPRANPFNSIFRAKRQLPGHCQCAGLQQPSCPPGPPGPAGPPGQPGQPGSAGQPGQAGQPGQPAAPCPPQNIPCPRCPAGPPGRPGGQGPPGQQGAPGQPGTPAQGGGPGTPGAPGPQGQPGQPGRPGASGQPGQPGANGVVSRPIPGPKGPPGAPGQNGNPGGQGQPGQPGGQGPPGPPGAPGQPGQPGNGGQPGQPGAPGQPGKDSGYCPCPPRSSVLAVKKKMAAAKKA

SEQ ID NO: 119799 - protein, 252 aa, Heterodera glycines
NDVTEKEAEFDGTKRVGQGPLGQTGLINLGNTCFINAILQPLFHTPGFSQLFRQKIIIESFGFIIESFGFFRNYGTKGVIAGSFSALIDQILSGNFNAIRPQVFLKEFFANVNAEKEFFANVNAELANGQQHDAHEFLIYLLNALHEDTNREKQQPFDQNYDNTDEKQQPFDQNYDNTDLRANAFDFFEKSKLFFSSPVNDLFNLTTISETKCITCNASSVLTTISETKCITCNASSVRFESVNQLRWVLFA

SEQ ID NO: 119800 - protein, 147 aa, Heterodera glycines
MKTFITALMDKQHLKRRIQVLAKSGNVMVDSDALWVVKYLASKKELSQSFDLYLKKILEGFNPDLYPVAIRAKAMKCLAQIVEADYQVLMIAEVNKIVQDRLIDANASVREATFDLIGKCLVTRPDLLDTYYSILVNRTKVGGICIP

SEQ ID NO: 119801 - protein, 127 aa, Heterodera glycines
MKIKLIFNDNECFVGVRVTAEVLLAINRCVQIISNRLANFLFQTWRTYVWLLLASVYGLYMLIFTKPILFTGLYVSWFNNPHVGYVDEADEMTVSCFFWVEAGMASQCLIGCDYILYSKPLKYCKTQ

SEQ ID NO: 119802 - protein, 149 aa, Heterodera glycines
MGLVANTDYAGTILRSPFNFQPFNVREISISVNGRPYPQAPYDLDYRNGKYVRPFNDMNEAVGFANSTESNGITFAQYGKTHCIYVFNLTNSGDDQAALFDLIKNGTTAVSIKFNQPVPVGGIMLVVMGECDSLVMLDKNRSISTDTTI

SEQ ID NO: 119803 - protein, 198 aa, Heterodera glycines
MYKGEEQRSSAAKCLLKVAHYAAELDQYQKAQLTFEEVAIYEADNPMLKYAAKTHFFQVQFFNNIFLGSPPSRKILLPIDSVVWVLFGRNRDGINCCCPIQALLCSLCIDLLDSQRALKRYEELSNYFADARECQLGKQIIEAMENGDPDGFTEAVQQFDKISRLDQWHVAMLVKVKRRCGDGGDVKNEAGEEEDDLR

SEQ ID NO: 119804 - protein, 205 aa, Heterodera glycines
MGRRPARCYRYIKNKPYPKSRFCRGVPDPKIRIFDLGRKRATVDEFPCCVHMISNEREHLSSEVNVNICCNFKKRMIFYFASKRFHVIRINKMLSCAGADRLQTGMRGAFGKPQGLVARVGIGDMLMSVRVRDQHQAHALEAFRRAKFKFPGRQYIVISRKWGFTPFDREVYEKHRKEGRVIPDGVNCRFLKQHGPLTEWLKNPI

SEQ ID NO: 119805 - protein, 134 aa, Heterodera glycines
ELLEQREKLERAEQNLDTIHHTTQHTQRSLNSLKSWFGGLVRNKLSRAPKGLGTANANANNQQQQQEQTVQQQHQQRPLHAHLVQSSADEFAGAIGGGGGGVQPPQQHSLNSSSRAYIQGTRWEAMDDEIDNNL

SEQ ID NO: 119806 - protein, 273 aa, Heterodera glycines
KPSQSIAHCSDVGIFLWFAGGVGITAGAHRLWSHKSYKARFPLRVLLVVLNCVAFQNHKSYKARFPLRVLLVVLNCVAFQNDVIEWSRDHRCHHKWTDTDADPHNINRGFFFSHMGWLLVKKHNINRGFFFSHMGWLLVKKHPQVKAHPQVKAKGSTLDLSDLTSDPLLAFQRKFYLPLVLLFCFLLPTKFYLPLVLLFCFLLPTLIPVLLWNESSSVAFYLIPVLLWNESSSVAFYTAAVFRYTFTLHATWLINSVAHMWGGSVTDEGNPSI

SEQ ID NO: 119807 - protein, 122 aa, Heterodera glycines
MPFFLHDPDLDSYAAIIMDEAHERSLNTDVLFGLLRDVVARRSDLKLIVTSATMDADKFANFFGGHTPIFQIPGRTFPVEIYHARVPVEDHVDAAVKQAVKIHLGGMEGDILIFMPGQEDIE

SEQ ID NO: 119808 - protein, 361 aa, Heterodera glycines
PAKATSSPTAISRRLTPAPEGYLPHGAFRPTAETPAGGAITDTLQLPIHLVGSAPQYGGVSGMIIAQEIPKGERIRYLDARERSQKALVGTGERIRYLDARERSQKALVGTIEATIRAVEEAEEEIQKPPQIELPQFGTQRHWRVEVEKEAVSDRLAAMGAATAEVVQLTAIPEETLDTRVGHAIATIGSNIPEMGRGVRQLAAIMPDESRAGDLMDAARKLCNAFGDFLEKVHPEKQEKRATIVHPEKQEKRATILSAASRVGELSHDMISTMHEQTEEERTFHEELNRRARAVATSTAQLVLQAKTVSAAKTVSAECEEPALKDQVIHSAMKTAFTAFATSELVACTRVTPTMNMACKE

SEQ ID NO: 119809 - protein, 441 aa, Heterodera glycines
MTCPQKISENSPLAINSGLNIFSIPPTNVAVVRSFFRQVLPLATITQESPYLFRLYSDNLWTDLSRIYLYLELSIEKPGAIDKWIAIEDTDVSVSAIQGIGQTFVQQLKVTVGNTEVYDSGNLYPYKAYITNELSFPVNAKKNFLGSTGYYHTERHDDPTDDGFKERCKVFKGGNNAQFLSRLDFDLGNQELYLLNNLDLLFTIYKAKDAFLLQTLKANDDTKYRLTVHDVKIYAKMIEVQPSLNMNLYKTLEKQPATYAVRKTEIKSSYISSGRYEFEYNVFSSTIPRRVTIALVSNSAFNGDYKLTPFKFDPFDLREISVHAGGMVYPVVPHKLNFSKNYYVRAFVEMYEALGMANSERSFDVSMNQFKNGWAFFVISLNSTLDDSCGFELLRSGTTSIRATFDSPIPKGGVEMIVLGEFDQMIMIDYNRHIVSDSKLG

SEQ ID NO: 119810 - protein, 1224 aa, Heterodera glycines
MQHTRRYLLVPEEIYESLISSPQDGSPIGLVRSRIKQIKNDNEINEEQRAFKYEQEFKRFNKLKNDEEERPVDVKIQNLQEVAETFPKPFNLIRKSAIPRRHNLKLGKRRKDYVDDDEEVFDDVKIPNKDDILNFIYKNSQALGISEQGQILKADGRPFITSNVEDIVDHLTKKDRSANKKDPTALKEFVARAKQNAVLSRRLFSDGQTDILKFLLTQRTYTLHRQAKRRFRRLPTLAPGLHIEWQADLAIFDRLSKYNRGLKYLLVCIDSLSRQIFVEPIKSKTSKNMIKAFDQIFKRTKYIPWKILTDQGKEFTARPIQEYYRSKDVEHFCMLTSPQFHAGMAERANRSIKERLYRYFTERNTYKWIDVIQDIVKGINHSMNSTIGMRPVDVTFANAEELRKKLYNEAAKNPRGNPKFHVGDRVRIEKHKHVFQKGNRTNSFRTRIPRKLQFNTEWEVGLAVIVYPHSWPSIGTAQQQFVEIEWQTGKALRIEVPPSNVTNPYELSKNLYKLLGEGSDHLAKQLRTTQNAFLLVINKARRWAREEYIKRKVKENRSIHDEEKLLHALLIDSESFIELKDVDRGLIAEEKHAETSKVPLRISTDDKDSYQKKLNEYFSGLSERDLNLIDDFIKAKVKSEIKKMTEDERMILEASKEVGMGAWLQAYRRIWLACQFTYDNNRNRFDLNFDTRYVKKVKITAQLAYILGFDNTEFLEPENEARFMPDMNGGVSSFNVYAPNLIEPMMIGDVTAPVLRIVTIRGKPDEVIEEQFLAIQYHKILLKEISEIFIEIRTNSGSLMPFQYGTFPPTNVSVIRSFFREILPLASITQESPYLFRLYSDNLWTDLSRIYLYLEISIEKHDANGKWTSIEDTDTNIAPIQGIGQTFVQQLKVTVGNTEVYDSGNLFPFKSYITNELSYPTSVKEHFLGSMGYYHTEAHDDSTDKGFKERCNVLKGGKHAQFLSRLDFDLGNQELYLLNNLDLLFTIYKAKDSFLLQTLKANDNNKYRLAVHDVKIYAKMIEVQPSLNMSLYKTLEKQPATYSVRKTEIKSSFISVGRYEFEYNVFSSTIPRRVTIALVGNSAFNGDYKLSPFKFEPFDLREISVHTGGMVYPAVPYKLDFPKNYFVRAFVDMYEALSMANSERTFDIKMSQFQNGWAFFVIPLNSTLDDSCGFELLRSGTTSIRATFNSPIPKGGVEMIVMGEFDQMIMIDYNRHIVSDSKLG

SEQ ID NO: 119811 - protein, 225 aa, Heterodera glycines
STRLYRMVYNTYPFSELQLGMFACEFFMKRIPIRLTSNNAPIEGVTLPDFYPLTKSEERELKRIRRKIRNKMSAQTSRRKKQDYIEALQERIFMSDSENREDYIEALQERIFMSDSENRELKKQIEVMAAENRQLAAQLRNMQASIGQSSKRNAQTGTCLAVLLLSVCLIVTPNSRHLGERTSEWTLSAATGASQNNSSKKRWANLSGIGGLNFDHPAYQQGIVF

SEQ ID NO: 119812 - protein, 78 aa, Heterodera glycines
MGDRKAVIKNADMTEEMQQEVGPSAIECATQALEKYNIEKDIAAYIKKEFDKKFNPTWHCIVGRNFGSYVTHEKHFIY

SEQ ID NO: 119813 - protein, 190 aa, Heterodera glycines
MAQKQQQQAQIGHQFDEGALLEKVQRMIREELRRFDADRTGIVDYALESSGGSVLSTRCTVQYNERSRVQKLFGFPLWYTGYSPRTVIQSYQDLDELDTRLLLGNFTYDAERGEPLQMFPVQQWDPHGTQIVELETLANWGSQVTCLYRFRVHGDKMREIPEVASADDLAAFDSAKRWPDSSKHKEIGGG

SEQ ID NO: 119814 - protein, 134 aa, Heterodera glycines
MAQLFDKLGVGPHDLSVDRLEVRADDTFHRFDLARWAIGHDKILKTFDDFLDNLFTPLFEVTNDPNTHPELHRFLKVIEMQKYHKTLKFQHVSGIDSVDDESKPENVAFTKDSPEPADYDNDQNPSYSYYLYYM

SEQ ID NO: 119815 - protein, 256 aa, Heterodera glycines
IDTIVHFAADCTSKRCYEQPMEALENNSVAFVQMLECVREYGKVKKFVHISTDEVYGDSNLGPTEKAKSEECPILPGNPYAATKAICEFYAHLFQQKFALPIVTLRINNIYGPNQWDVKVTDKSKNYNKHFQMLANASLHRNGTAAEAIPRPRQRGPIALVAVRGRRVGGNHTGGRMKEVAECVQSEVRTQMGLPLVAPQFDHIADRPYNDQRYLISFSKATKELGWTPKTPFEEGLKRVVSSHLEHKTEPSQRLS

SEQ ID NO: 119816 - protein, 416 aa, Heterodera glycines
DCAPGYSRTGGGPYLGMCEKCECHNHASQCDAEYGACIDCQHNTEGDRCERCKPGFVGDARRGTPYDCRPAPEIAVVRPRCDCHNHSPRGCDSYGRCILCEHNTEGFHCELCKKGFYGDATKGTPWDCTQCPCPGTAECFLDARGQVQGTAECFLDARGQVQCRNCPPGFAGRLCDECAPGYTPGQTADGRKCEPIGKHKPSEVEFVPGPDVPFRVEILQPKQLTIQEGSRAKWTCKIVSADTDLVEIQWSKIGEPELDLVEIQWSKIGEPELPERAQQFGHQLVIDQVQQQDTGHYRCTGRLKGDISTDDATLTIGRAAPAHMPKPSVTPPHQLVDEGQQAVFTCLTPGYADCQQAVFTCLTPGYADCEVQWHFQRLGGPLPHGWQQRGNQIIVQSAQQIHAGDYICSVTHQFGT

SEQ ID NO: 119817 - protein, 208 aa, Heterodera glycines
MSKFTQVPEDMDDDLFELAAGLPPRSKNNEQEPKPVEDEPLPDAEHVELDFYNSDFNMKACPSNKWLVDPDNSDGFALMWGGITEFLSLKHLPFDEADPHQIRVGWSRADSSNLLGEQQNSFAFSSMGNKATNNIFTDFVDPFFVDEVITSVLYRTGDIYFPHVATKNCKVMVNFGTEIPESIEAAKDESGLCLWRFIWELSRKTRIF

SEQ ID NO: 119818 - protein, 240 aa, Heterodera glycines
VEKKRGFIKPIHTLEEQIEYMNSEVFAETYKGRPIFAETYKGRPICFMWKRNMKGQWKLQPPPRLFCIDRNGRFNVGNACTVCRRFNVGNACTVCRDEYLFFDYRNPKLLEHFLYPGTDQPLNPKLLEHFLYPGTDQPLPIIQTGLCQEQYVNLQAQLLKAKEHGTFIFNVPFRHFNYGQWYPKTFIFNVPFRHFNYGQWYPKDANALISSDGRRINRAETNVEDIYPNPSIAFETHNRD

SEQ ID NO: 119819 - protein, 279 aa, Heterodera glycines
MNPVYSIGTPVDQQQQQQGKNNEAADNSENVPANQMPPDLDEADTAHRVQTDTFVNYAPLRLRSGFPHPDEVVETLSLSSVSSPEIRYTMAIPDEVVDGGDGAGVGKGRTIAAIIFENFLRGRRKAIWLSVSSDLKYDAERDLRDIGADKIAVCALNKLRYGRIGSSESGGGIGRGVIFATYSSLIGESRRGSTAKGGKSADAMEMMKSPTTQRQQRQPLVTRGFASWSNEPRNMAYMSRLGLWGLGLTFKTFGEFIHAVENRGVGAMEMVAMDMKVYV

SEQ ID NO: 119820 - protein, 225 aa, Heterodera glycines
FYEEVFTELQRTYGPVEELNPVEELNVCENIGEHMVCENIGEHMIGNVYVKFVIGNVYVKFVYEEDAEKAVQGLENRWFNGQPIYAELSPVSDFREARCRQHEISTCSKGGFCNFMHLKDVSDEVYERCYANRGAYERCYANRGARYRSTRRHDRFYADDGYDRREGATGGWTTDEKGPPREIGGWGYVGQKLRARLLMGGGGDRGGGGGGGGRDRRRRDDRGDD

SEQ ID NO: 119821 - protein, 393 aa, Heterodera glycines
MALLWVQQHITSFGGDPRAVTIGHSVDGHELTAHPLWLLNNVRNGIVNVFSVPFLVGMNAQDGTEAILEDRTLGGTALSQFGTLFICTGEFTDFLQITRQYMRSFIIEYAFKHNYTMNREAVIDAIESFYTYWPDASDVWQIRRWFIDLITDAYYTQPITQSAHLHSDTGSRTFLYVNNYNFSMQRENTVAHNGEVPNFPAWAGSCHDCDLFLLFGFPFMPPELLPKAIRSVNWTDTDRNASQLFSSFVRQFTKYSFVLPFFHLIPKFSDPNLPNDGTWLAHQPRAHWYINFNYSRGQSLTVPGTLSRDFRFEQVAFWENYIPAGLFGVSLLVLIALLVLTLSLGYNVCTRPLRERCGRYSEWEEVQAEERGANVEMARKSTRERGGGEGAGR

SEQ ID NO: 119822 - protein, 241 aa, Heterodera glycines
VLKSREIKTLTAAYKTFVRPQLEYATEVWNPNLKKDIDKIERVQKIFTRKALRKCGFVYKKYGERLKITGLHKLEERRKINDLTTAFKIIKGFTSLDAGKSFFFSERLRRPLLLRTFFENLDEHSLKILDRPLRQVTEFIKQRESDEGRPMRQIWINTYKNRRSAADIIVITRDRYFEKSLDLDLDSMLDLDFLGKNPGPGKIQAPRDLDPGLDLDFLKFVLKSKQMLEKINYLLEASKNI

SEQ ID NO: 119823 - protein, 136 aa, Heterodera glycines
MNPSLGNAFVPSGPVALLPLGRDLCSLVWTVSTADAARLLQLSPEHFVEELNGTLQFDNSSANSLVNNSLDCLGKALNFLPSKESPAKCTIPRVLSLPYDDRAVFPLSLGYAYDYIRPRVALIGYEKLNQCGGTDP

SEQ ID NO: 119824 - protein, 188 aa, Heterodera glycines
MRIMMMMMYVCGTSRRPQKSIHIHFGVPILQMVATTAAGSPKGFRHHRGIIAAQKGNLFLRLGIGTKQLGVCSSPERQSSITLVFRDVSPLPSAFTFRPGQSYFVITTSNGTLMGLNNTEGGLCATRNMRLKFDVLSLADEADANNDTMLQIPQPHHAHAHHHHHHHQHHHQQRYHHKALVHKQQETH

SEQ ID NO: 119825 - protein, 158 aa, Heterodera glycines
IYHHSSLSQIELFAVCTERQSDAELDRIVRLQQSLYASLQLRFRVMDMPSEELGAPAARKFDLEAWMPGRKSWGELCSASNCTDFQARRLHLKYRGEGALRFVHTCNGTGLASTRAMIALLETHQTGRQKGVKLPDVINERMHTERSVGIYCIHQKNA

SEQ ID NO: 119826 - protein, 188 aa, Heterodera glycines
KKVIIQKDRHIKVIKGRLKANQRRRKLFIAFLLKSPRHPYLFSAGEDKQVKCWDLEYNKVIRHYHGHLSAVQDLALHPTLDILVTCARDSTARVWDMRTKAQIFVWDMRTKAQIFCLSGHSDTVASVICQGVNPQVVTGSHDSTIRLWDLATGRSMCTLTNHKQTVSGREIHMSYNTFRSRVDFYYEF

SEQ ID NO: 119827 - protein, 285 aa, Heterodera glycines
QNRICENAPMLGKCCALDYHLDELTDCLRHDFPSTTGPAAMIAEPIQGIGGTVQFPEGYLKRAFDEIHARGGLRICDEVQGLRICDEVQTGFGRLGTHFWGFQSQNAVPDIVAMAKGMANGFPMGAVITTKEIGARLMEGGRYFNTFGGNPLACTVAKAVLEVIDEEGLQQNCFKVIDEEGLQQNCFKIGNFLLSELCRIDSRLLGDIRGKGLMIGIELVEEDGQRVLGTERVERIFECIRREGVLVGKGGNEGNVLRIKPPMCVGEEDAWRCAEAVAKALKEEE

SEQ ID NO: 119828 - protein, 559 aa, Heterodera glycines
MAQEIQIHQALAHPHVVKMEGFFEDDDNVYILLELCSRRSLMELHKRRKAVTEPEARYFTFQIVEACKYLHGKKIIHRDLKLGNLFLNSEMQLKIGDFGLATVVDYDGERKKTLCGTPNYIAPEMLDKKGHSYEVDIWAIGCILYTLLVGKPPFETETLKDTYNRIKANQYTIPPKIGKDAASLITRLLAPDPARRPRVTEILNFQFFTDGFLPKVLPSSCLTMAPKFNMQAVSGGLIRRPELDHVPSPRAAKGPAFTGHAPLASVPETKVPPQAVAVKQDVASVLITEMAAGLPHLRMFNCSDCFRLGENNDVPADFYLSDLYAQLCSLLNTNPERFSEADKDEIEDPRAQPFFWVSRWVDYSDKYGLGYQLCDNSVGVLFNDNTKVILDAAGNQLQYTERNNTEHFYGANKYPQALEKKITLLKFFRSYMNEHLMKAGANIKMRDGDELARLPCLNTWFRTKSAIVLHLSNGTLQINFFQDHSKLIVCPLMSAATYIDQQKNVFTCKFQYLEKYGCPKDLCQRLKYTKVMVERLIARHENPNAMTAKSGRRAEVVPQ

SEQ ID NO: 119829 - protein, 254 aa, Heterodera glycines
MCSGVPQGSVLGPILFLIYINDLPKKIPKGIFIKLYADDVKLYSIHRTKTDRVIMHEALRQLSNWSNEWCIDISINKTFVLYLGKNNPREQYKINNNTICEVDTIRDLGILIDNKLKLTEHINTVTRNAYGRMRFLFRIIKSKRISIWKIIFMSYIRPLLEYAPEAWNPQLKIHINKIEKCQKYFTRIALRKCNLPYIPYGQRLELFKLPTLEKRRKIFDILTTYKIIHGLTHLDPNSMFKRTNLNTRNKSFFD

SEQ ID NO: 119830 - protein, 271 aa, Heterodera glycines
KDARGGQCQANEMAKGRCSSADEGKQNAQREEGGAYNVWTKKALERAAASASIPKSPVAKREENDKPVKRFYPLNPWEKQQPNNNNRQNKGKENGTRQPQAMPVGWVLGVRSKTTSINEDAGPSHPSTSDALSTTVKPPASSSSIASVLPPHPSFSLIQENGLRYGIESLFRFYSYGLEKKLRPKLYNDFQEATLQDVKRGHTFGLEKFLAFLKCLWHCKYSTQLEVMPQIAKELARYRSTDLFATEPAKAAKLELQNESKNRSGGRNVMV

SEQ ID NO: 119831 - protein, 124 aa, Heterodera glycines
  unsure (1)..(124): unsure at all Xaa locations
KTIIRMYKTYVRPQLEYAVEIWNPNXKKDIERIEKVQKFFTRKAFKKCGLLHRSYSERLEICQLIELAKRRNIADLTIAFKIMKGFTSLDASKLFTFSDRSSRRPLLLRMRRTTAKSKNNFFNL

SEQ ID NO: 119832 - protein, 255 aa, Heterodera glycines
IFTLVNSHLSFSKLLCSQSFVKRIVYTHRSGRQVVKVMALLEAVMKKKMELGDDFKSKYELKTPKGTRDFGPEQMATREKVLAIVTETFKRHGAVTMETPVFELREVLMGKYGEEGTKLVYDLADQGGELCSLRYDLTVPFARYLAANKVEKIKRYQIAKVYRRDQPVMTKGRYREFYQCDFDIAGNGDFDIAGNGEVMVQEAECLKIMDEVLTKLDIGAFEIRVNHRLLLDGVFAALRVNHRLLLDGVFAALRV

SEQ ID NO: 119833 - protein, 140 aa, Heterodera glycines
MTCDTVNRVMADPEIRELIQQQWQKPILLNRFPHGIKAFYMSRCADQPELTESVDLLMPGVGEIVGGSMRIWKEDELLGAFQKADIDPKPYYWYVDQRKYGGCPHGGFGLGLERFVCWLANQHHIRDVCLFPRYIGRCAP

SEQ ID NO: 119834 - protein, 291 aa, Heterodera glycines
YCGLIIENMTKIYSFLAKNQPEFFCLFLTFQKAFDSVPHNLLLYKLEKIGIRGKLLKWIKEFLSNRIFRVKIGDSLSSIKVGSGVPQGSVLGPLLFLIYINDLPDVIPSGVNIKLYADDVKIYICYKTRSEIEIMHKTLHNLFEWANKWQIKVSVQKTFILYLGFKNPKETYKFDGNTINAVDTIRDLGVNIDNKLLFSDHILQITKNAYSHIRSLFRIIKSKSSKIWIILYKIFPSGRFNSPSYRQHKIQKIYSIYGRLMCLPYKFPLMCSTPLKNFSKILPYISMSGLS

SEQ ID NO: 119835 - protein, 149 aa, Heterodera glycines
SGNLALVTRQYVADMTRARLEGLLNAFPKLITSDKVLAQRQHTFVETNSVRYVYQPMDNITSDKVLAQRQHTFVETNSVRYVYQPMDNIYMVLITTKASNILEDLETLRLFSRVIYMVLITTKASNILEDLETLRLFSRVVVKCVYNKN

SEQ ID NO: 119836 - protein, 436 aa, Heterodera glycines
MAFHKIDTDSVNSITNALDFFRIPPTNVSVSSSKVFELLPSNPLTDTPYHFKLHSSQNYIDLSKCYLLTEFRIHKENANGQLVNLTIDDINIAPIQMIGQTFIRNIKMSINGREIFNANALMAYKTYFSHELSYSTTAKDSHLNAAGYYRDTGDSLEMGDGCTARRDLFANSNVAQFIAKIDTDLFNQPLYLINFCELDIEILPNDNEFVLIAPTGGRYRFEVVGLKLYVKKVSLMDGLALDIARKLEVKPARYAVRKTMMKSVFISPGRYEFTANLFMDQIPRRVTMGLVANTDYVGSIRRSPFNFQPFNVREISIVANGRSYPQAPYDLDYPNGKYVRPFNDMNEAVGFANSSESNGITFAQYGKTHCIYVFNLTNSGDDQAALFDLIKNGTTAVSIKFNHPVPEGGIMLVVMGECDSLVMLDKNRSISTDITI

SEQ ID NO: 119837 - protein, 235 aa, Heterodera glycines
DLDIAPDFFDFFLATRPLLESDRSLFCVSAWNDNGKKGLVDLSFGASLLFRSDFFSGLGWMMTKDFWNELRPKWPRAFWDDFLREPEQRKNRSCIRPEISRTAMTEFGRIGASKGLFFNRHLRRVFLNRMPVNFTRIDLSGFIRSEYDASFLERVYSAQKVQMENILEWSKNSGDCRIEYESMEEFVSIALRVGVMADSKAGVPRTAYRGVVTCFLNGTRLFIAPPKNGWNGYDR

SEQ ID NO: 119838 - protein, 114 aa, Heterodera glycines
MISNAESLLVMFISPKDRTVVVREQDGTLRTALPEEHDRMNRLFFVQPNRPVNEPPLFAMTDEWLQKTLDRDEHEFVLDWACHFYEPDAPKFVENKHKNSMIKLVRFPYNPLMD

SEQ ID NO: 119839 - protein, 451 aa, Heterodera glycines
MQPDLQPPYCDGRSPTLVNRLPPFHSTTPMITTMAQTSAKSVEKTNEEEMAQSKKGKAKATTAEFSGDEKETDEGEEEKDKGGKVEKKEKQQKGSDKEKEGQRQQKILPQLEQIEEQTEWQPVREEEAKKETDDERAQQDGENERGKEKERQEEEGAKEKEGREHEQQKSAQRKKTTNVPGNAIEPAIISSRKPAIVTIQSKEIEEMPPDAFDDGSIRTAPTPRAQQMEELEREISGSIVPELIVPQVIVGGKRKEEKGEDEEEKGDGRQKGNGKRKEEGGKGKEEKGDKEEQKGKGGEKENGKGKEEEEEGNGSKTSAFLQEKTDEHNANGNDKGTTNSKAKNEIRIEPIGTKGRTNAKAKPTAIPAEEAEEGREDEQRQQQAEEKPEQHEPASSSAVPPSPPQRQRPTTPEAKRTARPSTEMATTEEQRETPKGKIDKEKATHSGTHQQ

SEQ ID NO: 119840 - protein, 280 aa, Heterodera glycines
MTLLIIKSYGVAQRVLTVDGVQEFPGLVKIVWYFNFYKLYRLCKIKDAESLEKFYIAKNEEAHAELDAVDQILNEPFLLGSALAAAAVDGGGGGGDDDVDDALIIAGEDVIKFFLNFYYFFKATGPPKKSTKRGGKKYRALREKAQALRNTATEAASTLSSSSSVNTSMFKKMSIEYARRVAQLREHRKKKLPGISEELVNVKIWSTEQPNALHTIAIHGKAVTDVSLHPTGDYVLCSSEDSHWSFIDLHAGRPLVKVNNRSSPLLTTLLEFKKIFSGQI

SEQ ID NO: 119841 - protein, 102 aa, Heterodera glycines
KMQRLAKLANTGGLLIPLSGAVQTISTRGVLRIPHWENHIRFDPRFGRKRPCQDLMTPFWLRPKHYVGDPMEPYHTPYGITFARVDDQKRLVREGPNSCFDD

SEQ ID NO: 119842 - protein, 356 aa, Heterodera glycines
PPQMELMAHHHNESPPVGRLAPKLSLSSTPGTISGNGPGDNQTTAFTEALSPDHSQQMAVMQQLAAQLGLSNGGNATEGERNALEQLLGSGGLHLAELMAHAQNQQQNTDMNSQSALFQHQLIAHIGGTDAPQQQQQSTASNDTQSTVNALAMLAAAGINGGSGTTQQQQQQLFGQLLGSNPFSQGTTPSLMFNNSSAFGGINPTEFDGAAMLAKLSAEFAAVAQAQHGQSGAISATTVQSTGGPSTQQNGAMGRGHTPAPSNKPPPQKRQYSSTSKNFCDLCNKEVCNKYFLRTHMLKMHNIIIDENKQLIANIDTVDKERKGEVKFRLEMSRGNGWRIVIGLVPPLGVTFAIPA

SEQ ID NO: 119843 - protein, 290 aa, Heterodera glycines
AESSRDEMLSMYGVILLDEVHERTMITDVVMGLVKRIMRHRPRIMRHRPELRVVVMSASLQTGTFVQYFSEFDYLTMKISGRTFPVEIKLTFEPNEYISKAVLTFEPNEYISKAVEKAIAIHRREAHGDILLFLCGQDEIERACEMLEEIERACEMLEEEAKKCRESGIGRLDVLPLYGSMQLEDVLPLYGSMQLEQQRKLLEAEQNQLTNGERRRRCIVATNVAETSMTIDGVVYVIDPGFCKRNIYNPNSKIESLLVQHISRASAVQRAGRAGRTRPGKCFRLYTEHC

SEQ ID NO: 119844 - protein, 346 aa, Heterodera glycines
MNVQSPLYAVPCKIDPSPSRRTATLDRMSPDSGHRDSAGVSGAGAFDVTIEELRTLMEFRGGEALEKISTDYGNTLGLCERLATDPNNGIANTQDELKRRRDAFGANEIPPLPPKSFFTLVWEALQDVTLIILLSAAVVSLALSFYNPGSELGGGKDETEQEAGWIEGAAILISVVVVVLVTALNDYTKERQFRGLQAKIETEHKFAVIRGGKQLQVVVNELVVGDIAQVKYGDLLPTDGVLIQSNDLKIDESSLTGESDQIKKSAEHDPMLLSGTHVMEGSGRMVITAVGVNSQTGIIMTLLGAAKSAMEDERKEKLREEKRRTRRRSKASGQWEHWPIEENGIR

SEQ ID NO: 119845 - protein, 147 aa, Heterodera glycines
MPTNKSSKLFGTARCPLKRYSCSRLTLSSTKIYKKMVLPVSNDGLERSTFSRTKCSSYPSICPIIGAWRDYLEQESLDKRKRPFDSEGWMMECRKDIPSQSNFSDCGMFSCLFAEYASRRAPITFTQKHISYFRERMCFEIYQKSLL

SEQ ID NO: 119846 - protein, 121 aa, Heterodera glycines
MDNGLFEEAWERAVRNSEMLRENSVLEVGKRLVNHLMEQKAYDLAVNFLPQVCSTHKVEWEFYVNEFERHHQILKLVPIIPTKDPQLEPECYESVLLAALYMRPKLFDAIVSHWNADIYRA

SEQ ID NO: 119847 - protein, 386 aa, Heterodera glycines
SHEVVAWVKRILRVKKTGHSGTLDPKVSGVLVSGVLVVCVDRTTRLAKSQQNAGKEYVAIFKLHNPVESVKTIRQALDKLTGALFQRPPLISAVKRQLRLTGALFQRPPLISAVKRQLRIRTVYECKLIEYSPSQQMGVYWMSCEAGTYVRTHIVHLGLMLGVGAQMQELRRVRSGVTGENDHIVTLHDIMDAQYLYDQHKDESYLRRIIRPLEALLVQHKRIVVKDSSVNAICYGAKILIPGILVNAICYGAKILIPGILRYENGIEINEEIVIVTTKGEAVCIAIALMTTSTIAITDHGVVAKIALMTTSTIAITDHGVVAKIKRVIMERDTYARKWGLGPVASKKKAMIKDGLLDKHGKPNESTPKGYVPGMMDYSLSKVKAS

SEQ ID NO: 119848 - protein, 80 aa, Heterodera glycines
SYGDLSPLFTLNLAQFNCVALIKAANYLDVRGLLDVACKTVANMIKGKSPDEIRRTFNIKNDFTPEEEEQIRRENAWCED

SEQ ID NO: 119849 - protein, 196 aa, Heterodera glycines
IRNALLFALLTVPILIIGNGPAGIALSALLSGWRPFYNKRVPHPDPHLHAQLTRMASSSSDDNSNILSARKTPAAPEGTPFSVLYDCLARPAASSPVPSSSCLCWRRRERDAISHIVLGDQQIGGSWTEYDDHMLTVSAVEWMDLPGFSLAADFVGDAQLAQQRPRAGLYTYLNAYVDAMGLRHNFKLFTRVTHIE

SEQ ID NO: 119850 - protein, 244 aa, Heterodera glycines
MPVVDAEGTPLARDPASGRYLDPADGTPIAVDDQGRPLDRSGNVLSKNIYDEYVWVDVGLVSPDGLPARTAGGRIGAEATTATLHDDHAVDGAELVPSDEGGPVAALPDDRVPTRVEKGECRVQEAVIDLVVAVNDELLQAHGDRLRQALDDLLDQHLDLAADATRVALLQYGKSVAVPVSLGGYHERDQLLDQLGQLRSTASNLLGLPDLSAAYEASLQQFESFGRGGNVPKVLLVVSSGEDM

SEQ ID NO: 119851 - protein, 148 aa, Heterodera glycines
VYDYFSEFIPKSFDDKEWVRTMECSSVVERVNYWAFLALSQHRKDLDEMKHNQSVEHTDSFFKEQLRLYNAGGMGYSEDAYYRTIEESKKLAQQLTLGESPRILFDCQFLPQMTQRIYGKVAKSAVHAYFVWFWNFTMIFISLISHQI

SEQ ID NO: 119852 - protein, 325 aa, Heterodera glycines
LIQHPRVRYAVCNAIGQMCTDFQPTMCTDFQPTIQKKCHERIVPVLLEAMADMSVPRVAAHAAAAMVNFCEDCPKVNFCEDCPKSIISIYLPSIMERLESVLSQTFQQMMIMERLESVLSQTFQQMMTNGKKLVLEQIITTIASVADAAIITTIASVADAAQDHFAKFYGNLMPPLKYIFFENAKDDNLKLLRGKTIECISLIGMAVGAELFETDADSVMQVLLSSGVKFENNDDPQISYFISAWARICKILGKGFAKYLDMIMPAVLSAADFKPSVALVDGKDTDDNEDWDYMPIDENRSLGVHTAGLEDKVTACEMLCCSRAS

SEQ ID NO: 119853 - protein, 94 aa, Heterodera glycines
LIFVVDSNDRERVGEAREELMRMLAEDELRDAVLLVFANKQDLPNAMNAAEVTDRLGLHTLRNRNWYIQATCATSGDGLYEGLDWLSNQLKNRG

SEQ ID NO: 119854 - protein, 438 aa, Heterodera glycines
MGAGHRAEQQAAANRLQLVFGYISHSMALIADSFHMLSDVIALCIAFGCLKSIQRLLNPEPIKNPLHVLVVGLIGFFINLIGMIMFRGHVGHTHAAHGVEDVRSEVLEVAAEAAAAAAAAKADEPLFGAGNADGRRRNHRCCRDGTKRAQQRGGHNEVDEEEQNRAISMSDLEAVEESLMSRVPRHKHCKIGWMSAGHLNMHAVFLHVLSDAVGSVIVIATALVAWKVEGVEWLKLYMDPMLSIVLVCLMVCTTLPLVHETALILLQTTPSFVNIDSLQSKLLHIDGIVAVHEFHVWRLVGERIIATVHIRFRTLRHYVLAAEQIRSLFHDNHIHSTTIQPEFAEMDTSGSVSELECAFACLPNNCAMLENGDVTCCGKDKRTPPKKIVTSTSIAIEEEEQQRPTDATTGDGGTAFFTAGSGSSSSSSTNSSPEQSGS

SEQ ID NO: 119855 - protein, 253 aa, Heterodera glycines
VDCIYIDFQKAFDSVPHELLLYKLEKIGIRGKLLMWIKDFLSNRTFRVKIGDDLSSSKVGSGVPQGSVLGPLLFLIYINDLPDALPSGVRIKLYADDVKLYICYSKNRNSMHKALHNLSEWANKWQIRIIKKTFVLHLGNKNPKEIYKIDGNIINVVDTIRDLGINIDNKLQFSNHVTQIIKNAYLRMRSLFRVIKSKSSRIWIILYKTYVRPLLEYAPEVWNPSLLKNIKKIEKSQKYFTKRSLFQCSLPPI

SEQ ID NO: 119856 - protein, 41 aa, Heterodera glycines
MRIHKRIINLNSSSDVLKKITGISIEPGVDVEVTIAESPSN

SEQ ID NO: 119857 - protein, 164 aa, Heterodera glycines
MQIFVKTLTGKTITLEVEASDTIENVKAKIQDKEGIPPDQQRLVNQANLRKRIMEKMALSDFRWETIGGWTHFGRLQHSGTPPNLRTTIFTGSSPLFQKESTLHLVLRLRGGIIEPSLRMLAQKYNCDKQICRKCYARLPPRATNCRKKKCGHSNDLRIKKKLK

SEQ ID NO: 119858 - protein, 137 aa, Heterodera glycines
AFPYKDDKPQEAAPVEDRIRITLTSQNVKSLEKVCEQLIRGAKDENLVVKGPVRMPTKILRITTRKTPCGEGSKTWDRFQVNKPTEILELHQEKQINKYIKNQQWSQNTHQEKQINKYIKNQQWSQNTEREIGQKGH

SEQ ID NO: 119859 - protein, 93 aa, Heterodera glycines
MVTKSGKYCLGYKQALKTLRSGKAKLVIISSNTPTLRRSEVEYYAMLSKTGVHEYHGNNIELGTACGKLFRVSMLSITDPGDSDIIRTMPTEA

SEQ ID NO: 119860 - protein, 331 aa, Heterodera glycines
MAREEYCFDATAAAAAEQSRPSATTSTLVQGDGLSSSFVDAIIRKVRQSPVQRFTDEITDEELKQLCKAATDIFRMQPTLVRIQPPVVVVGDIHGQFTDLQRIFHTHGNPPEQQYVFLGDYVDRGPQSLETIVLLFCYKVKYPANFMLLRGNHECANINRVYGFFDEVNRRYQRPGPRRLYDLFNQTFAWMPYVGLIGDKILCMHGGLSDQINSLEQLSHLNRPQIDPPLRTLEIDLLWADPARGVRGVIPNTRGAGIAFGEDVVERVCDMLCLDYIIRAHQVVMDGVEYFAGRRLITLFSAPRYTGRNNTGATLTIAPNLSHSITRFPPA

SEQ ID NO: 119861 - protein, 364 aa, Heterodera glycines
MFVLEQEEYKREGIAWTFIDFGLNLQACIELIEKPLGVISMLDEECIVPKASDMTFVQKLIDQHLGKHPNFQKPKPPKGKQAEAHFAIVHYAGTVRYNANSFLEKNKDPLNDSAVSVLKAAQDNELLLNIFEDYVTQEEAAELAKTGQSSGKKKGKSSSFMTVSMMYRESLNNLMNMLYQTHPHFIRCIIPNEKKQSGLLDSALVLNQLTCNGVLEGIRICRKGYPNRMQYPDFKVASQFKTIAINTKQSQHRYAILAAEESKVPDEKQASKQITDKLATDGELKDEEFKLGNTKIFFKAGILARLEDLRDAKLSVIMTGFQSRIRWFLAQTDVKRRIQQRAGLLILQRNIRGWCTLRNWDWFK

SEQ ID NO: 119862 - protein, 377 aa, Heterodera glycines
MSRVYLFLELSIQKEDAGGRWVPIEAADQLVGPIQCIGQTLKCKTQLYDSGTLYPYKAYLTNELSFPNSAKGHFMASAGYHPSLKHDSATDAGFLARCARFEGGRKARFLSRLDFDLGNQELYLLNNMDVLFTIYRAKNTFLLQNLAPAPAVGAAARQQYALYLHDIKLYMKVVEVQPSLNLSIYKTLEKQPATYAVRKTEVKSVFLTAGRTEMDHNIFSAAIPRRLTIALVANGAFNGQLAQSPFNFKPYSIREISVHAGGQIYPAVPHRMDFSGAAYIRPFVDMYEALGMANSERSMDITLDQFRDGWTIFVVPMTSTLDDSCGFELLRSGTTSIRLTFNEEIPAGGVEMVVLGEFDQLIMIDYNRHIVSDSKIA

SEQ ID NO: 119863 - protein, 120 aa, Heterodera glycines
MEGIGVIWAAVVGSEVDSDCAMELLTETALVGSQMSARGHRTRGQVQCWRKGLCSFGPASTEGERRQIIQTNCQRKEKEELMAYKIEQGIATWTPADNPKATVDPYKTLFIGRIVKKNTW

SEQ ID NO: 119864 - protein, 199 aa, Heterodera glycines
SSRYGPPIQTRYRMLVTNLSTRCSWQDLKDLMRNAGEVTYADAHKKVRNEAVVCFATHEDLRRAVERYQGKDINGRRIKLVDDSEGYRAQKVQGKDINGRRIKLVDDSEGYRAQKVRTFPMPFPRKFLSRSRSPRSRSRSPRSRTRSPPSRSRSPRSHGRSRSRSRSRSPTPSRSRSRSPNDEKTNEEESMMEHLFVGW

SEQ ID NO: 119865 - protein, 172 aa, Heterodera glycines
FVGRVIAKAIYDNKQLDCYFTRAFYKHILNKHVRYQDIESEDPDLFKSLEFLLNNAVEDLGAELTFTVEVEEFGVRSTRQLLENGNKTTVTDANKHEYVHLMCQMKMTGSIRQQLNAFLEGFYEVIPKKLISIFNEQELELLISGLPDIDIDDLCANTEYKTYTRTSPQIQW

SEQ ID NO: 119866 - protein, 180 aa, Heterodera glycines
MDCNRYRDVICAEQGRVRLDNGRYIHANWITALGEQRFICTQGPLETTCADFWTMIVQENIEGIVMLCDTVEQNKTKCHQYWPTPDKKQLHFANKTITVHFIEETALEPDLYRTKLSVLSRNGSMNRTDWNTGGAAHCLRYSAAWTSTQHPLVGAQPPSASGPKCADAGPIPLHILRDFA

SEQ ID NO: 119867 - protein, 153 aa, Heterodera glycines
FHAYKKVAETVPDSALLIVLGFALGQLLRLFRVERHIYMFEANTFFLYLLPPIIFEAGFYMPTNLLWENYDSILLFAFVGTIWNTVAIGFTLYWLGTFGIFSMPFSICQALTFAASISSVDPVAVIGVFEQINVNKFLFINVFGEALFNDAAA

SEQ ID NO: 119868 - protein, 460 aa, Heterodera glycines
MDKGRSKSPNDNKEEEETQSAKEDKTDHKTNEQMLLVRTGLKLKRGTLFKKKRNVDPKTIDLTIKKEQEGPRKTKAELAFLKRQEETAFDRLSKRAQISHREKVEKFNKQMEELTEFNDIPKQYKMGADGGTIPKRCELVKKKRKKEKIEKSYEAATKWRTCQLSQQPLKKPIVCCKLGRLYNKEAVLEAKLDKTLAKNKATEHIHAFSDVKELMLTDNKAWKDNGPEKGDIYIDMNETPWVCPITALPMNGVNNFFVNWKCGCVFSEKAHNELKTDSCYGCGGPMQEQQFIKLYPDEELFLLYEQRIVDEIAQRKLKAGEKKRKTTGDSKGAEHQQKKSKVEEETKFSSIQDNPNVPKAVKSMFTTSEEAKKQPTAHWKIICICWFASDYSLEQMDGLTEPMLSTRPSPSIGAEGKERFARENHSEIERRRRNKMTHYINELADMVLKVAVAIAIKHFM

SEQ ID NO: 119869 - protein, 101 aa, Heterodera glycines
MNKPDLVLFVGEAWVGNEAVDQLVKFNQALADNSAVGEQARLIDGIVLTKFDTIDDKKLGKKLEGIGNNAMNDGGEERRNGGENADRNQNGAQKEEAEEIE

SEQ ID NO: 119870 - protein, 118 aa, Heterodera glycines
ASQIHKSMVIPSPDIDKKVRQEVDEAVKVALSDEVLPPEALFSDLLPPEALFSDLYANTPPLAVRGTTADATVTQPFVSTAEVLRKMGREPKNYENERTDSQRRIDNEKHGIINCSII

SEQ ID NO: 119871 - protein, 232 aa, Heterodera glycines
LNWLTDFLTNRTFKVRINQQFSKEFPIKSGVPQGSVLGPILFLIFINDLSPVIPDGISLKLFADDTKIYRYNTESQRKKLDEALHCVNQWAQRWGLQFHQKNQLLLYLGKDNFKIPYQFNGKTIKETQTIRDLGILIDNKLTFKSHISAILQKALRSRTLFQKIKSKSSKTWIKIYKSYIRSLLEYSSENWNPHIKKEIVRLEKFQKFFTRRVFLKCHLPVLPYSDRLKYLT

SEQ ID NO: 119872 - protein, 307 aa, Heterodera glycines
ASNPAEMFELRAELNAHEKLAEEKITECQHLRANLELARKEVREAEEHETVLRADIDKLERELADQRRTTMPMQTHQLTVDKLESTERKSQQLEQRFTAQLDTLQREKFEAEAQLQTQKRQQRDCRAEMDALRERAGCDADQWERQRKALESERNALRARLDLEEANARELHAAKCEAESAARNAAEYERQVHEREERMRKLETELAQQRQQTDAEKKKSQLYREELITEQNRLSDLLGRLRSVCLMALRSGADEAADTSCCLEPTCMQDDLQLIAIIDDLLMKALTDARREADALRVQQQKQIREL

SEQ ID NO: 119873 - protein, 260 aa, Heterodera glycines
MGNEHSGGRFGGNGTNKEKGDDDGGQTSPSTSTGIPASFSFLAKKRNSAKSAVMGSIVVVIEGASCSSSAVPGKDVDLRRIKEIPRFLPLLRGVLPGHRDIPEVQQKIDSKSILSFMHRLQQHFKSCAQTVATEQGRMFARIVEIDQLISSLFKKTSTATKRLDALNNELRRVGTFSSQLEEIQASLLDLSSSANSLNQLLSFDDRLPPLQFAFTPILTRKKLSENAGTMLPQNSDNINSGDRTAIERDLRKVSELRVVD

SEQ ID NO: 119874 - protein, 245 aa, Heterodera glycines
FLTPMDGPPPPPMAKPGRIRMFRSLKQFVPTKAGELKLYGEDIVAGELKLYGEDIVYVKEAPEGTKSCEAKSSTGHTEGILPKQFAVEQHMELIEFPLHEAARAGDLSFLRECLDNKMSVNGLDRSGSTALHWAAYAGHTPILKHLLSVPNVTLLAQNKLGDSPLHAANKLGDSPLHAASAKGRLDCVHLLVEAGANAHVRNRRGQRPVDVTGDPQVGALLKTTMTTTGDDMTEGDEDYLEEEDD

SEQ ID NO: 119875 - protein, 292 aa, Heterodera glycines
TLNKKLRNNERKYFLNVYKLILVSKLIDEDKLPHLLFYGPPGTGKTSTILAAARKIFSPKNIQSRVLELNASDERGIGVVREKIINFTSSQGLHDMAFKLVILDEADAMTKDAQNALRRIIEKYTDTTRFCIICNYLSRIIPALQSRCTRFRFAPLSQFRFAPLSQKQVLPRLDYIIEQERLPAVTDGAKNSLFKLSKGDMRRVINILQSTALSTSAVDEENIYKCVGSTALSTSAVDEENIYKCVGYPHPNVVKDIFRALLDNSIEIAYKSKLKILNIFLFMSFFVARFIF

SEQ ID NO: 119876 - protein, 200 aa, Heterodera glycines
IMQCQRMAQKKGRGPKSLIATAAVLSICNSIRPFQFINLIKFQRYDPAQPRTVTSFKGTQKLIFEGYRYQKLIFEGYRYNIHHIVPAKGVKTWRCVCAKKLIVPAKGVKTWRCVCAKKLTCSRSWCKGRAETWDDDGQGISKGEHNHPAEHEVAELEYFKSQLILAAIASPNANLNELIDEAIGFMSEGVSFGSRESLKK

SEQ ID NO: 119877 - protein, 210 aa, Heterodera glycines
LFEVFVNVDEFTDFPRPLFPNFIFIGGLELRNTRAQSPPYKSELLKGRKGVVPYKSELLKGRKGVVFFSMGSAVKTDVLPAPFMKNVIGAFAELPDWHFIVKIEPDDEQSRRMAENVPNIRLTSWAPQPAILSHPRLRLFITHGGYNSLLEGAQSGTPVLSIGFFADQRRNALVAQRNGWGRAFENWKLLEGMNEFRETVREMLEEDNEQ

SEQ ID NO: 119878 - protein, 459 aa, Heterodera glycines
MAGIDFGNLTCYMAVARNKGIEIVENDYSLHATPSCVSFGQFARMMGFGAKQQLNVNYGNSVVNFKHILGRTFNDKVVQTFRQHIPCGLMGKFTDDQIEIKVTHLGTTRVLSPEQVVACLLTHLRVQLSRSLGTDATECVINVPFFYEENQRRALLNAGRIAGLSLRLITDPAALAYCYGMYNGANLPPPEQPARLVAFVDVGHSSVQASLIAFSAGKAEVLAASFDLTVGGVHFDALLRDYFNEDFGKRFKIDARKTPRAWLRLLDECEKALTMKGTNELELSDQKANVGKQSAHSLCNRMLCERHRRQRSDAKVGDIFDVELVGGSSRIPRIKQIVAEFFKKVPKTTMNQDDALARGCALRSAMLYPAYQVKKFIVIDRYEMPIDPSALSDEEKLKEEIRAEQEMQTADLRDKQRSDAKNAFEEYCFKTQHTMEGEQLAKGKESDEERHKCIEKCKG

SEQ ID NO: 119879 - protein, 81 aa, Heterodera glycines
MTASRRLTRAEVAEHNNSSDAWIIIGNKVYDVTKFLDEHPGGMEVLMEKAGEDRTEAFEDIGHSTDARQMKEDFLVGEIVE

SEQ ID NO: 119880 - protein, 154 aa, Heterodera glycines
MVDQCFSKPKREILGIGDVSKWLNSEAHHKYMGFLRRLNSAVKTVPTTSSDIIIGETARKIISILDLLEDGQSLLSDLFPENLKSAVLEIWPYLMDSFGNSTRIDYGSGHETSFLIFLFCLYEIGVLHSPDDDRASILRVFHRLFFAQITNKNL

SEQ ID NO: 119881 - protein, 217 aa, Heterodera glycines
MSFLQRPPSSVKDHRRTWDRTEYEVKAQERLTTEREALEIKKGNIRPPPKGPKIKREMLKPREFKVDLESKVGRQVVINKTTPSSETGGYYCNICDCVVKDSINFLDHINGKNHQRNLGFSMKVKKSTVEEVRERFSMKKAQKETLRNEDVEEKQRDLKEEEAKMADLKRMQRERQKETSRKRTAAAVTAPPTDEEADAELMKVMGIGTFGSNKRKK

SEQ ID NO: 119882 - protein, 116 aa, Heterodera glycines
NTNTFNNPQLFELEQAAALGVSRAKDVAKIFSLMLSGELISPKSLTRLLKPQFVDRIDYVMMIPVSRGFGFMYEKHPRKSGKWLFGHPGFGGSTLMVDPEEELVIAYVCNGMKTGK

SEQ ID NO: 119883 - protein, 126 aa, Heterodera glycines
MTEQTERAYQRQPTVFLNDKFRTQGIGKKAANKDRYWKNVGLGFKTPREAIEGIYIDKKCPFTGNVSIRGRILTGVVIKNKMQRTIVIRRDYLHFVPKYRRYEKRHKNMSVHCSPCFRQELTKELS

SEQ ID NO: 119884 - protein, 982 aa, Heterodera glycines
MGSNEIRNALLDVAAPDEQNGQQAVRNEAGRGGGNFEQQHVDGGLRIRLQNVGRNNGQQWQIRNENSNDGHRILHPAPQNVRPRTSTPYENMFEELRVEHTVECRPHNQNLQANFQNMLNNGVAMQNQRVTAPTGLQSHPQQIHPHPIQQTQPQQPSQPMPAQPVFQQGFPGFIWGYPGQFPYGPYPTAFGYPPQQNFGYVNPNLQQPPIFNQQFPPPVLQHANYAMGVPSQQQPIVQANQQREVLQPVAQQQNPPITNRPNNFGTQNAGAEIRQTENEIRGPGMDQVAYALIMSQIPYLKGNEGAEKIKEFFKRFDANTAEWSNAKRITSLESKLFGRAERAFKSACSTEPYRYESIKREMFRQLEETDAREWSAFDQIMTGIRRKNDEDLDSLAERVITLVRRAYPGLTDHLVDDYAIKHLIRTFDNSELALSLELGRTPGMTFDHFVGMAARAEATQRATRRMASQNAIQRGRQNEANSTGGFFNNSQTQQTNDNRPKCYNCGKLGHVARNCFRRQAEQNGQMRNFEHIPTTGANCTPMPSNPNTNFMSKPEQNANQHRPQHFQSRNFLKQNFLIERKEVKDNEDAVKCTGVLNNEPEMEEFFKSFWEEHEDNFEAAGKKELCLIGKIMTTNVTIFDQPAISMMDGGAQVSLIKAEFLKNILESQKLEGTNLKIWPKTRNVVDINGKRVECYGIILLPVVRRGCEAVEIMFHITDAPIGHPILFGTNALGLLGFKIFDAPNGELVEFECVDNKSDSMRVIYSTLVEPYSTKFVELSISPDFDDKNVLITPKEENDRIRVESSVDKGRKGKVITAITNFSHKAVILKQNEEIAAVEELKQIANADDCLGRIVRNRPGPMTSKKRVLGLCAECDKPITAGARQMHMFYHLGKDMNTYRFRCKHAGCKVQDYRKDQMENHQSKAHGKVDAEMMEDRSMELYNMVQEMSMQLLGTKGNTPGPTAVKAQQIYEQQMREMEANLG

SEQ ID NO: 119885 - protein, 85 aa, Heterodera glycines
MSSFFCYGVIAIFPLKSAPCVSGDSGVGKTSLMNQYVNKRFSNQYKATVSARDGVNVEEAFQAIARAALARDSQETHDFPGRFAG

SEQ ID NO: 119886 - protein, 201 aa, Heterodera glycines
SSLKFDGRLALSRGRELANTEMLKQHVEDVLKAEQYAAWHVNDGAKPKGISASGGWFSAFKSLVGTKQLARGDIEPAMEKMKEMLITKNVASEPAERICESVAAKLEGKVIGTFNRVASTLLTPKRRVDILRDILDAKAQKRPYVIVFCGVNGVGKSTNLAKVNSEEEVFPLSVFSANRSLFGSMRMAIACSLPPAIRSGR

SEQ ID NO: 119887 - protein, 373 aa, Heterodera glycines
MVQFIGLKIAGVRSIGDKPQCINFLSPLTIIQGPNGTGKTTIIEALNYVTTGALPAGKMQTFIHNAQIANKARVDALAQLNFRDIKGNKCTATKRMNASATHSGKLSTKSDEFTLRIEDKFGNLKSVSSKISDFNKESVMILLTFCTKFLSQFKMLNLLGVPKAVLEHVLFCHQEEANWPLSEPKELKLRFDAIFEVTKYVKALDHIKKNIKELGMQIQLIDKELPHLENNMRARADLRLRFDETLTALKHNRKSIEHQLKTEREAVDGELRNIRKHLEMATKCNHEFEIIQGQINAQKRFLEGMPPLTHKGTREQLQQQIDELKRSATAREADEHRASVVRQVKSIAFEMDQCKKLEEAYRTKLMQHESRRM

SEQ ID NO: 119888 - protein, 106 aa, Heterodera glycines
MALCRVQQSLEAMAYIYFMHQVLEVFNTDWYTRLDKAAKEMGMSVNKRKEGMALHAIYISTLHDYDEGFFGDDRVLAAAVWRSFFLQLPDVCPAQINRVVRYMRAT

SEQ ID NO: 119889 - protein, 899 aa, Heterodera glycines
MTGIRRKNDEDLDSLAERVITLVRRAYPGLTDHLVDDYAIKHLIRTFDNSELALSLEMGRTPGMTFDHFVGMAARAEATQRATRRMASQNAIQRGRQNEANSTGGFFNNSQTQQTNDNRPKCYNCGKLGHVARNCFRRQAEQNGQMRNFEHIPTTGANCTPIPSNPNTNFMSKPEQNANQHRPQHFQSRNFLKQNFLIERKEVKDKEDAVKCTGVLNNEPEMEEFFKSFWEEHEDNFEAAGKKELCLIGKIMTTNVTIFDQPAISMMDGGAQVSLIKAEFLKNILESQKLEGTNLKIWPKTRNVVDINGKRVECYGIILLPVVRRGCEAVEIMFHITDAPVGHPILFGTNALGLLGFKIFDAPNGELVEFECVDNKSDSVRVIYSTLVEPYSTKFVELSISPDFDDKNVLITPKEENDRIRVESSVDKGRKGKVINAITNFSHKAVILKQNEEIAAVEEVKQIANADDCFGRIVHNRPGPMTSKKCVLGLCAECDKPITAGARQMHMFYHLGKDMNTYRFRCKHAGCKVQHYRKDQMENHQSKAHGKVDAEMMEDRSMELYNMVQEMSMQLLGTKGNTPGPTAVKAQQIYEQQMREMEGNLGVRKRRRPEYFGCNLLSANINNNVISRSSGLPIYDSANRRVEDLECRLCNKFILNRIKGFHILWHLNTDLNIVRYGCKHCNFKHDRPQSVVAHGIREHGDEASCEDLLYNFEDELKQMSKACFGVERLFEKEIRRRNRLERFARCSTENSSAGRAEDDDNYQHGNNESKLSQQIVRRRSQQHIMNLRVSLKSENVGRDWTPKEPDFHNSHEAPMDNRLRFAQEIKDSIRDCYPQLFIDAPIPTKEDIEKLRDSLNLSDQVLVCDKDEEGEEGEREEDGEEAAMDKDHANEEEEEAETR

SEQ ID NO: 119890 - protein, 293 aa, Heterodera glycines
MPFVSDSSKARCRVNQPQNLNPANLAISNEHVPTPGPGGVHGGAISLEDAEAAAEEEVAETPAVHGGGVATGRMKEEADEELEEEEVEEDGEEEADGEEAEGDGGEEYNSNGETRRRKRNARRKTATRQRSDREESGVASAAVRRNLRQQRQMLREAVEQAKEAGTATEYHGVLGRKTLLWVNTLIDEDLLEADLSSLAFARISALPFAPKYSPPPLVIAVNTEVNPTDPEAGTWELPCGFFKRNRPPREKARLSRGPAAAATNGGEHFGEENGRGRGGYYADNQARYAQPQM

SEQ ID NO: 119891 - protein, 132 aa, Heterodera glycines
VDSKTVKAQIWDTAGQERYRAITSAYYRGAVGALLVYDIAKHVTYENVERWLKELRDHSDQNIVIMLVGNKSDLRHLRAVPIKFLLSPKTDEAKAYAERNQLSFIETSALDATNVEDAFTNILTEIYRSVST

SEQ ID NO: 119892 - protein, 102 aa, Heterodera glycines
MKLLRLRSYLHFSCNLHVRNLTNLSKFGTYNEKAIQLIQQHYDEATSSSHQFVDSPSQEVFRMVLPPPNVTGNLHIGHAITVALEDAICRYQRLLGKKVVEE

SEQ ID NO: 119893 - protein, 92 aa, Heterodera glycines
MCSWTQQMGFPLVSVEQRVLEGDRRELRLSQTRFLADGGRDEANNSPIWQVPFSVATAADPTQAKAKFLLVKVEDKFILDGVKADEWVKVNE

SEQ ID NO: 119894 - protein, 49 aa, Heterodera glycines
MASHTAGIQQLLAAEKRAAEKINDARKRKAQRLKQAKQEAQAEIDQYRH

SEQ ID NO: 119895 - protein, 181 aa, Heterodera glycines
MEHISKIIRNAYIRIFQILRVLKSREIKTLTAAYKTFVRPQLEYATEVWNPNLKKDIDKIERVQKFFTRKALRKCGFVYKKYGERLKITGLHKLEERRKINDLTTAFKIIKGFTSLDAGKSFFFSERPRRPLLLRVKRHTAKTQNNFFNRIVKSWNNLPVVAVQINKAKEFRGLLKAMSSE

SEQ ID NO: 119896 - protein, 203 aa, Heterodera glycines
MVADVIRTSLGPRAMLKMLMDPMGGIVLTNDGNAILREITVKHPAAKTMIEIARTQDEETGDGTTSVIILAGEFLAQAEQFLEQSIHPTVIIHGYRMALEDIIEWTEEKFRFYFGVDESNTFSSSPFSKPVDLASESELTTVVKSCLGTKMLAKYMDLAVNIALSAVRTIDVTNNDFREIDIKRYCRIEKIPGAAIEDSNVVK

SEQ ID NO: 119897 - protein, 47 aa, Heterodera glycines
VDIGSIDLALLNFTSFEGATKRNRPNVKVGDLIYGLVILTSKQLEPE

SEQ ID NO: 119898 - protein, 224 aa, Heterodera glycines
MYVAIQAVLSLYASGRTTGLVLDSGDGVTHTVPIYEGYALPHAILRLDLAGRDLTDYLMKILTERGYSFVTTAEREIVRDIKEKLCYVALDFEQEMATAASSSSLEKSYELPDGQVITVGNERFRCPEALFQPSFIGMESAGIHESTYNSIMKCDIDIRKDLYANNVLSGGTTMYPGIADRMQKEMTALAPSTMKIKIIAPPERKYSVWIGGSILASLSTFQQM

SEQ ID NO: 119899 - protein, 129 aa, Heterodera glycines
SFRHKKTNTYLKVSSLFLPRKNMRTLLVGTSTFKASMMLNEDFDLFGDEESDDEEKKRITKERLKAYAEKKAKKPGPVAKSNVIYDVKPWDDTIDIKEIEAKVRSVQCDGLVWGASKILPVAFGVQKLQ

SEQ ID NO: 119900 - protein, 442 aa, Heterodera glycines
MEVSPKSDSNAFDPKHRKKTCTISKQRQPEKGIRQNYELNKFERRNDSLFGFYKKQRIVPDSEWDRFCEILATELPSSFRIQRSLPERDCLANFLEQHFFKQIASIAATSESDGVGIHPPKSVPFVPYAYQTKMPRSMLRRHPILKEFHEFLVNETELVRINGHYNEGFVLANDSDYKRCYLLVRQTLKRMPTANVAVLEDEAVIAQLLRKSNGTVELVDISDRLKELKRMPGISEWKVFDKEMNEVRAVDDVRAESKRLFKPSMFPPTLEEASQMHLERCFRILPHLHDSGGFFVALLRKKGPKSENDLQRQIEGTNAQMKSGPPSFRKSTAKRARLSNKEDPFIFLEENGQRDDRFVSELDTHFGISPSELPHSNLLLRSHNTERKKEIYFVNDAIRDFLRFNAKRFRIVNAGVGVLKRIVSDKVAQCPYRLKQDVMGGD

SEQ ID NO: 119901 - protein, 238 aa, Heterodera glycines
PVKKVSSGVPQGSVLRPLLFLIYINDLPDALPSGVRIKLYADDVKLYISDPEIMHKALHNLSEANKWQIRILIKKTFVLHLGNKNPKEIYKIDGNIINVVDTIRDLGINIDNNLQSSNHVTQIIKNAYLRMRSLFRIIKSKSSRIWIILYKTYVRPLLEYAPEVWNPSIQKNIKIEKQKYFTKRVLFKCSLPPIPYQQRLEYLQLPTIESRRKLSDLIMAHKIIYGNFFIKTKSDLVN

SEQ ID NO: 119902 - protein, 123 aa, Heterodera glycines
MTYDLETAERAAYAPFFGYIGAASAQIFTVFGAAYGTAKSAVGICSMGVMRPELIMKSVIPVIMAGIIGIYGLVVAMVLKGKVTSASNGYTLNNGFAHLAAGLTCGLCGLGAGYAIGIVGDAG

SEQ ID NO: 119903 - protein, 203 aa, Heterodera glycines
MINIVDYRDSCASTDEEDDLFFHRVSSNQAQENNDDDSESEFIKILEMCRKHREFSAAKMGEDSQNKPRSLNKRDKVFDSEYYSLPAIDQLNIQVKEETEFKRFGVVDSHINFLAKIKPDKDTPHLGYETILFNHDKKPIGEIFEIFGTVTDTLYALRFNDESDAVAKLPVGEVIYYANSDNAMTKPVFPKELAKYLLVIASC

SEQ ID NO: 119904 - protein, 609 aa, Heterodera glycines
MTEEEMERYFQERHAAQVATHQGDMDEDAYDDITQNGLLPSTKDPNLWIVKCRLGEEKTTCLRLMRKYLTFVNTDEPLQIKSVIVKEGLKGMIYIEAFKMAHVAKAIEGISALNQFKITSKTLYKDDLAQVDWVDISQNRVNLKLIPRIDYTRLRGALRSQDDRIMKKKRRPLPAPFDLDRIKLAYSELVLCSMYSLGFRSIGGEVTNDGDFYIFEGGHYRRGFLYKSFPMNAINWNYFSFKEPLTLNASELRKYFKPGDHVRVIAGRYEGDTGLIVRVEDNVVIMLSDLTMGEMKILPKDVQLCAEVATGVERMGQYQYQDLVMLDKETVGVIVRLERENVEVLSMHGKILRVNPQTIECKKNSRFVKALDSQKNTIQAGDTVKVVEGFLARKKETEEERQGEIKHLFRNWAFVFSRKYPQNGGMFVCKARNLALIGGSKASESQINTTILDNSQLMSPRPNPLESPRTIHGGMTPHSGSSVVGAQSVRGDHGFKGLFLDGHLFLLIQIFLAPSVVGSIATSATGVGRQHTVNFDINKVMEVGGAVPRELMDTAGAMTPGTATIGGRTPMYGGAQTPMYGGAATPMHDSCNQYLYYSNSEFAELFQRF

SEQ ID NO: 119905 - protein, 148 aa, Heterodera glycines
MDVPRQQLTTYRCYNKEELLMIRESNYCRTRPVFLLKDFDNDDGLFSPDKWLQHKWKCEGVENRVRRKAASQTSAGSGGGGGSVSGNSTATVITPQQETDKQQANIKAARLRRGASTTSNGMDFKPDFVGAFGMGERSELSEWAGDDN

SEQ ID NO: 119906 - protein, 224 aa, Heterodera glycines
MAVGKNKMGKKGAKKKAVDPFTRKEWYDIKAPAMFTHRNVGKTLVNRTQGTRISSDFLKGRVYEVSLGISSDFLKGRVYEVSLGDLNSTDADFRKFRLICEEVQGKICLTNFHGMTFTRDKLCSIVKKWHTLIEANVAVKTTDGFTLIEANVAVKTTDGFLLRLFCIGFTKRNANQIKKTSYAKTSQVRMIRAKMVEIMQKEVWSSNLFPCYVVSMSSLLCVSS

SEQ ID NO: 119907 - protein, 72 aa, Heterodera glycines
MNPPNGVLGPKESVNVAVSCDAFDPGSEDTKGDRVTVEWTNTPDPAATAFKLEWFQGDGMVRRKNLPIEYNV

SEQ ID NO: 119908 - protein, 780 aa, Heterodera glycines
MLLHNQRLVIIDVSQSVEHDHPHSLEFLRMDIGNVTRFFKSKDAAVLGMKRLFEVTFTLQAIVDPLIDDLAFEQILQNERMDGPLPDDMLFMKAYIPHKLDNITHYERDYEMEKRGIELNNPFQKTIGRTMDVKKSEEEDFCGNDEHLDGLDSDTNNEEPFESSEEQSDVSDEGENDDKQLKKNKKTVYQKYVRVRGESSIIIMDGGVTRSLYIGRDKTLEVLKRKEAVERELRAKREVKIREQHERMERAAQLKEAELRDRARMKQQRELERQKAVLDRRCAQMEQLNARKMELLKRTHHGSSRIVTLNQAKKPVYAFGSSTPRKLAFLENIQQQQRDSGGSRNSPMGMRGSTPSLAQGPSNTAPTTSRFQNPLSLDGRAGGSSIMTRSVVGALGNGIGTTPNRKNNFNKPPAQPTKQTPNSIKKQRKMANQGMIQTNEGMLTAGQNITKEVQQEKQNSPTLTATNKTNEGMLTTEQNIINEVQSNEGMLTADQNIINEVQSNEGMLTADQNIINEVQQEKQNSPTLTATNTSFYTAHESSSIGEVSMYEHVPLTENEPIITPPKSTTPPVLIVIPNQEEKEERRRHIKELLARTRQEANGPPNAQNNGMTNVNGESSVVPSTTPSLPISASNPLLPQRDASALVQDINAKYLHKFQKQQQKDGEMTANSQANPRNSTNLSKELDESGSADKEGTFCLPGQAITAFHSISFNTNLLLKVISANDQFSHMASLTIFSKNEEERDERILLKQHPSPPDDPQINGNEINGKEFHPPEPTNAQ

SEQ ID NO: 119909 - protein, 215 aa, Heterodera glycines
SSVMFYHDLHDNENSHDKELKQLVQMDDLAIPKFVMPPLGIKPKKFVRKHFGPNSRLPMAQFPKKFVRKHFGPNSRLPMAQFLKGTTTLSFVYKPKTPQDKGGVIVAVDSRATGGTYISSKTVEKIIPINDQLVATMAGGAADCQYWTRVVSKYCNLFELREGTQILFELREGTQISVAAASKYFANVMYDYRGQELVVSFVAVHFDVVQWHFKH

SEQ ID NO: 119910 - protein, 161 aa, Heterodera glycines
MDKDDAKQFEEYRARKVAMITGISGQVSFDLPEYTAEVDAVGTLRLLDAIHACGLTRLVRFYQASTSELYGKVQEVPQRRLPSCIPIGLWSITARPTKCTPAMAFCSTMRVREEVKQKCKDKSNFNCLGETFVTRIGKGNGGQRHRTDEEESDGIDAGPMD

SEQ ID NO: 119911 - protein, 506 aa, Heterodera glycines
LGMLSSFPLLLSLVGLIAVHAEVFFKEEFSDDSWTDRWVTSKSKDDYGKFELSAGKFFGDKVRSKSKDDYGKFELSAGKFFGDKVRDQGLKTSQDARFYAISAKFPKKFSNKGKPLVVQFTVKHEQNIDCGGGYMKLMASDISQENFHGETPLMASDISQENFHGETPYHLMFGPDICGPGTKKVHVILGYKGKNQLIKKDIRCKDDELSHDDELSHLYTLILSPDNTYEVQIDGEKVESGELEADWDLLPAKKIKDPDAKKPEDWDDKEYIDDPDDKKPEYIDDPDDKKPDDWEKPEHIPDPDAKKPDDWDDEMAKKPDDWDDEMDGDWEPPMIDNPEYKGTWKPKQIKNPNYKGKWIHPEIDNPEYQPDDDLYLREDWGAIGIDIWQVKSGTIFDNILVADSVEDAIWQVKSGTIFDNILVADSVEDAKKHAADTFDQLKEAEKKQKEAHDEEERKKFEEEEKKRKEEEEEKKRKEEEEKKPKKDEEEVEEDEEEKKEEEHDEL

SEQ ID NO: 119912 - protein, 268 aa, Heterodera glycines
TEGKCVYKDHQVFSQELPEAAPPGHLPRNIDVELPEAAPPGHLPRNIDVIADDDLADCCKPGDRIRVIALDDDLADCCKPGDRIRVIALFRVLPNKQAGMSTGNFRSVLIANNIQLLSKEMEPSFEPEDIKEMRKMSRHKNIFELLARSLAPSIYGHEEVKKAILCLLLGGCEKILENGTRLRGDINVLLIGDPSVAKSQMLRYVIHTAPRVIATTGRGYVIHTAPRVIATTGRGSSGVGLTAAVVHDSDTGERRKAGAMVLADRGIV

SEQ ID NO: 119913 - protein, 683 aa, Heterodera glycines
MKPSVKDLLDRVLDEYNHLQQQLHNVRVELEKSQQERDTLHRYSLMRHPFGTFPAFRLKCALPFEHVIPLLPQEHQAPAVQAIERAKTINQQVVFDFIFSIWALRLGCYFDCQRPSTAAAAICFDSARAWFHDESDGIWESDGGDDVSEMRRQKHYIRIIMNCRGIKPEDAIQAAAMFNNLLKNPMLGATAAGLPPPVGLNGPGTSVASNVGPMVAPNSTSLPPNGDDGPTPTTQPGRSSSALNSSSGAGIGHNRPRSGSRTSTPNSMAAKRTKLEPEEGDGELEIDVSWCNVRTEELLEFQVQNDDASSSAAPSHHTNGRTSQPPRQNHSVKDAERDSASASSSRDSTTPRSGKQQALTVLPCHSFQLSPCQLSSTPGSSAAGFASIMPTADANMAHMFLNTAFGGHFPGNLNRQMFLGLGAGNAPLGAAAGMPTANGKPAYAFKVSQGEPNLMPVQFPSDASQGPEVPKGLKRIGDLPHGDVVCAVTMARNGRHVFTGGKGAVKMWDIGERIGLASSAGGSISPSSSTIADGTNGRVGSAEPWTPVNTFPCLKDSYVRSCKLFPDASTLIVGGETRTICVWDLNSEKVKAMLDCDAEACYALAISADCRLCFACCSSGSIVIWDLQSEQKVAQLDGHTDGASCVDLNGDGLRLWTGGLDNTVRCWDIRERSELSKNVLESQ

SEQ ID NO: 119914 - protein, 345 aa, Heterodera glycines
MYADDVKLYYAHENDDHSNQLDKAIEALEKWSKINGLEISTEKCFVLYLGKKNMKKEYFINSKKISESDNVRDLGIIIDSKLNFSEHISKIIRNAYLRSFQILRVLKSREIKTLTAAYKTFVRPQLEYATEVWNPNLKKDIDKIERVQKFFTRKALRKCGFVYKKYGERLKIAGLHKLEERRKINDLTTAFKIIKGFTSLEAEQNFFFSERPRRPLLLRVKRHTAKTQNNFFHRIQIHLALKQKHNARLKDVKTNEILAQIQSNWRRFWKTRHATYKYMPNDLYEHWAAVQGQWQDLTFLARQLVQQLVTDKYNVAKYFQHIKQLLPERNLFYQLAEEHAKNITR

SEQ ID NO: 119915 - protein, 253 aa, Heterodera glycines
NNNNNSHNNNNAANKRFRTHLTPMQVQIMKSLFNDFKTPSMAECDALGQKIGLHKRVVQVWFQNARAKERKCAGGSCTGSGAGWCHCHLCGVEFDARLSLQEHIFGIEHVERVRERASKCAEFAPASLRHRRHSRQTMPAPIILQALSHLCYDPTVFGTPVPALKIPKCVMQQILADMAQRREHTLFTQDGLELGELAAKVDADDFAAAGTTDLEVGWGCTQCGNVFQQSEQLQNHQKLICVGGRRVPAGPNP

SEQ ID NO: 119916 - protein, 115 aa, Heterodera glycines
FDFSNLNKVFKRAAEQIVRLQRMAAELSAFYRTIDRTWVTLERIQFVGACNPPTDPGRNPLSARFLRHVPVIYVDYPGRTSLNQIYGTFARAMLSTMQIRGMAKPLTEEMTDFYL

SEQ ID NO: 119917 - protein, 219 aa, Heterodera glycines
MAVDANFKAYSCILSLLLRLRQACVHLSLTRNAIDIDAFKQDEGETDSDAENLVAKALEMSMAQMSLEEEALERNEEREKDEGQQIERLFEKEHQSTKVNALMNRLDGVVQNGDKCVIVSQWTSMLALIEFHLRQKAISFTSITGEVRTEERQSRVDAFNRTNTGPKVMLLSLTAGGVGLNLIGGNHLFMIDLHWNPALELQASDRIHRLGQKKNVFIH

SEQ ID NO: 119918 - protein, 165 aa, Heterodera glycines
MSSGVMVNSECQNAFQQLSEGKRYRYIIYKIVDKEVIVEVAVSSEDIGSTGTESYDDNSKAAYETFVKDLKERTEGFVDCRYAVFDFKFQTQRPGAGTSKMDKIVFIQLCPDGASIKKKMLYASSASAIKASLGTAKILQFQVSDESEIAHKELLSKLNDKYRDN

SEQ ID NO: 119919 - protein, 299 aa, Heterodera glycines
IMSEDELDKLKGEVDALQTFVNKRLEKALQLQAESKRIFETIRPSINSFNEDYLHFLRVDLDSQSTVLSSDFLKKMEKLNERLKDHHDLWAKQVVFRYDELLVKLDELSAKCFQPSTEFPAKPNLKNLSEKELLKLEEEVRIRQQMYERAKPVFDKLNEWMANWKQKLDIERRQQKIVEQKLPKLLNELCELCNDYVKNFQLNDIIIDGLRADKYAESKMQNYHQDKGVQKAQKQFSNPPLKRSTSNRPATSSTSRRNVFVPRNSCGRAAPRALNPIGEKQQTPTTSRKEGETKHATRK

SEQ ID NO: 119920 - protein, 39 aa, Heterodera glycines
MEGHGFLYSLEIENFKSFKGKHYIGPFKRFSAIIGPNGS

SEQ ID NO: 119921 - protein, 148 aa, Heterodera glycines
KLDVDAFDPDKFIDGDEAETPVGQGPDEGQVRQFLQANQNVEALKAALSNAPLRTKNQVRKGHHETAEWTDWQMKSQEMAGNAEFALKDKTTSLVVRVLTSFKSADIEAALKSLSAEEMDLLMKYIYKGMELLPDGQNCASLLAWHSQ

SEQ ID NO: 119922 - protein, 189 aa, Heterodera glycines
LQFNAENDESKQQKLGSIGKTIPTKQQRQSAHLKKGVGKESGETADNASIGGKKKEGDKEPEPERPMEQFYNKLKAVFAANRVPKECLNDRKRWPNEVLKIVLKELGDETPKDILAKELWIYAATSDDWWMNTQNFARTAAVSSMLGALIGLGDRHLDNVLVDLHSGQIVHVDYNICFGKGRTLRVPET

SEQ ID NO: 119923 - protein, 266 aa, Heterodera glycines
GIESCGYHDLVEELAFFNEVEDGSVLRKEEIPQEYREEAKILRQELLENLANCDDVIAECYLNLANCDDVIAECYLNEVTPSVKEIKEAIRRATIKRSFVPVLVGSALKNKGVQQMIDAIVHYLPNPSEVDNFVNLYDIDAIVHYLPNPSEVDNFVNLYDKNDNAERKNDNAERVLMDPLRTANSEKQKPFIGLAFKLEAGNFGQLTYFRIYQGRLVKGAGNFGQLTYFRIYQGRLVKGDTIYATRDGRKVRIKRLVRMHANTMED

SEQ ID NO: 119924 - protein, 63 aa, Heterodera glycines
CAYVKSDVVEALDYFAGPLELGPNGVEKILPLGDLTAYEKELISKAVPELKKEIAKGVNFIKQ

SEQ ID NO: 119925 - protein, 104 aa, Heterodera glycines
RVHKCDQCQKAFRFKSNLFEHKSLHLGSSSRNPFVCPFCSKTCRLKGNLKKHLQVHVTSAEDLECLWKPFSRSVRPQAVVAESPSMPQGTDGGAPAAPPPFGNK

SEQ ID NO: 119926 - protein, 48 aa, Heterodera glycines
MVLEDVKEMWTELPKKGKGKKKSKPVARDRFIPKLFLRGDSVILVLKN

SEQ ID NO: 119927 - protein, 63 aa, Heterodera glycines
MASHTAGIQQLLAAEKRAAEKINDARKRKAQRLKQAKQEAQAEIDQYRHLMSPIAFYFMNPIK

SEQ ID NO: 119928 - protein, 121 aa, Heterodera glycines
MDLPLIKLCMLKVIELDAKLNENERKLLGVAYRKSVTGQRFAWRVIASVLARGKGTKRQLEMVKQLLNKLEREVEERCREILDLLDRVLIKEAADDEAKVFYLKLKADHFRYLAETRAVKN

SEQ ID NO: 119929 - protein, 491 aa, Heterodera glycines
MCEDASMKMLEKECLSLEYYPHLANLCKNSEQNVRVVALRILTKFALVYPEEKVMASKGFKIRLHDDAFSIVCDAMNDLEVKVRAQAANLLGFFENVSESFLDQTLDKKLMRNMTMLNTNVRNTKNALSAGVGYIGGWSTGKKMGEDMPIEKLEDESQSLIPTGSCGAFVTALEDEFMAVRQAAVYSLGKLARNRPVFASACIDHLADMFNDEIQQDATADNRMALHTLLAKSNLADSNCVSQCLKKLLHSLRRFPMDKFSIFGCLSGIGQNHSSLVQPLVNDLLDVHPIFDTPEQSIDDDFCKDYLARLILVLNAASHRSVLCSLIPSYALKHYRYLRRSWPEIVPKILEFDHEKLHQCDSSPFLCPFLAVGPEDKTIEKENDAKTARIEYPDQTFDLHRPRRGDFLRLDSSTVHLQTNVVVSAQRWATSASVIFTPGIISTKSDESVAQRIVGKGQKDSLNQHIMPFASAENIARKCRISFNIHPMQQA

SEQ ID NO: 119930 - protein, 505 aa, Heterodera glycines
LSPGSPLSPTDISVPSIVELRRPSIRMNVGGRSAQLTLEKIRQRADRSRLSQFAEKDHAQRVLECDAFLNGEYYFERSATVFENILDYYVTGKLHRPMEICPICPIRWRDELEFWRIPLTALAECCLHLPSRRIRGNSSRHSSSPPPSSSSSICQGVAFSRVRLILWTFLENPRSSAAAKVLSVVSASFVLLSLAGLILSSMKEFQIKNDEPFYLFNWLPFSCMLFFTLEYLLRFAVIPHKWSFVKQPLNIIFVKQPLNIIDLLTIVPFLLEAFCLICLINFLIDHLGALIVIRVLRLARLARVARIFKLARYSIGLRAFGETMRKSAAELSMLGMFLLTMRKSAAELSMLGMFLLTGIMLFSTAIYFFERGIMLFSTAIYFFERDEPNSKFYSIPSAWWWCVATMTTVGYGDLVPVTTGGKVVAAIASVCVVAAIASVCGIIVLAFPISMIIDKFAESTGHGQRVFDETVAQGEVPLEANKSNVLLGSPTGRGMSRRRTKSRRY

SEQ ID NO: 119931 - protein, 139 aa, Heterodera glycines
MSEKFVGKWNLESSENFDDFMKEVGVNFLTRKAAGCVKPVLEFEVSNAGEHWKMTSTSTFTTWNCEFDLNKEFEVKTADGRTVKTIFAYENGKLTEKQSKLKDDEKDSYYERYIDESGKLVITMEAGSVKAKRVYTKAA

SEQ ID NO: 119932 - protein, 189 aa, Heterodera glycines
NDYDHVGYTLSGDKIKKDAIKTDEIDAFLQKEEDSDYWRKVFDRQSGQQMALTDQQVEKLNAIADNRFPEIGYNPYPPFYNPYPPFLDIFSSVREIHPISNRPPDKRSFVPSADERRIVGRMVHAIKMGWLKSPKAQKKEEPRLYDLWDDEGDEQRKSKSQMARVRMHLPAPKVSPPHESYPHESYNPP

SEQ ID NO: 119933 - protein, 237 aa, Heterodera glycines
IKPELIRDRTGLSLDGRMVVAQLAWPTEWVVLVGSFLSTFGAALQCLCSAPRLLQSIAPRLLQSIAKDNVIPFLKRFAKVTKSNEPFFGLLLTTLIAELGILMGAMDPFFGLLLTTLIAELGILMGAMDTIAAVLDFFFLMCYAFVNIICALHSILGAPNWRPRFVYYHWSLSVLGAALCLFIMFSTHWQYAVFSIWSLSVLGAALCLFIMFSTHWQYAVFSIMFCFAIYKYVEWKG

SEQ ID NO: 119934 - protein, 126 aa, Heterodera glycines
QLLPTATNLQHDDGTDFPRERIEAFSNVAIVIGDLISDAVLQIQNFSEHPDAISMFFELERKDLAFVKGESQADIEQVDGKSQKYNGFLINLIDSPGHVDFSSEVTAALRVTDGALVVVDCVSGFI

SEQ ID NO: 119935 - protein, 77 aa, Heterodera glycines
YNEPPEAKLPKLRWRLYPFKGDDTLPVFYIHRQSAYLIGRDRKIADFPVDHPSCSKQHAALQYRSLQYERSDGSIGR

SEQ ID NO: 119936 - protein, 111 aa, Heterodera glycines
MQQLSKKSAWVSKVSGELLLAKVKQITTIGLQRDTCVKVKISKNNFYEYNRMFFMSSAYEWSLDPESKCRVGDVVLIRRLSEIHRPSKTVQYAVEKARNSSFCRHAINKWH

SEQ ID NO: 119937 - protein, 170 aa, Heterodera glycines
LVELSKAQDIEAGDGTTTVVVLAGSLLDAAEKLLAKGIHPTTISDSFQRAATFSEKVLEEMATPIDINDDDELVKLAMTSLNSKVVSQHSHLLAPMAVQAVKKLMSSPEDSSVNLKLIKVVKKLGETVEESQLIEGALIDQKSMGHGGPARVEKAKIGLIQFQISPPKPN

SEQ ID NO: 119938 - protein, 83 aa, Heterodera glycines
MRRKFTRIASWVDIYHFIYIIKDFDADELLKVIIELVRLDRDWVPAKSPASLYIRPTLIGTDPVSPVDPPRSVKMFVLTGHGK

SEQ ID NO: 119939 - protein, 231 aa, Heterodera glycines
FPGIPLMLITLNELGKFLYKTINEFIAMLNNRCKMLHKFCKRFKKKHWKKEGKSGDEEMDEEMEKDSTQNASDFGILMEEATESEEENGEEEEEEEDEHGIPRMHVMVAIVTTFAWIFLCAALFKLWEEWTYWNSLYFMFISLLTIGLGDVNVHRRDLMVFCFMVFCFIFVIIGLSLVSMCINVIQSSLEDFYRKMLMKILADYQASLNKGNMYGQFLGIIQCWRENDPDP

SEQ ID NO: 119940 - protein, 346 aa, Heterodera glycines
LTKASPFPGVFIVLPQIVPTVVHTMFGPVKGFTDIDGANSSLVDVFLGIPFAQPPVGHLRFEKPRKPRPLVTHWDGILDGTEHRKSCVPHARPDWQNELLGQYSFSEDCLYMNIFAPHGAEEQLLPVLVLIHGGAFSIGSVRQFSDHRDIGAKFVSHGIVVVAIQYRLGVFGFASSGDPQMPGNFGLWDQLAALQFIRQNIRRFGGNPEDITLFGHSAGAASVSALGISPHSRHLFQRAILFQRAIQMAGSVFSSFLLGAHVHRLTLGLVETLDCEEPPKECLKRKSVDEIHAAVERMNCCIEGPAKVRLGNCCIEGPAKVRLGPRIDGDFFPRDIPSLVDTSPKK

SEQ ID NO: 119941 - protein, 83 aa, Heterodera glycines
GFLIYRVRIRRGGRKRQVTKGQTYGKPKTHGVNQLKNTRSLQAVAEARAGRRLGELRVLNSYWVGQDSTYKFFEVILVDPSHK

SEQ ID NO: 119942 - protein, 110 aa, Heterodera glycines
MAGIAAGRLTEERKAWRKDHPFGFIARQCKKEDGTLDLYNWICAIPGPKSTIWEGGLYKLRMIFKDDFPSTPPKCRFEPPLFHPNVYPSGTVCLSLLDENKDWCATHRGF

SEQ ID NO: 119943 - protein, 360 aa, Heterodera glycines
NNKWKKKLDCIYIDFQKAFDSVPHELLLYKLEKIGIRGKLMWIKDFLSNRTFRVKIGDDLSSSKVGSGVPQGSVLGPLLFLIYINDLPDALPSGVKIKLYADDVKLYISDTEIMHKALHNLSEWANKWQIRISIKKTFVLHLGNKNPKEIYKIDGNIINVVDTIRDLGINIDNKLQFSNHVTQIIKNAYLRMRSLFRVIKSKSTRIWIILYKTYVRPLLEYAPEVWNPSLLKNIKKIEKCQKYFTKRVLFKCSLPPIPYQQRLEYLQLPTLESRRKLSDLFMAHKIIYGRTEIPLKYSNLLNTLTFPFIDLTRNINAKKPFAGRVTKIWKPLYKRIIEINSLNQFKNKIKTISIPVKTEK

SEQ ID NO: 119944 - protein, 355 aa, Heterodera glycines
MRPDEHRFTAADSPYFRSNSSFLGIGMDKSVRIVENGLKQGDVAGAKAAMVVQVQKTPFHLVESMLEKFEKVVPRWNGGLLENGELAHVSRMLRGLYVHTTYNQQAIQRFPISAFSPTNAKTEIMMVEDGQITVEQYYARRYDIKLRSPIFSGAPCAPLVIRRERGKSTHYPMELLKICDYQRVRSAQMTPETHQEMIKACAIPPFLLRRQTDQLTNVLALNQSDHLARASIRFAERPMEVPARILNPMKLKYADDKLEMPNDTCRWRAGRYLLPAQINSWCAIALVDNSRDNNISLANWRDFVDRYRQMMQMKGMKVLAPSVTEVYNVGNFDLRDRFTRMQNSGVEFVLVGHPK

SEQ ID NO: 119945 - protein, 126 aa, Heterodera glycines
MNKTDDQLAECREIFCYFDSKGDEKINVKQVEKGQWENTRISFEEFVPIFQTVSKSRAQYTKDQFVEGLSHFDREGNGTIAVAELKHLLTNLGERLSEEEVEQLLAGHDVANGFVSIDSFIETVLR

SEQ ID NO: 119946 - protein, 132 aa, Heterodera glycines
MTEEERRNYLRMNPKIITNQQNKGKYKFLQKYYHRGAYFLDKEDDVLRRNFAEATGEDVFDKSVLPKVMQVKNFGKASRSKWTHLTAEDTTDHQGVWATPTPLSAKFVAKHAAGMKNVFEKPSAKKRKIGGD

SEQ ID NO: 119947 - protein, 105 aa, Heterodera glycines
MDKEYMSKIVTNAWTFVNDSLGTTLCLLWEPEVIAIALLYMSFKMERMEEQQIGRTFHFDASTEWWNLYVQNLTVPMMDDICHKVLDSIAPANGEDAPMANGTKN

SEQ ID NO: 119948 - protein, 249 aa, Heterodera glycines
LLFKFASKSIWEQICCSTTASRRRRADGTSAIPTQQCTSCVQLQCPPGPPGPPGVAGEDGADGLPGRPGKPGLDGLDVPLEPEPSYLDGLDVPLEPEPSYPCVICPAGPPGNRGPQGEPGRPGPCVICPAGPPGNRGPQGEPGRPGPQGEPGPPGLPGRPGKPGRVGDAGPLPGRPGKPGRVGDAGPPGSRGEPGEPGIKGPPGDDSIGGTPPGDDSIGGTGIKGPPGPPGQNKKCVDKWSITCQIKAR

SEQ ID NO: 119949 - protein, 139 aa, Heterodera glycines
MLEMNGVGNSKDYDTKVKAILEQCRISQKLLNYTEHFNYPYVSEVTYYEQLLKIGQGTFGEVFKARCKRTGKLVALKKILMENEKEGFPITALREIKMLQRLRHQHITELVEVCTSKQKSGKEKFCFYLVFTFCEHDLA

SEQ ID NO: 119950 - protein, 93 aa, Heterodera glycines
MGLSNFQSSLQQFEKAMKIANANADKLLELQLSLGLGNLFTLIRDLNKALVFLQNALGILQGIEANHVHAKYKSAILYQLSVILRLKGRYSGD

SEQ ID NO: 119951 - protein, 198 aa, Heterodera glycines
IKKARKIEKMAKFRVKRLFQLYFHIFSAFQLLLKDLCSYYDYNEFLMEKFMELFPTGAELLEFLDLLEFLDSNEQPRPVTIRSNPLKTRRGELAKALISRGMNVDPAAKWTKVGLVVYDSQVPVGATPEYLAGHYSIQGLSSFLPVMALAPQPNERILASLKGGGGWESINLAILTSRKMVNSCNNKLLAVILQNSFF

SEQ ID NO: 119952 - protein, 190 aa, Heterodera glycines
GRGGQQQRPFRSVLCLPTLAETEEKRKKADEEKRKRTDQTKRRVFRLQKGETETDSPVSGMFIKVKPTLGMAEELRQATAELDESALFVNVTEELRQATAELDESALFVNVTEETREAINAIPNVIGESICALCKIRFGDVFRLAMHKIRFGDVFRLAMHKCPRIRHEEYRCDECEKVFGCPANLASHRR

SEQ ID NO: 119953 - protein, 126 aa, Heterodera glycines
MCNEDDGIDLKSVALDEAFVARQLNETNWIVANCTTPANFFHLLRRQIHSPFRKPLIVFTPKSLLRHPLAKSPVDDFLPGTSFRRAIPEEGSASNNPAAVERLVFCSGKVYYDIFDERRKQGLEDK

SEQ ID NO: 119954 - protein, 300 aa, Heterodera glycines
GIHPSDIKRLRESYIGSCGISWGPELERVKGIDQKVEKIYTEAKKLVPMSFTLASVIHCKRSQLILIETGSRELNRLLGGGIETSSITEVFGEFRTGKSQLCHTLAVTCQLPVDMGGAEGKCLWIDTEGTFRPERLLAVAERFKLDGQAVLENVFKLDGQAVLENVAYARCHNTDHQMRLLMEGASMMAECRYALVVVDSVMALYRTDYTGRGELSARQQHLACFLRGLMKLAEEFGVAVLVTNQVFGVAVLVTNQVVAQVDGNAGMFQTDPKKPIGGNIMAHSSTTRQNFQNFKKRGGK

SEQ ID NO: 119955 - protein, 286 aa, Heterodera glycines
MVHIVQTLRNTKQSDNGGKTQQMVEATVAENGQQQTQKKHSDSAGSSTSSVVPCPAELALCRQAVLVNSDQQQQQQLHDYEQRPVIVGYDFNAGIQWEALLDSFLTTGFQASHMGIAIQQQFIWLLIQLSERIRDFHYNEDQTHAQLNRKLQLRDQLYYAISPIFPSTIELFLINDAPNAPFCCSVCGLYIVGSSLNGFGTKRSDLDLCLMITNRDIDQRSDAVVVLSSVMRTLESNQIVAEQNLILAKVPILRIKFIGTFHDITVDLNATTRWPFGHAFDVYYSP

SEQ ID NO: 119956 - protein, 405 aa, Heterodera glycines
TIQNLVALAADQFDDGGSTASAKKALPRVRSSTEVLNPQRVIRRRDSICTSTSAPNQIDQTEETHWITQCEQKEGNTEQIGGQRAADDAKAEGKDGGSFSADGNGTHRSPVFATIHQQRQNGVSSSDFAHTFLINPTFFAPLSERIDTEPWQPNRIPYVYQRIVDKFRLSGALSDVEENVEDEHEDDDDEREGNRDYLVLGGSKRFIVVGSATSLLRVLAQYSDLLFLFPQCSMELTMDIVQILKAFNSRTCQLILGAGARQLVGLKMISVKHLDHEGEIKGKMLGLMDRELIGALEEWKLEGKVPTAAFQQIVMQIGKFYSSYSAVMPAELTTDILLKIHENFKLYLRQHLNSRGISPHDSIAYGMAGQDFAYYIENVRALPDCKSFPVDTIGDVIQHKYSLPP

SEQ ID NO: 119957 - protein, 317 aa, Heterodera glycines
MELTRLGDEPTTRWTLLNIRILVESAEVGEGQQMVHPLQINFLHQMVQEKLDTANEALQIAKINRSGKGSEGSSQQYIRVDEYNEKECRLAISYWLRREDGTIHGRLSSHYRMLIFGDKNNSHVGLKIRHHPPSTELPTIDHEQSPSLQRLLNETVLFRCRERLLAVKQLLEAAFRTLSSQPNTKCPSSASPSSTNSEDTAQQFVHQSGHSLLTLSCPLVLIGDCHPDECLTVAVNTFSGAVIARVEVLGQREEIHKLEHQLNTCPTVLLHSSASSLSAFSVSSIGRLLARLRVLVIGERLNRALVGMQATKALSTD

SEQ ID NO: 119958 - protein, 163 aa, Heterodera glycines
MWQSEQITEIGTIVEINERFTPTEVIPKYVMTTSGSASCPTKVIRRQANFPLEHFRRDHQVNVVLKSVQLSSGIKIHPSFILPGNSPFRWHPDIIRPNGTGIACMAVARPDLVMKAIIPVVMAGIVAIYGLVVAVIISGRLEAAGPGYTIDRGFSQFAAGLVC

SEQ ID NO: 119959 - protein, 145 aa, Heterodera glycines
FESLTQTTKYNFDFLVQVLELALFYHFLKLIFSIFHPLPKKTENSVVMAGIVAIYGLVVAVIISGRLEAAGPGYTIDRGFSQFAAGLVCGLCGLGAGYAIGVVGDAGVRGLSQQPRLFVGMILMLIFSEVRRRDGPRILAWGGGV

SEQ ID NO: 119960 - protein, 43 aa, Heterodera glycines
  unsure (1)..(43): unsure at all Xaa locations
VSRALGCLSQLIWARXMGLPLERPKSHSTDGLIKLAAAATAAK

SEQ ID NO: 119961 - protein, 611 aa, Heterodera glycines
MRSNKLWTEIILVVNTVSRHVCHRLTLLSKVAEPLTQLYARMLQFLPDPANQNTQLGPSDRLSWLQIVLELTRIYHSLISQDLPEYFEDNLTPWMEGFLQLLELKLPELEAKSVDLEPNEHDKLRCEICEIATLFSQRFEECFIPYTERFIASINVADFYQEHVRSDLLLGPVNDLPILRGDALKFLVLFRKQLKPEQLIECLRGQNGLLECSIIRFLSSAHVLIHHYVAYAVERLFLMKNPTNPQETLFNASNVPIDLLIDALFDCFQVPQACETHYVMKALMRAFSLIDMITEAVRVPKNPLFVHYIFESLCVLIRRAYSKVSGGLDQHVIPIIELILGNDLSDFVPYVLQIIALMLDQSQSEKQRGIEMSQEAYVRFFPTLLRPDYWLRSANVPALVLVFESFIRCVPQLVFSAQYSDQILGIFQRLIGSKAYDQHGFRLANTFISHLDLNSLEAIQSGIYGMMLDKILLNEMQAMPQTTTYEEKRIVTIGAAKLITETTAFLGPRYAQIIELAVNILEAFEHKTSAVVDTAVQEREETAEVSELEYSDPYCKLSYAQHPEPFAPEIGNIKMHFAQAVLFTVRETNPENFDCLNARVQNCLRAYSSTI

SEQ ID NO: 119962 - protein, 495 aa, Heterodera glycines
SAHLGLGDRLGNLTAEAFRAYGAFVGRNQFWFEVFMAIFTLATLPGLFFLKINLDLYKLFVPLDAPVRFEFESLFVPLDAPVRFEFESQKLYNQIPPGKLDFPPGRPLRSPPTLRPLLLKMKRPPPNRPPTNLKTFRRRGTRETQPKKCTKVKKNSGKRKSKFEGKHPSVPQHNDILRFYVVHRDYENLLHSDTLGKLFMYNLLHSDTLGKLFMYTNEMMKVAMEYDGETWVFEWVFEDFCKRGPAQEQCSNENIWLKHAENLFRSNGTRHNPNLQLSYPVMYLFNRPKDIGNIIYGVNDIGNIIYGVNVTGQKHEIVGARVLTIHWFVAFPLAGNNLAAFLKYREGLNRFWDEKTAESQINFIPHNKAMDDELRLIIETAVPFAVPKAMDDELRLIIETAVPFAVPATLQLMLFVYLTNLASDVRKFVYLTNLASDVRKSKPIESKPIEAFFGVISVCLSLVATFGITFFAGLHFSPVCSTMLFLILAVGVDDA

SEQ ID NO: 119963 - protein, 208 aa, Heterodera glycines
TLRFAAVRTISMDYPQAVISCNVDLEQLITDSNRSIATLAISIATLAITTLLKTGAEASVERLMKQIGTFVSEISDEFKIVVIEAIRSLCHRYPRKHATLMNFLASMLRDEGGFDYKKAIVDTIITIVEDNPSAKDLGLSHLCEFIEDCEHAALATRVLHLLGREGPTTANPSRYIRFIYNRVILESTQVRAAAVTALAKFGAECGAA

SEQ ID NO: 119964 - protein, 272 aa, Heterodera glycines
MANILYFFPSVRPLFHFVPQESDFVEQQMRSQEVFLLRARDRHREKLCLLEKQFLEQKHQLERSMETALWELEEAQLAEKHALLTQQFRRTHMLARHAKEQEHVRRINQSKEEQLLRALTADRKALPKVLRNEAKTRTMMFRKSLEVDLPGESDTWTAKVRMFEEREKQRMRLKMEEYDQKCKRKLAQLVERNQEVMRELEEIHVGKAFKNATKNCQCFLFVVQNEKRNMLLENERTKLAEYEQEYQQLLAEWKASLPARKAAPNIHHIFND

SEQ ID NO: 119965 - protein, 210 aa, Heterodera glycines
MNAGSIDNDHDHYHNSIKNSSPKLSYDSVNCWSMESEGSSVNNDENPNPEMDDEMMEEEAAHHEDDQVANILDLKTTIISFNPIAAGLLECVRDSDPTDESLQRVVQLLDSFTISGVNGVHVCMVFEVLGCNLLKLIIRSSYAGLPIMLVKRIVKQVLEGLRYLHDKCHIIHTDIKPENVLITMSHEEIKKLAEDAILAGKTGRDMSGSA

SEQ ID NO: 119966 - protein, 499 aa, Heterodera glycines
YLIVMEGHGFLYSLEIENFKSFKGKHYIGPFKRFSAIIGPNGSGKSNLMDAISFVLGERTNHLRVRGKSNLMDAISFVLGERTNHLRVRKLGDLVHGASISMPASKTCCVRDLVHGASISMPASKTCCVRMIYRNPDGTERTFQRTTSELRVDDNVVNLSQYHKALEEINIFSKARNFLVYQGAVEQIAMARNFLVYQGAVEQIAMQNPKEMTQLFEELSKSAEFSAEFKDEYEKLKEEMHQAEARAQKNLNKKRDITKELREVMMEKNEARRFQTLKEELVIQNRTLFLVQVIQNRTLFLVQLFFAEKSKQFVEEGLEQLRLDLEKKKSDRSEFESDLHEKQRAAKDVHREKQRIEIRLQREERKVLNRRPNVTKSKQQLDHCCERKVLNRRPNVTKSKQQLDHCCLKLDSVRKAYETAKRAMDSQEKTVKEAEERIKSVMGEKAVLEEEKAVLEEELNKESQALQLNLSKEQVSRFLPQRNSAPHLRPGIQKRWNLA

SEQ ID NO: 119967 - protein, 246 aa, Heterodera glycines
MTHPQSVAAHGIREHGDEASCEDLLYNFEDELKQMSKACFEKERLFEKEIRRRNRLERFARCSTENSSAGRAEDDDNSQHGNNESKLSQQIVRRRSQQHIMNLRVSLKSENVDRDWTPKEPVRKRRSGGRRFFGSRGRKPMSRKARDVMIKLREVSMRLGGAQYFKKRSNEAISCEKCGKLVINRLSDHAYSHLEGCDLFKCQQCNLGHFSRETIVRHLKDFHNSHEAPMDNRLRFAQVTIVLTWF

SEQ ID NO: 119968 - protein, 190 aa, Heterodera glycines
MSLIGRGLFDLLSAAGDVFSPGTAIGVSLQLLDALEALHKIDYLHLDVKLENAAIGRAETNESRRIFLIDFGLARRYISQSGRARKQRSKTHFRGTPMYASISAHARADYCRADDIESWFYTLVDMYTGKLPWTHVTSERRTGKMKRLRLSHKPKEVQQRALHALLKKCPPIFYDILLHIVRFMRHFVPL

SEQ ID NO: 119969 - protein, 132 aa, Heterodera glycines
MAREEYCFDATAAAAAEQSRPSATTSTLVQGDGLSSSFVDAIIRKVRQSPVQRFTDEITDEELKQLCKAATDIFRMQPTLVRIQPPVVVVGDIHGQFTDLQRIFHTHGNPPEQQYVFLGDYVDRGPQSLETI

SEQ ID NO: 119970 - protein, 183 aa, Heterodera glycines
TEEAANSANAKVNAMLLDGKKVFVGKFLPRSARDKQIGDPSSRFTNVYVKNFGDAMNSEKLSEVFSQFGEIISAKVMEDDSGKSKGFGFVAYKDHESAARAVEKMNEVSVPGSEKVEQKFTVCRAQKKSERQAELKRRYEQYKAERIQRYQGVNLYVKNLHDTINDETLRSNFESYGNITSAK

SEQ ID NO: 119971 - protein, 103 aa, Heterodera glycines
QVIPGENGPPGEPGPVGPPGEPGPVGPPGPPGKVGQPGKDGAIGPKGRNGPEGRNGPEGIPGPNGFSGPPGPNGPPGKSGEKGICPKYCAMDGGVFFEDGTRR

SEQ ID NO: 119972 - protein, 225 aa, Heterodera glycines
MAKEEAIVCGALEALVPLLAPQTAIPQSGPNPKLQAMVADSLYFLLLDNLQCKLTFLSLQGPRYLVEILKSNPGYVKLFYAVVRCIRSISTCAENKASLIAIGGLELLHRAFNFIDDDKRKLTTLSAIRNLSDVATNLETLAPLVAELVSLIADHNDEELSLLSTQRPPIVKAALGLVRNCSLSNENLKLILSEKNADGETVLSLSVALLEQSGKQLAHELERSL

SEQ ID NO: 119973 - protein, 43 aa, Heterodera glycines
MSGCGKGGKGLGKGGAKRHRKGTRYNIQGITKPVIRRLARCGG

SEQ ID NO: 119974 - protein, 181 aa, Heterodera glycines
MALIHLMALNRKLKLLENTDGNLCRATDERTYKLTTKLCPPPEDPNFTLCSTFTKSVWQKDYWQKQGAIDVWMKFFERAPNRAEMEKEFFSQLDNPLLGKAFKLAIIGEWLAANSLDQGSYTPTNSELLEFWVSKRAPDRLLACEHGVVDYEIEGSKVKTNVLFEAATTAGNVKGQNDGSN

SEQ ID NO: 119975 - protein, 344 aa, Heterodera glycines
KDETRVVLRFPSFGDDPSADSFIHANYVRSPVLFNDFIVTQAPMSNTISDFWRMVWQEKVCYIFMLISRKESKRCAPYWPKNSKPLALHGLTISKPLALHGLTIQNEGIETSSRDPFFRVTKIRIIGPDNTELRLEHWQADMNNSLRLEHWQADMNNSENVEAPLRLLRLSRSCTAPTIIHDHLGISRAACLVAAEICICQLIRGGPIQYIVQNAVHYLRSFRPFSVETPMQYIFIHRVVQHFIHRVVQHFIRPFVGIPSGFEQDYIRWLDERSQRLFVDDFDREVSNYRLLSRLLSPRVDPDMLPLVRRRERPELRREMHAPVGELPLPADGMRTLRRYAIQS

SEQ ID NO: 119976 - protein, 277 aa, Heterodera glycines
LRGMWKLFLRMGVFHSSAHFLTKFRRSVVCRVKYGNTLPDLPFEPKFLQSPFISFRFIGYKPSSLEFRFIGYKPSSLEKCFKYELLTEPDLNVKIDLIDPMTYYCEPDEKTTLDPIDEQLLEDENTSQLNTRRSIQHRKVVPWMRSIQHRKVVPWMRKTEYISTEFSRYGIGHERPDTKIGYGMKNRIKDEFEYKFEYKDRDSQIAAIQRTFSEVQKPVRHHYSKKGVTAVEEMPIFPDFELWRYPFAPVIFDADPLPFELWRYPFAPVIFDADPLP

SEQ ID NO: 119977 - protein, 150 aa, Heterodera glycines
MADDDAETFKLWRVRKTVMQMCHDRGYLVTQDELDQTLDQFKDQFGDRPSERRPGRGELTILVAHNDDPTGESYREGALLKCRFLDQMYVFFPDDPKIGIKTIKQICQQMQEQNITRAIIVVQSGMTPSAKQVEKFDWEKCWLMNHSFII

SEQ ID NO: 119978 - protein, 110 aa, Heterodera glycines
SKALHVKLPSYCLEALSIDSARGVSINAHNASGQNTASLNLQADGRANVMCERFEVVDRQMNVLFSVDSQEIGLNLENLRILDDGGSIFEGAIQTSIVRPEPDSPLRWGG

SEQ ID NO: 119979 - protein, 103 aa, Heterodera glycines
VTEQCFCKRWAFSLKKSMESENFERHFRLAVQSVTAEDYEKMRQYRHREDSLATLAGRLFLRKAVQCLCGVRWADIEISRTERGKPFIVRPENISIGLNVSHQ

SEQ ID NO: 119980 - protein, 91 aa, Heterodera glycines
IFNYTSPWVTYYVTEDAKQATFGYSTAPGEGNIYRLKDYERRFSSKIGIWLVFLLLALPTTLLPFFLWYKFQQKYATKSGTSGQQNSKKAQ

SEQ ID NO: 119981 - protein, 38 aa, Heterodera glycines
MDGPEPYSTRSDVYSFGICVYELLTSRLPYEEIKNRDQ

SEQ ID NO: 119982 - protein, 245 aa, Heterodera glycines
VRLSILIRFPHFPFGFSLFFHFAENPYFTNAVLTKHYEVNLDVDPQKPFSYDGPTIVKSQGFSYDGPTIVKSQGCDIDWKDGKCDIDWKDGKNVTQKIVKKKQKKGAQAGKYVTKTVTNESFFNFFDPKVTTITEVTNESFFNFFDPKVTTITEEMVSGDDIEEQKTNDDFEVGQIIREQLIPRAVLFFTGEAAEEDEYDEFQLIPRAVLFFTGEAAEEDEYDEFDDEEEMGDEQSEEEDNAMHR

SEQ ID NO: 119983 - protein, 55 aa, Heterodera glycines
MPPARGSRTVTVQEASEAYLVRLLENTNLAAANANRVTIMPSDIQMSRHIRGETL

SEQ ID NO: 119984 - protein, 158 aa, Heterodera glycines
MAFSIKQLFSFNRTDVLDDDPLKDKVKRAMLHRKYGEWAAAVQVLNEALNEAVELGNEIFVSRMYYELATTFWESGQLENAEHLLKLLHGRYLTLHRSSGLSPEVIENSLRLADVYTRMGKLDVAEDAYKYCLTTQMEVMEKHLAEYHVARGAMVEID

SEQ ID NO: 119985 - protein, 734 aa, Heterodera glycines
DEGGRCSRDLCVADRAGCQYKCHNSPEGPICSCPLGEQLINKTKCEPENECLDPRTCSQHSQHCTDEKHGFRCSCDPAYELEPDKRTCKVTENRADMRVYVSNRNRIYIYWSDSSLENWRTFAAQVENAVALAWDSVDDRIYWSDIRDKRIYSATRNGTDVQTFIGIGLDITEGIAVDWVGRNLYWVDSSLNTIEIASLQKPGVRAVLLHDDIDQPRGLAVDPRVALMFWTDWGQHPRIERANMDGTGRTILVNTKIYWPNSIALDFTTNRVYFADSKLDYIDFVNYDGKGRTQVIANSKFVQHPHAMSIFEDFIYYSDRRLQRLQLYPKYPNGTNQDYPSHTFSKALGVVTVHPVLQPKLMTTSACSVSPIPCSHICALGNNGTYTCICPSGMVLDTDKHRCVADHRPFLLMVFKTMITGTSLAGGAKDSTAKQRAEMAGITPISGLQNAHDADFDAQTQKLFHLEHGSMARLVMATVISDARIYKSGFLGNNRTQLLTAQIPNDPFCMAYDWNGRNLYVGNKISQTIEVVRTEGEQFRAVILHNDQTPTAVAQPIAIAVDSDRGLLFWLDQGKGGVATKVARADMDGGNPLVLVNIDLAELDHLALDTVNHRVYFTEAKAGRITSVSYEGQDKHYLLNDPAKQPRAIAFFNNRILYSDSAFDKIFAGEFVGDEQPPEFSEFRANVEQLNNLKIIHPSTEKHPCHENNGNCDQLCIPGQRGEITCLCGTSFTL

SEQ ID NO: 119986 - protein, 208 aa, Heterodera glycines
MTHRKMTMNMAEKTNKAQKVKVLAQVGDNPEAERRELIRTEEEKLRAAARREAQQRRIRERPRMAGLTPGFLEGYESDEGGESLAAIKRRYQHAPYSAGGAHDGGAAGRRSSMAGGRGGSSDESAEEEERDRRARKAINEAKIYSDDEEEVGGASGTGPINGDGAGDDSDAFQKILNNAPFLVHFVFGSKGLTDLTTTGSEAVPPITV

SEQ ID NO: 119987 - protein, 441 aa, Heterodera glycines
MTFHKIDASSIDSITNAVDFFSIPPTNVTVSSSKVFEILLSNPLTDTPYHFKIHSSQNYIDLSKCYILTEFRMRKLTSPNGEWGYLDATDQVVPIQLIGHTFIRDMKIAINGREIFNSNSLMAYKTYLSHELSQSLEAKVSHLTAAGYDREDANNLQNANSEGFKSRRQRYLGGRTAQYIAKIDADLFNVPQYLINHCEIDITIQPHDDNFLLIDTLDPPGQPYSIELVGLKLYCKKVSLMDGLALELAKKLEMKPARYAVRKTMMKALFISPGRYEFNANLFMDQVPRRVTMGLVANSDYVGNIKRSPFNFQHFNVRELSVVANGRSYPQAPYDIDYENWKFVRPYNDTQEALGFANSTYGNGIDYFSFLHTHCIYVFNMTNSGDDHGGLFDLIKKGCTAVNIKFKKPVPDGGITLIVMGEADSIYFLDKNRTIATDTTI

SEQ ID NO: 119988 - protein, 227 aa, Heterodera glycines
MDGRNHNHAHHHESHVQISTTSLPPANPIDGIVNSLPDLNAFISVHSHGHHHHDHGHAMKMFFHGGFREVILFDFWRTETFYGLFFSLILVFMMAVLYEGAKWFRVYFQLWVSFDSICLPFLYPLKSFKTSVSQKSSGCISMDAVRGKFRRSQHGVEAALIEKATAAVTNSSASGCNACDGTADDSLKNTIGSQQQVYAPTVVRPAPISPNMTINRWTYRTLLLICS

SEQ ID NO: 119989 - protein, 120 aa, Heterodera glycines
EGIPANDQRLIFAGKQLEDGRTLADYGVQKEAKIHLVLRLRGGMQIFIKTLTGKVITLEVDSMDSVENVKRKITDKEGIPADHQRLVFAGKQLEDGRTLADYGVQKEATVHLVLRLRGGG

SEQ ID NO: 119990 - protein, 127 aa, Heterodera glycines
MKVKVISRHPDEYQRETKHDIFKVPRNPRNYAAPPDPFQQQVEYTRALNAAKLERMFAKPFLAAFDGHNEAVNLLVVNLLVKHPTRLSTVLSGARDGQVRVWHLATRRCLHVLQAHSGPINGLSVDA

SEQ ID NO: 119991 - protein, 299 aa, Heterodera glycines
CTDVRVNCSDVLERLWGMDIFAVGHFLGWAMKALLIRHSIICWYISIWWELTECWYISIWWELTEIVFSHLLPNFQECWWDAIIIVFSHLLPNFQECWWDAIILDVLLCNGLGICCGLWICRCLEMQQFHWESIKNIRTLRGKNIRTLRGKLKRVVLQFTPESWITVNWLQTLVTLVGLKRCIAIYAFIMVWLATELNVFFLKHVLAIDTSHPIVFWHIIFIGLIAAPTIRQYYLYVTDPQYYLYVTDPKIKRMGMQCWLYLAICALEASILYLAICALEASICVKFGREQLPAIKLWL

SEQ ID NO: 119992 - protein, 217 aa, Heterodera glycines
MRVKAYMMTEWGFQKDVKKGLCEASCYYVDDVDQDDYTNSGLKTERHVLLMGPIIHRNTDDFLIIAPSYVSGNAVIANPHTYHINIHDIRIYIKTVDVTQALNNVISNQLQTTPAKYPMRKIEIRSLFIPRGTSDLSHNVFTSIVPRRLIAGFVSTGAYTGNPKESPFVFEHAKIRSISVEANGNIFPGSPYSLNFDRNKYIRAFVDMYTGLGMDDG

SEQ ID NO: 119993 - protein, 403 aa, Heterodera glycines
MTTLKKIDTANNQFCDLNKTFLYLSTSIERKDKSNWIPITKDSEADQHVGVIQNFGHSFVKTLKVSISGVESYDSGIYYAFRAYMMTELGFSEDVKKGLCEASCYYVDDVDQNDYTNSGFKNRASRFADGAKCETMVKLNFDLGRQPNLLLNNSDVIFSIHRNTDDFLIMAPPYVSGNAVIANPHTYRINIHDIRIYVKTVDVTQSLNNVISNQLQTTSAKYPMRKIEIRSLFIPRGTSDLSHNVFTSIVPRRLIVGFVSTGAYTGNPKESPFVFEHAKIRSISVEANGNIFPGSPYSLNFDRNKYIRAFVDMYTGLGMDDGERTMSINIQKFVNGWCFFVIPMTSTLEDTPGFELIRNGTTSIKVQFNEPIKDGGYEMIVLGEFDSILSINANRVLSSDGSI

SEQ ID NO: 119994 - protein, 78 aa, Heterodera glycines
MSSSDLLAHNSSTSGSSSGATDKLAVFGGCEGPDACYVMLVSSDGHEFVIRKEHALISKTIRAMLSGPGQYAESETNE

SEQ ID NO: 119995 - protein, 381 aa, Heterodera glycines
MMINSFVELFNTSPPPPQTLPSLPVPPLAQTTEKFLKFAEPLLSEAEFSTTVNLVNCFLESKEANELQRLLEQRGRKLVNWLTPWWLNVAYLAARTPLPIVTSPGITFPKFDFAVPGTEAQLQCAAKMVQAALKYHHKIINDQLPVDKAGGVPFDMSQYRLMFGTTRIPGHGTDTIRYGKDRPSWARHILVTRDGRTFHVPVYDGAGNPLTIGQLVAQLGHVIDQQQGKKARAINIVSSDGREMWATVYARIRGKERDPTELGLVEDALFVMSLDRSASASLQFDPDDRNMAQALHGGGTRQNSLDRSASASLQFDPDDRNMAQALHGGGTRQNANNRWFDKTLQFHLNECGYGGITYEHTPAEGPPLAMLLDFICEQLGN

SEQ ID NO: 119996 - protein, 108 aa, Heterodera glycines
DAIKNPDNYVLKPSEEGGGNNFWGKKITEKLQTFTKQQLSAYILMQRLKPLKIKNYLVRPHKRPVKLVEAVSELSTFGYLIADGDTVYKNVSDGHMVNDGGIFKKVQY

SEQ ID NO: 119997 - protein, 204 aa, Heterodera glycines
FADDVKLYVSYKKRNERIKLNTALQNIENWASLNGLKISPDKTFIIFFGKNNSKQQYKLCNKIINEVESINDLGVLIDNKLKFSDHYLKITKAAYLRIRYIAKFLKSRSIRVWTTVYKTYIRPLLEYAPEIWNPKLKKDIIKIERCQKYFTKALFKCRLIPYIPYQQRLSFFKIQSLEERRKVIDLKLNKNFVFGKFFLKIFMT

SEQ ID NO: 119998 - protein, 261 aa, Heterodera glycines
MTQISFVAASATKCVMLFAKGLGAKFTPHVSFVVPVIFDKFKGKKQLLRDALVECIDVIAANTSFGKLSKALLNALTSKQNLSQKSQTDLFIYRLFRSLPAKDVPKGLLKDLVAILSKHGFDAASEVRDSSFAALGAIMKCIGERDLCCFISLELAKDANKMAKIAEKQWHSHFPCANVKIYKLSQFKAIAAAELQKSTPVQNSPADLWAPFHFLMPGYLSTRAVFQCGTFWHVEMHAPRSSSAKMENKHFNCSIANAFPL

SEQ ID NO: 119999 - protein, 186 aa, Heterodera glycines
MERLLRLGGLSGLGAGSLNATPHDSNQVDTSETVYISSLALLKMLKHGRAGVPMEVMGLMLGEFVDDYTVNVIDVFAMPQSGTGVSVEAVDPVFQAKMLDMLKQTGRPEMVVGWYHSHPGFGCWLSGVDINTQQSFEALSDRAVAVVVDPIQSVKGKVAFLISLPVKLHFRLSSMLFALLTHRQLH

SEQ ID NO: 120000 - protein, 127 aa, Heterodera glycines
VVHPKRSEFFLNSHVAIKGTACTPHYTVLRDENNMSMDTLQTMVHYLCFGHQIVTKPTSLPSPVYIANEYAKRGRDIYSYYAKNGIDNLELFAKRKGVEWPLRTHDDMTKVLSFLNTKDLRELRINA

SEQ ID NO: 120001 - protein, 120 aa, Heterodera glycines
MKALILVGGYGTRLRPLTITQPKPLVEFANKPMIVFSVEDEPMGTAGPLALASDLLGDTEPFFVLNSDVICTFPFAEMMHYHRKHGRQGTIAVTKVSYFYVCGGCKKLKFLDLHKLTHCD

SEQ ID NO: 120002 - protein, 92 aa, Heterodera glycines
VHEKNVTSVGFQVDGAWMYTGGEDCMAKIWDMRNNQLNCQRIFQVNTPVHSVVLHPNQVELIVADSTGAIYLWDLRSDRDDSLITEVDMSEF

SEQ ID NO: 120003 - protein, 358 aa, Heterodera glycines
MRYKVSYGMIPKIVLVAVSHLAITASTSLINQPAMIQLRSLSDSLEVLFSKASFTCDRCIMNWNSKGNALLVTASVDVDKSNKVSNVFFTSFSILSVKSYYGVTLNKQGPVHCVQWAPNSKEFCVCYGFMPSKVSIFNTRGDTVWELSEGHRNEVYFNPQSTILVTCGFGNIASGKMEFWNLETRSEICAFCAPHTTHFEWAPDGQHICTSTTAPRLRTDNGFKLWTYRGDFVYEQKYDREELWEPNKRRKCQNALRQFAEGIADANGALRPTASERKTAEKGRKREERDKFGRDGRGEENSDIAEEIGRYFEAEDEKGRGPSVGVEPNGQNTQRRTIAGGNGTTDGHGQLLKELAFN

SEQ ID NO: 120004 - protein, 328 aa, Heterodera glycines
KESVIFPLFKKGDKFNPKNYRPISIPCSLCRVKKILRNITNLLKNNKISEYQLVFVRNRSTTSQLITVVEDYDAIINGKNVDCIYIDFQKAFDSVPHNLLLYKLEKIGIRGKLLMWLKSFLSNRTFRVKIGDSLSSSKKVGSGVPQGSVLGPLLFLIYINDLPDALPSGVNIKLYADDVKMYISYKARSDLIMHKALHNLFEWNKWQIKVSVQKTFLLYLGSKYKFDGNTINAVDTIRDLVNIDYKLQFSDHINQITRNAYLRMRSLFRIIKSKSSKIWITLYKTYIRPLLEYAQEVWNPSLQKNIKKIEKCQKYFTKRVFMQPSTNS

SEQ ID NO: 120005 - protein, 181 aa, Heterodera glycines
MVERFFPNPEEAPLIKAIRDTFAKMWRIEGNENNQAFSELIERVKKQPNNFVMKLTEYALSDALNNNEVKKIYFGEEILEALASFDADKRSAYILMEKLRPMSVKNHIIWAEDGEESSGEDFLEDVTPELGIFGTLLGNIVNGEVLYNAQFGHQLKTKLASENARGITTGNCAFDTAYLVD

SEQ ID NO: 120006 - protein, 269 aa, Heterodera glycines
MTKLNTLRDGDEKHFCRCLDLGRDEQKDQQSGQMKKFNYIVMSLVGRGLDGVVKDAGGRLSLGSAVGVSIQMLAALRGLHTVGYLHRDIKPGNSTIGRPESNEIRLLYLIDFGMARKYTKDDGAHRRPRAATIFRGSPRYASIAAHLGLEYSRKDDIESWFYCMIELFKGALPWANVGETKEIGEAKIKRQKKQPEAVRHQAIADLLSGCPNEFGQVLKYIDMKYNDKPDYDWIIATLRNSLSNAGVQEFPYDWETTDKTTPQVSSYFT

SEQ ID NO: 120007 - protein, 112 aa, Heterodera glycines
TNEAGNWCLIESDPGLFTELISGLGVKGTQVEELYSIDDEQHLFRPIYGLIFLFKFRPIYGLIFLFKWRPGEELEGTPMPDAPVYFAQQVITNACASQALHLLLNISSSDVQ

SEQ ID NO: 120008 - protein, 446 aa, Heterodera glycines
MAFHKIDNDSVNSITNALDFFRIPPTNVSVSSSKVFELLPSNPLTDTPYHFKLHSSQNYIDLSKCYLLTEFRIRKENVNGQLIDMKADDLHIAPIQMIGQTFIRNIKMSINGREIFNSNALMAYKTYFSHELSYSTTAKDSHLNAAGYYRDTGDALETGDGCIARRNLFANSNVAQFIAKIDTDLFNQPLYLINFCELDIEILPHDNDFVLIAPTAGAPRYHFEVLGLKMYVKKVSLMDGLALDIARKLELKPARYAVRKTMMKSMFISPGRYEFTANLFMDQIPRRVTMGLVANTDYVGTIRRSPFNFQPFNVREISIVASGRSYPQAPYDLDYPNGKYIRPFNDMNEAVGFANSSESNGITFAQYGKTHCIYVFNLTNSGDDQATLFDFDQEWDYRYFLLLQQQQQIQEYSLDQLNHQLSPPPPSQPLPQLPLALPQRLQKVKN

SEQ ID NO: 120009 - protein, 90 aa, Heterodera glycines
MKFAYPQLDAKVTAGLNHLLKSPFSVHPENGNVAVPLSAKEIRAFDPNVVPRIDKLLAQLASLQSSQENKENQRSIGKKFYRQITRDCFY

SEQ ID NO: 120010 - protein, 252 aa, Heterodera glycines
MFYQTVCLLLLLSASNDVAVFGQEETTTTSTSSTSTSTTSSTSTSTTPTTTSSTSTSTTPSTTTSSTSTSTSTTPTTTSSTSTSTTPTTTSSTSTSTTPTTTSSTSTSTTPSTTTSSTSTSTSTTPTTTSSTSTSTTPTTTSSTSTSTTPTTTSSTSTSTTPTTTSSTSTSTTPTTTSSTSTSTTPTTTSSTSTSTTPTTTSSTSTSTTPTTTSSTSTSTTSSTTSSTSTSSTSSTTSSTSTSTTPSTTSSA

SEQ ID NO: 120011 - protein, 150 aa, Heterodera glycines
MDELGEQCATFSDPMPADPPKLWVAWLYTDFYGSGRKIRDQVTKLFGKDAKPGEMQVFKNTLSTNKQLWKIKHLLEIRPVTFPNGEPGQEDATHLEQAVQVELRQLIRTAFTPTHKFSPRYLASRLMSKDVTKQDVYEDTVYNPENISIG

SEQ ID NO: 120012 - protein, 56 aa, Heterodera glycines
MVHENIHWSRPRKFGPGSRSCRVCFSHHGLIRKYSLNICRRCFREYASDIGFKKLD

SEQ ID NO: 120013 - protein, 359 aa, Heterodera glycines
STEVCLNGCMNDQNGSHCQCQTGWKGQRCQEDIDECQLSEKLCQNGGKCVNTIGGFYCECPIGGFYCECPSDFVGYLCEVPHRPTDPCLANHFPCLNGAQCHENIDWRWECECLPGFDWRWECECLPGFEGKHCERAVDECDKHCERAVDECDMGMMTCLNGGKCAHAKNNYNLKKLNFIAGDFCEQDINECELGATLCKNGGTCVNRHGSYMCICVGGFSGKFCEINIDDCVDNLCYASGKFCEINIDDCVDNLCYAGSTCVDGIARYDCRCAPDRIGTKCQKFTKAINTKQLGALCDTNPFNGSYTCLCDEGWKCDTNPFNGSYTCLCDEGWKGQNCTGQNCTDDVDECSDEMTRCF

SEQ ID NO: 120014 - protein, 135 aa, Heterodera glycines
KLLEKMGSKRINSESKLERNVEPDDLAMIMYTSGSTGKPKGVLLSHRNIITAASGQSAVISVRCTSDTIIGYLTSDTIIGYLPLAHILEVCAEIVCLSKGCRVGYSSPSTLHDRAVKIKRGTTGDCVELKPTLIA

SEQ ID NO: 120015 - protein, 122 aa, Heterodera glycines
NNMDPQRLSLFLLSVRSFRFSYGVRYDFSSVMHYDSKIAARQFGMKTMTAKVNPEENDAKMGQREGLSPSDAEALSKMYCRPKECVDANVYCGTWATQNRCYQNGSANVWMANNCQKSCAFC

SEQ ID NO: 120016 - protein, 509 aa, Heterodera glycines
EFFLFQLFRDLSSRPPPLEPHMHSRILLNTPYGGRLVLALECGSLLFVHLKDKRLIRHKKRWSQVMYMYFLLGHRIMDSHLSVDKQLQADNTYILAIDGDSKADNTYILAIDGDSKFEPAAVIRLLHLMNLKSDVGCACGRIHPIGEGVMVWYQKFEYAIVMVWYQKFEYAIAHWFQKAAEHVFGCVLCAPGCFSLFRASALMDDNVMHKYTKTASEPRHFVQYDQGEDRWLSTLLLKQGYRVEYAAASDAETYAPEGGYRVEYAAASDAETYAPEGFEEFFNQRRRWTPSSIANTLDLLADYKLASSNNASISRLYILYQMVVIDLLADYKLASSNNASISRLYILYQMVVIVFSLLGPAIIFTMLVYAQVAAFAVDSTRVLFYNAVPVCGFIFCCFTMDSSVQLTYAKIASVIYAFIMLAVLIATTNQIVLETVFSPTSMFVLGMVLIFSFASCIHPKEFANIIYGSIFFLMIPSTYVFLSLYSLINLNVINWGTREAVAKATGQAT

SEQ ID NO: 120017 - protein, 227 aa, Heterodera glycines
MPCHFQDVHGTLIIGFGFLVAFLRRYGFASFTISMMLTSFTLELSLLVRGFLTDEFATNGKFYVNLQNMINADYTAAVVLISYGALCGKLSPMQYLLMALIEAPFSIFNEYILVKMLGVQDIGGSMVIHVFGAVFGLVAGRILYNKNWRESEHFGSVYHSDILTFIATGFLWVFWPSFNATNAFGVDARNRAIVNTYTALIGSTITAFILSSFFSKNEKFNIRHLTN

SEQ ID NO: 120018 - protein, 168 aa, Heterodera glycines
MGESEDGKADDEQSILSAGEESEMDAGNDDDDGTDEAARERFRQQRENLQWPDELERFMPSQGAFCATLFAPVTYPPTNVTVFLAHNSQPAELVAYGILLNVNPDRIVLKRTVLSGHPYKVNKRTAVVRYMFYNREDIEWFKPVELYTHEGRRGRIKQANWTTCQPLV

SEQ ID NO: 120019 - protein, 86 aa, Heterodera glycines
FRAVILHNDQTPTAVAQPIAIAVDSDRGLLFWLDQGKGGVATKVARADMDGGNPLVLVNIDLAELDHLALDTVNHRVYFTEAKAGR

SEQ ID NO: 120020 - protein, 86 aa, Heterodera glycines
MHSRGEYVKGTTFQYHKTKLAATAVGLIGREKAYTFSKFDTVDVVFADFDGILYHASNPDGGDKSKLMLSISLKFYKELQEHGADE

SEQ ID NO: 120021 - protein, 155 aa, Heterodera glycines
MKADKVTAIHKTFTGLYGLDDPDNENTKRVIQDAIAHPDNYVMKPSREGGGNNFWGDEIPKKLREMSRAELSGHILMQKVHAFSAPNYMVRPNERVQHGNVVTELSTFGTLLGHVKTKAVLHNAQQGHYARSKPEGATEGGVYGGGGVVDSPFLF

SEQ ID NO: 120022 - protein, 96 aa, Heterodera glycines
MTEAKKLPEVPETLLKRRKIRAAQRAARAKNSLNTIKKAKAKKTEIFKRAEHYLVEYRQKQRQLVALKREAKKVGNYYVPDEPKLAFVVRIKGINK

SEQ ID NO: 120023 - protein, 405 aa, Heterodera glycines
STSISTPSSSSTGTESSTSSSSTSTPSSTISTSTESSTSSTSISTPSSSSTITSSTSSSTPSSSSTSTSTLSFSSTTSASTTNTESSASSTGSTPSSSSTISASSPSTESSTISTSTSTPSSSSTPSTESSTSSVTSSSPTCIESTSTIFTSAESSTTRASSPITESSTVSSSSYSTPSTASTSSMAQHDQSHYMIQEYCKLVESYQKLVTKTITTMQMYETKTNEYNEVKKQNEQLEESNKQMNEQNSQMKEEKKQMEQKQIEMEKSMSETEQIKAETEKSYSQLQSDYEQMQSQCTKKEDGQVVVPKPNFPTPCSDNLMNGNCTDPSYMKTCLDPVSKQYTNSLAIISFHRRITTPCPCPNAASLAQKCAPQSLPASTFPSRSVAATPAVAAAVRKLRMESDC

SEQ ID NO: 120024 - protein, 167 aa, Heterodera glycines
KKIGIRGKLLMWIKDILSNRTFRVKIGDDLSSSKVGSGVPQGSVLGPLLFLIYINDLPDALPSGVRIKLYADDVKLYICYSKNRNSMHKALHNLSEWANKWQIRISIKKNFVLHLGNKNPKEIYKIDGNIINVVDTIRDLGINIDNKLQFSNHVTQIIKNAYLRMRS

SEQ ID NO: 120025 - protein, 276 aa, Heterodera glycines
DALPSGVRIKLYADDVKLYICYKARTETEINNLSEWANKWQIRISIKKNFVLHLGNKNPKEIYKIDGNIINVVDTIRDLGINIDNKLQFSNHVTQIIKNAYLRMRSLFRVIKSKSSRIWIILYKTYVRPLLEYAPEVWNPSLLKNIKKIEKSQKYFTKRVLFKCSLPPIPYQQRLEYLQLPTLESRRKLSDLFMAHKIIYGRTDLNPFEILKPSERFNIPFYRLNSKYKLGKKFILLRGGTKIWNQLDKKLIEINSLNQFKNKIKTISFSLNLFYS

SEQ ID NO: 120026 - protein, 206 aa, Heterodera glycines
MLRSIASFYEKNVKSLDISVVYESVQQSRLNEIDDSHLSSDIQNPPSRLEFQRTPEKSTRSEPSATSAEISTHNQSPLSEIVPTQQMQPQPHPPSKEYRVKLIRPEYYCKPSAEELEECFREDGSLRIECGLTVGRVGYGSVFWKGPIQLDGPIDFDEIVHFRNKEVVVYPDETKRPEVGTGLNTAAEVSLERVWPIDPKTKQPIK

SEQ ID NO: 120027 - protein, 74 aa, Heterodera glycines
HTSERDLKQLFGRWGEVESVQIVYDRYSGRSRGFGFVYFTNTKEAARAKDNMADVVIDGMKVRIDYSVTRGGGP

SEQ ID NO: 120028 - protein, 152 aa, Heterodera glycines
FDFSLFDDSDFANRSWVDIIDEEERERSKSTALSTTPSVVSSSAPNKRRHILPTPQKGWAEPNKGWCTDEATLERRDKELQKMKEKPTYKQKSTHIEHRKRRKQQRSGQRGLNYGSVKCSERGQGIEMNLRIFDSGAKSDQIWTLTVRYASL

SEQ ID NO: 120029 - protein, 57 aa, Heterodera glycines
MGAYKYMQELWRKKQSEVMRYLLRIRCWQYAKWRPSIAARGPRGRRRRAAWATRRSK

SEQ ID NO: 120030 - protein, 142 aa, Heterodera glycines
IGQYVYMFWKLFFAFVRFRVRDLKWVEKMSYSSAPMKTPEKNKKNYYFFMWQGFLIYRVRIRRGGRKRQVTKGQTYGKPKTHGVNQLKNTRSLQAVAEARAGRRLGELRVLNSYWVGQDSTYKFFEVILVDPSHKVRFVSCL

SEQ ID NO: 120031 - protein, 91 aa, Heterodera glycines
MEGEENGEVRVIREDSFYVGDIRPKNDHSCADRLFALNLSLTFQTPEQFFSKVSAEEPFRLPEFNPSQFLREHSAQSVPSPFPRPPISNSN

SEQ ID NO: 120032 - protein, 163 aa, Heterodera glycines
FIKNVSNLWVYSAKIWIWSRPSLGCVQTLSGHTGSVLCLQYDNQMIASGSSDATVRIWDVNTGEQLKTLVHHCEAVLHLRFQDGMLVTCSKDRSIAVWDMASPRDIEVRRVLVGHRAAVNVVDFDHKYIVSASGDRTIKVTDRSNAKRLGTMGYGCFGVVCRQ

SEQ ID NO: 120033 - protein, 102 aa, Heterodera glycines
MPELLFKTITQQSFTIEVEETATIGEVKRKIQQVKGAEYPAENQKLIFNGRVLEDAMLVSELNFAAPKFIVIMVMRILKSLFLVIFKLNEMRFLPTPSVQSV

SEQ ID NO: 120034 - protein, 174 aa, Heterodera glycines
MSPSLSVANSNVSRPLGQPKVAGFKDKDKPESVRTSNIVAAKAVADAVRTSLGPRGMDKMIQSGNGEVTITNDGATILNQMSVVHPTAKMARFVLFAFINCTVQLVELSKAQDIEAGDGTTTVVVLAGSLLDAAEKLLAKGRPAIFPSLGTNGGAGSEETDEFTGGLKCQSEVD

SEQ ID NO: 120035 - protein, 96 aa, Heterodera glycines
MRVINPGTKRIGYAFKTTKPKRINMNPPNGVLGPKESVNVAVSCDAFDPGSEDTKGDRVTVEWTNTPDPAATAFKLEWFQGDGMVRRKNLPIEYNV

SEQ ID NO: 120036 - protein, 115 aa, Heterodera glycines
LSGLLKRLEEDCIGSAPAVMDKDDAKLEEYRARKVAMITGISGQDGSYLAEFDGSYLAEFLLAKGYQVHGVIRRSSSFNTGRIEHLYSNPMTHAVGSSFNLHYGDMTDSSCLIKL

SEQ ID NO: 120037 - protein, 783 aa, Heterodera glycines
MQNGIQKILNEAKKIDPEITTDDVNKFLEKQRTYTIHKPIRKKFPRLKTVPSGFHTDWQCDLCIFDQLKKHNDGYKYLLVCIDVLSRMIFSAPAKSKKKEPDIKIWFDKMVEMGTEIQTSRNELKSFQEEVDKAKNTTLEHVEKNDMKEAKKSADVAKGIARQAKTKYTSTLEGYNDKSEKGFNGMVVRLNEALEAEKGPQKRERLANEDVQFNYDSIDQKFIVYLSSAVTHIDLSKHLAYVLGFKNTRLFHAEEATYMPDLTGGVRQLYIYAPNLIENTIIGNQMAPLLRIVNVVDDPGSIKKYILKMTHVFFDPESVDWSSFITPQHGRGQKQYFVGSKYQRGFGFLGNVARFLTPIARNIASSAGHEGLAAGQRVLSDIAQGRDLRDAVREHSRQGLTNLTDKLQQYNQFCDLNKTFLYLSTSIERKDKSNWIPITKDSEADQHVGVESYDSGIYYAVRAYMMTELGFSEDVKKGLCEASCYYVDDVDQNDYTNSGFKNRASRFADGAKCETMVKLNFDLGRQPNLLLNNSDVIFSIHRNTDDFLIMAPPYVSGNAVIANPHTYRINIHDIRIYVKTVDVTQSLNNVISNQLQTTPAKYPMRKIEIRSLFIPRGTSDLSHNVFTSIVPRRLIVGFVSTGAYTGNPKESPFVFEHAKIRSIGVEANGNIFPGSPYSLNFDRNKYIRAFVDMYTGLGMDDGERTMSINIQKFVNGWCFFVIPMTSTLEDTPGFELIRNGTTSIKVQFNEPIKDGGYEMIVLGEFDSILSINANRVLSSDGSI

SEQ ID NO: 120038 - protein, 182 aa, Heterodera glycines
SLVLIFTMSVETSIVSFSFMPIFIFNTHETARAIKHMPLKRAIRFLENVREKKEIVPFRHFNGGVGRKAQAQAWGTTQGRWPKKSAEFLLQLLRNAESNAEVKGLDVDHLVIDHIVVQAAAKMRRRTYRAHGRINPYMSSPCHIEVILTEKKDVVAKPAGALVKVKKESKKKQRRQLARGEF

SEQ ID NO: 120039 - protein, 472 aa, Heterodera glycines
NRKLTIFPVLSLTHLQNRVLKILPISVTDFLKNKNFFVSIITHNQDTFVIIRNNQLLCGSLDKALLGSESKCSIFYRLLCDWGEGHAIEAMWRLARISAVYFSNRGFSIGIGDVKPNVNLLQEKSVLLNTGYKICDHLNKSMRLERQKDKPDLGLVEELESKILKELSSIRDQAGKACKQYLSRKKAPLTMAQCGSKGSFINIAQMIALVGQQSISGKRPSDGFENRSLPHFERKNFCPWVADFFIANFYKGLQPLNFKPKFFSPKNYFLTLKIFTISLSYYYFYSLQLCQDLAVNYGNTVRTSTNEVVQFTFGDDGLDPAYMEAKDGRPLDFQHMLAQVRNTNNTRRKQFKFAVIKTVYTSNIKKEFSVKLNFGSLVLEKLNSSEQKNRNNFNLLILHFGDRTRSRGGHSTRCRDCEPIAARRRALLNATGFSLGQMRQFLDICAMRICRATAEPGTAVGAIAATSIGNYN

SEQ ID NO: 120040 - protein, 456 aa, Heterodera glycines
MSLFPEGFNRTGFLISAYLYEKCDMSIEMAVREFAECRPNGIYKQYYLDDLRKRYGDEDEDEMTFPGRPLWENGPISDDEFTNNGAFVMEATSNNSDVGIASNGPSSSSNNGTQMAKNITKLSGKGAPKFMDGKVVNVSYVEEPNKRRQVQDKTRLFCGYGSKVFPGSQPVSLEGPQGNNNIEFLAQEPYMVSWKADGVRWRICEEKSISNELFRYLVLIDGKYQVYAFDRDNNPFLIRSMAFIRHPRQKPLEDDDFVHDTLVDAEMVIDQNEGQQIPRLLIYDLVRFQVEDRLTKIGKIINCYKGEDLRQKPFNVRFEMIENELIRPRTEAFKAGLLKREEEPIGVRRKGFWNIESTRRLLEPGFLSCHEVDGLVFQPVNGGYVSGRCDKLLKWKPPELSSIDFRLDIKKVIRPGELPEFVGNLHVLHADKPFATIKATRQLLPYNNKIIECKFS

SEQ ID NO: 120041 - protein, 405 aa, Heterodera glycines
MDIDADGVEMKKKRMPAGEDIGPKLVNMIKKLDDQLHGASIESAIESLANVLEDNLDPYEGQIIHILYEWSVFVAFASVEAPKNARKSILFRNRVYVYCMIHSTECQTNCVTCAAYLPEKITIFSTLVGLLNVRSADFGERLLKKFMDEFHHTFTSGEYDISIRIATFLCDLCNARVVTPESIVSFMENFVDLATEENVIKSNFFVYLVLHTLPWVGTELYAKLPAKLNDIMARISLYIGKRTKPHFDMLKIWSATDYPKQEDYLDSLWSQLQNLCQNDWMERHILRTYAFFEDVLVASGAHQLPELDQHVLMTSKKHPMPHIVFRLFGKDDVMESDVVLPIPNAIERFLVEEDLHWIIDNNYLDWKLCAHSLLQYHRKDTVPLNYVIIETVFNQLFRLPAASHH

SEQ ID NO: 120042 - protein, 41 aa, Heterodera glycines
VEIRAEMIGYYLGEFSITYKPVKHGRPGIGATHSSRFIPLK

SEQ ID NO: 120043 - protein, 74 aa, Heterodera glycines
MAEICLAVNRCMEIASPKMARFLFEGKRIFIWMLFPAAYGLYLSIFTKSPCFSSIYIAWFSNPHIGYISGSEEN

SEQ ID NO: 120044 - protein, 438 aa, Heterodera glycines
MAFHKIDNDSVNSITNALDFFRIPPTNVSVSSSKVFELLPSNPLTDTPYHFKLHSSQNYIDLSKCYLLSEFRIRKENANGQLVDLAADEVAPIQLIGHTFIRNIKMSINGREVFNANSLMAYKSYFSHELSYSTAAKDSHLNAAGYYRDTGGVLEVGDGCTARRNLFVGSRTAQFMAKIDADLFNQPLYLINFCELDIEILPNDNDFVLITPPGVAAATRYHFEVVGLKMYVKKVSLMDGLALDIARKLELKPARYAVRKTLMKSLFISHGRFEFTSNLFMDQIPRRITMGLVANADYVGTVSRSPFNFQPFNVREISIIANGRSYPQAAYDLDYPNGKYVRPFNDMNEAVGFANSSESNGITLAQFGTTHCIYVFNLTSSGDDQAALFDLIRNGTTAVSIKFNQAVPAGGIMLVVMGECDSLVMLDKNRSISTDITI

SEQ ID NO: 120045 - protein, 674 aa, Heterodera glycines
ECQRLSGDQLLDYYTEQWTKFQFSSTVVNGIFSYLNRHWIRRNIDEAVRPGILEVYNLAVSIWKSVIFDELHHNITSAALALVEKDRNGERITTRLISGVVASYIELGINEHDPAADVGGPATAAVAQQQQQNSVVHRPSVKYQVYRNYFEQRFLEVEQRLSEERDRCQIYLDNTTMDSLMEACDTALIKHHLELFHDKFESLLTRQQNDHLGRMYTLCSRVPNGLAKLKEILKAYIEQEGKAAIQQIAREASNNPKQYIDCILKKHKLYNRLVVDSFKTDHGFVQSMDCAFRKFINNNAVTEMARNASKSSQLLVLYCDQLLRKSARNKEDEKMDEYLDQVMTVFKYIDDKDMFHAFFHKFLCKRLVYDTSASEEQERCMIAKLKHMCGFEYTSKLERLLTDVALSRDHSEQYKQQPRTSNVDFSVIVVMSNVWPLGQPVQFDIPRPLLDCIDSYTQYYTNRFNGRKLTWALQMCRGELVSTSNTFKDKYSFLCNTQQIAILMQYNERNTYTLDELHVALGTDFPADQLCAVVQSLVKTNLLKLTSADGTALTETKLDDKEQKFTFNSEFKSRKLKVDLVRAMSSARETKKESEDVQKTVDEDRKLVIQAAIVRIMKMRKSLKHQLLVAEVLNQLTTRFQPKVPIIKKCIDSLIEKEYLKRSEEDSDLYEYLA

SEQ ID NO: 120046 - protein, 101 aa, Heterodera glycines
FLLKQCAECGKTFAHCQTLHNHRRTHTGEKPYGCEFCDKAFCEFCDKAFAQQNHLDCHRRIHTGDRPYECDFCGQRFAHSNTLVNHRRVHTGEKPYEVNYR

SEQ ID NO: 120047 - protein, 268 aa, Heterodera glycines
RIQTTNRSLISLFAKGFHEQRDCFAELGGLENVTLEIEAQCGMSSAESISPTGLNLSVVLIFAARRISPTGLNLSVVLIFAARRSLVTPIEHSFPIEHSFLLQCFLPSSPRSFVLNTDLDTNVPPQPISHTISLEMAPPKCNYSLRRDSPNGPMVDKAHIGQTIYDSPNGPMVDKAHIGQTIYHRWECQGGKEISEVFGMRCTADSDLLSDLQYADDRLLAVARATVFSLRESDSLRFSCKLTLCVRREAHCEGIIPPITGPLTIALL

SEQ ID NO: 120048 - protein, 97 aa, Heterodera glycines
LLNPRGFDFVIIMPLLSVIVPFCLFFYTKFWWIVCLYFVWFLYDFDTPRRGSRNWLWYLWYKNSFIWKHFADYFPIKLIKTADLPPINNYILGHDLI

SEQ ID NO: 120049 - protein, 121 aa, Heterodera glycines
MLFFSFFKSMVGREVIVELKNDLSICGTLHSVDQYLNMKINDISVTDVDRICGTLHSVDQYLNMKINDISVTDVDRHPHMISVKNCFVRGSVIRYVHLPTDGIDTALLQEASRKEILQSRQ

SEQ ID NO: 120050 - protein, 50 aa, Heterodera glycines
FPVAKISFIARDTSTDARAFGFVFGTADGKHKFYGVKTARTADHAVLSIR

SEQ ID NO: 120051 - protein, 113 aa, Heterodera glycines
MAHRRPVKKMEPNARVPVKWLSPEAFAERCFTAKSDTWACGVMCWEIFANGEAPYGQTGGTDVAVSVINGTRLSFPKDAPSKLVEFILQHIWDAETSGRYSMAAVHDWLKRHT

SEQ ID NO: 120052 - protein, 116 aa, Heterodera glycines
MRQSTNQTPVTRTTTTTITEQQREGGGDQTNSEQFVLRLEAPPDTRPRVQWSTGTVDNENMGKKKSKCCCIYKKKRSWDDPNASSEDDDGQTDPDSLDLYDVFFSWTNLDEYGTNR

SEQ ID NO: 120053 - protein, 241 aa, Heterodera glycines
CSVQIPSLLLLRLTVPCASQHWSKPISALHAFMAPLLLCRVPMCAIHPFVPPFVLPFVPPFVLGELALLLSVLLALFVLCFTKLQKEPSCYRRCAAYFGFAISIAWIYATASEVMVMNVVLMFGTISGIPHQILGLTAIAWANSIGDLIADVTVARQGTPRMAFSAAIGAPLFNLMVGFGTTFLIAELQGKLMVGFGTTFLIAELQGKVIIVSDFGRVANPVALVMFVFLALSLLCTLLLL

SEQ ID NO: 120054 - protein, 350 aa, Heterodera glycines
MDFGFLNDSTNKWGKNQRNYYGTSYVDKDFGGVNDSEEEEMLQLEEEDAISRQKKIETGNSLVDFDCLIANSTIKNKGRSKLFEVLHISVAKETPEKETAQGKPLENVIQIYFTSNNVAQIGRTFEQNVCDLQSETSTDGGNFDDGGPCVSKEMRRKINYEIRKNKGIRKDKGRRKAKQRHSRVMKRTQYEKALIKRKSQPGAPRPRVFLPDFWIKLVEQPSKGYNRLPKNAAAFEIDLKMSRMDVREYLEKIYKYPVRDVRIRVTMGDITWDHPKDRDKRRALWKEEDRKIAIVFFKKGFIAEVPDLFPGRGTDAEIDQMKKFQEQDANTFNSRFVNRGRAGIGEMLPI

SEQ ID NO: 120055 - protein, 734 aa, Heterodera glycines
NFLALAEKLLTIAKDENLHWRQIDFAETLLSLLLRKDCDLPEGVVLHFFKLLTSDIINTRKIASVFCSSWLKIHRQKCSSWLKIHRQKAVKEDVVIPSVGGKFLLYDAANAPSDADKWDSAKFHSNVHPGFYTWPSKFRVYAPPSEQKWVSFLYYEQILEQAIVTMFKDNKFMERFLTFFSLEKSEWTFSNSKCLSLFQRIFRSFNDILLPEFLEMLDKLLDIGHESHHRLESHHRLASELVTGMVSGSKLWQYAKVKKVQERLEQRLTDTFLGLTEEVEKNWGTALATIFGACEPRVTNFGACEPRVTNWLIQMLFGLAKRPTDNIYLPNIYLPFRRLYLLQSGLNQVRKTTFFHFLMPFVLHCLVMANSERMAPIVTLHGSCQRIGLFLSKCPLAYRKVNKMINEIWDKYKNRMGNRWSFFRQFADNGVPNSLSEALRSSVGVSADVPHTESALSLDGIVVTPADEHKREKLALITLLNYFSSLSTHWAQLLRPFATSIFQLIPLFSHYSNENTDEELRGCCNAQLVRYMGLSTVASAADLEELFATCTTLRERASWWKSKVCLLRFLQVFAFTNQFFISAHPNGFSALEQLIIDFLCDPRFDVRVAAAETLGGLIRAAIIAVDQQFLAKARDMANSTDPITRHSGVLALSAIVRAIVRAFPYSVPDFLPDVLMALARHSKEPHPIYKDTVKRALNEFKRTHQDEWHTHKLTFTEDQLLVLTNVMISPSYYV

SEQ ID NO: 120056 - protein, 498 aa, Heterodera glycines
FGKCSPKFANVEKAFRRHRHFADGWEREGASLAIYWKGQLVVDLCGGYADKASLKRWGEETRTVLFSVTKAVAALAVQMLIDRGHAVAALAVQMLIDRGHIAYSDKISVFWPEFARNGKENITLEDVLLHRAGLAALDETVTMKAARDHVRMAQILEAQTPNWPLGTRSGYHAVTFGWLIDQIITRSGYHAVTFGWLIDQIIRRVDPQKRGISQFVREEITDKHNIDFHLGLPLSLSHTVSRIDFHLGLPLSLSHTVSRLTFPSFWYQLREFVYDPRVIVVQGVLHLRTRNSLRTRIAENATWIRIDGNTNTFNNPQLFELEQNTNTFNNPQLFELEQAAALGVSRAKDVAKIFSLMLSGELISRKSLIRLSKPQIINQIDYVMKVPFSKGHGFMFEKHPRKEGKWLFGHPGFGGSSVMMDPEEELVIAYVSNGMKSGMGELTRTFRRLKLAAFDSIKMGELTRTFRRLKLAAFDSIKAISDGRTDAKIRRNIINLTA

SEQ ID NO: 120057 - protein, 137 aa, Heterodera glycines
MIGNPTAMSVALFLFALSLSNIANGIVHFVQLQLTDKDKENVEKATSFTNSLLERLGLAGQNDAQQQKGDIRRQPPVSSYQTDELAALGADLAANRIDLHYDYAVVSNWVRYPVFVIARDPERFHRQHMKKVGPKGD

SEQ ID NO: 120058 - protein, 287 aa, Heterodera glycines
MSSAPSIASPTLQAPASSQQTPKKSLTPTKASKSKSLKTAKPKAMKASKPKLPKASKPKSPKVSKSKAPKVKTAKAPSNHPSYSSMIKKAIAELKEKKGSSRTAILKYLMSHYQLGENATKVVLLEKTLKLGLKRGVVSGELKQVKGIGASGSFRLGGSGTPKTSDVKKSPKKRIAAKKPSVMKATPKKAKKAVPKKSPAAKKAKPTAAAKPEVPLPVSPAVTKSKTAKALKKDVPKKSKMAKRSPKIAKKSKTPKKATGGAKTSRKVKNVVASKSAKKDVGVDAAS

SEQ ID NO: 120059 - protein, 47 aa, Heterodera glycines
LQLYIIYTLLGLERHLVMVRGLVTADLLAKARRKADSGRCKLCSKRY

SEQ ID NO: 120060 - protein, 209 aa, Heterodera glycines
CIQIKKEKKSCGFVSHRLISYQELRAHSIYVICMLCMSTPLQLFLNVINAIKKLFILAKGNIRRPPLRTRPPPPLVGGGAAAPTSHAPTPYVCEICDLAQLTDREQYRVHLQAAHRQLLGKNNAEMASGAPLACSRCRDRFWTYEGLERHLVMVRGLVTADLLAKARRKADSGRCKLCSKRYAFNILQRLVSDHRIKVCLHVYNCKFNL

SEQ ID NO: 120061 - protein, 111 aa, Heterodera glycines
MSSESDEQSADVNGLCSQSLRSDEKVCPDPDTIKMFIGQIPKPISNLGCCFVTYYHRKDAISAQNELHNVRTFPGLSHPIQMKPADVENKNGKEKANFTKLVTINLPVTVP

SEQ ID NO: 120062 - protein, 325 aa, Heterodera glycines
NESKGKILDDDSVIATLGKLRNEAQKSKKSAKTDQVMKEVVEIVSQKYYKLANACSLIYLMLHRLDEIHLLYNYSLDFLLDIFTTVLKSPQLGNVKDYDARLSIILQNLFSVMYSRVSIGMLHNDQIVMYSRVSIGMLHNDQILLASLLLRIYSRCCGAENAYEQELEQLTALPPEQVLSSAHMLMTKAFGSEFMQQDKVVNLREIILNEVQCKVQCKVPVLLCSATGYDVSNRVEDLAFELKMDILSIALGSAEGFEQADKALQSTSRSGRWILLKNVHLATEWLTQLEKKFRLHNPHPHFRLILTAEIGSALPSMSVYKLKIY

SEQ ID NO: 120063 - protein, 388 aa, Heterodera glycines
ICREETYVRVQDSGDGRTEEATRPLTGQSKPRTDFAKKAVVQPMRQEKLSVTEQKTLLAPDEQKIREEEERKRKVEEETKRKEEERKRKEEEERKRKVEEETKRKEEEKKRKEEEERKRKEEDEKKRKEEERKRKEEEERKRKVEEEERKQKLKQDEEERKAKKKAEEEERKRKLKEEEQRKKALSEDKSAQRKSTLNMREEERIKAEQAEKESARQKARATGAVEEKSKQYTTTKTEDSFAYKRSKALEPKTVDEQKKRTFQPIQKPDPKAEEAFEKQVKKEWQWQNAVPKPIQMAELREQMRQGSRKLQSEFRDVSQGLKSASDEAKLKTKEERHRTVMDKASSAFGKAEQERRRQREQQESEAERAKREKEERESKEREKREKEK

SEQ ID NO: 120064 - protein, 287 aa, Heterodera glycines
FSGVPQGSVLGPSLFLIFINDLPSFITNEAASVGIKMYAYDVILYYAHENDDHSNQLDKAIEALEKWSKINRLEISTEKCFVLYGKNNMKKEYFINSQRISESDNVRDLGIIIDTKLNFSEHIRKIVRNAYLRIFQISRVLKSREIKTLTAAYKTFVRPQLEYATEVWNPNLKKDIDKIERVQKFFTRKALRKCGFVYKKYGERLKITSLHKLEERRKINDLTTAFKIIKGFTSLDAGKSFFFSERLRRPLLLRVKRHTAKTQNNFFHRIVRNWNNLPVLAVQINKA

SEQ ID NO: 120065 - protein, 139 aa, Heterodera glycines
LLATIFPSIIPGLALFLGIFYGLLHSWLSMLSMFAEALRFGDRRFYANWWSSRNMAEYYRNWNLVVHDWLYAYIYRDISMLGMRWGPAVSQCLVFFLSSFFHEYWFAVSLRMCYPAIFTLYFIFFGVKFCWHNAQVFVK

SEQ ID NO: 120066 - protein, 135 aa, Heterodera glycines
PCSIDALVFGCLAPLLRTPLPNDRLQLHLSATPNLVRFVDSILSIYLPLPEKVIKEQAMARKKWQKLKMDAQQTMEEGRIERELRKAEKKERNSMHHILFFAISSITISLLFALHTGIIVVDTVDHKGKKKAKGG

SEQ ID NO: 120067 - protein, 372 aa, Heterodera glycines
VHFPRFASSSPFHTKSSLRGVHSLRDSAEFVDVFLGVPYAEPPVGALRFEKPIPPQKWDGVRSAVRSASACVPHARPSEREANDVSFSEDCLYLNVITPIWVIWVEANASKLSQILVIIHGGGFEIGSAHRYDFSDIGEKFVRRGIMSVVVQHRLGILGFASSGDKTMPGNLGLWDLLAMLRWVRSNLGLWDLLAMLRWVRSEAKAFGGDPRRITLLGFSAGSAAVSALGMCPFARDLFHQAIQILFHQAIQIWHNFGTNKQEHRSLMRRKCWSERKASKNCTMRSKKSLLLLKRIEFVFQFFVSQGPTRSDVNLNLAPVDGHFFPRDFPELIHESPPKRTLLGFSQLESLIFACMEPRECAETGHCQLSKS

SEQ ID NO: 120068 - protein, 82 aa, Heterodera glycines
MARTKQTARKSTGTVALREIRRYQKSTELLIRKLPFQRLVREIAQDFKTDLRFQSAAIGALQVKQFIAKESRQNESIPVQYF

SEQ ID NO: 120069 - protein, 80 aa, Heterodera glycines
DHLDREYSRTDFSLDDGEQMLRQLDSVREYIQQLHARLLSLTDRCAQISPLWQRGERISKPLPVMALCEYKSKDKIHIRQ

SEQ ID NO: 120070 - protein, 112 aa, Heterodera glycines
MPTPNLQAGMGNGTHHQAEKGEHQAEKGEHQAEKGERNEDMKKSEATIPSQAGWNEGDSQKLMMTNFGTPRDVKGKHLKRIWELEFPEEAADSQQPTAPVNAAPQQQQQATQ

SEQ ID NO: 120071 - protein, 673 aa, Heterodera glycines
MPPVKTKVEELSLKEEEQSTSQTIMTMTRTRRKQKQEMVRKAIRRAEERQRELREQYPLRATAVVQQVAYEPALFQHQLTAADSSQADDPALLEPVHQARQVVPVAQPLFPSAILSVVPTIVELLDDAQVDGSGVSGDCAWTRLATGRHPDPIPGVGGHPIPTFARGFHRILQHTGTRGAPFLSRLLLLPPLLLSPIAIGPFGHWPSAAAHPRACPPAEADRNGQSAADAQRPAPLARGGHSAAHFLPPRRIHAFALLPTPRGGDVFRHVPKHERSGTANDGRTAQIRMEQADREHVREDGECVHVRRLASVHQRDQWHYGRTICAFAPESRRAHQMLLCMQSMLPHLVRHMEEETNQRQQQAANALAALKLELSAYATLSVELRALVNSCDVLARGPTRSFDLAASGGGGGTAGGASLAPSSANRPHATDPRRGRSLGGGGADSPQFFDPPTIVEDEFVCFRLLTLCSMFVQLGSERLKELGRLSVGLDYSRGVMPELLDHKCHIKLSEVAVALLKLAPYDSNSLGCAGLRHYFTQVMPVVDWSVETNRSAINIILRRLDKTIAKIAKRPSTRRRANWGVISFWLVGLHQTLLNSPYIAHLHSLKLVFSLEMICGVENIGPLAERPEAILCQFLIPMFLRAAIPGKGGGSVLTSLTNSQTQIKKRHSSGPKT

SEQ ID NO: 120072 - protein, 124 aa, Heterodera glycines
MSGGVDFPDPSDPQANEIFFFSQITLGEEKMQTGHIEEGITHLSNAIVTCSKPDELLRIFQQTIPPECFSLLVQAIPGAKMRRNASSSYRHGREPIDLDCAKIDDIGDNAVDKKMFVLQDDELE

SEQ ID NO: 120073 - protein, 158 aa, Heterodera glycines
MASRKGKVKEEQPAVSLGPQVQEGENVFGVAHIFASFNDTFVHVTDLSGRETIVKITGGMRVKADRDEASPYAAMLAAQDVAERSYQNSPIVFKVGINALHVKLRATGGTKTKTPGPGAQAALRALARSGMKIGRIEDVTPIPSDSTRQKGGRRGRRL

SEQ ID NO: 120074 - protein, 320 aa, Heterodera glycines
VEDLFDLNSPLPAIGQLEPECSDPALDPVLRELDSLPAFQYRHQLTKFYKPEKALRNTLRSLGSSGKVEQIETLRSLGSSGKVEQIEHVVARLYFAMKCVHSHNHEVHWALSTLSAEVHWALSTLSALYWRVKGDPVNAIKCLRHSLHKSAIKCLRHSLHKSPNIFKDVPLISLANIYHQAGFLHSADVPLISLANIYHQAGFLHSALIVGRKALEAGVDVVALHFTLANIYLEAGVDVVALHFTLANIYASLSDFPHALQFYHSTLALQSNFEPANASLSDFPHALQFYHSTLALQSNFEPANLRILVCFCICLPLFHR

SEQ ID NO: 120075 - protein, 630 aa, Heterodera glycines
MGFLVVFLIASLFAWLSAWISRKFLRISQLVNRIPGPSTLPLVGNLHQIRLKPDEFFEQVQGLAYMFGEKNGFFEQVQGLAYMFGEKNGRIARAWLGPIPLAIIFGAEEVEPVLGSKKLLTKMFHYSFLSAWIGDGLLLSKPNKWRPRRKLLTPTFHYDILKDFVPFHYDILKDFVPVYNRHGTVYNRHGTTLVQKMEKIAESGEFVDIFHTITLCTLDIICEAALGVNIDAQRTIHSDYLDAVFAIKNIIFQRIVKPQFYPEFLFNIFGAGKEQKRCVQILHDFTNKAILARKAILARKKAMEEAGGIEKLVAKKVTEGGKRLALLDLMLDMEQHGQLDLAGIQEEVDTFTFEGHDTTSTALNWFLHLMGANPEGHDTTSTALNWFLHLMGANPEIQSRVQIQSRVQREIDQLLGPAEAELRYEQLGELRYLEACLKETLRLYPSVPLIALYPSVPLIARQCLAEICLAEICFSFHLLPATGIIIVASMIHRDRNYENPEVFDPERFLKFDPERFLKVDYLKHPYCYIPFSAGSRNCIGQRFALMEEKCLITKQRFALMEEKCLITKILRSFRVTSKLRTDEMRVSAELIIRPMRVSAELIIRPMFGNWIRNWIRLQKREIGELKKERQ

SEQ ID NO: 120076 - protein, 372 aa, Heterodera glycines
MGGFDYERVSAFTNAKWQKTLKKNELSLKGWNYGDAEFEEVESEAGQAIATLSDILLATPRGRYEIKVFQNHLSFHGKSYDYKVPLKTITRMFLLPHKDGRHMYFVLHVNPAVRQGQTRYPFLVLECSKEDYIELELGCTEEEYNSLFDYVQTKGLKIRNAQRLGEKAYKEADKFAGSSDEELDPYKEKLKDDARERAAGSESDSEDEDFNVEKEMKKRKADKDSSEGSGSEPDEEYSDDGTDVSDDLMGTDKGKEKEKEGAKKRKKDREEGKEEKGKKEKRKEKEGKKGEKKKDPNAPKRNQPYEQKAKEDKERYEREMSEYQSKKKEAGEGPSSAGQTSSQNQPKKSQSSPSKKPISKEFVDSSNSSDSD

SEQ ID NO: 120077 - protein, 175 aa, Heterodera glycines
MSGRGKGGKAKTEDGKNKSRSSRAGLQFPVGRLHRLLRKGAFFGYLNFRLFVRNRVRASEFIEMDALIRDQFLIGFEFAFFKITGHYAERVGVGAPVYLAAVLEYLTAEVLELAGNASRDNRKTRINPRHLQLAVRNDEELNKLLSGVTISEGGVLPNINPVLLPKKSQHSEVSE

SEQ ID NO: 120078 - protein, 275 aa, Heterodera glycines
MDLPTRECRVEQACEFMTNLLQDIRKSEEKIMSEDELDKLKGEVDALQTFVNKRLEKALQLQAESKRIFETIRPSINSFNEDDLHFLRVDLYNQSTVLSSDFLKKMEKFNERLKDHHDLWAEQVVFRYDELLVKLDELSAKCFQPSTEFPAKPNLKNLSEKELLNLEEEVRIRQQMYERAKPVFDKLNEWMASWKQKLDTERRQRKIVEQKVPKLLNELCELCNDYVKNFQLNDIIVEGLRADKYAESVMQSYHQDREVQKAQKVLRYHTSIDCF

SEQ ID NO: 120079 - protein, 145 aa, Heterodera glycines
AESNEFSKFFKIFSFFRCPTDLTLFPFPFDSQTRKLGIESYGYTSDQVSYGWSKGQREALKLHKIRLPDFRIKEAFVTSQLESYATGNYSRLYVCFVFSRSAGFCFLQLIIPSTAVVITSAVVITSWVSLWVGNETSFQGKEEME

SEQ ID NO: 120080 - protein, 276 aa, Heterodera glycines
GEIQQFASFAMFLWFDELHGCFRPLHSFNQLRIPWLSAHLATVSSLNAVHLPSSLNAVHLPLSGKQILDVGCGAGILSTSLCRRGALVTGLDADKSVLEIANGYKETMAPSLRKKIEFIPGTIERLAQEKDRTFDAVVSSEVVEFDAVVSSEVVEHVSDLPLFIRSCCKLARPNSPIFFTTINRTIWSQLLAKTIAEDLLRILPQGLHQFEQFVAPRDLRKLLAEDLLRILPQGLHQFEQFVAPRDLRKLLLDEQCSVGPVLGNGLHPFFNIWNWT

SEQ ID NO: 120081 - protein, 289 aa, Heterodera glycines
EVIYAILPLFGLLFLLCLLFKFLRAIWRCVYPYFIARPKDLRRLVGAKWAVVTGASDGIGKEYAKQLANKGFNLMLISRSADKLKAVKEEIQPKQFLQPEVKWISFDLTNANIEDYEKWLSELSKMDIGMLVNNVGSFPPLMRFHELPGGHRSIAKDLLLNTMPHTILTAFVLKQMTERNKGIIVNIASVAAVFPLFHTALYSSVKKYLTKYLTWFSSILRKDYADTGIIIQSILPGIVLTKMSQSHTQTGLFCPTPEKFVNSALRTVGHADETTGCFAHQIQAILLCL

SEQ ID NO: 120082 - protein, 117 aa, Heterodera glycines
MIEIIILYVLFYSIIMRLCHRITAKKTTFIQIFVKTLGGMTLTIFAHSLDTIENVKAKIQDKEGIPPDQQRLIFSGKQLENGRTLADYNIQNESTLHLSLTLIGGARTRRQQSQEVA

SEQ ID NO: 120083 - protein, 221 aa, Heterodera glycines
  unsure (1)..(221): unsure at all Xaa locations
REKTKAIGIPITKDSEADQHVGVIQNFGHSFVKTLKVSISGVESYDSGIYYAVRAYMMTELGFSEDVKKGSMXASCYXIDDVDQNDYTNSGFKNRASRFADGAKCETMVKLNFDLGRQPNLLLNNSDVIFSIHRNTDDFLIMAPPYVSGNAVIANPHTYRINIHDIRIYVKTVDVTQSLNNVISNQLQTTPAKYPMRKIEIRSLFIPRGTSDLSHNVFTSI

SEQ ID NO: 120084 - protein, 79 aa, Heterodera glycines
MEKEQKSADDIAAFKKKIQAWVVSLLAKDRFKNLAFFIGENMAEGKGEGQVAIVEYRQENGEEVPTLMLIKEALIVEKC

SEQ ID NO: 120085 - protein, 150 aa, Heterodera glycines
AVVVSALVLVGYLDEKSRDTVYSPQNISQTFLCIFNILSSASPVDDVLMTTHIAADLLHRLVIDDELASDSFPMKLVDDLIYEFKGRHVVRKEGEITMSGANPSAEEIDEGTEEAVERGIDFVLNHRLQEMNCYENQATFKGYVKDFMKK

SEQ ID NO: 120086 - protein, 182 aa, Heterodera glycines
MVQVDAKLDKNERTFLARAYKKLIDVRRETWRFFCNMDENPQDADTEEQKQARTDLRLKTHEGLLQLYREFLDVINEKLLPNANDEEASVFYHNMKGDFYRDQVDLLEEDERAESLIISEKSYEEGFTIATTKLKRSNPALEDANDELCEKEAAGDTEAALLLIQKQLTAWKPKNFAEDAAQ

SEQ ID NO: 120087 - protein, 257 aa, Heterodera glycines
RNEAKVEVAVEPPTAIDQRDDIMTGRFGDGRLVKMEVDYSAQVDSQLIVADNLAKVFAMAAIESLEKLEKDSRINCDMAIESLEKLEKDSRINCDMRSNQRLLCHMVKLAFDANNWQLLCETAKTLCKKRLLIKSSIKKMVQECCEMVPKAPDASSKSTVQECCEMVPKAPDASSKSTLIDTLRAVTAGKIYLEVERARLTIYLEVERARLTKQVAEKLEAEGKLDEAREMMMELQVETYGTMQRKKGAIGQFNEQW

SEQ ID NO: 120088 - protein, 225 aa, Heterodera glycines
KCVVFYLLLSAHDNEKWELLHRVNAMRELEQIPKHKELLELFIHQEELLELFIHQELIFWSKTIESEFAPILFAAQPPVEVISDSFQDGDGQKRRERLHDCVGEHNVRMVAKYYSRITFQRMAKLLEFGIEQMEAFVCKMIVDGVIPEVKIHRPSQIIYLSPKKNGAEVLDEWVFNVRKLTDTMNKVSWVFNVRKLTDTMNKVSQLIAKEEMVHKNVDLKDSPDE

SEQ ID NO: 120089 - protein, 209 aa, Heterodera glycines
MAHPAGDVTDAQVLEMSSDQIDERVRQLDEEIRVMRDEMRKIAYNIKTMGTKTKENNKQMQKYMKMPWLVANVVEILDLADDQAEGEEGSSSDLDARQKKGAVIKISKGLVMFLPRIGLVGPDELKPGDLVGIDNDTYHIIAKLPPHFDRRVKAMEVVERPTETYSEIGGCETQIKELQEAIVLPMTKKELFIKIGIHPPKGVLMYGPP

SEQ ID NO: 120090 - protein, 165 aa, Heterodera glycines
LLTEIKKYISILLGAQWGDEGKGKVLDFLIGHHKIDIVARCQGGNNAGHTVLANGREYHFHLLPSGLASEKVLNIVGNGVVVNLDALFEVLNIVGNGVVVNLDALFEELESNKIEDSADRLFVSDSAHLVLPVHIATDIMRENALGQTRNKRNIKHRSNYLHFSE

SEQ ID NO: 120091 - protein, 276 aa, Heterodera glycines
MQKQHQQNALPKEFVAEHFPFSKFFENRRHQSNLLPLKFELRDFEEDLTIALDGWERIKDIFKKLEEFRAFELLRNGRDRASYLLVIVWQGTLTTNDFSALTHCQVKEAKIIAMTCTHAALRRRELVDLGFRYDNILMEEAAQILEVETFIPLLLQDPQDGRSRLKRWVMIGDHHQLPPVVQNVAYQKFANMEQSLFARLIRLGVPSVQLDAQGRARAELASLYNWNYKNLGNLPHVLEQREFQCANPGFLHNFQFIDVPDFNGVGESTPSAYFYQ

SEQ ID NO: 120092 - protein, 337 aa, Heterodera glycines
FRFKFRDGRTGFLKLSRFNNMLVLPFDDSRCASLSTCTASFVAGDIRANLFLFLGLSSMHIVFAREHNRIARSLQSMNPGWSGDRLFQESRKIVGAEIQAILYKEFLPRVLGSTFDRLIGPYNAYDANADPSVANEFTTAAYRFGHGMILEQYARLAENGIPAGPFPEQYARLAENGIPAGPFPFGEGVFKSQKLLFEGGIDPVLRGLWFGEGVFKSQKLLFEGGIDPVLRGLWSTAVKRPHRMTPAITERLFSTTDLTDLGSLNIMRGRDHGVPSYNKMRRFCGLSSATSFDALSDHISDPSVRAILSSNYASPGQPLKNGGALLQLFVLCSERPA

SEQ ID NO: 120093 - protein, 36 aa, Heterodera glycines
MSGRGKGGKGLGKGGAKRHRKVLRDNIQGITKPAIR

SEQ ID NO: 120094 - protein, 39 aa, Heterodera glycines
MPPKPSGKGAKKAVKSTKAVRTGDKKRRKARKESYSVYI

SEQ ID NO: 120095 - protein, 125 aa, Heterodera glycines
MGQHPEDIATIPAHELHLNAPFNIRTIYNFRLINTGSKRIGFAFKTTKPKRIFLNPPCGTVGVGDTVNVIITVATFDPNNEDIKNDRVIVEWCNTPGPSDTVFKLEWFGEDGMVRRKNLPVIYNL

SEQ ID NO: 120096 - protein, 208 aa, Heterodera glycines
VTLVRRLNSEILLNRILNNPNARRPLEKTKQIIVRRLNGDEDDVQMDSLKISLMDPLMRTRIKIPSRAAECTHLQCFDLNSYLMMSEKRPTWKCPVCDRNAIYSKLIIDAYFEQVLSAVASGDDEIELLRDGSWRLPLPPDTMGVDSDDQNVGVAAAAAVGDYGGAGTAEASAGGDDDDDIMVVTMPVAKKQRPPGGAGGASDAVSSD

SEQ ID NO: 120097 - protein, 229 aa, Heterodera glycines
MAQLCKKLAEKRVFGSRLMAKTTFAMPNHSSYSNLPLPGIIYIYCTFIFYKHFILIETIRHANSKHGLLIYFADVCQKVLFDRVGKENEFKEYFREAMRKLAARCRRVRHARKFHHKQPQGVELAPSVGVVVGQSPFQQFAGRPVVGPNAIVALGHQQQQQHSMTTSGAAAGPSAAMSGSGIGQSQDTAQTMAAVNAALAELAHRRQQQQQMALQSSLGVGSSENKTNE

SEQ ID NO: 120098 - protein, 184 aa, Heterodera glycines
MVRTLKFHEKKLLKKVDFINWPAELDNSLHENKIMRRYHVEKREHYTLYNKLSREIREMAKRIRELDDKNPNKLVLARMLLGKLFDMGVIPTADTLERCDKVTASSFCRRRLPVVCHKMQMAPTVRKSSQLVEQGHVRVGVEMVTDPAFLVTRNQSDHITWTRESKVRRHLSTYNNELDDFEGC

SEQ ID NO: 120099 - protein, 37 aa, Heterodera glycines
MGISQDRWHKRRKTGGKRNPIHKKRKFEMGRPAANTK

SEQ ID NO: 120100 - protein, 88 aa, Heterodera glycines
SWEETAFERFEGLKEMFPTPVRSALSTTVQLTWVVAQNSFSFARSAAWVLSTSALLMVMPYIVDKELQDVEKAQLKQQQQLLLGGRPS

SEQ ID NO: 120101 - protein, 173 aa, Heterodera glycines
MVERFFPNDPKRVALIRSTFTGLWGLEVEDEATREVIEDAIRSHGNYVLKSQMEAGLGNFFDDQLAEMLQQMSTEDRGAYILQQRIKPLVVKNYLMREAKPAELEDVVSEMGIYGSLIGDQSNGRILHNAFDGHTIRSKRSDLNLGGVCCGGGAIDSPLLFPMSQMLDQPNGH

SEQ ID NO: 120102 - protein, 217 aa, Heterodera glycines
MASQQQSLGTDQHPSSLAFRQGQLFFRQTAPGNPFLASAPIASELQILRVRPLCSQRLSSPEELLKSTPFSAVMAIDMAKESGRRTEQPLRFVIQWRRKVRGTQTSVEAEEEEQQTKESKWITASIEFDHTFHVTGIRAGHFHQFSVQLVSPLGPVGPTVRSHWLNFDAIIEQFEPDGPMRRDSLQFFARYNMDNGVAALVRWRRDRDGQSKAKGTK

SEQ ID NO: 120103 - protein, 242 aa, Heterodera glycines
STNSCEDWYEALLGKNVDCIYIDFQKAFDSVPHNLLLYKLEKIGIRGKLLLWIKGFLSNRTFRIKIGDALSSSKVGSGVPQGSVLGPLLFLIYINDLPDALPSGVKIKLYADDVKLYICYKARADTESMRKALHNLFEWANKWQIKVSIQKTFILYLVSKNPKETYKFDGNTINAVETIRDLGVNIDNKLQFSDHVNHITRNAYLRMRSLFRIIKSKSSKIWITLYKTYIRPLLEYAPEVNQ

SEQ ID NO: 120104 - protein, 1209 aa, Heterodera glycines
VLYADQPTTFDVDLPMICSYLTYWWQHGLEGSRSLVLITQVTAEHINRLFCSLLTMMKDHVGRENAPWLCRAHFSAVPLIQYVTCDPVREQMLPVAEHLRQMAEKAFADEERMRTHPDEADDATVAEDNARLVRDVYAFFPILMKFTDLHRAKWLKMPSWESDGIYENVAVIFRIWSLSQHFKREELNYMAQFEDGEGTLSAMGAEMKTGKAAIAERKKRRREGQVGKMGEWGERTGQLAIRRDKHANSIVIACLKRLLPVGLNVFGGRELDIVQQSKERFLAKENEEKVCKFIRSRLTVPVRTRTDPTDKNAWQLSLYRKIGKSQMRGKEEMSQEAVVDKIANMAKVVAILHTVRGQNKIKKVISLQTEHPQAYKPSEWKKMVSSQRKRAVVACFRMIPVYSIPRHRGINYFLPVFSQHWLNDEDIDEDRLVSDICAVVEQQNSIVPDALRQLILCFQRAATSEESGQSNSRSDRLFIRYADVMCRSVHIGQSDRLFIRYADVMCRSVHIGQDGDEGGAMDDENEVDQAEKEEMAQTLRAEQGVLANRGAAIMVLMYLSAASGEPTVLMYLSAASGEPTEMVAQTLQLGIHLLNGGNKTIQKSMLNYLQLKKDVRFFTSSMLNYLQLKKDVRFFTSLSGLMNKCSVLNLEMFERQIKAEGLMGAALAAGEHQEHQNLNDAPFTCSLFRFMQLTCEGHNLDFQNYLRTQPGHTTSVNLINSTRTQPGHTTSVNLINSTVDYLLRLQESVMDFYWHYSSKEMIDENGKEYFLRAIQVCSQVFNTLTESIQGPCVGNQMTLAGPCVGNQMTLANSRLWDAINGFFFLFAHMMEKLYKNSTQLELLREFLNLQKDMVVLMLSMLEGNVLNGPIGKQMVNVLNGPIGKQMVDALVESQQCVEMILKFSDMFLKLKDLTTSQAFQDFDTNRDDLTTSQAFQDFDTNRDGWISPKEFQRAMEAQKMYSVEEITYLMMCTDVNNDGKIDYMEFTERFHNPARDIGFNLAVLLTNLKEHITNDPRLEKIVEKAGSLLDYFDPFLGRIEIMGSSKKVEKIYFEIQESWLEQWGKQQIRDSKNAFLFNVLQDDGGDQGKLEAFINFCEDTIFEMQHAAEISSGDSTTKVERAMRQRDYFLQQTYAGEQISKTLRAGYKCGMDAAAALRPENIQKELKRAAKKFSSMSWAELFTALALLCFRAGRAFFFFHLFLLSTAFR

SEQ ID NO: 120105 - protein, 383 aa, Heterodera glycines
ERLANKIVLLFTLCKEQLSNQCHYDFGLRALKYVLLLFTLCKEQLSNQCHYDFGLRALKYVLVSAGNIKRDAIQPGEQAVASQMSEQQMLGEQAVASQMSEQQMLFQSVYDTLTPKLVSEDILFKSPLHQFFPDSPKQVESLKNEVLICKTEHFSCSPITGEKLKNEVLICKTEHFSCSPITGEKGNLWLEKVLQVYQITNRNHGLMLVGASGSVKTTAWKTLLKALENHERVEGVSHVIDAKSISKDTLYGTLDPNTREWTDGLFTHIIRKIIGNVRGELDKRQWIIFIIGNVRGELDKRQWIIFDGDVDPEWVENLNSVLDDYKLLTLPNGERLSIPPNVRIIFEVADLKVRIIFEVADLKFATMATVSRCGMVWFSEDFV

SEQ ID NO: 120106 - protein, 142 aa, Heterodera glycines
VTVPLAYQHFQQVGTQMQNEMDFCKLRSGNIWREVTRTQVVTRTQVLSQFTGGVRQPRAVNTGKSRRIRQYEGAAGSGATGVAASGAAGGSSAGGGGCCGCGVSQPGPPGPPGPSGPPGRRGSPGGSGQPGSDGENSKQSIE

SEQ ID NO: 120107 - protein, 110 aa, Heterodera glycines
MYNCNMYNVEDIPLADRQSIPLGLMFLTLGLICEVLYLPCMLAIRKHMDSTCFKFMFYIAVADMLALFISGVLTGYLALVGAVYCSYPKLIYTMGAWAICMLIFLLLPCN

SEQ ID NO: 120108 - protein, 191 aa, Heterodera glycines
NLAVPMTPLPFAESAHRTPKQHHQPHSAAAQPPPSNMPAFVPATPFSNASVEIPSPTLQNIVSTVNLGVQLDLKQIALRARNAEYNPKSAFGAVIMRIREPRTTALIFSSGKMVCTGAKSEETSRLAARKYARIVQKIGFNAKFTEFKVQNMVGSCDVKFPIQLEGLCITHAQFSTYEPELFPGLIYRMVK

SEQ ID NO: 120109 - protein, 555 aa, Heterodera glycines
MAFHKIDNDSVNSITNALDFFRIPPTNVSVSSSKVFELLPSNPLTDTPYHFKLHSSQNYIDLSKCYLLTEFRIRKENANGQLINLDIDDINIAPIQMIGQTFIRNIKMSINGRKIFNANALMAYKSYFSHELSYSTTAKDSHLNAAGYYRDTGDTLEMGGGCTARRDLFAGSNVAQFIAKIDTDLFNQPLYLINFCELDIEILPNDNDFVLIAPTGGRYRFEVVGLKMYVKKVSLMDGLALDIARKLEVKPVRYAVRKTMMKSMFISQGRYEFTANMFMAQIPRRVTMGLVANTDYVGTILRSPFNFQPFNVREISILANGRSYPQAPYDLVYPNGKYVRPFNDMNEAVGFANSSESNGITFAQYGKTHCIYVFNLTNSGDDQAALFDLIKNGTTAVSIKFNQPVPVGGIMLVVMGECDSLVIKLGLILFFLRISLPLVSSTLREQQQQQQQRQPENTYSAYLKNLTFTRQQYEPEYSYTEYLRRLSLSKRTTNIPFTTTPKVPPKSDKLIDEHVSAVLPPLIQMCKDRPEESSFFHQAVCWALFALYLMFIISL

SEQ ID NO: 120110 - protein, 204 aa, Heterodera glycines
VSLMDGLALDIARKLEVKPVRYAVRKTMMKSMFISQGRYEFTANMFMAQIPRRVTMGLVANTDYVGTILRSPFNFQPFNVREISILANGRSYPQAPYDLVYPNGKYVRPFNDMNEAVGFANSSESNGITFAQYGKTHCIYVFNLTNSGDDQAALFDLIKNGTTAVSIKFNQPVPVGGIMLVVMGECDSLVMLDKNRSISSDTTI

SEQ ID NO: 120111 - protein, 183 aa, Heterodera glycines
SVLQGIGDLFVDTNDEFCQLGHILQRLLHWLAVDPSSFEQAYVPLCLPKLLGPFVRLQLVDWRPLKSPTQRPLYRMPWYRALLMAGLDNSGLEDLEHPSLVSLIPSVVEKIVFPKIAKIVREQWDPLSLHESSNLAQLLRSLRSILSDACLEELVVEGLLNRFTVLALRVGPPVDADQMSGSD

SEQ ID NO: 120112 - protein, 88 aa, Heterodera glycines
MVKASFHGHVGVVSDVCWHSTDQHLFVSASFDNTVKMWDVRSPRAALYDLMGHSDRVLCVDWTVPSRICSGSVDSTVKVFSHGTEENI

SEQ ID NO: 120113 - protein, 231 aa, Heterodera glycines
YFKSVAFWWMFLEGGLYLHNLLVFAFFNKTPKLWPYLITAYGVPLAHTFCWLIVLLVKKHGQLERCLGSYYLETEFWILDGPRLLQLVLNAFFIFNVIRVLWLKVRDSQQSSSENLRKSVKAALMLIPLLGIPNIMQTIPFSPTQENITYFAIWTYCAYFAIWTYCASLSYMYQGFMIAIIYCFTNREVQSVIIYCFTNREVQSVLHNCYTRHRLSHSRTDELFRGATTAG

SEQ ID NO: 120114 - protein, 340 aa, Heterodera glycines
KVIEIISEQLPLSFDIATSYANGTNEDQKFVSNFAQLLSTFFKEHSALVEITFPHPDEEQKAVKQAHLMALKYLLKISSEVEDIEVFKVSFLYGTLITLSPITQICLDYWNWLCMELFRESPFEQSEHSIIDALKRYNRQESPKRKLYIEVLSELRLLMISRMAKPEEVIVVVNENNEAVRELVKDTDSVVLYKTMRETLVLLTHLDYRDTELKMTEKLQNQVNGSEWSWKNLNTLCWAIGSISGAMHEDDEKRFLVTVIRDLLGLCEQKRGKDNKAVIASNIMYVVGQYPRFLRCHWKFLKTVINKLFEFMHESHEGVQDMACDTFIKIVIKCKSHFIS

SEQ ID NO: 120115 - protein, 128 aa, Heterodera glycines
TVEELRLKSNSDLHKLWYVLLKERNMLLTMDHAYKVRLRNMPNPERIDRVAESMERLEAVVHERNDAFLQLETGDSASPPKRTVTSFMGFTYEENVKKQIYYGIFSSKTFKFVKYYILEVSCFRRATA

SEQ ID NO: 120116 - protein, 138 aa, Heterodera glycines
PADGHHFLRIPIKDSYSAKLLPHFDAAFEFIEAARASGHKVLVHCLAGISRSPTLVIAYVMRAKQVVSDEAYKFVKNLRPTISPNFNFLGQLMEYEKLLRDQKQMPSPNRRRRWFSLKRSRRPSLLIVGPASLLALMP

SEQ ID NO: 120117 - protein, 423 aa, Heterodera glycines
FLSNSANQDDWEAMMEISNTDEQEKIQEKIRELAGENALPTTDPNQCIICRRVLSCKSALQMHYRTHTGERPFKCRICQRAFERPFKCRICQRAFTTKGNLKTHMGVHRSKAPGNLKTHMGVHRSKAPLRIRCTICTTACRRRKMPAEGCPTSTAAHCTLIARASAPGTADIPCPICGHKSGDPGQLQQHMADIHGSAVPRGDVRPSPSPRMPPAPFPPMIVPPSLNDTEPNEPPLLVKEETEMQRHAEGTDGGESAVEEKVKREKGKAQKTLSPDSSSSSEMQQRNCVSNKIPSKQYECPPVFLDWPFLPADPTIFSAADSPPPAFPKIPSAPRPPPPRGRVPLAKHQCRWCMKPFSSSSALVIHSRTHTGDRPFKCEECGRAFTTRGNLKVHMGTHSAPQNPSRRGRRIFDGGGVAARLPL

SEQ ID NO: 120118 - protein, 272 aa, Heterodera glycines
HLFHQQRQNAPGNIKVYDHHHPYETDLESGLTSDFDVQLELADGFAISLVGIVDEEGESKGLKQEELCYGRLSGIKLNVGKFKATYRINCHIDSIQMDNQIIGADRWHFLFCDPGALKDEPMVGLPALAFEMSYTPSEFFDVYEACPCPTLFICSELNKQLTLFSFENALVTLAPFCWLRYFCSLSRLLETLGNFYLNKLKRQKLNIIFAMDAFGNPMALGNELKEGLQGLIFEGDLAGFAFGIGYGAANSLSKVTSSMAQGKIFIIKQKII

SEQ ID NO: 120119 - protein, 222 aa, Heterodera glycines
MLAKAAAKEWSTKLFSIPSSVIISKKDEESVDFIKVLFQMAKNAQPSIIFIDEIDAFLRSGTVQRGKAQFLVEMDKLSSNSAYHVLVIGATDQPKELDKEASRRFAKRIFVENPSQQTREKMIRKIVEENQHAFELRDEEIKQLASRTENYCFDDLLDLCQTVNLGVLHDASERNEFGQWETVAQLRHIKMNDLENAIEKVGFMATRTTYSVIHKSNSYNVV

SEQ ID NO: 120120 - protein, 140 aa, Heterodera glycines
MGGTGPCGPCSEIHYDRVGGRNAAHLVNTGDPMVVEIWNLVFIQYYRRKIKELFKRATIYGSQMLGMERMSMHLMVPVIVEQLGETFPEMAQNKHKIADAVRIEEERLWKQRDDGMRHLEELFRNHPPTSKVFPGELIES

SEQ ID NO: 120121 - protein, 448 aa, Heterodera glycines
MTFRQLDIKCLKSFFIGLSFFATFFVSTNIIKPLQSLVCITSPNNCKEFVNPSSDPNLTSSKIAPIFYLMIYRNAVLNYVEEAFSSRYEVQKLANYAIDWAFNNGMILRYDIRHNFIAQFSPVSLLPSPFPREAFEKAIAVQEDYMLNTVKSSKEDGMDRYEIKQIEANTGAITGLRIDRRTTELHQRLLKRIGRDPTNAPQNEGDTNLINSLFMAWESFGNSDALFVILSAKWNKYKYELRNIEDELERLSGGKLRVEYVPLLEGYENFSLADDNSLLLNGKIVGVVYSGLSALGYQANEKEMHTRKIVELSTAIKAPSLAIGISSSKKIQQLLASPGILERFFPDPAEADKVKAIRETFTGLWGLEKDDKQTEQLIANYFLRPFYAPKFGLVVSELGVYGTLMGDMLTRNVSSNVQRGHVLRTKSAGVNEGGISVGTAVGDSPYLF

SEQ ID NO: 120122 - protein, 120 aa, Heterodera glycines
RTINQRFALLFDINNNSTCKSVLHGVFCARYKMSAPTTLATNSRRQTPSEFLKKIVGKPVVVKLNSGADYRGILSCLDGFMNIALEQTEEYHGGQLKAKYGDAFIRGNNVLYISTQKRRM

SEQ ID NO: 120123 - protein, 74 aa, Heterodera glycines
MFLTRSEYDRGVNTFSPEGRLFQVEYAIETVKLGSTSIGIHTKEGVLLAAERRSMSKLVVDDSMSKISEVEKHI

SEQ ID NO: 120124 - protein, 144 aa, Heterodera glycines
ISLGRPFGVSMLFAGIDHTGAHLFHLDPSGTYIKCLAKAIGAGSDAAEQTLQEHCKNCDKKMEMAEAKQVALNTLKQLMEEKINSKNVEIVMIKPQTDKEGKTVAIGRKCIFCYLFPFSVGQNCVVRGIGVARNHFAIVVEGDG

SEQ ID NO: 120125 - protein, 686 aa, Heterodera glycines
QNDVHDLDSRTNTLPSSCKNSDREHILLQLLLKLVVGQRPEIQKVATYFSVINKCVSSVAFGDTALDQDTEKQNVFTGGDLDDEFDKMERDDGIKRLNKRLDSAVEEKQEAVSLQIKYYEKLKELQHECSELRKVAPSGRALPPATVLDLPLPKELGKIVNGTQKHGIAAGAAFPTGPGCPPPPPPPPPPPALLMPDHKRNKLVTAAGGSVPPPPPPPPPPSALRPGGGGPPMPPPPPPGFGTPPTAFLHAASPELPDYLKKKSGNQPEVPMKKLPWNAAIAKFSATGRMNCLPMNLAKRPPSKAKTPLVIQDAKMLQALAILQGSCKLSFKRWRNAILEVDEKALNAELVDKLKSALPPLEMINRLKKCTDDEMQRMPEGEQELLKSQGLKHFINLVLLVGNFMGRTKNSKDAFAFELSVLNKLVDTRDCDNSETLLHGLIRLLHRKFSGKFTTFALDDFHHVSKACRVDVSELSKNKIDQVATYLSGYKMQAENDRFNERIGAFVKQAKEDLVTVDSLWENMQRKWSAVQAYLCFDPKKYAMDRLFADVHTFKGHYQNARAEVLKDQLKGAVDGREGAKASSRKPFKPIQPIASEAAKRAQQRNSTSSRRELLLSNEGGGGGSTATTPARPQATKIGTTPNTVPFGAKDAAGGGDGGVIDKIEQMLEEGMYRIECQKRPFRVRR

SEQ ID NO: 120126 - protein, 220 aa, Heterodera glycines
MEELVALSPGIRVGRWTITKKLGAGAFGAVYLCVNDQGEQAALKTEPVNTPHPLLVMEAHVMTKLDTLRDGDGKHFCRCLDLGRDEQQDQQSGQMKKFNYIVMSLVGRGLDGVVKDAGGRLSLGSAVGVSIQMLAALRGLHTVGYLHRDIKPGNSTIGRPESNEIRLLYLIDFGMARKYTRDDGSQHRPRVATNFRGSPRYAAISAHLGREYSRKDDIES

SEQ ID NO: 120127 - protein, 277 aa, Heterodera glycines
VSDGSSPTRSFSSVFHSLASGAIAGAFAKTAIAPLDRTKINFQVAFAKTAIAPLDRTKINFQVSPSRRYSFKAALRFVILTYREQGFVALFRGNSASLARVVPYAAVQFAAHEEFKHMLNVDKNRCPTPYRRFLAGTLAGVTAVVFTYPLDTAKARLSVSTKEEYQNLRAVFLKECRAKARLSVSTKEEYQNLRAVFLKECRAHGFLTFYRGIFPTLLGVMPYAGLSFFTYESCKLFYTSQTHLKPDITHNENAKFLLFFIPFYFFLEETGNPEPVV

SEQ ID NO: 120128 - protein, 175 aa, Heterodera glycines
IKYPSNFMLLRGNHECSNINKAYGFYEEIDRRYPRPGARRLFDLFNQVFAWMPFIGLIGEKILCMHGGISDKMRSLDQLSTLRRPHTRPPLRSLEIDLLWADPAQGIRGVVPSTRGAGILFGEDLVAQIRTRLGIDYIIRAHQLVLDGVEYFASRRLITVFSAQRYSGRTTREQR

SEQ ID NO: 120129 - protein, 655 aa, Heterodera glycines
MNRFRNQHFVFGNRMFEKNSVLQLQGIPLICKEGMQKNVRFVGDSPQQSTAVIQLDAKKSAFFPAIGLVDFVGYFINSDPHRLESDVQQKARVVNKQIKGLAVQTIHLPENQMTFSASGLTDRGANEITFTIDNHQTNLVQYYDQKYNRRLRYPCLACVIHRRGNQESYFPMEVLNIVDGQRVSLDKQTPKLAEQMIKKCQVLPVDLPRGIETQRDKGMIQNANPFFRAHEIRVETNMMQAEAQLLYPPAICFSAPIEKIEPNNRGVLDFRLADRGQPLPLRYSVPCKFPKVWAVVIVQNSVQRDQCSEHVSEQFAYYANNRCKFVLFFAPGKESAHAGVLTQHVAPKTVDKALGRQGAIMVLDNIMLKTNLKMGGANYEICAAQAFKEANRIRYDILSEQWLGRKRMFFGLDMSHAPPQTLFERRTGKAPAIPTIVGMAYTISEHLLQMNGTYWMQQPRVATVQMASPMVNAVKEALMTFNAKNGFFPEHIFVFRAGASEGEYKKVGETEELQKGDQLKVAYWEGGAFATAFAELTKERKMSKKPALTLIVCQRNSNYRIIPNNVRPGGRAPEQNCQPGTAMHSSLTEFLLVGHRTIQGTAQPLRCTVVIDTAEPRIKLSELEQISYALCYQHGICCSSTAVPGVLYSAGDLAK

SEQ ID NO: 120130 - protein, 54 aa, Heterodera glycines
IVPPNKKWRISNEFVSLFHSILSGIWALAILTRFDFHQIDDLVNKDSLDARYLV

SEQ ID NO: 120131 - protein, 114 aa, Heterodera glycines
MDFFFYHLQINLIFLFVIIIPKFSQSESDRLRAEQLLNEHKRDFDRQYEENKARLEDISNTISSIDGALPALNLEVCGADSAPCDAVCGGPGPTCSRCGGSSCPGTLNLKNIKY

SEQ ID NO: 120132 - protein, 136 aa, Heterodera glycines
PHAKVESDEEGGAESGDEETAKERAAIEAAEDAAGELHQRLNIGAEKQHTGSTLTQPAPAAPTAGSVIIRDYDPKKSRGGPVSKTAAASTEKYIISPLTNERIPADKLHEHVRYNTVDPQFKEQRDRCVLAKGGLS

SEQ ID NO: 120133 - protein, 619 aa, Heterodera glycines
AELRVSNREEDAQNIEPSMSGKQIVGLIIPPPDIRTIVDKTALFVARNGLEFEMKIKEREASNMRFNFLNPTDPYFAYYRNKVFNASADTQSASADTQSKVKLPEAVREHVQRAEFIPRLPPKPFEFCADPLTLNAFDLDLIHLTDLIHLTALFVARNGRQFLTQLMNREVRNFQFDFLKPQHSNFQYFTKLVEQYTKVLIPVLIPPKTIVDDLRASVTQHKILEDVRYRVGWDRHQKALKDREDQAVEKERIAYNQIDWHEFVVVQTVDFQPSETLNLPPLCTPKDVGARILLQQRTEAAKAAAESVAMDVMDQRLNIGAEKQHTGSTLTQPAPAAPTASVIIRDYDPKKSVSKTAAASTEKYIISPLTNERIPADKLHEHVRYNTVDPQFKEQRDREQMDRQDEDLVMAPGAEISRNIAKLAERRTDIFGIGEKGAEQTIIGKKLGEEERQMPRSDPKTIWDGQLSTIDATTRAAQQSVSLEQQISEIQRQHGYLPNPAAERQHGYLPNPAAERMVPFQQRPPPHQSTGGIASNVQKIVPVPQQPPQMSIPPAPAPPGGRPHMPPPPHMGMPPPPGGRPHMPPPPHMGMPPHGVMGAMPPHMQPGKQTHIWGSYMNK

SEQ ID NO: 120134 - protein, 306 aa, Heterodera glycines
MDLLKSYDGSSSSDNEQELADIPSSSNHNKLLALKIPSINLTPNVIEQRAIQQVAVVDPKTKELYHNPRFDELFRPEVVPYVLLCRSGPQNPFKSEHQRAEKNTLTGYVEPAHFNAFHFERSLRSYDTLGYADNPTADTTSAKFVGDVGQAQEKAGESLFESVKTGGQKRKRVINYDASNVDGYTVKDDTDYLGRSFMEPPKYTGTNLREDFVPDRCFPPTKQAHTYSSHTKPVTAIRWFPRSAHMFISCSMDGKVKNRYTIGGHRAYVVKFNPDDDKQNIFMAGMSNKKIIQWDTRTGEIEQVEK

SEQ ID NO: 120135 - protein, 105 aa, Heterodera glycines
MNSTSSSYRIGPQWWKKPIYQSPVVNPLERGPDFSFVDGRRLPFTTESEFNRRVKQVELGRKVVQYLAEIRHAEELYKENNLQREIVQQKIEQNMPKQKGTEELF

SEQ ID NO: 120136 - protein, 249 aa, Heterodera glycines
CFQLVVGRIRSCPDWSGGEDEDVLSLGLFPGTYLEFSMDDRVFFQFEAAWDSSLHNVFFQFEAAWDSSLHNSPLLNRVSGYGENVYMTISAAYMEIENCAQSAIITKDLGLIVYARDSKISAASRFCRSLIGGISKSAEMNRVPGVYLLTVMEDSDPGTARRKRRILDTSSTYVRGEENLGTWRVRGEENLGTWRPRGDSIILPRGDSIILEHQLELEKLSKLQQVERMRLFLMVSDTPGGESRKINIL

SEQ ID NO: 120137 - protein, 99 aa, Heterodera glycines
MAVARPDLVMKAIIPVVMAGIVAIYGLVVAVIISGRLEAAGPGYTIDRGFSQFAAGLVCGLCGLGAGYAIGVVGDAGVRDLSQQPRLFVGMNLMLIFSE

SEQ ID NO: 120138 - protein, 329 aa, Heterodera glycines
CNQHCLSFTNFSSKILEFLNSTRFFDKEQFGFLKNRSTTTQILKTMDDIYNSIQNQQIDIIYIDFVKAFDSVPIDLLLQKIKKIGIEGKIYNFLTNFLKNRSFKVKIGDELSESFKIFSGVPQGSVLGPLLFLIFINDLPSFISNKASSVGIKMYADDVKLYYAHENDDHSNQLDKAIEALEKWSKINGLEISTEKCFVLYLGKNNKKKEYFINSKKISESESVRDLGIIIDSKLNFSEHISKIIRNAYLRIFQILRVLKSREIKTLTAAYKTFVRPQVEYATKVWNPNLKKDIDKIERVQKFFTRKALRKCGFVYKGVGKDKSGLHKL

SEQ ID NO: 120139 - protein, 143 aa, Heterodera glycines
MDIATDFDGLGPIATGNGKSTVSESDEGELIGNKVSQNNSKKAEEDEGEEESTTYTNILGEEKDVTKGVGAMLKLAGQKGYLESGERKLEEGKLKHLESKRFSKVEQGRYDIEDKTMRKLERMGTTGTGPTRPFPEKAEYEPK

SEQ ID NO: 120140 - protein, 186 aa, Heterodera glycines
MANDANIIVAASATKCVMFFAKGLRSKFTPYVSLVVPVIFTKFKEKKQLLRDALVECIDGIATYTVKMDNPIEMNDRIELLANANPSSRLFADSAKKRDEPKSRHNLTFNSTPDDPIATKKDADQTSNWAGAHDTAFLSGTLSSNQRIECGTQQIGYEKGVRTALSFSRGKAMPPSPMLFCARKIR

SEQ ID NO: 120141 - protein, 396 aa, Heterodera glycines
SESTGLTEDIKGPAHLLSSPRTLSQPIQQLIALGRTVYAVELYLRCRSVALRAAARELTISEEPLSYVRQVSGLFVNDILEVCQELSPHRDQVCQELSPHRDQLCQVLTWSSRELSVLLSLIRRHVIEVAPTMAVLTHTWRILMSKHTWRILMSKCAQLVPIGLDLSFEVNRLAAPSLKNALEANFGNILDSIRLRNSEERWTPFSLGTDQNLIRFLEEERWTPFSLGTDQNLIRFLEEMSDIGLQIEWVRSNSGAYRCALNLAQSGCLFARTALQLSRDLALLNTSPHLHQRDLALLNTSPHLHQLSDSLMHSIWTEQLAHLTAGMHKSVVHHCTSRFIVSQVLPLCEKVYELSENGTGILHTLKHEIPPFAALSAQANQHFFEQQKSSEEVANV

SEQ ID NO: 120142 - protein, 85 aa, Heterodera glycines
MCSKPTNVFLFKRLVSPVQICCRSIKGGGLVHPVTGKEPPTLEEFDPLNPGEWQLGAYGKILPRLPEGTRCGGLVMGKYGLYNPK

SEQ ID NO: 120143 - protein, 213 aa, Heterodera glycines
FSRSTTAPVGIPFVVDNDGKTERVYDIYSRLLKDRIVCVMNPIDDFFAASVIAQLLFLQSESGKTAINMYINCPGGSVTAGLGIYDTMQHISAPVATWCIGQASSMGSLLLTAIGQASSMGSLLLTAGAKGMRTSLPNARIMVHQPSGGAYGTAADIVIRAEEINRMRKRLNEIYAMHTGQTVETIDQALDRWDRSDGSGKIFNILLESFRKF

SEQ ID NO: 120144 - protein, 86 aa, Heterodera glycines
TFLAIIFCVALSEYDMVLAEDDEMKRMIESMKLFKRMIESMKLFDSICNNKWFLNTSIILFLNKKDLFEEKIRRSAPKMVLKNYSP

SEQ ID NO: 120145 - protein, 67 aa, Heterodera glycines
SGQALNDPSTQYIEGRLANRRVWWCPSGYGYLAYCPQPTDWDNYNWCCTFPYFGSWKPSCCPFAIPT

SEQ ID NO: 120146 - protein, 174 aa, Heterodera glycines
MDVGVENESVVLKIGFAFAMKVINEFGYRQDARTPSQIRNIVYQMGVYSHADGSAYIEQGETKADGANLAACVNVASLALADAGIPLRGLLSAVECGSADGLPCADLSSREHSELVPRLTMATVGGKDEIVLMDMKNLLHKNHLPSLLQMGVNACAQVHICLETAVFRVNYKHI

SEQ ID NO: 120147 - protein, 110 aa, Heterodera glycines
AQLVRELKKVDDKDLLVDVQLEESIGFYHLSNYTKARADARTIANTKYTPPAMQVMLDQSDEVHSIMTGKTAQKYAKTETEAMHAIAEAAKKRSLAEFNEVCNGAGEKAI

SEQ ID NO: 120148 - protein, 33 aa, Heterodera glycines
MEHYDRAITIFSPDGRLFQVDYAQEAVKKGSTA

SEQ ID NO: 120149 - protein, 134 aa, Heterodera glycines
MSDESEISSLNEADVTDLRERYENTQRQEVPKEVMVQREMQIRELESILRLEEAKLMMLKKLQQSQQKAAQKTQQQQNQQQQQQQENVRRLAPGVVQNSTGQAYKPKVAVVNPSQHQTGNTSKTNGTTPQHGKK

SEQ ID NO: 120150 - protein, 177 aa, Heterodera glycines
SARPKVFFDVMVGGKSTGRIVMELFSDRIVMELFSDIVPKTAENFRALCTGEKGMGKSGKPLHYKGSKFHRVIPSFMLQKSGKPLHYKGSKFHRVIPSFMLQGDFTRGNGTGGESIYGNCFPDENFKEKHTVPGLLSMANVGPNTHGSQFFISTVKTEDVRQAYLAIFEIHDHKLIR

SEQ ID NO: 120151 - protein, 159 aa, Heterodera glycines
ANRQVSANGRILHAAQLTDDVLVNFCFNTATRRFVRGKQLNYRKPSRGRPPAVAAQYEFGSKSLNSSFSNLSMMYGGFVGVPHFRVVAKLVGYQGISGISAILFDLLGLAQRLLNDQIKTHFRSLLGLMPKMCKLQRFEYGVEAISKDFIHQLRDFSAY

SEQ ID NO: 120152 - protein, 729 aa, Heterodera glycines
KISKYDVFALFNIIFSFSEGAGLIAAALIAIVPGYISRSVAGIVPGYISRSVAGSYDNEGIAIFCMLLTYYFWGIAIFCMLLTYYFWIKSVKSGSIFNSVLCALSYFYMVSSWGGYVFLINLIPLHVLWGGYVFLINLIPLHVLTLICTGRFSHRIYVAYSTTLICTGRFSHRIYVAYSTVYSLGTILSVYSLGTILSMQIPFVGFQPVSTSEHMGAFGVAFGVFGLCQIVALAQWMRSKMTADRFQLLLRSVLLVFGVHVFSMCFHLHVFSMCFHLSILPEIAPWTGRFYSLLDPSYAKNNIPIIASVSEHQPTAWSSFYFDLQFLVFTFPAGLYFCFGLYFCFKKLTDQNIFIILYGLTSIYFAGVMVRLMLVLAPIMCILGGCILGGIAVSSTLGNYVVNVDLFGAEKKRREQRLSRCFFLHISLAVTLAMSICLISFVYHSTWVTSEAYSSPSIVLSARSGDGGRISTWVTSEAYSSPSIVLSARSGDGGRIIFDDFREAYYWLRKNTPDDAKVDAKVMSWWDYGYQISAMANRTTIVDNNTIVDNNTWNNTHISRVGQAMASNESHAYEIMHELDVDYVLVIFGGVTGYSSDDINKFLWMVRIGGSTPEGRHIHENDYYTKNGEFRIDKEGSSTMLNCLMYKLCYHRFGSSTMLNCLMYKLCYHRFGTVYTEHGRATGYDRVRHAEIGNKNFNLLHLEEAYTSEHWIVRIYRSQKWVKKCLKGF

SEQ ID NO: 120153 - protein, 266 aa, Heterodera glycines
RFILVPKCHEHLADLSALRFLVVDEIDRMLEQGHFENQEKEINLFILIVKNLLILFIISDLIIYAFCFGILNQFNLINLFGLSFEVRRIALSMSMRKGAANLSVIDLTPPQKTPQTRTECRMNCADLLQDLDLNLMYLLKRHGGRTLVFANSISAIRRMHSLLKKLALNTALLHGRMKEKERLKSVDKFKASDDSVLLATDVAARGLDFYGVQNIVHYQCPKTTESYIHSYIHRSGRTARASSAGLSVLFVPLDLHQYLKICRNTK

SEQ ID NO: 120154 - protein, 122 aa, Heterodera glycines
MDKGRSKSPNHNNEAEETQSAKEDKTDHKTNEQMLLVRTGLKLKRGTLFKKKRNVDPKTIDLTIKKEQEGPRKTKAELAFLKRQEETAFDRLSKRAQISHREKVEKFNKQMEELTEFNDIPK

SEQ ID NO: 120155 - protein, 305 aa, Heterodera glycines
DGKPEEFGEDAKLFVELRLLQRDVKVVLETTANQNFIGTVLHPRGNIAENFIGTVLHPRGNIAEFLLKEGLAKCVDWSGRRGGAEKLREAERIAKEKRLRLIAKEKRLRLWKSFTGSSSTVKNAFTAKVVEIGLVDSLSVLKDNGVEIGLVDSLSVLKDNGEEMKVYFSSLRAPRREGTDGTSGGVREGTDGTSGGVQRQFRPLYDIPFMFEAREFLRRRLIGKSVQVIFDYVQPKQDQFPEKTCCTVMFNNQNVAVMLIERGFARAVRHGRDDDNRSPQYDALFAAEAQAEKDKKGIWAEKCTE

SEQ ID NO: 120156 - protein, 216 aa, Heterodera glycines
MEVNTKNILIASGSEVTPFPGIDIDEEQIVSSTGALALKKVPQKMVVIGAGVIGLELGSVWQRLGAEVTAVEFMSAIGGVGIDGEVSKQFQRSLTKQLNCDVLLVSIGRRPYTDGLGLNNVQLNTDEKGRVPVNERFQTAVPSIYAIGDVIQGPMLAHKAEDEGILAVEGIAGGPVHIDYNCVPSVVYTHPEVAWVGRAEEQIKQEVNKMMGWSRG

SEQ ID NO: 120157 - protein, 105 aa, Heterodera glycines
MEALKEKSEKLYNKAGKIDQLVPDAKAFVIGMIEKAKGMRPKAGEKPKLEELRTAANELIEKYKALNDEAKESLKSNFPKITSVIQNEKFQTLAKSLLKQEAPAA

SEQ ID NO: 120158 - protein, 268 aa, Heterodera glycines
QVLEERDGLKDMCDSAAEILDTKDVKEMTDTTRDREGNNKVLEYIGERFGFTMEMLDSLYKYGKFLYECGNYLAASTYLDFYRNLIPQHDPNYLNAQYGKLASEILLQSWDHAKDDLNRLRAYVDSEPFGSELELLQHRAWILHWSLYIHFNYPKGRDEVIDLCLNQQPYLNTIQILCPHLLRYLAVILCPHLLRYLAVSVITSKNKQKASLKDLVKTIEVERGRILSQQLELGCLYLPFSGFATNVKTKETTCIVTYVSGFTLSHLQ

SEQ ID NO: 120159 - protein, 151 aa, Heterodera glycines
MSFCQVLYKTLTSGSVLPSSASANASASADPLNATSALGLPFPPSVSLPPVLAALFPDLNTSTPITLTAAQQEAIGENLEMIQNLIVQPSSPLCSPKPVAVAEFNLDAFMGQWYQVMYSPPLVQSACSVVSYRKLADINSGGIGSIFEVFE

SEQ ID NO: 120160 - protein, 336 aa, Heterodera glycines
TRLLQQRLVAWQPILTAKTVIPLVFSISILFIPRLVAWQPILTAKTVIPLVFSISILFIPIGIVLLRISQSVQEYVVQYVNMPTSAQEYVVQYVNMPTSAKTTMRMANAFQGDVYFYYFQGDVYFYYALENFFQNHRRYMKSRNDQQLSGILQNTKDCTPFEKAPDRPLQNTKDCTPFEKAPDRPIAPCGAIANSLFNDSFQLNYLGRNGSFQLNYLGRNGNGYDISWSHEGLVWPVDLESKFRNPTCDGLHFCDSTVRPPNWQKDLCLLGGFQNADFVIWMRTAALPDFRKPCRKLTRTQMFADGLPSGTYQLLVHNNYNVNTFGGKKSFVISTT

SEQ ID NO: 120161 - protein, 106 aa, Heterodera glycines
MTSSDEEFKKECTFASLPRTVRGMPLVVSSNSDGTKFLYCNGNSVFIRDEENIADCDVYTEHATLTTVAKYSPSEFYIASGDQSGKIRFWEPHNQSVSVDINLHLA

SEQ ID NO: 120162 - protein, 364 aa, Heterodera glycines
MSPDSGHRDSAGVSGAGAFDMTIEGLRTLMEFRGGEALEKISTDYGNTLGLCERLATDPNNGIANTQDELKRRRDAFGANEIPPLPPKSFFTLVWEALQDVTLIILLIAAVVSLALSFYNPGSELGGGKDETEQEAGWIEGAAILISVVVVVLVTALNDYTKERQFRGLQAKIETEHKFAVIRGGKQLQVVVNELVVGDIAQVKYGDLLPTDGVLIQSNDLKIDESSLTGESDQIKKSAEHDPMLLSGTRVMEGSGRMVITAVGVNSQMGIIMKLLGAAKSAMEDERKEKLREEKRTRRRSKASGQWEHWPIEENDIKLDGYNGAIPPGSAGRAKDDSEVQPAKKERSVLQTKLTRLAIQIGYA

SEQ ID NO: 120163 - protein, 312 aa, Heterodera glycines
HLIFAKLDRILVSCNNLMKGSTGSWRAHEAYLNGIAVLRNLVSTKDLLSNFVPLLKQEVLTARALPCRIAAAQTLLLMMREFATSRARQTIVDFFVHDIGHHSSCYRRRLLLDIVPLLLQYFSREFFIDKFLPAVLKLSADPISNIRLQLCRTLPKIKQYLMFPNNDESLSNLERVVRELLASEQNALSRQLIQQFACELSRTEMDKKECRANRAKLAEEKRLWTEHEDSTDETDEAEAGQQYSTEHTVTGSDAIGSPESGIFFEEDCWLGTGVGNSARPNNHQQMGGRLCRSATTTSISQHMETEVDKTFQ

SEQ ID NO: 120164 - protein, 104 aa, Heterodera glycines
MGEKFVGKWNLESSENFDDFLKEIGVSYLTRKAGACIKPVLEFEVNGNKWKMTSTSTFITISWEFELGQEKEVKTADGRIVKAEEKDSYYERYVDADGKLMIVR

SEQ ID NO: 120165 - protein, 469 aa, Heterodera glycines
MGKITKIGKQRKDKFYFLAKEAGFRSRAAFKLLQLNKRFEFLQRCRALVDLCAAPGGWLQVAEQQMPVSSLRIGVDLVRMNPIKNVDLVRMNPIKNCITLQGVIIEEKTRHAVRKELGTREADCVLHDGARNIGSNWAQDALQQNCLSLYALRLATQVLRKGGFFVSKIFRSADSQCLIGVFEKLFRIFRSADSQCLIGVFEKLFRKVHVWKPSASRLESAEIFVVCEQKVHVWKPSASRLESAEIFVVCEQYSKPDKVPSELLDSKKVFSDPDGGAYSKDNDSFCIRYSKDNDSFCIRGKERKAKALGYGNDALLGQHSGLGATEFVTSKNALQLLSRASELVLDSERVLNSEHTTNEVLDSERVLNSEHTTNEIKECLKDIKVCGPAELVCGPAELRSILKWRKKLVDEQKKEEKASKESVKSAEVVEGDTGEELEDKELEEIDDLIRTAKAEGKATLKKVNFEYHK

SEQ ID NO: 120166 - protein, 260 aa, Heterodera glycines
QREGDFWSDLTSSYSITVEPVPMGRRERAARAKGEGAGETSPLSEYEVPTDAAWEVGRERLQLVDILGEGAFLQLVDILGEGAFGEVWRGLLSPTGDEDMPVMPVAVKRLKSAAQERELIILVSEMQILKSIGHHPNILRLIGCCTGLGPLLVVLELCEHGNLKDFLRKHRPAEAKREQSDSPGTSVPMPSTSATSTAPILNRQLTLRHLVRFGADIAKGMDFLASKKIIHRDLAARNGLGQIIHRDLAARNGLGQWHLP

SEQ ID NO: 120167 - protein, 92 aa, Heterodera glycines
SVTNTIRYSKDKTADDDDDKDRVDITVKEKVNLNFSIKYLTNFTKATSLSDRVRLSMCDNVPLVVEYDIEGNGFLRFFLAPKIDEDKETMDD

SEQ ID NO: 120168 - protein, 863 aa, Heterodera glycines
MEKTVKGVKDDGEEANYMERIKEHRSLQELAKLKGDTFDDPNDFQTLSNDCRISNSVWNRLYRYQKRGVRWLYELHFQYVGGILADEMGLGKTIQLCVFLRSLSESQTISNIFRYKGLGPSLIVCPATLLHQWVKELNAWFPLCKVAVLHSSGAFSGPKATLIKRIGEHRGNGSILVTSYSTFMLSYEQISAVNWHYFILDEGHKIRNPEAKITLALKELRTPHRLILSGSPMQNNFRELWSLIDFIYPGRLGSLKEFMEKFSVPITQGGYANASAVQVRTAFKTACVLRDAISPYLLRRMKKDVQMVLQLPDKSEQILFCDITSEQRQLYLQYIESKACDDIVTGKQMPFAADFNVEDRQDMEFGFYQRSGKMVVLRELLRLWREQNHKVLLFSQSRQMLSIIESFVIIEGYSFLRMDGTTPIGSRQTLVEQFNKDPDLFVFLLTTKVGGLGINLTGANRVLIFDPDWNPSTDAQARERSWRIGQHRAVTIYRLQIFKHFLANRILDNPKQQRFFKTNELHELFTLGSSKSDRKYGTETAVIFAANGSEVSRKKLKNNMDKRRDEKEAENKAKAAERTDDGGKMPSADFNDSALSDEARERLKMVAKRLAANFGKTETDKAENGRRKRDKVLFEGKYKVPLLRKQVEVMEKKEEDNEETAPEGHSLSNKEQDDYVLSKLLSKKVGVHSALQHDQIIKESSAADIQLIEDEANAVAKRAADVLKRSRRRHLEFLSNASEFGPIQTKKSLFGRKRVAGFTIISNGIEKTDGNGGRDGAPKERTEKEEDDEEEEGCSKPFDGSEMLGRKKRGKCDASGAELLKSIRQRKERQLDIDGEGELAEGEEDEVGGQIQIFLNFCFPSLQ

SEQ ID NO: 120169 - protein, 481 aa, Heterodera glycines
QMMSHLEYHRAGVMCSNYCRALTNTACAVVVMMILTAYLYVSIFGLLNIRAELRPEQLFLRSSDVIELLHLRNEYIMPFYYIMPFYAVCMVFVNKPGNFSDPVQRQRWHSLVSDFEGLPSSVGRFSTKVSDFEGLPSSVGRFSTKFWLRDYEQFVEQDPEARIKFENLDYEIKFFISAGLVFRKLEFSMRNELAEFLQWPEFQGFLSANSSELVLSRFFFTTASYGTELREWSKRELLLGQWRRVADSVRSFVFLFTVQEDDAKFLDLIPTMIPQTIQSSACTLLCMFLVCLLFMTNPGALLVSNFAIFSTCIGVFGIQSLLGTLLDPIFMSVFGIQSLLGTLLDPIFMSAAIMSIGFSVDIPAHIAYHFYKTSVGEKAGTSLDVEQRLMDCLATIGFPVLEAGLSTLICTSSLFFVDLHMARVFARTVFARTMTLVVAIGLLHGLLVIPVMFSLCNTIRRRERQRPTVTGHAVIWPTTVL

SEQ ID NO: 120170 - protein, 179 aa, Heterodera glycines
MEEHRPGNTSIFFPAAKRSECGTYELRLKNNVGETEGHFEVLVQDRPAPPKGSLAVDNVARDSCTLSWQPPEDDGGSEVTNYVVECRGVGSQVWVPVNNVVGTNSTVPNLQEGHEYEFRVCAVNAFGCSDPLNTDSAVVAMDPYGPPGRPEVTDHDNNQISIKWAPSTDTGGSPIAYYD

SEQ ID NO: 120171 - protein, 90 aa, Heterodera glycines
MATPGIEASEDPTSNSNSAELSDAERELVIEELKKTENEIATLRQLLTARQKHVAQLKRKLGISPLNEITSEMAQGLKTVKETPAYVFVV

SEQ ID NO: 120172 - protein, 145 aa, Heterodera glycines
GVPKSTYWEYAYEDSMNLLAKLPTIAAMIYRNLYRDGSSVGVLDPNKDWSANFCHMLGYTERDWSANFCHMLGYTEREFVELMRLYLVIHSDHEGGNVSAHTCHLVGSALSDPYLSFAASMAGLAGPLHGLANQEVLFLTKMVAD

SEQ ID NO: 120173 - protein, 142 aa, Heterodera glycines
MTYKIGSDPSQLKFAEKLVILNDRTVGMLTRFYNMKKACADPKSRPQFLNDKSLDSAISTIVKRFPIIDIKRNSTAFSCVNEMKGDILKKLSLYYYTFADLLDLKDAILQLFTAMDANQCKLNIVCNGYDNQRRFVPRNIRN

SEQ ID NO: 120174 - protein, 247 aa, Heterodera glycines
MGPVLPCIGQNNKKHEVMKKKEKNDEKMTLETNKMAGEKRKRPQSLSEKSFPYNAGLEKNKLFVKKLDWSCTGEELKVTKKRGNGKFGTVVDARIVTKWNGRSKGCAYVDFADEQSASAALMGADGTEIRGRKISVYLSNPPPTKRMKMEEATLDDHNLTTDKTNGATTSKTVDGKTEQKQAKQQTKPSRLMPRAAFLTGAGQRIGKASRLMLPMSGISKRSGNIATEGKSESPVGVVTESTKDMSL

SEQ ID NO: 120175 - protein, 301 aa, Heterodera glycines
MQETHIVLGIASVCSLLAIIATVVTLPSLYSEMSQMNSKVRDGVEAFRVNTDSAWTDLMDVQVVVTPPSKPRDNPFNSIFRAKRQLPGHCQCAGLQQPSCPPGPPGPSGPPGQPGQPGGAGQPGQPGQPGQPAPPCPPQNIPCPRCPAGPPGRPGGQGPPGQQGAPGQPGTPAQGGGPGTPGAPGPQGQPGQPGRPGAAGQPGQPGANGVVSRPIPGPKGPPGAPGQNGNPGGQGQPGQPGGQGPPGPPGAPGQPGQPGNSGQPGQPGAPGQPGKDSGYCPCPPRSSVLAVKKKMAAAKKA

SEQ ID NO: 120176 - protein, 330 aa, Heterodera glycines
PTISDLRYQQPFWALVPAEDKQEYFLEIIKEGTVIGTVRLHNSAHQKSFWSIGRFEPCDIKLEHPSVSRFHAILQYGECIKGRPGWFIFDMNSTHGVRLNKQPLKKRTYVPLHNGFVFQIAGSSRLFTVCGGPKREQKEEENKEKAQPMGKTENKKDAEEEGEDEEEQQLRYYEKDPLGWLQKYFEREGLPMHFQFTKSSSDGGGGGAGDLLAEFEDEQNKKRGRRHSDEGHWTCSIELVSDVSLTSGNVVTVSAPSKRLAQLQCSLVACERLNDACLLRISSLWNKRKNYTENDFYDSDEDTFLDRTGQIEEQREKRRKRFGVVNLTTD

SEQ ID NO: 120177 - protein, 317 aa, Heterodera glycines
MPLSSPADAIAIVAFVLKPTPYIEEFLHRLSLLEYPDKNSRVNLRIYNNQMYNKQHIETWAKRRSGKKNDDFGIVQILNGTAMGEHKIRAEAVQWAIEINADFLFLIDAEAHITAPDTLNILVQKAREDNNYRAILAPLLLRPDTVYSNFWGAVSESDYLDIIHGKSPAHVWNVPFIGAAIFVSKRKFEALSKAFVLKGGVDADISMAQFCRENGHFMFVDSSKGIQYFGFLVNSDSFSQLPKEARLNLELYDYPNNKKLWESRYIHPEYFTVLKPGTDVPLACPDVYDFPFLSERFCEELIEVMEEFGQWSEGKHQ

SEQ ID NO: 120178 - protein, 105 aa, Heterodera glycines
ATDKRQQILIEEAGDGQHTEKSILGLIIAGHLKWEQRPLWFDAYVAHSPHYEPKWDIKMPKRDEPLPQIFYQEDLIRAKKLLEMRNEEPKYELDQQQQQQPDQLN

SEQ ID NO: 120179 - protein, 71 aa, Heterodera glycines
MPFQQNPFFFFAFSVRRQVVNIPSFVVRLDSQKHIDLSAKSPYAGGRPGRVKRKNAKKGAGGGGSGGEEED

SEQ ID NO: 120180 - protein, 257 aa, Heterodera glycines
DVKLYYTHENDDHSNQLDKAIEAMEKWSKINGLEISTEKCFVLYLGKNNMKKEYFINSQRISESDNVRDLGIIIDSKLNFSEHISKIIRNAYLRIFILRVLKSREIKTLTAAYKTFVRPQLEYATEVWNPNLKKDIDKIERVQKFFTRKARGFVYKKYGERLKITGLHKLEERRKINDLTTAFIIKGFTSLDAGKSFFSERLRRPLFLRVKRHTAKTQNNFFHRIVRNWNNLPVVAVQINKAKEFRGLLKAMSSGRI

SEQ ID NO: 120181 - protein, 258 aa, Heterodera glycines
MKIVVEQQKIETSLISAEYAQYNLIRTNPTNHPLLLTNGSHMMNAELDSSDLDLLCIVPAQINLNNFLYQLNISFFSMLKKNLTKAKVSSVSGRVPLIRIEQNQIEFDVLFVPVPLQYLVEGVNLESDQLIRELGTAEALYSLADRLIYSGLFGYFNGATLSVMATKICALFPFAPLAYLLYQFFSIYSNWNWASEPVMIEKLSEFPPQSTLKPPKIAENSMTVITPRFPEQNASFNVNKFTIRTIVEEIGIGKIFII

SEQ ID NO: 120182 - protein, 113 aa, Heterodera glycines
SDWPGIQFDLSRVLHGEQYIELYAPFPADGARLRSEIRVADLLDKGANAVIISEGTTTKTKCAGDHQSSLILSEKNDQIAGLDGFGPKILPGWDPIYIIAAYDLLSLNCGGLI

SEQ ID NO: 120183 - protein, 158 aa, Heterodera glycines
SKNPQNLHSYVAKKFGAMAEEISLDDGDEGTVASHQWEMPSLEFENFWETLIFDGPIKNELLVYANSLLEISYAGADLSILPVNRLVLLHGPPGTGKTTPPGTGKTTLCKALAQKLAIRTQKRYKRAIVEVNSHSLFSWFSEEGEIKKLRLLIFYYFE

SEQ ID NO: 120184 - protein, 357 aa, Heterodera glycines
MSGGGSGRQNRGKTEAPRRPTRTQQTRQPGTQQQQRRPTPTQERSALAQPTLRRWEDTAEFFFALERFVNDTTPRSVQDLVSEFTELNAAPRPEPSPEFTRNLECNRYRDVICTEINRVRLHSGRYIHANWISTFGENRFICTQGPLETTCDDFWTMIVQENIEGIVMLCDTIEQNRIKCHQYWPTADNKLMRFANNQIIVKFGREHHVEGALYRTDLIVGAPQMRQGHLRVQHFHWRQWPDRGVPHSDLAPLRLLYHVIGVPRAVVHCSAGIGRTGTLVAVYLANQTLHLGQPLNIFALIRDLRRQRSQSIQTLDQYLYIYFVILRYAQNKASKLNINVNALNALVQALNSTMRRG

SEQ ID NO: 120185 - protein, 58 aa, Heterodera glycines
YALPKLYHKLHYCVSCAIHSKVVRNRSREARKDRNPPPRFGQRSAVDRPQRPGGAAPG

SEQ ID NO: 120186 - protein, 274 aa, Heterodera glycines
LFVMRELHNGRDGTLVAMEYIEEFPPLLNQTGMASKIRNYYKKKLTKEEEKRKLTKEEEKREFEFGETAFSHTSPFLGNLSPNESLQAIENNMYRATIFQHHPMGTDFLLIRNKYGLFIRQFPVLFVLFIRQFPVLFVVGQQMPLYEVPTPNSKRAKDFNKDFMMVYIFRLFWQSDDLPKRYIFRLFWQSDDLPKRIRMDEMKQMYPGEGLIRKNLKQCAELRRMEGHEYWWVLREDYRLPNREEVSSMVTPEMYCAYASMLAAEQRLVAFRFK

SEQ ID NO: 120187 - protein, 77 aa, Heterodera glycines
MVDAVKKGFKSYREELESELLVNCRGVLEFLDSTLIPNATTNLEAKVFYLKMKGDYSRYISEIALGEDRTSREFVLM

SEQ ID NO: 120188 - protein, 238 aa, Heterodera glycines
RRGPVSLVLDESCTTAMETPNKLNASDMFASFSAPFNDTINSTARKIECSDSTRSVRPCDSANFEVEYFVASDASAVIEHTRQVIFLEDDDVAFVEDGALSIHRIKRSDDTAALTEQTREVQRLTMELQQIMRGDFKTFMQKEIFEQPDSVVNTMRGRVHEDGRIVLGGIKVSGDGERRVNNAHHRCQGVHERPSPLPSSDHDRLRHFVPFGIGLSSADGGTDRAAGGGRVGQRLHRS

SEQ ID NO: 120189 - protein, 60 aa, Heterodera glycines
MRGQPTEQMKMTVFYRYWCLKEAIMKATGHGLVNDLSRFDFIIDPNERYKQESSSRGLYV

SEQ ID NO: 120190 - protein, 156 aa, Heterodera glycines
VDDIEFLSERLHASVQDLSSFDEYCAEVRSGRLQWSPVHKLEKFWRENAQRFNEKNFELIKILIKILETSSDPLPLSVAAHDIGEYVRHYHRGKTIVEQYQGKQAVMKLLSAEDPNVRYHALLAIQKLMVHNWEYLGKQIEGLEGAKGSAGEEAKE

SEQ ID NO: 120191 - protein, 348 aa, Heterodera glycines
MILRINPLRELDITKRRVEKIIKSGANVVLTTGGIDDLCLKEFVEAGAIGVRRCKKADLKRIAKATGATLTASLATLEGDEQFDASLTLTASLATLEGDEQFDASLLGSADEVVQTRISDDELILIKGTKLKSAASIILRGANDMMLEEMEGANDMMLEEMERSVHDVLSVVKRVLEGKKLVVGGGAVETALNVYLENFALNLTSREQLAVAAFADSLLVIPKTSREQLAVAAFADSLLVIPKTLATNAAQDAISLLAKLRAFHNRSQTDKKFEHMKWSGLDLEEGASGLDLEEGAVAQNRDAGVFEPLISKVKSLKFATEAAITILRIDDLIKLDKIEKKPHDEDEC

SEQ ID NO: 120192 - protein, 379 aa, Heterodera glycines
DGTMPGNAGLFAIFLFFQVLDFHSERDRCLRLDFHSERDRCLRERRLFEDPEFPATDRSIFFSKSFPATDRSIFFSKSPPEGLQWKRPGELTSDPQLIAELTSDPQLIASSSGASRFDVVQGQLGDCWLLAAAAVLTLREELFFRVVPPDQSFTENYAGIFHFQFWRYGQWVDIFHFQFWRYGQWVDVVIDDRLPTKDGHLLFMNSAKHHSFWSALLEKAYAKLYGSYELYGSYEALKGGSTSEALEDFTGGLIEHFELAEMSREQLLAVLVRGFQMGSFFGCSIDADPSKMEAKLDNADPSKMEAKLDNGLVMGHAYSITAIQSLHDDVVLLRVRNPWGQHEWNGRWSDGPEWDQLTESQRRAGGLERDGFWMSLDDF

SEQ ID NO: 120193 - protein, 167 aa, Heterodera glycines
MKKSFVSFLFFTALLVIVCSKEEEGGAKEKKYGTIIGIDLGTTYSCVGVYKNGRVEIIANDQGNRITPSYVAFTPDSGERLIGDAAKNQLTLNPENTIFDAKRLIGREFTDKTVQDDMKLWPFKIYNKANKPHVQVKVGNEDKQFAAEEVSAMVLTKMKEIAESYPR

SEQ ID NO: 120194 - protein, 359 aa, Heterodera glycines
KINLFRSSLSIQLFLIKYVQAGFFTGVATRAIIQPFDVLKIRLQLQEEPLRGKSRGKYSGIFQSAKLIYHEEGIAAFWRGHIPAQGLSIRGHIPAQGLSISFGLVQFCTFELLTKQAGDGFHNFSKSVDFVCGASAGCLATTCAMPFDVVRTRMVAQLATTCAMPFDVVRTRMVAQGAHRTYRNMAHAFIKTWRYEGPAGYFRGLVPSLVQIAPFTGLQFTFYNLVNVYWDSSDRESTGLQFTFYNLVNVYWDSSDRESVGRIVSGWVAGMAAKTITYPFDLVRHRLQVNRHIRKDTFGQTTSDGGMLRTFVGIVKRETVFGLFKGLSPAVLKAAVQSSLSFFFYELICDFLRTVASSC

SEQ ID NO: 120195 - protein, 158 aa, Heterodera glycines
MVVKEWAKRHGINDSACSSFTSYSLVLMVIHYLQCGAQPPVLPNLQQMYPKRFSVRADVRTLNVSLPFEPIPTAMGWQFKDDATLSELLLGFLRYYAFQFDFDADAISIRMGKKVNRAQVAQNQSPFNTLSQWHCICIEEPFTLSNAAHSVYDERIFP

SEQ ID NO: 120196 - protein, 233 aa, Heterodera glycines
SVVDSKFTRIDIHEFWLQSHVPLKGTTKIPQYVFPVNQVMANNNELQSFLLSLCCNWQIVTLAPGLPTPVRQAAELAKRGRANFNELKRHIEEESRSDEQQRHEKTAAPMLTTAPAMAAALPTDFVTLPLQGIECYLANVQPADGSLHWSDKANELFQQLCVSKIIQAALVGYCKTDGIPCVELFVMDSANKKVGIRGQLLFIAQRMSPLLLKNPGDSRAKTLDSSKSLVLMD

SEQ ID NO: 120197 - protein, 85 aa, Heterodera glycines
MWCCETVMEMTLAFNRCVELSSARWARLLFQGKRIYLWMLFPTLYGFYYFWYTQPLIFSGIFFSWFFNPHVGYIDDFGKTLNFCL

SEQ ID NO: 120198 - protein, 207 aa, Heterodera glycines
RCCEKKSCGNRNETPSDPVIIDKYFLKFFLKCNQNCLKNAGNPLKNAGNPRDMRRFQVVLCATPRVDVDVLAMSDNMFVHNNSKHGRRGKRGSSEPSMAEGESSSAGGTMPSIKMIFPGEVWCQSGGTAMIIGEQFHEGMQVMVGGTVTWPEIIKMVTAHAIKVNVPARASPGAVEVVCSPKGQPKVRSNAIRFSLGSIPPLGFFFW

SEQ ID NO: 120199 - protein, 132 aa, Heterodera glycines
MIRKAIRGNLQKFPLLEKLLPYIVGNVGFVFTNEDLGDVRKKLLENKRGAPAKAGAIAPCDVRLPPQNSGMGPEKTSFFQALQIPTKISRGTIEILNEVHLIKTGEKVGASESALLNMLGIQPFSYGLVVEQ

SEQ ID NO: 120200 - protein, 122 aa, Heterodera glycines
MASAAPPLGPSLGQRGVNVANFCKEFNNLTSTIRFGEIVGMISVKHVYEIAKVKSQDKSLIGVPLKKICQLVIERADSIGIKVQNEDLDPEEYRKFLEHRQEVVQRQLEEIAKQEEAKLART

SEQ ID NO: 120201 - protein, 231 aa, Heterodera glycines
MNSYKSKQIIIGSGYQVMLPECNKKIRKDDKIDEERDECLWSKNQGKLGDTEIVEFCRDALNHYGIGPDRALYILLKSDHNLKRAKSELALRNSVKKRFSVEDEFAFREAHKCFGKNFAKIHQMLSHKNLSELVEHYYLTKKQQNYKSFMDNECGKNGTSERATNKHRVCAQPIEEKKRIPICPPEMKNIAEQFEEMARVVMGEQFDDISDGLDEVQVEQNNETICEQKIK

SEQ ID NO: 120202 - protein, 155 aa, Heterodera glycines
IFRKYYLLFAKIIIISVLISVQFLIGGDGPKRVDIEEMRERCRLHERVKTLGTIPILSDQIFLCFFILNLLLCSLHVVSTRVGGIPEVLPPEFISLVDPNPKAIAVGLLDAIRRRENGELPCPVKKHRQVAEMYNWADIAQWTERVYGNSMEEPE

SEQ ID NO: 120203 - protein, 249 aa, Heterodera glycines
GFPTSSLPCTSLDQSCGSALKNVFPSRHRGELSIHEKYRYDLSRAQLKASSRTSALLAGFAMIALVELQYQESTPKIALVELQYQESTPKPLLIMLGVVTSLLVSVHLLALMMSTCLLPYIEANGCTQDSPHIKANGCTQDSPHIKLRFYIELSWLFSTCIGLLLFLLEIGVIFFVKFNSIGYTFAAYITTGMLVPVVIVFIIISYLIHRNRYKNNLGKQPKSLIKSESLPKNLNKKEFNLKNKSKLFI

SEQ ID NO: 120204 - protein, 289 aa, Heterodera glycines
SFQQDVFECKLRSESGVVVKVISFGAIIRDWLVPTPQDQLRSVVLGFDSLENYVEHSPFFGAIVGRVANRIGRARFTVDGKEFLLTPNFTVDGKEFLLTPNEGKNQLHGGTETFGRKVWKMEPLCDNAAAKWPSGVRLSLESADGEGTFPGNLRVSVTYRLTANKLRMDIEATSDLPCPVNIVQHNYFNLSGHGDIREHSLKLAADWFTPTSSDQIPTGEILTVSFTPTSSDQIPTGEILTVSGTEFDFREEKKLQTKDGKPIELDHNFVLTKGKGTDAQIAAVLRAPD

SEQ ID NO: 120205 - protein, 150 aa, Heterodera glycines
MISENREGKMCSARQICVQLARYDRSYDIRDRCRFLRNFWLDKDQNSLKFPLDIFLQERPAPAKCNGYTELPDFPSEQPDPTIRRSAYPLPSDGIVQGTEIAMDEAEEEEDDSLDEEESEEEDEEEDEEEDEDEEEEEEEEESEGEKVPD

SEQ ID NO: 120206 - protein, 481 aa, Heterodera glycines
NKFEEEIGSLQLLSDQFQSKLNTLESKLNTLEQQQNKDKTDYLDSLQRLHDKNGDSLDQLKQLDLTMQTVQLDLTMQTVAARVVHLGDQLESVHEPRARAFEALVHEPRARAFEALQLMRHFDEFLADQPLNSALFTDPDRLLESAEVLLESAEVIAKLASIAQELDKTKFAAVQLRIAHKYDEIEQLLIEEFVRSDRKRMREIAMILSEFKGFSFSRCVDAFVERIQSVGPRSPNVFEDIQNLCDRAKPIIMEIFLSSQFVVSKLLLNVFHGKLQEAVVEAVVATLEENKGNPEQYLANLHELYLKTHKLLGLLQEKFRTNSLDPTHKLLGLLQEKFRTNSLDPQFLPTLTQSVFGPYLVTYAKIEHKFIADKCTFTLRKFYESKGHQKRSIGHHFEFRLQELKSRLLTAGHHFEFRLQELKSRLLTAEDFGGETFLSEIIAINILQEFKNAFARCSSLCKKTESLELNTVLFDMLLKFL

SEQ ID NO: 120207 - protein, 307 aa, Heterodera glycines
MSSYSSSRRRAPASSFMEEHVLDRISREAEERSNKKRQARDEARQIRMDCLEKSIKAGDQKDYHLLAKVTELENKYQRAMLLYTQLDNEKSALLYEIDLLKDEMEEKDVTVFQVSKENREISEELKLLRKTVEVSKENREISEELKLLRKTVEALQLQHQQMKSEISQRDRLIHENGFVIAEQDPNDDHENGFVIAEQDPNDDGSQSTNNAPVVGSQSTNNAPVVKFDPILLSHVKFDPILLSHVTLSAIEKALPGTSSVDQKVQRLVESNRKLRNQIDETEKALYNHRRRQNEKHNATGSTSSGIS

SEQ ID NO: 120208 - protein, 213 aa, Heterodera glycines
MSLTGRGLYSLLKKAGGMFSPGTAIGVSIQLLHALKTLHSIGYLHLDIKPENAAIGRRETNERQRIFLIDFGLARRFISSKTGKHRRQRKKTHFRGTPMYASISAHARSDYCRGDDIESWFYMLVDMYTGSLPWSRVRSEHRTGKMKRRRLSHKSEVRRKALSDLLQGCPAQLGPILEHIVGYSHTLIRLCPLQFPPLFRTAWIFTTDPTTNG

SEQ ID NO: 120209 - protein, 89 aa, Heterodera glycines
MRDQCKNIAQVLWDMSLAKTSSVKSNESKGRKRGVDRSKLEPSGKGKKGGLPMSPQTRICIIRDSDGVDYVIRAGIRATLLEVNEDMVD

SEQ ID NO: 120210 - protein, 176 aa, Heterodera glycines
MDGLALDIARKLEVKPARYAVRKTMMKSLFISQGRFEFNANLFMDQIPRRITLGLVANSDYVGDPRRSPFNFQPFNVREISIVANGRAFPQAPYSLDYPRGKYVRAFNDMNEAVGFSNTTEDLNAPVSIFPGIQLCKDMPAADNYMRHIFCWAVFALYAMMHVSLIIYPLRSILSG

SEQ ID NO: 120211 - protein, 154 aa, Heterodera glycines
MSVPATSAKPMVIDISSLSIDELSVLQQQFDAELAFFNDSLNELRNVAAKFGRCQATLDSISPKELNKSALVPLSESVYVRAKMTDPDKYLVEIGTGYFVEMNRQQSSEYFKRKYAFLESQVETISRKIIPEKQQARQTIVAALQKKVQLATSK

SEQ ID NO: 120212 - protein, 742 aa, Heterodera glycines
GPREAVRTCLECTECLRVRLSRLAINLDLSRLAINLDQLRRFWTVQPLLSREDWLQWVGTLRNQFIRQSPSSALRACAVLAEMCESLSKELFNAAFMSVWTELFNAAFMSVWTELPEREQNELTNQLIDVLRHCPPEPIQTILNLAEFMDHSEKGPLPIKHRMLSESAEKTRAGPLPIKHRMLSESAEKTRAYAKALRYKEMEILSTRGNGEPNDDCQTMIMLFNKLNLEEGAAGIVQYAKRHNMEISVKGRWYEKLGEWGRWYEKLGEWEKALEMYQNDMTKQLSWKSISSHSEPQLLPTNREESSRSDLLLHQMRCLEALGQWSQLDRSETALAEEESNQYNPNFNIATEKQQPQKIATIGARGCWAVGNFKKMEDYVDKINENNRDNFKKMEDYVDKINENNRDGAFLRAVLAVHNNDFDKAYSCINKVRDMFDSELTAMAAESYERAYGAMVLLQELTELEEAIEYKMIPEREMRIALLWSRRLQGCRRNVEHWRRILMVRSIVFSSIVFSQTELRPLWIKFAALCRYEGRQVTVSRNVIRSLLEVPPDTPLEKVPIPLPLEKTQLALALCKQLWVDSHRRTALVQLEQLTQAKTDDFFFISSIRNRTMLTREQLEPHARLTRNRTMLTREQLEPHARLTAKCYLKLGEWHDQSPPSNRRWVSDQHFPNHKTKNCQPKTRACKLILQCYINATNFDPNWYKAWHRLATTYAWHRLATTYYNMIMADRQQRSVTISPAK

SEQ ID NO: 120213 - protein, 243 aa, Heterodera glycines
KINIYFRHLGSDTAINAICMVDTINQANGSKRFLIETMGGHCYLATVSIATGADNAYIFEEKFTVDDIKEDVIKEDVKVISQKMQKGVQRYLIVQSEGASHNYDTTFVQKLFSEEGKGESTRINILGHPQQGGKPTPFDRNMGTKLGARALNHLITQINANFDKTTERCNADKPDTATLLGLIGREVVFSPLEELAAETDFEHRLPLKQWWLKFRPLLRILAKHRASYVQEATKPAENEKEAN

SEQ ID NO: 120214 - protein, 166 aa, Heterodera glycines
NAPCEPTTPPPCKPCPQGPPGPPGPPGSPGDPGEAGTPGRPGTDASPGSPGPRGPPGPPGEPGPQGPPGEPGVPAQSEPLVPGEPGEQGDQGPPGPPGPPGSPGADGPPGPPGPKGEPGPDGLPGQDGQPGPSGPPGPSGTPGEKGICPKYCAIDGGVFFEDGTRR

SEQ ID NO: 120215 - protein, 198 aa, Heterodera glycines
DSLTFCPNVLRASKKSKKTFLISLPKFRARMLLQHGVVRSNCVDCDRTNVVQFGIGKVALGKVALGWQLYSMGFLALPWSLQLHSEVCRVFEEMFDEHGNTLAWQYAGSQLVHSIKTYKRTAVFQERSERSRDVFQTISRYYSNTFGDFEKQDGLNLFLGIFRKEIGTFHNVWTVRGERAIFFPFVLKKTDYLGWKMK

SEQ ID NO: 120216 - protein, 694 aa, Heterodera glycines
MSDRMCSLSVYETAAHFYIIGSDPKGKRFRTLKIDRVTDKEFIAAEPDQDYTQADIGELLATVSSSDIGELLATVSSSSSDFFDFESSCAGGGGLLSCAGGGGLLRTVEKAWGIIGAVRFMEGFYLLIVSRAKMVVSIGVHSIYIVSRAKMVVSIGVHSIYKIEDVSMIYIPATGAATHPDETKYSKLFLSVDFTADFYFSYTYQLSVDFTADFYFSYTYQLSRTLQENCLAGFAHKWENNYGKTIGPEKKFVWNEYLMEPLYRAGVNRKWTLELMRGFVAVNRKWTLELMRGFVAHQLLELPCAKLDLILIARRSSAFAGTRFLKRGVNCEGAVANDVETEQVVWDAVANDVETEQVVWDTSSPLSFRSGKFSSFVQRRGSVPLFWSQDPTHRGSPMVVGKPPILIDRVEPHALTTAKHFRELGRKYGHPLVVLNLVKREEHRHNENLLHKIFLKTVRYLNDFRRTVRYLNDFRRVGECIDYISFDVSRCNKSGRVLQRLEEIGQRVAMSGGWFQVDQMSSAAQMSSAAPPKIEENISHFTAQTSPDARMLLQHGVVRSNCVDCLDRTNVVQFGIGKVALGWQLYSMGFLALPWSLQLHSEVCRVFEEMFDEHGNTLAWQYAGSQLVHSIKTYKRTAVFQERSRDVFQTISRYYSNTFERSRDVFQTISRYYSNTFGDFEKQDGLNLFLGIFR

SEQ ID NO: 120217 - protein, 193 aa, Heterodera glycines
MADHQHNDIELAEDASATEHGTKQNVSVAVKWFFHGNWRRFQCSEWTYSALQAEIRTIEPNFSGQLFYRDADGDAIVFTTDAEMRVMLDHFQKKMNKDTVTLETMGGEGTVKTGVVKTGCPYINKIGKMRDVTNGNGDKSLHPHIMCDLCDGGVVGIRYKCMVCPDFDLCEQCEKTGVHAEHAMCRLATTNTP

SEQ ID NO: 120218 - protein, 194 aa, Heterodera glycines
LVYDVNAPAEVARRGSSAKSPKVTSKLKQEIEYRLRLTPAPDEAISIRTDLEPEDEFTVEHVKKDYDVDLMDESQSSLKRRARSATPRRTLNIEPAGPMGPIPVCAYCQEEIDGPVLTALAPNATLTALAPNATKAQKFHPYHFMCCYCQKALNLHGTFREHERRPYCHDCFYKLWNGLMYEPDNNQRKIEKLI

SEQ ID NO: 120219 - protein, 493 aa, Heterodera glycines
TKLILYIPNLLLKISKFRDGEYFKRKTLTLKREKQFMYTEDGNIWAVLVATSNGWENYRHQADVSHAYHTLINHGVEKKRIITMMVDDIANNTENPQPGKIFNVPDGEDVYKRVKIDYRGHEVNPQNFMAILLGDEKRTKGKPVLKSTGKDKVFVYTSGHGDFTGKDKVFVYTSGHGDFGFLIFPHSELTVKQLTRTLKTMHEKKMYAEMTLYIEACKAGSMFFETLKKEWKIYAVTASNPYYAVTASNPYEFSYATFCDPDFLNGECLGDLFSANWMKDSAKANLGKETLRVQFANLGKETLRVQFEIVRKKTNESHVMKYGDLTIQSENVAEFMGKKQAQKRNERHHPAVMFENFQLNDEFGIFAAQISDDSITCCFSVDEASERVPTRRNVVEQQIKQIVNKLVQNANDSRILTKHPKRIDLDCHDEVVHTFGNSCFNFSDVILLNIYKILLNILIIESLCLEYAYVLANLCEQSELDTERIKKVLMEQC

SEQ ID NO: 120220 - protein, 150 aa, Heterodera glycines
MSDFEMDDGEDYGLQYSDDSGSEPDVALENQYYAAKTLKSDGDQRGALDAFRRVLELETEKGDWGFKALKQMMKLNYAMGNFEEMLRHYRNLLTYIRSSVTKNYAEKSINSILDYVSLSKNTALLQQFYKITLEALKVVAQISRQFFFGF

SEQ ID NO: 120221 - protein, 92 aa, Heterodera glycines
MNNDVERTWKNYKEEQLKNGLLDWQDYRNLIYGKPQEGQEISPEYVKMIERDERRWKVADYNSDGKMDRTEYGCFMHPEDCDHMRDIVVQVD

SEQ ID NO: 120222 - protein, 375 aa, Heterodera glycines
MTENKELKTKLSQQHSQSQQFYPRTPKKRKSQFPYADDNDEDAYCSRMGGDASAVRRSVSMPPPETPLGIIGTTAAGQSVVRAGITTAAARQALTVNASGGIKRRRALVPALVKNSRISQSHGDLTGRNNSDEAVDDLLPSVCESPWLFADQMVHGFQKRRNLLKHSCTRCEKTIEVFHESCRHFAPLPCVRRHNTPKVAGNGNKSAGRPRLGDFCPDARPMVPPLVIFCTYFLDHCKTYMPYRDLYQIEGNPAEVEAVTKQFLVPNKSYPKLDAFPPAVISACVNKFLMQIRDPLIPYSYGKEICALLDRCLAIDGPILEGFAGIVEDLPVSASAQVAIVINRHDNDGQRHNDEQKREHIGVLDGPFFAICYGK

SEQ ID NO: 120223 - protein, 162 aa, Heterodera glycines
QNYLRLSSSSLHCAITTTLQKRPHRRFSSFIRPSVLHINSLAVFAMARRRIQKEMAELHQELVTTGYTAAPMDDGRDLYHWKASIKGPPESPYEGGTFHLDIVFRRDYPFTPPNVKFDTIIYHPNVGERGDICLDILKQMWAPSMTISKGEGDHKTATRYLT

SEQ ID NO: 120224 - protein, 73 aa, Heterodera glycines
DFLEKEDFGTCSFDFVKVNPDRTKLYVAVRFESKSCAREAMERFGPEGEMLGYKVELSWFRDIRRYLAHCAKQ

SEQ ID NO: 120225 - protein, 324 aa, Heterodera glycines
KLSKLMGQLECHSSSKLAYLPYPSFAQIVSLNWHHVETPYTVSVWILLASIAKILFHVNKKFHVNKKFGEAIPDSALLIVVGLVLGYGLHQLHVSMYNLKSTIFFLYLLPPIIFDAGYFMPSRQLFENYFMPSRQLFENWDSVMLFAIVGTIWNTLSIGFTLFTLHVLGHFNLFSVPFSPFEILLFASLISAVDPVAVIAVFEEIHVNEFLFINVFGEALFNDGVSVVLYQMFRKFVLYQMFRKFTLIGVDQLSLADYLAGVGSFVVISFGGALTGLFFAFFVSILTRFTGRVKILAPVSDFLTRFTGRVKILAPVSDFLLPKV

SEQ ID NO: 120226 - protein, 218 aa, Heterodera glycines
MPLTMHERHHADARLRNARMETALDIAVRTDKANLCRLLMLNCPELNLMCASDCCSSTLTTTTTPVSKSHSPPYPLHSAARLGHTDCMEALLEHGFDPNYLGPDGTALHVAIRQGQCSALRILLDYGGALDICDSNGQTVSDWLSTGLSSSTHESDDGMDQRLRDCKKLVDEAVEQHRKAPQPAAERRHGQLFQMREGIWKSAVPEPKFKQFNGTNNG

SEQ ID NO: 120227 - protein, 104 aa, Heterodera glycines
MENANVLARYASICQQNGLVPIVEPEVLCDGEHSLERCQKVTELTLAYTYKALADHHIYLEGTLLKPNMVTPGQSHSPKATPDQIGLATVTALRRSVPIAVPGA

SEQ ID NO: 120228 - protein, 43 aa, Heterodera glycines
VDQHVASIPAVLEIPSKEMPYDASKDSILNRARGLVNTDDLKS

SEQ ID NO: 120229 - protein, 115 aa, Heterodera glycines
  unsure (1)..(115): unsure at all Xaa locations
PPTRKFAALNTLATPLXIVSFGFLWGPLAYCQFLFSEPRRVVTAVYLLSVLATLYTSLWLQSSLLTVITAALQTFGLIWFLLSYVPGGENGLKWMGRMAKVAFCARQSSTLVLPI

SEQ ID NO: 120230 - protein, 126 aa, Heterodera glycines
MPYANQPQVTILQLSNEFVQFVLEDTDLSVANALRRVFIAEVPTLAIDWVQIEQNTSVLHDEFVAHRMGMIPLSSDNIVDRMQYARDCTCTEFCDKCAVLFLLNVRCEEEATKAVTSDDLESNNVE

SEQ ID NO: 120231 - protein, 145 aa, Heterodera glycines
MRSDGSVIFGRCDEPREIIQLPVDLRTLSDDERRMRIAERKPIAKKVVERKIERRERRREEKALAAAKLDNAIERELLQRLKKGTYGSMYKFSDKTIDKAMERVDESEQSEEEEVEYETETTREKQRQFVEDFDESEEGEDIEDY

SEQ ID NO: 120232 - protein, 149 aa, Heterodera glycines
MDPEKARQHIPEPAIFTYASKDAILYALGSEQLRKSDWPGIQFDLSRVLHGEQYIELYAPFPADGARLRSEIRVADLLDKGANAVIISEGTTTKTKCAGDHQSSLILSEKNDQIAGLTDGFGPKILPGWDPIYIIAAYDLLSLNCGGLI

SEQ ID NO: 120233 - protein, 362 aa, Heterodera glycines
LAFPSSQSYVHGCSVQPLLFETIAERLRTAASKWPNREFVIFKREGIRKSYAEVLADSERLAAGLIHLGMEKGDRLGIWADSERLAAGLIHLGMEKGDRLGIWSPNKYEWITAQFASALAGFVLVNVNPMYHSEDLCYAVEKVGIKTLVNVNPMYHSEDLCYAVEKVGIKTLILIAPPTFKRTDYYGILRELIPELEEAPRGDGRLCTDTFPKLRNLIIFDAEKRTFNGAWAYDTVMGMGTAESRRKLAQYEASTQPDDPCNIQYTSGTTGKPKGATLTHHNILNNAFFVGLRAGYANHRTVICIPNPLYHCFGCVMGSLAALVHFQTCVFPAPSFEPLAALQAIHEERSAFSGRSSFVMGN

SEQ ID NO: 120234 - protein, 389 aa, Heterodera glycines
YLVRPSESNPEDYTIPIHQGSRVTHVKIPLNASNVYRFPSGQEFRSLEEIGKALSNGPDILTDEVFTSLSSPLYPSVKRWFHISTSGQEAEALLRLKHEGTFLLRESTSSEGEFALSVKSTDAVIHVRVHRGARSVPPFSYFPFLLKHGRFGIVPKDNFRGFADLLDNYVRMPMVQNDGSAVKLVNDGSAVKLVAALPTTRFTAATIDDRIDCLLQSQRKTGAKDGFVEEFEVLKTEDAQMFISCKEGGKTENIRKNRYRNVVPFDHTRIKLKSVRENDYINANYIKVLLRDTDTRNGEFRRSYISTQGCLEETVNFFWQMIWQEETRLIVMVTKEVERGRVKCFRYWPDLDERKNVKCFRYWPDLDERKNYGTTNVSKVNLFETEPFY

SEQ ID NO: 120235 - protein, 266 aa, Heterodera glycines
QSDSPVPNWLLNIGPISCHAWNKDKTQLAVSPSNNEIHIFARLETVWNPLTQLAVSPSNNEIHIFARLETVWNPLHVLREHDLLITGLDWAPNTAPNTNRIVSCSHDKNAFVWTWEAEKNSWKPEMVVVRINRAATCVKWSPNENKFAVGTGARLVAICYYERENDWWVAKQIKKLIRSTRENDWWVAKQIKKLIRSTVTSLNWHPNNILLAVGACDFKTRVFSAYVKEIDEKPTPNPWGTKIDEKPTPNPWGTKMPFGRIAQGVP

SEQ ID NO: 120236 - protein, 125 aa, Heterodera glycines
MQIFVKTLTGKTITLEVEASDTIENVKAKIQDKEGIPPDQQRLIFAGKQLEDGRTLADYNIQKESTLHLVLRLRGGMQIFVKTLTGKTITLEVEASDTIENVKAKIQDKEGIPPDQQRLIFAGTI

SEQ ID NO: 120237 - protein, 291 aa, Heterodera glycines
MSLPQFDLPECVSNSNGWGPGSVSDSQVLSEFVGLPYQHFNKCDRIGRIVDWLGVDRFFKKGETRDRYNERVYGSSATAGVQFDYIHDNEESNFQLVDSSRPQKPQRPFRRQIPFRKLAQREQERREYEKYNVSTKMKRSILKEQQKAYKVFLRRGGGTRGTAQRPTGRRFNDRQAGKGRQPSVQVRPDWAVLKELDFVQLNKLYLPNIEPGKDIPGETYGTLHFYDKALMDKLSVKNPLHLEKFHASFYSLTTTEDPVFRKVVVFTSLLNFAWLSCPATMSAMYSPQISF

SEQ ID NO: 120238 - protein, 331 aa, Heterodera glycines
MAREDYCFDATAAAAAEQSRPSATTSTLVQGDGLSSSFVDAIIRKVRHSPVQRFTDEITDEELKQLCMAATDIFRMQPTLVRIQPPVVVVGDIHGQFTDLQRIFHTHGNPPEQQYVFLGDYVDRGPQSLETIVLLFCYKVKYPANFMLLRGNHECANINRVYGFFDEVNRRYQRPGPRRLYDLFNQTFAWMPYVGLIGDKILCMHGGLSDQINSLEQLSHLNRPQIDPPLRTLEIDLLWADPARGVRGVIPNTRGAGIAFGEDVVERVCDMLCLDYIIRAHQVVMNGVEYFAGRRLITLFSSARYNGRNNTGATLTIAANLSHSITRFPPA

SEQ ID NO: 120239 - protein, 212 aa, Heterodera glycines
MNKENYNLLLLKKESDNVRDLGIIIDSKLHFSEHINKIVRNAYLRVFQILRVLKTREIKTLTTACKTFVRPQLEYATEVWNPNLKKDIDKIERVQKFFTRKAFRKCGFVYKKYMERLKITDLHKLEERRKINDLTTAFKIIKGFTSLEAEQNFFFSERPRRPLLLRVKRHTHKTQNNFFHRIVRNWNNLPVVAVQINKAKEFRGLLKAMSSE

SEQ ID NO: 120240 - protein, 105 aa, Heterodera glycines
MACDMFYQNPSYTNQQAGATGGADSRKICHLFNKYATDPKDKSQKIGPDRIGPNGMVRFLRDLNIEPTSRAVMVLAWKMGAQKQCEFTLQEFGDGISTLMFVSLF

SEQ ID NO: 120241 - protein, 361 aa, Heterodera glycines
MALQGTRDCRWALSLPRFPCFVAGDERNSHQPGLTALHTIPGLTALHTIFLREHNRIAEALGRINPHWTDERIYQETRRIVVAQQQHIVFNEFLPKVIGLDLLHEYDLVTQRSDYYTGYDANCDPAISHPFATAAFRFGHTAISHPFATAAFRFGHTLIRRMFPRMNSDYHNMSEPVDLARHFGFVEPLYNRTAGGLDSMLLGMLGTPSMAFDRHITTAVRDMLFARRDEPTSGMDLLFARRDEPTSGMDLVAINMLVAINMLRARDHGVQPYNAFRPLCGLSRAESFTDLRDVMEPNAIAALQSVYESVDDIDLFPGLTSERPRKGALLGHTMSCLLAEQFRRLKKCDRFYYENDNSAAR

SEQ ID NO: 120242 - protein, 135 aa, Heterodera glycines
HVIFALSPSDFAKIWLDFAKIWLLKHALLVVYTPDREHFGIVPIEAMFMRCAVLAVNSGGPLESVENGSSGFLRDSNAEEFGKVMKLAVNRPQLMQQMGEAGRIRVRIRVEKHFSFGAFANKIDGSGSAMSLLLA

SEQ ID NO: 120243 - protein, 351 aa, Heterodera glycines
SESSHLREYLHIIRDKPLYPVILDADGVICSMPPIINSEHSKITLNTRNIFIEVTGTDLVKLEIVLDMLVTMFSQYCTEQFNVEPVQIVQPNGTFSLFPKLDYRDHLVDVLSLAAKIGISDIGADKAVQLLSKMALECVPIKDEEQPQTVDIGKALELLKLTMSGEEKRSGPQFPAARHFEDHRQQQGHGTATTSLRSAGRGVHRREQSDALLIIFIAFFTALLGEGLTWVLVYRSDEYKRLKFSMERKSKKLERKKDAIGAGGDAAGGAGAANAASKTTKRKIEREEERLKSTNRDLSMFRMKSMLAIGFVFAALLSTFSSIFEGRVVAKLPFEPITWVQGLSHRNLVGQ

SEQ ID NO: 120244 - protein, 746 aa, Heterodera glycines
RENIFKDLFNIHPHRALSEEPKQSLPLVFSLIFQQFRSLSAELQQRLNSGISEWDGEERMVAKAAEDLVQDDGPPISYSEWECQCGLKENLWLNLTDGAIMCGRFSQLAGIKGNGHAKAHFESTGFPLVVKLGTIENGDGDIYSYNEDAPVCDPWLGQHLARFGLDIKKFRKTEKTTLEIELDANLKHEFSAIQEEGLHEFSAIQEEGLELVNVSGPGYTGLINLGSSCYINSALQVLLIVPDFVRAFTEELYINSALQVLLIVPDFVRAFTEELLLRKQPPEINEDFAAQLAKIFVAMKSGDYSREDNKHGAEKEKGIRPTTFRRIVGRNHPEFSTAKQQDVEEYVRFLFEKVDACSDEYVRFLFEKVDACSDLSSENPVAAFRFRLVTRFLDELSDCVRYSFRTDNILSVAIPMDLCKEVNINSRRKSVTLEQCLAATFEEEIIDDYFSPVLKMKGRAKQQQRMGSFPDFLLLQLRRFAFDWILGTQHKLDVDVHVSDELDINAFFSTGELQPNEKAQLEKPWKPPRQAVIITFVILIIYNQLLSMGFTENAAKKAALFTKNESAESAINWILQNKIRKGTKCCFLKKFKAEFNKIRKGTKCCFLKKFKAEFHPNVYEFIFSILTTLMNDPHPMLTKQSTPPLTSNQGKQTRGTHGQIKSNKGVSINGLIAFLGQNASQKRHGKGHYRLRAFISHIGSTPNSGHYVAHVKADNGQWHIFNDEKVAKSQHPPKTLGYLYLFQRAT

SEQ ID NO: 120245 - protein, 57 aa, Heterodera glycines
ADWTFRGKHLGVYEFGTDLNRSDWVLIHKHEEKKFTENRQQMGTLNIPSTFPVPPLQ

SEQ ID NO: 120246 - protein, 320 aa, Heterodera glycines
MPIDYSAWSNIEVSDDEDDTHPNVDTASLFRWRHQARVEREAEMKQAKKEVKEEQSNEIEEKLKSAKLEEKERISLELELNTIRTQEEEFRKKEKELEEKEKHQPWNVDTIAKEAWSKTIVNKPKEGKEQPKKGTTSKSEEDEEINRMQKYFKEINMGRVAENYIMIQYELELAKSLHAMATNTNVIKNFFKKIRIAEQNYMKMFTDEVEAFKDRLRKRARDKREAMLSETEVEEKKKRVAQSPGGLDPQEVFDSLPAEMQEAFETQSMSKIFEVAKSMDSEVFKYHLDRCTASGLWIPNAKEAEGHGQEEEEKKETEEK

SEQ ID NO: 120247 - protein, 66 aa, Heterodera glycines
PLDKKHEQSLNDALQKFATRGQKLNLTFTVKPDLVGGLVVNIGDKYIDLSMATRLKKMDAVVKGSI

SEQ ID NO: 120248 - protein, 340 aa, Heterodera glycines
TYRYPGATINIHPLLSSLVNYTHPIKFSGFDVAEQNDLHFHMSSFSESTGLGLLKQSALEFVNYNKRQLSRIYPKGARVDSSNFLPQIFWNAGCQMVALNFQTPDVCMQLNQGKFEYNGQCGYLLKPDFMRRPDRTFDPFSESPVDGVIAAHCSVRIISGQIISGQFLCERKTGTYVEVEMYGLPTDYGLPTDTIRKEHRTKLVPANGLNPIYNEEPFVFRKVILPELAVLRFAVYDENGKQLGQRILPLDGLQSGYRHISLRTEHNQASTLPTLFVHLQLKTYVPDELSGLGLVDALADPRAYLSAQEKREEALQQMCVDELDIVDDVNIQNDTIHYST

SEQ ID NO: 120249 - protein, 159 aa, Heterodera glycines
KIIMVFYLKKILQNKRVLPVVSKTATFRLAPIYSMFPFHYNSKKPIFRFRFIKISFFHPQIYGGMRSMKGMVTETSVLDPEEGIRFRGYSIPECQQKLPKAEGGEEPLPEGIWWLLCTGEIPDQKQVNAISKEWASRADLPAHVAQLLENIPPNLHPMS

SEQ ID NO: 120250 - protein, 204 aa, Heterodera glycines
VLYWNAEAENRGAILNDPERDDYMRNPCERAQNKFLIIELCETIQPTALEIANFELFSSSPRQFRVWGSERYPTQEWALIGEFEALDNREVQLFNVLEHTSYAKFVKLELLTHYGSEHYCTLSTFRMYGTSMVDEYEAETVVAVDAMQQQQHQQQMDSVFGRTFSTLPSTNSAAVNEAVVATGGEEENRQNNGTITEKTPLTTV

SEQ ID NO: 120251 - protein, 47 aa, Heterodera glycines
ATIYVGGLDEKVTEAILWELFVNAGPVTNVNMPKDRITGKRQGFGFV

SEQ ID NO: 120252 - protein, 109 aa, Heterodera glycines
MLSSQPTLIMDNGAYSIKAGYSTDQSARIFPNTVFKSKGERKRIFVADELDQCTDRSALFFVLPFERGYLVNWDTQLQIWNRVFGTEGAGLGVDCQQCRLVLTDPHEVA

SEQ ID NO: 120253 - protein, 730 aa, Heterodera glycines
TDAGGITHFRSGMTHDEDQIIPNLYRYIQPWEAEFVDSQRVWAEYALKRQEANAQNRRLTLEDLDDSWDRGIPRINTLFQKDRNTLAYDKGWRVRTEFKAYQILKQNPFWWTHQRHDGKLWNLNNYRTDMIQALGGVEGILEHTLFRGTYFPTWEGLFWERASGFEESMKFKKLTNAQRSGLNQIPNRRFTLWWSPTINRANVYVGFQVQLDLTGIFMHGKIPTLKISLIQIFRAHLWQKIHESVVMDLCQVFDLELDALEIQTVQKETIHPRKSYKMNSSCADILLFAQYKWHISRPSLLADTKDVMDNTTTQKYWLDVQLRWGDYDSHDIERYSRAKFLDYTTDNMSIYPSPNGVLIAIDLAYNLYSAYGNWFPGMKVLLRQAMAKIIKANPAFYVLRERIRKGLQLYSSEPTEPYLTSQNYGELFSNQIIWFVDDTNVYRVTIHKTFEGNLTTKPMNGAIFIFNPRTGQLFLKIIHTSVWAGQKRLSQLAKWKTAEEVAALIRSLPVEEQPRQIIVTRKAMLDPLEVHLLDFPNIVIKGSELMLPFQAIMRIEKFGDLILKATEPQMVLFNLYDDWLKTISSYTAFSRVILIMRGMHINPDKTKVILKPDRTTVTEPHHIWPTLSDEEWIKVELALKDMILNDYGKKNNVNVASLTQSEVRDIILGMEISAPSQQRQQIAEIEKQTKEQSQVTATTTKSVNKHGDEIISATTSNYETTTFSSRTEWR

SEQ ID NO: 120254 - protein, 278 aa, Heterodera glycines
YGGLSDDSPAPGGLIGQFGFCSAPPRTVNQHPTLVESEGRLAIVWAVAIRHCPANNSSTMCRLFTHSFANAMPFLQVLYKTLTSGSVLPSSASANASADPLNATSALGLPFPQSVSLPPVLAALFPDLNTSTPITLTAAQQEAIGENLEMIQNLIVQPSSPLCSPKPVAVAEFNLDAFMGQWYQVMYSPPLVQSACSVVSYRKLADINSGGIGSIFEVFEYTTDGTPYSKPKITSGYAIIKQMGELIFRTTAHQEDVNKVRNGGATASGTEGRRQWYQ

SEQ ID NO: 120255 - protein, 249 aa, Heterodera glycines
KQLIAIGIDRDKGVPSITFAPYLTHCAFESLTQAFTNSMALMEWFKRCAHQTLKLGRPALMEWFKRCAHQTLKLGRPMEWVTPLGLPVVQPYVTVDKEGTGLVFRPVPHKQVNAFPPNFVHSLDSSHMMLTALCCYRHGITYASVHDCFWTHACDVDEMNRICRDQFIALHEQPITEQLSRFFTSTFLPPELRQLMSVDEFFTSTFLPPELRQLMSVDELNKIVEEFKLNIPPGNLDITKVRESKYFFS

SEQ ID NO: 120256 - protein, 257 aa, Heterodera glycines
VCVVSTNVAETSLTIPNVRYVIDSGREKKREYDPITGVSRFVVGWCSKASADQRSGRAGRVQSGYAFRLYSSAVYEDMRDHSTPEILNKPIDQLILMLKAMNFTKIDNFPFPTPPRLDQIKSSELRLSHIGALRVQEGLYTITQLGQSLAQLPLTPSFAKVVISSIRGGLLPFAVTLVSALSVREPLLFISSTKEDGTEERRKRMSEVIKQRFLWCAVGEARLFGDLTVILNTVGAADYEEENGCTLPRTTEEIKVE

SEQ ID NO: 120257 - protein, 299 aa, Heterodera glycines
LKSYIYHQLVKVEYTGAVDDIFYAGTGLLLLKNADSVQMYDLQQKRVLASVKATKVKYVIWSKNMECAALLSKHTVTLVTKRLEVLGTVQESTRVKSGAWDAVLGTVQESTRVKSGAWDADEAFLYTTSNHIKYALTTGGDHGIIRTMDIPLYILAVRGSRLYCLSREASPVELSIDLTEFRFKLALTHRRYDEVLNMVRNANLLGQSIIAFLQKKGYPEVALHFVKDEKTRFGLALECGNLQVGLRVENSTLDGFHKLISTNFLMTSFKLQGLEILHKALSFFIFWYVMENALILTKS

SEQ ID NO: 120258 - protein, 255 aa, Heterodera glycines
MSAEEFSAKLREVTGSQLLSPQQQQLSDNGVDEAVTAQRQLQVSRSVPPPSLQQQQIQPAQIVNVVRPLSVQNSLNALYPATTASTTFVVERKPPTPQQQPLQKQTPIASASPAQQVQAVAQQPQQLQTNRPPSTSSSMATTNVHESSASTTTLAQAQMAPESLQAAEARLRNVLAQLASLADHRQRPLRIDPNYALVDEPRKQMRFMEDIERRAHESRETAEKEAMMRTAKSKGGKDRDVVEKAKMVGHWAGGN

SEQ ID NO: 120259 - protein, 79 aa, Heterodera glycines
MIISVWGIVFLGLLGVFFYMHAVTLFPDLHLEEEAKLERQMVEEKYEEKAKQCWIAAGMYVVTLIAVFWQNRFNTTQIL

SEQ ID NO: 120260 - protein, 515 aa, Heterodera glycines
QFQIMLYQNLKIVPSADSQPLSSFIHDLLRRKLLSCTHPVKYFTDITAYSSTKYFTDITAYSSTLPNVLYAGVDPTADSLHLGNLLVLNSLIRASFFGCSPILLIGEATASVGDPSGHKRDRKLLLHEFIRKLLLHEFIYANSKALQRQVEKIKANVSSLYGEDISLEIRNNAEWYKEVSLADFFESTKRFRMSDMLKSGPIKSSLADFFESTKRFRMSDMLKSGPIKSRLDDSLSYAEFSYQTLQAIDWLKLYEERGCLCQIGGTDQIGGTDQFGNMRAGFEHIRATERLSIALCMPLLTDKNGRKLGKSSDQNGGTAPLWLDQLKTSAFAFYQHLRQLHDDAAEHFLVDAAEHFLVSFSLRITEVEDVLEEHRNNLGKWVAQHLAEEMTAIVHGKAALERAKKCSKILFGASSSELENASSSELENLNPDEITEMFGSASTFEIVCGSIKTMGDLAAMTKQDGINLMRAGALKINGTKATDPEEKIDLERILINGRFTIVCWGRRKFSLIKWS

SEQ ID NO: 120261 - protein, 79 aa, Heterodera glycines
MSALIPFIIVTLFWAVIGAGGPFLVPSGMNRGIIQTMIVLTAVCCYMFWLIVYLHQLNPLIGPQLPVKTIWWIHNTWGI

SEQ ID NO: 120262 - protein, 180 aa, Heterodera glycines
MCEWRKFPFRCPATWLYYDCFPSSVTHFSDVGIYDRVIVQEVVKTMAQVEQLNRSTQKAFKVVVLMEAENLSREAQHSLRRTMEKYAGTCKIILCCESASRIIDPLRSRCMLIRVAAPNDAQMRECIESVCAKERVNLSEFWMKMLIEKAGGNVRRAICLLEEECSTKVKEIMSQFNGNM

SEQ ID NO: 120263 - protein, 139 aa, Heterodera glycines
GYRLTFVIAYLRDMAMDYAVIGDMAMDYAVIGESFETSVPWSRVLDVCSRVLDVCRNVRTLLVHEARRHGIKYPVLATCRVTQVYDAGACIYFYFGFNCRGLEKDPLHVYEQIETAARNEIITCGGSISHHHGIGKIRK

SEQ ID NO: 120264 - protein, 148 aa, Heterodera glycines
MSPEPTPPFLPVASAHAKVEEEVPIPSTALKPQTSLELDEVKKEAESRRESAEDYDEDYDEEKPIDKSPGVAVAWCELQEQKLNKAERQRFREEAEMLKGLQHPNIVKFYDYWERTDGKRKLVGFPFYFVWGRRFKNAICRYIVLITE

SEQ ID NO: 120265 - protein, 139 aa, Heterodera glycines
MVHDGTVVNLTPGSVINEKMVRPDIPEFFMQSHYPKKGTGKPVEYSVLVDEIGMTQDELQGFLNALCYSHQIISFAISLPEPIWQADELAKRGRNNYLTMKRFFPKDIPRLPNGVVDTKRLTEGLCYRNGRLSATRFTA

SEQ ID NO: 120266 - protein, 111 aa, Heterodera glycines
MYLADQEAVQFVANALQWLRPDGYLHLRESCSEPSTKKSADHSTTTTTTSTSSSSSSSLHNNSKPNPTRYRFSSAYIQLLRSLRHTDVQSGTQWRFDVQWACSVGVYIEVW

SEQ ID NO: 120267 - protein, 164 aa, Heterodera glycines
MPTYSAMDSRRKNDGGNGAVTEVKEYNAKWADEYGIGQDRLPKNVAKTGEEEEDKADEEKLVVITVDEEYIQDRFNLTGLSEQVPHFRQALDMILDLEPDDDYEEGQSDLVEQAAEYYQSQSPVSGVQGTSQQQAVTPQQTTQSVAQTQLLNNGGRQSMDAFDD

SEQ ID NO: 120268 - protein, 142 aa, Heterodera glycines
MNAPERNDEEVKYEKLCKEMRGLLNKVTPSTYKDLSEEFIKYKIHEDPKLLEMIIDLIFDKAVEEPHFCPLYSDLCKKQVEEEKKCQKTFTVSNHFDDKIAELRKKIDDLEEGDEKGRAQVEEEIEGRRSKEKRRLLGIISW

SEQ ID NO: 120269 - protein, 94 aa, Heterodera glycines
ELKNEPNCRLFAQQIARTAKDIEILIDSLPADEQSLSVEEHEKALLELDDERARAAKELEQAVEKAEKLTDQLGELLSRIARLQMESRPMAFST

SEQ ID NO: 120270 - protein, 222 aa, Heterodera glycines
GRFRVILGSLVYVFGHVLLSVGAIPVLDSLVRKTLDYSGLAVIALATGGIKPCVSAFAADQFGDDQQRQRTQFFSFFYFAINAGSLLAMGITPRLRTVQCLGADHCFPLAFAIPGLLMLVAFLTFLFGWRNYKITPANKGNILWKVVRCIFFALRRKIRNRSHRRSPDHWLDYARPKYDEHLIAGVKSMLAIIVLYIPIVFFWALYDQQVGKAVLTLFMTLS

SEQ ID NO: 120271 - protein, 59 aa, Heterodera glycines
MARRYDTRTTIFSPEGRLYQVEYAMEAIGQAGTCLGIRAPDGIFIAAQKLTANKLLDDR

SEQ ID NO: 120272 - protein, 359 aa, Heterodera glycines
AKALKKFSNKVGLETESYRHKLLLKETNVEIIESVRGEDVYIIQSGCGEINDCGEINDHLMELLIMISACKIASACRVTAVIPCFPYARQDKKDKSRAPITAKLVANMLSISGADHIITMDLHAVANMLSISGADHIITMDLHASQIQGFFDIPVDNLYAEPAILKYIRETIPHWQESVIVSPDAGGAKRVTSIADRLNAAFALIHKERNNAGGAKRVTSIADRLNAAFALIHKERNNPNEVEKMTLVGNVQDKVAILVDDMADTCGTIVLAAEKLFEALFEAGARKIYAICVHGIFSGPAIDRLNKSRFEAVVVTNTIPQEENMKRCNKIQVFLAGHGLLKSIANLPMVSHLFKKYFL

SEQ ID NO: 120273 - protein, 274 aa, Heterodera glycines
MYGARIEQTQKEEEEKALKLVRMLEELKENEKCQWRKEETREEDKENVMLKKGPRKTAVVDGWEEAQIEEEELIEKSTERKVPSDGWEEAQFDDEQMHLKRNEQHSNSVDGWEETEIWTDEANEERFKSKDVFEEAQTKEEIVIKVKERLKPLDVWENGKSEEREQSKAEQSQLLEENRKLFERFTTTNAELSRIETQMSEIQRLQGIFAEKISEQEQEIDVIHSRTVYTLDNLETANEFIREAIKNQANRRVILIFCLLVLTFTLIFLDWYNP

SEQ ID NO: 120274 - protein, 169 aa, Heterodera glycines
VVSVTASTSQGKPLEQNELDVIIEACSMAEELYDLRMKMHLFVELRMALIAPNLCRIVGAGTAAMLISQAGGLVPLAKMPAKTEEDFGRLQLLRDPSQHRLHLPPPNRPNSAARPSQKSGAIGRCKMHIGFPSGFNSFFVGRTNWGAIVSRNQREIGKNARATAGQKCQ

SEQ ID NO: 120275 - protein, 189 aa, Heterodera glycines
PAFALDFLLSYPSLSNRMKLKICFIFPFFQIPRKVLNEATAALLYHSISLGREDLVKFKALKVVVRIGSGVHNVDMQAATDLGIAICHSPAECVEETADSTMSLILNMFRRTFWAARTVQAGKQPGSVEQLRDLMSGSARINGSVLGLIGLGRVGTAVALRALRKAFGFRVLFYDPHLPNGTSYIINSN

SEQ ID NO: 120276 - protein, 268 aa, Heterodera glycines
IVPSDVNPLTTGIETVGGVMTKPITRNTVIPTKKSQIFSTAADNQPTVTIQVFEGERPMTKDNHLLGKFDLTGIPPAPRGVPQIEVTFEIDVNGILHVTAEDKGTGNKNKITITNDHNRLSPEEIERMINDAEKFAEEDKKTKEVVEARNEFESYAYSLKNQLGDSEKLGGKLSAEDKTTIEGAVKNQLGDSEKLGGKLSAEDKTTIEGAVDEAISWLDSNKDAPPEELKERKKDLEAKVQPIISKLYAGQSPPPGSETPPTEEKDEL

SEQ ID NO: 120277 - protein, 144 aa, Heterodera glycines
MDKGKADIGQSKGMGQPMDNETMQNWRDSGGPYAKRLANGVPVYMTAVLEHITGELLKKIGEITQAEGMKRLSAFHIRTAARDNDELRKLFSGVSLAEVCVLPELESDVEQSSEGSGESDSDEESTEGSASGSQEGGGAAAAQQ

SEQ ID NO: 120278 - protein, 302 aa, Heterodera glycines
MKNLKNLLFSPREYIRAGGGPLLCSLVIAAFILNVGANIFGTVWLKNWMVRLKNLFYLLTVIKKKKLQNLIMSHISVPHTAITVPLMELVGVWPTVHPFTSTFMVGGFHFACVVYQRTAQGIGVCQGVKFHKKKSLNKMILVFYSYKICPIVYAYCRHTVAQSDVAPCTVRHCRLFPPYTVRAHFEPVQQRHGRNLKRVENVTRSPVFEHLTTSLDALPTIHAFGQTQRFVEQLKQHLDENSGALFLYHSAMRWQAVWLDLLVVGLTFFVSLFIVLLTGRIDPAEADLLNVIKLLRQFDDAN

SEQ ID NO: 120279 - protein, 122 aa, Heterodera glycines
LGGTIGDIEGMPYTMSGEIKTKPAQNGLRSLRETGLYPDLLLCRSQKPLTQALRSKIASFAQLDINEIIDVYDCHDIHSVPLLLLQQQMKELLISQLQLPDMRTKEDFSAFYRWQQLSEKQV

SEQ ID NO: 120280 - protein, 174 aa, Heterodera glycines
VDKEKQFLKFFAMNLASGGAAGATSLCFVYPLDFARTRLAADVGKADAREFKGLADCIMKILKSDGPIGLYRGFFVSVQGIIIYRAAYFGCFDTAKMLFSPEGKQMNFFVNWAIAQVVTVSSGVLSYPWDTVRRRMMMQSGRKDIMYKNTLDCAIKIIKKEGLFTGMYKGALSN

SEQ ID NO: 120281 - protein, 333 aa, Heterodera glycines
MDDLTTTELKWRPAERANDDSLPLKPLTDIERQMNEIRTELFMARQEEEAIISRIKDEFRQTQKRLFDQSVARINAEFERVGSNARQLANSLDSVSALAQNISCRVVALDLGKSRVVECLQRVNDLKDLGTCAFGVQEALRAEKYEEAAQHIHRFLTLDTAVFKMGDHRESKDAGYSVKNSYEILRNATSELKRIIEQRFDEAQSSGDVASMERFFKLFPLINEHNSGLQRFGTHLCGQIEALGDQNFRIMQAGGTDDKRKNVLYADTLTMLFEGVARIIELHQPIIENFYGPEKLLLLIELIQPECDKQCVRVLNTFIQRRHFEEKAQQVFF

SEQ ID NO: 120282 - protein, 226 aa, Heterodera glycines
SAWLSWLFLFIFILLLLVALHRPLPARIADRRKIALFEFLMRLFNEYLGSLVEIAAGHSARNKLSRALSLLTFPVFPVGFSVGSSPPIGAVRDESIAGVPCRLYVPKGDKRRHNGAVVFIHGGGWCIGKPRYYDGAYYDGALLCLSWKVGIPIISIDYSLSPEAKFPTALLQCERVIAELNKVPFSTYGIDPTKIALMGDSAGANLCAVICQRYRRPRRDRRSGQG

SEQ ID NO: 120283 - protein, 665 aa, Heterodera glycines
ERFQRFPDKPLPPTPTHCESAHFDNGNNNNNGTGYNGSTFGGDFPFLVQQRSPLRSDDFDSSSDESEGTGVEMDPITGGNGRPGTAKSLCPKSVATAHRQLRTHRRKSKSFRKSGGPSHFERRAKGGGLRNAEGLRNAEGRSEEQCQVRPKEREKSFIGYFAGGGTALSGTVNRPGRMPNPNQSGTVNRPGRMPNPNQVQVNVNVQVNVNPNSAASDGDAPEIRKYKKRFNGEILCAALWGVNLLIGTDTGLMLLDRSGQGKVYHLITRRRFDQYHLITRRRFDQMSVMEGQNILVTISGKKRRVRVYYLSWLKQKILRTEGVGRPKETEKRNGWTNVGEFQCATHFKIVPKETEKRNGWTNVGEFQCATHFKIVRYERIKFRYERIKFLVIGIEDSISIYAWAPKPYNKPYNKFMAFKSFGQLSHAPVIVDLTIEENSFGQLSHAPVIVDLTIEENARLKVLYGSLAGFHAIDLDSASIYDIYSPQQASIYDIYSPQQMCQGMCPHCIVIMCQGMCPHCIVILPNTNGMQLLLCYDNEGVYVNEGVYVNTYGKIVKNVQLQWSEIPSSVAYISTNQIMGWGNKAIEIRNVETGAYISTNQIMGWGNKAIEIRNVETGHLDGVFMHKKAQKLKFLCERNDKVFFSSAKGSSSQIYFMSLNKLNNW

SEQ ID NO: 120284 - protein, 313 aa, Heterodera glycines
IDTVIHFAAITHVDESYTDRIGTIQENVIATTTLLLLEAINFYGRVRRLVHISTDEVYGEVYGDSMDDTTPKCEDSPLNPTNPYAASKAACEVIVRSYHHHSYKLPYVMVRMNNVYGPRQAYSKNNVYGPRQAYSKLIPKFTRLALEGKPYPLMGDGMHSRSWMYVDDCAEAIRRITERGRIGQTYNIGTEFEKCNLHLTEMLQEKVQKLMDRLHLTEMLQEKVQKLMDRDPSQISFEPDPSQISFEPIADRPYHDRRYYINFTKIREELGWENFTKIREELGWECTVPFAQGLADTLDYYVKEYRKTHNAML

SEQ ID NO: 120285 - protein, 244 aa, Heterodera glycines
FLIFINDLPSVITNEAASVGIKMYADDVKLYYAHENDDHSNQLDKAIEALEKWSKINGLEISTEKCFVLYLGKNNMKKEYFINSKKISESDNVRDLGIIIDSKLNFSEHISKIIRNAYLRSFQILRVLKSREIKTLTAAYKTFVRPQLEYATEVWNPNLKKDIDKIERVQKFFTRKAFRNVDVYKKYMERLKITDLHKLEERRKINDLTTPFKIIKGFTSLEAQEAFTFTSNTRPKLKIIFSIG

SEQ ID NO: 120286 - protein, 163 aa, Heterodera glycines
FQPFDAAYTAGGKEADRLKFGWKVNDCQGLFSIGTWMGLVVATLLIGVLFFGFLMLNSVQTMDRFDDPKQKQLIIMQGKGMCTAWHRRSSAFCGCSDGPLFEVERAGVSHIAVHARTVSQRSEPPDYAAVALLKQCLQVPIFANGGCKTFEDSLEISQATGAD

SEQ ID NO: 120287 - protein, 120 aa, Heterodera glycines
FDISGHAFLLIYSILIICEESTSFQNWPSKPRVTIHHVPSRKEFELFQRNTKIIQWLFVSLMLLHLLWDLQLLITSLYYHEFWQKLIGASIGVFSWFVTYRFWFVVGFPFLPIRRHIKSF

SEQ ID NO: 120288 - protein, 128 aa, Heterodera glycines
MMDCSTILECATEHSLILIDELGRGTSTYDGFGLAYAISEDIISRIGCFAMFATHFHEISRLQSKYPGKVKNYRMDTICENGELTILFRVVSGVADRSFGLNIAKVVGFADEIIKDAEVILNQLEAGE

SEQ ID NO: 120289 - protein, 152 aa, Heterodera glycines
HAWFGMEQEYTLLDVDQHPFGWPKAPFGFPGPQGPYYCGAPYYCGAGANKAYGRDIVDSHYRAYGRDIVDSHYRACACLYAGILISGTNAEVMPGQWEFQVGPCEGIQMGDQLWIQMGDQLWMARFLMARFLLHRVAEEDGVIVSFDPKPSQ

SEQ ID NO: 120290 - protein, 235 aa, Heterodera glycines
MDVPASSSATPPPFCGTAFEGVFLNGVRTSEYNVYSTFQSHEPEFDYLKSLEIEEKINQIKWMKKKNAANFIISTNDIVDIKPANMEELTEVWDLNMESRPVESYHVHDYLRSKLCTLYENDSIFDKFECCWSGDDRHVITGSYNNYFRTFKRNTSVESTYEASLDLCKPYRMGGYGGRPLLHHERMELAAAMASGGSSPGGNKKQQHGSSSTNMPPGKKRREEISADYLDFNKK

SEQ ID NO: 120291 - protein, 107 aa, Heterodera glycines
VVDILHPNRASVPKSEVRERLAKLYKTTQDVVVAYGFRCQFGGGRSTGFANVYDSLDYAKRFEAKYRLLRQGVGQKVEKGGRKQRKERKNRQKKVRGVKKVKVQAGK

SEQ ID NO: 120292 - protein, 200 aa, Heterodera glycines
MKGALIDQKSMGHGGPARVEKAKIGLIQFQISPPKPNMENQVVISDYAQMDRALKEERNYILELCKQIKKAGCNVLLIQKSILRDAINEMALHFFAKMKIMVIKDIERDDIEFYAKILGCRPVASVDHFVPESLGTADLVEEIETADGKVLKVTGLKQSGCAVSILVRGSSKLVLDEAERSLHDALCVIRCLVKKRALLP

SEQ ID NO: 120293 - protein, 226 aa, Heterodera glycines
DDVKIYISHDNDTKSSVGLSKWSKDNGIAIAHEKCAALYLGKNNSRHEYKIGEKVILSVDCVRDLGVLVDQKLSFNNHISKILKAAYFKAYQILKILKTRNINTLILAYKSYIRPHLEYASEIWNISSKEQSKRIEKVQKYFTRIVYKKCGLKAIPYEKRLEICKLEKLSTRRSLTDMNMTFKIIRGLTHLDPKKYFEFSTRSQRKTFRIQNCNYVALGFVQINKI

SEQ ID NO: 120294 - protein, 201 aa, Heterodera glycines
VPAKKRSPKQHPNFKFSRLDVSASVDSSVAFSIHKTWPDLQLNQSHLFFECTLFLYSVLALFLQYLNLYRTLWWLPKSHWPNSLKYHLINPYILKYHLINPYILSCIGLLLGLRVTKCFWDTITDRISFFSITDRISFFSAGQDGWKFICWKVFENAIVKTPLTTVVLSSFLFSFTRIYFEFGIKSFLCFTCPFLLKLCNF

SEQ ID NO: 120295 - protein, 582 aa, Heterodera glycines
RKSFSFFVFSLFVLISRNYRGDVDTVVIEKFVPLLVDLEEEYRGDVDTVVIEKFVPLLVDLEEEGQLAPVVDVESGTHMIWIRFNNIYVVAVSRCNTNVSLVQTFLVAVSRCNTNVSLVQTFLYKLVAVFAEYFKDVEEESIRDNFVIIYELLDEMMDFGYPQITEGMMDFGYPQITEGRILREYITQEGHKLEAAQQPRPPMAVTRILREYITQEGHKLEAAQQPRPPMAVTNAVSWREGVRHRKNEVFLDVIESLNLLVFLDVIESLNLLASGAGTVLQSEIVGSVKMRVFLTGMPELRLGLNDKVFLLIQFRGRIKAVELKDIKFHQCVRLSRFENDRTISFIPPDGEFELMSYRLSRFENDRTISFIPPDGEFELMSYRLSTIVLSTIVKPLIWVEAVIEKFSHSRVEYMVKVIEKFSHSRVEYMVKAKSQFKRRSTANNVEIVVPAPSYSDSPRFKTAIGNCRYQPEDNSFVWNIKDNSFVWNIKNFPGGKEYLMRAHFKLPSVLSEEVEAKRPIKVRFEIPYFTTSGIQVRYLKIIEKSGYQIQVRYLKIIEKSGYQALPWVRYITQSGDYSLRLN

SEQ ID NO: 120296 - protein, 198 aa, Heterodera glycines
MSRAASIARQASKHGLKVKSIFTVTPGSEQVRATIARDGFIKDFENIGGVVLANACGPCIGQWDRKDVKKGEKNTIVSSYNRNFTGRNDANPATHAFVTSPELTIALALAGTLDFDPRHDTLTGSDGKKFKLEEPKGECLPAKGFDPGEDLYQPARFQGDVVVDPKSDRLQLLEPFDAWDGKDLTDMVILIKVMGQGV

SEQ ID NO: 120297 - protein, 222 aa, Heterodera glycines
TKAKKFCRNEFNLTGLCNRASCPLANSQYATVREENGVCFVCFLFMKVAERSHFPGKLWEKVKLHRNLAKAVEQISTHLLHWSEYVRKKCKARLMRHHQCLNRMRKMELRGRTAKVIPLQRKIERRKIERRERRREEKALAAAKLDNAIERELLQRLKKGTYGSMYKFSDKTIDKAMERVDESEQSEEEEVEYETETTREKQRQFVEDFDESEEGEDIEDYS

SEQ ID NO: 120298 - protein, 222 aa, Heterodera glycines
MTEETSGTERVFALSVNVGGLVNHVIFRRHNGMYTLDNCDKGFRTIERFVDHYLRTGASVTTKQHVALIRAVPRAHWELSHTSIILNNELGRGTFGIVKSGVYVDQQGTRATVAIKEVSQTSTKEQFYGVAVGQEPLMIVMELASDGSLTNYLKQQRRSARVKLYMCLGAAGGLDHIHSKGIIHCDVAARNCLYTNGVVGEKHQKKIFFVMKLLNLFIFPHR

SEQ ID NO: 120299 - protein, 241 aa, Heterodera glycines
LRSSQAHLGLLKVHSFFFVVFTFYLLLLLVLTIHSTPIKTLSNNFFAGLYIRRLELINCEIELLEKGAFGGLENVLQELAINGNRIKEMIPETIAGFHSLVRLDLSNNSRIKEMIPETIAGFHSLVRLDLSNNSIEELKVEHSLPRLPKLTLTDIDLSYNRISAVHKTFFDGVKGTVQTINLGHNVIEEVPASAIRGFRMLMALHLHNNLLNGILPALSFMNLPVLSLLNLAGNQLSAMHR

SEQ ID NO: 120300 - protein, 159 aa, Heterodera glycines
EISTEKCFVLYLGKNNKKKEYYINSKKISESESVRDLGIIIDSKLNFSEHISKIIRNAYLRSFQILRVLKSREIKTLTAAYKTFVRPQLEYDTEVWNPNLKKDIDKIERVQKFFTRKVFRKCGFVYKKYVERLKIAGLHKLEERRKINDLTTAFKIIKG

SEQ ID NO: 120301 - protein, 473 aa, Heterodera glycines
MVKVEGQREEFVRNCFVVGGCESVVGSDIVECRDEKELLEASIDKTVCLLSRIRGSMCRQRDAAMQSKQMGNRVNKFVSMDGRIIFDVLQLVLREYKLRSYTLNNVSYFFLGEQKEDVSYTFIPQLQNGSNMDRRRLALYCMKDAFLPLRLLDKLMLVINYIEMARVTGCPLNFLVSRGQQVKILSMLLRKTREHFLFLPVVEMGEGAGGDEVGYEGATVIEPLRAFYKDPIATLDFASLYPSIMIAHNLCYTTLLPKGAVAKKAIPSDWREGEDYIVTPSGDMFVKATHRQGLLPKVLEELLSARKRAKAELKKEKDPFRQMVLNGRQLALKISANSVYGFTGASRGKLPCLEISQSVTAFGRQMIEATKQMVEESYIAGAVDGLCPANAKVIYGDTDSVMVKFGVKSVGEAMELGRHAAREISRRFPPPIQLEFEKVYFPYLLINKKRYAGLYWTNEERHDKMDCKGVMEE

SEQ ID NO: 120302 - protein, 179 aa, Heterodera glycines
ESVLLSGSNDFTLKMFDYSKTAVKRAMKTITEVEPITAVSFHPSGEFFLCATRHPITEVEPITAVSFHPSGEFFLCATRHPTLRLYSAETQQCFVSPIPKDQHSDSITDVCYSENARMFVTGSRDGNVKVWDGVSNRCIETFTRAHDGAPICSAQFTRNGKVLLHYAIFPEINYSVIAV

SEQ ID NO: 120303 - protein, 170 aa, Heterodera glycines
DIPSPLDAEIQIVLREIQSEVHQLENSGEYGEQLKNARRLLATEATKLENNIDPEWLEVDINKATKLENNIDPEWLEVDINKPIKVSKKVLIPSFRHPKFNFVGKFNFVGKVLGPKGTTLQNIAKSYKCHVYILGRGSTRDRTKEQEMLSSGDPQYAHYGGPLHVKVETT

SEQ ID NO: 120304 - protein, 297 aa, Heterodera glycines
PFLGVTSISCDTHYGYAPKGTSVILYRSHDLLYGYAPKGTSVILYRSHDLLHQQYFCSTEWPGGLYATPTLSGSRSRPGLNIALTWATLQHFGEKEYARRAHLILQKTTQLADAVAKVPGICLVGTPEVSVVAFSSHRVAFSSHRFNIHALGDCLSKMGWNLNFLQKPDALHFCITYNQTADGVLNAFLVDQKPDALHFCITYNQTADGVLNAFLVDLKKACEEVAALPDRGANSKTAAIYGMAAKIPDKGLVEEVAHLYIAAIYGMAAKIPDKGLVEEVAHLYIDACYSMPSFTSS

SEQ ID NO: 120305 - protein, 219 aa, Heterodera glycines
ISRPISGSFAYKPPFSYIWLTYMAIQNSEDKMLPLTDIYNFIMNRFPFYRQNTRRWQNSLRHNLSFNDCFIKVPRRSDKPGKGSCGSCWAIHPKAIKMFENGSCLRRQKRFKVRAPSLPRPPIALPFPLALCPPIPSLLPLFALFPPPPAVSDSPLLLNLALLFHLRRCAPSRSSPTVGPFPAVPKGPSSASPSPSSDSSSSSTFSSSSTFSITSLLAQ

SEQ ID NO: 120306 - protein, 117 aa, Heterodera glycines
NCLPGMFIVGLPFAVKIGGWCAILALTGVAWICYRTGLILIECLYEDCPTEKFSYREVAEAVRPGLGKFVLIAQLTELASTCILYIVLAGDLLQGCFPSVDKPDCPVKTKGENCSPE

SEQ ID NO: 120307 - protein, 123 aa, Heterodera glycines
GLNEPCSVNSLVEVVVGGSSGVAPGEVSIFATSPAGLKQKCEVIRRENAFTSTFTPDRIGNWLIGILYEGEHNWLIGILYEGEHIKGSPFPCQVFDASLVNVYGLDVGLIGQELTFTVDASRA

SEQ ID NO: 120308 - protein, 787 aa, Heterodera glycines
ADPRQDRFISPKWVQLRESTNPAKDGQLAGVVIGEVNFTLVSCITDKTVHSYILNSEGNLLKTIVHDVKGCERKCWHYSKTTNQLIVATIVHDVKGCERKCWHYSKTTNQLIVASREMVYFYDINDCLEMGGENGMVYFYDINDCLEMGGENGRCHALGRGSEKVQLLEKDGQIALVTEQETQIQRSDNNKMNVLYLFDIESRYISFFCSMPSPCHIFTLGGEIYLRNSEGVLSKLVEESVETKLDILLKKNLFDLAISIARRGKSEELLKSIFMKIARRGKSEELLKSIFMKYGDYLYKKGDFDNSIKQYTNTFGFVEKGDFDNSIKQYTNTFGFVEPSNVIKKFLGGARISQLCQYLEAFLGGARISQLCQYLEALHANLHANNLATGHHTTLLISAYVKLHNVRKLEEWLKKAPKSKRKAKEYIFKAPKSKRKAKEYIFKLLRSAELFHLASKLAAKSDRPFTFLDILCQDTREWGKAVKFISERPLSVSCELLETYGPILLEHVEEQTLALIGRLIWSEGEKVLNPVLWIKFVSKSEGWWVLMGTFLCSQSTFFQCNFLHLDAILPNGHFHSEPFEGTVAELVSLVDSASPHHSLLLAYQYNCSPLVIHILRLLNRIEELFRYLLTEGDVVAAIELCEGKSLEDMWVELISFGTKSKSATKKEDLIALLRKISESDSLNPLIVLEILSRISESDSLNPLIVLEILSRDESLQVGDIREFIIGWLERQNESLKDNEHRIAEQERQLQKMSKEIADLENKLLFGVKGGRERKGCQFSMTIRHRRC

SEQ ID NO: 120309 - protein, 66 aa, Heterodera glycines
MPKEEVPEGVDQLTYFREQCEHKVAHLKSILEECNERVRSKPKTTEICHMVRFKYYHYKKNRLATF

SEQ ID NO: 120310 - protein, 238 aa, Heterodera glycines
MLGQPMGVCAEKTVAEFGFTREQQDAYALASYARATRAWAGGAFGAEIVPVKVKQRKGTELMVAEDEEYRRLMPDKVPSLQPAFVKDGTGTITAANASSLNDGAASLVIASGQVEGAKPLAKVIAYAEAGRAPVDFTVAPVDAVKTLLQSVNISIDQIARWEVNEAFSVTALAFIRQLDLDPARVNALGGAVALGHPIGCSGARIVVTLVHQLESGEFGIAAICNGGGEATAILVQRI

SEQ ID NO: 120311 - protein, 203 aa, Heterodera glycines
AKRSSDESLFGRQLRGTMPPQPVLTMIDHLLLYGSEPVLTMIDHLLLYGSETEGIFRKSPKQQTVRILRQQLDQGQVPDFHQFNVHVTASLLKEYLDQGQVPDFHQFNVHVTASLLKEYLRCIPGQLLISGNYRLWMEANGDGLSDEQRICRCRKLLTMLPPAHTVLLRSVLRLLRRVAANEEHTKMGTNALAVCVAPSLLEK

SEQ ID NO: 120312 - protein, 265 aa, Heterodera glycines
MYADDVKLYYAHENDDKTNHLDKANEALEKWSKINGLEISNGKCVFLYLGKNNMKKDYLINSKKISESDNVRDLGIIIDSKLHFSEHINKIVRNAYLRVFQILRVLKTREIKTLTTAYKTFVRPQLEYATEVWNPNLKKDIDKIERVQKFFTRKAFRKCGFLYKKYKERLKITDLHKLEERRKINDLTTAFKIIKGFTSLDAEKSFFFSERPRRPLLLRVKRHTAKTQNNFFNRIVKSWNNLPVVAVQINKAKEFRGLLKAMSSE

SEQ ID NO: 120313 - protein, 325 aa, Heterodera glycines
MQNQWDWILNLNKCLEGHLRDACNAKAFVEESEQVEQQMQKQLASFPSVVFGIPPPDPRLASFLSRLHNQFEKLRKLWDRTHHLVRYNMVLNTMRTVRAWDLDTFLCILSDQRDEIIKTLNEDVNKLLSEMDPNDPLAKRLKDELRMTNEHFYDLLARAQKEPEPDYSNQFDAACAELLCKFKEGGKQLNHRVQKRMATNVRRFSFRRSCAILLFLFLLVCKFPHTNSREITIEYGMCWIERNTETRTGMCPSTPTPTTSDSTTPTTSDSTTTTTTMTTTPPTTTQKKQPDDGKKPKKSDFWTVNKIISIGVPLCILVLLALSAP

SEQ ID NO: 120314 - protein, 51 aa, Heterodera glycines
ATSAHTCTGDGGGLAMRAGIAMQDMEFVQFHPTGIYGAGCLITEGVRGEGG

SEQ ID NO: 120315 - protein, 398 aa, Heterodera glycines
FAARRERTRGDFAVGSLDGSIAHLFGAKFGEVVLFWPEIFHSEYEPKRKIFHSEYEPKRKIFPRETATSEELVSFWRDNAIPLVGQMTRANSATRYHRRPLVAVYYNVDFSLAYRDGTQFWQKKLVAVYYNVDFSLAYRDGTQFWQKKVLAIAKKYSKQNYHFAVADEEEFYSKQNYHFAVADEEEFSTELNAVGLGTSGLEQNVIVFGVDGKKYPMDPEKYDENLEENLANFLEDIGKGKVKPFVKSQPVPKVKPFVKSQPVPKGDKKGAPVRILVAENFAKIVNDEANDALVEFYAPWCGHCKAFECGHCKAFEPKYKQFATKHSKEEPNLIVAKFDASENDVPEGYAVEGFPTIYFVPSGKKDKPIKYGGNRDLEDLAKFVKKHAVASFKKQENR

SEQ ID NO: 120316 - protein, 534 aa, Heterodera glycines
MPPDITPPPTLEDNLDDKFQMKLEDRTKVSGGETSEDEIADFSGNEISSRSSEDPMFWTADDECNFFKTLSALKERDPKIYEQNANFFDEENQNTKTYSDAFQDIEAKKGRKTQQKMTLRDYERKLVVERGGEFSESDEEMNMPGPSSSPSYFDQQQQLKKAFKSALADSDDSGTEELLRKREKSEQEKVKEREDFYEWLRNEGAEESGAIIDKDLVKLKKRWSASGGNQLDEEEKFLRDYLLNRNYENDEEEEEEEGIGGERVPTYEQIIQEEEDEEMADQFERKYNFRFEDPDQEFLKQYPRTVRESLRTNESKRKRRRERQKEQRKEEEQQQRGVKVEEVDIPFRYRTVLPNSFGLSTEEIMNTDDRRLNAWAPIKKLNQYQSEEEEHKQLMFFQRKSQHIEKKRKLLEEIDFALPKKAQKSKAKTEEQKEDNAKREEATESKDEEEKASKRKIKQKKTKVEKKTKKRGRVEEDGTVDIAELGMDRLRAYGVSTKKLKRAHFSKKKAAAAERNQGEKQQKKSERTYQNGTD

SEQ ID NO: 120317 - protein, 137 aa, Heterodera glycines
MPFGCIRNVKLEQPIFGANYLAGELVAQPDGNWEGEVNWKLTFNRGGCIEFGQALLKTSEMAESVFMYEQPPPYAGIGPIRGQNPVPYPSNTPMYPPQQQVQSEWQWHRQFCSLPGCSIAVVQPGNRIATETKGRVK

SEQ ID NO: 120318 - protein, 145 aa, Heterodera glycines
MGQVLEVTKDKAVVQPINPWSRIYPEEMIQTGISAIDVMNSIARGQKIPIFSAAGLPHNEVTKWCRPVQFFPHCQIAAQIVRQGGLVKQPNRKKENEVEGDDDFAIVFAAMGVNMETARFFKQDFEENGSMENVCLFLNLANDPT

SEQ ID NO: 120319 - protein, 221 aa, Heterodera glycines
MLKFNRLAALSTDLDQITSALKDSHLIDVSDDNVKIRRNPEEPLPENTLEYWQEIKRRTVYLKGFPQESTLDEIAKFVGKFGEVKNILMRKTRGSKETPKVFKGSVFATFVDQEQAKKLASVKDLKFKDEYAMVNKMQEDYWAEKNNERRQQRELKKQMRKETIDKQNQSHFVKGLVLKLSGLPMQSGETKKEVSVHKLKEFFEPYGQPAYAVIEGSEVTD

SEQ ID NO: 120320 - protein, 252 aa, Heterodera glycines
MEDSLLDAETFLYKCSHHNVAADSIEFHGVKTTRTDALKKEVAELFRANNLHQLIQNSGKAAIHMMTAAPLPGGLFCGASFRLGVVHPVANRGIHLLDRLYLGGPFDVRGYELNSIGATKESGALGGSTLLSTAVHLYAPLIPKDMIAPLDIDLPELQGDPADITKAKCAKAVDATGGTLKVIVEDTALCFNALDGLPGPYLATTTSQLILCALWPIQREKTSPSIFLLGQQMDKLLSREGRASSDGTHASK

SEQ ID NO: 120321 - protein, 113 aa, Heterodera glycines
MPPKFDPTEIKIVYLRCVGGEIGATSALAYLRCVGGEIGATSALAPKVGPLGLSPKKIGEDIAKATQDWKGLSPKKIGEDIAKATQDWKGLKVTCKLTIQSKTMPIQFLSYRR

SEQ ID NO: 120322 - protein, 122 aa, Heterodera glycines
HAIANPSLYVLKPQNEGGGHNYFDDELKQKLLQFTREERAAHTLMQRIWPVTAKNFMVRPMEEAVLDDTIVELGMFGYLLGDKRDRSIVRNKQRGYLVRTKPASSAEGGISAGGVYDSLNLF

SEQ ID NO: 120323 - protein, 436 aa, Heterodera glycines
FKRWCPSITTCCIGDQEARTKIIQEQILHKFEALVTSYEALVTSYEMVLKTTSVLKKFMWRYLVIDEAHRIKNEKSKLSEMVRLLKSKNRLLITGTPLQNNLHELWALLNFLLPEKFSDAEHFDSMFTEDHVLGQQNLDLVARLHQILKPFLLRRLKSDVEKSILKPFLLRRLKSDVEKSLLPKKELKVYVGMSKMQREWYTKILMKDLEILNASGKLEKARLMNILMHLRKCSNHPYLFDGASNHPYLFDGAEPGPPYTTDKHLVENCGKMILLDKLLSRLKEQGSRVLIFSSMARMLDVLEDYCWWRSFHYCRLDGNTPHERSFHYCRLDGNTPHEERQKSIDEFNAPNSEKFVFMLTTRAGGLGINLATADVVIIYDSAGGLGINLATADVVIIYDSDWNPQVDLQAMDRAHRIGQTKQVRIFRFITEKAKCT

SEQ ID NO: 120324 - protein, 127 aa, Heterodera glycines
MTRFALLLACALDKLGHRTLKKGQALSASAAATAATAAATTAPTATTTAAATTAGASATDTKRDASASTSTTATASATTASSTASAAAATSSTASAPATASSTATSPAATSARTSSASTSSTTGSCA

SEQ ID NO: 120325 - protein, 314 aa, Heterodera glycines
MFDRANAFVIYHTVSTALEREVEKKRRNEALSEACKDEEIVLLEGSTSKEEKAEASKSPNNTELRSNFKALVHNFEPFIAFAHFDINICGYIIDKDLEDIIFSIGLDVSRWDVQRLVKKLLSKERINYRDLTDKWVDKEGKVRYVPLPSYENIFQSFSEHAKGSLINIKQSIERQYALEKERQETVDQNEKLTLQLNNINEQREHLEKKKRRLEDDVDRYKKKLYDSEKLLKKEQEDNSSMKTSLLDCKRYGERMVAVVEKVLPPPSKKEEKEKSSGSDKNGTSGKEKDNEVANLNTEDGVEKGDEQQQKVALA

SEQ ID NO: 120326 - protein, 483 aa, Heterodera glycines
AAACGTEHVLLLTDDGRLFSWGINRFGQCGNGTETEFENCQEIIGKWGRIVSICAGGNGTETEFENCQEIIGKWGRIVSICAGHYHSGFISEKDEIYLWGWGLYGQLGNGRTANLKRPAKSRPFSALNCVKKLCLGYSHSLALLLGYSHSLALLADGRVFGCGAFSHGQLGIDPQIWKGAQRRPWPPSNCHFRGLVGLVLEYFHGIALGVDHLRRKVLFEWGDSPQSLKMNAFLQKRLKLKQKMKMDGQENPPTAERKKMDGQENPPTAERKGEAKVATIAIDELERVHFNIRTVCEWNGAAVKALSAGFNHSALLTFNHSALLTSDGQLFTWGKSLEMQLGHQNRKEKGTPTKVDVPETVRWSEVVCARNFTTAISVEGKVFVWGRNDRNFTTAISVEGKVFVWGRNDKFQLGLGKTTKKGTACQIRTIALKSDKGNAQRSVELPVDNCVESPTIYTDCGHLWKAKRNVKGSADEGLKTLMV

SEQ ID NO: 120327 - protein, 125 aa, Heterodera glycines
MGQHPEDIATIPARELHLNAPFNIRTIYNFRLINTGSKRIGFAFKTTKPKRIFLNPPCGTVGVGDTVNVIITVATFDPNNEDIKNDRVIVEWCNTPGPSDTVFKLEWFGEDGMVRRKNLPVIYNL

SEQ ID NO: 120328 - protein, 246 aa, Heterodera glycines
MISNVEIDIELALQSDDFMIHQEAANRDKYTLEVVDCRLIVKTVDLMDGLSLDIAKKLDLEPARYGIRNTLMKSLFITGGRYDFSANLFTEEVPRRVIIGLVPNQNYIGHNQKNPFYFNHHNVRDIELTASGRTYPQFPYNLDYKNNRYARAYHDTQEHLGMACTTESNGISYSMFKTAYCLYVFQMTNAQEDSPGFELIKEGCTAVNIRFSEAVPNEGVTLIAYAEADGLILIDRNRSITSDLTV

SEQ ID NO: 120329 - protein, 104 aa, Heterodera glycines
NEMPLAEDLLYPDPQKERQKHKLKRLVQHPNSFFMDVKCPGCYKITTVFSHFMDVKCPGCYKITTVFSHAQTVVVCVGCSTVLCQPTGGKARLVEGCSFRTEGH

SEQ ID NO: 120330 - protein, 243 aa, Heterodera glycines
KYYPPDFDPAKIPKAKQPRNRQFIQRVMTPFNMRCNTCNEYIYKGKKFNMRRETAEGENYLGLKIFRFYFRCPNCLAEITFKTDIENVDYQAEHGATRLFDAFKFYQEQERREEVKEEEEKADAMKMLEKRTKMSKIEMEALGHIEELQESNRRYEKIDAIAYINETEQQRAMSFADQIRVQEEEDEREVERLVGRANGGKIERRLNDDEAVEQEKAENCPTTSSRKNRQAAILSGIILKKKK

SEQ ID NO: 120331 - protein, 736 aa, Heterodera glycines
MPPISSNSFYVVVPSNTNVDGNRTNSFRVRLPRKLQFNAEWDVGLATIIYPHSWPSLGTTEEQFIELEWQTENIVRIPVPSSNIIRPYELSKSLYSLLDISSEHLSNQVHDAQQSYKEAMNAARKLAQKEYVKMKSDDKKRRPKRKIIDQNEALPLLSALLIAIDTIDDALISNEDGTINPEMVAGALLDREKRAATSNVPLREESDSEEEYQRKLDNFFLKMRDSDDLLLFQNLIAKHLEVELNKLSKDEQSLNKSIKDLGMEAWIQAYKKVSSVVQFIFDVRHNRFTLAINTKFIKRVKLSEQLAYILGFAPQTQFKKDKNPAKFMPDMSGGVSTLHVYIPDLIEPMMIGNVIAPILRITIIRGNPDEVEWSSFPLNNSASSLELSSALNQWGGGVGSYNIFRGQPYQRGNGIGAVFRSLMRYLVPIGREIGSTIGRQGLESGNRVLSNVLEGKDLKESLISEGKGGKKAQFLSRLDFDLGNQELYLLNNLDLLFSIYKAKDNFLIQTLKANDTQEYRLRVHDVKIYAKMVEVQPSLNLNIYKMLEKQPATYAVRKTEVKSTFISAGRYEVEYNAFSATIPRRLTIGMVENGAFNGNSKLDPFNFKHFDIRDIAVHAGGFIYPMVPYKLAFKKDAFVRAYVDFYEALGMANSDRSCDITRQQFKNGWTLFVIPLTSTLDDSVGYELLRSGTTTIRATFNSAIPAGGVEMIVLGEFDQMIMIDYNRHIVSDSKLG

SEQ ID NO: 120332 - protein, 283 aa, Heterodera glycines
MAAQNDHSNAIFGNASFSFPSPVHLAECAHLTELTNGTKLGDPKIFEGGDLIISKKMQSLIFTSFYLGAIAISTTGNQISVVLAMFVTAELCVVRWIGGWTASFYIYGLIGVAFCAVWMLLVRDYPSQSKYIRSDELRLIELNGGHANVSQKISPNEVPWRRILCSMVVWSTGFSSFSQNFMNVGIVVYLPTYYHNVLGMDLTSDRRLMSSTSVTKLFNLIASFGSGLCFVLLSLCDCRTPYLAISLAVCAIGISSGFIPGYNTSVVRKTRWRWHNHELPAQD

SEQ ID NO: 120333 - protein, 372 aa, Heterodera glycines
TILPAASNDIYYRDEIGNISTSNVYPRADRVEVELRPRFPLYGGWRTNYILGYNVPSTSFLRHSGSNFAIKMKLMDRLYDNAVVEKLNIKLVTPYSVKRLPDEVHKTYLDTFGRPVIVLEKENLINNHIQPFTLYYEFDRFSMLYEPLLIVVAFGALFLAAVILFRLDFSIAGKTKTSLLVGPAVRLLLGHYDIKTSVLRASGPKKNILKSDVLSHINDKKLSPIKAFSAKPPSKMSLENEVISASSHPIIPLKSSGRSEPTHRHVHVDIQFLTIGALRRHFEPDETTKKPKLVTKFGATLCYDARTIEGQTARRFLDSFKTALISPESLFAELDYLIEDEVDISEMDDGSAIEEKIDIGKEDEELAKLLLR

SEQ ID NO: 120334 - protein, 109 aa, Heterodera glycines
MNMNQLLVGRSLFPKIIRPFSHTKPLAKSEADPDDYGYFPDPIEHSWGLERKMLIARLKGDDRYEPKVYFRAEHTTRDYPNLVPVHLQDKVVGCLCKTDLRRNFFITHY

SEQ ID NO: 120335 - protein, 432 aa, Heterodera glycines
MLYKKVDVSSAEVANAGLDFFTIPPTSCAVSNSSYREYLTLNPISSRPFHFKIHPITSYVDLSKVFVCTEFKLKKVADDGVVVDVPANAAVGLIQMPGATFIRNLKVHINQREVYDSNQLYSYKVFLDTELSYPVTAKDSYFGVAGYFRDSDPTKVNDRRKKAVEESKGFQAISKLSADIFNQDLYMISNVEIDIELALQSDDFMIHQEAANRDKYTLEIIDCRLIVKTVDLMDGLSLDIAKKLDLEPARYGIRKTLMKSLFITGGRYDFSANLFTEEVPRRVIIGLVPNQNYIGHNQKNPFYFNHHNVRDIELTASGRTYPQFPYNLDYKNNRYARAYHDTQEHLGMACTTESNGISYSMFKTAYCLYVFQMTNAQEDSPGFELIKEGCTAVNIRFAEAVPNEGVTLIAYAEADGLILIDRNRSITSDLTV

SEQ ID NO: 120336 - protein, 194 aa, Heterodera glycines
MTKQSNQTINHLANQLINHNNQSIGRSNPHKSADQSKLFNSIKANCVVARGNRQKSKKGSQTMMKKRERKEKEEVVFSQPVVWVKQKKRNFLCKIMGLPGRRRSRSRDLPSSRGGGGGGGYYGSRRFHDGRDNPNPNPCLGVFGMSLHTTERDLKHLFGRYGEVDSVQIVYDRLSGRSRGFGFVYFTHTKDAAR

SEQ ID NO: 120337 - protein, 309 aa, Heterodera glycines
MSSSLDVFKLTDDDAMKFLVCESHIGTKKMDFQMEHYLWKRRSDGIHIINIRKTWEKLLFAARAIAAIENPSDVVVVSAQPYAQRAVLKFAAHIGATPIVGRFTPGSLTNQIQKNFKEPRLLVVSDPLDHQAVREASYVNTPVIAVANTDSPLKFVDIAIPANNKQKHSVGLIWWLLAREVLLLRGKISRQTGFVVDDKLIMPDLYFFRDPQEQEKEGTEGEAEADITVKEGGWGATGGMETIGGDFPSCSDFMPRSSVALTTVSDEQRRLQANPNTAQNTAAEPDGPTMSSLGGSIRSVTRLFTKNWS

SEQ ID NO: 120338 - protein, 254 aa, Heterodera glycines
NNNCLSLCSRIRVPTRDSKYTLDHQAFISSVLGLRFFTIIKPFLLGPNFVRLLIFLILPIVRLLLPLQLQVTVDAMERLLKSCHGSPSLNQFIEGYLLMVQRLLETNNAHMEKLATDLFERFSTIEEDSPSYHRQYDFFISKFSAMCHAQNDVYVSSQRYNGLRGLRGVIWKSASDDLQANIWEKQHMNKIVPSILFNFQHDDESGGMSMLHIPSFASSFSLPMSMLHIPSFASSFSLPIKKNQAVSSKKIENF

SEQ ID NO: 120339 - protein, 238 aa, Heterodera glycines
MPELVRKTVIFCSVVFTLIGMGLSIAAILTPSWQVVNLQEYNSVHEHGLWLDCIRHIRDGGGVLLRRYSGTFDVEDDNSPVGEVNRHRFYGWHSATLIMLALALITSFCSICLGACGCCYASMSLVFTATALLTSDLSFLLLPKACSSSSPIVPTIVSSRALLALMSFAFTRKGVALDRERYSLQTSSKTNMTNVGRPMDRMPLLDQLQPPPSFHSSSQSADRIDRGFLRTDLPFLNF

SEQ ID NO: 120340 - protein, 93 aa, Heterodera glycines
MADEIFAALHANGKNYLILLNSVHPQKCISPSPLRSSEANHVPLNSEFYLDCLAVSDGENLVIGTIDDIRKLHFRTVPLGESASISAGIESDC

SEQ ID NO: 120341 - protein, 104 aa, Heterodera glycines
MADESGTNAGGTGAAGGAQPAEYIKLKVVGQDSNEVHFRVKYGTSMGKLKKAYAERTGVQVTSLRFLFDGRRVNDDDTPKSLEMEEDDVIEVYQEQLGGYIVEE

SEQ ID NO: 120342 - protein, 453 aa, Heterodera glycines
HKGRTRDRRGSQARKPNAPMCLIEPTKELAQQTYDQIERFRKYLDKPKIRSVLAVSGIPMGQQVAAINAGIRSVLAVSGIPMGQQVAAINAGVDILTCTPGRIRGLVQEGQVELDQIRFFVLDEADSLLGGQSDSAQIELDQIRFFVLDEADSLLGGQSDSAQIVHELHSRIPKYSEFGERFQMIVCSATLHNMAVQRLATQYMYTQYMYFPQWIDLKGQDSIPETVHQVVCMVVVCMVDPCEDKSWIRLRSKPETDSVHARDQLRPGSDNPETLSEAVKVLKGEYLVKAIEEHKMDQAIIFCRTKLDCDNMEKFLAPTKLDCDNMEKFLAPRGYKCVCLHGDRSADERTRNLLSFKEKIVRFLICTDVAARGLEKIVRFLICTDVAARGLDIKGVPYVVNVTLPPAEEKANYVHRIVNVTLPPAEEKANYVHRIGRVGQAERSFEAFQCFFD

SEQ ID NO: 120343 - protein, 863 aa, Heterodera glycines
MSVVVEDGKPEPKIDWFKDGHPLHIDGQHIMRRDEPDGRHSLTINNARAEDAGTYTCKAFNKAGQSVSEANFGVQQRVEEPAQQQAEPMFLVPLEPQTVREGETAEMCCKVNAEESKPDIRWYHDEKLVVPGQQPNVVIEHLADGTLNLRVQSATKSDIGMYRCEAVNAAGRAQTSAPLKYAEEMEVDHKFELAEPMFVRPLEPRTVREGEPAEMSCKVNVAESQPDIRWYRDDKPILPGQEPNVVIEQLADGTQKLRVLHASASDLGVYRCEAINPTGRAQTQAPLRYAEERLIEQPEEEHAPLLSWRRTLRDQQMSKGTRGVVFECQLEPSSLSAVKRVDWLKDGSILANKMELYSLRVEQLQDGTQRLLFDREAHFDHIGVYRCVATDASGNQIWTEARLGVIAPRDAEEMAPGPPEFVELLKSCTTTIGGTAVLRCKVKGNPRPTIAWSRQGYGPLSESDRISTEYHEDGTIILTLTNADMDDTGEYRWGTGQQQQAVAGTHGDEQCGHLSLHRCDAENDYGTAWTEGPIIVAAEGSLPTEGEAPDFIEPVRPITVKVGDTGILEGRITGLPFPEVKWYKGEQLITPGLNPRYRLENLPDGTQRLIITNAQMGDMDDYRCEATNKYGDVWSDVTLTVQGGQWGRGYEPEPEEEPSSPYFVRGLQEVRVTEGEQADLECVVKGWPTPEVKWYKDDDEIRPEDVNFRATQSPDGTCHLTLPAARITDAGVFRCSATNPSGTAHTEAPLRVLLEEEAPMPAEVAPEFVQGLKPVQATEGDEAMFECQVSGVPQPQVKWYKDDVPLAIEAKPAVVEERPKEEEAKPMEDEKPLEEETKMEWEEAKPKEEEAVKPFEEAKPMGL

SEQ ID NO: 120344 - protein, 243 aa, Heterodera glycines
MERLFNTPISSLSTNTSNCTRNTICLGFLDGSIQCFSFDTQRGITPSMESSVKLGGMWRKRMKRSVRAMQISEDGTSLYATSSNRAVCLYDVETGKRVRCIREGHKSRPSAMALLPGERRHFATGAENGEIKAWDFGQPKPNVHTFGEQADIINALHIWRNNLLAASGDGTLAVYDTHKGKVRIQSETMHSELLSLAVTERFTYVGAADGHIEVFSNGQFGNIRERMETPFLMGVEQMVVLRN

SEQ ID NO: 120345 - protein, 159 aa, Heterodera glycines
FVPEKRVDEAGHILNDPSKSLADRFRALFLLRSVKKSLADRFRALFLLRSVKSDRAVHWICKCFSDPSALLKHELAYCLGQMQNPAAIQKLIFVLQDTEQEPMVRHEAAEALGAIGDPSISKLFEQYSGDAVREVAETCLLALRRTQWVQQHGGKGAAE

SEQ ID NO: 120346 - protein, 165 aa, Heterodera glycines
VTTAKKTDAANEDGSPDEKYLIATSEQPITAFHRTFLSIYSAPLNFAICKVGSHGRDTRGIFRVHQFEKMEQFVICSPFDNESWKHMDEMIDNAEEFCKVLGLPYRIVAIVSAELNNAAAKKLDLEAWFPGSGAFRELVSCSNCTDYQSRRLRIRYGQTKKMDGK

SEQ ID NO: 120347 - protein, 190 aa, Heterodera glycines
MGFATPMSAEDKVTIVQCHNNYRSQLALGKVANKTGQTMPTAANMAKMVWDDGLGKSAQDWASKCQIQHSGTDFGENLYFSSWRDFPNKEVLEKSCNAWWSELAEFGINKDMWLDDDNLSKVGHWTQMAWFNSVQIGCAVANCDGDWQTYVVCHYNPGGNYVWMSTYKSGPICSECEAPRKCNNSSGLCE

SEQ ID NO: 120348 - protein, 366 aa, Heterodera glycines
MQNQQNMDNSARSIFVGNISYDVSEDELRKLLSACGQIVSCGQIVSFRLVHDRETGRPKGFGFCEFADVPQAEAAIRNFNGFEFRGRPLRVDSATGNMQHFQMTLTRPQNPTDELSPYGPELEPGKAPEVIARTVASMPPEKMFELMRSMKETVNNNPQMARQLLMENPQLSYALLQAQVVMRVVDPKIAYQMLHREHAQPLNPLNCLPNSTSPPSVPSHNPLNCLPNSTSPPSVPSHQFQMQPPPLVPGQFHHGFPSMGMAPPSLLQQQQQQTPFTQQKPTPIAPLAVPPAATAPQQQQVVDSQQAQQSNSQQAQQSNSDNLDEEQQAQMLIRVLQLTDEQIRMLPPTERAQVIELRNQLRSADA

SEQ ID NO: 120349 - protein, 191 aa, Heterodera glycines
KNWYKGAKFLWGIKGFLSNRTFRVKIGDSLSSSKVTSGVPQGSVGPLLFLIYINDLPDALPSGVKIKLYADDVKIYICYKARSDTEIMHKALHNLFEWANKWQIKVSIQKTFVLYLGSKNPKETYKFDGNTINAVDTIRDLGINIDNKFQFSGHVNQITRNAYLRMRSLFRIIKSKSSKIWITLYKTYIRP

SEQ ID NO: 120350 - protein, 337 aa, Heterodera glycines
MSINGREVFNSNSLMAYKTYFSHELSYSNTAKDSHLNAAGYYRDIGGSLETGDGCIARRNLFARSRTAQFIAKIDADLFNQPLYLINFCELDIEILPNDNEFVLITTPIVAQGAAAAPRYRFEVVGLKMYVKKVSLMDGLALDIARKLEVKPARYAVRKTLMKSMFISHGRFEFTANLFMDQIPRRITMGLVANSDYIGTISRSPFNFQPFNVREISIIANGRSFPQAPYDLDYPNWKYVRPFNDMNEAVGFANSLESNGISYEQFGKTHCIYVFNLTNSGDDQAALFDLIKNGTTAVSIKFNQAVPAGGIMLVVMGECDSLVMLDKNRSISTDITI

SEQ ID NO: 120351 - protein, 114 aa, Heterodera glycines
RDAKLQEMGKVLDEGFARYADDEAMNARLKEQLHEEDPMAEYFRVKSHKVQMRTGVAVYPSYKGQFPPNRFSIAPGYRWDGVNRSNGFESKLQLEKNKRKARETDTYRSIAECE

SEQ ID NO: 120352 - protein, 242 aa, Heterodera glycines
STTSQLNSCRSFYEAIINGKSVDCIYIDFQKAFDSVPHNLLLYKLEKIGIKGKLLLWIKDFLSNRTFRVKIGDSLSSSKVGSGVPQGSVLGPLLFLIYINDLPDALPSGVRIKLYADDVKLYMLSKSRTETMHKALHNLFEWANKSFNSKNFYIIHIGSKNPKETYKFDGNTINAVDTIRDLGVNIDNKLQFSVHVNQITRNAYLRMRSLFRIIKSKSSKIWITLYKTYIRPLLEYAPEVWI

SEQ ID NO: 120353 - protein, 187 aa, Heterodera glycines
MDTIFLVSSSELNNGVINCSFILLFRDLIRLFACYNDGMINLLEKFFDMNKKQCREALDQYKAFLMVSQQINSARQEQLFQSNSSVDEMAKQRYLEEEKERLRQFEEQRRRQIQQQPGGGVPTSSVPSPSSIPPPSTNPFALASDLICFDTPPKDGNSVAVGQIEPTNPFAIVAELNNRPSQQGNFS

SEQ ID NO: 120354 - protein, 229 aa, Heterodera glycines
MESGGGSSTDAENSRRENDETADDGRAESVGFAGLPAGAERLDAAELSRLRQHELFLSRIVETLPATQIRGKCSVVILNEDSFFYSLVYDPTNQTLLADKGRIEIGERYQAQIPELTVSQEEVNKVKREGEEETTGRTEVRCTDKEFVVYHPHHRLSDRDIDQFLIIARAVGIFSRALDGSSSTKLTTLHQTASAASRDITLLHAMALLHQADYSLGQVFCRVQLLFCK

SEQ ID NO: 120355 - protein, 183 aa, Heterodera glycines
MWLQAFIAYWGYTADYDGNPSIVAILERSFPLVYEYGEDIRKYGEKDRVLVIVNHQSTADVPTLFTVLQTKGVATRKVIGSAESSNGAQYSDDLVDGCDVSLDTFWDYRTNAWRLFHSAGQSDARQRTDQTEGTPPKGVLGQRPTLGHSFPGGRLLLQKKRNQPKICQGEQLSPLGALHFAAN

SEQ ID NO: 120356 - protein, 164 aa, Heterodera glycines
  unsure (1)..(164): unsure at all Xaa locations
PRFYWFYEGKLYMWLQAFIAYWGYTADYDVYEYGEDIRKYGEKDRVLVIVNHQSTADVPTLFTVLQTKGVATRKVIGSAFGIIGRMHGDYFIQQGKATRDKELIRLKGHLQKVFWDRDRRWVILFPEGGFYFCFQXYAKENNFPHLEHCTLPRMGEQQINYKII

SEQ ID NO: 120357 - protein, 115 aa, Heterodera glycines
MRGGGITQQQQAIGNHPQQMLCAGSGGGQPQESVKRKLIQQQLVLLLHAHKCQQIERSELRQNRAPCTLPYCSVMKAVLEHMVGCSAGRQCQYAHCASSREIIAHWKDCHKDDCP

SEQ ID NO: 120358 - protein, 69 aa, Heterodera glycines
  unsure (1)..(69): unsure at all Xaa locations
RDGIAPGLMDTPLLSSLPPXVKKFLSGTVPFPNRLGKPEEFAALVEHIIDNHYLNGEIIRLDGGIRMNA

SEQ ID NO: 120359 - protein, 150 aa, Heterodera glycines
AACESPKYSANGYSTQDGFFHYKTSYIVEFAIQCSNNYKDAPFYALVGEKTLQLAVSEETNKYQVSWQLEHADSGAQTFDIRVYDEDKFAEHKKADESGSSSVQPLFTVQHYHGGTSHKTWISSESVFLLLGVVALYFTMNLRQLLAKRD

SEQ ID NO: 120360 - protein, 476 aa, Heterodera glycines
MVHQIFDPNSVDFDDFMLVEQVGSGETYNYFRGIPPYQRGYGRQRGGGVGDILRLLWRTILPKLKSAGTVLGREALDTGTRVLDTIEKSEAPNKPSIIAEVKKGVDNILEKGGVGRQFGTGRRRKSIKRNAIIGKTVPKTVINKRKRSDGREIYDSNSLYAYKAYLDTELSYSKNVKESDMQASGYYVDSENQDGTDLSQPGFELRRKLFSQSQTAQFITKLDADVFNQDRYMVNGVEIDIQLTPNDNEFMIMAASNDKYRIEITACKLYVKNLEVVDGLALDIQKILENKEAKYAHRKTLIKSIFISENRTEYNGTLFTGQLPKRVILGMVENSAYVGNQKKSPFNFRPFDVRSVTLTANGKQWPAAPFELNFSKNLYTRAFHEMNEALGMASSTDSNGITLEKYRKGWTIFAFNMTNSMEENECIDLITEGTTTVSILFRSPVPAGGISLIAMSEMDSILILDKNRTVMTDTTV

SEQ ID NO: 120361 - protein, 85 aa, Heterodera glycines
PGPKGSPGAPGQPGNPGSQGQPGQPGGQGPPGPQGAPGQPGLPGNSGQPGQPGAPGQPGKDSGYCPCPPRSSVLAVKKKMAAAVV

SEQ ID NO: 120362 - protein, 186 aa, Heterodera glycines
TPMVTLESHREPVVGCAWHPSNLSQAITASWDHQLMLWDLQLAGPISTLTSNKAFSALSVCPANGLVLTSSVDSLVRLWDFRSRDGSMVKASFHGHGSMVKASFHGHVGVVSDVCWHSTDQHLFVSASFDNTVKMWDVRSPRAALYDLMGHSDRVLCVDWTVPSRICSGSVDSTVKVFSHGTKENI

SEQ ID NO: 120363 - protein, 276 aa, Heterodera glycines
ILLPNSCLDNLMRRNIQYPMLFKLTNVGPALQRGTHAGVLEFLAEEGRCYLPSWMMAQLALREGDLITVEYKALPNATYAKFKPMSTDFYNISNPRAMLEYNEQVYEFQVKALKPENAVTIVECDINIEFDAAEGYVEPNRTHQQRNEMVAAEEEQQSHPPNVFKPFSGSGFRVDGKKPRSVSTSSQQEATSSSSSSASSGRQPSSGIASTASTARDALEAIAVDENYIPGELRFVRRPYKSKAQRDKEAREKDNGGTMKPFGGEGNTIRPTRGGQ

SEQ ID NO: 120364 - protein, 142 aa, Heterodera glycines
NSAPGHLLQHSPSISSPDESKASTSAVETRRSKPTRKNGGEQFMGNKNLNFAISSCMLRKHKNNRKPRTPFSTQQLMALERKFVDKKYLSIADRAEFSSKLKLTEQQVKIWFQVGLANGKKYNNNKFISHHHHQAVAAAAAA

SEQ ID NO: 120365 - protein, 170 aa, Heterodera glycines
HTTFPPKPSFSTPPESPQNECTGLQTNSCDFLRKLLKHNKIIPLIKLKINTAGETLSDYDENIINRGTIGRPKPLLKFHSVCGTNIQLLREGRVARRKESFCKGLAFSNRPISINEIVCIRLSEIGTNWSGVMRFGVTNVDPASFGVTNVDPASFRDIELPVLGFFKTKT

SEQ ID NO: 120366 - protein, 276 aa, Heterodera glycines
MLPTALLLCASIVFMTNPSVDAEISIKIERHFPCSAASGPKKENLIIKFPPKKENLIIKFPSYKSTGVAFKEEKDDAGHKCFQMGGGKVEVYAPGLDGNKKYYVYAPGLDGNKKYYVHVETRIGIHGKPERCVNPDKEGCGGIGSCVHCDICQTIGGRQFIQIFKGDKPAECSAKGLPPGTYDNLSLKVCLPSKDELLPFLDQNSSRAEQLWDVFVNSSRAEQLWDVFVSSRARSGEIPLVIAARNVDRPINKLEIPLVIAARNVDRPINKLSIKN

SEQ ID NO: 120367 - protein, 475 aa, Heterodera glycines
MTHVFFDPESVDWSSFITPQHGRGQKQYFVGSKYQRGFGFLGNVARFLTPIARNIASSAGHEGLAAGQRVLSDIAQGRDLRDAVREHSRQGLTNLTDKLQQYNQFCDLNKTFLYLSTSIERKDKSNWIPITKDSEADQHVGVESYDSGIYYAFRAYMMNELGFSEDVKKGLCEASCYYVDDVDQDDYTNSGFKNRASRFADGAKCETMVKLNFDLARQPNLLLNNSDVIFSIHRNTDDFLIMAPPYVSGNAVIANPHTYRINIHDIRIYVKTVDITQSLNNVISNQLQTTPAKYPVRKIEIRSLFIPRGTSDLSHNVFTSIVPRRLIVGFVSTGAYTGNPKESPFVFEHAKIRSISVEANGNIFPGSPYSLNFDRNKYIRAFVDMYTGLGMDDGERTMSINIQKFVNGWCFFVIPMTSTLEDTPGFELIRNGTTSIKVQFNEPIKDGGYEMIVLGEFDSILSINANRVLSSDGSI

SEQ ID NO: 120368 - protein, 515 aa, Heterodera glycines
DQENGNPILPTIFGPIGSDVGMKSLFGFDSYSDVLADVVCDPNLPLVLADVVCDPNLPLPLTIGLYAKWGSGKSLLLPRIRDSMSAFSRTWLDGVELYWSWSLVLSVLLSSVSLSLFISALSALILQNSHFLISLGVGVGIFLLFLLLYGFIYYGSEKKFWNGSIATARLIGRSIARFKLMLNVLFLNAPVRREKSRNSPSPVSFLFADDHRLSFIGGEHSLANIIQSFFTAAEEHFGTLAVHLFTHFGTLAVHLFTTLRSSSPSLLADRSSKLKSYCGVPVLVLTLAFPCSLVSASLLFIQTRHWLASVFLALALVSGAFILYIFSARIFQFGWGSGPKRRITRISDRLHLMPFERMPKRRITRISDRLHLMPFERMIQKLQKEVDLLVSLVFALDEFVFALDEFTSSQTRLVIMVDGLDSCESNKMVQMLDALSLFFCSRQNAPALSLFFCSRQNAPFIVLLAIDPNIVVSTIQQNLHAGPEGGGITGRDYLKNIVTMYVSALSQFFELLGQK

SEQ ID NO: 120369 - protein, 183 aa, Heterodera glycines
MSYYKTNRMRLLDENIGDIKMQIVDAETNIVLNLQKRILDSKEAVLSAVELAATLDCLISLSVVARKYNWTRPKFVEESIVAIEQARHPIAEHICKDGKYVPNPVHSSTEVGKVKVLSGPNASGKSIYLKMVGSIVYLACCGSFVPAQRATIGPISRILSRLYTIDSVLDGMSSFANDLKQVL

SEQ ID NO: 120370 - protein, 237 aa, Heterodera glycines
MNFNPMEKIGIRGKLLIGIKGFLSNRPFRVKIGDDLSSSKKVGSGVPQGSVLGPLLFLIYINDLPDALPSGVRIKLYADDVKLYICYKARTETEIMHKALHNLSEWANKWQIRISIKNTFVLHLGNKNPKEIYKIGGNIINVVDTIRDLGINIDNKLQFSNHVTQIIKNAYYERSLFRIIKSKSSRIWIILYKTYVRPLLEYAPEVWNLSIQKNIKKIEKCQKYFTKKIYLIANKIT

SEQ ID NO: 120371 - protein, 156 aa, Heterodera glycines
MFSIVGKKVFNTTSCNFLSKAFYAHMSKDEIMWHWPAQKFDQHFIDYLNKPDIDGWEIRKALTELGNFDVVPDPKVVEAALRAIRRVNDFALAIRFLEQIKYKCGGPKSRSIVYPYIIQEVKPVMDELGIPTLEELGYDEPEFFTPDPEWYWEKSW

SEQ ID NO: 120372 - protein, 169 aa, Heterodera glycines
MGGPVGLLLNAQPMAEILCVWIWGFGVSVRSDRDKHKQITFYCLCYSMAARKTVARRARPQRATSNVFAMFDQPQIQVEFKEAFNMIDQNHDGFIDEHDLKDMFASLGKEVSEKFIENMVNDASGSINFTMFLTLFGEKLTGTDPEEVIKNAFQCFDEDNSGTIAEGWT

SEQ ID NO: 120373 - protein, 228 aa, Heterodera glycines
DCVASSILFNITNYFIAISSGGEIQHTSQLVEQIASLHLNDEFSDFVLVVDDQRFPVHRVVLAARSSYFKAMLYGGMRESSESEVILHDTAMLYGGMRESSESEVILHDTPVQAFQALLKYIYTGKLQLKSALLKYIYTGKLQLKSFELSFVLDMLALVHKYGFSELEAAIPEYLKTILKVRNVCSIFTVATILKVRNVCSIFTVAHLYSIEGLSAACLDFIDNYASD

SEQ ID NO: 120374 - protein, 359 aa, Heterodera glycines
IDDRLPCSMEGELLYMHSQELNENEFWSALLEKAYAKLYGSYEALKGGTTSEALEDMTGGLTEFFDLQQPSENLMQMMARGFEMGSLFGCSIEADPQVWEARLPNGLVKGHAYSGHAYSITGMRIVPTPRGEVPLLRIRNPWGNDQEWNGPWSDNSSEWRQLSNELKTDMGLTFAHDGEFWMSFSDFLSNFEKMEICNLGPEFWMSFSDFLSNFEKMEICNLGPEVMEEIYEMTGVKATPHNAWATVAHDGSWRAGRTAGGCRNNLRTFALNPQFRMKLTDSDPNDDDKLCLRTFALNPQFRMKLTDSDPNDDDKLCTVIIAVMQKYRRELKNTGVENLAIGFAVYEATLSRGGGGGET

SEQ ID NO: 120375 - protein, 331 aa, Heterodera glycines
MTNERDFSHDDHINNAIGTNGDSKDAAKRKDICRDFLNNICSRGNRCKFYHPEDSVEKNQNSADEPYQFCIDFQNQGCYRENCRYVHAFREDVDRYKRSGDVTLGLARALAALLKGDTINGIPLCKEFQNGHCARGPQCRYWHINRDEERRKRFGGGRNCGGSPSSLAFGAYPAVPPAGAQLSRRRGDEFVSEDFAPPSKRSFAHNQPFATIPGQMAPTSAPTAPSHPSPQLVIELERRNAELTVNLNPKNCLISLFIGSTEVESLKRELNREKERYDDLMSLFRAAQGQPTVQPKHFFTKRASTTTSAAVSAAVERNVNIATAKLDKIRL

SEQ ID NO: 120376 - protein, 95 aa, Heterodera glycines
KEYELTARIFGHWHFGFGIQEHIDLGIKYDPSIGIYGMDFYVVLGRAGLRVAKRRRIQGRIGASHRVQKEEAYDGVILPPKPKESRKGGHRGRKR

SEQ ID NO: 120377 - protein, 307 aa, Heterodera glycines
CVCAFSVCTLQTLFKGVIWLLPHLFLDYTQFQGVAHSEKTNHQAVLNRLARNCCEALACLAGFRPDTPDNDGVQKSLRAMLTPFICRQLRAMLTPFICRQMQLCRNDFVLKLLNANTEDPYLIWDNSTRAELLDFVDKQRNSHENVSEMFGAEFKLSIYATELVVGEIFVSEMFGAEFKLSIYATELVVGEIFVRIYNAQPEFRLLEPKRTCMDFLDYLEPKRTCMDFLDYLSKHEADLIDLTTEFVVEEEHPAVDGRFANVNASNPEITTHSSTFGTVNPNGAFRGVAFSPGIGFRMVLEALRIVL

SEQ ID NO: 120378 - protein, 47 aa, Heterodera glycines
LLSTNEDGFISLMDLETCDTKDDLRLPEGEIGDQIKQAYEKDDNGIL

SEQ ID NO: 120379 - protein, 100 aa, Heterodera glycines
YYRGAVGALLVYDIAKHLTYENVERWLKELRDHSDQNIVIMLVGNKSDLRHLRAVPTSAARPNGADQQPEQHHAVLHHGQQGEEGVLFLHLIVCDDGRMV

SEQ ID NO: 120380 - protein, 151 aa, Heterodera glycines
MEIGKGRAEPTEDILVDSAKRSRWDCESILSMHSTLYNHPTEIREPMKGIGRRRGRTTKEKGMANLEEMEVDGDQRDGPPAPSVRTRTSMVSVIRPKGETTEERRIRKIAVKEERRERRKEKKANKQLFRVERLKLDEQQRTNQPKTRQIH

SEQ ID NO: 120381 - protein, 125 aa, Heterodera glycines
MATLLQDNEYAHFALIGSGVQRKVDRLTLGVQTVSKFLHFAPSNGCEVEVMVHEQGKVWTKAKGMAKIVGTLGESLEKGTVLICGDTHSDLPMVEFGKSKNSTMMTVLLKAKKMAEVDSELGGKN

SEQ ID NO: 120382 - protein, 246 aa, Heterodera glycines
MADDDKTLEQKEDETQNDLSDEKPQMNDDEKQQIAKSLAAKGKPKRKNVKNDVEPIQINSDMAAAEFAHTTTTENNYIDPPLDVSTIKKDPYSLLEKFIWSDIDLNADEQLDELYILLTENYVEDDANMFRFDYGKNFLKWYWHRSLNPKKLVESSFSHIGKNMTLPRMIKLYKLPENTESQLTLLNRDSAKSAFELLSGYLTKFDLVPIFTIEEFEHFFLPRDDVIYTYMIQVGKPTDKSRDGGQ

SEQ ID NO: 120383 - protein, 87 aa, Heterodera glycines
RSVIDADERERVVGAVARTFVEMLDLREIQNRPHPYASSLARFNPIRLMNGHLVCSLYLFTKVCYSVNIMLQFALLNAALTSKDHFL

SEQ ID NO: 120384 - protein, 369 aa, Heterodera glycines
MRKLTPPNGEWGHLDATDQVVPIQLIRHTFMRDLKIAINGREIFNSNSLMAYKTYLSHELSQSLEAKVSHLTAAGYDREDASNLQNANSEGFKSRRQRYLGGRTAQYIAKIDADLFNVPQYLINHCEIDITIQPHDDNFLLIDTLDPPGQPYSLELVGLKLYCKKVSLMDGLALELAKKLEMKPARYAVRKTMMKALFISPGRYEFNANLFMDQVPRRVTMGLVANSDYVGNIKRSPFNFQHFNVRELSVVANGRSYPQAPYDIDYENWKFVRPYNDTQEALGFANSTYGNGIDYFSFLHTHCIYVFNMTNSGDDHGGLFDLIKKGCTAVNIKFKKPVPDGGITLIVMGEADSIYFLDKNRTIATDTTI

SEQ ID NO: 120385 - protein, 181 aa, Heterodera glycines
MVDFDTSSLYSVKAILILDQDGKRIMAKYYDKQLFPLEKEQNVFEKNVFQKTHKANADIILLDGLVCLYRYNVDLFFYVVGSANENELILQSVLNCLYEAFSTILRKNVEKKALFEHIDTSFLIMDEICDDGIILETDPQAVVARCAVKADELAFGEQSISQVGMSLLGSAKDQLKWSLLK

SEQ ID NO: 120386 - protein, 118 aa, Heterodera glycines
MGKGFQNFMSKKDFHPSAWWNLKRKWEAEQKNDLEKRRQDELRVQYEKEQEILNNKALLGDEKARLGLSFMYDAPAGINKKKEEGPEPKFEWQRKYNAPREEWAKGNELIQDQPFGIQ

SEQ ID NO: 120387 - protein, 129 aa, Heterodera glycines
MSAPAAKLPRPPEHMLRYMAHIRAKSLVFCAMGVSGLIGLSFYFFYVEVRRKAYMEFGKNYNPYQRMREICEYPVKYMHSCPSELAKRLEEKGVLIGDRDYSIPLDDVVPESRKKEFMMANAFERFMNR

SEQ ID NO: 120388 - protein, 239 aa, Heterodera glycines
MAHLAGGGGQAGPPQIGPRPGTVHVPPAESGHCLLVPEGDAHLQHTARVISPNIYNAKLWEQSGHWHHYAENMFRFEIEKEQFGLKPMNCPGHCLMFDYKPHAYNELPIRYADFGVLHRNEMSGALSGLTRVRRFQQDDAHIFCRKDQILSEISGCLDFLNFVYVEVFGFSFRLHLSTRPEEGYLGDLATWEAAETQLKQALDNSGLKWELNPGDGAFYGPKSKGWNTFTYISSYTMNN

SEQ ID NO: 120389 - protein, 218 aa, Heterodera glycines
VTLIGASGGIGQPLGLLLKKNPSIAHLALYDLVGTPGVAADLSHINTQAKVTGHLGPDQLVAALEGADVVIIPAGVPRKPGMTRDDLFTTNAGIVRDMAEAAAKTCPKAFMGIITNPVNSTLPIACEVYKNNDCFDPRRIFGVTLLDIVRAQAFVSELKGLDVSQTKVSVVGGHSGVTIVPLLSRCTPKVSLSDSETKALTERIQEAGTEVVKAKAGA

SEQ ID NO: 120390 - protein, 118 aa, Heterodera glycines
MQIFVKTLTGKTITLEVEASDTIENVKAKIQDKEGIPPDQQRLKESTLHLVLRLRGGKVHGSLARAGKVRAQTPKVEKQEKKKKKRGRAFRRIQYKRRYVNVAAAGPGRRRGPNSNAA

SEQ ID NO: 120391 - protein, 386 aa, Heterodera glycines
MEQEQQQNVHHSGREVRQMFIDFFVKEKAHKYYHSSSVIPHEDPTLLFTNAGMNQFKPIFQETVDPNSDMAKLKRAVNTQKCIRAGGKHNDLDDVGKDVYHHTFFEMLGNWSFGDYFKREICTWAYQFLTEWLHISSERLYVSFFGGDLANNLLPDEECRQIWLDIGVPSEHILPFGMKDNFWEMGETGPCGPCSEIHYDRIGGRDAAHLVNADDPMVVEIWNLVFIQFNREEGGVLKSLPNKHIDCGLGFERLVAVAQQKTSNYDTDLFTPIFSAIQEGTGAREYTGKVGSEDVDGVDMAYRGDTFPELRKDPSSAMEIINEEEAQFLKTLRRGHVLFEKAVNALPSGNKTFPGSIAWRLYDTYGFPIDLTQLMAEEKGLTVQMD

SEQ ID NO: 120392 - protein, 110 aa, Heterodera glycines
EYTPWYSGQFASQKGSGGFMKVRDVLPHSQGGKDIPEDDKLKSEGIVRLQSGTNKLSGTNKLASQRGMTGFGTPRNTMSKMGWKKEWVEEYEAAMREFEEQRPPGSASSD

SEQ ID NO: 120393 - protein, 93 aa, Heterodera glycines
VAGQNVADQKLLDFIQKCTKPITLYNKSTWRHPHRMVINGLQWFLTKKGLAATSHLESGGFARSSTEVSHPDLQFHFLPSTVHEDGRQSPNCH

SEQ ID NO: 120394 - protein, 210 aa, Heterodera glycines
GTLFVCTIFYIVMKIYSLDEFRFCQMMAPLLGSGNDADCDLIRAFLSYILKRWGKELNAREESIKRSATGKMQAGMHKQTVEHLSPLMKSLEKYTVNNDIRLYLTNITKLCVVERNYIVASTAYMEMSIGNAPWPVGVSIGNAPWPVGVTRSGIHQRPGSSKAYVSNVAHVMNDETQRKYSNRFFRIMSKCQEFFPTDPSKCMEFVKNKS

SEQ ID NO: 120395 - protein, 366 aa, Heterodera glycines
MHFYQIKLVDKLSTVLLNTVQKGLHSDDKCKVMRSMEIVAGLCATPTNESIVCEFFEESQIIPRIFALLSLKDILMCMCAMESVLAISELGRVACEAVARCDRAVQMLVGFLTTDALSFGTVGLAGMHVVEVHGHQTRPYVAPNKKNPPPPLKLQPVQPPVQYAQQRHQTPASSTTTTAPPFGEAMEFAINARTDTLETCPDAFQRRATDGNDSAQFASHQRHPPTRKKVYLKSSRLPFLNHRQQLATDAPPLQNGLSSIAAAVPSSIESVANERDFMCEWLMQSEGDDDWSDEEGTAAGPIEPCARFFASASQMLFHVYNEHLVPLVQQHSDGEPPRIRCRWPICDNTPRTLWSITTHLQVNNDE

SEQ ID NO: 120396 - protein, 138 aa, Heterodera glycines
MDDLKYVWEFDFSAKDSIRYYNRVPVEKQVFKNLKLFMEEKDPGDDLFDRLDLPIPSTRKCFPTIVKPLVQRHFTYIAYIQDENKQIALGTSKLNYLDPRISVAWCKKNDVPVEKIFSKTQRDKFRWALDMAKEDFIF

SEQ ID NO: 120397 - protein, 128 aa, Heterodera glycines
MHGGISDQIQSLDQLSNLLRPQTDPPLRSLEIDLLWADPSKSITGVAPNSRGAGVMFGADVVESVRNLLGIDYIVRAHQLVMDGVEYFADRHLITLFSAPRYTGKNNTGATLLIAPDLSHTITRFPPA

SEQ ID NO: 120398 - protein, 71 aa, Heterodera glycines
CQLVDGTLLRTYGVDADSTIHLDLRLLGGGKKRKKKQYTGPKKQKHVRKKIDDNGKIHRQRLECNFASCGA

SEQ ID NO: 120399 - protein, 92 aa, Heterodera glycines
STEQEAHRELVKAIKEGIVRAQLVAGDPLAGGRHYVKFGTTDDQYRGVEPRREFDARVNELLELYHQAVKALRYPDMRNPEVETIDEQRRRE

SEQ ID NO: 120400 - protein, 191 aa, Heterodera glycines
MTTLEGAFHQLEDGDHVVFTDFEHAELNELPPVPVTLKGSKVFNIGNALAAFSGAVQGPVSRGRVQQVKVPKKMSFKPLSRALAEPDFMIWDFAKFDEPAQLHALWQALYSFEEMKNYSPLPRSDADAKLLKEMLPKDAPEMPDSLLFNFSYQVPCATFNFEFLPVFKACGNLQPIASLIGGLVAQEAMKA

SEQ ID NO: 120401 - protein, 336 aa, Heterodera glycines
MIGQTFIRNIKMSINGREVFNSNSLMAYKTYFSHELSYSTTAKDSHLNAAGYYRDTGGTLETGDGCIARRNLFAGSRTAQFIAKIDADLFNQPLYLINFCELDIEVLPNDNNFLLITTLAAAPRYHFEVVGLKMYVKKISLMDGLALDIARKLEVKPARYAVRKTLMKSMFISPGRFEFTANLFMDQIPRRITMGLVANSDYIGTISRSPFNFQPFNVREISIVANGRSFPQAPYDLDYPNLKYVRPFNDMNEAVGFANSLESNGISYEQFGKTHCIYVFNLTNSGDDQAALFDLIKNGTTAVSIKFKQPVPAGGIMLVVMGECDSLVMLDKNRSN

SEQ ID NO: 120402 - protein, 519 aa, Heterodera glycines
MVHIVFDPSNAGYDEYVQYGSGVEIEDYFKGSSPFQRGYGAQHGAGVGDVFRGIWRFFLPILRRVGTTVGSEALSTGQRVLDRVGNEGLPIKEALLLPSNPLADTPYHFKLHSSQNFIDLSKCYLLTEFRIRKENENGQLVNITAADEEVAPIQMLGHTFIKNMRMSINGREIFNSNSLMAYKTYFSHELSYSTAAKDSHLNAAGYYKDTSLVLETNSGCALRRNLFTESKTAQFVAKIDADLFNQPMYLINFCELDVEILPNDTNFLLISPTYAGTRFHLELVGLKMYVKKVSLMDGLALDIARKLEAKPARYAVRKTLMKSMFISPGRFEFNANLFMDQIPRRITMGLVGNADYVGNIMRSPFNFQPFNVREISIIANGRSFPQAPYDLDYPNGKYVRAFNDMNEAVGFSNSNESNGITFAQFGKTHCIYVFNMTNSGDDQAALFDLIKNGTTAVSIKFNEAVPVGGVMLVVMGECDSLVMLDKNRSISTDRNGQQTNYEDFDGKSIHRTGLSGVLR

SEQ ID NO: 120403 - protein, 383 aa, Heterodera glycines
YINYIFIIKKFNKIELIYFYIKSTFQLLIFDWNEVSTAYSISAWLLLASMSKLFFHVNKFHVNKRIAEALPDSALLIALGFVLGFILRLCQIDHRIYMLQSPIFFLYLLPPIIFDAGFFMPNRQLFENFDSILLFAFVGTIWNTIAIGYSLNWMGYSLNWMGQVGFFSVPFTTFQILLFASLISSVDPVAVIGIFEEIRVNEFLFINVFGEALFNDGAAVTLYKMFQEFTNIGPYNLHAMDYIEGILSFFVISIGGCILGLFFAALTCIATKYTHVRLIAPIFVFVVPYMSYLTAEMFGISSILAITACTIAMKQFVKGNLSHDAYSSVKYFTKMLAQCSETVIFLFLGFSLVSREYTWDWTFVCSTIAFCLIHRTVGKIMPL

SEQ ID NO: 120404 - protein, 58 aa, Heterodera glycines
MAGIVAIYGLVVAVIISGRLEAAGPGYTIDRGFSQFAAGLVCGLCGLGAGYAIGVVYI

SEQ ID NO: 120405 - protein, 237 aa, Heterodera glycines
HHKIEKPHSPLPPFFASFFFLCRFAALNFKPLASEERHKKIYFHAYNPDLPQIITSFKGNQKLILGGNQKLILGGFRYNIHHIEGVKTWRCVCAKKLTGTRSWCKGRAETWDNDSKGIPKGEHNHSTEHELAELEFFKSQMILASQMILAAISEPTADLSTLIDEAAKFLSEGLNFGNRESMKKSQQNRNEKEGTEKRKVRMKSNEKEKTKIEREREENIIDKREKSNLINFLFFIN

SEQ ID NO: 120406 - protein, 202 aa, Heterodera glycines
MGADLSNILKIQRLSDEHIQFLVYQILRALKYIHSAGIIHRDLKPSNIAVNEDCELKILDFGLARHADQEMTGYVATRWYRAPEIMLNWMHYTQTDIDQLTRIMSVCGTPNDEFLKKISSEEARNYIRNMPRMERKDFKKFFANATPEAVDFLEKTLNLDPDYRPTAEQAMEHVYFKQYHDPNDEPTADGHIEVDIEQELSI

SEQ ID NO: 120407 - protein, 162 aa, Heterodera glycines
HLHTLLKNDNRTAKGHELVTKATEEDKTKNYEEALRLYTGSCEYFMHALKYECQADRQKETIRLKITEYMNRAENLKAFLRDGGERTKRARPVKENEKDSSGDEADASDENKKFQKAMSKAIIVEKPNVVWEDIAGLEDAKRALKEAVILPIKFPHIFKGTH

SEQ ID NO: 120408 - protein, 138 aa, Heterodera glycines
ECSPYSYFCNTNFLHHFFSFAIDSVQFSFLLKADGDSFVRLGALLHALRSVAHPFLYWGFLDGRARPQRAVGGKWREEQWRLCDRYLPYQLGGGYVLSHALASFLHLNRERLKLYRNEDVAVGAWLAGLKVRYVHDPR

SEQ ID NO: 120409 - protein, 285 aa, Heterodera glycines
MGGPAIANRTTIIHREMFAKVGYEAANLPDNDAEGIVAKGLYQAWLAFGVNDAIVVVVSGHADRNIEQFQLELRLEQLSGNKIQIVKLSIFECDDQLFLDPEDNSLRYNGHLVAVVYYKTIIALSEPGMLEHFFPEPEYAQMVNDIRKTFAKMWSLEQDDDETMKIISDAIENPGNYVLKPSQEGGGNNFWNEEIAEKLRTFKPNKRAAHILMERLRPLVVKNFMVRPYVKEVPQLSNIVSELSIYGYLLGNASNMRVLRNERDGCMLRSKREDATEGGIHSGGG

SEQ ID NO: 120410 - protein, 239 aa, Heterodera glycines
MLCTGHHCSERWPNPPFPGQSVFRGQVIHSRAFHTAKPFEDQTVVVVGIGNSGGDIAVELSKVAKKVGPWIKIGRIVSLKVYLSTRTGSWVINRVWEKGHPTDAVLLNRFAFALRAITPRSVQNRQRMALIGPGRALHSSFPSAFRLIERKLNLRFDHERYGLRPSHRFLEAHVTVNDELPNRIASGTVVMKPNIQKLAEKDVTFDDGTTVYAGEWQIDFCAGQQNTFVQIDVSARLIA

SEQ ID NO: 120411 - protein, 377 aa, Heterodera glycines
MNNDDFRKLLAVPASVRSSHSSSDRVSVNSSSVATFTHRQVVSVAASTGNVANKKAPKKRNFANFHREKPVEGKEEDDLFDESQARLNEIMKNYRDRAAERRKGKSKYLGGDMEHTHLVKGLDYSLLNKVRTEILERDVTDKDQEQQDSQANAPLSESSKAANSKLAANICKLLFESKPPKRNELFARGRMAYVVELEDEETDVPSTLLRSVVDCPLDQSSENINADNLLINKLTQVLAYLRTDVKKRRKGAGDGTTEAAKGEAETSIFEGLEEYEPSKERQQETRRGREEGQQKRTTASSYFDTDNRDSRSGRDERDKRGHRETKDRERKREREKDEPTNAANNADTAEEQHLEKLKKRRLEQEDAYAEFYPGTEF

SEQ ID NO: 120412 - protein, 617 aa, Heterodera glycines
MDSATGEGGGNALTLDWENGVKLPKCHKIYNNAIWLNQKVVREVVDSLVYRVSASTEHEKPNQKKDVPPRSRHTSTDERLSVNGLYSPTVPNGSATHSFDQTTAEDDHSSAGMGGGQNTPQQPSKLEFHSLEEKDAFLIFRALCKLSIKQTPDDQDTRINPIFESDPLGTALDWLTISQPFSPAEFSLISPRSHELRSKLLSLDMILLIVRNFNAALPDTHSFVYAIRHFLCVALTHNAVSPNISVFSKALDIFVHLVDKYKIHLKKQIEVFFKEIIISILDSSSSSFEHKWVVLTTIAKICDSPQSVVDIYVNYDCHMTSANIFEELVTHLSKIASGYSADSSSPSHGQIALKERERRMRELALDCLVKVLQCLVYWYEEMNLGKEQSIHGGDETANAAPSACNGNGSDVNVTAQAKQQKGIVESGIELFAKKPKQGLSFLSEKGFVGAEPTDIAKFFHAEERLDKSVIGDYLGDGDEFNQRVMYSYVDNFDFTGVSIVQALRTLLSKFRLPGEAQKIDRIMEKFASRYCACNPQLNHIFASADTAYVLSYSIIMLTTDLHNPQVKRKMTKDEYIRMNRGINDQSDLPDDFLSQIYDDIATNEIKTKPGNLKRPKL

SEQ ID NO: 120413 - protein, 467 aa, Heterodera glycines
MGKEKIHINIVVIGHVDSGKSTTTGHLIYKCGGIDKRTIEKFEKEAQEMGKGSFKYAWVLDKLKAERERGITIDIALWKFETSKYYVTIIDAPGHRDFIKNMITGTSQADCAVLVVACGTGEFEAGISKNGQTREHALLAQTLGVKQLIVACNKMDTTEPPFAEARYTEVMTEVSNFIKKIGYNPATVPFVPISGFNGDNMLEPSDRMPWFKGWAIERKDGNASGKTLLEALDSILPPQRPTDKPLRLPLQDVYKNWRSCIGTVPVGRVETGVLKPGMVVTFAPQGISTEVKSVEMHHESLPEALPGDNVGFNVKNISVKDIRRGSVASDSKNDPAKETKSFTAQVIIMNHPGQIAAGYTPVLDCHTAHIACKFAELKEKVDRRSGKKVEDNPKALKTGDAGIVDLIPTKPMCVEAFTDYAPLGRFAVRDMRQTVAVGVIKAVEKTEGGGKVTKSAQKAAAPGGKKK

SEQ ID NO: 120414 - protein, 100 aa, Heterodera glycines
ALLWRQLWIWLAESERELGLEAQISAEMVAELKAQKHNINWDKIRANERTMKHEVVAHIHAYGEVCPLAKGIIHLGATSCFVQDNTCLILQREAIDHLLE

SEQ ID NO: 120415 - protein, 129 aa, Heterodera glycines
MHGGISDKIRSLDQLSNLLRSQIDPPLRSLEIDLLWADPSTSITGVRPNVQRKAGVLFGADVVESVRNLLGIDYIVRAHQLVMDGVEYFADRHLITVFSAPRYTGKNNTGATLLIAPDLSHTITRFPPA

SEQ ID NO: 120416 - protein, 116 aa, Heterodera glycines
MHGGISDKIRSLDQLSNLLRPQTEPLLRSLETDLLWADPSTSITGVRPNARRKAGVLFGADVVEKHQLVMDGVEYFADHHLITVFSAPRYTGKNNTGATLLIAPDLSHTITRFPPA

SEQ ID NO: 120417 - protein, 219 aa, Heterodera glycines
MERRAANRRASPLAPLRRRVVLTGGNGGGSMRISSSTRLMVDRERERHHRGGTSAGGSGRGTIVGRSRSKKKGFCMRGDNCPFDHGPDPVVVENSALKDIVRDTTIFDTSTTYGVNPPPPGLESTVTPSAICVNKLSGGVTEGYNPEAPSMDNSAAIPQIDFSVPPPPLPQHFLQQQRQILYPPAPTASGIIPTFGAATATTAPTNASGGGVLPLRSAV

SEQ ID NO: 120418 - protein, 133 aa, Heterodera glycines
MPTRWSAPECFTKNKFTHKSDIWSYGVLLFEIFSFGEIPFDNYTNDNDVIDAVKTGADPGVPKDCQEEIAVIMPKCWDQTPEKRISAENIKCALDCIILADVMQKCWTPEKRISAENVKRELGNIGRMEQEAK

SEQ ID NO: 120419 - protein, 214 aa, Heterodera glycines
MSILTASKVCTLPRLSSARSMTWWWPEKNNGREVVGPTFHGDEFYQDRLDRWYPSIRFRKNFYQDRLDRWYPSIRFRKNDEVITPIRHKELGDWKKLSIEEKKLIYRYSFRQTLAEFEALTPYGYLTVTLFFSMLGLTILYASFVRTYVNDRLPNDRLPDTFDDEYKESQAERRVVLERESQAERRVVLERGHLYGGHLYGPAYYYDYDKNRWK

SEQ ID NO: 120420 - protein, 127 aa, Heterodera glycines
MNIILADCEEMRRIKPKQGAKKSNVEEEKRILGLVLLRGDKIISISVEGPPQKEDSGVQLPKAGGLGGPGQGRGAGRGMPMGVVPPMGAVPPGLQGAVRGIGGPGMGGPMQPGYMQGMPQGMPPRPF

SEQ ID NO: 120421 - protein, 356 aa, Heterodera glycines
LINLVDTYRTLNKPIVLTSLKILANSVASSKELAQTVANSDWIPLLSSMLKNPSHDEERILSHKILSNILFAFGREKNELPAHLYELHKPMSNKMPQIDIVFVHGLRGSAFRTWRQKDRPNERTTLFWPKDWLAVDLKESVRMIAVDYSDWLAVDLKESVRMIAVDYSSRFFQLSKSMETFEARAQLFAEEFKRNGIGERPIVFICHSMGGLLAKQLLLENEQLLSKTVGVLFMATPHLGTPVASQLRPYFIRPSSDVLLLQPKSEQNNKLANRFNKAAEQIPFIATVLECKKTRVFGRVMLVPVESGIMGKGPVYHLDEGHHNVCKPESKESIAYQIVFNFINDVLEYVKPFNGK

SEQ ID NO: 120422 - protein, 867 aa, Heterodera glycines
KYNYTGQEKAAIPLVISMAKGVQSLMVNMDTDFAVAIRQHIYAELQDFVGGPLRDLLAKAVKHKKDILTGPLNKFNSRSSDLSSSMRSLGGGGGKKSKKGGADTGSMPDLRGRRRSVVPSSTQLYLARTMLESLVHEKSSSTGRRIYRKDLDEKYREKMVHFLRQSYFWPALVHFLRQSYFWPALLDLKQSLDESVNLSQLWFREFYLEMAMGNRIQFPIDMSMPWMLTDHILTTLDPSLLECVLHQLDLYNDAAAFALGHFRKQFLYDEVEAEVNLCFDQFVYKLSEAVFAHYKQRAATMLLDKGFKEDCARYGIAIFMPNSVRFETLLRQRHVQLLGRSIDLNLLGRSIDLNRLISQRINAALLRSLDVAISKFEADGALLRSLDVAISKFEADGLNCIMVLVLDNLIEVNRLCHRLLSDHLGSLADFNDLLLEANRQVSAPNGRITLHAFAQLTDDVLVNFCFNTATRRFVRGKQLNYRKPSRGRPPAVAAQYEFGSKSLNSSFSNLSMMYGGFVGVPHFRVVAKLVGYQGISAILFDLLGLAQRLLNDQIKTHFRSLLGLMPKMCKLQRFEYGVEGNLQYFIHQLRDFSAYGPLRRECCQSLRELGNVLAVALLMELGMAQEEMFDVFAAAAFTNQIPKPYAKNLEDQAIKMHKLESKYSRLQIGKIVHQFGTETQQQQAKIALDSAVLTSERLSCGLRIFDMVLIRLHDTLLTDPIWRGPVPTNGVMWVDECHEFHRIWCVFNGRECNGCQLIMDVVEELFGDGIYWAGCAIVRLLGQHRRFEVLDFSYHLLRVNRASGQQNVSFPQIVRLIERIRRVQAQHKQVFALLGNFCVHVEEQEQKIRHFAPPVYQPLQNPYANGR

SEQ ID NO: 120423 - protein, 388 aa, Heterodera glycines
MTFHKIDNDSVNSTTNALDFFRIPPTNVSVSSSKVQNYIDLSKCYLLTEFRIRKENANGQLMDLTIDDENIAPIQMIGQTFIRNIKMSIKGREVFNANALMAYKTYFSHELSYSTTAKDSHLNAAGYYRDTGETLETGPGCIQRRDLFAESKTAQFIAKIDTDLFNQPLYLINFCDGTQNVCEEGVINDGLALDIARKLEIKPARYAVRKTMMKSMVISQGRFEFTANLFMDQITRRITMGLVSNADYSGTITRSPFNFQPFNVREIGIIANGRSYPEAPYDLDYPHGKYVRAFNDMNEAVGFANSSESNGITFPQFGKTHCIYVFNMTSSGDDQAALFDLIKNGTTAVSIKFNRAVPVGGLMLVVMGECDSLVMLDKNRSISTDTTI

SEQ ID NO: 120424 - protein, 127 aa, Heterodera glycines
MQMAMMLGRQQIFLELPDGEDGLLGELNANSHLHKHFLALARELDIMTPKSPDDVYKMHLEQARPFTHQAVKTTTTTPFAQFVEVCAYAGTGNVLKVQKMLHICTEHTDKKEVSRPTTIKMEDFNAK

SEQ ID NO: 120425 - protein, 147 aa, Heterodera glycines
  unsure (1)..(147): unsure at all Xaa locations
DLLLLDVAPLSLGIETAGGVMTSLIKRNTTIPTKTSQTFTTCSDNQPGVLIQVYEGERAMTKDNNLLGKFKISGIPLAPRGVPQIEVTFDIDANGILNVSAQDKSTGKQNKITITNDRGRLSKEEIERMVQEAEKFSXEDEVQRNRV

SEQ ID NO: 120426 - protein, 214 aa, Heterodera glycines
MAERFHAPQPPPPGLPEEAVWVPPQGADGGGGEDGAGGGDGGGGGANLFGGEDLLLLDVAPLSLGIETAGGVMTSLIKRNTTIPTKTSQTFTTCSDNQPGVLIQVYEGERAMTKDNNLLGKFKISGIPLAPRGVPQIEVTFDIDANGILNVSAQDKSTGKQNKITITNDRGRLSKEEIERMVQEAEKFSKRTRCNVTVWRRRERFWKFHSDLFI

SEQ ID NO: 120427 - protein, 316 aa, Heterodera glycines
GGVAGIEQLDPTQWTGNQRIVHFGPMAQRDPFFYFYPKGWDLLYPAQFGFFPYRTNKLGSSAVVCVWAFGIFLFLGGILMIYLGYFIEYKKPFWRWTVEERQNTPPVQIAGPLLAGTGILLLVVGMVYFFQILQFLSDKLRHHHHRDQPASVTVYTTHYSPVPYEVSPYQPLPPPANSPVPYEVSPYQPLPPPANPVYVNPNARTHLLDPNKELKLFPPVYENLGFFFYIKGSNGLIEVVGPHFGIGHLGIKQKIHCLGFKESLISDQEGVCLIERERENGERESWGREREERIWQREREREALKGKEREREREKE

SEQ ID NO: 120428 - protein, 745 aa, Heterodera glycines
SPLRMFDVPGIDAPVMSLVYKERFPKAKQQLESRILQFLQQNAPLSGFSSQLLQPTIASSTPLRATSPQPGQPPGAISDHSSVCRPQSPLPVRPLSPLVTESATAIGDAVIRSSAHFSSQGLLSPQQQRPFVEEAERIEGLPCHHSIYATQFGTGGERDGRQSSLAKHSSPVCSPSSTTVLTTTDQNILRLISDGATRFLHHQLCEIASDCLQKSKDGMLSCAYFCNMSVRLDETLAEAEVKIGPDSYSYLTRLVKQLLMIVSRAARLLECLEFDPDEFYQLLEEAEGAVRVQLGAGSARVPDLPQYIVSKLGLNKNIHLLMEDDQTAMDLGEEAEETSDKRMTEIMGTNELMKKRAAEVLAQGVPKEEDFETVRLISNGAYGAVYLVKHRRSRLRYALKKMKKQTLLMRNQIEQVYAERDILTFTDNPFVVCFYGSFETKQHLCMLMEYVEGVRRNFAHRIGPPLCGGNGVGHRIFALVWHCAQGFKAGQFANHFHGTHKTDGFRPLQNWAYESDYFGVGRLSATGRHAAVQGQPTLRNARIHRTGRKPVDWWALGVILYEFLVGIVPFMGDTPEALFANIINEDVEYPEGDEALDSDAESLIHLLLEKNPLDRLGTVGGAPQVSAHPFFTPLDFDTILRQKAEFVPQLENDEDTSYFDSRSDRYNHDANESAEDDDAAAAAHAAAIERSGQPLQQQDRIVDDDRVESRRRLLSSATTASSGIGSGPNSAFGPLSSTLLTRKIA

SEQ ID NO: 120429 - protein, 126 aa, Heterodera glycines
MVNGKKLDQVADMMVANAHNLIVTIKPANQRNSLQRKGKADQFAVQSQYHQYFTGDGSSSSAVGKIGTFGSGGGGKVYPTGHGSSLYHLGTDRHHHHQMDEFFDDYAEDEDEDEIVDHTKTALKIH

SEQ ID NO: 120430 - protein, 124 aa, Heterodera glycines
MAFCLVPGVHLHKKFMPEMLASRIDVHEASSALKVMMNGDFLGKNFALAYPEERECFLDSNGAAATCCKLKRFGTLIAVGSTDGRLFIYDLITKSAVKVGEVVHSLLNFRPCFYYIFFALFSGD

SEQ ID NO: 120431 - protein, 94 aa, Heterodera glycines
FLVADNDQWFSYDDVESIRNKLSWIRQNSFGGAFVWTLDFDDFNGQCPGSQLGRYPLIRTIAQELGGIQLSQTPVSALSNSPSPSTGAALPAVT

SEQ ID NO: 120432 - protein, 871 aa, Heterodera glycines
MSIIKKIDKDSVEGLEGSLSLFNLPPTNVAINKTSVRELLPLSALNQTGPYLFRLFSDSQYCDLSKTYMYLLTSIERKNAAGEWVPTDDAIEEDKHVGVIQNFGSSFVRSLKVNISGVEVFDSSIYYHYRAYIMQELGYSHEIRKAFHEAGCYYPDENSQDSYSNKGFTSRAQRFSNGKQCETMVKLNFDLARQNTLLLNNQDVVFTIHRNSDPFLLLTPKWKTVTDAVKDAQGNIITAARVTWHDNTAEYRIRLHDIRLYVRTVDVTSSLNIAISRQLESTPAKYALRKVEMRSIFLGMGRTELSHNVFTSTLPRRLICAFVSTDAYSGARHLSPFNFEHANVRSISAEANGLTFPSTPYLFSFGNQKRFVRAFVDMYAGLGLDDSDNKTVSISMARFLSGWAFFVIPMTSTLDDTPGFELIRQGTCTVKVQFEQPIKADGYEMLILGEFDSVLSINADRVLSTDGIARCSGVPYCEVMVNLYRTRTIADLLVKGPVHFESIRKLEPMACFEYNGKSYVFFEDREADEMHLYRGHEQKIVKKFLANANRPMFDYMTERLYISDKYERQISEIELSYLERLWTNKNPTNFTLLKLNFVCMLPQDKTDFIIIDNKVYLIRSDRRIYKYGINDGQINPKFVSNISDTKFNFLLFKEYRDDVINILQASSPTPQIKLLLWSAYTFDVLLVVICAYVIRQIRRTSSSSKTSSEDVGMFDQMELEIFSDNPKDLVYRPTTRAIKYFIDYYALDDIAQLYALFKSEIDSEPSNYFPNPLQSVPCVHLVNEEYENQPVVVEGTLDLIGDLFFSTCYPKKRQGIDWSEPLYVELKDLMVCPGDLRKCLSHFGHRKDQRNLVVDELDWHDEDDDIAEGAW

SEQ ID NO: 120433 - protein, 471 aa, Heterodera glycines
DIEWAGIIWNIFRRLPRRNSTSPDNVPYILLKNCAEPITKILADIFRLILDYGQIPEIWRTSLVVPIFKKGEKTDPLNYRPVSLTSTVCRVFERILSSKILEFLNSTRFFDKEQFGFLKNRSTTTQILKMMDDIYNSIQKNQQIDIIYIDFVKAFDSVPIDLLLQKIKKIGIEGKIHNFLTNFLKNRSFKVKIGEELSESFRIFSGVPQGSVLGPLLFLIFINDLPSFITNEAASVDIKMYADDVKLYYTHENDDHSNQLDKAIEALEKWSKINGLEISTEKCFVLYLGKNNMKKEYFINSKKISESDNVRDLGIIIDSKLNFSEHISKIIRNAYLRSFQILRVLKSREIKTLTAAYKTFVRPQLEYATEVWNPNLKKDIDKIERVQKFFTIKVFRKGLVYKKYVERLKIAGLHKLEERRKINDLTTAFKIIKGFTSLEAEQNFFFSERHRNKRKCVSRKSIKFPNKNAFF

SEQ ID NO: 120434 - protein, 131 aa, Heterodera glycines
VCGDIHGQFYDLMKLFEVGGSPSSTKYLFLGDYVDRGYFSIECVLYLWALKICHPATLFLLRGNHECRHLTEYFTFKQECKIKYSERVYDACMESFDALPLAALMNQQFLCVHGGLSPEIQTLDDIKKASR

SEQ ID NO: 120435 - protein, 56 aa, Heterodera glycines
MRDWVMPLNFDHADAEAKHLIHIADENKDGKLSPEEILTHYDTFTEFVLMSLMIFA

SEQ ID NO: 120436 - protein, 218 aa, Heterodera glycines
NNDVERTWKNYKEEQLKNGLLDWQDYRNLNLIYGKPQEGQEISPEYVKMIERDERRWKVADYNSDGKMDRTEYGCFMHPEDCDHMRDIVVQETVEDIDKDKDGFVDMAEYIGDMYRPDDYPELKGKEPEWVESEREMFREHRDKDKDGKLNKDEMRDWVMPLNFDHADAEAKHLIHIADENKDGKLSPEEILTHYDTFVGSQATDYGEQLQKHDPADL

SEQ ID NO: 120437 - protein, 376 aa, Heterodera glycines
MNLHLPQTYEAKAEASLLMGLKYNLVSPRAGQPLIAAIQDFITSGYLLTHKDTFLPRSEVQRIAAAVVEANTGAKRIRLPPPALLRPKELWTGKQLIELLIAPYKGTEVCLNLSTKNRMHNPDEGEFTPNDTFVIIRNNQLLCGSLDKALLGSESKCSIFYRLLRDWGEGHAIEAMWRLARISAVYLSNRGFSIGIGDVKPNVNLLQEKSVLLNTGYKICDQLNKSMRLERQKDKPDLGLVEELESKILKELSSIRDQAGKACKQYLSRKNAPLTMAQCGSKGSFINIAQMIALVGQQSISGKRPSDGFENRSLPHFERNDRAPDAKGFVENSFYSGLTPTEFFFHTMGGREGLVDTAVKTAETGYMQRRLVKCLE

SEQ ID NO: 120438 - protein, 89 aa, Heterodera glycines
MVQYKLYYFDGRGLGESIRLLLHYVGQPFEDIRIKDMEEWEKTYKPKFFYGKVPVLEVDGKPLGQSATILRYLAEKFGKLIIIINFICF

SEQ ID NO: 120439 - protein, 274 aa, Heterodera glycines
FIDFQKAFDSLRHNLLLYKLEKIGIRGKLLLWIKDFLSNRTFRVQIGDSLSSSKVGYGVPQGSLGPLLFLIYINDLPDALPSGVRIKLYADDVKMYICYKARSDTEIMHKALHNLFEWANKWQIKVSIQKTFVLYLGSKNPNETYKFDVNTINAVDTISDLGVNIDNKLQFSDHVNQITRNEYLRMRSLFRIIKSKSSKIWITLYKTYIRPLLEYAPEVWLQKNIKKIEKCQKYFTKGYFLNVAFHPIPKSIRIPNFSFLGSAFLKIFGSFLRG

SEQ ID NO: 120440 - protein, 154 aa, Heterodera glycines
KCLHGKTGLTHSEFDSRTEQGSAVQYFQFYGSLFQQQNMLQDFTRTATYQRAIFDNWHDFRGKVVLDVGAGTGILSFFAAQVGAKRVYAVGLTNFKFFSNFKFFSKELVDANGFSSVIVVLSAKIEEVELPEQVNLVDSSFYVIYSSRILVKIS

SEQ ID NO: 120441 - protein, 87 aa, Heterodera glycines
RIGYAFKTTKPKRIFLNPPCGTLGVGDAVNVIITVTTFDPNNDDIKNDRVIVEWCNTPDPAATVFKLEWFAEDGMVRRKNLPVIYNL

SEQ ID NO: 120442 - protein, 213 aa, Heterodera glycines
MESSNEEQQLQEIEALESMYSNELRVLCRDFPNISVELDVRPDLDEFTELFGKSVISLRATFPSDYPNCFPVIDLPDFDGDDDENTLQKTQFWDECERRITNPTKQEFFVQMADDYLKNRDELERIKADKIEREERAKFEGTRVTVESFKKWNDAFLKSVRVPQEKIKDNQTTKRMTGKQLFLSDKSLNISDLQFIGNAKDENVVEIDQSLFE

SEQ ID NO: 120443 - protein, 124 aa, Heterodera glycines
MDDDSDSNNNDEELSLGVFETYAVLVKILCLKPMLIMVIVLLTGKIAFAATDGMTDLKLINEGLTTDKIASRSIFLTPLQIILPWVLGKQTAGPKPLNVFLWAYPYRLVMSLALALLVYWTPSF

SEQ ID NO: 120444 - protein, 199 aa, Heterodera glycines
MHSSGCCRSICQQSVPGLQEHISKIIRNAYLRIFQILRVLKSREIKTLTAAYKTFVRPQLEYITEVWNPNLKKDIDKIERVQKFFTRKALRKCGFVYKKYGERLKITGLHKLEERRKINDLTTAFKIIKGFTSLDAGKSFFFSERLRRPLLLRVKRHTAKTQNNFFNRIVKSWNNLPVVAVQINKAKEFRGLLKAMSSE

SEQ ID NO: 120445 - protein, 691 aa, Heterodera glycines
EIFLRELISNSSDALDKIRYQALTDPSQMESGKELFIKIVPNKADKTLTIIDTGIGMTKADLVNNLGTIAKSGTKAFMEALQAGADISMIGQFGVGFYSAFLVADRVTVTSKHNDDDCYQWESSAGGSFIIRNCADPEVTRGTKIVLHLKEDQTDYLEERRVREVVKKHSQFIGYPIKLLVEKERDKEISDDEAEEEKKEDEAKEEEKKPEDDVSDDEAEKRKEEGDKKKKKTKKIKEKYTEDEELNKTKPIWTRNPDDISNEEYAEFYKSLSNDWEDHLAVKHFSVEGQLEFRALLFVPQRAPFDLFENKKSKNAIKLYVRRVFIMENCEELMPEYLNFIKGVVDSEDLPLNISRETLQQSKILKVIRKNLVKKCMDLFEEISEDKDNFKKFYEQFAKNIKLGIHEDSVNRKKLSDFLRYYTSASGEEPCSFKDYVSRMKENQTCIYYITGESKDVVQNSSFVERVKKRGFEVIYMVDPIDEYCVQQLKEYDGKKLVSVTKEGLELPESEEEKKKFEEDKVKFEKLCKVIKDILDKKVQKVSVSNRLVSSPCCIVTGEYGWSANMERIMKAQALRDSSTMGYMASKKNLEINPDHSIIKSLRDRVEKEQDDKTAKDLVVLLYETSLLTSGFSLEDPQQHASRIYRMVKLGLDIPDEEEPAEQQPSTSGEPTIAEKIAGAEEEASRMEEVD

SEQ ID NO: 120446 - protein, 268 aa, Heterodera glycines
KFPSKNAVFYDAIFSMPISKVREMNNTGYALLSKDQLHLLYGPESPYNNSDALQRFVRLSDSEIHAGIERDVHALAELESFKVRQKDVVLSPILFTTFLLVNTFSAKSTILLSPILFSPVILSPNVLGPTILSPWLFVPVILSPRALSPTVLSPFVLDPIILSPFAIHPIILSPGVLNAIILNPFVLSPFILSPQAFTPVILSPIALSPFIMNPSMGSPTILSPFVLTPSILSPQFLSALILSPYALSPVIASPLTAVSVILSPSWLS

SEQ ID NO: 120447 - protein, 424 aa, Heterodera glycines
IIGAGLTGAGIANVSIDKDIKTILIDTNQETLDGGLKQITSQMEGQIKCKLITAAEKKIFLANLKPLDDYEKLRNADFVVETESEEIESKHEIIKKLEKVVPNHCIIATNTSVLPIHDIVAVAQCPERVIGMNYFSPVDKMQMLEVIIADKTSHETLAVAAKLGLDQKKMIVVVKDGPGFFVARCLSPMLNEVVRLFQEGVSPQQVDKITTQFGFSVGMATLADEIGLDYSEYLTTFLIGLDYSEYLTTFLGKALGPRVQGGSSELLADLTKAGFKGKKSGAGIYTYSADGGKKSKKVPNSKAQEIVARYKLSSSEGASSVEYQQIRVVSRFVNEALICLEEGIISSPSDGDVASVFGLGFPPFWGGPFRFVDLYGAQNLIKQMERYGNIYSTVQFKPCQLLIDYAKSGKKFYSYAKSGKKFYS

SEQ ID NO: 120448 - protein, 92 aa, Heterodera glycines
KCPYGAIQIINLPSNLERETTHRYSANSFKLHRLPTPRLGSVLGLVGTNGIGKSTALNILSNRLKPNLGSFKPPPLWHSEAPKNFRKSEFFN

SEQ ID NO: 120449 - protein, 75 aa, Heterodera glycines
MKKSAKPEIQTAQTRIAIVNPDRCKPKNCGQPCKKNCPVVRTGKQCIVVEPTSKIAEISEILCIGCGICVKVCIH

SEQ ID NO: 120450 - protein, 237 aa, Heterodera glycines
MCDDCRRFEAKDYWRACVQQLVTHDVRSNFYDYKHTFCVDIVPITKDALICLPRTLAQSFANIGQFVLCLRVTDVVSLINPQTLQLYELNATTYWKNPFDILVHPKSLVEFFVVDVEEVDDPYAVLPHGHGSVSTKHRLADVWVEFMDDIEEDPALRERINIYKKGGGKQSVKQTATSANRTAAQQRHHRQRMASAAADSALSEGGEEEHIDGAPTLAEMLDDLELDDVEMREEEEG

SEQ ID NO: 120451 - protein, 404 aa, Heterodera glycines
MKYLLFEAFYKGQQELLYIVPFVVKCITASAKSQLFGPHCGWVYAILKVLAEIHNEPDLKLNLRFEIEVLCKELNVDLRSIEVGSYLKEQRRLPKLVPPSKLGTTAASPTLAQCQLPPIQQPPQIGAGISAQSTADYTPTDMANILTEMSISRKYSPASYTPGGSQQQVPSITAHQTLPTFNYADIALQSGILQIIVIPPHLMLFQVHPQLKATCKIAINHAIKDVYGGVADRAISVAIAATEQICRKDFGLDSAEQNLRRGAHQMMRSMTAAIASITCREPLSQQMNSILKMYLTDAMGNVLPGSDQAKMVEEAATAVTDTNINIATNFVVKNACEKSVADIEKRLEPEYVARKTASDDRPFQVDADMAEMSEKVPEMIRLKEGPISEAMLKVYDDFSSYVKF

SEQ ID NO: 120452 - protein, 408 aa, Heterodera glycines
METDEQMWDMPYYHGLLPREDVNDLLVKEGDFLIRMSEETSGQDRIYVLSVVAGGHKHHLIFRTERGMIAVDFKHERGYRTMRRFIETHLSKKDTVVDQRKVILLKGVGRQKWELAHSTITQGAELGKGAFGVVKRGVFRDPTIGQPVQVAIKEVSQTSTKAQIKEFMNEARIMRHLDHKNVIRFYGVAVGREPLMVLMELASDGSLDTYLKKTKRSPRSKLFMCYGAAAGLDHVHSKGILHCDIAARNCLFSENTVKVADFGLAFKGPSKPVETGKPVPIRWLSPETMRERTFTPKSDTWAYGVLCWEIFSNAQQPYQFISNNDVAPMVLRGSRLRFPNVTPPPFAEFIKANVWTADVARRYAMRDVLAWIEQHIDELIDDTTASRHDTTTATTRNRGSRQGSRTGS

SEQ ID NO: 120453 - protein, 408 aa, Heterodera glycines
METDEQMWDMPYYHGLLPREDVNDLLVKEGDFLIRMSEETSGQDRIYVLSVVAGGHKHHLIFRTERGMIAVDFKHERGYRTMRRFIETHLSKKDTVVDQRKVILLKGVGRQKWELAHSTITQGAELGKGAFGVVKRGVFRDPTIGQPVQVAIKEVSQTSTKAQIKEFMNEARIMRHLDHKNVIRFYGVAVGREPLMVLMELASDGSLDTYLKKTKRSPRSKLFMCYGAAAGLDHVHSKGILHCDIAARNCLFSENTVKVADFGLAFRGPSKPVETGKPVPIRWLSPETMRERTFTPKSDTWAYGVLCWEIFSNAQQPYQFISNNDVAPMVLRGSRLRFPNVTPPPFAEFIKANVWTADVARRYAMRDVLAWIEQHIDELIDDTTASRHDTTTATTRNRGSRQGSRTGS

SEQ ID NO: 120454 - protein, 236 aa, Heterodera glycines
MAEQRKDNIQRAKLARQCERYDEMAKEMKQVAEMSVELTEEERTLLSDAYRRAISTRRSAWRVIESHVKKSTMDKQKQGVKELQKKVESEAEEKGREILTLLDNQLIPKAADPEAKVFYMRMKGDFHRYLAEIKPSETKDLRNALKAYQEAYSIAQEKLRPSHPIRLGVALNFSVFYEELLKSTEEARRIAQKAHDDANAVILAESNNKTLKEALDLMIKLSNNLREWNKRKGGAE

SEQ ID NO: 120455 - protein, 97 aa, Heterodera glycines
MPFCPLCSEYVGETAASDGTLQGDTSAAMASALFHEMIKGAATIVGHTFMEPVTINYPFEKGPLSARFRGEHALRRYPSGEERCIACKLCEAICPAQ

SEQ ID NO: 120456 - protein, 212 aa, Heterodera glycines
KYFDSVPHNLLLYKLEKIGIRGKLLLWIKCFLNNRTFRVKIGDALSSSKKVTSGVPQGSVLGPLLFLIYINDLPDALPSGVKLKLYADDVKLSRADTEIMHKALHILSEWANKWQVSIQNTFVLYLGSKNQKETYKFDGNTINAVDTIRDLGVNIDNKLQFRMRSLFRVIKSKSSRIWIILYKTYVRPLLEYAPEVWNPSLQKNIKKIEKFK

SEQ ID NO: 120457 - protein, 167 aa, Heterodera glycines
NHRNFFFRQFRLKLTSFNFLQNRLWDIECGNCLRVLEGHEDLVRCIRFDSKRIVSGASDGKIMIWDLAAALDPMTPPNSICIKTLSQHTGRVFRLQFDEFQIISSSHDDTILIWDFLNTGPSAAVAAGAAAAAAHNQAKEGEAGAGTVPGGGGGCHKSFINRSKGAM

SEQ ID NO: 120458 - protein, 159 aa, Heterodera glycines
FAKMFSNFHISSSLSLTWKKYFFCSKDQATRAISQSWRQPKNGEDALEFQHKFYRELYPKITADIRQIEQNWREGRHRLERINCQSENSKGVYCLQYDDEKIISGLRDNTIKIWSRPSLGCVQTLSGHTGSVLCLQYDNQMIASGSSDATVRFFSKNTK

SEQ ID NO: 120459 - protein, 417 aa, Heterodera glycines
MSDNIDFQNEIREMLRGINQKIDLCNERIDTLHQDMAVLKSVAALKSEKDLPCTAAVEPLNQEEKKKEESSGPSEVEHAQNMENVPEKYLPETEIKGLTFTVAIEPLDQEEKKDESVTDEREPGVDKEELSGPSEVEHAQNDVENMPENYLPSNETETKDVPCTAAVEPLNQEEKKKEESSGPSEVEHAQNMENVPEKYLPETEIKGLTFTVAIEPLDQEEKKDESVTDEREPRADKEELSGPSEVEHAQNDVENMPENCLLSDDTETKGLTNSHKTPLLAGCQITASGFMGTDRVKIGRLVELHGGVFTGQMSRATCTHLIAAASSGEKYRRAREWGTVKVVTSEWLFKCDEMGYRLREDHFLLDNDGEKRRSSADIEWKTTEGQQRNTTKDERKENMKPATKKMKVDMKLKKNEH

SEQ ID NO: 120460 - protein, 336 aa, Heterodera glycines
MPAQLRFQPSNAIGTHQRSIITAQQFQQQPFCVKRARYDYDLYEGQSHHNFQRQRFDQTPPSAIHPMRTFQIRHRSTDKTRGLRHFAQKVCEKVKQKVQTNYNEVAEELVNEYFDNIAEVPSDPEKLQYDTRNIRRRVYDALNVLMAMNIIEKEKKEIRWVGLPTSSLAECRRLEEEKAQRQERIRQKTEQLQELIVQRNRENERVNGRPLDSTILYLPYIIVSTNKKTNVECAVAPDKSEYLFNFDRPFEIHDDIEVLKRLGLAYGIDRGEVDPAYVPHIKFLTSFIIVKATMQVTAHKTIGQITFFKFFYRVQILPRNDFKFVADKIRLAAVSY

SEQ ID NO: 120461 - protein, 153 aa, Heterodera glycines
MNKAFVKTALCSKSRNAFLFKRLVSPVQIGCRPITGGGFGHPMTRQKMQMYSPEMRAVNYQQKRTHMHAILTKKTVEDRVMLNLHLFDKVDNDKLTFDSDFFKDLGIDSLDFVEFIIAIEDEFEFEIPDGDSDRMRTPRDVYNYICDKCDVYD

SEQ ID NO: 120462 - protein, 193 aa, Heterodera glycines
DQVQQQRVHLDDEGQNGTLELDADQFAHSSSTNTDTDSDEIVNVARKKPTVFEYFCMEVSRRYSLQNEKEQYAEKRRKVYAFLRIPVELEKFIYYGFRQCLDAFCHTFTILPIRVLFNLFACSVRLKRWSAADTCDILKLIIIFCASWFMQFVDTSVVYHIVRGQGIIKLYIFYNMLEVADKLFSSFGQVRAC

SEQ ID NO: 120463 - protein, 429 aa, Heterodera glycines
MTCPQKISDSSPLAINSGLNIFSVPPTNVSVVRSFFRQVLPLATITQESPYLFRLYSDNLWTDLSRVYLYLELSIEKPGANDKWVAIDDADTSVSAIQGIGQTFVQQLKVTVGNTEVYDSGNLYPFKAYITNELSFPINAKKNFLGSTGYYHTVNQDDSSDDGYKERCKIFKGGKNAQFLSRLDFDLGNQELYLLNNLDLLFTIYKAKDVFLLQTLKANDSTKYRLTVHDVKIYAKMVEVQPSLNMSLYKTLEKQPATYAVRKTEIKSSFISVGRYEFEYNVFSATIPRRVTIALVGNSAFHGDYKLSPFMFEPFDLREISVHAGGVVYPAVPYKLNFSNDHFVSAFVDMYEALGMANSERSFDISMAQFKKGWTFFVIPLTSTLDDSCGFELLRNDSFLFGHRRIEAALLQRAEREAEILRQYAENQQ

SEQ ID NO: 120464 - protein, 272 aa, Heterodera glycines
DMENDAMFFGGSAIRKVLITTSPRAKLKTFKLCFELKKVIPNAEKTFKLCFELKKVIPNAEIVSRKNVAIKRVVRQAIERGFSDLMVVHEDRKKPNGIVFCHLPNGGIVFCHLPNGPTAFFKINSLQYSKQIKDVGEATEHYDVGEATEHYPELILTNFNTRLAKTVSRMFACLFPQKADYGGRRVVTFHNQRDYVFFRHHRYEFKKEYEFKKEGQKAALHELGPRMTLRLKWLQKGTFDTRGGEYEFYVKRHDMEKSRRHDMEKSRRRFML

SEQ ID NO: 120465 - protein, 390 aa, Heterodera glycines
FNFLKRFHLILTRPLTDLFKLSLKSGKLPKIWKTSIILPLFKNGDKNLASNFRPISITCLRKRSTTLQLISTLEDWYNAILLNKKIDCIYLDIIKAFDKVPHELLIYKIEKIGIKGNLLNWLKDFLTNRTFKVRINQQFSKKFPIKSGVPQGSVLGRILFLIFINDLSPVIPERISLKLFADDTKIYLCYDTEFQRKKLNEALHCVCQWAQMGLQFSPEKSASLYLSKDNFKVPYQFNGKTIKTQTIRDLGILIDNKLTFKSHISSILQKAYLRSRTLFQKIKSKSSKTCIKVYKSYIRPLLEYSSENWNPHIKKSNYSLEKFQKFFTKKVFLKCHLPVLQYSDRLKYLNISTLGNRRKYLDLITAFKIIKQETHLNPLKFFSLKNGHTH

SEQ ID NO: 120466 - protein, 201 aa, Heterodera glycines
  unsure (1)..(201): unsure at all Xaa locations
SIVRPFFDSVXRWADRDFGEDLRNFLEEISYSDLASYAQLIHHKDIIIQCLLRHLADRSLSLPAFCDFCSAIATDLRDDFHTHFWQIFDAISNLVLASKGKEQCSDNELECTFRAMEQIVRINFRFISARLKQLFSRLLPLFAFPSDGRLRFISARTFSFVFLKSPFPHKLAKFLLVKCFSDCGHLRDGLSLFFFDAFLGV

SEQ ID NO: 120467 - protein, 302 aa, Heterodera glycines
MAQAVAAVAPAPNANAASAHTTQPQVMAPSYPLASLYVGDLHPDVTEAMLFERFSNAGPVLSIRVCRDAITRRSLGYAYVNFQQPADAERALDTMNFDMILNKPIRIMWSQRDPSIRRSGAGNIFIKNLGKEIDTKAIYDTFSMFGSILSCRFVGKFVPRTAREKQIGDPSSRFTNVYVKNFGEAMDSEKLSEVFSQYGEIISAKVMEDDSGKSKGFGFVAYKDHKSAARAVEKMNEVSVPGSEKVEQKFTVCRAQKKSERQAELKRRYEQYKAERIQRYQGVNLYGFCLVGGNFSQILGFC

SEQ ID NO: 120468 - protein, 98 aa, Heterodera glycines
YVKNLHDTINDETLRSNFESYVTSQVQRFVFNGLLVMCDEHGRSKGFGFVCFEKADEATKAVVEMNNKIIENKPLYVALAQRKEDRKAQLASQYMQRL

SEQ ID NO: 120469 - protein, 200 aa, Heterodera glycines
GRRRLFLRFYPSLKALLFLVTLLFQLAFVFSFSSVPSLSLLLAKCRLEKLTLSDVAQFDAEGQLPFHLRRTNVFARLWRSLVSLPSTLGRLFTYALFLVQFLEYFYSDELGRRFGQFVEGRRNIRIPTHPFNNLPTEQQTLCMEVDKCPICRRIRKNDTVLTVSGYVFCHSCIFNFVRIEHCCPITSLPATSNELVKIYN

SEQ ID NO: 120470 - protein, 436 aa, Heterodera glycines
MEKWGTTWTKNIAEEDGLLQLQARRKNSTKCLDRKRLEKILREKEEKQRLKEIETPDEKRTRRLAKKLQKEERRRAETINGFPEVIPYTDLNNPFNDTNLTDTFIWKKKWESEGKANVSVKKAEKVNRETIAKNFAEMEQLKRNREARDAAREDMEMITRDQERRQCDWSRTEDVYRLIDGHKNKCYWDDIETVAKNGMKRLLDTRKRTADIGTVHSSVQEEVHKIFKGKTYDELEQLESQITARISNANRGTDVTYWESLLDSLRPFMAKQRLKELHTKMTQLRLKIIRQEQINQMDKSDDRDQVEEETVEKDSGETDEEKPSEDELEMEIEQKAKLERAKYEDKQQTVQQETKTMPFTIEQFIGADDEQREQMNHFWFNRYVKAKDKRMLEIARQGMDQDEAEFSVEEKLEKQNFLWSDKYRPRKPRYFNRVRD

SEQ ID NO: 120471 - protein, 336 aa, Heterodera glycines
YQFGFVRNRSTTFKLITVVEDWYEATINGKNVDCIYIDFQKAFDSVPHNLLLYKLEKIGIKGKLLMCIKGFLSNRTFVKIGDSLSSSKKVTSGVPQGSVLGPLLFLIYINDLPDALPSGVKIKLYADDVKLYICYKAKADTEIMHNALHNLFEWANKWQIKVSIQKTFIYLGSKNPKETYKFDGNTINAVDTIRDLGVNIDNKLQFSDHINQITRNAYLRMRSLFRIIKSKSSKIWITLYKTYIRPLLEYAPEVWNPSLQKNIKKIEKCQKYFTKRVFFKVREPFLNAAFRQFHTKRLEYLQLPTLENRRKLFDLFMAHKIAYGRTDLKLFSIFNP

SEQ ID NO: 120472 - protein, 306 aa, Heterodera glycines
MRKLTAPNGEWGYLDATDQVVPIQLIGHTFIRDMKIAINGREIFNSNSLMAYKTYLSHELSQSLEAKVSHLTAAGYDREDANNLQNANSEGFKSRRQRYLGGRTAQYIAKIDADLFNVPQYLINHCEIDITIQPHDGNFLLIDTLDPPGQPYSIELVGLKLYCKKVSLMDGLALKLAKKLEMKPARYAVRKTMMEALFISPGRYEFNANLFMDQVPRRVTMGLVANSDYVGNIKRSPFNFQHFNVHELSVVANGRSYPQAPMTLTVKIGNLSAPTMTRKRRLVLPTLHMEMELIIFLFAHSLYLCV

SEQ ID NO: 120473 - protein, 50 aa, Heterodera glycines
MAAHKTFIIKRKLAKAAKQNRPLPHWARMKTGNRIRYNAKRRHWRRTKLK

SEQ ID NO: 120474 - protein, 385 aa, Heterodera glycines
MYNDEKMVVRPTQLRGFWMHNSFLLESGKRPVKLYTNYSILLHLANEEMADFDKHAAQREAESLRTLAFFGVCLSTVATVIAVLSVPFAYQHFQQIGAQMQNEVDFCKMRSGNMWREVTRTQAYSKVSHDSRHKRQAGGCCGCGVSPPGPPGPPGPSGQPGGDGQPGGSGQPGAPGPQAARQLLARTRQAADACRNVRPPSPDSPARPDPPDPRDRTANPDSRHRPRLLAAPDHRDLLDPMDSPATPESLANPASPANSPRARPSLDRLAHQDPLASPDSPARTDSPASLETPARKDTLATAEAPANPATPEAAASPDSPEHRDPAANATIAHRPAPPPATECDQSTIDNWRRTPTDDPRGCCPFVSHHFPDHFGISKTLIGQFS

SEQ ID NO: 120475 - protein, 146 aa, Heterodera glycines
LLRSKRQWGCPSACSPCMNSAQCQRMNSAQCQRYQLATVCVLGCCCPAQNNGNSGACDGDPAVAACLNGLCGQGYFCNARNFCCRCQSGTSPGPCVNNLCPPGYACNTNNFCCSLGSGSVLGPCVNECPVGYACGAGNLCYPVTGS

SEQ ID NO: 120476 - protein, 217 aa, Heterodera glycines
RCRSRVVVYFRTEQFNFFVFLIHDLFFHLCSVPLRRMDTVRARLALTGSLEQFRKHRTESLRRTVERMNNNYNNNEEVGTEIDEVGTEIDELLRNYMDAQYYGDISIGSPAQNFTVIFDTGSSNLWVPSKKCPIYDIACSLHLHHKYDGAKSTSYQPDGRKVAIQYGTGSMKGFVSKDIVCMANICVQKQEFTEATSEPGLTEPGLTFVAAFDGILG

SEQ ID NO: 120477 - protein, 352 aa, Heterodera glycines
MPRNSHAIGIDLGTSASRVGVFRNGYFASIHNDRGKRMMPSYVAFTDSGPLVGEAAKAQLAINPSNTIFDFFHLIGRKFVDRAVQANINRWPFRVVPGEDGRPKIAVQSNGKQQTFTVETILSMLLAKLKHSAEAFLGHTVADAVLTVPTHFGHSQHQSVKDSAKIAGLNVLRLLSAPTSASIEYGRDNYWENVNVLIFDLGASNVGVTIVNCEDGIIRVKSCVGDTRVGGDDFTNRMVNHFVAEFMRQHGYMLSWSPEARMVNHFVAEFMRQHGYMLSWSPEALFRVRAACENAKCTLSLYTEDSLGFQPLFFGFHFIITIITLRFSIELDSLLISSREGDEALRSKQLDK

SEQ ID NO: 120478 - protein, 196 aa, Heterodera glycines
AIYPTLYTVKINFSSVWFSNVEMGPPDAILGITEAYKRDTNPQKVNILGITEAYKRDTNPQKVNLGVGAYRDDQGKPFVLPSVRQGKPFVLPSVRQAEQEIIAAKMDKEYAGIAGLPDFTEYAGIAGLPDFTASAIELALGKDSEVLKAKRNATVQAVSGTGALRTGAEFLSKWSHRKVVYQPAPTWGNHVPVFKC

SEQ ID NO: 120479 - protein, 356 aa, Heterodera glycines
NMLKPFSHLNSIQCTKHLLVSKRPMHIWMPDAQFMRQYGPSFGQWLNSKTQIDPEDKVGLRKLASMEKISHISWNDFACEFREAQIDSMILNFGPNHPAAILNFGPNHPAAHGVLRLVLKLEQEVCIKASPHIGLLHRGTEKLIEYKTYTQALPYFDRLDYVSMMNNEQAYSLAVEKLLGIDIPPRAKWIRTLFAELTRIQNHIMAITTHALDVGAMTPFFWMFEDREKLMEFYERVSGARMLMEFYERVSGARMHANYVRPGGVAWDLPIGLMDVAWDLPIGLMDDIYDWCTQFPQRIDELEDTLTENRIWKKRLIDVGVGSADLTPNLGWRGGGDLTPNLGWRGGGGGGVGERE

SEQ ID NO: 120480 - protein, 86 aa, Heterodera glycines
IQGITKPAIRRLARRGGVKRISGLIYEETRSVLKVFLENEIRDVVTYCEHAKRKTVTAMDVVYALKRQGRTLYGFGGAGRKERRRA

SEQ ID NO: 120481 - protein, 519 aa, Heterodera glycines
QPTAAGRPNSGQSKSLDFQQSADHRHHNSRQSPFSSYMKHHQTQQHHSLRHGDNDVEDAIELLSFPQRTREEIVSLLYNHIKAVNSIYENTDFHGINGINFAIQRTTIYTPDTCAGASSANSAATVGNNPFCEENVDVSHYLNSNSQKDHSAFCLAYSLTYRDFLGGTLGLAWVASPSQSTAGGICQRFQRYNEQQRGGVNRSLNTGIITTIFPPIASLPCPTATSSCSPPAPPGTSRTTPRVSKCSVANISEVLYEVLGQSPKNQQFGRKKNCFTDQLKSFCGNQIREDGEECDCGFTKQDCHENQDQCCAPRENNDERTMCRRLAGKKCSPSEGICCRAADCSFVQRNGRVCREESECQHEQKCDGTQAKCPDSRNKPDGKACQESTKASRARWLNLCAPWHARLFPDRGQAGGLVPVGLPNGSGYGQAWVLGIVSYYNVTSGCQAAADIPRLTVYTQEGRKSGHLLLPPGSPCNDYQGYCDIFRKCRSVDSNGPLSRLRTLLFNSEKIQEFKEWVK

SEQ ID NO: 120482 - protein, 122 aa, Heterodera glycines
MLKNNLLIRGKSVLFSLPLRAFSLSAQCANGEPIRRVVLIPGDGIGPEISSAVQKIFEAAKTPIDWIVSGVVQSIKLITEQASRRVARFAFEYARQNGRKEVTAVHKANIMSSERPIWTRFV

SEQ ID NO: 120483 - protein, 126 aa, Heterodera glycines
MSNNDIIFGNEEGVNYLAPWTYSCLIKTSIDRLKTALSEHLQEVFRQIDRASPSFLYDFSKLLLIESGVAGTNVQESYLRMHANAATEELELPQFAHIAEFQYLSMRAVSLCKVLARIPDEMTDRF

SEQ ID NO: 120484 - protein, 154 aa, Heterodera glycines
MNEEYCFSTSTVVAQSWAQTNFRPVDEQPNSLVDTLIAKLSCTTFEQFTSEVSAQDIHKLCDVTVGVLQQQSMLIRLQPPVVLCGDIHGQFRDLLRIFKTMGFPPDKKYLFLGDYVDRGTQSLETMVLLFCYKVKYPDSVILLRGNHECSNMNR

SEQ ID NO: 120485 - protein, 167 aa, Heterodera glycines
RALAHIDNVYKFGALDVYGYMCKTNLASNTAFRGFGAPQGMFATETIMKHAAEQFGIDVDTAGALVNVYTDGSVLISHGGMEMGQGLHTKILQIASRCLGIDVSTIQIIDTATDKVPNASATAASIHSEPPDFVEGRGSESYSYCVYGVGCAEVEVDCLTGDHRVQF

SEQ ID NO: 120486 - protein, 291 aa, Heterodera glycines
MQLKSSSSCETTDSESDIECDPNVLPEDKVQQIQFDLARGQGNISSSSDDESSDEMFDQKTGENKEGEEEDNWGELDKEVRRVEWASSKLAICNLDWGNVRAADLMLLFNSLKPNEAKIHSVSVYLSDFGAKSIEREKRNGPMLKVKRFNRKANEREEEDKLEDAFIGSDSEEEEKDKQNQRNAKRDMLLAAAREGLLGNSKAQQSKDEEKDDEQHENVEKEKADEKERTRNESDGEDREITDEDSEEEAVDIQRPKRKTKFQLYLERKKQLKQERKQEEAKRRKRRRGDE

SEQ ID NO: 120487 - protein, 267 aa, Heterodera glycines
MNERTKQIDVEDDSRFMDLAKAPMFREMRKKEQKVQIDDRFKKLLVDKDFREDAFQLMDRRGRPTTKTNRDAHLSHIYELYHDEKTAPPSVSGEMQLKSSSSCETTDSESDIECDPNVLPEDKVQQIQFDLARGQGNISSSSDDESSDEMFDQKTGENKEGEEEDNWGELDKEVRRVEWASSKLAICNLDWGNVRAADLMLVGTKNVDSINKEIALVFTNKLDSVIQLTKTERSENSLGFCLFVGFWSGKHRERKAKRTDVESEAIQ

SEQ ID NO: 120488 - protein, 572 aa, Heterodera glycines
MCKWTTCDNGCRTENRADNSGVVVQANRTVIVGLNASAADVCECPAYSPKSECDRTVCFNGGVCHDTRPGTFCECRNAQLTGFRCQGNTRSFDGRGFAWFKPLPACTSLNISLRFMTKQDGVLLYNGPMGDPHLDALSYNDYLLMYVEKGMLHAMLQFNGKEPVDLFVEQMVADGRFHRATLSQQHKKLRLVLDDCTTMEVGAQQQQQKPNTAFCLTSRDAPDDDERLNIAAPLQLGGLAPLSGAEDYPSAVREHALGNFVGCTRELVVNNDHYDLYRPIHAEQSSPDCSMFWGSSCAGDSASSSADGRANHLTESASVQLASTFCNGHGECFVESMDQQVAKCECEPGWEGERCDRPINWVEFTSRDSFLKYILQVQPAYQESRLRVLFLPGSTGMGQLASAIGQNQPPAYMKLDINRVQLLVDGQYRLLRELVPDKETALFVARTFFAGSQQGQQGFQGCIGKFRYNSFEMGLRLDESTVEGTLNVAAGNELQLNMAPGGGPAAPTRPHREEDSEGRVRRYRPHQHRHRREPPNPGIVRLDTVKGVVQGCSQVHHCHANGCLHEKTKAAI

SEQ ID NO: 120489 - protein, 382 aa, Heterodera glycines
QNYIDLSKCYLLSEFRIRKENANGQLVDLAADEVAPIQLIGHTFIRNIKMSINGREVFNANSLMAYKSYFSHELSYSTAAKDSHLNAAGYYRDTGGVLEVGDGCTARRNLFVGSRTAQFMAKIDADLFNQPLYLINFCELDIEILPNDNDFVLIAPPGVAAATRYHFEVVGLKMYVKKVSLMDGLALDIARKLELKPARYAVRKTLMKSLFISHGRFEFTSNLFMDQIPRRITMGLVANADYVGTVSRSPFNFQPFNVREISIIANGRSYPQAAYDLDYPNGKYVRPFNDMNEAVGFSNSSESNGITLAQFGTTHCIYVFNLTSSGDDQAALFDLIRNGTTAVSIKFNQAVPVGGIMLVVMGECDSLVMLDKNRSISTDITI

SEQ ID NO: 120490 - protein, 277 aa, Heterodera glycines
VADHESDIRFDQFRIPDSNKKSKIQNSLMFESLKYPDFWLSNVDGGPSAKFLVSNVHTMSELNMVGNCLKGSRPILSFDPEFDGKSHLRLIKELLVNTFKTPNHHPRSQPFIDTFKTPNHHPRSQPFIDHVINFAVTEDGNIWFRNYQVAENNELMEIGPRFVLQLIRLFDNSFCGAVLYDNPNYQTPNAIRRQIKLQKAAEFKQRQGQREEGKVKERMIKEVEMEDPLGEVFDTEEKMEEEEKTEEKEEKKKRVNAAKALEKRILKKNKKKRKSTG

SEQ ID NO: 120491 - protein, 281 aa, Heterodera glycines
MASWTCMKNSGMYPYMDERQGDKSLEFYRKFFIIICGLDSIEARRWLNATVCSLVEFDDGNNPKSNTIVPLIDGGTEGFKGNSRVIIPFMTPCIQCTIDLYTPQVNFPLCTIAHTPRLPEHCVEYVKVVLWEKEKPFGQGENGSCALEALKLASNISCSLNNYLNFANVEGICFNVVALERDPECLVCGQKSVQMYSVREDCTLSGFLDDLKDKYQLQNPSIRAGSTFLYEINTLMPEMETASRKNLCKTLKELHVTEDSELLVADEALTRSIVFRIKYSK

SEQ ID NO: 120492 - protein, 504 aa, Heterodera glycines
MNIPTNGDEYLDRGESAKREKRFVFECAWEVVNKGIYTVLRTKAPISTDELGDQYYMMVGGQHQMEGESNQQTLHEPEGFMGPYVEERVRLEVEVLEPETANLKYTLDQMYDWGFRVVYGRWLIDGYPKVLLFDVGIWKLNIATLFTTHATLLGRHLCASGADLYNNLAMFDIDREAGRLQIYHRYCLERAAVNMAHVFTTVSEITGLEAEHLLKRKPDTLTPNGLNVVKFAALHEFQNLHAQNKEKIHDFIRGHFYGHMNFDLDRTLYLFTAGRYEFCNKGGDLFIDSLAKLNYMLKTSEDKRVKGVTVIAFIIYPANANSFNVDSLRGQAVCKQLKETISKVKDSIAARMFDSCLRGRIPDMEELLLPAERVQLKRCILSSKRDTLPPICTHNMVDDANDQVLNAFRRCHLFNEETECTVMGIPSVTTNLSGFGSFIEKQVPDHDNYGLYIVDRKNRSPDESIQQLSSILYSYCALSRRQRVIIRNRAERVSELLDWKTLGG

SEQ ID NO: 120493 - protein, 499 aa, Heterodera glycines
HKFGKSSEFDLTKRLPSPMLSDGSPSPQALPNYAQFAYSSSVDYALIAFGTVASVLHGAGFPLLSIVLGGMTSVFLRAENSDFVHGQTPRFLRAENSDFVHGQTPRQNATNSSAISPISKEEFQSEVAAFSVYEEFQSEVAAFSVYYLVLGFVMFVTSYIQIACWEAVAERIACWEAVAERVAHRLRHTYLKALLRQEIAWFDTVQSGNLTARLSDDLERVREGLDLERVREGLGDKASLFIQMFSAFVAGFVVGFFYNWQMALVMALFTPAIAFTGAALFTPAIAFTGAWMGRITATRTQVEQEKYAVAGAIAEETFSSMRTIHALNAERQEMERYEKYEKALEDGRRTGLLKYLYMSVGFGATHLITHASYAVAFWFASRLIVWDEFASRLIVWDEQFDRGTVFIVFFSVMSGSTALGAALPNFTSISSAKGAARHVLKVINREPKIDAYSEGGQMLREVKGEICFRNVRFAYPLRRDIEVLKVLKGVSFKVCPGKK

SEQ ID NO: 120494 - protein, 501 aa, Heterodera glycines
LAFLCLLLALLYLKTISLKNFQNHLFKFFFYSVTLRRMDTVRSRLAAAGSLVQFRKHLRQALRQRLDRLYSDKMARADVAFDTDAAAREGIDEVLRNYMDAQYYGDISIGSPPQNFTVIFDTGSSNLWVPSKKCSFFDLACRYHSKYDHKKSSTYQPYHSKYDHKKSSTYQPDGREVAIEYGTGSMKGFVSKDTVCIMDGMCVEGQEFAEATSEPGDTFVNTKADGILGMAYPAISVQKLATVFNNLVEQKEVEEPVFAFWLNRDPSSEFGGQMTVGGMDKRRFVEPINYVPVTRQTYWQFKVRMEQNGKSKIACRNGCQNGKSKIACRNGCQAIADTGTSLITGPQKDVEAITSLITGPQKDVEAIHKHIGATELAQGEYTLPCDSIEQLPHISFNIGGKAYTLTGKDYVWKVNSRGKTSCLSGFMSGFMGMEMSSTADKLWILGDVFIGRYYTVFDAGQNRVGFAQAKDENECTFSEPIEPKVDDNDDADDADDDGMPA

SEQ ID NO: 120495 - protein, 233 aa, Heterodera glycines
MLHLKTKPQVGLTNYAAAYATGLLLARRHLNKLKLDSVYKGKENVDGEDFDVEQEGDNPNPFTCVLDTGLARTTTGAKLFGVMKGVADGGIHVPHSLSSLICSLFHSSETRFFGYDPEEKKYSAEAHRDRIFGKHVADYMAHLKEEDEEAYKRQFSQFIKNGIESGTLEEMYKKAHEAIRADPSFTKKEPKKPKEQKHWNKKKYTLTERKHRVANRKAYLLHLKNQQEAALEG

SEQ ID NO: 120496 - protein, 402 aa, Heterodera glycines
VFFGFGTGASLGRTVRFDNRTATMFPSLLKQQLRDLVLRRKSLVEREPEDDTMMNSATGTTTHPGTEKLSRFSWEIVYGIFIFPNSRFSWEIVYGIFIFPNGIAYDPLMARHQCLCAENSNHVEHSGRVQSVWARLVEKGLAAVCERITARKAPLELLRLVHSARKAPLELLRLVHSPTYVTFFAVSPTACLKMDPAELPLKSFVQLPCGGIGVDSDTYFNDLPCGGIGVDSDTYFNDASTQTAAKMAVGSLVELCCQVMEGKLQNGFACIRPPGHHAEREQAMGFCFFNNVAIAARYIQQVAIAARYIQQRFATTCARIAIVDWDVHHGNGTQLCFEADPNCLYLSMHRHDNGNFFPGNFEKMYFKFANRFHYFVSFIHSIFFQTFSFSLLFPIFLSFCPN

SEQ ID NO: 120497 - protein, 39 aa, Heterodera glycines
MERLEAVVHERNDAFLQLETGDSASPPKRTVTSFMGFTY

SEQ ID NO: 120498 - protein, 150 aa, Heterodera glycines
MPSPFPLSLYTKAFEVQETLNELYFRISCDHEFLLETYKDVIKGDPYIKRCVEIAQQIHDEGVHQPLALSVQRADYLSHWDEQKQCIELKQVGKSDRSKKHSFSDQRLIDVMPKYFAAKFESKKLHLISEVIRNGRTEETLGTSLLVRDR

SEQ ID NO: 120499 - protein, 441 aa, Heterodera glycines
MTFHKIDASSIDSITNAVDFFSIPPTNVTVSSSKVFEILPSNPLTDTPYHFKIHSSQNYIDLSKCYLLTEFRMRKLTPPNGEWGHLDASDQVVPIQLIGHTFMRDLKIAINGREIFNSNSLMAYKTYLSHELSQSLEAKVSHLTAAGYDREDASNLQNANSEGFKSRRQRYLGGRTAQYIAKIDADLFNVPQYLINHCEIDITIQPHDDNFLLIDTLDPPGQPYSLELVGLKLYCKKVSLMDGLALELAKKLEMKPARYAVRKTMMKALFISPGRYEFNANLFMDQVPRRVTMGLVANSDYVGNIKRSPFNFQHFNVRELSVVANGRSYPQAPYDIDYENWKFVRPYNDTQEALGFANSTYGNGIDYFSFLHTHCIYVFNMTNSGDDHGGLFDLIKKVCTAVNIKFKKPVPDGGITLIVMGEADSIYFLDKNRTIATDTTI

SEQ ID NO: 120500 - protein, 668 aa, Heterodera glycines
MQVKNHMWVFVNSLIENPSFDSQTKETLTLQAKSFGSKCDVSEKFMKEAAKCGVVDLVLNWVTFKENQQKDKTSGRKTAKLKGVAKLEDANEAGTKNSKRCTLILTEGDSAKTLAVAGLGVIGRDYYGVFPLRGKLLNVREASHKQERKQRREQGEHDIYLYNKDTRSVTFAEFINKELVLFSNTDNERSIPSLVDGLKPGQRKVLFTCFKRADKKEVKVAQLAGAVGEMSAYHHGEQSLMSTIVNLAQNFVGSNNINLLLPIGQFGTRLQGGKDSASPRYIFTQLNPVTKALFPSVDENVLRFLYEENQRIEPEWYCPVIPTVLVNGAEGIGTGWSTNVPNYNPRVLVANMRRLIHSEQLEPMIPWYKGFKGRITRMDETRFETRGLINIIDNGSNDLVEITELPIKTWTQSYKERVIEPMYDGSDKKPQLLQDYKEYHTDQNVHFVCKLKQDELREAEQKGIYDVFSLKSSVNTSNMVLFDAAGCLRKFDSPEQICLEFFECRRELYKKRKRYLEGMLQAQSDQLSEKARFIVMKIKNEIHIENKRKSAIVEQLQKHKFRPDPVKRWKDEQKRKELELCGEANVSDDEEDEDEHADQAVDEALEKRCSDYDYLVGMAIWKLSMEDKDKLLAESESKKKELEVLKKKEWSDLYEEDLEAFTKALDTQ

SEQ ID NO: 120501 - protein, 371 aa, Heterodera glycines
FFTRLLPPIAFSAIYSALFTKPNRIARILAGSKKRILTKKPRFLSTFSQVVITWSLVGVQCAIVAVSVMEEMPQAGFDPNLMPRRMFLICSISTRAFLAPFVWNFILILFCTLYAFKTRNLPENFNEAKFIGFTMQVYFFVDIHLLIYLRYCTLVTWGAFVVLYVNAVNKHLLIYLRYCTLVTWGAFVVLYVNAVNKALTASFTFSLSASIALCLLFFPKVFIILLRPEKNVRSSYTTTKLIRCHFGNSQALNDSKQFSSSKARNSTQSLSLGSGTASLHVANHNSVAGTPTSGLCPRRDAFAQTELSTIVRSNHHQQARQRHHGTGGFARFTRTFSVMGGTHGGYGDNAAAVQRAGDRLSESRGGGSGSS

SEQ ID NO: 120502 - protein, 168 aa, Heterodera glycines
DTDEGQKQQYCVTEIEHDPKILLERSQDATDWALSNGLIKLVPAMCQNCRIKMQNQSFVAEFIPISLYPSPFPGKLFRQAMEVHKVITLRAMLLLYFRASQDFAFLKETHRQLVESNEDNKIKKMISLLDGLYEEGIKQPVAMFCQRSHLGPILSPGNLDRDQPRLFG

SEQ ID NO: 120503 - protein, 123 aa, Heterodera glycines
MKDVLILHNINQIVQVVDDDRTFCLLGDQMGKIKIMESDGHELAILCIEGRIEQIGIFEEISSRFNSKELTDVTRVDCGGGSVLPGMADAHSHPVFSGDRVHEFAMKLAGETYMEVPMEAKKR

SEQ ID NO: 120504 - protein, 101 aa, Heterodera glycines
MFDKNNHGYIMATQIGQIMRAMDQDFEEKKLRKLIRKFDADGSGKLEFEEFCALGNGYLSTDTLKNLLREIEPSLSDKELQSAVEDIDEDGSGKIEFEGGE

SEQ ID NO: 120505 - protein, 125 aa, Heterodera glycines
MFKIFVLFNAFLLIKFAITDEEREIPPGGEVEQDVNSEMIKTLASRAMDKMNQESNNTLMFIPVKVLSATSQPVAGVRYELRILVGKSKCLKKVYKVEVYQRAWENFEEITFEQEKIANMTGCLG

SEQ ID NO: 120506 - protein, 462 aa, Heterodera glycines
MGIVQDTLTAVRMMTKRDVFIDYARLMDLLMHLPNWDGKIPQPAIIKPKPLWTGKQVFTKIIPGDTIADTSTYRDIQETIRKAKQDVIDVIEKAHNDDLEPTPGNTLRQTFENHVNRILNDARDRTGASAQKSLSDANNFKAMVVAGSKGSKINISQVIACVGQQNVEGKRIPFGFRHRTLPHFIKDDYGPESKGFVENSYLAGLTPAEFFFHAMGGREGLIDTAVKTAETGYIQRRNATNRAVIQLRYGEDGLDGMWVEDQTVPTHKPNNNLFENEFKLDLTDERQLRKLYTENIVKEITNSADALHSVESEWRKLEEDRNILRSIFPRPSTKVYLPCNLNRLIKNAQKIFHVSMNKPVDLSPVRVIEGVTELTKKLVIVSGEDSISIQAQHNATLLMNILLRSTLCAKQMAKYHKLNLEAFEWLLGEIETRFDQAIWCWYSIFMFYRLRLLHNQAKWLAH

SEQ ID NO: 120507 - protein, 204 aa, Heterodera glycines
TNIRRQIPSNQTCFGDGQCFWQHFVVRNLLTGKVALVRQPIVLDSLRMRMARLSGDGSLIGMLANSSDIFVFDFKTMEHLHTFRGGENVVDFCFAPFNRQILYSLAVGGAVNTFDLARCTGQDTFFDQGCVRATCLSCSPSGQFIACGSNTGIVNVYDLTKLSPSLAKSNAPRPVRMFDQLTTLVSFVRFNNDSQMLGFGTAVP

SEQ ID NO: 120508 - protein, 371 aa, Heterodera glycines
PPFQTLYLHNAEVWCVKFFPCGNYLASGAKGNQVLIWRVIPTQVHIHQNPTQVHIHQNIHILQEIVGISSLSWSQDSRYLAVTSTEQANGVGVGLSVPSSVSPEEYVHYTGDAFTTVAFFKDGSHKLACAGEKGHFHVYVSESISAKMFEGFRIRCLYACMDGKTVLAADTHNRIRAYDFETMHEQTLIQEASQIITFCVDRKEKYCLVTTKTEGIRVDRKEKYCLVTTKTEGIRLWDLRTNDLVRSFFGSKHNEFVITSSFGGPDELFIASGSEDNTVVIWNTRRTHPVKRLINTVVIWNTRRTHPVKRLIGHTSTVNAVSWNPVDNSMVASGSDDGHTSTVNAVSWNPVDNSMVASGSDDGTIKWGGGR

SEQ ID NO: 120509 - protein, 181 aa, Heterodera glycines
QKDNVKSEVGDVPNGGTSFTAQLSDDFTIQVNWDWASNTNEVVDSFDNMQLKDTLLRGIYSFGFEKPSAIQQRAIVPCCSGRDVIAQAQSGTGKTATFSISVLQRVDENAPDVQALVMAPTRELAQQAIPPTLPIGTLWTYLSPFDRFFLLCVHLAKTDKIKMFVLDEADEWCLAGQRPNL

SEQ ID NO: 120510 - protein, 348 aa, Heterodera glycines
MRLVLFPEPLLVEHVAQLKLETTGEGPVDRVKVQIFEPSGNEIAVVSRTYADGTLRAEWQPASEGRHRVLIRDGSRHICGSPLPVSVLDLSAVRLVGLRNANAGVEQNFSCEVHNETAETRCERRVIHSATSRATLFDPQGSPLPVRCYKQQDDSYWVEFTPEICGAHSIEVMFGDQPVPGSPFHCEVVDPRRVQVHVSRKGAGTGPLAVELTDPQNEPIKLDRVLNSSGDESFTFVPTRLGPHKLALKLAGFAVHGSPFSLVVEEQKEPCVYGAALDYAIERGQQASMIFDPNNHSGGLKVDVHDPSGAKVKHNTNRRPDDSTEISFRPHEVGIYTVDVQFNNRTVQ

SEQ ID NO: 120511 - protein, 89 aa, Heterodera glycines
MEKSVTESLVFHDEVEIEDFEFDDEFQLYHFPCPCGDRFEITREQLESGEDVATCPSCSLMLRVIYDMEQFVKLETLRLEPTNAVEAVK

SEQ ID NO: 120512 - protein, 162 aa, Heterodera glycines
MYNDLFQQMLKLEEEKYDINFVVSQKDAEISEITISVNDLRGKFVKPTLKKVSKYDNKFRKAALTEGESTAPKEDFRSKLKTVEKKNVMEELESKQKNKAEKPEWTKKVEKDATGRRASQASSKGGGASEAEPTTPKLAKPTPEEAEEEEEPEVGDEEEDEE

SEQ ID NO: 120513 - protein, 70 aa, Heterodera glycines
MQNHWEIILHLPLLCEDKNVPYVFVKSKAALGRACGVTRPVIATSIIQNEGSQLKSQIQKIKEDVEKLLI

SEQ ID NO: 120514 - protein, 220 aa, Heterodera glycines
MADINAILDGTDGDEALNLNDLDEKEVLGDDEEDQHQNQHTTKEEVEDLYDEAMAPSGALSEKRESAEVISSLPSSIQHKSSFAMPMMIKSEPGIAGGSQSGKRYCCYIGNMTWWTTDDQLQKLIQTLGVDDMIDVKFYENRNNGQSKGFALAVFASEPSVKAVMEKLPSKKLHEQSLAVLPYTKQSLAKLEEATKRYDQVPSCFCKMLSYGSSAFFAFL

SEQ ID NO: 120515 - protein, 368 aa, Heterodera glycines
MSIKKLDSDTNKYVNLKVNEQAATINMIGATWIKNLKITVQGREIYDSNSLYAYKAYLDAELSYSKNVKESDLQASGYYVDSENQDGTDITQQGFELRRKLFSQSQTAQFITKLDADIFNQDKYMVNGVEIDIQLTPNDNEFMIMAASDDKYRIEITACKLYVKTLEVVDGLALDIQKKLENKEAKYAHRKTLIKSTFISENRTEYNGTLFTGQLPKRVILGMVENAAYVGNQKKSPFNFKPFDIRSVTLMANGKQWPAAPFELNFNKNLYTRAFHEMNEALGMASSTDSNGISLEKYRKGWTIFAFNMTNSMEDNEGIDLITEGTTTVCIQFRSPVPSGGITLIAMSEMDSILILDKNRTVMTDTTI

SEQ ID NO: 120516 - protein, 596 aa, Heterodera glycines
MGTEAWIQAYREIRLVCQFNYDVHRNRFVLNTDPRYVKKVEISPQLAYILGFNNTEFMQPEIEAQFMPDMSGGVSSFHVYTPDLIEPMMIGDVTAPVLRIVTIRGDPDQEVSEILIEIRTNSGKKCPIFKKMNTLEIDKTLARNNVTRHYYIGCFAADQIPAGAIVKFPHCMVVNLDPSTSRGSHWVCIYCASPLRLEYYDSLGMWPPPSVLIVNHLSRYKQIQYSSIPLQSANSMDWSAFSSSCVQFGGYNIYRGLPYQRGAGVGAVFRSLMRYLLPIGKQIGSAIGRQGMQSGNRVLTNVLEGKDLKESLVSEIPPTNVSVVRSFFRQVLPLATITQESPYLFRLYSDNLWTDLSRIYLYLELSIEKPGANDKWVAIDDADTSVSAIQGIGQTFVQQLKVTAYITNELSFPINAKKNFLGSTGYYHTVNQDDSTDDGATIPRRVTIALVGNSAFHGDYKLSPFMFEPFDLREISVHAGGVVYPAVPYKLIFSNDHFVSAFVDMYEALGMANSERSFDISMAQFKKGWTFFVIPLTSTLDDSCGFELLRSGTTNVRATFNSPIPHGGVEMIVLGEFDQMIMVDYNRHIVTDSKLG

SEQ ID NO: 120517 - protein, 126 aa, Heterodera glycines; identical to SEQ ID NO: 119174

SEQ ID NO: 120518 - protein, 473 aa, Heterodera glycines
NNVFPQCHVPNRAEDIEHVLRERVALLPGVRDREGRPIIFVPADREGRPIIFVPAREVNSHPDHLRNLLTYLYEVTQDDAKTRGFTFVIDMRDDAKTRGFTFVIDMRRGTTWEIVKPILKILQEYFPALIEYFPALINCVYIVKPDKILEKYKISTTKYKFDVQMISLEAMPKYIDFCQIIREGGSLPYDHDEWIELRKDIERILQRMCEILKNLDDIERILQRMCEILKNLDRISTEMDNAEMPIDVQSSQTSIAKHQDLYPIITAVPMDEFTSEIQSLRDRVIISGHKQSNPDLLSVFPNPDLLSVFPQIEMLKQNLDKQRGIVYAKWDYRKKDGIVYAKWDYRKKDLDRYFQLKLFEKDAEEASQFAFNTRHFLTFVQLSKWICSHLNVLSHRFVLIGESETETNRLLKEHKDFADSVNVSSPNDLNVFHFFADIPSHFLKMPSWLPNAGVDPNSIRSEDELPNAMHRHN

SEQ ID NO: 120519 - protein, 116 aa, Heterodera glycines
SFYYAYELVLISFELAFLCIFIPMLIKVKTLTGKEIELDIEPTDKVDRIKEKVEEKEGIPPPQQRLIVEEKEGIPPPQQRLIFAGKQMLDEKTAQDYKIQGGSVLHLVLALRGGMF

SEQ ID NO: 120520 - protein, 342 aa, Heterodera glycines
TPPPPSPPPSSPVSKDKLLLKTPLLLVENQKDASAIELQQYCYQPIVLIHGLTMALKIDLSQFSTKTLIQTAPEHEVEVEVRTQFKMPSYDVNLDQMGSTWAIRSSKSWSTISRYGQYQARSSKSWSTISRYGQYQAESFRHSLKEETEKLRQANPKLFQHSLKEETEKLRQANPKLFQQQTPSTSDTPPESSPYKIIKFGTNIDLSDERKFYVQLKELNKLPAFCRLHSTSNMLSYLGHTVFGMNTVQLYLKVPGCRTPGHLENNSFASVNVNIGPGECEPGHLENNSFASVNVNIGPGECEWFGVPYEYWPVFNFFHFRRNIDFLRGAWWSVSDLVKSDV

SEQ ID NO: 120521 - protein, 260 aa, Heterodera glycines
HMRDKQKAKAAVITEQHRIPTKVTATEEETENVSCKGSDNDETTALIKEPQTSKVQTFQDRFVYSIWLCFCKEVIGVFKPKNEEPYGSLNPKWVKWAHKLLCPCCFGRSCLVPNQANNLQQSFDLLAIQGYLSEAGASLVDQKLGLDIVPRTAIVALAAPTFYYGRIDRTVTNTKEQIARNYPDLGRHFKRIGLPPKVGMTFSLSSSITQAEIHLAGQFPAVCPWLQRCQILARPMGTVSGKDIAKAKPKRIATPNLRKV

SEQ ID NO: 120522 - protein, 170 aa, Heterodera glycines
MVHRSSSSGLSVAVMGKQANKYNTQEGTLLLEWIKKVTGANCINTDGSADNFVAQLKDGILLCKVKNSVEKLIAQIEAGNEAGAQLNQRGDGQGQLHVPADEQLGAVHPLLPQAGSHHAGVVPRRGPGRGAGPLLGVHDAQLVGPNYRKYRNRPFLEYRYSYRFYLNVDL

SEQ ID NO: 120523 - protein, 177 aa, Heterodera glycines
MSWILDWFSGVLNYLGLTKKSGKLVFLGLDNAGKTTLLHMLKDDRIAQHVPTLHPTSEELSLGGIRFTTFDLGGHVQARRVWKSYFPALDAIVFLVDAADLERIQEAREELWSLLQDEQVRTNALGYFMGFLRLPMLHCSSWVTKLTNRMHSEKISSNTYLGVQQYCTGWPIRKSFQ

SEQ ID NO: 120524 - protein, 85 aa, Heterodera glycines
MADAAAQEQKKKRTFRKFVYRGVDLEQLLEMNEKQFNQMIPARQRRKMNRGLNRKHKSLLVRLRKAKLNCPELMKPECVRLICVI

SEQ ID NO: 120525 - protein, 188 aa, Heterodera glycines
MKPARYAVRKTMMKALFISPGRYEFNANLFMDQVPRLVTMGLVANSDYVGNTKRSPFNFQHFNVRELSVVANGRSYPQAPYDIDYENWKFVRPYNDTQEALGFANSTYGNGIDYFSFLHTHCIYVFNMTNSGDDHGGLFDLIKKECTAVNIKFKKPVPDGGITLIVMGETDSIYFLDKNRTIATDTTI

SEQ ID NO: 120526 - protein, 297 aa, Heterodera glycines
HHTVNELSDLIRQCELTTIAATSTLLKSLADLRESDEVSAAAPTDHHAHPYSNHNQLRLLNNGIGTTAANHHNHNHHHHYSHNNRHYSVNNNNSTATALMSNNGGNASLSSSSAASSTVVPMRSAAAASSSGTVTDAGAVPSSSVPSSSVCRVQQRRNALSSTDDAPPAKLMMTPSQHKRKGKAAEMTARLFDMQSSSSSSTPIQPSDAARSHRLARTRQVSRCSQCGQLLIFDAVKCQCCGLLSHKKCLGSVQLWCGEKTAKRLTECGADRRMSIFGVPLSESLRTQHRKVPFILE

SEQ ID NO: 120527 - protein, 396 aa, Heterodera glycines
MPDLSNELWHRFKVVNFNGQHHFSVTPALQHTPQEEKTEPANSSPTIANFFTFVYDGNFDGIGSDYCDGAVALDGRIEPGDMILQVNDISFENFKNDQAVEVLKRAVNTRGPIKLTVAKSFDANRTNYFSVPSREPVRPIDTHAWVQHTNAVRGMTSTLVNAMNAIPEGSEGTPTPIPSGHFPPTSSSLLHTFAPPTSVPSQRPASSSTSTGSGGGAAQTIVGPGGVILSMQQQHRLDVHSDKRKVIQTLAMPNSGLDIRDRTWLKIPIPRSFLGSALIDWLIGNVDGLDDRKEARKYASGLLKDKFIAHVVNKVTFTEQCYYIFGEQSAGELLNLRASFPEDGTLSNMQNQFQHMEIANPHQQGTVLYSNRAQEQPNFIQPTNLGTGTSMVFLAE

SEQ ID NO: 120528 - protein, 353 aa, Heterodera glycines
KPTEYGGGRDAASIVAWLKKKAGPAAKELKSADELKDYKDSAEVVVVAYFKNKESDAAKAYLEVAGAIDDVPFGIVYEADVAKEAELKKEDSIALFKKFDEGRDEFEGNPTEVDDIKKFVQSNRLPLVSEFSQETASVIFGGEIKSHNLLFVSKESSDFEKLESEFRAAAKEFKGKVLFVYINTDVEDNARIMEFFGLKKEDLPAVRLISLEEDMTKYKPEWSDITTENVVKFTSTYVDGKLKPHLMSEEVPEDWNKQPVKVLVGKNFEQVARDDTKNVLVEFYAPWCGHCKQLAPIWDKLGEKAIDYTGERTLEGFSKFLESGGKDGAGPSEEEKAAKEGEEGGDEEGHTEL

SEQ ID NO: 120529 - protein, 184 aa, Heterodera glycines
EFPTPMGGKPLSSQDFAVIDADIDATENLQCIWSVWEVSFAVFPFLFGLMLNDFTLLSKELGMHFHEVHPEEVEVPKCNLCMQELLVNARLLEKFGEDFGITLPNEHSFRSIRFKKDLKSEMAMENAISRYLRRISEGADPTLVDIESLDEESGDGEERDEDGPMVGQTVAASCEAFANSRMNC

SEQ ID NO: 120530 - protein, 309 aa, Heterodera glycines
RNQRSMSLGGPAHESLLSKQHSSSPPQTVELSRAEGDCVVLVVENTRFIVNPALLVVKPDTMLGRMFSLRARTGGGTSDLVRPNERNEYDVAEGLSAACFRVVMDFYHRDFYHRGFMHVPQSISVAELREACDYLLVPFNVHNVKCQDLRGLLHELSNEGARAQFVVYLEDIILPQLVISAERGERECHIVVLLDEDVVDWDEEYPPQMGEDVTQVVYSTPLYKFFKYAENRDVAKRVMKDRELKKIRLGIEGYPTHKEKIKYPTHKEKIKRRFNRSEVVYNYVQRPCTFSGRCKNYFIVALFYWCIFS

SEQ ID NO: 120531 - protein, 250 aa, Heterodera glycines
TGELPLELASVMKHLWADTGVQECFERSREYQLNDSAAYYLNSLDRVAQPGYVPTQDDVLRTRVKTTGIVETHFTYKDLNFKMFDVGGQRSERKKWIHCFEGVTAIIFCVALSEYDMVLAEDDEMNRMIESMKLFDNRMIESMKLFDSICNNKWFLNTSIILFLNKKDLFEEKIRRSPLTLCFPEYTGSNTYEEAATYIQYQFESLNKRKDGQKEIYTHFTCATDTNIRFVFDAVTDIIVKENLRQCGLL

SEQ ID NO: 120532 - protein, 291 aa, Heterodera glycines
AFDIFVRFVGEAHPALRLKKLIELKRFDDALAFAKSYNLPADSVYIELLLYYQEQIQNGKDGTYEEETFKELLQTLRMLSDHNTAADHCVAILNFVNRYEHIKTILDFAKALKITDEYTQKEIARFRYELASYRMLFEAHGPSFERDSPWPQFLSSGSHKEFFDAFCEAGQMTQARLLLSRYSNIGQELQDEKSMKRLLTVFKSTLIGIGAISEFVEIELVPLLLTSNNALNTKIICSTFCDFFVDISLLLERLEPKSFPDASLHFAETFDRAISLLRADCRTSEKHVLFV

SEQ ID NO: 120533 - protein, 62 aa, Heterodera glycines
MPPKPSGKGAKKAVKSTKAVRTGDKKRRKARKESYSVYIYRVLKQVHPDTGISSKAMSIMNS

SEQ ID NO: 120534 - protein, 113 aa, Heterodera glycines
MTDTANRQQRSRGRGGRRPRAHLRDSAKKITKASILRLARRAGVARINAKVYDEVRAALRSYLETIIRDAPNFLFHQGIEPKRQIKKAEMTDGQASLNAFQSRAPLHIPSKAF

SEQ ID NO: 120535 - protein, 216 aa, Heterodera glycines
MATVRPINNDEVRNSSIPDPIAFPFSMHRMVGIIQKKFSTIQVQLKQSTCENVMVLRSRFLDARRKRRNFSKQATEVLNEYFYSHLSNPYPSEEVKEELARKCQITVSQVSNWFGNKRIRYKKNIAKAQEEASMYAQKKAQPSPYGVLSGTSAGAVAVAANSMLSPYASMLHAGQNDLQHQVIASGFDLASSGYNPQLFQMGYLPSQQTSTSSPRQ

SEQ ID NO: 120536 - protein, 284 aa, Heterodera glycines
MIQQTMVQRACKIFKGEKNAQFLSRLDFDLGNQELYLLNNLDLLFTIYKAKDVFLLQTLKANDVTKYRLTVHDVKIYAKMVEVQPSLNMSLYKTLEKQPATYAVRKTEIKSSFISVGRYEFEYNVFSATIPRRVTIALVGNSAFHGDYKLSPFMFEPFDLREISIHSGGVVYPAVPYKLNFSKDHFVSAFVDMYEALGMANSERSFDISMAQFKKGWTFFLIPLTSTLDDSCGFELMRSGTTNVRATFNSPIPLGGVEMIVLGEFDQMIMVDYNRHIVTDSKLG

SEQ ID NO: 120537 - protein, 346 aa, Heterodera glycines
TEKDKVFVYFSDHGAVGVIGFPAADLTVKQLTQTLKEMHAKKMYGELTFYLEACESGSMFDHTLAQSLKIYAVTAANGDESSWGCFCDTNLPGNCLGDLFSVNWMQDSDQENLRTETLRKQFGIVREETNKSHVMQENLRTETLRKQFGIVREETNKSHVMHYGDLQIQDEHVSEFMGKEQAQKRNERMSLSRFSTISAWRGKLENAKYIIKFKKNLRKIRLLKFQSHIVSQKRSFLEQTIKQIVHQLVHDMNNRRQILTTYPQQIRDLDCHNEVVHTFSNFCFKFSENPYALKYAYNPYALKYAYVLANLCERPELDAERIKMALIEQCAEVELSGVISNLKNAI

SEQ ID NO: 120538 - protein, 371 aa, Heterodera glycines
MTSGEQPCFTLIHVANDVEFPSEGQLKDKFEHGDTKTKTDALKKLILMIQAGEKVTSQLMMYVIRFCLPSSDHYLKKLLLIFWEVVPKNIEPFSFAFRFLCKLKEPELLEPLMPSIRKCLEHRHSYVRRNSILAIYTIYKNFDFLIPDAPELIQQLLETEQDASCKRNAFIMLLHVDRQRALDYLSGCIEQVAQFGDILQLVIVELIYKLIVLDRLVGLREIVPNDKVLQELVMDILRVLSTNDYEVRRKILQLALELVSSRNMTKMKLFPLFFLIIILIAKIGSAKNKLQQKSFEEIFGGKWEENLEEKRQIIEKFYKIKEKIKQKGRKHTAKEWSKIERKIVKQLGTNRNYIQKWIKQFVLQKFKLKLE

SEQ ID NO: 120539 - protein, 767 aa, Heterodera glycines
LEINDCFSDSDGILLMKFLEIISGEKLGKPNFLEIISGEKLGKPNRGRMRVQKIENLNQVLDFLKYKRILDFLKYKRIQLENIGAEDITDGNERLILGLENIGAEDITDGNERLILGLIWTIILRFTIENIEIEQTKESGQTKESGERKHAKEALLLWCQRKTAGYPNVKVDNFSSSWRSGLAFCALIHAHRPELLDFDALNPQETIGPELLDFDALNPQETIGNLNLAFDNLNLAFDVAEKHLDISPLLDAEDVNVSHPDEKSIITYVSLFYHFFAKQKTEMHPDEKSIITYVSLFYHFFAKQKTEMTGARRVAKVIGELVEQDGMQEEYEQLASELISWVRRSISWLSARHFPNNLTELRDELAQFNRFRKEEKPPKYREKGELEALFFAIQTKRNASRRRAYAPPEGFLLHDLEGAWSELEKAEHARQGALIEELQRQERLEHRAQLFHKKADVREAWLREISVVLGQFKCSPNAQSVETGKRMMRNIQTEAAPKKERFQLLKELSAELQAERFHGSAEIAQREREIIGRWNAFLTMLEEHELELDRLEELSLLVEALDTLGEELDSLGAQLKLREKGRHMAEVDELMKGQELAETDLSAKGEMLRKLRRKAELSSKTQPPHREAALEMLQLRLNAIGKQYDQLRRDARERRVALQKTREFFQFVQHFDELSGWLSDRLSACFALLQLRDLSALRDSQRLHKSLETEMQSQWERTKRLISDGEKLSAGGSAMARRHFARVGKGREGKARTDEVVGECDDNAATD

SEQ ID NO: 120540 - protein, 708 aa, Heterodera glycines
MLFTSLKNLVLFSMFFELERKDLEFVKGESQADIEQVDGKSQKYNGFLINLIDSPGHVDFSSEVTAALRVTDGALVVVDCVSGVCVQTETVLRQAIAERIKPVLFMNKMDRALLELQLGQEELFQTFQRIVENINVIIATYGDDDGPMGPIQVDPSIGNVGFGSGLHGWAFTLKQFAEMYADKFGVQIDKLMKNLWGDRFFNMKTKKWTNNQEPETKRGFCQFVLDPIFKVFDAVMNIKKDEVAKLVEKLNIKLTLEEKEQEGKPLLKTMMRKWLPAGDTMLQMIVMHLPSPVTAQRYRMEMLYEGPHDDEAAVAMKNCDPNGPLMMYISKMVPTSDKGRFYAFGFTFSQIMNKQFYENSGRVFAGRVATGMKARIQGPNYVVGKKEDLYEKTIQRQATIHFCTILMMGRYIEPIEDIPAGNIAGLVGVDQYLVKGGTITTYKDAHNMRVMKFSVSPVVRVAVEPKNAGDLPKLVEGLKRLAKSDPMVQCIFEESGEHIIAGAGELHLEICLKDLEEDHACIPLKKSDPVVSYRETVTEESEIVCLSKSPNKHNRLFCKARPLPDGLPEAIERGDVNPTDDPKNRAKILTEKFEMDATDSRKIWCFGPEGTGANLLIDVTKGVQYLNEIKDSVVAGFQWATKEGVLCDENMRGVRFDIHDVTLHADAIHRGGGQIIPTARRVFYASQNSDPKMEIYFIEQQNPLLEQY

SEQ ID NO: 120541 - protein, 140 aa, Heterodera glycines
PSKIGQILCNFFSRKNAPLTMAQCVSKGSFINIAQMIALVGQQSISGKRPSDGFEAMPSPKFYSHYRTFNWNFVTSPHRSGLTPTEFFFHTMGGREGLVDTAVKTAETGYMQRRLVKCLEVLRFSFKNLVFFCLKDNENF

SEQ ID NO: 120542 - protein, 328 aa, Heterodera glycines
MRKLQFVGPELLLIRMEQPKGDDDFDDHQFASSSFCPPSSSSSYSSSFAAANHQHHHHHYQHMFVLFEWRVGRIVGVFNRSSEALFGAFERHNEQFRNGHIVRTMFPTSMEHCGAERAQHEALKQSSLLTGPYISQSVRHAGPVRKPEVFKKSNICASLGILSHQSICPCTINLMNAHQFSTRFRCSPTAVQSSHQMPSHPAGLSHQCHPNTVLRPCAVPSVRFVKRSQEEYYDSLLSYSQQRMMLYPYHLSDILVRELRITPFTYYTNMIVEVMQAEKSYDSIPNFTAVPTLDGFVMNRVQGDYFETLLYKIFVAIDGQTSVMEVVG

SEQ ID NO: 120543 - protein, 305 aa, Heterodera glycines
VTRRQLILNLIHNCPSPSIGLRTLVVAKKVLTAEQLADFEREYHRAKMNVTDRTEHMASVVRRLENDLQLLCLTGVEDRLQDQVTTSLELLRNAGIKIWMLTGDKMETAICIAKSSGLFSKTDNVHVFGQVRDRTEAHNELNALRKKSDVALVMSGSALNMCLQYYEAELAELVCSCTAVVCCCCSPQKAQIVNVLKRYRRPARVAAVGDGGNDVSMIQAAHAGIGIDANEGKQASLAADFSITQFHHICRLLLVMHRGLIISTMQAIFSCVFYFASVSLYRILMVAFCFFFNVWSLFNKKQSKN

SEQ ID NO: 120544 - protein, 146 aa, Heterodera glycines
LMLNVFLLQFLNQFKFCLFIFLILFFNLRSPTDLLKALAGTVKEDETSVHFGLVDDPIMIPTGFRDKRLYLMSKELGRRTARELGRRTARKIVEEWPTLFMLDRDVPELKAFRPQKPLDPTLVQPNEENLQKMIMDRRVSDAIKLY

SEQ ID NO: 120545 - protein, 128 aa, Heterodera glycines
VKDACCENVVGFVPLPTGVAGPLYFDGTFVHLPLATTEGALVASVSRGCLSINGNNAFSVHVFRDGMSRAPIIEFPCVRDSIYACLQRIDAHLEGTYLYLRFVASTGDAMGKKMVNLFCQFFFESWDL

SEQ ID NO: 120546 - protein, 667 aa, Heterodera glycines
EPTRENNILDLVFSQPIIYNVKVGSPFSNSDHNTVWFDINQTIPKKIVKKFLSEIYARKILLNSTKKFFLMGQTPSQLQFQTMRNTAYLPLNKKRFDKNVPMKLLKTTIKKKHDDKIKYKILCREYKKHIHKLYCENEAKFISNGRNTLIDEQGQITLIDEQGQIIFRNEQKCILLADVFQKSFLYKENNNDLLSHENPNQITDIEFNVYNIWNLLKKLPRRNSTSPDGIPYILLKECALPLAPILTELFRIILDSSKIPEIWKTSIIIPVFKKGDTDNPINYRPISLTCTLCRVMEKIIKLEILKFLNKNQFFSPFQFGFLRQRSTTTQLLSTLNDFYISIENKSCVDVIYIDISKAFDSVPIKLLLQKLKNIGINGKIHKFIKNFLNDRSFRVKISEQYSNSKNIYSGVPQGSVLGPLLFLIFINDLPNNLPKNVGIKMFADDIKIYIEHKNDKNRENLSSALEAINKWSKNNGLKISIEKTMVLYLGENNTKFIYFLDGEPLPETKCVRDLGILIDQKLSFSDHINKILKNSYFSCYQLLRALKTRRLETLILAYKSYIRPQLEYATEIWNPLKKENVHKIEAVQKFFTRKAFKKCGLVPMPYKRLKFCGIKTLEIRRKINDITTTFKIIKKHTHLKPSNFFAVAKRAIRKRLQIVNSLLPLKC

SEQ ID NO: 120547 - protein, 293 aa, Heterodera glycines
LTLKQAKNELLAQLSLFDQILLPKTFLVGERLSLADISVAIDLLPAYQYVLGEEARKGLVNVNAYQYVLGEEARKGLVNVNRWFQTVVSQPGIREVLGDLNAAGQPAKKEQKPEKQKGAKEEKPKSAKEEKPKKKAKEEADEEMDAADEAIAAQPKFSDPLAALPPGSFVMDSFKRVYSNEDTATKAIPYFWENFDPTNYSIWFSEYKYIWFSEYKYPEELKLVYMSCNLIGGLVYMSCNLIGGMFQRLEKMKMFQRLEKMKKHAFASVCLFGTHSTISGIWITHSTISGIWI

SEQ ID NO: 120548 - protein, 198 aa, Heterodera glycines
MDEPLLQENPNRFVIFPIKYHDIWQFYKKAVASFWTVEEVDLSKDISDWKSLTDNERFFISRVLAFFAASDGIVNENLFEFIKKKADWALRWIASSDASFAERLVAFAAVEGIFFSGSFAAIFWLKKRGLLPGLTHSNELISRDEGLHRDFACLLYTHLKNTPPKERIYEIISDAVKIEQEYLTDALPVYMIGMNSDL

SEQ ID NO: 120549 - protein, 494 aa, Heterodera glycines
RKAKQLCRSLTLLLESYMDKIAPQLSNISEFMLLRTQDNNEETALEACEFWLAFAEKDVCRQVLRPILAQLLPVLVRCMKYTETDIILLKGDVEDDSNVPDRVQDIKPRFHRAKTQGQQNNSEGDEDDEEQQNNSEGDEDDEEEGTDDESATEWNLRKCAAASMDVLSGIFTDEFLVHLLPILNQSLSSDQWEVKESGILTLGAIAEGCVSGMTPHLPWLVPFLIDSLQHPRSLVRSITCWTLSRYCHFVVQQPQSELFAKLVKELLARVLDKNKRVQEAACSAFATFEEEACHELVPYMPEILGTLVEAFHELVPYMPEILGTLVEAFKRYQAKNLLILYDAVGTLADSVGGNLAEPPYAEMIMDPLMSKWAQLRDDDKELFPLLECISSVATALHTAFYPYCEPVFHRCVRLISHTLAISEAAHEFKAQHDQPEKDFLIVALDLLSELAEALRDYIDPLVAQSNIIQLVYICAQDTNGKQRQNALTADCAKM

SEQ ID NO: 120550 - protein, 261 aa, Heterodera glycines
MFTVDLNSDKGFRTIERFVDNYLRTGVSVTTQQYVALIRAVPRAHWELSHTSIILGNELGRGTFGVVKSGVYVDQQGTRAAVAIKEVSQTSTKEQIKEFMNEARVMRQLRHPNVIQFYGVAVGQEPLMIVMELATDGSLTNYLKQQRRSARVKLYMCLGAAGGLDHIHSKGIIHCDVAARNCLYTDGVVKISDFGMAIKALSKQIERGAKLPVKWMSPDALRDRSFTQKSDTWAFGVLCWEVFNNGETPFAQLSGSEVAAA

SEQ ID NO: 120551 - protein, 78 aa, Heterodera glycines
MQIFVKTLTGKTITLEVEASDTIENVKAKIQDKEGIPPDQQRLIFAGKQLEDGRTLADYNIQKESTLHLVLRLRGGKN

SEQ ID NO: 120552 - protein, 366 aa, Heterodera glycines
MEPGMYFYKIEDPEADTDSKHRLRDGVPLNWPGESNLEKLGWFRWEKGHGWAHISVEDCKSQRYRATFNAEQFVLRRHSPAEEMPTPKGANGEEEAEGTAEEMGNFDLGNLVEEEPWAGAVRTSEREVVLEHAEGVALTLTLRTESWPRIVHHSSELSDFSGSNCLGQRVQPVSEPHFLCWFGICRKMGNISAQNARGTLIGQIFSSQDSLSVMESIFSIDISKSTQSKAQRAVATSVRSPRLVCFYPMGSIEKRKCHRLDFVRQPLQEKPPMTDHWQRQRSECQGCNERGGYLKKRRRLAIVSFSTSVESFLSSLDPRQWLDGLNSPAELFTCLVELVLCLVLLLLAVLLLTKCVFPLCRCVRFV

SEQ ID NO: 120553 - protein, 289 aa, Heterodera glycines
MNTEDGRIAHCASSDRIGHPCRVRGEQRAYQQRFIRNIPRSAQDWGRLEGGDLFHENHPSRETQLKVVRLLRKHCFREGRLGLEFVSDPTVNFQHSNFPVANYLDVNLHVNMPIFTIHGNHDDLSGKGLSALDVLHEAGLINLFGKFCDVDQIEVTPILLTRGNTKIALYGIGSQRDDRLARSFAKGRVKFNRPDGDDPDSWFSILVLHQNRPPRSKLRSTKSHLSFKHIPLFFDLVIWGHEHECLIEPDFKYMDPNDSTKGFYIIQPGSTVATALSVEEAKKKQIGIL

SEQ ID NO: 120554 - protein, 181 aa, Heterodera glycines
KFSKIFELGPLTRRGRMAPRKLKDRDAAVLTVRFIPMLQNKITFSLETFHAVVVRCGVAHFLLCKHIAASSEVKVLLSGEGADELFGSYAYMQRAPSAPEGADELFGSYAYMQRAPSAPLLQREIVRRLRLLHQYDVLRCDRCPSCHGIEIRIPILDKKFCDRCPSCHGIEIRIPILDKKF

SEQ ID NO: 120555 - protein, 268 aa, Heterodera glycines
VANWTLEKGIWPLYGHLNVDVQHLNHYRIVTIITKPVFLNTGQRVEGYCIDLLTMLTESLNFTFELYSLNFTFELYLVEDGLFGSFDENGNWDGMIGDLVLGKAELALGPISVLAERENDIDFTVPFYDLVGLGILMKRSDVEYSMFKFLKVLEWPVLEWPVWMCILGAYLFTSTLLWVFDRFSPYSYVWMCILGAYLFTSTLLWVFDRFSPYSYRNNSERYAEDEEKRNFTFKECLWFCECLWFCMTSLTPQGGGEAPKNVAGCLAA

SEQ ID NO: 120556 - protein, 208 aa, Heterodera glycines
MSGWDAYIQSLTSSCAEITRVAIIGNSDASVWARTEGENEFKASEPELKKLVGQFDDLSQVPSVGADLEGIHYIVPRTDENLIFGKRDKTGFFAVKTKSAILIAIYKDEESVVGADVRGAVEKMAKYLEDAAILIDRFDPIASVFVQHLNVSLLFFRDHYKIDDEMLRLDTFHVDRKSLTLHANGTLDFGKSAIYSKSWPINSVKCFH

SEQ ID NO: 120557 - protein, 179 aa, Heterodera glycines
CIYIDFQKAFDSVPHNLLLYKLEKIGIKGKLLMWIKGFLSNRTFRVKIGDSLSSSKVTSGVPQGSVLGPLLFLIYINDLPDALPSGVKIKLYADDDKLYICYKARTDTEIMHKALHNLFEWANKWQIKVSMQKTFVLYLGSKTPKETYKFDGNTNAVDTIRDLGVNIDNKLQFSDHINQ

SEQ ID NO: 120558 - protein, 91 aa, Heterodera glycines
SIRSPHFIRGGFAHGVRGPCTQFYMLPNTVRIHGLRTALTLKHAQDDLVIVDSYDTLNSADPQFLNDLADFLNDLADARNWGYSVLFVDCD

SEQ ID NO: 120559 - protein, 214 aa, Heterodera glycines
MRFFLGSQRDEKPNEDGQNSSDDEMEGGEEGSRKETKSLKEVLQKFRHAKKTRKRKKNLDQAKKVIVTAQRKKEEKRLPKDMKQCNMEAINAIYDPQKLLQIALCARVIGVHQLQTLGFYSYLHRYIRPKQKEVTRILLYAAQACHPLVPSDVIEQLVTSFLQIRVVAQNFVSDRNTPEAITVGLNTIREIYKGCPEAATEEMVRDLAAVKFSQ

SEQ ID NO: 120560 - protein, 475 aa, Heterodera glycines
MTHVFFDPESVDWSSFITPQHGRGQKQYFVGSKYQRGFGFLGNVARFLTPIARNIASSAGHEGLAAGQRVLSDIAQGRDLRDAVREHSRQGLTNLTDKLQQYNQFCDLNKTFLYLSTSIERKDKSNWIPITKDSEADQHVGVESYDSGIYYAFRAYMMNELGFSEDVKKGLCEASCYYVDDVDQDDYTNSGFKNRASRFADGAKCETMVKLNFDLARQPNLLLNNSDVIFSIHRNTDDFLIMAPPYVSGNAVIANPHTYRINIHDIRIYVKTVDITQSLNNVISNQLQTTPAKYPMRKIEIRSLFIPRGTSDLSHNVFTSIVPRRLIVGFVSTGAYTGNPKESPFVFEHAKIRSIGVEANGNIFPGSPYSLNFDRNKYIRAFVDMYTGLGMDDGERTMSINIQKFVNGWCFFVIPMTSTLEDTPGFELIRNGTTSIKVQFNEPIKDGGYEMIVLGEFDSILSINANRVLSSDGSI

SEQ ID NO: 120561 - protein, 371 aa, Heterodera glycines
MDLFSNNNNNSAKKAISIFPEENVNEDVINKSSGSSSNSSDGVPTEEDVFEVEKIIAHKVCEGKDYWKVRWVGYGPSDDTWEPRENFLDKKVLKMLKDFETEQHAKKEKRKEISRKSIEYTRSKQEEDDQEDATDEKNERRRNDEIFTSESSAQEVFETNEKGAVAIPEKPKGISQKMPNDKRIKEEVGTHEMKMVFHKRPRLGEEETHNSELGISKSLKPKKLAKLGQKLKLKAASKREDIIHMKKTKEEKNASKKHELSKESVPHKTKDKQLSKLAVVRLEETGLVVPFASEGVNIAAAFERLAVERQTSLSLIDNPFLISQEEFEEMVMDGKVEKVQQLLYGQAANNFSLNRVDEFGKTLLHKIFVHI

SEQ ID NO: 120562 - protein, 218 aa, Heterodera glycines
WVSHSGPTNALWGHEKLVPEEEVWHEKNDDLLTIRHHTVMVMGTATTTTVAVTVATVADMRRMCTSKTGSPVSTIATDECNGHENGVLESAVGRKCASTCQHLRFSTLSKPGKHGENIWAAPYYNYTDAIGRWYNEVNDPWCGCGTGYKHCCGHYTQLYFVLIDGMGRDKSDRLWICAIFVCHYNPQGNKVMYYFNGGDYAFSLDLAPGLDIPGPGFS

SEQ ID NO: 120563 - protein, 126 aa, Heterodera glycines; identical to SEQ ID NO: 119174

SEQ ID NO: 120564 - protein, 328 aa, Heterodera glycines
ELLLLFGPAFLFVFVVYWRHISVLKTLLVGFCSLIIVLILSVLLSVLLDSLMWRRWVWPEGEVIHFNVWHNRSSEYGVLPFWWYFFSALPRAMFLSVFLVPFGLLIHQRVQFALVSLCLPAFLFVLLFSFLPHKELRFILYAVPLFNTSVAVFCAWIWKKARDSWFFRFCAFLVALHLLVNAIFSVSFVYASAQNYPGGVALLKLQHKHRFLRDKPIAVHIDQFSAETGISRFLHLYDAWEYNKTENLAQEEFGRFDYILVGNYDGRLRAEIKNNLNETHTKHFIVKAFHKVKKCNWFLWQVPAYSYKPQVPAYSYKPKVMVMKRKDE

SEQ ID NO: 120565 - protein, 104 aa, Heterodera glycines
MDRIRSRRSNTAATRGKTQKHFVHATRRGHAVVIDHHQAIRFALDLARGMSFLHSLDQPVLRYYLSSKHVLIDEDLSAKISMADTKFSFQEVGRLSRPLGWRPR

SEQ ID NO: 120566 - protein, 400 aa, Heterodera glycines
ILSQNIYNFLLKLLKSEYQFGFVRNRSTTSQLITVVEDWYDAIINGKADCIYIDFQKAFDSVPHNLLLYKLEKIGIRGKLLMWIKSFLSNRTFRVKIGDALSSNKKVGSGVPQGSVLGPLLFLIYINDLPDALPSGVKIKLYADDVKLYISDTEIMHKALHNLSEWANKWQIKVSVQKTFVLYLGSKNPKETYKFDGNTINAVDTIRDLGVNIDNKLQFSDHVNKITRNAYLRMRSLFRIIKSKSSKIWITLYKTYIRPLLEYAPEVWNPSLQKNIKKIEKCQKYFTKRVFFKCSLPPIPYQNRLKYLQLPTLENRRKLFDLFMAHKIVYGRTDLKLFSIFKHALTSPFTDLTQNIKAKNSFPLPGGTKLWNQLDKELIKTNSLNQFKTKLNFIIHFLFL

SEQ ID NO: 120567 - protein, 147 aa, Heterodera glycines
MVEKLATLYWFTVEFGICIQNGAKKAYGAGLLSSFGELEYALSGQPELAAFNPPETCQTKYPITSYQPKYFVAESFADAKNKLAYCICRARVLSIFNPPRSRSTWSTSIPRQFQVNYNPYTQRIEMLDNESAANKLVRDVKSESQPW

SEQ ID NO: 120568 - protein, 274 aa, Heterodera glycines
AILSYFPSGVNIKLYADDVKISRTETEIMHKALHNLFEWENKWQIKVSIQKTFVLYLGSKNPKETYKFYGNTINAVDTIRDLGVNIDNKLQFSDHVNHITRNAYLRMRSLFRIIKSKSSKIWITLYKTYIRPLLEYAPEVWNPSLQKNIKKIEKCQKYFTKRVFFKCSLPPIPYQNRLEYLQLPTLEKRRKLFDLFLAHKIVYGRTDLDILKIFKPSKRFNVPFYRLTQNINAKNLFPAGRATKLWNQLDKEIIKINSLNQFKTKIKLLNVNDR

SEQ ID NO: 120569 - protein, 139 aa, Heterodera glycines
TLRSNAKRPREEKSTKPPPKLRQIKGLEGAAKQRNVRFDPRFSASCGQFDEFRFHQDYSFINELRKTDIQELKKAFRRAKREGNSALSDRIRCNLLRLENQQKAEMERQKMENIRLELRRGNIERMNRGERPIYLNNGQ

SEQ ID NO: 120570 - protein, 261 aa, Heterodera glycines
MVEVKKEVPREQSAKAESNVSTKRLYVSGVRDEHDEESFMHYFTEFGPVAKVEIIQDKNTNKARGFAFVTFDDYDPVDKCVLLKSHMIGGYRCDVKKALSREEMQKAQQHDRDRMERGMRSRGVPPQYGGRGGGYGPPPPAYAQYGGGYGPPQPGWGPPPPQWGGYGGGYGGYGQGPPAAASWGGAPPQAPAGPLPAAGTAAAEQGQWGAAAQGWGQQGGASWGPQQAGAWGGGGAAGGGPAASGAYGDKPQQDAIGCFFI

SEQ ID NO: 120571 - protein, 210 aa, Heterodera glycines
MNAYSNRSYGIKYDYGSIMQYASTIASSAPGKKTMVAKLKPTENERLMGQREGLSLSDVEAVKKMYCQPSLEPQLIKASLGTDQPVDRGLFLALGLESAEHPVPNDQNTFRILKQQLVQVLFSPTTKVTVDTVCLEREYSLICCWREWQSADIASVVHAVVGRSVEHKAKGAERTEQGSVHPKLEDFGEIAMDEENGRRDEKGLHWKDNG

SEQ ID NO: 120572 - protein, 341 aa, Heterodera glycines
MCYKKFSNFKCAGGGGGGFFYAHQQLTPPVAPGQHSPGQQRHYAPPPPQMLHPGMMYHHHQQQQQAQQQQQHMASPYHQQQQQYGAVQHQQHQQAMAAAAAAYWARTNGQQQQQQQQMPTPPAQDVGGGAVPGASTSARHTPQPSSVPPPNPSPVASAGPPQQPVVQSSPSVTAATSSAPGTAYDECGMADVGTTDSAQRPRSRQQQQQQQQAVHLQQQQQPPQHHPNAPPQQAMMLTPQAAAAHLRYASAVPPSPGMMMMVGPPGGGPPLSHGLPPQQQQQHAYAPPMGPPPHPSPHMAMPPMHHHHYATAQGMPPPFPGLSSGSFPPQFIGVREGGRGP

SEQ ID NO: 120573 - protein, 229 aa, Heterodera glycines
MGMKQAQREAVEKLVMQLANTKQPELVHERRLFFEKLVLLNEQQGEVLSGPPQVSKSTVDLFSLYFAVKKKGGFEKTIKDKVWKHMCVEANADMQESSAAGFQLRKHYQKYLLKLECMETGQNAKELVEFAEKQKKKKKEKEPSSGGGGSASAAGPSTPSSAKDEQQQQHGGTGRPRGEPAATTAATTATTQQNAAGGAPPQQQQFSGAPGTAQGKAKQYQKWGHIVHT

SEQ ID NO: 120574 - protein, 384 aa, Heterodera glycines
MYIKEVNITGFRSYKELTTVRNFSPKHNVVVGRNGSGKSNFFTAIQFVLSNDFSSLTLQDKNAFLHEGVGSRAPIAKVEIVFDNTDRRIPTDSDEVRIMRQVGQKKDQFFIDNKPVTRTEIVNLMESAGFSRSNPYYIVKQGKITELATASDPYRLKLIKEVAGTRVFDEKKDESTKILHETQTKIEKSVQLLGYINERLKKLEEEKEDLKEYQKWDKMRRAIEYTIYDLEIKEARSKNEKLTSHRERINAQQNEVETKLIQAKMSIQEAEMQIRRLETHYKGVKEERATLLKEQTDLMERKTQLELAIRDLAEDVDRERSGREIAEHSLQQLKRDIAEKEGQLEQLQPQFEQLLEEESQLGSDIRIGEQKCRELYAKQGHREQ

SEQ ID NO: 120575 - protein, 567 aa, Heterodera glycines
TKMSVSFPEEIMPPSSSDNPKQNPFTGNNFSSKYWQLLSERTKLPVWRHRDEFISALATHRCILLEAETGSGKTTQIPQWCVQWLRTRDPHNKSMVCCTQPRRLATVCVAQRVAEEMDVMLGEEVGYSILGEEVGYSIRFEEALATVTLLRYCTDGMLLAESSRDELLKSYGVILLDEVHERTMITDVVMGLIKRISEFRPELRVVVMSATLKTGNFEQYFYGCHLMKIRGRSYPVDIIVTMIDGDNYITKSVSKAIEILQKTERGDILIFLSGLEDIEKCCEMDIEKCCEMVENEAEKCGGSGRLIVIPLYIVIPLYGSMQNEQQQILMETQPPFFTNVGPRRCIVATNVAETSMTIDGVVFVIDSGFCKRKMYNARSMTIDGVVFVIDSGFCKRKMYNARSKLESLLVQRISRASATQRAGRAGRTQPGKCFRLYTEQCFRETMKEIFFAQIKHTNLDSVILRLKFFAQIKHTNLDSVILRLKKCGIDDIYQFHLIDAPSPDSIHHSIRLLTDLGALDHLGRITPLGEHINILPVDPPLARMMLESVKLRCTKEVICICAMLSAP

SEQ ID NO: 120576 - protein, 86 aa, Heterodera glycines
ASADKTVKIWSTVDGKLEKTIQGHKLGISDVCWSYDNRMIVSCSDDKTLKLFDVQQGKTLKTFRGHRNYVFCCNFNPQSTLLVSGS

SEQ ID NO: 120577 - protein, 433 aa, Heterodera glycines
MENDALMEEDGEQNQEDEMTLEDCWNICWLDSERCIAHKPPKRKAQNCKKNPYCIHRLGLEKFDKLLKTQQTSKVLVRREESKQPCGLNNAGNFCYVNSFLQIWFNDLKFRQCVYNWRSSTNWIMPQNAKLNIQTVMNCLQQLFLTMQFTPFEVTDANDFIKLLRLDNQQQDVQEFHTLFFGTIERTLEAHPNGRPVLDVIRQLFQSRISQTISCANCLRTSETVGEYRSLQIGIDGHSTLISAIQAFFAPEPLRDFRCDQCRETNCVTRSSRFTQLPELLIVQLNRYVLASNGNLRKLQNAVHYPRLLTELGGEGIPDYELCAVMIHEGKSTNSGHYYDVIRDPVIDRWFTYNDEVRIVWSYYPILRLCPIQTVNQKRTAPGYLGRLTQKPRASADTTGCYALIYRRVGSGLRGPVQLPPENIVTEAKKRVG

SEQ ID NO: 120578 - protein, 384 aa, Heterodera glycines
MSRVYLFLELSIQKEDGGGRWVPIEAAVAADQLVAPAQCVGQTFVQQLKVQNTELYDSGTLYPYKAYLTNELSFPNSAKGHFMASAGYHPSRKHDDATDAGFLARCARFAGGRKARFLSRLDFDLGNQELYLLNNMDVLFTIYRAKDAFLLQSLAAAAAAAAAAQHYALYLHDIKLYVKMVEVQPSLNLSIYKTLEKQPATYAVRKTEVKSVFLTAGRTEMDHNIFSAAIPRRLTIALVANGAFNGQLALSPFNFKPYAIREISVHAAGHVYPAVPHRMDFSGCAYIRPFVDMYEALGMANSERSMDITLEQFHDGWTIFVVPMTSTLDDSCGFELLRSGTTSIRLAFNEAIPAGGVEMVVLGEFDQLIMIDYNRHIVSDSKIA

SEQ ID NO: 120579 - protein, 399 aa, Heterodera glycines
IIFFLKYFEEFAFLSFWLYRATYWKRRGIPCPDGKLFSGNLDKMFWEELRLFQMAKWTEQYGKVYGLLTGFQPVYGLLTGFQPMLVISDPTMVHELLTSKFEYFHSRMVSSLEGDVDKNPRMNLVNARGARWKRLRAIANPAFSISNLKKASLQKESFLFLIKEINQNTFSNISYLIFSFFVEMTYDVIARVAMGQRESRQFQSEDAKLAVHAFQRLQNKFEYLAMLFPWLGPMLRPILLLTVKMRRDPLLLLTLKIREQVAERRRQKQQQQQNAKQQRVPVDFIDQQRVPVDFIDMFLDSVTDEGSIEYRDELGNANIKVDRTNTVDEIEMQLQVFLLAGFDTFDTTANSLGFVSFNLACHPEVQLHLQEEIATVCISEEVGKKNLRSGMRPICHIKK

SEQ ID NO: 120580 - protein, 260 aa, Heterodera glycines
MHAFWSYQVKIGENFSESFRTYSGVPQGSVLGPLLFLVFINDLTNYIPAAVGIKLYADDVKLYISHDNDTKRDLLSLALANLAKWSKDNGIAIAHEKCAALYLGKNNSRHEYKIGEKVILSVDCVRDLGVFVDQKLSFNNHISKILKAAYYKAYQILKILKTRNINTLILAYKSYIRPHLEYASEVWNISSKEQSKRMETVQKFFTRIVYKKCGLKAASYEKRLEICKLEKLIINLGITFLFVQLIRGIAYPKQLWKSEL

SEQ ID NO: 120581 - protein, 228 aa, Heterodera glycines
MSVISKCRRPQMSASVENGTPPAVAGNAQQQKLQQLCVACRRMCAYNFPCFVAVFGEEADVFSGRLLPILEQFCRDSDDEVRSIIASGFHEIVAQRKIAPMGTKNAKNSSSISASVPLLLGPFVDLLSSGNADIVQQLTANLHRILPMLYAEISASATQKRTHLIFAKLDRILVSCNNLMKGSTGSWRAHEAYLNGIAVLRNLVSTKDLLSNFVPLLKQGVLTAVIAK

SEQ ID NO: 120582 - protein, 145 aa, Heterodera glycines
MVWSRGKRKRIATENPKMHNSAISRQLGQEWKLLSDVEKRPFIDEAKRLRQLHLLQHPNYKYRPRRKTKHPIAVDNICQPHNNCANLTTKIGTFGMEKQQHHQQHFPPLKIPKMNGEICNKFEIEMPFNFLIIYLIFNRCLIIID

SEQ ID NO: 120583 - protein, 228 aa, Heterodera glycines
MSRFVCAISGNEPEVAVASPVSGEVFEKRLLIKYIEENGTDPITGHKLDTSNLVELKQDPGIRSMQKSITSGGGSFLAFAKLLAEWKWIVILLILQLGLGVIAADMSTASCNWDWKIILSIAAFFLLSWVSVLVFIANSVKGELSAKIDGVKTELRDKLDVVKAELNEKMKEMNDKFNGARVEINGKFEIMKIELRGDMKGLSGEMNAMKSELNGRIDVLKAEMNGKR

SEQ ID NO: 120584 - protein, 84 aa, Heterodera glycines
MKPKKRPMKHPSAPFSRDSPRSKRLKQSTDGAGGKRLFVVIEDCSLEVAKVGAEHVVLCSDKHANWLRKQNRDPAQFRPDILHQ

SEQ ID NO: 120585 - protein, 332 aa, Heterodera glycines
KEDMKSLIELIARRQPHLVVIGGEDIDALRLTTDVRLSINEAAQQNLKIPLQLSVEIANSDAARVYMNSRMAMQEFPKYPPLLLKAISLARFTLDPLIEICHLCNADDDIMYMKFHPLQNEVPKQELLFALQVECINRVNEVGVDINRCLEFPYTAGLLQFVCGLGPRKASHLLKILKQNENLLESRTKLVTYCRMGPKVFMNAAGFIKIDTTKVADRTDSYVEVLDGSRVHPETYEWARKMAVDALELDEPSDQTIAIEEILKAPERLKELDLDAFAEELGRQGFGNKSITLYDIRAELNYRYKDLRKPHQAPTGEELAQILLKEDCSNLQ

SEQ ID NO: 120586 - protein, 443 aa, Heterodera glycines
MLTNFPKFCCAPPYLKVISLTVPDSLHCVNLNVKMTHPVIILSMRGIPPNTSANFTKKILNLIGNYFEEDFILMGDFNLNAKDITWTSGTPYAKSEKGNIFCEFFNKYGLFLMTNGPTRGSAWLDLILSSKPDFVNNVLIEDIFSSDHLSTNFSLSFPQNKILEDWYDSIYGKKNIDCIYVDFRKAFDSLPINILINKLHNIGIRGKLLSWLSEFLKDRFYRVKINNKFSNLYPIQSGVPQGSVLGPLLFLIYINDLPQVIPPGVSIKLFADDVKIYVSYKTRDERSKLNVALDNIGKWANAFGLNISQNKTFILFLGKNNSKQQYKFFNNIINEVESISDLGILIDNKLRFSNHYTKIIKAAYLRIRNIAKILKTRSIRIWTKVFKTYIRPLLEYAPEIWNPTYKKDINKLERCQKYFTKIALFKCRLPYIPYEQRLDLFKL

SEQ ID NO: 120587 - protein, 535 aa, Heterodera glycines
MTEESEEYCLGGRPLSDLKVVELRKELEIRSLPKSGNKKELVERLQNFLRDEKSEQRTGGESHQAQKTAPTMELNQSPSGVSVPNVVAQYLAQQQIQLQAARRSADKIRADTSLDDSAEIMPISSPTEEIQPSLEQQKEEESQDQIKQSSESAPELVNSDVKEPSVEKTEESAELQKGADQHLEVETDKSLEEERTNTEEKEGSGDGSTSEKEREIKKEERTEEKTTEPTKDEEERSSRTEGTQGDQQIEVKAESDEDETEKPVETVNRTETVDTHAEEMSPDKSAKARSSVVEEELDFENEEDDEEEREEPADDGGKRRAHLKQGSPVTMKSFEHKLGPEHMEQKVTDVISTSKTVAVSESEVGPLVGQLTASIKEESSKPPEGQQENTPEGFIRRRPSSPARRANRLMIGFTRSVSDTLRRVGFTSETLSGRSQRRPSLICLLNRRKAEEEQEASANNSALGGGLGLTIVVDNRAWILKLIIHLNYGDLFQGRGPETVPNSGPTVLIQHDKKRQKDAENRKRKGAFCEINGDL

SEQ ID NO: 120588 - protein, 210 aa, Heterodera glycines
KDYAVVVALMRAQNERAQNELSSYQQKVFKLDDHLGLSMSGLISDGRILARFMQSECAEFRWNYHNPISVELLNRKLGLKLQSNTQYYGRRPFGVGLLIIGYDDKGPHVVKAEPSGDVSDKGPHVVKAEPSGDVSEMFAASIGARSQSARTYLEKNLPEFETADRDALIRHAIRSLKETLQADAGSLDENSAVLGPFFLGVARARVWGFV

SEQ ID NO: 120589 - protein, 219 aa, Heterodera glycines
MAADDSNSEKESNSLSIRTDKLLSVPFNGEETSENTSQQQQQQTPVALPTSSSKILSKQHPLKTKWNFWFLNNKKKDMDWLERLSKVCTVSTVEEFWAFFDNIHPPSGMYGCDYNFFRDGIEPLWEVAQNKDGGRLVIQVDKQRNELLDGWWMEFLLACIGEQFGDDSDQVCGAVCNIRNKGSKISIWTTNASEEDKNRRIGHLFWLQTSSAIPCRFMI

SEQ ID NO: 120590 - protein, 286 aa, Heterodera glycines
LGPLLFLIYINDLPDVIPSGVNIKLYADDVKLYISDTEIMHKALHNLFEWANKWQIKVSIQKTFVLYLGSKNPKETYKFDGNTINAVDTIRDLGVNIDNKLQFSDHINQITRNAYLRMRSLFRIIKSKSSKIWITLYKTYIRPLLEYAPEVWNPSLQKNIKKIEKCQKYFTKRVFFKCNLPPIPYQNRLEYLQLPTLENRRNLFDLFMAHKIVYGRTDLKLFSIFRPSTRFNIPFYRLIQNINAKNSFPLLGGTKLWNQLDKELIKTNSFNLFKNKIKNSVMLMIV

SEQ ID NO: 120591 - protein, 286 aa, Heterodera glycines
MDEEDIALDLVRDRINIDVESGEFTALDKVVKLAPYHVQTYKELSDLYSELGQKEKSFEFKMLAALLNSKTTAEEWDEIAGTAKSFNRLELAVACLAKAIRCDPENWLYYEKRIQILDASGETDLAMKTRLQAAQSINCQTSKINFAWIDKLIKTDSAKSILAMHNELVKAVDEKGDNAMTVHFTNTDYKLSPFPPPSGSHWVINAKMNSLLLSYLIICWVHLGRLDLVPQLIDCLLERPLGSSDEENAFLDIARSLHSTHQLVLAVEYMQKLRKERPEYNESTDF

SEQ ID NO: 120592 - protein, 106 aa, Heterodera glycines
MDFSRSAYIRPFVDMYEALGMANSERSMDITLDQFRDGWTIFVVPMTSTLDDSCGFELLRSGTTSIRLAFNEEIPAGGVEMVVLGEFDQLIMIDYNRHIVSDSKIA

SEQ ID NO: 120593 - protein, 430 aa, Heterodera glycines
MPQQQQQAFPPVPQQHQAFPPMPHQQSVPQQQQTFPSVPQHQQQAFPPMPQQQAVPQQQQNFPPMPQQDAFTQMPQQPPTFPPVSQQQQAFPPMPQQQQQAFPPMPQQQQQAFPPMPQQQQQGFPPMPQQQQQQGFPPMPQQPQAFPSMPQQPQAFSVGFYGPMAEDDQSTRSGLFPTGFPQAESPPLVSTEIIAQDQGNANPKFMRSTLYAVPQSQDMVKATQLPLSLAICPFAKLHQSEYPPPVIDLGEIGPVRCQRCKAYMCPFMEFIDGGRKFRCPFCRASTPGMLINTRVHPTIQYFNGTPPKQPAYIFMLDVSYNAVRTGLVELFCRNIKDIAQGVAENFFFGFLMGKSSVRRDKRAALYGENFRAGASSMRIGLATYDQTVHFYNLSQPGRAEMLVVSDIAEVFVPFVDGFLVEFEQAENALT

SEQ ID NO: 120594 - protein, 154 aa, Heterodera glycines
MLFKVLSTPGIVERFFTGPGEEGMAQAIRKKAMENPQDYVLKANDCGPTGMYFNEDMVKKLKSMAPAERDFYYLTEKLRPTTVKNHFVRPNAKPMLNVNANPELGIFGCLVGNMKTGQVFFFSRIGHMMKSKMDNVDEGGVWRGNSVYDSPYLV

SEQ ID NO: 120595 - protein, 287 aa, Heterodera glycines
KYPIEKVLFLIYSAERPLLLVGSQAMAPPVKADELAQTVESLGVPAYLGGMSLGVPAYLGGMARGLLGAYSAIQMRQERKTALREADLVILAGAVCDFRLSYGRVLSPRCKVFTINRHRDTMLKNHGVFWHSAMAIQADVGSTLVQLHQRMASNSFAVDGHQRWDAWLNALRSRERDTDTRNGAKAAERTADGRLNPLRLLRMLNEVLPDNTILVADGGDFVGTAAYTVLPRGPLQWLDPGAFGTLGCGAGFALGAKAVHPDCPVLILYGAGASGYVSKWGWMDNLG

SEQ ID NO: 120596 - protein, 192 aa, Heterodera glycines
FVGIKDLHAKVRGSTTNYIALTYAFVAGLLNQETHQQLAERTRLHVVELSPNRQFFPRIVASPLTAPVKADDEVDTKERMKLDEYYGEGRFPLKKAEPLPFYANSPGHLHAEWRKHPYRNMEKKIIRLLADGVVNRWTRKERYKWSQRSVEMVASGRKPIPLGLGLSDVNPPEGEKALIGGGRTANEATEAD

SEQ ID NO: 120597 - protein, 387 aa, Heterodera glycines
RVKNGAFRRCTFGKDFQKKLKKLRKPLSDLSSITTKCASRRHPITKRWRHFLIFRFDSEFEFLLKYYRRKRSTEQNTATEYGKSAGEYGANSDYGTSGGYGKTDSEVNYPRKPKTYKPYQYGGAYGTENGGYGGKDEYEKSEYSRKDGYDKKGCGGYEQSGYGEKDGYDKKGCGGHEQSGYGGKEGYGGYGGKQGYEKSEYSRKDGYDKKGCGGYEQSGYGEKDGYDKKGCGGHEQSGYGGNEKSGYGGKDGYEQSGYGGYAQSGYEKSGYGGKDGYEQSGYGGYAQSGYEKSGYGEKDGYEKSGYGGSDGYEKSGYGGRDGYEQSGYGGSDGYEKSGYGGRDGYEQSGYGGYAQRGYGEKDGYEKSGYGGKDGYQNEYHDYYKNNR

SEQ ID NO: 120598 - protein, 92 aa, Heterodera glycines
MLFTLNINGFLIRQRLNGDVEIFCRPRQIICSPELSTVHLRTANVEMEVQTDKKAYVKYGSKRVHVSRSGMVVSNENCSASMDHIGRIVSAS

SEQ ID NO: 120599 - protein, 975 aa, Heterodera glycines
MPSSNSFYVIVPSNTNVEGNRTNSFRVRLPRKLQFNSEWDVGLGVIIYPHSWPSLGTSEDQFVQIEWKIGENVQIPIPSSNVTNPVELWKRLYKLLEEGNKPFAVKVEGVQKKFTEAANTARQLGRAEYINKQQQQQQRDKRNVNDDDDDDDDENEEQLLNALLAGVDTLLDLYGATSGGLLEREKRAATSKVPLRNWDDTEEEYQEKLDKYFLRLRGRNLERLEGLITEKLNAEIALMDDEERKILDQTKELGMTAWIKVFQSAYSACFLHFDSATNRFSLKLDDRYVQKIKISDQLAYILGFNSTDFTEKETIAKFMPDMSGGVASFHVYAPDLIEPMMIGDVIAPVLRIVTIRGKPDEIIEEQFLSVQYHRVLVKEISEIFIEIRTSGGSLMPFQYAVAATPAPYSMVINVDPSEVVVQYGGYNVFRGVPYQRGSGIGSVFRSLLRYLIPIGKEIGTAIGRQGLESGNRVLSNVLEGRDLKESLVSEGKTGLKNLLEKAANNINAQKGQGFDFKRYTKRNDAREGGAFGKAKKGINKLQSRLGPHDFLPANTPAVPSTNVSVVRSYFREVLPLVTITQESPYLFRLYSDNLWTDLSRIYLFLDLSIEKPDVDGNWVSIAATDAQVGTIQGIGQTFVQQLKVSVGNTEIYDSGNLYPYKVYITNTLSFPMNVKKSFLASTGHYATRTHDSVADEGFKARCKIFEGGKRAQFLSRLDFDLGNQELYLLNNLDLLFTIYKARDTFIMQTLKANDTTRYRVRVHDVKLYAKMIDVQSSLNLSIYKTLEKQPATYAVRKTEIKSCFISEGRFEIDYNVFSATIPRRMTIALVANGAFNGNYALSPFNFKPFDIRDIAVYAGGMIYPIVPYKLDFAKDIFVRPFVDMYEALGMANSERSFDITKEQFKSGWTFFVIPLTSTLDDSTGYELLRSGTTSIRATFNSAIPEGGVEMIVLGEFDQMIMIDYNRHIVSDSKLS

SEQ ID NO: 120600 - protein, 290 aa, Heterodera glycines
MAKNMNSSGHSNLPTSVEAVEVEFLAFTDRLSATLTECEGLTIRALNRIPAENDLILGPELSDRILSAIAALEKCMCCLNECCAMAVSQLSAVDSEGLPAQQLLEFLRGEVEKFAGRLDNQQQVAFHIFDERERGLELVRTVLDELSVALENSSMELPPSAKDGDPTRNGSPLTINGNPFVPLNERAYGRKKEAVEADGIRWQLAKKDEELLNLQKALKERDSEIGTMKVGEFSKMSSQIAFICSASGGNGKDSVGRNDGERRHFRGDGIASAAMHRLRERLEETEGVRF

SEQ ID NO: 120601 - protein, 288 aa, Heterodera glycines
CFNLRYYESYVTGMYLATKVFYVGNVLTNYLATKVFYVGNVLTNLLLVNKFLETNNYSIYGLGVLYDLLLLGKSWTQSGNFPRVNFPRVTLCDFEVRVLGNIQRHSVQCVLVINIFNEKIFILLWLWFCVLFFITLFDALYWFSVSLFHRDRFRFVLRHLELTSDPDRPELFRKEKLTSDPDRPELFRKEKRKQVEHFLRTYLKVGGVLVLRFALVGGVLVLRFALRAGVFCPVVPAALWLRFLSRPVSLLVVASFLFPQGVHRLIDSSSAPNPSHRLIDSSSAPNPS

SEQ ID NO: 120602 - protein, 446 aa, Heterodera glycines
MEDQPQLSQGFFQTFLDEKVPADFQPILQVLETRTIGSSSAMGGYPPQGQQMRARLSDSLYSYSGCVIPQTVTRRFQDDGLSTHNGIIQVTSWKRVDGGKLCFFQVLDYTLYSLDFPVIGNPQPHSGNPAEFRRVVQVAWRICGVVSGKDASIKDLTSPRGSFRVFSFNVTDSKGVAIRIAAFGEQADKFFPIVENANAYFISGAGGPRSVRAANKRFNSTGHDYELVLDRDSEVVYCEEQIEVPEVKLKPISLKDLPNHVNECVDVQAIVDRVGEIAQVTSRKDMRQLDKRDIFLLDSTGTEVCLTLWNEEAVAFHATTGTVLFSILSFLGMCPEAMKFAFLRPSGFSVSTTSSTSLLFNPEGKKSENLCLWYREYRPDANIKSLSIGSASDTQANFERDFRMIGIIRRDGVSRDNDKGEYFSIKAMVVTVKSDQAIYQVRPNNK

SEQ ID NO: 120603 - protein, 68 aa, Heterodera glycines
GSIDGNQCLIVKGKFQQKHFENVLRGYIKLFDNPLPLLSDEYVRCHTCRSSDTELTKDVSRLFFIQCK

SEQ ID NO: 120604 - protein, 421 aa, Heterodera glycines
ERSVITRILFSISVLRVFILKFLLFQDSWAKLKTDPVLWLDRIADVWRTLRPWQQNSPINRCFRSVQMRWNVLTTLQRHQSQQRVVEHACVVEHACRTIRFLIRSMGAQSVVFIEPVASQIMLTFSQFPHSCLLYLSSIMVDEYGSMAHLQPGMLQLLDNLANRSLSLLATDSENGLRDHPLLDNLANRSLSLLATDSENGLRDHPDTVDDLYRLAIRFIQRSPSTLFSRSPSTLFSHPIVVQLFQGAIHGLVLNHQDANRSVTKFVMEIIAAAKGKRSQSLSKEQTERVSQSLSKEQTERVRQMLAENGPQLMLACVSAALFHLSNSLCKEMAEIVHALLKTDKMKAEQWLHFVCVQLPHDGGTDKMKAEQWLHFVCVQLPHDGGHSATPQQLNDFRMKILEPSFDRVIVLMHVFRSVRP

SEQ ID NO: 120605 - protein, 109 aa, Heterodera glycines
MHEQAQEFLKRAIKLCPTNASIWVLLGHEYLETKNHQLASTAYKKATGVIFSKIDRKSDAEKCFKKAFQIGDVEGNALTHLAKLYEEQENQQNAAKAYEAYLTLYTEEL

SEQ ID NO: 120606 - protein, 187 aa, Heterodera glycines
MAFHKIYNDSVNSITNALDFFRIPPTNISVSSSKVFELLPSNPLTDTPYHFKLHSSQNYIDLSKCYLLSEFRIRKENANGQLVDLAADEVAPIQLIGHTFIRNIKMSINGREVFNANSLMAYKSYFSHELSIPRPRDSHLNAAGYYRDTGGVLEVGDGCTARRNLFVGSRTAQFIAKIDADLFNQPR

SEQ ID NO: 120607 - protein, 377 aa, Heterodera glycines
FTSFMNRIPRKIIIISNILSNNLILFKQFYIYIFDFFLSFRHFLACSLQAISFLLIGFSTTMSMALVGVAFGSAAAGFGEICFLALSSFYDRSTVSAWCFSTVSAWCFGTGGSGIVSATAYAALTEPKLLGMSPQNAILTMLIVPTVYFLTWFVLVHSPRMHKAQLLRPSSWIVPANYFMIPIGLKKQTDFKIRKQINILVQPLLRYMLPISSVYVLDFLINSGLLQHVKFDCARSFGLSLASQFRWLQTFHVIGLFLARLSAIFVEMPSLILYSLPILMLANLAIFFGQALFSFVPHILLANLAIFFGQALFSFVPHILFVFAIIFFEGMLFGSGYTFFGKIHRKVIFTFYLKSALAQTVGVRVFSRDRWTCNRPG

SEQ ID NO: 120608 - protein, 132 aa, Heterodera glycines
MASSRPEYSGPPEQYYDNTEARKYTANSRIQKIQRELAQRAYELLELPARSPALLLDIGCGSGLRSPALLLDIGCGSGLSGAVLAEHGHHWVGLDISRAMLSFVDTESNGQLLLADMGAGLPFRPACFDGAI

SEQ ID NO: 120609 - protein, 144 aa, Heterodera glycines
MSGCGKGGKGLGKGGAKRYRKTGLHNIQCITKPVIRRLARCGGLKRIPGLDYEEISMAHHDNIQGITKNDFARNEGVKGTSGGINEIWPNDFRMDNESNTIVENFQIDETEEQIDWDPDANSAFLDIGATVELVGAESDIDDGN

SEQ ID NO: 120610 - protein, 87 aa, Heterodera glycines
KEIVTNAREDWFQRGGQVHITIYCKGALPSETSAKSDGLTLEVTINGSTKRYELFGEIAPSESVVIISERKVEIVLKQVAKIGWPKL

SEQ ID NO: 120611 - protein, 98 aa, Heterodera glycines
MIPLNLQIAESALKVLQTKTPGGEIEQSATAGAHCTNNTCKKVFTGPESDAEECVFHPGNAVFHEGLKYWSCCGRKTTDFTTFLDQLGCTRGKHCWKK

SEQ ID NO: 120612 - protein, 559 aa, Heterodera glycines
VALLVGLSGAFHFGIQITITNPSQQTFLLFLNSSLHINYGKRMDTKQLEVFVFWSLIVSMLFLGAIFGSLSIRPLADRFGRLRVLFFSNLLCTFGLFCSAFSYFVCQCLLFIFSRFAIGSRFAIGFLLALCLGLAGIFLAECSPKYCRGPKYCRGFVSMSTGALLQLGTVFGSFVAIPRVLGSSNLWWVMFTIEGTQLLATTIILTMVAEESPRFANSHSKKLFLSSVFFCFVIMKHSRDSLAFYHNCSGQILEERMGELRRETLRSVRHRSIVFGWQSKRANRKGTLIGSVVSLIGSVVSLSMGFSGIAVINAFAVELFRTTGVSEINAFAVELFRTTGVSEYWASIDNVGLALLSLISNIASAISNIASALLIDRFGRRRLLLVTLTAILLMNIVISGLMYAYAKTELSWLGLCLIVAISLFTVAFAFGPGPICYFLASELVEQSARSAAQGWANLCQMISRTFLLAIFLPLRASIGVASAYFMISRTFLLAIFLPLRASIGVASAYFLLFVTPILIALLFLFFNLPETPILIALLFLFFNLPETKRRDICEVRHGM

SEQ ID NO: 120613 - protein, 632 aa, Heterodera glycines
TMSVPIVLLCEGTQSKQGRDQILSNINACCAVADNIRTTLGPRGLDKLLVDRKGQTTIQTTISNDGATILKKLDIVFPAAVMICDIAKSQDAEVGDGTTSVVILAAELLKSAKPFIEEGVSPQLIIKAFNAASREAISKLRELSVKVTAISKLRELSVKVTGTEESREMLIRCAATTLSSKLLKQERHHFASMVVNAVDYLDVDLPLLLKQERHHFASMVVNAVDYLDVDLPLNMIGVKKVSGGSIKDSRLVKGVAFKDSRLVKGVAFKKAFSYAGFEMQPKHYKEPLIAILNIELELKAERDNAELRIGNVADYQEVVNAEWTILYQKLEKIHESGAKIVLSKLPIGDVATQWFADRDMFCAGRIQEDDLGDMFCAGRIQEDDLGRIMAACRIMAACGGSTLTTVSQIDKIVLGKCAEFYEQQVGSERYNFFIDGSKHKSCYNFFIDGSKHKSCTLLLRGGAEQFIAETERSLHDAIMIVRRAKKNDSIVAGGGAIGGAIEMELAKHLLGLANTREMKDQFFWKAFAKSFEMIPQQLCQNMIPQQLCQNAGLDSISMLGELRAAHQRGEKWAGVDIQRECVADNMEGCVWEPALVKENAIVSATEAACLVLSIDQTIKNPKNKNMPGLPGQ

SEQ ID NO: 120614 - protein, 200 aa, Heterodera glycines
MSEGLVQRRRKAAESNNSSNGGQQLDNDDKSAGTYRQTTDSNGAGDEDNDKMQRLTLMEEILLLGLKDRENEKMTGDVILDEALKHIKETPQKETVVSWIEYLRLAKNLVEKGVLTTEKQNFLLFDMTTHPLNDGNAKAKLVKRVQEAVLSKWTNDFQRMDKKMLSLLILAHASDANGGGESSAGSAFDVIYAVFEAFSK

SEQ ID NO: 120615 - protein, 438 aa, Heterodera glycines
MAFHKIDNDSVNSITNALDFFRIPPTNVSVSSSKVFELLPSNPLTDTPYHFKLHSSQNYIDLSKCYLLSEFRIRKENANGQLVDLAADEVAPIQLIGHTFIRNIKMSINGREVFNANSLMAYKSYFSHELSYSTAAKDSHLNAAGYYRDTGGVLEVGDGCTARRNLFVGSRTAQFMAKIDADLFNQPLYLINFCELDIEILPNDNEFVLITPPGVAAATRYHFEVVGLKMYVKKVSLMDGLALDIARKLELKPARYAVRKTLMKSLFISHGRFEFTSNLFMDQIPRRITMGLVANADYVGTVSRSPFNFQPFNVREISIIANGRSYPQAAYDLDYPNGKYVRPFNDMNEAVGFANSSESNGITLAQFGTTHCIYVFNLTSSGDDQATLFDLIRNGTTAVSIKFNQAVPAGGIMLVVMGECDSLVMLDKNRSISTDITI

SEQ ID NO: 120616 - protein, 96 aa, Heterodera glycines
MFSRNSSPRNSLAASIQIPLHLRNEGECSANLTSKEIFQKDPTNADFLVVHSTTPHYVSWRNSANGAWFVQSLCKVFSEMAPKHCEIFEMLTTVNY

SEQ ID NO: 120617 - protein, 355 aa, Heterodera glycines
IHLNASSNPTDSLQQRHEAVVHSRNVLYVCNVCQFECRWNREFYECQFECRWNREFYEHMRRLHFPGPPYSCDSCTYDVDRLTVLLTHRLTHTDEKPFKCSECTFDEKPFKCSECTFRTRNRANLVVHHRLHTGEKPFQCEICGKRFVLKRTLEHHSIARFVLKRTLEHHSIAHSEERPFACDQCNFTTKYQSHLISHRRIHSGELSGELFRCEVPDCDYSSPKKSQLAAHLRTHMGVKSHKCRICHRSFVEKSHCRICHRSFVEKSHLVRHERIHLEEKPFKCQNCEYTSSRRDKLKEHILKYHNQSQSNTRLLKRRYRRARQLQQGSKGKGGGKMDILLNTKYIGKNLIENLR

SEQ ID NO: 120618 - protein, 302 aa, Heterodera glycines
MITLCMPRRKFCLPFSIFAFVRMSFVFSSCVSFGQFARMMGFGAKQQLNVNYGNSVVNFKHILGRTFNDKVVQTFRQHIPCGLMGKFTDDQIEIKVPFFYEENQRRALLNAGRIAGLSLRLITDPAALAYCYGMYNGANLPPPEQPARLVAFVDVGHSSVQASLIAFSAGKAEVLAASFDLTVGGVHFDALLRDYFNEDFGKRFKIDARKTPRAWLRLLDECEKALTMKGTNELELSDQKANVGKQSAHSLCNRMLCERHRRQRSDAKVGDIFDVELVGGSSRIPRIKQIVAGSKFGKSLKG

SEQ ID NO: 120619 - protein, 313 aa, Heterodera glycines
LLLKKFTAFIKRLNELSLCRTLFGFHHLSEGEDIITRLDRLEKLLEGSGNPTLVTIIERLEKLEKLVERLIAGENRYGNRFADPQHTSHTSASTNNNGNVQWGQPPPFAGTGAVSQMITEAIINSEQLKEKSTRAVIKKLPEAMDQQAVVEQIAEQCGVKDKLSPDIHRHPRTRPEGGVKRDRILKVPFLDKFSRDKFLFNFRNAVKKLPNVPQHIKVRRDMTQSELKILYSLRQQAYQANIAAGVPQGSVLGPLLFLIFINDLPSFIANEAASVGIKMYADDVKLYYTHENDDHSNQLDKAIEALEKWSKIN

SEQ ID NO: 120620 - protein, 121 aa, Heterodera glycines
FQIFVKTLTGKTITLEVEASDPIENVKAKIHDKEGIPPDQQRIIFAGKQLEDARTMADYNIQKEKQLEDARTMADYNIQKESTLQLCLKLFGGARTGKTAHYSRSVSHDITSKKEPVSVLS

SEQ ID NO: 120621 - protein, 194 aa, Heterodera glycines
MESNRELILYRAKLADQAVRYYDMGQLMKKVVELDNVLNEEERNMLSIAYKAVIRPLRFALREISPIEWTQDGTEKQLQMLKRYREKLVKELHDTCNELVELLDKLISRADDPEVKVFYLKMKADVYRYMAAEAIGGVVDKSRQAYQEAFDIAKDKLRPANATRLGLGLNFCIFYYDNLDMEETAIDFAKKARD

SEQ ID NO: 120622 - protein, 287 aa, Heterodera glycines
KLLNDPRAIILFVVVKDLSTWHFSKRYDEYELERLSGGRAKIVHLTTVECFENLKLDDDLTLRLDGRPIGVAYWNLVRLGSDAFGPKSWAALRMIERSTAIKATSLFFELSTSKKIQQLLAKPGMVERFFTDPSEQQMVDAIRATFAKLWGLENKDEETQKIIQDAIAHPERYVLKPNKEGGGGNIWGEEISQKLRKFSRSELAAHILMERINPVTVKNFMVWPFKRAEFAEVINELGIYGYLIGNMNTGEVLEYEQPGNMVRTKNMHNNEGGVSSGNGVLDTPFLY

SEQ ID NO: 120623 - protein, 147 aa, Heterodera glycines
MAYKDVIESDTSVRTLLGILEDIKKEGIKQPISIFLQRSIEVNGGSIGSAGCQDRLLSIHQRMLKHTGCSDQMISNALPENRSGAAIAKIIYKAWKLLNDPRAIILFVVVKDLSTWHFSKRYDEYELERLSGGRAKIVHLTTVECFE

SEQ ID NO: 120624 - protein, 407 aa, Heterodera glycines
KKREDRERRRRVAERQTNRGKRNEPSDDEEGRQRDKRRRNPRGTADAGGRKVQQALKFSSAPQFSANHIVPFSDCQNNPKLAINLYFWPSPASDSPALLRCVDHPFRKNRRNLKKGPVTVVTSKKRRVTFFEVPNDINAMVDAAKIADLALILIDASFGFEALILIDASFGFEMEVFEFINICQVHGMPKVIGVLTHMDNVPKRSQLKSIKKQLKNRFWSELYQGAKLFYLTGMQKQGAKLFYLTGMQKQRYLQHEIKNLGRFISVAKLRPILWRNSHPYVFCDRFEDITDPELIRSDPKVSRSVSLYGYVRGVDPELIRSDPKVSRSVSLYGYVRGVHLKNNSAVHENGKGDSASEGKSRLGIGAFNPYKGTSRTVSRKMHMYYIPLDGRRVDFYCEFLILGPIAK

SEQ ID NO: 120625 - protein, 299 aa, Heterodera glycines
LFVCGTGDARVEAWDQRCRRRVAMLDCVLNKAIELELDLDSGGGSQIEVSSICFKDALHLAVGLSNGYVLLYDVRSSKPYLSKNHNFGLPITRLQFAPEQELVLSMDGRALKESITEELEAEKPSVYDDFKFVTKSQLEELGLSKLIGTNALRAYMHGFFVDMGTYKKARTATSVGAGALSAICEAERRWRRGGPTLAQIAQGQPRVAARLQAELSINETATMTPHTTDIDGKTGANDEDGTFAGEGGGGDGDEAASSSSKSLAAAEQPSLAAPTTATKDAVSADHGTAIAAAVTKPKK

SEQ ID NO: 120626 - protein, 244 aa, Heterodera glycines
MDVQVVVAPPSKARANPFSSIFRAKRQLPGHCHCGPPQRPNCPPGPPGPSGPPGQPGQPGGAGLPGQPGAPGQPAPPCPPQNIPCPLCPAGPPGSPGAQGLPGQQGAPGQPGAPAPGGGQGPPGASGPQGQPGQPGRSGTPGQPGQPGNNAVIYNTIPGPRGAPGAPGQPGSPGSQGQPGQAGGEGPPGPSWCAWDCPACLATLVSLGSPGHPANRAKTAATARARLALPRWHSKRKWAAVKKA

SEQ ID NO: 120627 - protein, 332 aa, Heterodera glycines
MAFLQNDDLGDSLDAVESLLKKHEDFEKSLAAQEEKIHALDEFATKLIEGGHYAAEDVAKRREKLLARRRHLMDRMAQRRERLKESYRLHSFDRDCDEMLGWIQEKLKTAKDQSYLDPTNIRGKLQKHGNFEQELRANRNRLDEIKATGQELIQSGHYANEHIQTRLNEVEQLWTELADASGLKGAKLQEANQEQLYNRNIEDVELWLSELEGQLASEDFGKDLISVQNLQKKLGLVESDYNAHQERIDAIGHQTREFHDTGHFNAPLIGKKFEALRARFEALREPLQRRKQKLAESLLGHQLFRDIDDELAWIREKEQIAASTNRGRDLVG

SEQ ID NO: 120628 - protein, 499 aa, Heterodera glycines
RSFPPCLLRRSASSFTWAFNPSMFTNIDYLSPTNEPVLEYRKGSAESDALEKELLSPTNEPVLEYRKGSAESDALEKELQKLWAEPMEVPLAIGGEKTFRKDFFICFQPFFFICFQPFDHNRPIALFNHATTEDIQNAISIGLAARHQWERLPLIKRADIFLHKRADIFLHAADLVAGKYRMLINAATMLGQAKNIQQAEIDAACELADFLRFNAYFAACELADFLRFNAYFALQNSKYQPISGKGYENSMLLRGLEGFVAAIAPFNFTAIGGNLAGFVAAIAPFNFTAIGGNLASAPALMGNVVMWKPSDTAVASNYVAYGNVVMWKPSDTAVASNYVAYKVFEEAGLSSGVISFLPSDGPTFGNLSSGVISFLPSDGPTFGNAVTNSKDLAGINFTGSVPTFQHLWKQISENLTTYATFPRLIGECGGKNFCGGKNFHFVHPSADVPSVVACTHRAAFEYQGQKCSACSRMVVPESLWSIQKSRMVVPESLWSIQKG

SEQ ID NO: 120629 - protein, 208 aa, Heterodera glycines
MFDFPLLTFLATRALLEWTQGERKLDEQIHPKMAPSLEDETNFNEENVRLFRYPFLKNPFWDGHFDENDSDRMAGKALEWLSYHLKLAKNDETNYDETLIRVIRLLGLSIQRKWTEAKSLAEEMFITVAPSDNARQMIYSSMEQMQQFLNFDEQIEAAEKQTEREKDDQNSEESEKMALKKEEERMMEVQRKHFWEWAERRKRLIHSQ

SEQ ID NO: 120630 - protein, 259 aa, Heterodera glycines
KHHDLDLVLIRENTEGEYSGLEHESVKGIVESIKIVTRRNIEKIARFAFDYAVLNNRPQITAIHKANIQKLGDGLFLQVCKEVAETEYKNAGLQFNSMIVDNACMQLVSFPQQFNNGILLMPNLYGNIVNKDTALPGGTYNIIVVFLKISNIACGLVGGPGLVSGMNIGEEYAVFETGTRNTGTSLAGKDIANPTAFIRASIDMLRYLELHDYADKLSDALYKALTEQRTHTPDIGGTNHSTEVVQAVINNYSETISNA

SEQ ID NO: 120631 - protein, 378 aa, Heterodera glycines
SLLPAVSKRLTRLPTGATGFGLYSPNESDFRQIISSSAPTSGNVVNSQNAQLTNGGGNGQHGLTEAEIYKDRRKKDIHNMIERRRRYNINERRRRYNINDRIKELGLMLPKSTSEEMKLNKGTEMKLNKGTILKASCDYIRQLQKDREIMIRQQQQTARLEDLTRQYFQQQQTARLEDLTRQYFQRVQELEHQLEKNGINVPPSNLPVLQRVQELEHQLEKNGINVPPSNLPVLGSLSPLSVNESIKKEPPEDSVNSNCAQQSVSFSPSSTPQATKIATSLQDMQIASPIGTAKPSAKCSTRITQSAWRSFPSRSFKHNHGNLMTANSVQNRGPLQGQDPLIPHNNQLSPIIQWDQSGFSPGNDTNPKKNVVQNIELL

SEQ ID NO: 120632 - protein, 125 aa, Heterodera glycines
MAQLPPEDVATMPTQKVVFNAPFDHKVTCHMRVINPGTKRIGYAFKTTKPKRINVNPPTGVLGPKESVNVAVSCDAFDPGSEDTKNDRVTVQWTNAPDPAAAFKLEWFQGDRKVRRKALPIKYNV

SEQ ID NO: 120633 - protein, 126 aa, Heterodera glycines; identical to SEQ ID NO: 119174

SEQ ID NO: 120634 - protein, 56 aa, Heterodera glycines
AVSCDAFDPGSDSSKGDRVTVEWTNTSDPAATAFKLEWFQGDGMVRRKNLPIEYNV

SEQ ID NO: 120635 - protein, 457 aa, Heterodera glycines
MGVELPPTITERLSTLKKDVIDALLDKNAVPPELITSLMAGVGGSAFSKALELVPSYNQNLQKMAKYYFTAKGGKLIRPTVSLLMSAACNQCAKRPTTPADTAPGRQAKSQRVTPTSIVNESEEQPIEISMNQYRIAMVAEMIHNATLVHDDVIDESNTRRGQPTANARWGNKQVENEQTTQYQGTGNGQTTQYQGTGNGQTTQYQGTGNGQTTQYQGTGNGQTTQYQGTGNGQTIQHLAVLVGDFILARATKVLCSIGEPPVIETMAEIVEDLVKGELLQLNGPSTSTGNARFNHYMVKTFYKTGSLFANSCRSVAMLSENCNGLLLELTTEFGRNLGLAFQLVDDILDYCATEEAMGKPTATDLRLGLATCPVLFAAEEFPDALNPMIERRFSADGDVQRALELVQRSDGLTQSRRLAKEQGEKAIQCAEQLLPEGGLVRDCLVDIVQRQLSRER

SEQ ID NO: 120636 - protein, 334 aa, Heterodera glycines
VKKFASQHLLQLKHLLGGKSRGFLKFKRRGFLKFKRLYRLKGALGHGGFGIVYRAVRISDQLPVAVKFIERRNVREWGKFIERRNVREWGKIDDHKVPMEIALLARCSNVSGVIALIDWFSLPEGFLIVMERPIPCMDLFDFIHHQKMLDENLARFLFLPIVKLARFLFLPIVKAVIELTERKVLHRDLKDENILDENILINLANGQIKLIDFGAATVFTRNRCIDFGAATVFTRNRCHDFQGTRLYCPPEWFWFLHSLYLGREATVWSLGVLLFNMLNGRLPFLNEKDICTAHLLGPLPFFTTLSKAARARDLLAQCLSFESVPSCSLNTISS

SEQ ID NO: 120637 - protein, 142 aa, Heterodera glycines
MSTHRLLPSLPRLKVPIGHRPQRLKLPYIPNPRGHLELVRKLVNRVIREERCELKYNRAEECRQYVERWWFIEQDLVDKMWSILVPRFSHYPIDQSYTEIYRLPTIRLKSKVNKETEFWNRYSIAVLELKGRETPSSSEFPS

SEQ ID NO: 120638 - protein, 241 aa, Heterodera glycines
MKSFVKDRFFVFNLDLGLYFFSYLIYIPKFPGQKQGKPSCRKIACTRKNQGLDPGPGQSLVFIGLGFMDSLIVTSLVFDIDSFARKFSAEQSDFTLSRFSEIFMEMELSSIFLGRFSFSDLVEFSENLFIYCSRFMFTPFSSTGSVGNGDQIHFNSDGMSSGRIADRNYKQRLFGLFLCYSFYFLQPSQYVVPISVTSSQLDDFYEFTSSVLLPEENFEALYCFYRLLNANAFSIAPVLGN

SEQ ID NO: 120639 - protein, 176 aa, Heterodera glycines
GGSVWTKDWRSGKCCCVGQGIRQIPLDMAGPGRAKAVSTIYFFDVSLGRLTPASFAAFPNLEEIFLDRASLLAHVDSRAFSGLKKLRKIAVLNSGALRELPLLEMGPQHSLPMERIDFSGGHLSANPSLDYIAETAFAGLAHIEHLDMSQTDITALPFIGLRSLKQLTLKVFNLVS

SEQ ID NO: 120640 - protein, 134 aa, Heterodera glycines
MFKSNASSSVPSARDPNYATLGQLDPNIFVKNNAPTKATSNQQKQQTKEGQMIFVSTRNPNYPTLAKLDPDIFVKNNAPTKTAPIKQQAKGGGRGYATTTDPDYATLGQVDSKIFDKNNEKDEKTGTDDDSESS

SEQ ID NO: 120641 - protein, 60 aa, Heterodera glycines
MSDAKMEIEESATSTSVASLSAIKKRFEVKKWNAVALWAWDIVVDTCAICRNHIMVFKFC

SEQ ID NO: 120642 - protein, 488 aa, Heterodera glycines
PRSKKKFKIFFSKQSFNSLKLSGNKFFKKESAGDSDAIPEGQIKSLAELKMDDIKEMKISQIKTVKGMVDEEMKISQIKTVKGMVDEEVRRTKLRMETLEGDRNEHLAKIGNLLHNSVPISDNEDENRVERTFGDCASRKSYSHVDLVVDLVVMCDGFDGERGTNVAGGRGYFLKGPLVFLEQALIALALQMLNKKGFTPLYTPFFMRKDVMQEVAQLSQFDEELYKVTKGSKSNEDGSPDEKYLIATSEQPIAAFHRDEWLNPSDLPIKYDEWLNPSDLPIKYAGMSTCFRQEVGSHGRVGSHGRDTRGIFRVHQFEKIEQFVICSPFDNESWKHMDEMIGNAEEFMIGNAEEFCKVLGLPYRIVAIVSAELNNAAAKKLDLEAWFPGSGAFRELVSCSNCTDYQSRRLRIRYGQTKKMDGEVNYVHMLNATMCATTRVICAILENNQTEDGIVVPEPLRPFMPSQYSQRIPFVKPAPIAGKSAEKE

SEQ ID NO: 120643 - protein, 65 aa, Heterodera glycines
MDKPIKLAKVTRILGRTGSQGQCTPVRVEFLDDTNRSIIRNVKGPVREGDILTLLEAEREARRPR

SEQ ID NO: 120644 - protein, 48 aa, Heterodera glycines
ASSTNEECTVAWGVCNHAFHFHCISRWLRTRQVCPLDNRDWEFQRYGH

SEQ ID NO: 120645 - protein, 224 aa, Heterodera glycines
MSAQKIASDSEWKKTPIGQTGLFNMGNTCFMNATLQPLFHTPGFSQLFQEKSAQRFVNGNNSFGTNGVISGSFSALNDLIWSGKFNALRPTAFLVNKRQSFEQNYDDTDLGASASDFNERAKLFSSSPVNDLFNLTNIYRVQCSTCNTTSARFEVVNQLSLEMLTNIDGLTLKDCLEAHFSSASLEDKWEGLSEVQKQTAGDTEHKNLGDSEGADRPFEEIFAD

SEQ ID NO: 120646 - protein, 196 aa, Heterodera glycines
MESENGKEEGPSSTTTKPAVLPYGQFPKNVWFLRENYVLDCDEFLEMVGPYCVCFFLIFSAPKVREEYDVILALSITKWVHLNWGDDGLKRFLRRTFLNLRPGGRLLLEAQPFPSYYKKAKMTSDMFETYKAIQFKPYQFKDFLLSDTVGFSECEELGTPTAISKGFERPILVFKKASSSTTPTTTKRKRERCLRP

SEQ ID NO: 120647 - protein, 128 aa, Heterodera glycines
MKKEYFINSQRISESDNVRDLGIIIDSKLNFSEHIRKIVRNAYLRIFQILRVLKSREIKTLTAAYKTFVRPQLKYATEVWNPNLKKDIDKIERVQKFFTRKAFRKFVVAVQINKAKEFRDLLKAMSSE

SEQ ID NO: 120648 - protein, 234 aa, Heterodera glycines
MNSSAAINANPSMSVPFHLQKQISIINKREPEKRIFVNRTVRLEKIQLFGFDMDYTLAEYKSPIMEAETFKFCIDYLIRIGYPREIAEFEYDPMFSIRGLWFDIKKEVEDCYPNKFVQLSERQIYVLNTLFNLPDAYLITRLVDFFDKFEQTPDRTGVRYSDVTMSYNAIYQDIRAAMDHVHGGISVGQLKKKILTRIGDFVEKDERIGVLLAQLRATGRKTFLLTNSDYEYTK

SEQ ID NO: 120649 - protein, 389 aa, Heterodera glycines
MNSANDVGKRLLPLGIRSAFTEFFVAETSAADQLRLIIRGQISTMGEQLVESVLQFYTDVRAQFPGKFNLRTLSRALAVANDQLQQRHYGTARHCLCRACSVAFVSQLDIEQRNRMQLVVTKWLGAVPSTARNGKLSEDDARKFVLIEGHKIPRGPLPVLTNDDNEQQQKQQYIFTQSVRANMALLASVVATGHFPVLMEGETSAGKTSMVMQLAKMSGNQCFRINNHEHTDVQEYIGSYAPDASGRLEFVEGVLLRAVRNGDWIILDELNLAPSAVLEALNRLLDDNRELFVSELNITVRAHPRFRLFATQNPVGTYAGRKRLSRAFLSRFMCLQWDALPHAELPNIVQRRCGVSPRMAELMAAVLAELKVRRAIGGIFASSDGLMTL

SEQ ID NO: 120650 - protein, 156 aa, Heterodera glycines
MTLFFNLKKSFLAASHESNQNPIKSNKNANFFGVYATAKKRNFSEIELKDMEKNPLPEGCTARPLDQRTMTPWTVTIRGRAGTPYENGNFQLSMAFPRDYPFKAPQVTFTTRIFHPNIDTRGKVCLDILQTYWAPTLTIEKGGVDLVVDLIMFYMD

SEQ ID NO: 120651 - protein, 438 aa, Heterodera glycines
MVFKKIDKESVNSITSALSIFTLPPTNVSVSSSSVREYLPLNPLTDIPFHFKILPTASFFDLNKCYILTEMSIKKLDFDTNKYVNLKVNEQAATINMIGATWIKNLKITVQGREIYDSNSLYAYKAYLDAELSYSKNVKESDLQASGYYVDSENQDGTDITQQGFELRRKLFSQSQTAQFITKLDADIFNQDRYMVNGVEIDIQLTPNDNEFMVMAAADDKYRIEITACKLYVKTLEVVDGFALDIQKKLENKEAKYAHRLTMIKSIFISENRTEYNGTLFTGQLPKRVILGMVENAAYVGNQKKSPFNFKPFDIRSVTLIANGKQWPAAPFELNFSKNLYTRAFHEMNEALGMASSTDSNGISLEKYRKGWTIFAFNMTNSMEDNEGIDLITEGTTTVCIQFRSPVPSGGITLIAMSEMDSILILDKNRTVMTDTTI

SEQ ID NO: 120652 - protein, 211 aa, Heterodera glycines
MVYLSSRAIGQSHYTKTYLQNFAQGSRTLPDGPVLLSPSSVLMAFRKEVIERKPEEFKIACLTDLKSLFPVGQPFFAGFGNRETDVKSYLAVQIPPERIMIIDPQGSLRRADNKAGGYVSDYPTLAMDSVDYVFPPRVDMDGIDIRTKEDGILSEFVAWRTDAEQFDALVDAELEQYEERSKRAKAIVAGTTDGRGADGKKKMYRNGRRAK

SEQ ID NO: 120653 - protein, 171 aa, Heterodera glycines
MFGWINIYLFFHTAFSFSSNKIIHKISLIICSNSLDKFEKYVYKVTRERFGKMKAYIDNELKEAIEFRKTSKEQADSLKAVHENFPTIFQENLALQLEATYRKNVDYAWQEMKRRLDYLQEVQAIKDRFSKEMMVKLITDGVRKQIEMNEGGIRDKYLDQCIEQLRVLSAK

SEQ ID NO: 120654 - protein, 592 aa, Heterodera glycines
MKFGEQLASHLTPEWRKQYIRYEELKSMLYDLMLEAPTEADARDQYVTQMDETFFAECEKELTKISLFFSQKIAEAQGKYHELSAELNLFKESVDHRQTPLTQRKSVRVRFNSATKLAPSSKLQKEQAKTAQQLKLAFSEFYLNLVLLQNYQQLNATGFRKILKKHDKLMLNDRGMAWRINRVEKSTFFLNADIESLINNVETTVINELEGGNRQAGMKRLKVPPLSEKQSAGTTFSLGMFMGIFIVLAIAIVLSLVGLQPKDNNQPKWVAVRLFRGFFLFFLSIFLCGLNMYGWAAAGVNHVLIFEYFICFYATEVDYSGAQLHVRTLNVTEGSIPWGFVDVNTGQDMCMSSVGIRSVVSVLPALVRFLQCLRRYRDSRAWHPHLVNAGKYATTFLWDIFMDWGLIDPTAPKEAPFLREEMIYGSKWYYYFAILEDFVLRLSWVMNVSLAEAWTLQGDFLVCIMAPLEVIRRFIWNYFRLENEHVNNCNALSMLPKTFQFDHLQSPKGGQFRAVRDISVKPIRKGDLESLLAKMDQQDGVTHRGQDLRDRVKKQKKAARDKKQILKKNRITRISLPAIHPQPSNTLLETMH

SEQ ID NO: 120655 - protein, 264 aa, Heterodera glycines
RSHNLRRRMKQQNLKKAPKKSSLADDETQRRMKEQNAKKAESARQRYHRMSTEEKKLSTEEKKLYNQRRTEAFRRRRMEEEALLAMPIGRINGEALDRAQQIVIRNARINGEALDRAQQIVIRNAKRAEAARLRYQRMTPEQRRAYNQKRTPEQRRAYNQKRYMPKRKRDMDMMMSMDSPLGIDKTDKMEREDEFDALSSLERDVQRRTQQAQALSSLERDVQRRTQQAQQTLRQRQWVVQQQTPSATTGHSNWIISGDKLRMT

SEQ ID NO: 120656 - protein, 290 aa, Heterodera glycines
MREFATSRARQTIVDFFVHDIGHHSSCYRRRLLLDIVPLLLQYFSREFFIDKFLPAVLKLSADPISNIRLQLCRTLPKIKQYLMFPNNDESLSNLERVVRELLASEQNALSRQLIQQFACELSRTEMDKKECRANRAKLAEEKRLWTEHEESTDETDEAEAGQQYSTEHTVTGSDAIGSPESGIFFEEDCWLGTVVGNGARPNNHQQMGGRLCRSATTTSISQHMETEHLIFAKLDRILVSCNNLMKGSTGSWRAHEAYLNGIAVLRNLVSTKDLLSNFVPLLKQEVLTA

SEQ ID NO: 120657 - protein, 374 aa, Heterodera glycines
YYRDTGGVLEVGDGCTARRNLFVGSRTAQFIAKIDADLFNQPLYLINFCELDIEILPNDNDFVLITPPGVAAATRYHFEVVGLKMYVKKVSLMDGLALDIARKLELKPARYAVRKTLMKSLFISHGRFEFTSNLFMDQIPRRITMGLVANADYVGTVSRSPFNFQPFNVREISIIANGRSYPQAAYDLDYPNGKYVRPFNDMNEAVGFANSSESNGITLAQFGTTHCIYVFNLTSSGDDQAALFDLIRNGTTAVSIKFNQAVPAGGIMLVVMGECDSLALLFSFFAIINMYSKKVGVILFLLRISLPVVSCREEIPEYSEYIRRKAMLTSTTTKTIPSTTSTSTTTTSSPPKSDKLIEEQVSAGLTPLIQLCKD

SEQ ID NO: 120658 - protein, 120 aa, Heterodera glycines
MPRYDATDDLSGAEYLASIYGTEKDKVNCSFFFKIGACRHGDNCLRAHHRPTFSNTVLLKHFYQSPIVNPAQADAFDKVGKKDELEQRHFDEFYEEVFTELQRTYGPVEELNVNWERIFA

SEQ ID NO: 120659 - protein, 396 aa, Heterodera glycines
MTCPQKISDSSPLAINTGLNIFLVPPTNVSVVRSFFRQVLPLATITQESPYLFRLYSDNLWTDLSRIYLYLELSIEKPGANDKWVAIDDADTSVSAIQGIGQTFVQQLKVTVGNTEVYDSGNLYPFKAYITNELSFPINAKKNFLGSTGYYHTINQDDSTDEGFKERCKIFKGGKNAQFLSRLDFDLGNQELYLLNNLDLLFTIYKAKDVFLLQTLKANDSTKYRLTVYDVKIYAKMVEVQPSLNMNLYKNLEKQPATYAVRKTEIKSSFISVGRYEFEYNVFSATIPRRVTIALVGNSAFHGDYKLSPFMFEPFDLREISVHAGGVVYPAVPYKLNFSNDHFVSAFVDMYEALGMANSERSFDISMAQFKKGWIFFVIPLTSTLDDSCGFELLRS

SEQ ID NO: 120660 - protein, 239 aa, Heterodera glycines
MLFADYRYENEHRDLRRVMGVGIAITRGAAAALSVDLALILLTVCRNLLTMLRETFVGEYLPLDSAITFHKIVAITAGTFAAIHTIGHCVNFYHVATQSQEGIAIYVFSAPAVMKRAYHAFRITHLLNVLLYALTILHGLPKLLDSPKFWYIVLGPVIIFIIDRIIGMRKHYKQLRIVDAAILPSDIIYIQFKRPHSFKFRSGQWVRISCPAFSCTFNESHAFSLASAPQSPTLELFIK

SEQ ID NO: 120661 - protein, 149 aa, Heterodera glycines
MALWNTGRSTGIQNWTPFNFKHFDIRDIAVHAGGFIYPMVPYKLAFKKDAFMRAYVDLYEALGMANSDRSCDITRQQFKNGWTLFVIPLTSTLDDSVGYELLRSGTTTIRASFNTAIPGGGVEMIVLGEFDQMIMIDYNRHIVSDSKLG

SEQ ID NO: 120662 - protein, 234 aa, Heterodera glycines
AKYDAFRRRHPLAHMKVNVNDYELLPMHCEYLIIGGGLTGSAAAYWLKQGFRDENLTVTVQRTPGYSFASLWCYAFGPDGGGRRAVQKCLETSSVIFNFFFLNYNYSNDRGANVILIGREELSSRFPFMNFDDVVLGTVGLENEGIFDTWQLLSALREKNMTLGVRYLKGDMEGTVTYRHRGMQEHGRTTDTADADAAEQSMQTIRGAINAAGPWAGEVARRAGLGSFLCIRPY

SEQ ID NO: 120663 - protein, 186 aa, Heterodera glycines
MTDSLVELSPGALVSGRWTVIKKLGAGAFGAVYLCQDQDGITKGALKTEPINAPFPLLALEAIVLRSFDTLRASSGKHFCRCMDLGRDQQPDAASGRTLEFNFIVMSLVGRPFDKLLQESGDCFSPGTAIGAALQLLKALQALHDVGYLHRDIKPANFAIGLPETNEQRLLYLLDFGMARKYLKDD

SEQ ID NO: 120664 - protein, 92 aa, Heterodera glycines
MITIDGKQIKLQIWDTAGQRDNFLTGDLEARREVKKEEGEQFARENGLVFMETSAKTAANVEEAFIDTAKEIYRKIQEGVFDINNEVNYHYQ

SEQ ID NO: 120665 - protein, 180 aa, Heterodera glycines
MLTKIAGSGTGDENSGSNTTIITMNIDGKVDGEEEERESHRRAAGTSRNGDDTVKKEEEGGGEEAEKQQKRRGEGEEEKENPSFVPSGKLAKDTNTYKGVLIKYNEPPEAKFPKLRWRLYPFKGDDTLPVFYIHRQSAYLIGRDRKIADFPVDHPSCSKQHAALQYRSLQYERSDGSIGR

SEQ ID NO: 120666 - protein, 164 aa, Heterodera glycines
MVERFFPNPEDAPMVTAIRKTFAKMWGLENPDDEETKRVIQDAIAHPERYVMKPNKEGGGKNFWEQEIVDRLKKFTSKQRAAYILMERLNPLVAQNYLIWANEKPIFSDVITELGVYTYCVYDTKAGTLVEYTQPGQMIRTKCASSNEGGIGAGLGVFDSLYLY

SEQ ID NO: 120667 - protein, 239 aa, Heterodera glycines
MYSLLHETDGATSVNFSAWGNFLPGPGKQLVTVCAKCIKFYRLNPFFVPTDGFAGQPPTVRLECLLSFTLMAPVRSLAVVRLKFSADCYDSLAMTFDDAKLSIVGVNPATMALTTISLHSIEDEFLRDGYTDENIHQPELRADPEHRCCAFTVYGRHLAVVPFNIVELVRQQSSAVSSREEAKLYNQQQQQQQMLLQSYTIKMRLLDERLDNVLDMCFLHGYYEPTLLFLYEPIQTTAG

SEQ ID NO: 120668 - protein, 297 aa, Heterodera glycines
MTDCRWMASVPMAFEQKVSMAQPQQSMAYLPDIETLRKGKVSPTILKSVGDLTLTRLCALPTQIPFESEVTVGRMLDARVHLGHKVGTLNDNMKWALYGERLGICVFDLEITRHYLLKALEFVRSVAFLGGRFLFVSTNKCCFPMGFPFGGICLFRSSMLMVETMADELGQYAHTRHWQPGTFTNTKSVFGGPIRLPDTVILLNTLTSAMEAHPALVDSAKMCIPTVAIVDSNSDQKGKKSFKELQQLHDKNGPLRLIRIDVSDDRSIRTAFGQVQKQLLDKGGLNLLINNAGILLK

SEQ ID NO: 120669 - protein, 334 aa, Heterodera glycines
MFYQTVCLLLLLSASNDVAVFGQEETTTTSTSSTSTSTTSSTSTSTTPTTTSSTSTSTTPSTTTSSTSTSTSTTPTTTSSTSTSTTPTTTSSTSTSTTPTTTSSTSTSTTPTTTSSTSTSTTPTTTSSTSTSTTPTTTSSTSTSTTPTTTSSTSTSTTPTTTSSTSTSTTSSTTSSTSTSSTSSTTSSTSTSTTPSTTSSASTSTSSSSSTTTKPSSGDSGSGASTSCTNAAGDRACNAYKNRCGQFSAWLKKNCAKMCNACTSSDSSTSTTTSTSTSTSTSTSSTTTKSSSGGGSSSSCTNSAGDRACNFYKNRCNTLAGWVKKHCAKACNAC

SEQ ID NO: 120670 - protein, 122 aa, Heterodera glycines
TSHYMRFALHEEHIPLRLTLTRSKKLLATINKNFGTLAFCRRWLDRLGETKYLMSLRDLCEKDIVKDIVAPYPPLCDQKGCYTAQWEHTILLRPKGCYTAQWEHTILLRPTCKEVVSRGEDY

SEQ ID NO: 120671 - protein, 537 aa, Heterodera glycines
MAFHKNDNDSVNSITNALDFFRILPTNVSVSSSKVFELLPSNPLTDTPYHFKLHSSQNYIDLSKCYLLTEFRIRKENANGQLINLNADDINIAPIQMIGQTFIRNVKMSINGREIFNANALMAYKTYFSHELSYSTTAKDSHLNAMGYYRDTDDTLEMGGGCTARRDLFAGSNVAQFIAKIDTDLFNQPLYLINFCELDIEILPNDNDFMLISPIAGAPRYHFEILGLKLYVKKVSLMDGLALDIARKLEVKPARYAVRKTMMKSMFISQGRYEFTSNLFMDQIPRRVTMGLVANADYVGTIRRSPFNFQPFNVREISIVANGRSYPQAPYDLDYPSGKYVRPFNDMNEAVGFANSSESNGITFSQYGKTHCIYVFNLTNSGDDQAALFDLIKNGTTAVSIKFNHPVPDGGIMLVVMGECDSLVIRLSLFKRTTAIVSTTTAPLTITSPKSDRLIDEHVAAVLPPLIQLCKDRPEEENFFHQAVCWALFTLYLMLIISLVLHQLCSIFWLKNGQHTNHKDFERKSSDRASISGLLRL

SEQ ID NO: 120672 - protein, 777 aa, Heterodera glycines
PWWYFLNTFHHFHRCQCQCQLSPLSFQSLAFGQHHHLLQQNRAVLEVPLSNRCFCNYGPSVCDMEDTCILEVPLSNRCFCNYGPSVCDMEDTCIKHTSAACFHAIVLVKHTSAACFHAIVLVFNSGTGAIERRHFFGCFNSGTGAIERRHFFGCAPLEKGSDASHLTCNAWRSSHSNGRTVCNAWRSSHSNGRTVACCYEGNFCNRNLTLPDSPALEVSTGLKLALSLRAQFAPRHRPSPAFPVPSFAICFSSVWLFGRPCLLLTFAVPFRCWLPPLGCRGIIFPIVVVGCLSFEQSCSASVDGVTLVQRSIALDLQLMEVFARGRYGELRKAFYRGTVVAVKIFYTTEEESWQNERDIYQCIFYTTEEESWQNERDIYQCQMLNHENILQFVAADILSSVESLTQMFVAADILSSVESLTQMLLITDFHLLITDFHPLGSLYDFLRANGRLSLDEALQFALSTISGLEHLHNALRGTAGRRKPLQFALSTISGLEHLHNALRGTAGRRKPEIAHRDIKSKNVLVKRRGVCCVADFSKNVLVKRRGVCCVADFGLAVRFEDGQIVPRSVNIGVGTKEDGQIVPRSVNIGVGTKRYMAPELLRYMAPELLLGTLNVRNFDAFKSADIYSFALVLWEILHCVQVSSRGDTEGFSSFKLELGFSQVSAEGKRRTEDRQQKVQREHRENREQREYREHALPFKGMVGNEIHSDPSFEQMRQIVCSGGEPFKGMVGNEIHSDPSFEQMRQIVCSGGESLPLPFTNFRNSVRTMETPMERRQC

SEQ ID NO: 120673 - protein, 324 aa, Heterodera glycines
EFFEKDFGACTFDFVKVSPDRTKLYIAVRFDSKAAARKVMENFSTDGELLGFKVEMTWFRDIRRYLAHCAKQGIRPSRFRGRSDYRRDDEQYKGRGRSRQVGGTNGDKKVRLSPPRVLSPSPPPLKKSKKEKRKKEKRQRRSKHMSPSLAVHRQPHSGSDMEMGGEEEDGLSNGGGRKMLKMESSSPVNNSKACGQLGENEPNRGMGGEYPLAFSDDFHWSGQAHCPTVADCTTKAAQGGAAQPVHHPRTVSPPKFKPIGELSDYQQQINGSKGMQELSNIRLATPPPQPPPVLRNVPLPPVTSNNNEMMVDRNYIAKVPLPLF

SEQ ID NO: 120674 - protein, 204 aa, Heterodera glycines
MNMVQPKCPPGPPGPPGPAGTPGLPGSPGNAGEPGQPGQQSGPCPPAAAVGCQKCPAGPTGQPGAQGQPGTLGNDGTPGQPGQSAGPGAAGPPGAPGPAGVPGPPGSPGQPGQPGASATQSTFVPGPPGLPGNAGPPGQPGAPGQPGNPGGQGLPGVPGAPGQPGTAGTPGQPGQPGLPGQPGHDGAYCQCPPRTALLLHRFHA

SEQ ID NO: 120675 - protein, 459 aa, Heterodera glycines
MNPSNTVFDAKRLIGRKFDDPAVQSDMKHWPFKVVQGEGARPKVMVEVKGEDKAFFPEEVSSMVLIKMKETAEAFLGQTVTDAVVTVPAYFNDSQRQATKDAGTIAGLNVLRIINEPTAAAIAYGLDKKGQGERHVLIFDLGGGTFDVSILTIEDGIFEVKSTAGDTHLGGEDFDNRMVNHFVAEFKRKHKKDLSSNPRALRRLRTACERAKRTLSGSTQASIEIDSLFDGIDFYTNITRARFEELCADLFRNTMDPVEKALRDAKMDKSQIHDIVLVGGSTRIPKVQKLLSDFFSGKELNKSINPDEAVAYGAAVQAAILSGDKSETVQDLLLLDVAPLSLGIETAGGVMTSLIKRNTTIPTKTSQTFTTYSDNQPGVLIQVYEGERAMTKDNNLLGKFELSGIPPAPRGVPQIEVTFDIDANGILNVSAQDKSTGKQNKITITNDKGRLYKEEIERM

SEQ ID NO: 120676 - protein, 306 aa, Heterodera glycines
MEELVGNIPGARQVFERWMEWEPDEQAWLTFINFEMRYKEVDRARDLYQVKREQRERKPNKQNNARNSALFACPWARLQKLDHLPTTRTTELFKCLTMHEKKFGERLRIEGVIFSKRRHQYEEQVKENPFNYDAWFNYVRLLMAEEADRAEVEECFERAISNVPPYVEKRFWRRYIWLWVYYAIYEELDVEDVGKCREVWRACLDIVPHKQFTFAFTWLMFAQFELRQLNLGSARKILGTAIGKCPKKKLFREYIGDGVAAEGVRPQWRDFEAQHGTEAERSAVERMMPKRVKKRRQITATDGTDA

SEQ ID NO: 120677 - protein, 306 aa, Heterodera glycines
GQSAKTRARKKHAKALLRRHPPPKKREMKNLVDKCALLGIKIVDKCALLGIKINSISSKTLADSLKVYEHREEYRYGVIPALNQMLMKCMHLAQYFCTGLVESEREFRHYALSVDFYTHFTSPIRRYPDVVVHRLLAACLGYAASPDYSTEQVDKIAGRANSTKTGAKVCSELSGEIFFGAIVRSEGHFEALGIVMGISEGHFEALGIVMGIYDGCFDVLLLKYAIIKRVYLKVLAYTSFEGAVIAPDAQLDVPTWVSSSEEEQRQTVRMMSIVSVRLVPVKNTVKYEVRMGDGGMNALSGCIKKF

SEQ ID NO: 120678 - protein, 186 aa, Heterodera glycines
MTPKYPGIKAESAGTIKSDEGPAKRLFNKMFPIKLIRLSVLLVILFEFVFIGVKCNAPKETNEDVKNKQNEYLDTKALVEDAIDWAQKISLVWLPKQHMGRSDVTEIVPFTLFPSPFPRKMFEFGQKVQIAYNLLYFRVSNDYEFITKAYEKVAETNIAIRRLLTILKAVTAEGIKQTKSLVLARS

SEQ ID NO: 120679 - protein, 404 aa, Heterodera glycines
MSRVFATQSRFLRHILPDGQQQQQEDGDDDVGCQRIEEGMCGTGGTPLANIDQQQPFAWRKIVVRSNPLSGGDCSSGSASIDMGNTRVMCTVNGPRELQQQSVSSSADAAASMEEGVLCVTLRGCDIDASLRYSVERALQAATETAIELNVLSDDGGAFAACLVAAGVAIASANIEMLDVLLACNVLLIPSNSLTAPLRIVFDPDKATIAAHKVKCKSEEEKELKDAFMYRAYIGLNKCSVPLGEIDATDGNGSAALMAIRRFATFMSGAPEKRSFRELSGKIEEALRVLNRTASDSLECAALRVQCLLKLNRGDLAAKEVKRMQEMDEDATITQLAQAWLNMAMAMIEVGRDKLKDAFYIYQEMLDKYGATPLLLTSQAACLIMQQKYEEAEKLLLVLQKKKH

SEQ ID NO: 120680 - protein, 165 aa, Heterodera glycines
MGDFGEWYRSIPLITRYWFTGSTVIPLLGRLGIFHPYLMLLSWELFFYKLQLWRPLSALFYYPVTPQTGFHWMLMCYFLYNYSKDLETSQFDGRPADFLFMLIFNWICCTAIYLPWILVAFSMVLRGGGINELVGILVGHTYYFLAFQYALDYGGSVLLRTPQFL

SEQ ID NO: 120681 - protein, 419 aa, Heterodera glycines
QMGSKSNAKFDFCNPVLPKPRCHITSTGAILLADIIPSLIIKLFSPFIIDRVPFGFRHLLFRHLLVCIMQALSFVIVAFSQSFTLSLIGIIFASLGNGLGENCLLALSSHYKRSTISAWSSGTSTISAWSSGTGGAGIVGSVAYAALTEPKLFGLSPRNALLSMLIVPIIFAIAYWGLLTPSPTVHRTKLLNPSTWIIQVKRKKHSEFNLNFFNVKILMNNSEIIKFILLLIKFILLLHLMVPLGIVYFAEYLINSGLHQLLHFDCAHGFGLSEASQFRWYQTLYQLGVFISRSSVTVLALPTYVLYLLAVLQCGNILIFYFQSLFNYIPHCGNILIFYFQSLFNYIPHIGIVFIVIFVEGLLGGASYVNTFDKIHKKVNYFKKYILSFLISNFHFSTDFPFFISFFQYYDICVQMFFF

SEQ ID NO: 120682 - protein, 142 aa, Heterodera glycines
MVYYNNASSYIQWQVIRKNSAFLKRQRGIPKHFSTEPFNMARLNSIRHNGMINKKAVDISAAKDGKGVVMSVKKHKNVAKPLQAVASTALTRDSRRVISAVGNAVTAYKPSHAKLAQRRASQILRSQKTKAKPATVRKGKAE

SEQ ID NO: 120683 - protein, 228 aa, Heterodera glycines
MCRFGQFVEENCNNGHRFNPTVSGQIAEIKRKVIGVGEKKPSKAMGKMRAVNKSLIQRIWKVFISLYVLKIGRCDPSFACPEHQKPPCFEGQMRVTETPSAAPTAKCTTEYELCRDGRFKRISCPYGEHFAGGRCVAGNCNGGQSGSGQGQTDRTAMCKVRRHVLISGICLDYAQESPGPQGFRSDSKNCAKFYQCANGKWVPKDCAKGTVFNPALAVCDWPANVPGC

SEQ ID NO: 120684 - protein, 61 aa, Heterodera glycines
EMQEAFETQSMAKIFEVAKSMDSEVFKYHLDRCTASGLWIPNAKEAEGHGQEEEEKETEEK

SEQ ID NO: 120685 - protein, 371 aa, Heterodera glycines
FLEKFSKKLISQSVIKAGLYSKKNLGVHVSAAGNLENAIWLENAIWNAIEMGCRSFALFVRNQRRWNAKPMDESVVERWNCAIKKTKFPLHQIVPHGSYLLNAGSPDQKKLEMTRKAMLDECQRCERLGIQFYNFHPGSTTGKCTREQSTTGKCTREQSISTIADTINYVLENTHLITLVVETMAGSGNTIGATFAELRSIIDGLVVETMAGSGNTIGATFAELRSIIDGVQNKERVGVCLDTCHLFAAGYDIANYDIANNYKGVMEEFASTVGLPFLKALHLNDSKGICSSKLDRHENIGKGKSSKLDRHENIGKGKLGTKAFEQIMGDERLDGIPMILETPEGKYPEEMSLLYELERIEMSLLYELERI

SEQ ID NO: 120686 - protein, 155 aa, Heterodera glycines; identical to SEQ ID NO: 119223

SEQ ID NO: 120687 - protein, 765 aa, Heterodera glycines
MPWINSILINARSIANKIADLEYLIETNKHQIILINETWLNTRNTITTELTLNGKFQTVLANRDNKRGGGCAILHVKEPTREKSILDLIFSGKPSIVNDIKVLEHFSTSDHKMISFKVSQEINKTREPKIFVRDFSYKNFQKLNQMILLNRLSCVINTKFYLEEKYNTLLIELMKAFNHTIPKKPLKQIVKQSYPQKIRDLYDEKLKLHKLIKNCKGNEKYKLSYKIVSRVHKKHLKQFWDKRENNIISSGQKALTNYVRKKLNPKNSIPYLIDNSGNICFDEKEKNNIPYILLKNCSETLAVILSDIFRLTLDSGQIPKIWRTSIIVPIYKKGEKSNPENYRPISLTSTVCRVFERILARKIIEFLNKNNFFSKEQFGFLKNRSTTTQLLQTLHDFYEAIQNQKEVDVIYIDFSKAFDSVPIDLLLAKIKNAGIVGKILVFLRNFLSQRSFRVKIEDHYSESYNTYTGVPQGSVLGPLLFLIFINDLPANIPKNVKIKMYADDVKLYIFHQNDSNTNDLSEAIKILEKWSKSNGLEISVEKSQTLYIGKNNSKKEYFLNGKIIPSLEKVKDLGVIIDSKLSFAEHINKIIKNAYLKAYHILRIMKTRELKTIIRMYKTYVRPQLEYAVEIWNPNLKKDIERIEKVQKFFTRKAFKKCGLLHRSYSERLEICQLIELAKRRNIADLTTAFKIMKGFTSLDASKLFTFSDRPTRRPLLLRMRRTTTKSKNNFFNRIAKNWNKLPIVPIQADKANQFRALLKAMYEF

SEQ ID NO: 120688 - protein, 83 aa, Heterodera glycines
LTLSILCSRQLSLLSLQMARTKQTARKSTGGKAPRKQLATKAARKSAPATGGVKKPHRYRPGTVALRIRRYQKSTELLIRKLP

SEQ ID NO: 120689 - protein, 86 aa, Heterodera glycines; identical to SEQ ID NO: 119620

SEQ ID NO: 120690 - protein, 215 aa, Heterodera glycines
LFNLRFASKELSRNAKKCDKQEKEEKVKLTNALKKGNREVAQVHAENSIRKKNEALNYLRMSARIDAVAARVQTDATQKRVSSSMQGVVKAMESAMKSMNLEKVQNLMDRFEKDFEDLDVQSATMEGSMNATTTLNAPRSEVDALIQEAADKAGLELGMEMPAAQTGQLDTVSSKASVADNDDLSKVDNWSSFGRPEANLTSEWTDRMTPFAKSL

SEQ ID NO: 120691 - protein, 402 aa, Heterodera glycines
MQFQRWINGEVEVSKDGTDLSDEGEDESDTLRNIARLVIAGDFARFAQNDIETQRVSMIGAELDSDMDSFSQFDKFLATLLQNLRVDLMPGASDPVQCMIPQQPIPPAVFTLAAPFQPMLNTVTNPYSFELNGVRFLGTSGQNINDLRRLTRGKDTLALMERTLEMGYIFPTVPDTLPGFPFSGRDPLVLDQIPHIYFVGNQPTFEKRIVEFGGKPTKSQKMPFVKFKPGKQFGRYNTRLFKEIVKSKNKEPIPRIVPTDSIESMGFDVLDPQDAGFLQKMAGGPKQPNFQLPPHLRKPEKMEHPLFKSEECFAFEGITGMTDGIDEACALIRATKAQPVPDRVWNSLPRDFLPADFEHSVEDAIWAGERFDPTLEKLPRKFDPILFWIKYKMCYGTPVTKR

SEQ ID NO: 120692 - protein, 334 aa, Heterodera glycines
MASSVNGTESPTSVRRNNWESDGEEGDNWNVLARTEAEDRQWRSRREERERLGAVGVRHIWGYSPTHNELERVFEEHRIAERMLKEELKRDVISEKNRSEKKRKRKEAREEQNDQSTKEETSDETTEESSKDSESSEDKKRKRKRGRKERGKKRKEESKRRKKHKKSKRKSSTTSGSSDETSKGGGKGDEWVEFTKEMQVKKSKKEEAAMIGPQIPEDLLQKLNPTMAPEMKLDASARNNMLRGEAAAMAAYAAQGKRIPRRGEIGLSSNEISTFESVGYVMSGTRHKAMEATRLRKENQILTAEEKRLLSTFTDEQRTRREDTVLKQFKDLIT

SEQ ID NO: 120693 - protein, 315 aa, Heterodera glycines
IKPELIRDKTGLSLDGRMVVALLAWPTEWVVLVGSFLSTFGAALQCLCSAPRLLQAPRLLQSIAKDDVIPFLQPFAKVTKKNEPFFGLLLTTLIAELGILMGAMDTINEPFFGLLLTTLIAELGILMGAMDTIAAVLDFFFLMCYAFVNIICALHSILGAPNWRPRFVYYHWSLSVLGASLSVLGAALCFFIMFSTHWHYAILSIVFCIVIYKYVEWKGAKKEWGDGIRAKKEWGDGIRGLALSTAQYSLMQIPEKDPHPKNWRPQLLILQSMPWSKELVDLRPQLLILQSMPWSKELVDLRYLKLWDFASQLKA

SEQ ID NO: 120694 - protein, 166 aa, Heterodera glycines
MSFSHAALLFIVFAIFAGKSGETFAFQSDIAQLMPKLDNTTGKAHDIENDPSKADKTWTIIDTGIGMTKADLVNNLGAIAKSGTKAFMEALQTGIGALMPGHFGAAFYSAFSVADRVTSKHNDDDCYQWESSAGGSFIIRNCADPEVTRGTKIVLHLQEDQTAYLE

SEQ ID NO: 120695 - protein, 709 aa, Heterodera glycines
MRVSCMAILCLALLSECPAGDSPVFLLHHNTSVASGIRSAPVPGVLECTELCSVARQCQLVGPKSASEGAVAEFGEEMTRTVTKNCVKSERICSSPFHFDVHEQKILVGFAREVVSADSVHRCLSACLNAFDTFGFECESVMYYPVDAECILNTEDRLDRPDLFVDEHEDTVIYLDNNCAGCECQSGILNDQQFAIAAQCYAPYVTQYVAVEGRQLSDELDRFEGLELSECEELCTQRLSVTANDFNCKSFMYSNLTRSCVLSDERSRPLGRANLAEVPGWTYFEKKCFASPRTCRGVPSFTRVPQMLLVGFASFVSPRTCRGVPSFTRVPQMLLVGFASFVMENVPSVTMCLDQCTNPPPETPPPETGQNFVCKSVMYYYNEQECILNAQECILNAESRHSKPDLFIPEEDDFVVDYFDINCRLESEQCSAGEGARSPKIVRTLNAALPEGDGAIHVVETVQAVRECAQKCAAHSPCAAHSPDKCRSFNFDKSSGICNLLYLDGRGSLRPEPKGQVDLYDLHCLVDLYDLHCLETSPEGQSMGCVDPEGAAFSRHRHLYSRVGGELSKELHSVPLSKCLNLCAGAGHCEGLNYNRRNGTCACEGLNYNRRNGTCAVIDSVGGDAESEQVDFYRNVCALKEVQSEESSAANVPKSKRDMGGEMKGIKSKIGKLMKKEKKALVSGTSEEKAQKRTKKLDTNERTAHLTKR

SEQ ID NO: 120696 - protein, 306 aa, Heterodera glycines
MSNLDNPRIFYQDRVFSNDAADNVLDGAREMVAEYKRLDEIYQRFIREFSIGGLNFKYREELKLNYTLGNYSLIVDFNDLATFDEDAAGKIKRYPTTFLPALESAVKRVVDDITHPRPPGEEEIHDIQVIVNLSDKALGIRKIKSSDVSQLVKVSGIVVAASQARSRATKVTLQCRTCRHTIVDREIRAGLEGFQLPRQCQSANQQAAVGGQRCPLDPYMVLPDKCRCIDFQTLKLQELPEDVPHSEMPRHMQIYVDRYLTDKVSPGNRITVTGIYSIKRVTGGKKGGKEDGKAGMSGIRTPYIRA

SEQ ID NO: 120697 - protein, 171 aa, Heterodera glycines
MEAQNSNLPLVGTNVGTSEHLEPSIARFGDWRIVNAFGDLSPEPETRFDLAQRFVAFFEKKERGVDMHASIKRRKDYINPALYEALRNAYGIDEKGTCFARAVYDPNAFAADDFYDALGERARSPGGARATPEKDGPATTAAGATPTQQQQKARLFSDRRRKSEMMPKRSE

SEQ ID NO: 120698 - protein, 245 aa, Heterodera glycines
MNSLLAYGSDSDEEGQHQQSRHGQPEPDQQPREEQKQRGNGGLAGQLSSSSSSSALAAAAVPLEEPCPPRRQSDMFDEDDDEADVFGSERRRNDEDDEEEELDLLLEKGAKFSDSAMLDVGGSSGGGGSTPGPGYTPRSVCSADEPMDEDMAAESSADAIQHRDLPPSPRGECDPELAQRFVAFFEKKERGVDMHASIKRRKDYINPALYEALRNAYGIDEKGTCFARAVYDPNAFAADDFYDAL

SEQ ID NO: 120699 - protein, 633 aa, Heterodera glycines
MDHHRFAPPINHSHSSSKTALSPPISSAITSSDTASVAAPSFSSLSIRIHGDQQAQQQQLRHSSHLLLLDDGLRAISNIKKAKVPGKTALSIASTFHELSELKQNIALPSPKPQPHSPSASTVSAFAVSEGGSDVSGALFPPSSSATVRVVESAAAVIYPISSSAHSFQSSTELNNKLRQLDNAAQIAESAKHRPKCSPTVLPGGVLSTTYRKKSNERIVHPGGPGEEPQIEVIPCKVCGDKSSGVHYGVITCEGCKGFFRRSQNAPVNYQCARQKCCTVDRVSRNRCQFCRLKKCLELGMSREAVKFGRMSKKQREKVEDEQEFKYSPPSNNAQNVSSASLPLPLYYGHPPGTHPHHAHHQLQQHQQQQLVHQSNAYHEEEMPSFHTMDGQPIQLLRHATALPTAAPSCVGAHFVFAKCGSVFPVRCHPSLRCRTIEQNRADGWLKFANELTNVTKCIIEFAKMVKEFLELEQDHKIHALKKTTFDLAIIAMAQHYHQQSQTLHVNNLVLPVYQFRCSDRKDEEFGKELISRLQYLSSFQLTSTETALLSAFVLMDQSQAPGMEAFVGQLKSCLGGQLHQRMPDGDEALRQLLEFLPRLRELAKTHRKCLGRFRLQMVDQQSEHQTDRGAAE

SEQ ID NO: 120700 - protein, 135 aa, Heterodera glycines
RRLFADLRSDYPALIGQIDVKFVRDLTTGYDNAQPDDRAILPLSTSSYDNAQPDDRAILPLSTSSEMVTFTLVDGSAVTLRASGTEPKVKYYIELRTEPGKEEKLSSVLEQLDQLESDVVDTLLQPTKYGLISRI

SEQ ID NO: 120701 - protein, 709 aa, Heterodera glycines
MGMKEGEHKKKIVKSMGILGSQSIQWQRKDSKRTCEWLDFWKLVVAISNIYIYYLLLILFRPLSSKYFGESSDETDTVALIKVIADRPEDVRRTLTMFPAKLQEQQQHHHLHVSPRDELPQEQQQPNPLPTCREEFPQEQQQPLPVCREEFSIFRDPAKSMVHLLIMLPFHRLPNVQICCDLDDVTLAGAHGKFAPTVFTSTPRRSVAFCAFEPPMMEMDNDGLMGPAPSEDREERVGGLFAPGKKMTTNDIVKALPNLKIGSTIMEETEEDEKENSFASPHRKKARQGTNASHPPSLVHSSKQTSQLNDVSHNQPKAVSAETPTEEGQPDPDTTHLGIVEQIKTGTENPWDEEKRNQILQTAHVMVESHAFMTEKCPRFELNRTIHLGGESFSIEDLLGQGGFARVYRANSREDGCTYAIKYESPACPWEVYICSALKRRIPSQFAAYLMEVRDAYIFKNASAIVYEYFPKGTLLDLTNVYKKNGTVVGGLLATFFGIHLARALRQVHETANIIHADVKPDNVMLLTAALNAHDSLDNLLKTPVLKLIDWGRSIDMNHFQGVEFHGKAGTENFDCVEMKTGMPWTFQTDFYGFCATMYVMMNGEYLAHGSVRRVDAVVRSVPEHSQLQTAAKMVKYIGPNGKPTGRGCENGAFGVEKSDRTVQRIRQTTGVKEKGQDIGSDFCANDITYPKMLFCFIYKNNCPPHINK

SEQ ID NO: 120702 - protein, 349 aa, Heterodera glycines
MCIELENFMCHNKLRLNFDVDSNNCFYIIGPNGSGKSALFAGLNIGLGGTGRSNERGKTLHSYIKDGKSDAHIRIYLSNEGPFACANFDEVVVVERHITEKATNFTLKTSAKFGGRERVVSRKRAELDALLEQFGIELDNPLAWLSQDRSRQFLQQMKPEKLYQLYRKTAEMDSTDLMFQSIEAHFDEFCRVFDSLAAEKKAREENYIQMKNRHKASREIKDKKVERQRLLWYNFWAPIRDNITRVNGNRAEVGTLSTEKVDLLEQIQQHMAQKDKLIQKQQSLLPQKEEEVKKCKQQHEKIMEMKRKVRELEFEITDLKRDLHKRTHQKMAFDKDIGEANAKLAAIIG

SEQ ID NO: 120703 - protein, 158 aa, Heterodera glycines
MKTRLICQRSERRKWIHCFENVTSIMFLVALSEYDQVLVECDNENRMEESKALFRTIITYPWFQNSSVILFLNKKDLLAEKILYSHLADYFPEYDGPPRDEITAREFILKMFVDLNPDAEKIIYSHFTCATDTENIRFVFAAVKDTILQHNLREYNLV

SEQ ID NO: 120704 - protein, 185 aa, Heterodera glycines
QRVESAKRRVVLSALYLGTDALEQRLVHRLAVAAKTVATKRPVKVRILLDFFRATRGATADGKSSTTMLAPLCIYDNVEVRLFHTPKLRGLLKSALPERTNEIVGLQHMKFFVFDNSVLITGANLSDQYFVNRRDRYLLIEDCPLLADFFVDLFHLVGDNSFRLLADGRVEFTAGGTLSPIHPET

SEQ ID NO: 120705 - protein, 294 aa, Heterodera glycines
MVDFDKNAAQREAESLRTLAFFGVCLSTVATVIAVLSVPFAYQHFQQIGAQMQNDVDFCKMRSGNMWREVTRTQAYSKVTHDSRHKRQVGGCCGCGVSPPGLPGPPGPQGQPGGDGQPGGSGQPGAPGPQRVYLEFHETVNSSLGQAAPRPYPPSGGCVPQCDAAQPGLPGPPGPPGPEGQPGQPGQSAPPASPGRPGQPGPPGPDGQPGNPGESGQLGQPGKLSQGPPVVGPPGPQGPPGQPGQPGENGQPGQPGGPGPQGYPGDGGNPGAPGNPGGVGEPGQLGAQGASGQC

SEQ ID NO: 120706 - protein, 86 aa, Heterodera glycines
LQLYIIYTLLGLERHLVMVHGLVTADLLAKAQRKADSGRCKLCSKQYAVAPPTKSWNGIWRRNIRTPGPTSNSSNINNSSSSSSSN

SEQ ID NO: 120707 - protein, 202 aa, Heterodera glycines
PLKNCNSFLKATSAAAAAAHSAATAVGGGAAAPTSHPHQHQHHYVCEICDLAQLTDREQYRVHLQSAHRQLLGKNNAEMASGAPLACSRCRDRFWTYEGLERHLVMVHGLVTADLLAKAQRKADSGRCKLCSKQYAFNILQHLVSDHQIKLCSAEIMYSCDVCSYRCTSYQKLERHLETEHPKATAATSTTAAAAAAATLGK

SEQ ID NO: 120708 - protein, 117 aa, Heterodera glycines
MLRIADPYIAWGYPSQKIIRQLVYKRGYAKESGQRIPITDNAIVERNMGKSDVICVEDMIHQIWTVGPHFKQVTNFLWPFKLSNPVGGFKKKSNHFVEGGDYGNREDQINKLLEKMI

SEQ ID NO: 120709 - protein, 248 aa, Heterodera glycines
ISFSNKKVCSGVPQGSVLGPLLFLIYINDLPDALPSGVRIKLYADDVKLYISDTEIMHKALHNLSEWANKWQIRISIKKTFVLHLGNKNPKEIYKIDGNIINVVDTIRDLGINIDNKLQFSNHVAQIIKNAYLRMRSLFRVIKSKSSRIWIILYKTYVRPLLEYAPEVWNPSLLKNIKKIEKCQKYFTKRVLFKCSLPPIPYQQRLEYLQLPTLESRRKLSDLFMAHKIIYGRTEIPMKYSNLLNALT

SEQ ID NO: 120710 - protein, 284 aa, Heterodera glycines
MAEAPRPFPDNLIQKIVRSKQMEFPKEVSSGEIQQLCAAATDAFKRQPSLVEILPPVMVCGDVHGQFPDLMRIFNCLGTPPEKKYLFLGDYVDRGAQSVETIMLLLCYKVKYPTSIVLLRGNHETSNINATYGFKKELEERYPAHSQALFDSFNDTFAWMPLTGLIGQKILCMHGGISEKIRSIEQLKQLERPMLLPPTDSLHIDLMWADPMEAQGQLPNPRGAGVLFGEDVVIRTCQLLKISCIIRAHQFIQSGFEPMFNQRLITVFSAPAYTGQTNTGAVLE

SEQ ID NO: 120711 - protein, 170 aa, Heterodera glycines
GGGGNRRHQYNVFCTFYFRFLLFFQIFKMTDSMFKYDQREQRMIRNVKQWEQDPHYFKEVISALILLKMVMHRSGGNIEIMGLMNCRVDANTIIVLDAFALPVKGFFTRKKLQTNTNYFLKKKIRFFVCSNLAQVFSWYHLHPGYALWLSGIDVNTQSINQQFQVRSSHT

SEQ ID NO: 120712 - protein, 170 aa, Heterodera glycines
MANIFEFYGLLLPISATDPNYGTLKNLDADIFTKNAPAKPAAAPKAGPAPHGGGGQALTPTTDPNYGTLKNLDADIFTKNAPAKPAAAPKAGPAPHGGGGQALTPTTDPNYGTLKNLDADIFTKNAPAKPAAAPKAGPAPHGGGGQALTPTTDPNYGTLQNLDAEIFVKK

SEQ ID NO: 120713 - protein, 341 aa, Heterodera glycines
PKAGAAVPTPQTSAVGGPPGAAEAPSSVKSSEKSGGSKKGPAPKKGAAAKKGPPAAAAKKPSPKGKAPPPQKKSGKGSAKGPMPPAASKELVPQSEPNYGTLVGLDKEIFAKEQQAKGGMPPPPMGAPQPQQQAPGPAMTPTTDPNYGTLKNLDADIFTKNAPAKPAAAPKAGPAPHGGGGQALTPTTDPNYGTLKNLDADIFTKNAPAKPAAAPKAGPAPHGGGGQALTPTTDPNYGTLKNLDADIFTKNAPAKPAAAPKAGPAPHGGGGQALTPTTDPNYGTLKNLDADIFTKNAPAKPAAAPKAGPAPHGGGGQALTPTTDPNYGTLQNLDAEIFVKK

SEQ ID NO: 120714 - protein, 443 aa, Heterodera glycines
MTCAKRISQQSALAFNSALNIFAVPPTNVSVARSFFRELLPLSTISQEGPYLFRMYNDSLWADLSRVYLYLELSVEKANAQGIMEPIDSVVDKEVGVCQSIGQTFVQQLKVEVQNMELYDSGTLYPFKAYISNELSFPANAKSHFMASNGYYVSRTHDDANDDGFKKRCARFSGGCKAEFISRLDFDLGNQELYLLNNMDVLFTIYRSKDAFLVHSLGAGAAGTSYALRVHDIKLYVKVIEVQPSLNISIYKTLEKQPATYAVRRTEVKSCFLTAGRTEMDHNIFSAAIPRRLTIALVANRAFNGAYAHTPFNFRPYDIRAISVHAGGNTYPAIPHRMNFVGAAYVRPFVDMYEALGMANSERSMDITLEQFRDGWTFFVVPMTSTLDDSCGFELLRSGTTSVRLQFNREIPQGGVEMICLGEFDQLIMIDYNRHIVTDSKIA

SEQ ID NO: 120715 - protein, 493 aa, Heterodera glycines
RISQFFQIPSIVNYSISAFDAKAIIRKLLVEAVEKRLMAIIRKLLVEAVEKRLMGNRQFGFMLSGGLDSSLIAALATRFLATRFLRASPIAFSVGFEDSPDLVNARKVAEYLGICHRVLVISARECVEAIPEVVFSLETFDPLVVVFSLETFDPLVVRCGVAHFLLCKHIAASSEVKVLLSGEGADELFGSYAYMQRAPSAPKVLLSGEGADELFGSYAYMQRAPSAPLLQREIVRRLRLLHQYDVLRCDRCTSCHGLEIRVPFLDKKFVSFVCDRCTSCHGLEIRVPFLDKKFVSFVAQLPPSFKLIPGKTEKFLLRNAFQNLAQLPPSFKLIPGKTEKFLLRNAFQNLLPGEVLWRSKEGFSEALGKVDLGVDLGELLGKHAEGLIGVKNFANRTMLFPLQNFANRTMLFPLQTPQTKEEFWYRMIFEQRFNLRKLNNVIHTKVYRQRKWRRKQRKPPPIGRGKKGREEKQERKGEEKRIRRRSTGSAKLA

SEQ ID NO: 120716 - protein, 478 aa, Heterodera glycines
LLQIFNKKRLVFGISRLNLYGFSFKKIKYVLIKTMSNHIFSIGNPRVYKKKIQNNLISVEGLNGKEEGKVKETPLGHLHTWAMLLRIYNNKISESQFGFVRNRSTTNQLITVVEDWYEAIINKNVDCIYIDFQKAFDSVPHNLLLDKLKKIGIQGKLLNWIKSFLSNRTFRVKIGDTLSSVKKVGSGVPQGSVLGPLLFLIYINDLPDVIPSGVNIKLYADDVKISRADTEIMHKTLHNLFEWANKWQIKVSIQKTFVLYLGSKNPKETYKFDGNTINAVDTIRDLGVNIDNKLQFSDHVNQITRNAYLRMRSLFRIIKSKSSKIWITLYKTYIRPLLEYAPEVWNPSLQKNIKKIEKCQKYFTKRVFFKCNLPPIPYQNRLEYLQLPTLENRRNLFDLFMAHKIVYGRTDLKLFSIFRPSTRFNIPFYRFNTKYKLGKNPFAGRATKLWNQLDKELIKTNSFNLFKNKIKNSVMLMI

SEQ ID NO: 120717 - protein, 152 aa, Heterodera glycines
FSRRFESDRSYSVVPLFNGSRIHSYLKLIRADKPIGTWLLYWPCAWSIAFAAPPGCLPSPYFLALFGGGAFLMRSAGCILNDLWDQDIDKRVSSYSSNQIGIGLSSYSFSKSVTRNTLSSIFFIWIQISNYSAFSSSVFKTMHYNAQAYVME

SEQ ID NO: 120718 - protein, 74 aa, Heterodera glycines
MSKLRNYTEDQLQNLLQDESRLNAMVDSMPQVSSLPNDKEIKLAQSKSLAEYNLSIEPQLNKALSHLRETHANA

SEQ ID NO: 120719 - protein, 572 aa, Heterodera glycines
IQSNLITQRERCRLETIVQEAVDWAHTVSLVNRVKDQLERSDVVEIVPFALFPSPFPRRLFEEAKAVQKTFQLLYFRVSQNYEFLKRTTFQLLYFRVSQNYEFLKRTLGEAGKGDAYIGHLLDILDDVQQRGNKQPISLILQRADYMCHLNADGEYELKQVEVNMGAIGGNARTEGVSKVHLKQVEVNMGAIGGNARTEGVSKVHRRVFSKLGLSANLPPNESCAGAAEALVKAWKQFNDKQFNDPLSVIVFMSYTKVQSIFDQRLVQYEIAGNKIEIVRLTLQECGEKLLILDPNDSSLSYKGRKVAIIYQRNFLFEKDWQTEKEWDIRRKLERSNAILTTNVRIDLAGTKKVQQTLALPGMLEHFLPDQKAETIAAVQQTLALPGMLEHFLPDQKAETIAAVRKTFAGLWGLDKDDKETRAIIEAIEKPERFVLKTNRDGGGNNFWDIIEAIEKPERFVLKTNRDGGGNNFWDEQLADKLRTMTRKERGGLILMEKLEIEIIELIGDKPINGSFPFQLTSELGIVGYFLGNAKTMVDNVQRGHMLRSKAAEAREGGVGIGIGLHDSPYLF

SEQ ID NO: 120720 - protein, 271 aa, Heterodera glycines
MESRNWQSQDGEEHPHKTHQSGCRASLDIVTITSGDANTDSEWVEEIVVERPPGLAAHCPEESLKRIFPNDKQAPRYGIEEMIRDAFHKNLISDAYNTRRMSQARGVGQPIPKAPIGRPNANGPSCLMRRPDEHVSVFGVQEIDRAYKNKDMDTAFKLFIVTRCIDESNEKNVLLAEQHIAATRQKQAQKDKEKSNKMEQRQRKLGPTSSATAQSVGHLDSGSLTLADSPHVVHYVHLTRAFVPNLLVMAPLIQSEMANHRCFNNEEIMRM

SEQ ID NO: 120721 - protein, 268 aa, Heterodera glycines
MPSTAIQKLLLAVSIFLIIAGIVLTVAGVFSPAWQVVDIREFRVDIREFRAEHQHGLWWDCIRAEKHVVAVGDFYEEAPLHHVVAVGDFYEEAPLHCMYKFDESAALVIERALNHVNHVDEDGAAGEAEHHRFWGWHKVVLSLILLSQLAAFVAVCTGVCAPCFAPSTFCFAISLFIAMLLSVLADGIFFFSANRVDIRFVTGEQVIGYAFYLHLGGTLCWAFAFVCAIATTYKFLTSNGQQRIRSFILPFSLQTQKLSLRFLLFLFI

SEQ ID NO: 120722 - protein, 439 aa, Heterodera glycines
NPSRRDWGKCGRNIRLGHLLSRKPSKHKATHKEHHSDQIGTHSSEKCVNLLEIRFLECFHPFPIVSLSKLDIGPRRGRKEPLTLPHSSSSDLGSPQKVLNLNNLNAYNKIIIIASTNKVWSLLCEKDEKRRDPHVFSRQKKINAKMRAMLLDWLMDVCADKQLHRETFVCADKQLHRETFHLCIDYIDRFIALNHQMQPQRLQLFGSTALVIASKVEEIYPPKEIYPPKIAEIAEYTDGCCSEADIRGIEEIMLCCSEADIRGIEEIMLEKLDWTCYPVTAVHWLALFMQLMNTDEVIPAQRVVISAGWYSFVVMFQILDLAMLDSGCLRFRYSELATAVVLCCYARTFDLPTHRCRPDRLIALHKYFFPLGFSPEKVRDARAYIEPFVRVFDLSEPTGTAIPCPDVPHGDRHNIQTYTSKSRMTEKKNEWVTDIKSTN

SEQ ID NO: 120723 - protein, 93 aa, Heterodera glycines
MSGDNSALIAAEQAAYGPFFGSLGVTAAMIFTAAGSAYGTAKSGKFFPRGRGRVGILKICTGIACMAVARPDLVMKAIIPGTLCIFCLPIMSI

SEQ ID NO: 120724 - protein, 678 aa, Heterodera glycines
MGASKPIEEEIEGVKTRGESLKDLIVSKQIETVLFKYLKERRKFSIDFNDQRIDFIELSAQLGYILGFEDPTKILSGAIAKYYCDLKGGIDSLCVYINGITENVIVGDQLASLLRIVVVEGKFGDVIEKIYNTPMYIKVVVKEINEIEIEIRTREGRLIPFQWVEQIGSGEAFNYFRGIPPYQRGYGRQRGGGVGDVLRFLWRALLPKLKSAGTLLGREALDTGTRVLDTIEKAETPNKQVIINEVKKGMDNVLEKALSIFTLPPTNVSVSSSSVREYLPLNPLTDIPFHFKIHPTASFFDLNKCYILTEMSIKKLDSYTNKYVNLKVNEQAATINMIGATWIKNLKITVQGREIYDSNSLYAYKAYLDAELSYSKNVKESDLQASGYYVDSENQDGTDITQQGFELRRKLFSQSQTAQFITKLDADIFNQDRYMVNGVEIDIQLTPNDNEFMVMAASDDKYRIEITACKLYVKTLEVVDGLALDIQKKLESKEAKYAHRKTLIKSTFISENRTEYNGTLFTGQLPKRVIIGMVENAAYVGNQKKSPFNFKPFDVRSVTLMANGKQWPAAPFELNFNKNLYTRAFHEMNEALGMASSTDSNGISLEKYRKGWTIFAFNMTNSMEDNEGIDLITEGTTTVCIQFRSPVPSGGITLIAMSEMDSILILDKNRTVMTDNTI

SEQ ID NO: 120725 - protein, 790 aa, Heterodera glycines
MKKYQGVTDGRTIQALNEEALRMRTAMKHRRKNLNAFNKAVLKKDLQISAEEYERTSYEQNKDYVEPFFDSHPTDYWEHIHKKYEGLQDDYKKIRELREQQQFLTDEQKKQSIQDEIDQLRRLVDYRKKRFAALEYEAKKRDALQQQPMALALTHGEALKERIGKIEGTTTTADGEETKTHGKSLVELIEQVQKERDDSKAKTEGKTRGEILGDKLKAKIDEQDSSADGATHGEVLKNKPETTIGEKVMTRGEILGEKLKSKDEEKKEERITHGEALKNRIEQIPEEEKTKGKTRGEILKEKIGASKPIEEEKTEGKTRGEILKEKIGASKPIEEEKTEGKTRGEILKEKIGASKPIEEEIERRKFSIDFNDQRIDFIELSAQLGYILGFEDPTKILSGAIAKYYCDLKGGIDSLCVYINGITENVIVGDQLASLLRIVVVEGKFGDVIEKIYNTPMYIKVAVKEINEIEIEIRTREGRLIPFQWVEQIGSGEAFNYFRGIPPYQRGYGRQRGGGVGDVLRFLWRALLPKLKSAGTLLGREALDTGTRVLDTIEKAETPNKQAIINEVKKGMDNVLEKALSIFTLPPTNVSVSSSSVREYLPLNPLTDIPFHFKIHPTASFFDLNKCYILTEMSIKKLDSDTNKYVNLKVNEQAATINMIGATWIKNLKITVQGREIYDSNSLYAYKAYLDAELSYSKNVKESDLQASGYYVDSENQDGTDITHGGFELRRKLFSQSQTAQFITKLDADIFNQDRYMVNGVEIDIQLTPNDNEFMVMAASDDKYKIEITA

SEQ ID NO: 120726 - protein, 413 aa, Heterodera glycines
NCALKCFSEPLVKFATGATPSSSDVGKMLSSIPDLVVNIPGFGTMDASKLHPSLVLHPSLVEHVLKGGQIPGIPKETLDHIVKQYMQRLYVAASNLQGRPTTESTKLLRPISELPNEMVEKVVQNKPLPHLTTESTKLLRPISELPNEMVEKVVQNKPLPHLTQEQTEVIKQYYMQQMPSSQYYMQQMPSSSGGDIGKTFGIAVNGNASEPLNLTGLLPPKVFQMMKLLPPNYNLSKLPPELTQQVMRGEMPDLTKLPLDLQQWIKDNFDRLVATFFPFVQPDLSIDEIMKKLTFFPFVQPDLSIDEIMKKLPTFEHPPMSTFSPYDINKVDADLVVQQRNEEEANHRFWRIFAASALALAGAVTLGVLSAFFWYLKRSRRLADPPMEAAQFAAAPAALHLAVASSATEGPSS

SEQ ID NO: 120727 - protein, 85 aa, Heterodera glycines
MADESATNAGGAGAAGGAQPAEYIKLKVVDQDSNAERTGVQVTSLRFLFDGRSVKDDHTPRSLEIEDDNIIEVYQGQIVGSILDD

SEQ ID NO: 120728 - protein, 85 aa, Heterodera glycines
MVIKSNSVISRSHSDHFQEASGSLSATSGSEDAIKHWGWWRHFVAGATAGCVSRSVTAPLDRLKVFLQVNANHKTPHTLPSAVDY

SEQ ID NO: 120729 - protein, 294 aa, Heterodera glycines
HSQTPVVKASGRELSYVLLFSCLLCYSMTFVLLSKPSWTVCTIRRTGIGLAFSCLYSALLVKTNRIHRIFATRTRATRTRRAPPLISPISQLLLTSAFIGSKMIFSLVWLIIQPPGTRHFHPTRAEVVLTCIVPDHHFLYSLAYESLLLIMCTVYAVKTRKVPENFNETRYIGFCMYYTTCVLWGCLILFFFGTGSDFQLRTTALCMSTSMSANVALVCIFSPKIYVILFEKDKNVRKEGSGSMLNKKMGSRAKNDHSSIGSGVINALIRDGDGRSGGDWAIPLITFSYYANNL

SEQ ID NO: 120730 - protein, 259 aa, Heterodera glycines
MPTTQEERKAKSEANKAKREEEKRKRQNMMAGAFVGGFGEEKPSGRNFVVQKREEGSDALGQNAESGGGPKLRGGPNKAQQQEAKRNYMSIVNRPVDVSNMLPNDIKAKIKQLHARIVKLEGEKYDLEKQNERQQYDVGIGTQINANRFGPPLLIQLKELGERQKQFARQKALESGMDPSEMEENSSLPPKVRVASKFDRQTDRRGYGERRNKFEHPPPKPEPKIAHGSGRPPPEWGRKELEELENIRKNLEPPKYQEQ

SEQ ID NO: 120731 - protein, 131 aa, Heterodera glycines
VEDTSSARNLDADEPFDELNEDDTDLDEDSDNEAELMAELERIRKERAAERASKEAKEREEQERIREENILHGNPLLNPASSEFKVKRRWDDDVVFKNCARGIDERKKTPSFINDAIRSEFHRKFMEKYIK

SEQ ID NO: 120732 - protein, 503 aa, Heterodera glycines
VDECLLLVDDCAETQRCLNTPGGFKCIRTQSCPGGFKCIRTQSCGTGYAMDSETEGTGYAMDSETEQCVDVDECALGAHDCGPMYQCRNTQGSFRCVPKRCAADEAMDPNSGECKSVNCPVGYKAIDGRSVNCPVGYKAIDGRCEDIDECREARHCAIFEECVNTPGVNTPGSFRCQEQGNVWSNGYHMDKDSGFCLDTDECARKTHSCETDEQTDECARKTHSCETDEQCTNLPGTYRCNCGAGFEFNDFARRCEDVDECVKFGAHACSLQAQCVNTFGSHECLCGPGFKLGADNRSCDDIDECASGVARCQQKCINSPGSYQCICCINSPGSYQCICERGFQLGIDEVTCEDIDECAIWAKSGNDLCMGQCVNLPGSFANDLCMGQCVNLPGSFACTCPLGYEIMADGITCKDIDECQIDECQSENICAPGHLCINLLGNYRCQRIECPRNYFPDRNYKNRCVKRPGFCENLLLERCKKLPIHISWQNITIPKVNREKGKR

SEQ ID NO: 120733 - protein, 113 aa, Heterodera glycines
MLYQNLRKIVPSADSQPLSSFIHDLLRRKLLSCTHPEFPYKQQDITAYSSTLPNVLYAGVDPTADSLHLGNLLVLNSLIRASFFGCSPILLIGKATASVGDPSGHKRGARQNI

SEQ ID NO: 120734 - protein, 224 aa, Heterodera glycines
SWFLRFILKNFSKKFFFFQFYPRWLAPNVLTFAGALIVMCCYGLVVCFDPGLSANSATGPAELNIPRWVWLVCGVGTFLAHLLDGTDGKQARRVGASGPTGELCKYAYLIFAFPTFRVDHGFDSWSTVPFTITIFSLFGRGQFSVEPLTLLSVLIAVQLVFIASHWEKYNTGVLFLSWGYDASQYPLSSVFHWFSVPTVVNFFTIFRIHLFDAHSPAVNWCCTN

SEQ ID NO: 120735 - protein, 722 aa, Heterodera glycines
LRIDRKFFQKIYPESTRKFQKYSGFVSWVGFLVVFVGAAALVCKYVSAQAIGSGIPEIKVIMSGIPEIKVIMNGFMLQNYLSFRTLVAKMLSLTLTLGSGLPVGKEGPFVHMGAGPFVHMGAIVGTLLSKVTRAWQSSAFFSNEGREFEILSSGCSVGIACTFSSPAGAVLYGIECTHKYFAVLYGIECTHKYFAVKNYWRAFFATTCAALIFRFANAVIIPPHIAGTITAYYQTSFPNEVFLVEEIPVFVLVGLLSGLFGALLVGLLSGLFGALFVVVHRRIAYFKRRNRTFRAIFGKNSMSFTIFMALIVGIVTFSMSFTIFMALIVGIVTFPDGFGRFIAGKYTFRETLGDFISYTFRETLGDFISNCTMTLYNVTSMGCGGKVIQRWTGQCSSLLPFPLPNLFFHFQFFLVAICITLALPAGIFVPSFVIGACGGRIIGELMVVVFPEGIRGSDGMVVVFPEGIRGSDGPQIYPGLYAVVGAAAYTGAAAYTGAVTHSLSIAVIVCETTGQLCALLPVLVALMVANAVVANAVSSFLQPSIYESIINIRKLPHLAELPPSRISVHTLKVEQVHTLKVEQIMVRIMVRDVVFVTKLTTYKELRELLICTPHLRSYPLVTDEEERILLGSVARKYLHYLLTSHLGPDPALLLHGSRRRKSRTMSGFSEGTFHRNPTPNNTLATTAVPANYKMSMINDRNLFGNTLLSISPLHDDQSSELG

SEQ ID NO: 120736 - protein, 226 aa, Heterodera glycines
MSLNFWILKSNRKRKEQTLTLMPTKPKCAVIKTSTRATYFLPVVGLVDPEEMKPSDLVGVNKDSYLILEKLPPEYDSRVKAMEVDERPKETYSDIGGCDSQIRELVEAIVIAATNRVDVLDPALLRSGRLDRKIELPAPNEKARAHIVRIHSRNMNVDTGHNYIMAATDYDALQNWISVLTSCSFEFMEATRQSLESVEEKGTEKEEKEGEKSEESTEKGGTEKND

SEQ ID NO: 120737 - protein, 379 aa, Heterodera glycines
DGSCYWTYTLEQVLSPTPPPSPPLPTAVEGTPQQQNGPVPIGEKLTTDNNNERQIGQQQILLGQTFDWAQFKNRLALDRCVCMGHSFGAASSLSACAEYPSLFNACVLLDAWLYPVERRMYPATVQPVLMLNASKWQWPHNVRRMQRLLAKATTATNDDKTATETTTTTAPQQQSQDGAATTAATAQPSVTNTDSRMMFTIKGIVHQSFSDFGFLVPGRVARYIGVQSDLDPLLTGTAVFEMVLQFLESQFLHQQQQKEDEEDTEDEEGEEDESEEEEKEEEGEKESKEREEEGKAINASALDRLRRLVAEKYAAFVVEGTDIPQAKLDEVAPLVEAEQQQAVSAEEERKVANDSGVDTPPTTETTTEEAAENNNQPSI

SEQ ID NO: 120738 - protein, 95 aa, Heterodera glycines
FIFVRATLLFWHPSQVLRKGSGTLCEALLMVQAQRSNIIFPNKQTAKEQRMTDAGHLILSDTYVGGHVEAVESGVFRADIPCRFKLDVEALAQLV

SEQ ID NO: 120739 - protein, 419 aa, Heterodera glycines
IRNNNLILVKANRNNDHATKGNLDSKRWKINFLHRFKDYADNSSQTAERINSHINKHLTSHENEESDTSEDEEEEEEDQGDSDVSEERNNPEDLINSELSAVKLPDSEQQRPDDAVSIINSAFSNRKSFSCPKTKSDLLTGTSTANLSPEDTSTANLSPEDIGIIASMGDSLATGAGLWPRTDIEFRGAAFPIGGDATIDGLVTVPNILREFIDSNLLFGVSHGMGQRDQLPENQLNVAVSGASSSSMPGQAVELVRRMKRLRELAVELVRRMKRLRELDVFNTWALIIVTIGTEEVCKNCVCKNCTGPNTKALVQALDILNRGIHKALVILLGPIHVTSLYQQKFNLLPIHVTSLYQQKFNLLKTRCLCSQNKDDKFMSALSEEWVKTRCLCSQNKDDKFMSALSEEWVKAFEEIQTH

SEQ ID NO: 120740 - protein, 320 aa, Heterodera glycines
MTCLQKISDSSPLAINSGLNIFSVPPTNVSVVRSFFRQVLPLATITQESPYLFRLYSDNLWTDLSRIYLYLELSIEKPGANDKWVAIEDADTSVSAIQGIGQTFVQQLKVTVGNTEVYDSGNLYPFKAYITNELSFPINAKKNFLGSTGYYHTVNQDDSTDEGATIPRRVTIALVGNSAFHGDYKLSPFMFEPFDLREISVHAGGVVYPAVPYKLNFSNDHFVTAFVDMYEALGMANSERSFDISMAQFKKGWTFFVIRMTSTLDDSCGFELLRSGTTNVRATFNSPIPLGGVEMIVLGEFDQMIMVDYNRHIVTDSKLG

SEQ ID NO: 120741 - protein, 224 aa, Heterodera glycines
HGTVLKSKVERAKFEMKGEFDRPKKRRRLTGAQKKRFFEKQQKIFEWIFEWKPEKPRNYRPPCECTLVLRGMFNLEEIDANAQRIFTLKEDTQKLDTQKLCERFGPVKKVTVYDTNPDGVVTVTNPDGVVTVTFDNVEHTDAAVQAIDGRIVAGRVVQAKHWDGKEKFKRAETAAKHWDGKEKFKRAETAQEKERRENAWEEFLGNDEDEKEMEEDKKETEEDK

SEQ ID NO: 120742 - protein, 101 aa, Heterodera glycines
MAFRALSFARRPFTTSSICRKEIDLVAGVYLNKVREVVGKQSEILNSPQLKKELNDQLNRLAQKFHLPDADAVAKLGLQFKVRWYLGDLETKTFEQIGIVY

SEQ ID NO: 120743 - protein, 229 aa, Heterodera glycines
QGWRDAKPLLMPHLIVLKTPSLGAMENWGLITARESSVLYDPAKSSSSHRQWLTTVMSHEVAHFWFGNLVTMKWWQDLWLKEGFACFMESLFTAKKYPEFKVWSTFVDNTVVRAMGMDSLRNSHPIEVPIENPNELDEIYDEVTYEKSCSVLRMLFNYLGESTFQKALRAYLKKHQYANADTDDLWHCMSEASDGTVRFSKNPLENYQNFFSLKFHKKFELKIINLKKL

SEQ ID NO: 120744 - protein, 157 aa, Heterodera glycines
LSMNTTEIDRHLPTAMTLLQPFDGVPFRELPVVHIKASSNNTIIHAFNFITRAIIYTSCRKERAIIYTSCRKEGFKNTKKKSPLAGQTTGVAAGQKLLRRGVSTVRVIIKGIGPGRISSVRGLALAGVNVVSISDVTISDVTPIPELGPRPKKIRRV

SEQ ID NO: 120745 - protein, 576 aa, Heterodera glycines
MHSSSFTLPLRSNNSNSGGGSIMNLHQTSGSEDFGTRRSAITAGSAGGGGGSRQISVGSAGGPTISGTSTISAGSGMTTIGRKGIFFAREKLTFAHLEKIYAQAIANRSNDLSILELEAHWTNFVHINKLLNKRQSDQQEAIWEIITTERRYILQLQSLEDMEWCFVELQKQGFMRDVNRQCVFLNYSQLLRCNLAFWQCAIVPMLERSRQSHEPLNALLMQPGFDSIPDWSFCYIDFNIGHADSHAYVQKRQKDNEVFAEFVKWAEQHTMLNRQKLVDVLSSPMQRMTRYSLLLKAVQRCAADTEEKIGIQVRFVLLWHNFAHFIPSGHDRMRGDGHNSVELRAEQQRLAPPIVRDHEDHRELRRGGQRRVRTAFPFAHGAGARPTVGPAEQPAPTIAGRYEPSAAPLQPDAANAVHRRAAPVQADQEVHCILFTDMLLICRMVSRRNDRLRVTKPPMHISNLRFHHFSEGTEGCFGSVERLVAQPPSCNKCCGGGGHNATHRNATSVDICASHLRRGETLRTMPVHQKQLAQKNTALAQCKGCAEAGPNNGDFEGVVHRKSRSMDSQVAIWGAV

SEQ ID NO: 120746 - protein, 114 aa, Heterodera glycines
MKQPEPIINKENLRPANQPSNKMHEGINYSEFGKEWKHPNILRMFNYFHDDKKVYLILEYALHGELFKVLQKSRRFSESTSAQVITPKLFIYIFQVSDALNYCHSKKVIHRDIK

SEQ ID NO: 120747 - protein, 478 aa, Heterodera glycines
MENQSNKGLFAIFGLFLMRFSLPFQAKLERVFGTPACSSSLSVDPISGLVAYPAGSIVVVLNPRTLSQAHLVCASKNQLTSLAFSPNGRYIVTGEFGGDPKVRVWELRHEKHTHGEQRVELEGHRLGISCVSFTKDSDQVISIGNQHDKSVCVWDWRTRKKLAETRLTCQVGNIHLLFTKCTNKHHLLCQVNAMDVSESGRMFVTVGVRHVKFWYLGSNSNGENGSAGVVLHGRSAILADQRNNTFVDVCCASNNRTFSITISKLLVEFVDKKLTNIYELGGEVPFSLSIGASHQLFMGFGNGAIRAMNLERMEPELELCRPHALHCDICAMGDGTGTEENQAKKFPDVHSIVFHSHSKTLTALYSSQLFHVGPVFDIEVSKSQPQLFFTAGADETVRIWCMNNSDTATAHSVTTVTDSNGSPSPPILDIGPPNHFSLELRKILYLNPGTDTLSEQPDKNFGGIMSDTLGLHYGSALH

SEQ ID NO: 120748 - protein, 373 aa, Heterodera glycines
MPRIWIDYCMLMIRRGQITETRRVFDRAIRALPITQHMRIWPLYIDFATRHNVPETAIRVYRRFLKVYPGGREDFVEYLKSIDKLDEAAQQLVILVNEDRPISEKGKTGHQLWTELCDLISKNPNKIFTLRVEPIIRQGIGRYTDQVGGLWLALAEYYIRMPNFEKARDIFEEALGVVKTVRDFTQLFDAYSKFMERLTSLKMDALSSARPTQVDERELELELVMTRFEHLMNRRPLLLNSVLLRQNPHNVHEWVNRVQIYEGDPENQIATFEKAVATVDPKQQVGRLGQLWIEFGKLYEKLDKLDEARKVFDRAVQANFVRVDELAQVWCEYAEMELRHSNYELATALLRRATTPPPVRRDSYFDDSAKCRT

SEQ ID NO: 120749 - protein, 481 aa, Heterodera glycines
ASLRCLAQHGRFLEIGKVDLAQNSALGMSLFLKNVTFHGILLDAIMDQSVGDMEDWMECARLFEQGIHRGVVRPLDATVFPSDKCEEAFRFMSAGKHKGKVLIQIRFMSAGKHKGKVLIQIREEEQQLLCAPSPMRVRAVCRTLCNPEHVYLITGGLGGFGLELAQWLINRGARKLVLTSRSGIRTGYQSRCVHFWRRMKVSVAVYQSRCVHFWRRMKVSVAVSTLNIAKKEDAVELVRSCLEIGPEDAVELVRSCLEIGPLGGVFHLAMVLRDCLFENQNQQNFKDAAEAKYFGTISLDEATRKGEQLRWFVVFSSITSGRGNAGQTNYGWSNSTMERIIEQRRADGFPGIAIQWGAIGDVGVILENMGDNNTVVGGTLPQRMPSCLGSLDLFLSWNHPIVSSYIKADTSGKKQSGGGNLLQYIKADTSGKKQSGGGNLLQTIAHILGVNDVSQLNPDANLGDLGLDSLMGVEKQALERD

SEQ ID NO: 120750 - protein, 142 aa, Heterodera glycines
MDAEDANGKREAESLRVIAFFGVCLSTISMMICVVTVPLAYQHFQQIGSLMQNELDFCQSRSGNIWREIARTQAYSHASGGVRYTRQAAASGYGAAPPPPAAPSSATAGGGYGGTAAVSAPAPSPPPASYGGIAPAASAKPS

SEQ ID NO: 120751 - protein, 121 aa, Heterodera glycines
PLFVLLLHLLLAAVVRSQDSCYVTDSGHTCCDKALESAMKSAMSSAMKSAMSGKDLLSSADRIQKSAEGAIGGKFETVVAFDDFAHKSVVAFDDFAHKSHFKDGKSCKVEKDGQVALAWQP

SEQ ID NO: 120752 - protein, 273 aa, Heterodera glycines
MEMASESAVTTTTSANLLLDQQHLKNSTKRETIANASADSVSEDSEEQVGRADSTVPSNDEEEEMRGYNLIPPEARPSSTLEKVEFEREENESEENEPSDSRGIVGMLEYDASFDEPKKHREFLWERSKFREVLPISSEELKAKIHQTFRLQYVQERIYPLIEYLINNHWENTFSKVDYVQTFVKMHDIWEAHLANKSDEGEKVKENGQTTPLAMTPPNAQWRKEREHDDEELFFSKDDDDEMLMMRTELPVFSVGISLRQRAAQCPSAGYPK

SEQ ID NO: 120753 - protein, 133 aa, Heterodera glycines
MGTRQRCHFLTFCCVAFVTIVFLLFLFPSDDQRREAADSRTYAQKRHSADGGASSAAEVDNLAPFIFIGGIPRSGTTLMRAMLDAHPEIMYEQCNAVGQAKCLPVYYEQLISVGFASHAGNETVTELLGFAVE

SEQ ID NO: 120754 - protein, 561 aa, Heterodera glycines
MRLVHGKDLTPDVHYLHEKDDYHFVNAVHKYIVRHPELPWDSPEFNPSANIQQNIAEFREIFEREVFDENYELKTREEKNELIELVKGFRFYFADELGRFMLRIFSDKISHITLTDQLAYVLGYEQQQEIHNEDQAKYAVDLAGGVSHLCIYLNSGIIESMIFGNSFANLLQVIAVEVFVQIHPITSYIDLSKVFVCTEFKLKKIAEDGVVVDVPANAAVGLIQMPGATFIRNLKVHINQREVYDSNQLYSYKVYLDTELSYPAAAKDAYFGVAGYFRDSDPTKVNEKRKKAVEESKSFQTISKLSADIFNQDLYMISNVEIDIELALQSDDFMVHQDAANKDKYTLEIVDCRLIVKTVDLMDGLSLDIARKLDTEPARYGIRKSFMKSLFVTGGRYDFSANLFTEEVPRRVVIGLVSNQNYIGHNQKNPFYFNHHNVRDIELTASGRTYPQYPYNLDYKNNRYARAYHDAQEHLGMACTTESNGISYSMFKTAYCLYVFQMTNAQEDSPGFELIKEGCTAVNIRFTEAVPNEGVTLIAYGEADGLILIDRNRSITSDLTV

SEQ ID NO: 120755 - protein, 193 aa, Heterodera glycines
FDGQSGETFAFQAEIAQLMYNMDNATTKVCLTELVTNFLHNFCETFFKGAIENDPSKADKTWTIIDTGIGMTKADLVNNLGTIAKSGTKAFMEALQTGIVALMPGHFGAGTGIVALMPGHFGAGFYSAFSVADRVTSKHNDDDCYQWESSAGGSFIIRNCADPEVTRGTKIVLHLKEDQTAYLQVKWVREFAV

SEQ ID NO: 120756 - protein, 539 aa, Heterodera glycines
MNNHPVRFDTIWRDLSPGLESIFKTQERMAPQRYMEYYTLVFNHCTTSQQSSNFTHETTNNRARRGNRGTPAAAAGAEFVGEELYTRLRHFVEEYARKLLQECQRLSGDQLLDYYTEQWTKFQFSSTVANGIFSYLNRHWIKRNIDEATRPGILEVYNLAVSIWKSVIFDELHHNITSAALALVEKDRNGERITTRLISGVVASYIELGINELDPAPAVGQQQNSVVHRPSVKYQVYRNNFEQRFLEDTRNFYTTESNNFLQSNSANVQDYMKKVEQRLSEERDRCQIYLDNTTMDSLMEACDTALIKQHLELFHDKFESLLTRQQNDHLGRMYTLCSRVPNGLAKLKEILKAYIEQEGKAAIQQIAREASNNPKQYIDCILKKHKLYNRLVVDSFKTDHGFVQSMDCAFRKFINNNEITAMARNASKSSQLLVLYCDQLLRKSARNTEDEKMDEYLDQVMTVFKYIDDKDMFHAFFHKFLCKRLVYDTSASEEQERCMIAKLKHMCGFEYTSKLERLLTDVALSRDHSEQYKQVANEI

SEQ ID NO: 120757 - protein, 456 aa, Heterodera glycines
MSVIKKIDKDSVEGLEGSLSLFSLPPTNVAINKTSVRELLPLSALNQTGPYLFRLFSDSQYCDLSKTYMYLLSSIERKNAAGEWVPISDAEPDDKRVSVVQNYGSSFVRALKVNISGIEVFDSSIYYHYRDYIMNELGYSHEIRKAFHEAACYYADEDDGQDSATNEGFIARASRFSNGKQCETMVKLNFDLAHQSALMLNNQDVVFTIHRNNDAFLLLTPHWKKADGTMQENTKEYRVRVHDMRLYVRTVDVTPSLNLAISRQLESASAKYPLRKIEMSSIFLGKGRTELAHNVFTSTLPRRLICCFVSTDAYSGNRKLSPFKFEHANVRAISAEANGQSFPSTPYLLSFDAAQQRFMRAFVDMYAGLGLDDSDTKTVSIGLQRFLNGWAFFVIPMTSTLDDTDGFELIRQGTCTLKVQFEKPIKDDGYEMLILGEFDSVLSINADRVLSTDGSV

SEQ ID NO: 120758 - protein, 213 aa, Heterodera glycines
QTMGMTFELSEKNDELRDIVARMLQPGKGILAADDPAVALDSRLTLFGMENSAENRRRFRQLLFTTPNIHKHISAVIVQDETYRQMTDQGDQLVDLLRRTGIAVGVKVDEDTIPLFPMPTEVQLLGLDGLAARCAEYKKGGCSFAKFRCAYRISQRTPSKWALEQNAMVMARFAVTCRVMARFAVTCRSFGLVPIVEPDLNGEGTHGMRNANR

SEQ ID NO: 120759 - protein, 124 aa, Heterodera glycines
HIFSCDDASYTLSPVDSFPTLEKAINDHVRQAKNIVLVTFWVLESRRPLNLEDIYNANSVRVLAPAAEVAEWTLPEASAIFETMVEQEDEDDDDEASDGDEENRPPSDDREEAEDGEAAMAGDS

SEQ ID NO: 120760 - protein, 342 aa, Heterodera glycines
GQHFARGALREVAGRLQEEDGDRIDPFIALNKPKKCNTQQIVILMQYNERNTYTLGELHVTLGTDFPADQLCAVVQSLVKTNLLKLTSADGTALTETKLNDNEQKFTFNSEFQSRKLKVDLVRAMSSARETNKESEDVQKTVDEDRKLVIQAAIVRIMKMRKSLKHQLLVAEVLNQLTTRFQPKVPIIKKCIDSLIEKEYLKRSEEDRDFWLYTDVWMDMFPFFDRLQLGLKLALLSPRFEFLVDKHFDGTSELPILKNIVLRKNKVTAVPELRVFIDNANYVPFPVPDHSLPKKIRFKHLRICYIDHSFIAFIRANQQMFDKGTNLEFSVSWNETFFAQPI

SEQ ID NO: 120761 - protein, 133 aa, Heterodera glycines
  unsure (1)..(133): unsure at all Xaa locations
MSSSALVKIKLDQEVCADAEKLVRLYTELADVHRXXISKLYSAHDPQIVWNGNPYKGMPEIETFWRNLPETSHDVACLDAHRIDPTSDDMSLVVLAMGTVIIGGLSHAYNQSLLLVLEGSTYKIKSDNYRVID

SEQ ID NO: 120762 - protein, 140 aa, Heterodera glycines
DLEASKIELRERSKKKSSLSSRWAHPTYALTRVINFSGLEAFAHPPTFGSENSAGADLYSAESYVVPAKGQVLISTGLQVLISTGLSVAIPEGHYGRVAPRSGLAVKHSIDVGAGVIDSDYRGELRVNLYCFVGNNEIWS

SEQ ID NO: 120763 - protein, 4940 aa, Heterodera glycines
YIQNELTQWLDELRRIKKPGERDGRKLGPLEKSQVNDLQGAVRHLKQNIEIPEVVLEFDSNIQQIVDVARKENRKPFLNNLQNHINIWIKAIQKMTKLDRDPTSGTALQEVTFWVNLERALLQIQEICESDEFIVTMEALKLGKRFHATVAFESNTGLKEMLVTAQDYNQMMKDVQINSNTGLKEMLVTAQDYNQMMKDVQINDLLCAFDLAAVKTAVSTILGSIKKMRSTKYPLKRAYGFITTISTDLCERLVQLLKPRLLMHAPMLLKPRLLMHAPMSELEEIMDQCKKIFTAWDEEADKVMMMFRDLAKKQRPADAKPMLRMIYRHKLLELRLEQLYRFRTQHEQLSNMISRVLRFAGPTSLESFGVIDSDPEKEVEDNGINCSFKILQIGKAYDAVKELDYLDMGQQGQQAWESAMQYYRDHISRVEAELASRLRDQLGGAKNADEMFTIFSRYNALLVRPHIHSAIREYQTALIDGVKADIVELQETILDTKKRELAIRCADRYDIPAFSASMMWVRQIYDIPAFSASMMWVRQIESQLNMNIKRIENVLGEGWANHLEGKELSKECELLRKELSKECELLRQKLDTSHLHKEWTDKMLAKCEVQNDRLFIVDKLQRDGKIIHRIRVNYSPDSIRITKEVRNLKNLGYRIPFKIMSHSHTISTYYPNAISLIESMRIYESTNEIVLNRQSIDQLIASYRNIIHNLLNEGVKTEWTGVKTEWTNFKLESFVVKLADAVGNYQEKVSDLIEWLDKIELEMSSMDKCQFKQEIIAQILGSIQKIVDQMALNNYSNLKKWIENLDKTLENKMARRLEEAIRVWIKLLKQSTLENKMARRLEEAIRVWIKLLKQSRDELEDERVSIVPEIHPIPLEIRIISQCIVVVPTLEKARLSLFNQFSSWHGIVTNQTRISCNRFQVLQNNADTVLQNNADTQTYKSVLLKMPHSQQIIQETHFAIEDIMMKLGDYVSQWTRYQALWDFQQEMFFERLGTDLCNWMKVLLDIKKARTMVDSPETRHNIFPFVVDFTRVQSKVSIKYDFWQREVLNKFGSALGSSMSSMQQFFSDISKDRHELESQSIDSTNTSSTVALIMHVQSLKKRIKASQEQVDTFLSGVDTFLSGQKLLTVHRYPFPQSWLYAENVEGEWSALLDVLNRKDVAIQSQVANLQTRILEEDKLLEKHINDLVSQVANLQTRILEEDKLLEKHINDLVAEWNKSKPVHGAQRPKEALILLSGFEDKFKRLRDERSNVLNAKNTLEISDSLIPNQTTNKLEIAIEELNDLTGVWDSLLPVYNVWDSLLPVYNNIDELKEIPWLSVQSRKLRQNLEELLAKLKSLPSQYRSYESYDYAKRLLQNYLKMNSLIIELKSDSMNSLIIELKSDSLKERHWRNLTREMHVNWVLSELTLLTREMHVNWVLSELTLGQVWDIDLSRHEETIKKIMIVAHGERVLEDYLRQVKEYWTDYAVDLVNYQQKAKLIRGWDDLFNKLKEHMSSLGQMKLSLYYKQFEEDALSWEEKLNKMNTIFDSWIDVQRRWVYLEGLFTGSADIAHLLPSESNRFNMVSNEFLGLMRKVSTSPRILDVVSTSPRILDVIHIQGVQKILERLADMLSKIQKALGEYLERERNSFPRFYFVGDEDLLEILGNSKDLMRVQKHLKKMFAGIMAVEFNEQSRTISAIISREGESVTLKCPVDLKQLPKIDEWLRGLEREMQSTLATLLGESLSSFSKLVIENIQHEELMELMDLYPAQIIGICVDVWWAQIIGICVDVWWSSAVESCLSKHGSAENVLQTVEKWLSMLCESVLRDQTAIRRKKISNLITEFVHKKNVCRITEFVHKKNVCRQLVKNNVKNSQDFWWLQNLRIYFNSNLRIYFNSNEKDPRKSCFIKMANAEFFYGFEYLGIQEKLVQTPLTDRCYLTMTHALHCRLGGSPFGPAGTGKTESVKALGHQLGRFVLVFNCDETFDFQAVGRILAGLCQVGAAVGRILAGLCQVGAWGCFDEFNRLEERMLSAVSQQIQMIQETVRADSDMVDLVGKSLTVNPNMAIFITMNPGYSGRSNLPDNLKQLFRSLAMTSPDRGLIAEVMLFSQGFQSAEILANKIVPLFTLCKEQLSNQCLCKEQLSNQCHYDFGLRALKYVLVSAGNIKRDAIQRSYDEPSQSGDGAGEQAVASQMSEQQMLIQSVCETLTPKLVSEDITLLQSLLHDVFPDISYSPKQVESLKNEVLNICLKNEVLNICKTEHFSCSPITGEKGNLWLEKVLQVYQITNLNHGLMLVGASGSGKTTAWKTLLKALENHELVEGVSHVIDAKSISKDTLYGTLDPNTREWTDGLFTHIIRKIIDNVRGELDKRQWIIFDGDVDPEKIIDNVRGELDKRQWIIFDGDVDPEWVENLNSVLDDNKLLTLPNGERLSIPPNVRIIFEVADLKFATMATVSVRIIFEVADLKFATMATVSRCGMVWFSEDVVTPEMLFESFLLRIKNEPLISGNANRLLNIQIICENTLSMHMDANGLVPLCLEFAVEQLEHIMEPTRQRLLLTFFSMLNFSVKQLLQYDSDHPDFPPSEEQIANFISRSLLVNLIWAFADFPPSEEQIANFISRSLLVNLIWAFAGDGSWKNRKSLSDFVRASTTIQLPPDQSLPITDYFVTTDGDWESWLLPITDYFVTTDGDWESWLTKVPQIEIEPQRITDTLTVIPTLDTVRHEMLLNTWLNERKPLVLCGPPGSGKTMTLLAALRSLPDMDVINVNFSSSTTPELLRSLPDMDVINVNFSSSTTPELLMKNFDHYCEYRKTPTGVVLAPVQITRWLVIFCDEINLPQPDKYGTQRVISFMRQLVEQNGFYRTTNGFYRTTDRTWVTLERIQFVGACNPPTDPGRNPLSARFLRHVPVIYVDYPGRTSLNQIYGTFARAMLRQTMQIRGMAEPLTEAMTDFYLQSQEHFTQDDQPHYVYSPRELTRWYLQSQEHFTQDDQPHYVYSPRELTRWVRGISEAIMPLDSVSHEELVRLWAHEALRLFHDRLVRDDERVWTNELVDQVAHKYFAASCNLDAALERPLLYSCWLKKHYSPVSSKHYSPVSSKELEDYVMHRMRQFAEEELDVKLVLFDQILDHVLRIDRVFRQPQGHLLLIGVSGSGKTTLSRFVAWLNGFTIFQLKVHSKYIFQLKVHSKYKAADFDEDIRHVLRRAGCRNEKICFIMDESNMMETGFLERLNTLLANGKVPGLFEGDDFNTLLSQIKEGAQRQGFMLDSHEELYKWFTAQIVQNLHVVFTMNPSGIVQNLHVVFTMNPSGDGLRERASTSPALFNRCVLDWFGDWSNSALFQVGHELTSMCEIDKSDYTPPAALEHCCDRLPTEIAYRDAVVNSFVHIHNIVRKTNVTESRKGHRVMAITPRHFLDLIKHYVTMSKEKRDELADEQIHLNNGLRKINETEQQVKEELADEQIHLNNGLRKINETEQQVKELQKSLNEKEVDLRKKQGEANAKLQLMLGDQREAENEKRTSETLQKQIREEKQCIDRKKDEVKRELAEVKPAVEEVKPAVEEAKSAVSGIKKAQLVEVRSMASPPNAVKIAMEAICLLLGEKQTEWKSIRAILVKDDFIPHILQFNTDSITPEITEKMKQYEGNPDWEFEKVNRASVACGPMVKVNRASVACGPMVKWARAQLSYAKMLNKIEPLNNELKRLEKDAEEKTVKGEELKHKIEALENRIQELKDEYAQLIGEADEYAQLIGEAEHIKQDLQVVQEKVNRSIHLLKSLRVECDRWETGRERFAQQNETLVGDVLLSAAFLSYSGYYDQLLRDTIFQKWMGILDSSQIMFRHELARIEYLSTADERLQWNNNGMPKDELCTENAIMLRRFNRFPLIIDPSGQSIEFICKEFSTASEKEKNTKFFILNFRKNLESALRFGTTLLVQDVESYDPILNPVLNKEVKRTGGRVLITIGDQDIDLSPAFKIFLFTRDSSVEFPADVCVEFPADVCSRVTFVNFTITRASLETQCLHQVLRSERPDIDKKRNDLLKLQGEFAVRLRHLEKALLNALNESKGKILDDDSVIATLEKLKNEAQEVAKKSAETDQVMKEVEIVSQKYYKLANACSLIYLMLHRLDEIHLLYNYSLDFLLDIFTTVLKSPQLGNVKDYDARLSIILQNLFSVMYSRVSIGMLVMYSRVSIGMLHNDQILLASLLLRIYSRLRCRECLRAGLEQLTALPPEQVLSSAHMLMTKAFGSEFMQQDKVVNLREIILNEVRQNVRYHLLIKHLLLKVQCKVPVLLCSATGYDVSNRVEDLAFELKMDILSIALGSAEGFEQADKALQSTSRSGRWILLKNVHLATEWLTQLEKKFRLHNPHPHFRLILTAEIGSALPISMIQASRVLIFEPSTGLKANLLRSLSIQASRVLIFEPSTGLKANLLRSLSSISPARIAKAPAERARLYFIICWFHAIVQERLRYQPLGWANSYEFTDADFRVACDTLDSTVDMVAQNRANVKPDKLPWLALRTLLNRANVKPDKLPWLALRTLLSQCIYGGKIDNDFDQAILDTLLDKLFTSNSFDADFILIENIGVNALNMPDETKKDGLINWVINIKALQKPNWIGLPNNAEKVLIAERGTAFTNRNAIMKKSFFINYRARIYTEDDQNADDELAYEADDLERNKQAPTWMVQFSGQCKSWLDALPQQLQRLRQLQRLRRTKENVRDPLFRFFEREINLGARLLSDIRRDLNELLSICHGDQKQNNHSRELIAALVKRKRVPDNWLQFSVPKDVTALEWMRDFVQRMEQLKRLSLENLRYEEVWLGGMFFPEAYITATRQLIAQTNGWSLEQMYMHITKTEEGQLKSTAFTLTGVIDLRAIGVLCEADEIKLTDEVHVGTGVIDLRAIGVLCEADEIKLTDEVHVGVPRLQFTWTLEGHSPASVVVPVYLYSNRAKFLFGLNLPIGFDHSMLSQRGVAFVSNCSL

SEQ ID NO: 120764 - protein, 126 aa, Heterodera glycines
MNIGSVVGSAMGPRTAEMHRRMLQRMRMDASNVPENRAFNTLARGLFQAWLRFGDPNAVVVFAVFQGSMHRFDERAVEYELQRISDWQVKVVRLSSKEAYSNHFRRYIHMISNAIGPESSQHQFAF

SEQ ID NO: 120765 - protein, 230 aa, Heterodera glycines
MRASLLRPGTALAKGMSEEDAKLRQRMLEVAKTKLKNLTMFVSPNRLVIHNIPFSWKDDQLKSVCSEAAGDCPATAISECRIMRQLKGQNEKGRAILGKSSGFGFVTFTEHTLALNCLRKLNNNPTTFSDERRPIVEFSIENLNALRVKERRQQKETKSEENEEEKQQTKNRVGNAEALEKTKREMMAGGKKWLPKKLGTKIRHKKPQNGLSTTPGKRRGQFVEQRAGMV

SEQ ID NO: 120766 - protein, 179 aa, Heterodera glycines
WTWTWIPCWTWTLISWTKIRKIQVRPIIISGPSGCGKSTILARAMKEYPEAFAFSISHTTRKPRDGELDQQHYYFVDRREMEQMIDAGQFLEHAEFGGNLYGTSKKAVDDVQSSGKICVLDVELNGVRNFKALQFDAKFVLVRPPSIEVLEQRLRQRGSETEETIAKRLKHAKEDMEAG

SEQ ID NO: 120767 - protein, 245 aa, Heterodera glycines
KPGDVYLLAYNAIQFLGWGSILVKTVLWLASGHSFPELYQNVEMELKIFQTAAILEIVHSVVGLVRSPVFTTIVQVFSRVTVVWMILHKVASARLSFGVPMLLLAWSITEVVRYSFYALNLLAVPYALTWMRYTFFIALYPMGAGGEVLTMVAALGEIARRKHFTIEMPNSWNMSFNFYYIIIALCLIYLPGFPKLYGYMFIQRKYMFIQRKKVLGGGGKSSKTTTEGANKILALNFQPRLQSQW

SEQ ID NO: 120768 - protein, 325 aa, Heterodera glycines
MHTHPLSVDHGRPTTQRLPTHQTCAFALCCVEHAPSFAGTRPFRRVQKVDKKGNRLSKSLDILLGRATVEQQFCYYELILKAMSLSLDGKWPRALVDKLQLAWERFDSEIEEKEALLRSFGGTQRLAVVQTYIELCDDEDGTEIDDIEEIRQILCSQIHQLFIADTHLPKLVHFNMYPLRLVPVIVQRVPSAHVLINSINELITGSNLERRIFAIVLITELLELYKIPSAFAALSLISDMLDAMLVSLVTDEFIVLMLNVVPSLARLVLLSPFHAEQFLTILERTRKLAFSRMAIYSSLSQARKSPERKLFEMVNRTMEDLPKLT

SEQ ID NO: 120769 - protein, 427 aa, Heterodera glycines
PLIRPNSSIHLVFLQKPSLNATNSAGIRPSAVKGAIEFKDVHFAYPSRPQLKVLKSVSLRIDAGESVALIGHSGSGKSTIVALLMRFYEATKGCVSLDGVPLSDLNVPWLRQTIGLVQQEPVLFAATVEDNLRMGREEATKEEMETACRMANAIGFEEMETACRMANAIGFINKLPQGFKTLVGQGGIQLSGGQKQRLAIARVLLRNPRILLLAIARVLLRNPRILLLDEATSALDAESEQIVQEAIDNASSGRTTNASSGRTTITIAHRLSTVRNADRIVVFEHGRIVEMGNHEKLIRPNSVYKQMVPNKNEKGLKWGGGDKRTEKERNSIGPIKWHFRWPNKLKKKSQREPRREKPLLVITAQNTLFLFDRLDDELHEMGARPASPLDILRYAGPEMPFVFFGVVSAIWPANKTSPDEKNSQKIR

SEQ ID NO: 120770 - protein, 113 aa, Heterodera glycines
SGSRHAVAIKMEPPSNGPLFTEMHVYMRVLKPEHLDKWKKDKGLKFLGLPHFISNGSFTYEGQQIRYLVIPKFALSLESVRAARTPSAVLSWTEVSAVAKTVVHALAYLHDQG

SEQ ID NO: 120771 - protein, 188 aa, Heterodera glycines
LKFLGLPYFISNGSFTYEGQQIRYLVIPKFALSLESVRAARTPSAVLSWTEVSAVAKTVVHSLAYLHDQNYVHGDVKAANLMMESKSDFSRVVLIDFGLARRLPDALVEKENKKQAHNGTPLFTSCDAHRGCLPSFRGDLEILVHNMFYWTTGTLPWESVEQNLDAVYEAKKSLVANAPGRPQNEIQN

SEQ ID NO: 120772 - protein, 289 aa, Heterodera glycines
MPSNTKLKPANLKHPEVAELFSLKDPEQRYEDLREIGHGAFGSVFYALDKDTQETVAIKALDKDTQETVAIKKMNFSGKKMNFSGKQSVEKWNDIIREVRFLKSVRHPNIVCYKASFLKEHSCWLVMELVMEYCVGSTADILKVYKKAFLEVEVYKKAFLEVEIAAICEQTLNAIAHLHSLKRIHRDIKAGNILLTESGVVKLADLGSASLSSPAQTFVGSPYWMAPEVIIAQDTGGVYDEMAPEVIIAQDTGGVYDERADIWSFGITCIELGPTLIIIGFNTDKNYIS

SEQ ID NO: 120773 - protein, 258 aa, Heterodera glycines
MLVSIYGSKDLFVKEYQHLLAERLVHNGWDRYLQSEFNYLETMKRRFTDGELNHCEVELELELDGRNVQIVAPLTQAQIILLFTEKEIWDVASLAEATELEILDLRKRLDWWTSKGLLSQGPSDPITLEDTFYLVSTTEAIENYLKQSAVHQSGTFYEYMYSDEEEEEKPLVEDVAEELEQYWNYTKGLLMHRATCEPLTAQFLHRMFKNFTSPGKMAPSLEAVQIFMQRKIKQNLVVFENGVYKATKELKSQSNNTK

SEQ ID NO: 120774 - protein, 449 aa, Heterodera glycines
MSCPKKISEQSALAFNSALNVFTVPPTNVSVSRSFFRELLPLSTISQEGPYLFRLFNDNLWADMSRVYLFLELSIQKEDGGGRWVPIEAAVAADQLVAPAQCVGQTFVQQLKVEVQNTELYDSGTLYPYKAYLTNELSFPNSAKGHFMASAGYHPSRKHDDATDAGFLARCARFAGGRKARFLSRLDFDLGNQELYLLNNMDVLFTIYRAKDAFLLQSLAAAAAAAAAAQHYALYLHDIKLYVKMVEVQPSLNLSIYKTLEKQPATYAVRKTEVKSVFLTAGRTEMDHNIFSAAIPRRLTIALVANGAFNGQLALSPFNFKPYAIREISVHAAGHVYPAVPHRMDFSGCAYIRPFVDMYEALGMANSERSMDITLEQFHDGWTIFVVPMTSTLDDSCGFELLRSGTTSIRLAFNEAIPAGGVEMVVLGEFDQLIMIDYNRHIVSDSKIA

SEQ ID NO: 120775 - protein, 449 aa, Heterodera glycines
MREIVHIQAGQCGNQIGSKFWEVISDEHGIQPDGTYKGETDLQLERINVYYNEAHGGKYVPRAVLVDLEPGTMDSIRAGPYGQLFRPDNFVFGQSGAGNNWAKGHYTEGAELVDNVLDVVRKEAEGCDCLQGFQLTHSLGGGTGSGMGTLLISKIREEYPDRIMSSFSVVPSPKVSDTVVEPYNATLSVHQLVENTDETFCIDNEALYDICFRTLKLQNPTYGDLNHLVSVTMSGVTTCLRFPGQLNADLRKLAVNMVPFPRLHFFMPGFAPLSAKGAAAYQACSVAELTKQMFDAKNMMAACDPRHGRYLTVAAMFRGRMSMREVDDQMMSVQNKNSSYFVEWIPNNVKTAVCDIPPRGLKMSATFVGNSTAIQELFKRISEQFTAMFRRKAFLHWYTGEGMDEMEFTEAESNMNDLISEYQQYQDATVDDEGEYEAEDTTQPTAEVE

SEQ ID NO: 120776 - protein, 124 aa, Heterodera glycines
MLHGNISDIYITIDQRKGPQGGLSPGFGIFLTAETTEGVFFHGEAMSRPKGQNEDQTVPEEIGEQAARRLLDEIHMEWWKVMKEIVGKGGNAMKNGSEDKCLMTCVGVGFLQHQQRPTLIVLFC

SEQ ID NO: 120777 - protein, 571 aa, Heterodera glycines
ETQAATTTAREHYPATVSYEGPLSATTRKWELEGAPLNSHVTVYHHGRSDLAAPEQQQPVAEKVTTKISSLFKRKPHHEDFPVSEPFTGQLDETARVSELFHEPIDASVSVYSAGRSDEHVVVQPTTIAEAEPVPLVEYPRTTAYDGPLQSTSKGAEMEGQPLDAHVSAYHHGRSDMAPPAAPKETITTKLTSIFKKTTAQEDEYPPKTEPFLGPVAQTNRQRELEAVPVVDRIERIPKGFYEEGELHPVVVHEEKELTPSEAEKRPGTLERITHLFKRTATEGEWPMVTEPFTGPHAETSRKGELEARPLGELVAAYASGRSDEVGPMQTIETQAATTTAREHYPATVSYEGPLSATTRKWELEGAPLNSHVTVYHHGRSDLAALEQQQPVAEKVTTKISSLFKRKPHHEDFPVSEPFTGQLDETARVSELFHEPIDASVSVYSAGRSDEHVVVQPTTIAEAEPVPLVEYPRTTAYDGPLQSTSKGAEMEGQPLDAHVSAYHHGRSDMAPPAAPKETITTKLTSIFKKTTAHEDEYPPKTEPFLGPVAQTNRQRELEAVPVVDRIERIPK

SEQ ID NO: 120778 - protein, 236 aa, Heterodera glycines
DSIHRTLFVSSSQHKLCFALKELFVWRFMQTDPNWSNFLFAPNPSMDTDPNWSNFLFAPNPSMDRYQLVLLDFGSTRSFSKTFIDKYMRILKAAYAADREEMLKWSREIGFLTGYETKTMEQAHCEAIAIIGETLTCTDAYDFSEQSVTPRINKLVPVMLEHRLTASVTPRINKLVPVMLEHRLTAPPDEIYSLHRKLAGSFLTAAKLKASVACGRLFLNYFANYIYFTSFILFVD

SEQ ID NO: 120779 - protein, 203 aa, Heterodera glycines
MGSAKRHGTRNARMPEKVIWMRRMRVLRHLSKRYRDAKKIDKHLYHELYLKAKGNAFKNKRNLMEYIFKKKTENQRSKQLAYGFWVQLNSAQPVILCFREQAEARRNKNKETRKRREERLVQKRKELLHKISESEKEKTPQPLVTKPAEKEQPKPQPVAARTADKEQPKTQPAAVKTAEKEQPKSKTETVGKRVLVGVSLIEV

SEQ ID NO: 120780 - protein, 289 aa, Heterodera glycines
LGPLLFLIYINDLPDALPSGVRIKLYADDVKLYICYSKNRNSMHKALHNLSEWENKWQIRISIKKTFIHLGNKNPKEIYKIDGNIINVVDTIRDLGINIDNKLQFSNHVTQVIKNAYLRMRSLFRVIKSKSSRIWIILYKTYVRPLLEYAPEVWNPSLLKNIKIEKCQKYFTKRVLFKCSLPPIPYQQRLEYLQLPTLESRRKLSDLFMAHKIIYGRTEIPLKYLNLLNALTFPFIDLTRKINAKKLYLLRGGTKIWNQLDKKLIEINSLNQFKNKIKTFISVRLTGKI

SEQ ID NO: 120781 - protein, 384 aa, Heterodera glycines
MSRVYLFLELSIQKEDAGGRWVPIEAADQLVGPIQCIGQTFVQQLKVEVQNTELYDSGTLYPYKAYLTNELSFPNSAKGHFMASAGYHPSLKHDSATDAGFMARCARFEGGRKARFLSRLDFDLGNQELYLLNNMDVLFTIYRAKNTFLLQNLAPAPAAGAAARQQYALYLHDIKLYMKVVEVQPSLNLSIYKTLEKQPATYAVRKTEVKSVFLTAGRTEMDHNIFSAAIPRRLTIALVANGAFNGQLAQSPFNFKPYSIREISVHAGGQMYPAVPHRMDFSGAAYIRPFVDMYEALGMANSERSMDITLDQFRDGWTIFVVPMTSTLDDSCGFELLRSGTTSIRLAFNEEIPAGGVEMVVLGEFDQLIMIDYNRHIVSDSKIA

SEQ ID NO: 120782 - protein, 176 aa, Heterodera glycines
MQLLYFRVGCDFDFLFEAYKDVLLASPGGVERFFPDPAEADKVKAIREIFTGLWGLEGHDEKTERIIAVEDAIENPSNYVLKPNGECGGNNYYDDQLVEKLRTMTNNQEERAAHILMQKLHPMITKNYFLRPTILPRLGVVVSELGVYGTLMGNMLDRTVSYNAQSGHLLRTKLAG

SEQ ID NO: 120783 - protein, 156 aa, Heterodera glycines
MALRRIKQELAELKQEPITGCTAAPMDDGKDMFHWKATIKGPPESPYEGGTFNMDIVFRRDYPFTPPIVKFETPVYHPNVNKQGGICLDVLKTTHWAPSLTISKGESDAGKSRQNADKILRRQNDPIQNDHQNRTFWKSVDILSCEWDFSNSEMPF

SEQ ID NO: 120784 - protein, 185 aa, Heterodera glycines
MRLMLAGGDEAMEENGRMEESTGKGMAREWPSDAQADEGGRMSLGNGATAEDEAVEEHPYAEELAQFEPTEHSQMMALPETVKVSVFHLYTFMQLFFLFKKPTPLESSPPIWVRQLKDLEALIDTLNEVHEFSFDVEHHSFRSFLGLSCLLQISTRSADYLVDPFPLWPHLHLLNEPFTNPNIVK

SEQ ID NO: 120785 - protein, 573 aa, Heterodera glycines
FFNFSICQTAILLTTNLFGIFFIYPAFIALDLKRRKAGRRDLEFLCYKTKIGSFPINNRPTAFKYIFYQNNYFLLFTIASKISVSQNATPTPSAETVQNYTLHGFLHIVYIPLLRRRAVKFAILVTMVALFALGIYGLSRSTIGLELSDVLPDNTAPAAFLKTRDKLFSFYPMAVVIRGANVDFAAQQHQIDLLRRDIGLSPFVVKLPDGEPSERYWLQLFRDWLRGMQQRLDVAKRDGLLDNFDGDGTAKHHSPDLQIAYSLAAKHHSPDLQIAYSLACSYGQNYDCARKAGTVRLIDESGTINTEGFYNYLYGWHEYEQMFYSVSQASFYPRLRKLRQGPPGPMNFIPPAPKPLFSRIPFYCDGLRDTPTIMRMIREIRAISENYSRAGLPNYPEGVAFTFVAFTFWEQYLHLDYYLVLAIGIISVSVFCVISTIIFNPWAPLWVTCVVASMTVELAGFMGLAGVKLNPISSVTLITAVGIGVEFTAHVALAFLTSLGTREERMVNAQHMFVPVIHGGMSTLLGIIMLAFSDFDFVVQYFFVVLTALVIIGLFNGLAVLPVLLAYVGPPCE

SEQ ID NO: 120786 - protein, 316 aa, Heterodera glycines
MDEDMEEVEIVFAQRLASGEPTARQRAMKHLRTHIRERTKTDGFSSVSLARLCKGLHYALWMQDKMTLQEELADEICALCNYFRTDEQLLEFVVVLFTTLSKEWPHIDRWRMDKFLMLVRRLVRTLVRRLVRTLFRQLSSHRWDPPLCDQFLQMFRSSLLSANSPLCESLKFHCASVWLDELDTAATAKVTPSEGNAGKNCEAFPLDEQRSLDFVWPYVQLLQEQISWEINKLVNLQKKTEEKSSSFEFDYKRIGELLFEVGKQQKVPSRRRKRIYALCKKFECAAQGDDPFHLEGVKIRKKKRRRKNSSSQVAIV

SEQ ID NO: 120787 - protein, 137 aa, Heterodera glycines
MVTGEYGWSANMERIMKAQALRDSSTMGYMASKKNLEINPDHSIIKSLRDRVEKEQDDKTAKDLVVLLYETSLLTSGFSLEDPQQHASRIYRMVKLGLDIPDEEEPAEQQPSTSGEPTIAEKIAGAEEEASRMEEVD

SEQ ID NO: 120788 - protein, 193 aa, Heterodera glycines
SLLLCEIHLAFLRLFFREEDSEHTIFAATETTVSVNILIQLMDSMSFAEHSNYPFVELDKRLRVLKWMCERFFQFDLIKRIVGGTHKTVHDEQCRSCGKAGGGFGKLLACAECEAVYHVHCDADLVPGPTPPPQPQAPPPNPQTVPSSASDPTTATSNGGGGAGGGVAVTTAPATPVAAEDDPNWRCPLCRIY

SEQ ID NO: 120789 - protein, 441 aa, Heterodera glycines
MTFHKIDASSIDSITNAVDFFSIPPTNVTVSSSKVFEILPSNPLTDTPYHFKIHSSQNYIDLSKCYLLTEFRMRKLTAPNGEWGYLDATDQVVPIQLIGHTFIRDMKIAINGREIFNSNSLMAYKTYLSHELSQSLEAKVSHLTAAGYDREDASNLQNANSEGFKSRRQRYLGGRTAQYIAKIDADLFNVPQYLINHCEIDITIQPHDDNFLLIDTLDPPGQPYNIELVGLKLYCKKVSLMDGLALELAKKLEMKPARYAVRKTMMKALFISPGRYEFNANLFMDQVPRRVTMGLVANSDYVGNTKRSPFNFQHFNVRELSVVANGRSYPQAPYDIDYENWKFVRPYNDTQEALGFANSTYGNGIDYFSFLHTHCIYVFNMTNSGDDHGGLFDLIKKGCTAVNIKFKKPVPDGGITLIVMGEADSIYFLDKNRTIATDTTI

SEQ ID NO: 120790 - protein, 178 aa, Heterodera glycines
MTDTANRQRRGRGERRTRVLLRDSAKKITKASILRLARRAGVARINAEVYDEVRAALRSYLETIIRDAAIYCQHERRKTMKAIYCQHERRKTMKSRDVVHALKRQGNLMYGFEQAQGRGGRIYLEPAPYDIFMDNYYHCTYVCICLYCIVYCFVIYQCNSGPKCPLLAIISKNFVWFK

SEQ ID NO: 120791 - protein, 241 aa, Heterodera glycines
QKPPNAWLCDQKQRTAREGRKSSDGQLVPRFFDGLPMLTLMHIILTGLPGARKWTGGVFGNFYQSIFLSMPVCTIGNNCVTFSSARYEFTDSDGFTDLVDRRTMDVSKEQRGIINVLTSHDYLGYSVRYGRFGFWYEHTEAGEEAANFTVVSGATRYNQTGAVVFLPFWRHVQAENQRQLGLSDDFFLLAGHQLGSGFGSALEVLDLNADGFDDLLVGAPFEFHLRSDGASGGAVYVFYSA

SEQ ID NO: 120792 - protein, 241 aa, Heterodera glycines
MSGRSGRSGKRRQDGPGRPSRSRQQQHTQRGVQSAYQGPREPPEQPTVRGWEDTHDFSSALKIFVNETTRRNVKELVNEYTELNAMPRPETSPEFTRHMDCNRYRDVICAEQGRVRLDNGRYIHANWITALGEQRFICTQGPLETTCADFWTMIVQENIESIVMLCDTVEQNKTKCHQYWPTPDKKESDGPEHSVALHIAYDTLQRGHRLNILSLARNLRQHRAQSVQTPDQYLYIYFVML

SEQ ID NO: 120793 - protein, 84 aa, Heterodera glycines
MADNLRSEDMWRVNAIIGGFDSTDKKAYLTMIDYLATNIPPQNFIFYGFPGAFAYSIMDSFYRTDLTEQEGLGLVQRMIDQVKR

SEQ ID NO: 120794 - protein, 110 aa, Heterodera glycines
MDRDNRWERIKALIFEKNIVFGLAFFLKVAYEALVAGEGEKCEPANAVQLVNERYANQQTDEFLTPIVFSDEARVKDNDTLVFFNYRADRMREITSAWVVCKTCRIWAPM

SEQ ID NO: 120795 - protein, 268 aa, Heterodera glycines
PSRVKIKLYADDVKLSRADTEIMHKALHNLSEWANKWQIRVSIKKTFVLHLGNKNPKEIYKIDGNIINVVDTIRDLGINIDNKLQFSNHVTQIIKNAYLRMRSLFRVIKSKSSRIWIILYKTYVRPLLEYAPEVWNPSLLKNIKKIEKCQKYFTKRVLFKCSLPPIPYQQRLEYLQLPTLESRRKLSDLFMAHKIIYGRTDLNPFKYSNLLNALTFPFIDLTRNINAKNLYLLGRVTKIWNQLDKRLIEINSLNQFKNKIKTISIPVK

SEQ ID NO: 120796 - protein, 335 aa, Heterodera glycines
MEYVPGGDMMQLLPDNILIDRSGHIKLTDFGLCTGLRWTHDKRHYVVYDEQSNGAPIGHVRDDSFSLPPGLDQRVKVLEMRHHRKRDRAHSVVGTGNYMAPEVVQKIGHTQLCDWWSVGVILYEMVYGRPPFLSQRDDPAETQFMIVHWRRFLDLRNAMGVRLSKQCVDCVAKLCCDQENRLGHRNGAKDIKAHPWFKNPEDTSNFDTFEVENEELIRTNGNGNDRLKCAAYGGGKPLGPNFIDFTFRHFFSEGMCPPARGRSPQVRPSLAPLMESSTEGGNAAKSPAGEVFAKPKQIVTITGKAKVVPFTSSKRVPAPSIPSDSSKATTVQIGG

SEQ ID NO: 120797 - protein, 152 aa, Heterodera glycines
AKELLICHSSSPTASPQPSGCFLTSANVVAELDRIRREQNRSGAGEADGQSTAATTPNASRRPSNSSAAAVSGSVEDELAKIKVVLRQHERRIRLLEPGNETIRGHLEKRKDWIRRTRDHQEKSADIKKLKRSARERNPDEFHFHMLRSQIG

SEQ ID NO: 120798 - protein, 154 aa, Heterodera glycines
TYLFSQHSLMVRHVTASCFRAPWPFEKKGSTGWRKNGPVVIESHKWPGQQKEFPELSPKFLGANFKQLWRYTGVAPTGFNDPKTDDFVYTGVAPTGFNDPKTDDFVHVPEMVPELVVPDLANFELKPYVSYKTDAKIEERKKFKTTNISIALGY

SEQ ID NO: 120799 - protein, 190 aa, Heterodera glycines
MSTCFRQEVGSHGRDTRGIFRVHQFEKIEQFVICSPFDNESWKHMDEMIDNAEEFCKVLGLPYRIVAIVSAELNNAAAKKLDLEAWFPGSGAFRELVSCSNCTDYQSSRLRIRYGQTKKMDGEVNYVLMLNATMCDTTRVICAILENNQTEDGIVVPEPLRPFMPSQYSQRIPFVKPAPIEQEKVQKKKK

SEQ ID NO: 120800 - protein, 214 aa, Heterodera glycines
MYQLFRALGYYRAPELIFGATDYTTKIVLAELLLGQPFFPGDSAGVDQLVEIIKVLGTPSRDEIQHMNPNYTEFRFPMIRPHPWHRVFRARTPQEAIDLVSHLLKYTPSVRPSPFEALAHDFFDELRSPTCKMPSTGGPLPPLFDFTEHELQIEPRLNEKLVPKCQSASASSSLSATMPKTSTAPDGGGAKQQEGVGGGVVKTDESDSKQQGLY

SEQ ID NO: 120801 - protein, 427 aa, Heterodera glycines
AKFFDPNVWVHPLRGQGKFEKTLSFKTKFFDPNVWVHPLRGQGKFEKTLSFKTLNLSHNFWLLELFLIISTHFSTRIVRYEVYQTQPSAIASSAIASYLHENGNAQRYLDLFCRHQRNLGNAQRYLDLFCRHQRNLGAREWDHALMLTGFDIHRGYGATSISGIARLDGMCDSWNSCTLAETLAEGLDFTSAFIGTHELGHAVGMRHDEPYCPGTHIMSASLGPGKVTWSSCSTRDYQMFIQRLDARQNNCMRSSLLREQLPITESLKPGQVYDAHEQCRLMHGPSYVQVSPRHDHYDGVCHMMWCGQSNYGRGVCHMMWCGQSNYGRIITSHPALEGTVCGTNQWCSLGRCMPWGSSAPLQPQPVATVPMLTPLQPQPVATVPMLTTVMSNDGQFSAWNARQGNPCQIHAYAGRVASARSASGPTM

SEQ ID NO: 120802 - protein, 438 aa, Heterodera glycines
MTFHKIDNDSVNSITNALDFFRIPPTNVSVSSSKVFELLPSNPLTDTPYHFKLHSSQNYIDLSKCYLLTEFRIRKENVNGQLINLGIDDINIAPIQMIGQTFIRNIKMSINGREIFNANALMAYKSYFSHELSYSTTAKDSHLNAAGYYRDTGDTLEMGGGCTARRDLFAGSNVAQFIAKIDTDLFNQPLYLINFCELDIEILPNDNDFVLISPVVGAPKYHFEVMGLKMYVKKVSLMDGLALDIARKLELKPARYAVRKTMMKSMFISQGRYEFTANLFMDQIPRRITMGLVANTDYVGTIRRSPFNFQPFNVREISIIANGRSYPQAPYDLNYPNGKFVRPFNDMNEAVGFSNSSESNGITFAQYGRTHCIYVFNMTNSGDDQAALFDLIKNGTTAVSIKFNHPVPDGGIMLVVMGECDSLVMLDKNRSISTDTTI

SEQ ID NO: 120803 - protein, 274 aa, Heterodera glycines
MNQQKEEKKASKGEREEDVKVLLAEAERFKRLAFLGVMYEIVRRPKRSPMVSQFLISNHGSLSAAQFTPNTAQRRKSRQGGYEQVIAGYAAAGSQVAPPPAPPAPANAYPGNNSPPPPAQEVPQAPPSSPAPSAANYAAGAQAPSAGAQQVPLLLTPDRPAGWAPKGHPDSQDCQANPEFRERPGLKAPRAHPAPAERMDRPDSRDQEVKEKGAEQMQAYTSGLDGQLSDVPGVQGPPGPVGPPGPPGVPGEPGQQGQSQVMRGRAENNHANGH

SEQ ID NO: 120804 - protein, 340 aa, Heterodera glycines
EYVDEELKKYGAILENAHESAKQVTELRNRDWLDSPWDDFFRGKNPSQLLPTGIERDSLEHIVNKISQVPDGFNLHRGLLRLLKGRKEMLSENNLDWSIGESLAYGSLLMEAFLSLNFFLCQTQAEYTVCNSSLSEYAVLGFELGYSVVNPNSLVIWEAQFGDFANTAQCIIDQFISSGQAKWIRQTNLTLLLPHGSEGMGPEHSSARPERFLQMCNEDDGIDLKSVALDEAFVARQLNETNWIVANCTTPANFFHLLRRQIYLPFRKPLIVFTPKSLLRHPLAKSPVDDFLPGTSFRRAIPEEGSATNNPAAVERLVFCSGKVYYEILTERRNQGLDDK

SEQ ID NO: 120805 - protein, 79 aa, Heterodera glycines
MAPLAKTFLGPELARGLKEGLPYPLKDTIRFIRPKLTLHEGYIRLATDFELSEQHMRQRVAEAFERIKNEHEPPGQFRN

SEQ ID NO: 120806 - protein, 144 aa, Heterodera glycines
MESTRISEAEIKRREAQMMEGARPFNVFDPFTWSFPGKIAATSTGILTCSVTYYMLWYRKPWYAALNMKILIFAAGISGAYFIAKSRARVMADRDAVVSHYVQTHPEDFEHLTLNNFYGRPYRDLLLPWVPIRAQYNKLEKEAN

SEQ ID NO: 120807 - protein, 413 aa, Heterodera glycines
FICYFRRMLRKLKHSASFPLISAFTRRFSKNVSGYKIVDHTFDAIVVGAGGAGLRAAMGLSEGGGAGLRAAMGLSEGGMKTAVITKLFPTRSHTVAAQGGINMKTAVITKLFPTRSHTVAAQGGINAALGNMNPDDWRWHFYDTVKGSDWLGDQDAIHYMTREAPRAVIELEGSDWLGDQDAIHYMTREAPRAVIELENYGMPFSRTEEGKIYQRAFGGQSNDFGRGGQAHRTCCVADRTGHSLLHTLYGASLQYNCNYFVEYFALDLLMSREGHCVGVVAINLEDGSIHRFRAANTVLATGGYGRAYFSCTSAHTCTGDGTALVARAGLCNSDMEFVQFHPTGIYGAGCLITEGCRGEGGFLINNEGERFMERYEGGFLINNEGERFMERYAPVAKDLASRDVVSRSMTIEI

SEQ ID NO: 120808 - protein, 615 aa, Heterodera glycines
GRKRRTKSIRPPRANRSPSRKDVKTERRSSEREKRGDSDEEKRSERTTEEMGGESCEEMEDFPRRLAMFDFGQCDPKRCSGRKLCRVGLVSVQRFSHRFPGLLLTPAASVTISPVDRPLVMAKGLAVVDCSWNRLDTTPMHKAKGSEHRLLPFLLAANPVNYAMPFKLKGSEHRLLPFLLAANPVNYAMPFKLSCVEAFAAALFIVGLEEAAKCVLAPFKWGPNFLALNAEVLSAYAKCSSGDEVIRCQRQFMEKIEACSSGDEVIRCQRQFMEKIEAEAKRSKERTVKYPTSSSEEDEEAEEAKLKYLFGFKGAKLKYLFGFKGWIIWGLLHFFGWAISLKFTQNPFALRLKSLPTEGASVALQKTETVDAIVSQTDCELYEWNDALFQGAEARLFACTFLRRRAVMKERFVKRYRHAELDARLAKERTRAELKAILKCQEIGIGIRVPSVFFVDPLKNRIIFELICSSGSSDRAPTAKHFLDKLQRDESASKLAEFGHEFGRILRTMHDANLIHGDLTTSNVLVLTNGDQSLALIDFGLAQFSSKPEDKAVDLYVLERAIRSAHIGMAHIGMGKMMDAILDAYKTKGAEGTRTAVLLKLDEVRRRGRKRDMIG

SEQ ID NO: 120809 - protein, 360 aa, Heterodera glycines
MDLEGADEKNACFGGTQALFHAVDWMYANYATEKRLAIVVCADVAVYSAGPARCTGGAGAVAFLIGPNAPIALERGLRACHSQNVYDFYKPIGGVSTQFPRVDGPNSVETYLNAVDMCYGRFCEKWNKKFCTGPPCSLSDFVAVIFHSPYARLTQKAFSWLSFVDFKRGMMDDGVTADDDDVSDWDQLSAYKSKSLHEIFAVERTKTRSDGDRFTDKILRMSSRTADAKLNPFLEFSRRIGNMYTPSVYAQLINVFLNTELSDKSNGKRILIFSYGSGCIAAMYSLRFNLYTEKLMAAYGAIKQSAKKAHARLDQRIRHSPKQFTAALERTEQMSREGGQFGDEPPNEPFMYRYLHRNSR

SEQ ID NO: 120810 - protein, 197 aa, Heterodera glycines
PPPPPPLSNAIAPLVSLYTIYDEGSVHQKGETSVYLLLYGAAGMCVGLWLLGHRVIYTVGENLTRITPPSGFSIEFGAALTVLFASKLGLPISSTQCKVGSVVAVGLVQAHPVVHWTVFRTQCKVGSVVAVGLVQAHPVVHWTVFRNISLSWLVTLPIAGVVTLPIAGVMSAIVMFLLRMLILGSSEHHQRKGRLFM

SEQ ID NO: 120811 - protein, 99 aa, Heterodera glycines
INKYAFSGGRDTKEEHRQFGGDCTVDTSFQFLRFFLDDDERLEEIREQYASGAMFSGELKAIAIGIVQGIVSELQTRRKTITNDVVREFTTPRKLAYDF

SEQ ID NO: 120812 - protein, 273 aa, Heterodera glycines
LSGKLPSLQVVLNAILRAMIPLLHIALLVLFVILIYAIIGLELFCGKLHSTCIDSVTLELAQLDPSTCGFSSAYHCEPSSASAIHSVRHKWLCSHNTTWMGPNNGITNFDNIGLAMLTVFQCVSLEGWTEVMYWVNDAVGREWPWIYFVTLVILGSFFVLNLVLGVLSGEFSKEREKANARGLFQKFREKQQLEEDLKGYLDWITQAEDIEQLGDDEHADEHGESGAGDGDEDGEHSDGETQRPSALLTQWRLLQRMNRRCRRGCRRMVKSQT

SEQ ID NO: 120813 - protein, 188 aa, Heterodera glycines
MARTKQIAKKRMSEKKATEQDALVSKQNLPTQAVKKAGSDMGHRAKRQLATKSAPNRRPRYQASHLLPPPEEPLQQKRFKKRGALALQEIRKFQESVNLLIPRSTFFRVVREVTMKFADGMRWQGKALLALQTMTECHLVNMFEDVNMCALHAGRVTIMPKDIALVRKIRGETTLAPSSGLRQTNRRR

SEQ ID NO: 120814 - protein, 407 aa, Heterodera glycines
ECGYAIRFEDCTSEKTIIKYMTDGILLRECLSDPDLDSYAAIIMDEAHERSLNTDVLFGLLRDVVARRSDLKLIVTSATMDADKFANFFGGHTPIFQIPGRTFPVEIYHARVPVEDHVDAAVKQAVKIHLGGMEGDILIFMPGQEDIEVSPSIHVTCALIKEKLGELDEAPPLAVLPIYSQLPSDLQAKIFQKAPGGMRKCIVATNIAETSLTVDGIFFVVDPGYCKLKVFTEKIGMDTLQQVPQCRRFAAVPFHGLTADGQHAELHVPALDIGCTGQHWPTDGFGTQNGGISAGPNTVQNAADVRGHGLQQRNFDHCVDAFHSFAVPESDHLTYLNTYIQWQKHKYSSKWCTDNFVHAKAMRKVREVRAQLAEIMESQRLEMLSSGTDWDVVRKCVCSAYFYNAAR

SEQ ID NO: 120815 - protein, 123 aa, Heterodera glycines
MTDKGGDSDDEAAEEFVPTGTFKPIVPLPSKVDVKSGEENEEVLFSARCKLFRYDPMDKKNKERGIGELKDFSESSEGIDEVFLLKFRDQTTAEEFANKLEETGKRLGETPKEKEAAEKEPRQ

SEQ ID NO: 120816 - protein, 140 aa, Heterodera glycines
MNQFRVGGQRELLGVAEDYADDILRHTKKILPHLARLFLVSTFIEDGCRMWVQWDDQREFMQESWSCGWFLAMLFVVFNFFGQILPVVMVMIRKYIGIACAILAGVVVLQTFAYHIIWDLKFLASVNLAFLLMPDILIVL

SEQ ID NO: 120817 - protein, 304 aa, Heterodera glycines
SFCNYILKVHQSKEMALRGGAATWRRHVRLKHHVRLKHLATDQYLSIMPISEERKESDSRRPNGGKAKQRPSSSLSASSVVGHANSAADAFQLDSAFVLVPKHSEDPIRDDNLLFSLDPCAKCSTVSLFSHWSTFNLFAHSGCWVHTTNPQITSNLFHSSKNEKGWVKVICEGHKVDKEAFALLPVPPNEVRDLDFANDACRALSQFVDLIRSGRSVGKEAINSTTQLLVDAIFFVTNASNHLADPLRLFNFTPIRDRQKLLREQGVLAQVFALLKAPFMPRQVFALLKAPFMPRQGSGEVQPL

SEQ ID NO: 120818 - protein, 66 aa, Heterodera glycines
MAEEPVKLILVTGGVMSGVGKGIVSSSIGVLLKGCGYRVTVIKIDPYINVDAGTFSPFEHGKLTLP

SEQ ID NO: 120819 - protein, 89 aa, Heterodera glycines
NIVPADVVKIAPFTLFPSPFPRELFVQAQKVHKAIQLMYFRAASNFEFLKDVHKGLLKTDQNFIETFKSIESRHLEGIKQPLTLFCNRA

SEQ ID NO: 120820 - protein, 126 aa, Heterodera glycines
CESCKAFFRRNALRPKEFKCPYSNECEITALSRRFCQKCRLRKCFEVGMKKEWILSDEQLKRRKNARIKCQQQQQHPNGGGIAREHQHNRHNNQHQHHQQVERESTVRNGTYNDGGKWQKFGTTGE

SEQ ID NO: 120821 - protein, 108 aa, Heterodera glycines
MAVAVADNANSNNNNAVLAIFFGQFGIGLMHTTFMFYYVKVFLNIFQVNEYWFNWSQLLFLIWNAINDPLFGYLQDVGGTWMKDRGKIFTYFGPFLVLSFPDHLVPVA

SEQ ID NO: 120822 - protein, 166 aa, Heterodera glycines
NVAPFNPAALVPIRSSLRPILPSAVASPALAFRRQPSVASSAWSKPTKRVSAPVRSRLNCLTPILAVTKVDILDQFHEIKIAIGYELNGRQIEYPPATVDDWANLCVHYKTFEGWQSPTTSARQWEQLPDKCRAYLEFIQNQLGVPVEYIGVGKGREQLIVRTNNG

SEQ ID NO: 120823 - protein, 137 aa, Heterodera glycines
MRTFQIRHRSTDKTRGLRHFAHKVCEKVKQKVQTNYNEVAEELVNEYFDNIVEVPSDPEKLQYDTRNIRRRVYDALNVLMAMNIIEKEKKEIRWVGLPTSSLAECRRLEEEKAQRQERIRQKTEQLQELIVQVIEQT

SEQ ID NO: 120824 - protein, 256 aa, Heterodera glycines; identical to SEQ ID NO: 119337

SEQ ID NO: 120825 - protein, 252 aa, Heterodera glycines
MGEGTPKIHFPPFFVKYPSNFMLLRGNHECANINRVYGFYDEIDRRYPRPGYGFYDEIDRRYPRPGARRLFDLFNQVFAWMPFVGLVGEKILCMHGGISNQIRSLDMHGGISNQIRSLDQLSNLLRPQTEPLLRSLEIDLLWADPSTSITGVAPNNRGAGVMFGADVVESVRNLLGIDYIVRAHQLVMDGVEYFALVMDGVEYFANRHLITLFSAPRYTGKNNTGATLLIIQKNLNLSMKHNSKLSIKTENN

SEQ ID NO: 120826 - protein, 394 aa, Heterodera glycines
MVAPKQTQLNALCADKAGDLVIASSKDNFDIYVWALATGHLLEVLNGHTNLVTGLALSENTLFSASSDGTLKLWNIIEGNCLESVQLTSEGLDVKHSPSAMLLAVLCYDSSIALFDTVNTQQLGTIDTKLDIDAARQKADKVKKASSERNKTFTCIAFSPDGSLLLAGGQSNTFCLYSVAGRIRLRTFKLSFNASLEGVKDDINSRRQTEFGNIDLFDISDSEDERHNPRKAIKLPGTRHTDMAERSIHQPVTVTKMGFCPTGGSFAVVSTEGVALYSLFQMRRFDPFQLEIDVVPNSIVQFSLSGEHAKAISLALRLNDAKLTRRVVESVPILQPTKLADFLQSAAEQSAAAPKTTANPIAVSSLPKVALALLVIGGGEVGHGVQNVGAVLRE

SEQ ID NO: 120827 - protein, 285 aa, Heterodera glycines
TCCVCCAFTIVTFLIDIERFEFPEKAIFFEFPEKAIFYMAICYLLVSATYMVGLVEEDSLSCAVSSATKQQLVTQGNEGNENILCSAVAVVHYFFNFAGTLWWLVLCFSWFLVTTLKWGEAPVGQVSSYFNILAWSYFNILAWSLPAIGSVLLVAMGAVDGDMFTGICSLGNLRPEFYFRLALVPQSIAIGVGLVLFASGVGLVLFASGFVSILRIRSYIKGHRFVTDKSSDKLSKLMFRIGCFSLVYVLPMAVGIFCAFYQTENIGHWLTNWLSNECFLATNLP

SEQ ID NO: 120828 - protein, 155 aa, Heterodera glycines
VFVVVCACVISRRRPSLRNELLRLIDLGHQIQVVDENIYRWKVKIPGPPTSLYFPGVYTVNIEIPCVYPNQAPKVQFETRILHPNIKNGDFCVNLLTLWNASNNMTDVLQAISHVLLEPNYESPYNTEAAFAYHHNQVAYENSVRRMVQLYAVGG

SEQ ID NO: 120829 - protein, 208 aa, Heterodera glycines
MLASVINDRFNRHSQCAPFFSLEFYPPLKEHPKNLADFFEMLDHLKQAQPLFVDITWSRRNDPGNLAKLNSSSAIAIATAAIFGKERTMLHICCNDHTRTESISHVKQTLSHGIANIMALRGDDMPTEQTLLTKNTKHFAIDLVKWTRELEETGGYFGNDRLTVAVAGHIYPPMKNISYRQCMEHLRAKVNAGADFVVTQFFLDANLF

SEQ ID NO: 120830 - protein, 73 aa, Heterodera glycines
MPDYDETTDLQLCFNKTHFQRSDFNVERFVNLARKRVTLDQLQNDLRIYLRHLQNFMVELINDDYADFANLSS

SEQ ID NO: 120831 - protein, 489 aa, Heterodera glycines
MHVDFDPLQVDWSTFSSEYVQFGGYNIYRGLPYQRGAGVGAVFRSLMRYLLPIGKQIGYAIGCQGMESGNRVFTNVLEGKDLKESLVLPLATITQESPYLFRLYSDNLWTDLSRVYLYLELSIEKPGANDKWIAIEDADTSVSAIQGIGQTFVQQLKVTVGNTEVYDSGNLYPFKAYITNELSFPINAKKNFLGSTGYYYTVNQDDSTDEGFKERCKIFKGGKNAQFLSRLDFDLGNQELYLLNNLDLLFTIYKAKDVFLLQTLKANDSTKYRLTVHDVKIYAKMVEVQPSLNMSLYKTLEKQPATYAVRKTEIKSSFISVGRYEFEYNVFSATIPRRVTIALVGNSAFHGDYKLSPFMFEPFDLREISVHAGGVVYPAVPYKLNFSKDHFVSAFVDMYEALGMANSERSFDISMTQFKKGWTFFLIPLTSTLDDSCGFELLRSGTTNVRATFNSPIPLGGVEMIVLGEFDQMIMVDYNRHIVTDSKLG

SEQ ID NO: 120832 - protein, 165 aa, Heterodera glycines
SAFFFFSNEKRQEVSGEHPEWKVGQIAQELGVRWKALSDEERAIYEKKAQEDKERYAELIQTTAEHVLQSQGGAHVVSTSAGGQPQMVILQQQPQQGQPGTQLPMQILHYNKQSKREGFPLPPWSQFPRLVKKHVLGLVRLFVVVKEEHVSSASAAQQCATQQHA

SEQ ID NO: 120833 - protein, 180 aa, Heterodera glycines
VTFVKDGCEHFLIKLMTIENCLGLRELSDQHSCEQLLAAIEAFMLEHFMEICHKEEFMALDSVTTLERLAKSDDLNITDERFLFEFLVKWVEMDKTGLRLNSLTRLLRFVRFFQLPFDYFVNIKQLPLISQSSEALAFVQSQSEAFLEAISASAVHFRTKINLPTESRHSQLQAVWASIN

SEQ ID NO: 120834 - protein, 288 aa, Heterodera glycines
MTTIWQLCEDATNVLRDQASLVETKPPLVMCGDIHGQFVDLKRIFNKMGYPPFTKYMFLGDIVDRGNQSVETIVLLLLYKVRYPTEFYILRGNHECASINRIYGFYDEINERYGQHNVRPLWERFNMTFAWLPFVGLVSDCILCMHGGIAPEMTNIQQLRMLRRPSIDPPVPSLELDLLWADPSTAVEGTAPNPRGVSILFGADVVAEVCRKLNIELVVRAHQCVPFGVSFFANSYMLTLFSAPMYVTEKNVGAVLVIDAKLQLSFRFFKGTQITPSIGPASRRECSQ

SEQ ID NO: 120835 - protein, 202 aa, Heterodera glycines
MDAGFYRGTSSEQDIRFTDKERKLLRQMKFENVLETKLTKVDLAKINLDVIKPWITLKLNEILGMEDDVVVEYVFTQLEEKELNPKKMQINLTGFLNARRAREFMAEMWQMFVEAQDSPEGIPTSLVEKKVQELKASNSNKQPMQTYHKATEVDWNQRYQTLTGGRYGKMDPKAQVSKSHMSDTFMKGGGRRPPAKAARSGR

SEQ ID NO: 120836 - protein, 259 aa, Heterodera glycines
MAMRLPSPHNQRNEWLRHQHTFAMAATQTMENEKTLQGEGIFAEPVLPQKNLPLKPAKSEESDEGTATEQTQQQQQQPTISDLRYQQPFWALVPAEDKQEYFLEIIKEGTVIGTVRLHDSAHQKSFWSIGRFEPCDIKLEHPSVSRFHAILQYGECIKGRPGWFIFDMNSTHGVRLNKQPLKKRTYVPLHNGFVFQIAGSSRLFTVCGGPKREQKEEENKEKAQPMGKTENKKDAEEEGEDEEEQQLRYYEKDPLGWLQ

SEQ ID NO: 120837 - protein, 337 aa, Heterodera glycines
MSINGREVFNSNSLMAYKTYFSHELSYSNTAKDSHLNAAGYYRDIGGSLETGDGCIARRNLFARSRTAQFIAKIDADLFNQPLYLINFCELDIEILPNDNDFVLITTPAVAQGAAAAPRYRFEVVSLKMYVKKVSLMDGLALDIARKLEVKPARYAVRKTLMKSMFISHGRFEFTANLFMDQIPRRITMGLVANSDYIGTISRSPFNFQPFNVREISIIANGRSFPQAPYDLDYPNWKYVRPFNDMNEAVGFANSLESNGISYEQFGKTHCIYVFNLTSSGDDQAALFDLIKNGTTAVSIKFNQAVPTGGIMLVVMGECDSLVMLDKNRSISTDITI

SEQ ID NO: 120838 - protein, 44 aa, Heterodera glycines
MAKRTKKVGIVGKYGTRYGASLRKTVKKMEVSQHAKYTCAFCGK

SEQ ID NO: 120839 - protein, 96 aa, Heterodera glycines
VIIRPSSKVIIRFLTVMMKHGYIGEFEIVDDHRAGKIVVNLTGRINKCQVISPRFDIRMADLEKWTSNLLPSRQFGFLVLTTSAGIMDHEEARRKH

SEQ ID NO: 120840 - protein, 165 aa, Heterodera glycines
MPLNDVSNNEGIAQNGTTDSLADADNGTEVMPPQHLFSDYVEIAYLGLVICAGLALNISVLKRLMVERRRARRSNKVMSGFLLLKLNLNVSDILILLIHASGKLGWLITYDWRGGDALCRLFNLLSMFTLYLSSNIVICIALDRLFTVLTAQRMDLGQQKVRTKK

SEQ ID NO: 120841 - protein, 76 aa, Heterodera glycines
MYQQLVNLSPPSQQPPQSSSATHQGGHHRHTSSGHHRSSGMTASSSRAPNRTRTGDDLHIGKYKLLKTIGKGNFAK

SEQ ID NO: 120842 - protein, 887 aa, Heterodera glycines
MAHLIQDGFVVNDATWKLGIFITDMNISRELFVRGDMTIGSLMMQLVGQIGETQDWSDHYMWWPDRRKWETQDWSDHYMWWPDRRKWLKHTRSTLDQIGITAATYLEFTPMHKHAKVQLPDLQVQLPDLQIIDARLDFSVPILKVTQKICQELAIRHPEELSLKRDIPPDILRKGASVESEAQIQPYMKPGEESIGPGTLRTAKPIRASTVNLTSGRGSPALSQASAMGPGHLFNASEIGTLPKMGTIPRGMSPGPAAYREVLGRTPEPYREVLGRTPEPGYSEGGGLECDQFDENLINSPKITPGRETFRPQNYLEKAALNRGWLDSSRSLMEQGICEGDVVSLMEQGICEGDVVLLRFKFMQFFDMNLRYDPVRINQLYEQAKWSVLLEEVEHTEEESSLFAALQLQAALQRNSPDRESPLQAALQRNSPDRESPERDEVDVLLDELEQTLDTTASLSRRDLTYVPELTEYLKYLKPKKLGFNNFKRAYFTPKKLGFNNFKRAYFTFRDLYLSYYNTAQDANGPPLGHYYLKPPLGHYYLKGCEVSQDLSVSQGKFNIKLQVPSSGCEVSQDLSVSQGKFNIKLQVPSSEGMSELILKCDTEQQFAKWMAACRLASRGKTMADSSYNSEVESIKAACRLASRGKTMADSSYNSEVESIKKVLQMQAGTAAQNGAQNKKKSQPVQLPTDFNSEEFVCQRYWKRSGNKSKMQQRISDAHSNKMQQRISDAHSNVKTLSCTEAKLQYIRNWEALPEHGLHYFIVKFRNGKKAELIAVAHNRMMKVNSDNGESSKTWRFSGMKKWHVNWEIRHLKIQFDNEDVEFKPLSADCKVVHEFIGGYIFLSMRSKDQNVVHEFIGGYIFLSMRSKDQNQTLDEEGFHRLTGGWG

SEQ ID NO: 120843 - protein, 112 aa, Heterodera glycines
MVALRAQFEASNDVGVFCKLTNAYCLVGIASSENFYSIVEAELADVIPVIHCTVAGCRIVGRVTAGNRHGLLVPNATTDQELQHIRNSLPDSVQIRRVDERLSALGNVIAWS

SEQ ID NO: 120844 - protein, 223 aa, Heterodera glycines
AMDEELERDERVFLLGEEVAMYDGAYKISKGLWKKYGDERIVDTPITEMGFAGLAVGAAFAGLRPICEFMTFNFAMQAIDQLVNSAGKTYYMSAGRVTVPIVFRGPNGFAAGVAAQHSQDYAAWYAHVPGLKVVAPYSAEDAKGLLKAAVRDENPVIFLENELLYGVPFPVSDEVLNADFVLPIGQSKIERVGAHVTLVSYSKAVQNCLEAADQLKAEGVEAE

SEQ ID NO: 120845 - protein, 405 aa, Heterodera glycines
DYREQPELDALSQSGIDDTSDITELSIDARRRAELDMARRDQMTVDDAIYWEDGDDEAIHLMRRRKQRGLSSADEHSLAGEPAEEDIRIDIIENPRGRPTREHIKDESIKHMVAENRESLEVDYNDLAHESGEPDITYFLPEAPTEVLECLNRAATTVVVSIFPWYHRITTEVKVRIKNLPMEEDIRMLRQVHLNMLIKTAGVVTITTGILPQLGIVKYDCKSCSYVLGPFVQRQDEETKPSTCPSCQSRGPFELNTEETIYHNYQRVSIQESPNLVAAGRLPRSKEVILLGDLCDSCKPGDEIELTGVYSNGYDGSLNSRQGFPVFNTVIIANHITRKDRIESDSLTDEDIKAIHELAKHPQIAQQIFCSVAPNIYGHAEVKQAIALALFGGEAKNPQGKHNIR

SEQ ID NO: 120846 - protein, 761 aa, Heterodera glycines
ATAHADSTEYLKNESSSAGVSNGTSVCTQHTADDGRSYYYNKATKVSSWTKPDDLKTKEEVIKELSVWKEYKTPEGKPYYYKELSVWKEYKTPEGKPYYYNTQTKVTTWSKPEALNKVKSILFFFCSGAQNHVIPEHSIVSLKFSSVIVILFLSERYYLFSETKTKKEESDAANESKPDLVHLSSNSEIEKAMEATLKTLVVKKSDEPIEAKEITQKKEEEDDSEYNLKKRQEKRINTNMNWEQASKYIQNDPRYKILAKVSEKKQVFNAWKTQRYKEERDERRFAIKMAKDERRFAIKMAKEGLEKWLMAHQRMKPTLRYHKAELMAHQRMKPTLRYHKAEGIFAMELQWKAVTEPERREIFEDVKIALAKKDTEQKKALKERNIKALSDILDGIDKIDYRTALSDILDGIDKIDYRTTWAEAQRILIENPSFAKDTTLQGMDKEDALVVFQKHIKLSEEMDKEDALVVFQKHIKLSEEQYVKEKQLEAKRIKRQERKTREAFIQLLHGLHDRALVTPASSWAQLYPMISADQRFENMLLTNGSTALDLFKFYVDELRTKYHEDRKTIKEFLEFKKITIDESTTFDAFRQWVKEGPNSDQLDPVNVKLCFNDLCDRILMLCDRILMKKKEAERDELKKQKRAELAFWDLLRSQKRAELAFWDLLRSLSPAVGPNSDWEQIKEQLKESGQLETTAEEEQLKRLFDSFVKSLQDICGHYHSAVSSSSKKRKKEKRKSTNRGNGGREDGKAKKFRKMHPTRKR

SEQ ID NO: 120847 - protein, 69 aa, Heterodera glycines
SPRIGTYVINKQTPNKQIWLSSPVSGPKRYDLSDKGRWVYKHDGVTLHELLEKEFRHIFKNDQISLHQS

SEQ ID NO: 120848 - protein, 299 aa, Heterodera glycines
MNNKSQVFIHFSGTIDESNSMKKERKWVTISELGQRDLEEELEKVREISLDLEGEVSKVREEIKTMLKHIMKPLMEFHKIGIHLNFKPKNLIVFEKTEEEEELPKLEEKKAENEKSKQNIFPLFKMFNRKNEAEKKAKEEKERKEREREEKERKEREREEKERKEREREEKERAKTIKWEEKVIKLTDFDGHSKNGHLVSWAYHFTIDPQKTFGYKEKVDEKIGELFRSAKLKFEGGEFKPDRTKLTRLALPIDNYECMENLKYDEYWPSGNWWYNYLTVIHDILTLWDKMPEIVFLSV

SEQ ID NO: 120849 - protein, 928 aa, Heterodera glycines
SFLSLLPFPICDLSLSFSVPFPILSLQSDQLTLEYYGRLNFFPRENISVTIPLMPTENWFDARTRRNVDKAVFMRALADVKGILVRARAVFMRALADVKGILVRARYSQYQLQSSIYGFHMETAWDSATAETDKNLATVALSDHEQLTINTTKVCACPEHFGGNSCEKCEKGYRRVNGQIYDGMCQKCECQGHSDSCDPFTGHCLHCQCDPFTGHCLHCQHNTTGLNCEHNTTGLNCEHCLSGFYGNPSLGPLLGQCRPCACPTVAHSHSAECTLSQLVMDQVAAVGQDDYVCTACETGYDGNKCESCADGFFGCADGFFGDPFADKCHPCECNDNIDPAAIGNCDRRTGKCLRCVGHTTGDQCEQCLPDHWGSALLHSCRPCRCHHKGAFSSQCSNETGKCECREGYAGERCDRCVCDRCVLGHGDVENGCPKCLCNSTGSLGIACDEFSGQCACKKGVYGKRCDLCVPSYFNFGPEGCDLCVPSYFNFGPEGCEFCHCNKFGAFPDKECHNMTGECQCRRNVEGLKCERCVKGFFNLTSGDGCQSCECDSQGSSCECDSQGSLEGQSCDTVTGQCGCRAGVTGRKCDKCEPNHYGFDSSGCKLCRVCPAPGQVCDAVTGDCVCPPLCRVCPAPGQVCDAVTGDCVCPPNTRGEMCEQCTQNAWNYHPYRGCELCQCDGIGADSQLCDSQTGQCKCKVGYVGHRCDHCEPGHQTGQCKCKVGYVGHRCDHCEPGHHSFPDCRPCECDTAGTESSECRGNTCLCSNEGQCKCKKNVAGQKCDRCRENAFSLEAWNPNLEAWNPNGCTECFCSNKSAICHQSARVWHQIYAPDRSVLFESPFEMFDRRHRLHILKELPSHYNSELPSHYNSYPTDHTPLYWPLPQGFKGDKTGSYNGFLRFRIRNDDNFRGRPNVLPDAHSFRIYPQVL

SEQ ID NO: 120850 - protein, 59 aa, Heterodera glycines
MRRAGRCVICGGPGTSDAYYCKECTIMEKDRDGCPKIVNLGSAKTDLFYERKKYAFKKT

SEQ ID NO: 120851 - protein, 650 aa, Heterodera glycines
GKSKTGANLRIYSVPGKKEQGNYALELVTKSIDFYSEWFDFKMPLPKCDVLAMPDFAMGAMENWGLITARENCSLYDPTKSPSTHKQLLTLLLSHEVSHFWFGNLVTMKWWSDLWLKEGFASFTQYLFTDKNYPEFKIWSDFVDAEVVPIDNPNELEEIYDSITYAKSNSIIRMLFNHLGEATFQKAIRDYLKKHQYANAETNDLWKSLSDASGIDVKALMSSWTQQMGFPLVTVEEKILDGDRIELHLKQSRFLADGGHDEANPVWQVPFGVTTAADLTHPKAKFLLMKAEDKFIVDGVKSNEWVKVNSNFSSFFRVQYSPNMLQSLLDGVKNRELGVLDRYQLASDLYALVKSSRVSVSHFLALLTVCQEEEDYFVWSAIDSGIGSIAHSLKHLDDERKLLDRFERFVCKMIEPVAAKLGWEPKEGETIHVGRLRALLLSRLSHFRHQPTIQMALSKFNALIEKGVDVVPDLRKLIFRAVGSTNDEKIIAALKNLMETSGYAQVELSCVLGLGQCSDLKMLEDIFNYGVIQGKIRDQDLYLLFAATEMAPMACCGHFAWDFFKNNFALLIEKYGSVNSNVFLHCFNCVTSGFCSNAMAEDIMEFFKKELDEHSLKTLERPLRQAVESIKVKESLLKNNVPDLDKYLQN

SEQ ID NO: 120852 - protein, 310 aa, Heterodera glycines
LKNNKISEYQFGFVRNRSTTSQLITVVEDWYEAIINGKVDCIYIDFQKAFDSVPHNLLLYKLEKIGIKGKLLMWIKGFLSNRTFRVKIGDSLSSSKKVTSGVPQGSVLGPLLFLIYINDLPDALPSGVKIKLYADDVKLYICYKARTETEIMHKALHNLFEWANKWQIKVSMQKTFILYLGSKNPKETYKFDGNTINAVDTIRDLGVNIDNKLQFSDHVNHITRNAYLRMRSLFRIIKSKSSKIWITLYKTYIRPLLEYAPEVWNPSLQKNIKKIEKCQKYFTKRVFFKCSLPPIPYQNRLEYLQLPTLR

SEQ ID NO: 120853 - protein, 475 aa, Heterodera glycines
WRFNNFTLSRQFKLSHFQIELVPSCKTLREIQIVSSGAAGVFKDEVLNEWLARQNPSEFQYKAALENFRRSCAGWCALENFRRSCAGWCVATYVLGIGDRHNDNILVTTNGHVFHIDFGKYMGDWQMAAGFKRDRVPFVFTPEMAYVINGGQSSTEHFQRFVDECCQALNLLRKSAPTVLNIMRFLSCSDIPGMSMESVAFVENNLLLDLSDAQATMLFTQMIMDSLQSKFPRLNFLAHTLAQFRGNPLGGRSEDMNRLSFISELYNEKNEGRLESVHVNSYEKWKNPEKIYMYKLLVKRQQENVTTVIFRSFAEFQELHWKLCYRFSSRAIPQLCQTVTFGRTNIRTVAVRRQVDLQYFLQRLFALSDEVAHSELVYTFMHSIYRDTEPEAHKQSDGALSTQCQLLLRLAWEEAQNKLRIFVGHAKNLPLVGREQAPDSYVKSYLRWTGTSAAQPRQWKRKTHVVRNAQNPTYN

SEQ ID NO: 120854 - protein, 388 aa, Heterodera glycines
MGGPEDSRVRVISAIIFMITWITVFRLTDAPLPEGWEMRITEQGVPFFIDHNNKTTTYNHPRTGRPVGPLGGPGLHMAADKTFKNKVAQFRYLCYSNSVPNHVKISVTRNNLFEDSFQEIMRKNPFDLRRRLYIQFKAEDGLDYGGIAREWFFLLSHEVLNPMYCLFMYANSSNYSLQINPASFVNPDHLKYFEFIGRFIAMALFHGKFIYSGFTLPFYKKMLNRKITLKDLESVDTEFYNSIVWIRDNDIDECDMELYFVVDYDLLGEVKTHELKENGTEIAVTEANKNEYIELLVEWRFNRGIEQQTVAFFNGFTSVFPLQWLQYFDERELELLLCGMQEIDVDDWQRHTAYRHYAVQSKQVIWFWQFVRSLDQEKRSKLLQFVTG

SEQ ID NO: 120855 - protein, 140 aa, Heterodera glycines
MVTAEDTVKTKEEDPKKTTTDDGSSSEEEVPELEEGDVTEEQKKVAEAAGLTWYFYLEDLAQHAQITDVENLKPPSIIRDVRNRITPAEEESDGEEVERADATGIEEKDIELVMSQANVSRNKAITALKKADNDLVNAIM

SEQ ID NO: 120856 - protein, 304 aa, Heterodera glycines
MNVKKSFLASTGHYATRTHDSVADEGFKARCKIFEGGKRAQFLSRLDFDLGNQELYLLNNLDLLFTIYKARDTFIMQTLKADDTTRYRVRVHDVKLYAKMIDVQSSLNLSIYKTLEKQPATYAVRKTEIKSCFISEGRFEIDYNVFSATIPRRMTIALVANGAFNGNYALSPFNFKPFDIRDIAVYAGGMIYPIVPYKLDFAKDIFVRPFVDMYEALGMANSERSFDITKEQFKSGWTFFVIPLTSTLDDSTGYELLRSGTTSIRATFNSAIPEGGVEMIVLGEFDQMIMIDYNRHIVSDSKLS

SEQ ID NO: 120857 - protein, 346 aa, Heterodera glycines
HFYCIFVKNFIIFQPSSKGVYNWRRQINGDWHIKRANTVDHIEFVGESEANMRKLFADAEEEWRRCGPNSWLHIIIFDEIDANCKQRGSGGGSSTGVHDTVVNQLLTKMDGVEQLNNILVIGMTNRKDIIDEALLRPGRMEVQLEISLPDKQGRIQILNIHTAPMREHNKLDSDVNIEQIAKRTKNFSGAELEGLVRAAQSSAMNRLVKPGGKVQQVKDTNGRKKEKPKGQFRWTTKQLTLNRLLYGGLCLWGDCVSRVLEGGRLLIKETAAPDTRGFVRALLAGPPNTGKSFLAAQIAPPNTGKSFLAAQIAKDSEFPFIKVCTPEEMVGYSEAEKCAKIRKVFE

SEQ ID NO: 120858 - protein, 240 aa, Heterodera glycines
VTLRDGRTQTLDNVFIRGSQIRFSVLPDTLKNAPMFKVAKLQQRLSAALTSKQFYEAHQILRTVHARLSAERRFTELLEQIQSTVLILCEAKEYTSAIDLAELYAETLKQSEATLNTENLQILLTMFSNLPSTFNSDSPSSDRRIPFLNKTLDWALKSAKGKPEMLRACALLQRKFGDVFFSEGQEEQAERYARSAEYLLDEADRIEGIPIGGEGSSGENRETDNADDAAQKIDSELELD

SEQ ID NO: 120859 - protein, 190 aa, Heterodera glycines
MIGGLFVYNHKGEVLISRIYRDDVNRNAVDAFRVSVIHARQQIRSPVTNIARTSFFHIKRGNVWMCAVSRRNINASMVFEFLNRFADTMQSYFGKLNEENVKNNFVLIYEILDEILDFGYPQNTDPGVLKTFITQQGVRTASKEEQAQITSQVTGQIGWRREGIKYRRNELFLDVIEYVNLLMSQQGPIN

SEQ ID NO: 120860 - protein, 249 aa, Heterodera glycines
LAAVDIGRFLSDVVLISYDKFLGCIGHIEEERTAKAQRRRRRGCIGHIEEERTAKAQRRRRRRKRRRSGQNAKRKRQNGAEGSVFQCLMRVICVAFMSNCHFPQERRLPLSVDAAILLLFCMLGGVVYIAAAGNHNFIEGFFVTFNLVANLTMSEMPTDMPTDISRLMTLIYIFVFVTFVLLSMCADLAASELKWVFLKIHYVFLKIHYFGCKINWAKRRSLKKQQQQQIEYCLAIRQLAKKFYYENRK

SEQ ID NO: 120861 - protein, 144 aa, Heterodera glycines
MRRLSQLFLRCHWTPSEIAASCRHASSAATARPLYMDVQATTPMEHKCVLDSCRFLEHEGDFHVTYIPVQNNGLISLEVLEQAIRPETSLVSIMAVNNEIGVRQPLKEIGELCRKKNVHFHTDAAQAVGKVPLNVDELKIDLIK

SEQ ID NO: 120862 - protein, 276 aa, Heterodera glycines
QLIRDGWQIEEPDDWLRFGNPWEKARPEYMLPVNLYGRVEKDDGKSHWRDTHLIFAMPYDTPSHWRDTHLIFAMPYDTPVPGFRNNVVNTLRLWSAKAENHFPLKFFNDGDYIQAVMDRNLSENITRVLYPNDNVFVGKELRLKQEYFLVAATLQDIIRRFKSSNYGSRDPVRVDFDTFPDKVAIQLNDTHPSIGIPELLRLLVDVEGLSFDKAWEICVRTFAYTNHTLLPEALERWPVAMLALERWPVAMLEHLLPRHLEIIYLINQRFIGRSAF

SEQ ID NO: 120863 - protein, 97 aa, Heterodera glycines
MPMDEGDDAVVEQPQQLGAGAPDQSTGSDVRPGSSLADFYRDLENYRPTIPDSVALYYMRKNGIANPDVRVVRLFSLAAQKFISDICLDAMQQARHK

SEQ ID NO: 120864 - protein, 153 aa, Heterodera glycines
EFYTPTEKYALKTAHKRPRRPKSLRIYETHVGISSQEPKVNTYRDFADTVLPRIKGQGYNAIQLMAIMEHAYYASFGYQVTSFFAASSYFHDNVRGYHTQWDSRLFNYNETETLRFLLSNLCWWIDEYGFDGFRFDGVSSMLYHSHLISMLSK

SEQ ID NO: 120865 - protein, 120 aa, Heterodera glycines
MQYVLSVLWSSDNKFVLSGSDDMNIRLWKANAAEKLGPLCPREKAAIEYSQKLRDTFQGHPEVRRIVKHRHVPKAIYSATREHRIIRESQRRKDKNRRKNTKSAATEPFTSERAKAIVSE

SEQ ID NO: 120866 - protein, 538 aa, Heterodera glycines
MKVKVISRHPDEYQRETKHDIFKVPRNPRNYAAPPDPFQQQVEYTRALNAAKLERMFAKPFLAAFDGHNEAVNLLVVNLLVKHPTRLSTVLSGARDGQVRVWHLATRRCLHVLQAHSGPINGLSVDASDGLHFVTVGQDAQLKVWPLPIEFDGNAQPTQPVHSLSLDGVPHGCSHVAMLSLDGVPHGCSHVAMSSDFVTCGEGISVWRLFRSSPIRHLFRSSPIRHYAVGPNTVQHINCNPIEEGIMAGCAADRSIFLFDTRQKVPLSRVVLKLRTNSIAWHPLEPFTFVAANIAWHPLEPFTFVAANEDYNLYTFDMRRLDSARLYTFDMRRLDSARHVHQGHTSAVMDVDFAPSGHEFVSGSFDRSLRIFPVEQWRSREVYHTPRMQYVLSVLWSSDNKFVLSGSDDMNIRLWKANAAEKLGPLCPREKAAIEYSQLCPREKAAIEYSQKLRETFQGHPEVRRIVKHRHVPKAIYSATREHRIIRESQRRKATREHRIIRESQRRKDKNRRKNTKSAATEPFTSERAKAIVSEGLE

SEQ ID NO: 120867 - protein, 183 aa, Heterodera glycines
LSWEEIFLISSRRMMLMMLECREQIEQMEKLKSDNEMLTDKYKRTLADMENLRKRTQRQIEEAKLFAIQPFCKDLLEVADVLDLALNSLEKMKTEDGAASLDSGVNKGIKMTKEVLLKTFKKHGLVPVQPEGQKFDPNLHEAVYEIPKDQARMPAGHIAHVLNIGYSLHDRPIRPAKVGVVKM

SEQ ID NO: 120868 - protein, 339 aa, Heterodera glycines
FLLLCSNCRWHLLRKIAYDTLSNIARNIKLVDKLSTVLLNTVQKGLHSDDKCKVMRSMEIVAGLCATPTNESIVCEFFEESQIIPRIFALLSLKDILMCMCAMESVLAISELGRVACEAVARCDRVVEMLVGFLTTDALSFGTVGLAGMHVVEVHGHQTRPYVAPNKKNPPPPLKLQPVQPPVQYAQQRHQTPASSTTTTAPPFGEAMEFAINARTDTLETCPDAFHRRATDGNDSAQFASHQRHPPTRKKVYLKSSRLPFLNHRQQLATDAPPLQNGLSSIAAAVPSSIESVANERDFMCEWLMQSEGDDDWSDEEGTAAGPIEPCARLSRRPNPIDF

SEQ ID NO: 120869 - protein, 321 aa, Heterodera glycines
MENHLDEQVMVRNCCLCLCQFDIPQDIMFGYGHVANLLVKVLETHSSDPLTQRIVVFLLNSMACHVEGVQKIEVGEFGAIEIILQQIARKLQSNQCDDVMDTAWSFLWNITGQLLVLDETPANCSRFLKAEGLTLFYRCYVKFPSQMELVRNMMGLIGNIAEVFDLRDQLMIDDYLNIFCTLLDNLSDGIEISYNSAGVLAHLVSDGDERWKTTKVKNSRRHVSDLIVRATELWDLNARRFINYRSFKPILGLLSQWLAIGSQQWAIWALANLTTTDRAKYCRFVVEEGGVELVEQLVNSSNSTNAIRNLAQTVLNNIEEW

SEQ ID NO: 120870 - protein, 209 aa, Heterodera glycines
MRSLQKSPYYCGQFGLVQRFGRQKEHRRDFGIERRGDQKGDGGVGDGSASGGGGGQRQIQQIKKDFSQQMFDHIGAIDDSPSASSSLLIAISELQRALLGIGSAVMSLVDPKRGDMVATMGETTVTVKYFEAVQLGFPMCVAAAIFGALRLGPVHRRQLIERNIPWVVQQAERGRFLLALDWERRFEQKIADLQRECSIEPFSAECSNE

SEQ ID NO: 120871 - protein, 195 aa, Heterodera glycines
MDTDDPILKHISPNSRAYVVIIAGIILQFTYGLVYTFGNLLPYLASYLRWKVDPELNDGTLIWFQSLLAGFPFAFLVGGYLEKVIGARWGAAFGSFLYTLGVALSYLAIQKSYFSLWLPHRVGLVSGLITAGFGSGAFIMSPIQTKYINPDNLNIDSTGYFTQPELLERVPKMFLLLATIFGTLQFVALFFIADP

SEQ ID NO: 120872 - protein, 269 aa, Heterodera glycines
MPADLLDQRLQFKRHHVVNGFIHTSAYAQRSVHENRMDRMEEFRQLSLELLDHCYKEDDAQTLQLLTYELSYWGHQTCLSLAVIVNNKQFLAHPCCQILLADLWHGGLRIRSNSNIKVLMGILFPPSIFLLEFKSREELLLQPQTAAEHQKDINESSSSSSDSSSSSSSSDSENDGDESDAGERGGATAEERRRTSHSHGSMQSLNFTSIFKSKRKRRRPSHSRSSTTAKEDIEMSKQRNRVTSRSWRLYTLFNVVYWTYYMFIAKSTT

SEQ ID NO: 120873 - protein, 256 aa, Heterodera glycines; identical to SEQ ID NO: 119337

SEQ ID NO: 120874 - protein, 432 aa, Heterodera glycines
DLTIFFYTIRNVMPGVPHFVSKFRHLKDYLFPSSLLECLRTIYTKKSEIHLQQKLSQLAAKHQNVSIGSYPTMENNYFKTRLYFKTRLSIESISKELGNLAYEELANEFSGWVVNYDPEPWEDCVHKLDIYFSGWVVNYDPEPWEDCVHKLDIYCATQTKEFSVKLFNAIATIDEILDKYSLDQLAISFNGGKDCTLSLDQLAISFNGGKDCTLLLHLFRICVTKKFGKEKRIEGFFVEDEFCELIAFVRNISPNYSLDLLELKGALKKGLAELYSLDLLELKGALKKGLAELKVVRPNIEAVLMGSRATDPRGRFMKSKCEWTDQGWPSFLRVCPLLDWTYTEVWKFLRDMSIPYVCPLLDWTYTEVWKFLRDMSIPYCHLYDMGYTSLGECSTTGKNPALKVEGTEDRSYFVNIYNRVFSAVKKGSGVIF

SEQ ID NO: 120875 - protein, 127 aa, Heterodera glycines
MSANNGKEDKKVLTEIPENLKYLVILLVDKIVKERLVPEEVDGKLRKVNYLFINYKAVINVAKYKIDHIRQKLEVREKDDVHKYVLATFLSTNYLRAHYRCTGANCKRQYDAMDIGKIYDPFSQEMR

SEQ ID NO: 120876 - protein, 279 aa, Heterodera glycines
MDVEHHVAKLMVELSQSQDDEIGDGTTGVVVLAGALLEHAESLLDKGIHPTKIADGFELACKKAIEKLESIAQQFPIDDREALVKSAMTSLGSKVVNKCLRQLGEIAVDAVLSVADLGQHDVNFELIKVIGKVGGRMEETALIRGVVIDKTLSHPQMPRRIENAKIAILTCPFEPPKPKTKHKLDIASTDEFKQLQRYEKETFEKMINELVAIATNGRIVPRFAELTPEKLGSAGLVHELKFGTDNEQMLCIEQCPNNRAVTVLIRGGNKMAIRGLTEE

SEQ ID NO: 120877 - protein, 324 aa, Heterodera glycines
VLSIGISDGDFGQETDLFHSICNSALMLLVQDAETMCEPSLQAMNKINWSNVDQVGDEWSNVDQVGDESPYVSTIRKNLRASVPLIRDYFSERRKYFAHFCLKLASQLVNRFLGAYFSERRKYFAHFCLKLASQLVNRFLGALFKCRPISIAGAEQLLLDTHSLKTFLLSLPSVESAVVTKPPTQYTAILNKGMTKAEMVLKAVMADKSNQEEFVAHFIRIAVMADKSNQEEFVAHFIRILPDSDAAELQRILEMRPIRRNEQNQIIQLYKTKVESPSVFILNVPNMGFFCGANPTPIGTLSVSQPTQSVYSSLMASIGDSSMR

SEQ ID NO: 120878 - protein, 182 aa, Heterodera glycines
MPIKASGETLRKYIVVGRKLPTANDSNPTLHEMVIFASNHVVAKSRFWYFTSMLRRVKKTHGEIISCQEVFEKKPGSVKNFGIWLRYDSRTGHHNMYREYRDVCEAGAVTQCYRDMGARHRAQADRIQIIKVQTISVADCKRAGVKQFQNSKIKFPLPHRVNSKRRNVSQCHYTYFLLLFLI

SEQ ID NO: 120879 - protein, 307 aa, Heterodera glycines
MLRYVCLFPRRSFHFSTFLPKDYYKILGLSKTAKESDIKKAYYEMAKKYHPDVNKAKGASEKFQELSEAYEVLGDPKRRAEYDRFGAGGPQPGAASGSPGGPQSARDFGWEFHSGKSAEQVFRDIFRDFDPFGNAGAFGSGRRSFGETQHGFDAAQEVVVNVTFEEAARGVRKEVRINWIPVGNATAAVFSQGLRSSRCGGQGAYNKNPCLECEGHGQSVQNKNFHLDIPAGIDNGQVLRTQVSRATLGGTIDVPSISTNNDGKTRVHIPAGTSSHAQMVLKGKGIKRLEQPGYGDQILNIKVNVPK

SEQ ID NO: 120880 - protein, 135 aa, Heterodera glycines
MVSHMDEELSFEDEEQEPTPNGAPAGSVSVTMSEDNSGTAVTGTGSPVIPNPMSLEEKQLVDARSIYVGNVDYSATPDQLEEHFRGCGAIERVTILTDKFTGHPKGFAYIQFADVDAVNTSTSLNDSLFLGRQIK

SEQ ID NO: 120881 - protein, 78 aa, Heterodera glycines
MAENRREELPQIDGLTSEQVFDKDNDGFISPVELRFVMQNLGEELTESEVHEMIREADLDGDGKVNFNEFVFMMRQKV

SEQ ID NO: 120882 - protein, 136 aa, Heterodera glycines
MAISKGTKITPKGGKGGKGKKKKLTLKFVIECKNPVEDGIMKTATFETFLNERIKVGGKTNQLAANGVKVEATKTKLVVTSEQPFSKRYLKYLTKKFLKRNALRDWLRVVASAKDTYELRYFQINQEDEDESDNEA

SEQ ID NO: 120883 - protein, 303 aa, Heterodera glycines
HRFNQNCLFSNNLNWNKGSVLGPLLFLIFINDLTNYIPPEVGIKLYADDVKIYISHDNDAKRDLLSSVGLSKWSKDNGIAIAHEKCAALYLGKNNSTEYKIGEKVILSVDCVRDLGVLVDQKLSFNNHISKILKAAYYKAYQILKILKTRNISTLILAYKSYIRPHLEYASEIWNISSKEQSKRIEKVQKYFTRIVYKKCGLKAIPYEKRLEICKLEKLSTRRSLTDMNMTFKIIRGLTHLDPKKYFEFSSRSQRKTFRIQNNLHFFNAIFELSILSFGHKKNLFNKNFKQKRIKIFPVLLLI

SEQ ID NO: 120884 - protein, 300 aa, Heterodera glycines
SDRSSVRQRPPEVQTAVSATVAPAVSSPTASMLLGPIETMAMFGAQESMDLATFLIRAACENSLIANFLFWYLKVEMEANATDSDETNAPSSVSAMYCLVMGRLKQELSKGNGSARHTLSTIATQKKFVDTLVDIAKVISDLSGSRSKKQEVLRKKLSENVDLTELKGLGLPLDPSIHVRAVQPESAVLFSSNLMPMRLTFSTVRDALTPYECAEAYTTIFKRGDDLRQDQLVLQMIRLMDELLKEDKLDLCLTPYAVLATSCSEGFVQFIRGATPLADIKSIQVGHTAHIQTVFIHTLR

SEQ ID NO: 120885 - protein, 220 aa, Heterodera glycines
MPLRLDVKRRLLARSDRVKSVDLHLNEPWMLISLYNGFVHIWNYDSQQLIKSFEVCDLPVRAAKFIVRKNWIATGSDDMQLRIFNYNTLERVHQMEAHSDYLRSLAVHPTQPFLLTSSDDMLIKLWDWEDKWKLKQTFEGHTHYVMQLVINPKDNNTFATASLDKTIKVWQFGSSVPNFTLEGHEKGVSPWIPLSFELWVMVYRNRSIASIIITEVRSPT

SEQ ID NO: 120886 - protein, 503 aa, Heterodera glycines
KHILINNQQFITCFKLFLGAFELKRMAQYAIEWCHNNALILRRKEDEGNSDAADAALFPPLTLFPSPFPRDAFEQALKAQKAMNLLYFRVARDYEFLMNAYKDVIKGDEHIAKLVDILKKVHEEGIRQTITVMLQRADVVENNETNEVKYEPKQVEVNTGAIGATGLKRRTTEFHRRMLKKATGMDATTAIPDNKPDAALIDTFYMAWRKFDDPKAIMVCLIYSNDPFQYDLRYIAEELEKKSSGKMDVEIYSLADYSERENSTKSFSLRLDGRKVAIVYSGQSALGCKFDLGMEFRQIIELSTAIKAPSLAVAIKAPSLAVAISSSKKVQQMLTMPGAIERFFPEPSDAATVAQIRATFAKIWGLENEDNDTEKLIEDAIENPGNYVLKPNRECGGHNYYDDKLVEKLKEFTQTERGAHILMQKLRPMVVKNYVLRPYEAARLEEVIPELGIYGFLIGDLKAGRVLHNVQQGYHFRTKLSHVNEAGISAGFGFYDSVYLYWS

SEQ ID NO: 120887 - protein, 496 aa, Heterodera glycines
MVHIVFDPSIIGYDEYMQYGSGIESEDYFRGSSPFQRGANSITNALDFFRIPPTNVSVSSSKVFELLPSNPLTDTPYHFKLHSSQNFIDLSKCYLQSEFRIRKENEHGHLIDLAADEVAPIQMIGQTFIRNIKMSINGREVFNSNSLMAYKTYFSHELSYSNTAKDSHLNAAGYYRDIGGSLETGDGCIARRNLFARSRTAQFIAKIDADLFNQPLYLINFCELDIEILPNDNEFVLITTPAVAQGAAAAPRYRFEVVSLKMYVKKVSLMDGLALDIARKLEVKPARYAVRKTLMKSMFISHGRFEFTANLFMDQIPRRITMGLVANSDYIGTISRSPFNFQPFNVREISIIANGRSFPQAPYDLDYPNWKYVRPFNDMNEAVGFANSLESNGISYEQFGKTHCIYVFNLTSSGDDQAALFDLIKNGTTASNNRGISIIFRIYKKTKNGLAQKQPSTQYNACPRVSKTQIIDTTSQYNFDPAGKSSNHHNNPSSTP

SEQ ID NO: 120888 - protein, 164 aa, Heterodera glycines
GTARRKKKVVHKTTAMDDKKLQTNLKKLSVTNIPGIEEVNMIKDDGTVIHFNNPKVQASVPANTFSITGTAENKQITDMLPGILNQLGAESLTHLKKLANNVTTQFKPSAEDDDVPGGVEERIEDHGGTCPLVVFTIVTQATTVAVGLANQFPHYQPHRYDKSD

SEQ ID NO: 120889 - protein, 372 aa, Heterodera glycines
HLHFHEVGKNDTTEGYVRTENTERLLREHVKAVGGKVVTRFPPEPNGILHIGHAKAINIDFGLAKARGGICYLRLDDARGGICYLRLDDTNPEKEEERFVQEIVDMVNWLGYSPYKITHSSDYFDQLYSWALTLIRLGYSPYKITHSSDYFDQLYSWALTLIRKNLAYVCHQSTDEMRGFNPPPNLAYVCHQSTDEMRGFNPPPSPWRNRPMEESLRLFQAMKNGAAMKNGAFDEGQATLRLKLTLEDSKQDPVAYRVKYLPHHRTGDKWCVYPTYDYTHCLCDSLENVTHSLCTKEFQARRSSYYWLCRSSYYWLCNALDLYCPVQWEFARLNVNYTVVSKRKLLKLIQAGIVESVCFKRSNKHKISRFSF

SEQ ID NO: 120890 - protein, 484 aa, Heterodera glycines
TSHYQLSRVGFIPAKSTLRVKQFPSSINESTEEWEIAFDEFVYIEQADFREVAEKSYRRLTLEQPVGLRHVNLAVKIDKLERDEHGNPIELVVTANPVSSECKPKAFIHWVARPVLCEVRLYDKLFVHKNPEDPAEVPGGFLTDINPNSLHVLSNAMVDGSIIRTIRPLDRFQFERNGFFCLDPNDSWSSEKKKAVTSAAERALDIVGNASRVRLQDLRDNPGARTVGRQVRAKGHNQAGHTIGELQHASKPPLGWVWGDYYKPWQRSFDGDRRFNGDINLRREYIPISLVELQRLIDLGWLDTSRLVDIAAICATKLLEQKFKPELRQFGIHLTDEVQWASCTAIAAIERAGGRIRTAYYDTESLKAMSDAEKWFRTGKPIPRRKHPPYSLMEYYMDPDHRGYLANPEDIETSRVRLADIVGYTLVTGPPPFENEQKRPDQVFLGLEPGQLVSLEDEKVFEPTHPTLVEYYRGEEQQVADTIR

SEQ ID NO: 120891 - protein, 477 aa, Heterodera glycines
LHAFPWDFQKPIPPKRWHGVRNAIRPVAPCVPRAQTVQQMSEDCLYLNIFTPHQHSLRKSPVLFLIHGGAFEVGSAAVDNYTDLGMRYVSAGIVVVSIQYRLGIIGFSSTGDKQMAGNFGLWDQFAALNFGLWDQFAALEFVSENIAQFGGNPADITLFGESAGAASVSFLGLSPHSQGLFQKCVQLSGSPLSAWALNGRVINETAQLAAAINCAENGREGIKECLKGKTVDELFEGVEKVGGQNAPGIRLHKWGPLLDGDFLPADIPQLIERAPPKPTVMGIADLETLLWSDYGLNTNCLNLNKEIVQFYTRDKAVERIENEVCEENHFGKRKRKSENKMGNKIGNGNQFKMFFLLSDLQFAVPVIWEAAQKAQKGWPIYFFKNSYFNEVVFPKVVKSDVRKTKNGQNKCVKLRYFCNLNGTFNTHFLCLNVQIYITNFNAILKKTTIYLFFAKNGSEFENLKLNETDLVRNLLDI

SEQ ID NO: 120892 - protein, 182 aa, Heterodera glycines
MGRVRRHCVVPFECAARAQCVRLAGGREKDANWFMPILYVLCSDLRLIARIDLSRAEEALTFAFEHCPAHFMHNKRLILMYLVPVKMFLGHMPTQQLLVRYNLGQFADVAASVNASILNTHLIKLDAFLAVLRFLGTDIDADELSCILANLIAQKKIKGYISHQRQTLVISKQTPFPSLSAA

SEQ ID NO: 120893 - protein, 147 aa, Heterodera glycines
  unsure (1)..(147): unsure at all Xaa locations
FLKLLLIESGVXGTNVQESYLRMHANAATEELELPQFAHIAEFQYLSMRAVSLCKVLARIPDEMTDRRPFLETIKEIASSIKQLLDTTNAIIALVPRCYQPRQINLTPFLSYFXNCLVVEKRKREFVQVSKRFSSTLKDYFKHQEPN

SEQ ID NO: 120894 - protein, 296 aa, Heterodera glycines
LNFVPQGSVLGPLLFLIYIIDLPDVIPSGVNIKLYADDVKIYICYKAKTETEIMHKALHNLFEWANKWQIKVSIQKTFVLYLGSKNPKETYKFDGNTINAVDTIRDFGINIDNKLQFSDHVNQITRNAYLRMRSLFRIIKSKSSKIWITLYKTYIRPLLEYAPEVWNPSLQKNIKIEKCQKYFTKIVLFKCNLPPIPYLKRLEYLQLPTLENRRKLFDLFMAHKIVYGRTDLDYLKFSNLLNALMSPFIGLTQNINAKNLFPLRGGTKLWNQLDKEIIKINSLNQFKTKITPRIKP

SEQ ID NO: 120895 - protein, 206 aa, Heterodera glycines
MKIIRISLPACARQMKLGQLTLDPQDNTLRLYGQKVAVTYIATEAPNPSDDEWKVRLLFERSTAIKSPTIGQDLANQKKVQQDAIRNPQNYVIKPNREGGGHNIWGEDLKQKLLTFTKDERNAHILMEKLNPVVIHNYIVRPMPNNYKYGEMTTELSIIGYAFGNVDEMEVKKNVQKGHFLRTKLAHVNEGGVSFGNGAWDIPFLI

SEQ ID NO: 120896 - protein, 234 aa, Heterodera glycines
MIVLRCLAFLMIGERQQTKSKTWDITFVIIDLESTHCRGSPTAKSSSTGRNTKWGQKKESLDWLCLPGMKLCLEDWVTSILKHISTTFGELPRSAFTRNTIFDVCLSLLKIREPWRESQARFGENDYIDLLGDGSLHPAQLQYHVPRWLRGFPGQNRAIEPVKLIHYRNLYKSKLEQNSPHKWHQLNKRIKYLLQYHNYDKSDELRAERSLGLWEEEPDYFYKDKSRRSYQDLV

SEQ ID NO: 120897 - protein, 243 aa, Heterodera glycines
IHLVPYPAQFAVPLFPDAVKKQCLKELKQRYENKEIKSPPENFEEWVLHHFGPQILDVFFNPYSKKVWTVKPSKMSPIWVGTRVAKLPQEKLEELCSMDANVLKNADFGWGPNAQFNFPKYGGTGAVWKNMTEKLPSEWFKYNSKVLRVDHRQKCVHYVQLNANGQPTGPTKSLKYDALINSSPIDAFVADNKICEMPLLEHNKVFVIGVGLKLPMTEFCEKYTWLYFPDPDVPFYRVTFFSR

SEQ ID NO: 120898 - protein, 75 aa, Heterodera glycines
MIEIIILYVIFYSIIMRLCHRITAKKTTFIQIFVKTLGGMTLTIFAHSFDTIENVKAKIQDKEDIPPDQQRIIFS

SEQ ID NO: 120899 - protein, 149 aa, Heterodera glycines
MSPFGAQVRDSRDREKKELSDLNDRLANYIEKVGFGSAEHGQARPKPKQSTISTRTNLGPFPRSTEPQVEGGPGHAARTPRQGHHHHQDDVRERDSDGQKVDRRHGPIKARVGAGRGQTATKSQGWTKNYGLRKLYRFWIPMMTDYGFP

SEQ ID NO: 120900 - protein, 269 aa, Heterodera glycines
MDQNNDQRRAVNEYRLNEDNELRLEVGKEEVILELLEGFRAAVFTYKGALIEVVGRTDSAYIAQQTPMIIYLNTHAALESMRKSAETQLVADRTSSARGPRLLVAGPTDVGKSTLCRILCNYAVREGRTPLYVDLDIGQGSVSIPGTIGCLYIEKPADIVDGFDRKAAYVHNFGHISPSANIRLYDLLVKELALAVRKKSKSSSICDVSGFIVNTCGWVKGDGYACIVNAAEAFEPDVVIVLDHERLYNELQQDLPSFVKAMIDYYTIF

SEQ ID NO: 120901 - protein, 33 aa, Heterodera glycines
VNTLVTPDHTKKAYVRLAADYDALDVANKIGII

SEQ ID NO: 120902 - protein, 100 aa, Heterodera glycines
NRVAKIDVVPSAASLIIKELREPPRDRKKVKNVKHSGNLTIEQVINIARQMRPRSIARKLQGTVKEILGTAQSVGCTVDGQHPHDIVDMIRAGEIEVPEE

SEQ ID NO: 120903 - protein, 188 aa, Heterodera glycines
HAFFTPDIFKNGAEFLTLLGIPFMKAPAEAEAQCVELERLGLGAEFLTLLGIPFMKAPAEAEAQCVELERLGLVDGIVTDDSDVWLFGGRKVYRHMFSRKRHLQKYCAEEIGKKLGYELEGLRRAEFVQLGMLAGGDYSRGLEKLGYELEGLRRAEFVQLGMLAGGDYSRGLERIGVVAALELISEFP

SEQ ID NO: 120904 - protein, 104 aa, Heterodera glycines
MTTTKEGSIKREQFYVRYYVGHKGKFGHEFLEFEFRPDGKLRYANNSNYKNDTLIRKECYVGKSVMDELKRIIEDSEIMNSKLQGKIWLFSVFLQNRSAKSYIL

SEQ ID NO: 120905 - protein, 171 aa, Heterodera glycines
FCLISNLFLPLAVDMRTYVTKFQWEAARYPIKQSLKALSELIGKQVSQIDNDLKMKATAYNALKNALASIDRKTASLITRDLSDLVKADDFVLGSEYLQTVCVVVPKLLTKDWETKYHTFATMVVPGSARKIVEDADHALYTVTLFQKVLDEYKGACRENKYIVPRSRFDR

SEQ ID NO: 120906 - protein, 269 aa, Heterodera glycines
NTAFVDGSTIYGSNAKDLYKVRDGRTGFLKMSSFNGMMVLPFDASRCANRGTCAAATFVTGDSRVNMFIGLSSLYTLFVREHNRIARELQSLNRAWSGDRLFQRIARELQSLNRAWSGDRLFQETRKIVGAEIQAVLYNEFIPLMLGPSAERLIGPYNGYDQNVDPTVANEFTAAAFRFGHGTIVEQFSRLTENGQSIAAGPFPLNEGTFKSQKLTFKSQKLLSEGGIDPVLRGFWNTPIKRPQQMTAAVTEHLFSSRKIGMNKGINDQ

SEQ ID NO: 120907 - protein, 159 aa, Heterodera glycines
MVSFAAFTVACLRQFMWSKPTAELGMAHFVPTAGDGIGSSRAFLHRYRTAFPKYENYLELDFDGPLDYEERKEQIFALLRWPLEAGLANKAVSWLAEFDKYKKNVEYRIDEDSILPLLTHAFLPAKQFHKFASDVYISQGHIQRSRMYLELSDEGRQNM

SEQ ID NO: 120908 - protein, 438 aa, Heterodera glycines
MAFHKIDTDSVNSITNALDFFRIPPTNVSVSSSKVFELLPSNPLTDTPYHFKLHSSQNFIDLSKCYLLTEFRIRKENVNGQLVDLTADDINIAPIQMIGQTFIRNIKMSINGREIFNANALMAYKTYFSHELSYSTTAKDSHLNAAGYYRDPGDVLETGDGCTARRDLFALSNVAQFIAKIDTDLFNQPLYLINFCELDIEILPNDNKFVLIAPLAGAPRYRFEVVGLKLYVKKVSLMDGLALDIARKLEVKPARYAVRKTMMKSLFISPGRYEFTANLFMDQIPRRVTMGLVANADYVGSIRRSPFNFQPFNVREISIVANGRSYPQAPYDLDYPSGRYVRPFNDMNEAVGFANSSESNGITFAQYGKTHCIYVFNLTNSGDDQAALFDLIKNGTTAVSIKFNHPVPDGGVMLVVMGECDSLVMLDKNRSISTDTTI

SEQ ID NO: 120909 - protein, 417 aa, Heterodera glycines
MAFHKIDTDSVNSITNALDFFRIPPTNVSVSSSKVFELLPSNPLTDTPYHFKLHSSQNFIDLSKCYLLTEFRIRKENVNGQLVDLTADDINIAPIQMIGQTFIRNIKMSINGREIFNANALMAYKTYFSHELSYSTTAKDSHLNAAGYYRDPGDVLETGDGCTARRDLFALSNVAQFIAKIDTDLFNQPLYLINFCELDIEILPNDNKFVLIAPLAGAPRYRFEVVGLKLYVKKVSLMDGLALDIARKLEVKPARYAVRKTMMKSLFISPGRYEFTANLFMDQIPRRVTMGLVANADYVGSIRRSPFNFQPFNVREISIVANGRSYPQAPYDLDYPSGRYVRPFNDMNEAVGFANSSESNGITFAQYGKTHCIYVFNLTNSGDDQAALFDLIKNGTTAVSIKFNHPVPDGGVMLVVM

SEQ ID NO: 120910 - protein, 124 aa, Heterodera glycines
MCYISAKFLSNLICFKLKVNARKNCRTIYSSILWPRRVGRGEVTPTKPKRINMNPPNGVLGPKESVNVAVSCDAFDPGSEDTKGDRVTVEWTNTPDPAATAFKLEWFQGDGMVRRKNLPIEYNV

SEQ ID NO: 120911 - protein, 395 aa, Heterodera glycines
NGLVFVAFKMPKSSKKKIKSNFLQHNTEGDQCQRCQAGFMQKKWRPSHEGDPFVCEPCNCHGHSSECVYEEELDEKKASLDIYGKFSGGGHCQNCQHNTKGINCNKCTPGFFRPNGKEWSELDVCQPCRCDPTKHTGNCAESTGQCECLPQFTGPNCDQCSPGYYHPPECRPCDCHVNGTEGSQCLVKPDGQCPCKDGFAGRLCDKCAAGYANITDCPPCGCDAEGSVSSECDVKTTACACKSNFGGLRCEQCAKGYYKHPQCEFCDCDPSGTEDQVCDSASGQCLCKAGFAGRRCDRCDDEFYGYPNCRECSCHEKGSKTKECDQKTGECPCFANFTGRTCDKCSAGHYRFPECLACDCFSAGSKGLTCDFDGQCYCRENFEGKRCERCFQFIY

SEQ ID NO: 120912 - protein, 175 aa, Heterodera glycines
MPNPITLVDMTSDNVVDYQWCTREELAELKLETRERQHVKEALKHIQKRYRNSNPHISHHALLILEACVKNCGKKFIREVATKEVMDDLKSMIISDPPEKIREKLLELIQCWTSAFKGIPEFKIVEDTHSLLKMNGFEFPPIDEAKAMFLADCAPDWAEGDNCYRGRVEFGMFTR

SEQ ID NO: 120913 - protein, 112 aa, Heterodera glycines
MPSQGELKEIFNLYDEELEGKIDATQIGDVARACGLKPTNAMVWKAAGEEYKRKGEKKLAFEEWLPIFEQLQKEKVKAWASPLQHLIFHGMIFVQEIQVQAFLKMSNSNGNI

SEQ ID NO: 120914 - protein, 398 aa, Heterodera glycines
MNRLDRSLVEDLFADRHIQVLVSTATLAWGVNLPAQTVIIKGTQIYNPQKGAWTEIGPLDIMQMMGRAGRPQHNALGKGILMTHNTELQYYLSLMNQQVTNTDFGFCRNENFFIQLPIESQLVAKLPDTLNAEIVLGTVTNVVEAMEWLTYTYLHVRMCKAPALYGIVADKVLGLCKMVNARQWQSLNPLHQFKKLPLDIVRTLDKKNLSFDRLYDLDAHQLGELVRVPKMGKPLYKFIRQIPKLDMTTLILPITRSTLRVELTITPDFQWDEKVHGSSEGFWIFVEDVNGEIILHHEYFLLKQKYCEEEHVVKMFVPVFDPLPPLYFIRIVSDRWLGSETVLPVSFRHLILPEKYPPPTELLDLQPLPVSALNNATFEAIFSKRGIRLFNPIQTQGK

SEQ ID NO: 120915 - protein, 307 aa, Heterodera glycines
MEQNSSENQGFMKRAARFSDGRMCETMVKLNFDLAHQNARMLNNQDIVFTIHRNSDALLLQTPPWKTVHADGTETWNENTDEYRIRLHDRRVYVRTVDATPSLNLAISKQLENSFAKYALRKGEMRSVFLGTGRTELSHNVFTSTLPRRLICTFVSTDAYSGARHLSPFKFEHAHVRSLSAEANGQTFPSTPYLFSFEGGPDNKQQRFIRAFVDMYAGLGLDETDNNKTVSIDMQRFLNGWAFFVIPMTSTLEDTAGFELIRQGTCTVKVQFEQPIKADGYEMLILGEFDSILSINADRVLSTDGSV

SEQ ID NO: 120916 - protein, 412 aa, Heterodera glycines
DSFRFLFSKECFTGAGGGIGRTYALEFARRGAKVIVNDLGGNDLGGDRHGKSASTSAADKVVAEILAAGGKAVPNYDSVENGDKIVRTAIDVENGDKIVRTAIDNFGRIDIVINNAGILRDVSFGKIVINNAGILRDVSFGKMSEFDWDSVMKVHVKSVMKVHVKGAFSVTKAAGAFSVTKAAWEHMRAQKYGRLVFTSSNSGIYGSFGQANYAAAKMALIGLSNTLALEGAKYNIASNVLVPTAGSRMTQTVMPEELLTVPTAGSRMTQTVMPEELLTAMKPEFVTPLTVFLAHESCNATGRVFEAGAGWYGTVEQFRSRGKVIAEPTVEKLVENWEEICDMSGAQHIGSMREVEKLVENWEEICDMSGAQHIGSMREVMENLMDALGVNKSTRVGSSPGSPSSHSAFPAH

SEQ ID NO: 120917 - protein, 313 aa, Heterodera glycines
LRSAAAQARLPYDRDDQKGVGAVPGDEPSPGFGGTVPLHSQSNARRLDRPKTVIVIGAGPAGLAAARQLKFFGFSVILLEGRARPGGRVQTINRTHSADLGAMIVMGIMGNPLVTLIQQAPVTVFRASNRCPIYDNQASSFGKLVDSRKDDMIERSFNRILGTISYLSHAEGVTETKLPGETAGRKISLGKAFELILSQQELRVKNKWLNFWQKYYYLLKKLEIEKLRVDSLHAQLADCMQRLRENGIANPAEATAETIAVNFEESAEKVEQQMIVRALRKITEITLEKYDEAERERNNTENVLKDFKQMEPR

SEQ ID NO: 120918 - protein, 952 aa, Heterodera glycines
MPSSNSFYVIVPSNTNVEGNRTNSFRVRLPRKLQFNSEWDVGLGVIIYPHSWPSLGTSEDQFVQIEWKIGENVQIPIPSSNVTNPVELWKSLYKLLEEGNKPFAVKVEGVQKKFTEAANTARQLGRAEYINKQQQQQRDKRNVNDDDDDDDKNEEELLNALLAGVDTLLDLYGATSGGLLEREKRAATSKVPLRNWDDTEEEYQKKLDKYFLRLRGRNLEHLEGLITEKLNAEIALMDDEERTILDQTKELGMTAWIKIFQSAYSACFLHFDNQLAYILGFNSTDFTEKETIAKFMPDMSGGVASFHVYAPDLIEPMMIGDVIAPVLRIVTIRGKPDEIIEEQFLSVQYHRVLVKEISEIFIEIRTSGGNLMPFQYAVAATPAPYSMVINVDPSEVVVQYGGYNVFRGVPYQRGSGIGSVFRSLLRYLIPIGKEIGTAIGRQGLESGNRVLSNVLEGRDLKESLVSEGKTGLKNLLEKAANNINAQKGQGFDFKRYTKRNDAREGGAIGKAKKGINKLQSRLGPHDFLPANTPAVPPTNVSVVRSYFREVLPLVTITQESPYLFRLYSDNLWTDLSRIYLFLDLSIEKPDVDGNWVSIAATDAQVGTIQGIGQTFVQQLKVSVGNTEIYDSGNLYPYKVYITNTLSFPMNVKKSFLASTGHYATRTHDSVADEGFKARCKIFEGGKRAQFLSRLDFDLGNQELYLLNNLDLLFTIYKARDTFIMQTLKANDTTKYRVRVHDVKLYAKMIDVQSSLNLSIYKTLEKQPATYAVRKTEIKSCFISEGRFEIDYNVFSATIPRRMTIALVANGAFNGNYALSPFNFKPFDIRDIAVYAGGMIYPIVPYKLDFAKDIFVRPFVDMYEALGMANSERSFDITKEQFKSGWTFFVIPLTSTLDDSTGYELLRSGTTSIRATFNSAIPEGGVEMIVLGEFDQMIMIDYNRHIVSDSKLS

SEQ ID NO: 120919 - protein, 363 aa, Heterodera glycines
PPPPNAEYEMITKGPKSRAFYRVQATRRLVGGGDIVRKRLEREHDKAGDVTVQEQERQARRHTCRIFFDPAHYTVLESVGVFDVMVGRDGGPDGLTVMADYYTEDGTANAGSDYQPVKGTLTFHPEDKHQKISIEIVDDDVFEEDEHFYLHLTNLRFEEDEHFYLHLTNLRVRTRDGLILDPSRIGGVPVAMFDLPTTATIMILPTTATIMILDDDHAGVFSFEHDHYVTVENCGHVTDDDHAGVFSFEHDHYVTVENCGHVTLRVQRTSGCRGQVVLPYRTIDGTIDGTASGGKHFEVKEGEVVFENNQTEAFIDIGIMDTEQYEQTEAFIDIGIMDTEQYERSDFFSMELKDPIWTKKMSD

SEQ ID NO: 120920 - protein, 157 aa, Heterodera glycines
EGDGPGLKQLVEQVVRTTGINEVADTETMRVVKGETSSRQSYQRSAKGNVSILETSPEGKYVVLENTHRSKEETIGEWKLKRRIDGKREIVYTLPANFVLRPMARLKVRFRFWRRAHSPPDQSIIDWSEERKKNTVSGLTQGCDRFLFVRNVLILGY

SEQ ID NO: 120921 - protein, 234 aa, Heterodera glycines
NGGIGVKKSDAHVAEEWFHGKVGRDEAKARLLQAARHNNGLFLVRESTTGLFLVRESTTFIGDFTLSFLHSGCVHHCRIKGGTIGGERKYHLLDSVKRDTLYELISFYTHNALDTPNFKTFLQTPCPQPQPHLDKPWFSANADTEQAEKLLNAVPMDGAFMVRYSSTDKTVFVVSLRIDNNLCHFRLIDNNLCHFRLKREGRLFMVAQRTFETLCHLVDFYASTPFVRGVSLKF

SEQ ID NO: 120922 - protein, 234 aa, Heterodera glycines
MTSFSDEVEHRYQAKLQEQLQAMRDDFDNRIAQNRAEVDELYRNKLGEAAENANRNRDLAAKAREEAAMWRVRVQDLENSSKDHQGIVESLNRRVKDLEAALRRAHEDADIRIQQRDEQIEQLQKEIALMISDYQDLLDVKVQLDTELQAYQKMLEQEETRLHITPSTSPNTSVVGQNISTPNMVISTPRPVSPRLATPVTQSESLTTVRRGVKRRRLNQDDIVSFDKTSSSWK

SEQ ID NO: 120923 - protein, 119 aa, Heterodera glycines
MASKSKRTTRSQREAAIHIDASADETIESSSNGSTINSSSGHLSSRQDEKNHLCNLNDRLAGYIERVRSLETENARLQIQVREVEVVERKEKENLSARYEIKIDELRKQLEFFTREKAK

SEQ ID NO: 120924 - protein, 253 aa, Heterodera glycines
MEFSSTDYLNEHQRFDYQILPKVEYTGTTLVGMECFGGIVVATDSRSSSGTYISNRTTDKITMLNDRIVILRAGTQADTQALADIVMYYAEAHAIMDEEDEITVRNVANYARKMHYNYRGQLNSTFLVAGYDSLNMGQLYVIPGGGYTTRHPYYTSGSGSSYIREYLQNQWKEDLDGEVVRQILKKAVFEAQRRDGASGGLIHTAIINAKGISRKTYRPDKEDFPIVSPEKFYPNLPEHILQPGLVTIERMET

SEQ ID NO: 120925 - protein, 578 aa, Heterodera glycines
TKDTKCYQGSSGCMERIEESTFKSHLQDEVRQILLTWENEHRNNDWEIEPSLKRMAEIMAEILEEAINDYLQNNPDPMDERHPFKSQPDERHPFKSQPSRPLGYLLKMITKEENFLNKLIISYLIISYLLARDNPRLNMFAARLLLDLLPGIDTNVILADAESLLTQLFRWADAESLLTQLFRWAENGDSRELRAYSMALLGSAMAEQAHQYRQQNATLIPIALQRLHHQDEQLRHQDEQLRKESKVVGPTDFSLLRQEEQHENGSNCPLSYKSSSGRTHKGRQKTATTDGLSPTSKRSFTKLRTMISMLINSIRGVSTIDDSNSSWRQIMQPILVGTHSLYPLSIEMEQRLILNYLGPTSEYQDNLSIVLENHALNLSIVLENHALDVVLNFLEIDGPNHKCRDIRLLFDGVRYISSLLIHRKFAWEFIAAQGIQRLLRINRKSIASTAVTTCLYYLAYSADIMEKVCHLPEQVLNDIIDYALYALDHNHESVCHLPEQVLNDIIDYALYALDHNHESGRASIAMFLAHALQFRPILDRFDQRDGLRRLYNYISTLTVLQRIEEDVRSAQRRSHRAK

SEQ ID NO: 120926 - protein, 220 aa, Heterodera glycines
ERLISIIISVMMVITGSVNTLAAKSVNTLAAKWADSIVVDGVLFDHPYFQAFCMFIGEFSCLVVFVVAYLVKKRRWKNRNQYGDGGAIIEIGTDEEPTLPRFNPFVFLPPACCDVLGTSTMYVGLNLTTASSFQMLRGAVIIFTGLLSVSFLRAQLRGFKWLGMGLVAFGLVIVGVTDIMFDDNPKDDINGVITGDLLIVMAQIIVAIQMVEQKYLMQYD

SEQ ID NO: 120927 - protein, 112 aa, Heterodera glycines
HSVSLDFDEEAPNATMETKVAGGGAAPKRVGRWTLSQLRQTDGIIPSQAGWNKGDSQKLMTNFGTPRNTTTKVKVENLAEIPEDILLKSHGEVRLQSGTNRFASQKGFVSFG

SEQ ID NO: 120928 - protein, 195 aa, Heterodera glycines
RFSTSPNIVVGSGRSFHQLILLSVNILSNILSLPLPEEKIRASDGIVRLQAGTNKFDSQKGMTLFGTGRRETTRMKDSKHPEYSHERDIDNTEIPLQMGTNKFASQKGMTGFGTNRRETTKMLDTSHPEYSHEQSIDQTSIPYQMGSNKSNKYASQKGMTGFGQPRWEVLDPSISYQNRKSQGKQAFSVPNEFYS

SEQ ID NO: 120929 - protein, 536 aa, Heterodera glycines
SLQFANCFQLLVGGSRSVPDCRGGRDEDVLSLGLSPGTYLEFSMDDRVSFQEAAWDSSLHNSPLLVSFQEAAWDSSLHNSPLLNRVSGYGENVYMTISAYMEIAYMEIENCAQSAIITKDLGLIVYARDSKISAASRFCRSLIGGISKSAEMNRVPGVYLLTVMEDSDSAEMNRVPGVYLLTVMEDSDPGTARRKRRILDTSSTYVRGEVRGEENLGTWRPRGDSIILEHQLEPRGDSIILEHQLELEKLSKLQQVERMRLFLMATHRWEKSKNKYNYYFWKISPCSPKFPIPNSVKMSGKERKLATKVLELIRLKIPVNKDPPTGKKNANLFSQTMPKSVTLTADIRTKSRSFDDLNIEYGAMNESMTRSTSGNYVQNNGTLNNSRGASFMEIIKLINQVTEERVGLVVSKKGHMHFLEGARQEWVRRWVVVRRWVVIRRPYILLYRDDKDLVIRGIINLAIAKIEYNDEQQENAPNTFTVCTSHRAFFMQALPGDDLFDWIAALNPLLAGQILKKNHNHSEGDQLTMSDQTIGN

SEQ ID NO: 120930 - protein, 208 aa, Heterodera glycines
TMASDDNSDMFTFMPLGSGQEVGRSCHFMQFKSKKIMFDCGIHPFDCGIHPGMQGVDALPGMQGVDALPFVDFIDVEELDLLLITHFHLDHCGALPWLLEKTAFRGRCFMTHATKAIYRTLIGDCIKIAKYGSGGANESRMLYTEEDLERSMDKIEVLDFHEQKEVNGIKFWCYVARHKIEVLDFHEQKEVNGIKFWCYVARHVLGAC

SEQ ID NO: 120931 - protein, 650 aa, Heterodera glycines
MGSKSAPATADVAYANYRLFDELNRKVRESLRKAIEADETRIAKSRVIGLYENVLKQINKALEIRHTSCPSHKQTEMQEQQKKLKAFVGQTKDRLEKLASIEPMALRATPLPLATVETGNNRARRMPCTSTDQRLVSNRQNLSKMSLLKSVDSKLGDEILATIVETTDIRLDDIEGNAMAKLALEESVVLPALNPKLFMGLRAPCTGILLFGPPGNGKTMLAKAVASECNSTFFSISAATIMSKWVGDGERLVKALFQVARNAQPSIIFIDEVDSMLCQRFEQENGAARRVKTEFLVQLDGCSSEKEANGHVLVLAATNRPQELDEGILRRFPQRIFIDLPDKKARFQMIRRTFKQSNTKLQLNDAELEKIAAMTDNYSYSDLKALCRAAALFPVQSARMENRDLRRCTAEQLRPVNVTDLENAIRSPIKCPVRLPCQHYFCRLCIADEKCCVICGHPIGCSELVEDKVLNYVLESSSEVTETCANCDQLRSRPICPQHNEPFILFCLDSKSLMCIECFNSSSLERRFSKLIKIRMNCIFTSGHFVNIELAHKICCDKLEKNALNLRIFQEELREQIELRKRLTDELSKNSENLREEIDHKCDVIIDRLNELRRHLLDRVVQEKAEKQRKLSAQLNKLLTLGSPISVNLL

SEQ ID NO: 120932 - protein, 188 aa, Heterodera glycines
MKLIESSDIVKFPDNVTFALNNRVVTVKGPRGTLKRDFRHLNIEIMRENPKLLRVRKWFGIRKELAAIRTVCSHIENMIKGVTVGFRYKMRSVYAHFPINITLQENNTVVEIRNFLGEKFVRRVGLPQGVSAVMSTKQKDELIIDGTDIQKVSQAAARIQQSTTVKNKDIRKFLDGIYVSEKVAIADE

SEQ ID NO: 120933 - protein, 354 aa, Heterodera glycines
HGRRTEEECQAETEETVRVKTETVDEPKQNEPEENAKRKREETVRVKTETVDEPKQNEPEENAKRKREETVKVKTETVDEPKQNEPEENAKRKWEEKVSVKTETVDEPKQNEPEENAKRKWEEKVSVKTETVDEQNDVELEQQLEEPSSSCGAEEEEDPALKELKRILEANGTKMEANIPLPLPRWVRGIPDGHRCAETYQTICDGCLIGFKLLGSTTKGTLRVLQRSLTCIRFAYYRDANDLVGRRDYMEYSRLSGCWSMVGRQGGSQIVSIGFGCETLGITVHETMHALGVWHEQSRTDQENYVTINYNNILSGTESNFYKRSPDTSDNLGQPYDLGSVMHYSNKAFARDFN

SEQ ID NO: 120934 - protein, 378 aa, Heterodera glycines
TLQSSLCVCTPFLTRPRWWRRKKATHGRKLKLKEHPVTDEYKVSHEIVGIGESGKVMIVGIGESGKVMACFHKRRGEKCALKVLRDNARSRRELALHLSVVGHPHVVSIEDMFENSFDGLKCLLVVVEFMGGGDLLTIFEQNGRLAYSEKCVARIVSQIGSAVQYLHERNIAHEKCVARIVSQIGSAVQYLHERNIAHRDIKLENILCSSTVEKCTFKLADFGFAKRTEKGRLMESPCCTPAYVCPEILNRNHYDILNRNHYDKGCDIWALGVATYILCGYPPFYSMQGLPFSPGMRERIMEGMFAFPEDEWGTISHSTRIMEGMFAFPEDEWGTISHSTKNIIAAMLRKNIIAAMLRTDPTERITIEQVIAAAFALG

SEQ ID NO: 120935 - protein, 384 aa, Heterodera glycines
MCRHHQRHIWKTSLVLPLFKNGDKNSKQYRPISITCSCCRIFERLIAKKITEFLLKNNLISEHQFGFLKSRSTTSQLISSLEDWYNAILRNQKIDIIYLDLQKSFDQVPHDLLIYKLKKTEQRNLLNWLRDFLLGRTFKVRINQKFSNEFPVKSGVPQGSVLGPILFLIFINDLPEEIPKEISIADDTKIYHCYSNESQRKVLETALISVFNWAETWGLNFSVKKSSVLYLGKNNKKIPYTIKNSTFPESKIIRDLDILIDNKLKFYEHVSIILQKAISKVELFKKIKTKTTNTWITVYKSYIRPLLEYATEIWNPRTKKEIKVLSQVKNKQRKIYMKIKSRSINKMPQNFKNFTNRNNIKFNVVYCWRRKRSIKIKRIIIYSK

SEQ ID NO: 120936 - protein, 574 aa, Heterodera glycines
VNSLSYTPLYNCPSKQCHKQSGGRLEMQFRGSKFVKFQEMRIQELSDQVGVGSIPRSMTIYLSGENTRKSDQVGVGSIPRSMTIYLSGENTRKAIPGDVVEICGVLIPMLRTGFRQMAGGLVTELFLDAYVRFHFNRDTNEDLLDGELNAEEIELVSHEHFNRDTNEDLLDGELNAEEIELVSHENFYEHIAYSIYSIAPEIYGLSDVKKSLLLALIGGVNKNANGMKIRGALNILLMGDPGVAKSQLLTYVDRLAIRSQYTTGRGSSGVGLTAAVVKDQLTGEMSLEGGALVLADREMSLEGGALVLADRGICCIDEFDKMVDSDRTAIHEVMEQQTISIAKAGIMTSLNARTSIIEVMEQQTISIAKAGIMTSLNARTSIIAAANPAFGRYNPNKSIEENIQLPAALLSRFDLLWLIQDVPDRETDRKLADHITYVHRKGEQPQADFEPINMKLFRKYLSICKRKEPKYLSICKRKEPVVPNALKEVLVEKYVEMRCEAKNSSDSTFTSPRLLLAAIRMCTALARLRLADEVEMIDVKEALRLIDIARNSLHHTKAKRHLSENPFRLFLKRL

SEQ ID NO: 120937 - protein, 310 aa, Heterodera glycines
MAFHKIDSSSIDSITNAVDFFSIPPTNVTVSSSKVFEILPSNPLTDTPYHFKIHSSQNYIDLSKCYLLTEFRMRKLTPPNGEWGHLDTNDQVVPIQLIGHTFIRDMKIAINGREIFNSNSLMAYKTYLSHELSQSLEAKVSHLTAAGYDREDANNLQNSNSEGFKSRRQRYLGGRTAQYIAKIDADLFNVPQYLINHCEIDITIQPHDDNFLLIDTLDPPEALGFANSTYGNGIDYFSFLHTHCIYVFNMTNSGDDHGGLFDLIKKGCTAVNIKFKKPVPDGGITLIVMGEADSIYFLDKNRTIATDTTI

SEQ ID NO: 120938 - protein, 187 aa, Heterodera glycines
EVQRTMLELVNQLDGFDSRGAIKVLMATVLMATNRPDTLDPALVRPGRIDRRIEFSLPDVKARKNILQIHTKRMSIEPDVKARKNILQIHTKRMSIERNIRYELIARLCPNTTGYELIARLCPNTTGADLRSVCTEAGMYALRARRKVITEQDFLKAVQKVVKGYAKFSSVKGYAKFSSTPSYLTHN

SEQ ID NO: 120939 - protein, 157 aa, Heterodera glycines
FFLKNFYVSKFFLKNFSGGGGTSCSQLFPLKNCLQLNATVPGQIYVYCCRWHQCDFQFDCQEGLTEHIWTSHTNQIVDGSENPVDGSENPFVCLWASCLKFRRETKPFPALQRLKRHLRERHLNTAGRVICPKQRTKLYIIPIVCKNANDSKYGKIV

SEQ ID NO: 120940 - protein, 429 aa, Heterodera glycines
MTCPQKISDSSPLAINSGLNIFSVPPTNVSAVRSFFRQVLPLATITQESPYLFRLYSDNLWTDLSRVYLYLEVSIEKPGANDKWVAIEDGDTHVSAIQGIGQTFVQQLKVTVGNTEVYDSGNLYPFKAYITNELSFPINVKKNFLGSTGYYHTVNQDDSSDDGYKERCKIFKGGKNAQFLSRLDFDLGNQELYLLNNLDLLFTIYKAKDVFLLQTLKANDSTKYRLTVHDVKIYAKMVEVQPSLNMSLYKTLEKQPATYAVRKTEIKSSFISVGRYEFEYNVFSATIPRRVTIALVGNSAFHGDYKLSPFMFEPFDLREISVHAGGVVYPAVPYKLNFSNDHFVSAFVDMYEALGMANSERSFDISMTQFKKGWTFFVIPLTSTLDDSCGFELLRNDSFLFGHRRIEAALLQRAEREAEILRQYAENQQ

SEQ ID NO: 120941 - protein, 42 aa, Heterodera glycines
MMQTIKCVVVGDGAVGKTCLLISYTTNKFPNEYVPTVFDNYA

SEQ ID NO: 120942 - protein, 144 aa, Heterodera glycines
MASINNGHAAVGAANGIQQKKLLQQAQGTNMAQLPLKANDYALAAVRNDAELKLLAEYAVDYAHSIGLVGRSGDDKYKHSNDVSVAPPIALLPSPFPRELYEQATDAQQSLNELYFRIACDHDFLMEAYKDVIKYVWWRILKNV

SEQ ID NO: 120943 - protein, 467 aa, Heterodera glycines
ASPSFDLLAALCAAGAHPSNQQQAALARQMAATAVMLGFPQPQATAAAMIHQAAAEFPPVQQFFSANASQSPFPRQFHPMHLNCSTDASPHLSAESAQLQHQQHQIHNHQRTPTTPKGRKRRQSSTRTERNHRQTPQNLMQSSADSPLNLSRFKVENDTQNSCSSSGKNSPNNFHNNSANSEKSNGDKSEAKNANNGKKSNGGNQQQRAGAKSPNHIKRPMNAFMVWARDERRKILKECPDMHNSNISKILGSRWKAMSNCEKQPYYEEQSRLSKQHMEQHPDYRYRPRPKRTCIVDGKKVRITEYKNMLKGGPNNGTTVAKDAPQKRQSLSTSSTPAEATSAGGGTSDAAPLSPTAVSEESNESPVTAGAIPAMLFSAAPANGSSPPAKSLMDHPFAGQFAQNPALAAAAWLSAAAVSGGAQRGGAGGVSALHQAMLLADQLQHNHHHHSAMPLDFGTAAGVVANA

SEQ ID NO: 120944 - protein, 205 aa, Heterodera glycines
MLSSTEANNVDDEDNDGITQLGAIGSWPVTNEWSTPPATELPELPNGHNRIAAEVENPTIGESGQKKTAIDLTLSLAVQLIPQVRDGIFHTQLNLKERKIDMKNKTAFPKQMKPVVEELLQDMIKDDVWPAVKRGIEPLIYVKGVELPANCGVDPKSAQLHFGHRKIGASAKLNIKEISLSHCVEQFKSKLPDPATLFKINGTSF

SEQ ID NO: 120945 - protein, 296 aa, Heterodera glycines
MRPLALKGHERAITRVRLNREGDILFSASKVFIHCLRYTENGERIGTYEGHSGVVWDIDVSWDTQTMVSASGDQKVMVWDIETGVSKGFSEPGSVVRSIGLSYSGNLVVFTLNKPTTGGLPGIVVADLRDKMTQPILRDTFDDQCNACLFSHLDDHIVAGDHTGQLAMWDLRQPGAASNFTHPHKYQINDLQITADQTFIITASKDKTAQLHSAHDLQHLKTYKSNRPVNTASVSPSRDHIVLGGGEEHMEVTQTATTAEQFVARLYHLIFEEEFARFRGHFGPINSIIFDPTGDI

SEQ ID NO: 120946 - protein, 254 aa, Heterodera glycines
ANEIAGVPDLGSTGRGSDMQIGTYVEKLFASELSGNVIDLCPVGALTSKQYSFVARPWETRKTESVDVMDALGSNIVIAHRTGEILRIIPRMNDEVNEEWLSDKARFICDEVNEEWLSDKARFICDGLKRQRLLQPMLKNESEVLSPCNWPCNWEEALFTAAQKLRQITPNAIAGLAGGLVDAESLIALKDLLNQINSENSLIALKDLLNQINSENVFSEGELPILSGGTDLRLSFFLRFLRGDHFYPEDLFLL

SEQ ID NO: 120947 - protein, 326 aa, Heterodera glycines
MASKYRQSNEKLQTNIQSVSNPINAFRLIKRLSNAWKELQNEMRADVADEYLQNVTTDGHALFPTDEDLSGAAIGLLRLQDTYRLDTRDLANGFVQDIKIGNEMTESDVLEYLAFAMFKQGNLKRALVTTDRLAEIAPTHPRAKGNIKWNIYEALCRDEVPVSVKQTSKLYCYYKRDRPFLLLAPFKVEIVRFNPLAVLFRNVVTDEEIERIQELAKPKLARATVQNSQTGKLETASYRISKSAWLKGTEDEVVDRINKRLNLMTNLEMETAEELQVANYGIGGHYDPHYDFARKEETKAFSDLGTGNRIATALFYFSQPEKGGFT

SEQ ID NO: 120948 - protein, 518 aa, Heterodera glycines
KMNSDNFRVERDTFGELRVPSDRYYVPSDRYYGAQTARSMQFFKIGGPEERMPLPSMQFFKIGGPEERMPLPVIHAFGYLKKAAATVNQDFGLNSKVAAAICEAADDVISGKLDEDVISGKLDEHFPLVIWQTGSGTQSNMNVNEVISNRAIEILGGELGSKTPVHPTPVHPNDHVNMSQSSNDTFPTAMHVAVAVEINTRLLPSLRLLHDELSKKSKEFEHIIKIGRTHTQDAVPLTLGQEFSAYVTQIGNGISRVDATLGRLYELAAGGTAVGTGLNTRKGFAEKVASKLAELTRLPFKTAPNKFEALAAHDALVEVHGALNVVATSLMVHGALNVVATSLMKIANDIRFLGSGPRCGLGELSLPENEPGSSIMPGKVNPTQCEALTMVAAQVFGNQVAVTVGASNGHFELNVFKPLIVRNVLQSVRLLADGAESFTKHCVIGIIANEENIKKLLNDSLMLVTALNPHIGYDNAAKIAKTAHKNGTTLKEEAVKSGLLTAEQFDQWVRPEQMISPK

SEQ ID NO: 120949 - protein, 114 aa, Heterodera glycines
KARNAEKAMTALARWRRMKEQEEKGPIAKRPNDVRECKKLGDAERFRRELIHDISKRITRIHNPRLNPRLGEFKIKDLNDQINRLLRIKLAWEGRIKELGGVYHRRIAPRELDG

SEQ ID NO: 120950 - protein, 771 aa, Heterodera glycines
PWPCVKLLHLLQYPPPEDPGNRARLLECLEGILNKAQDAPKSKKVQHANAKNAVLFEAIALIIHYDSEPGLLVRACNQLGTFLSHRETNLRYLALESMCLLATSEYLALESMCLLATSEFSHDAVKKHQETIINSLKNEKDVSVRQRAIDLLYAMCDRSNAENDLLYAMCDRSNAENIVAEMLTYLETADYAIREEMVLKVAILAEKYASDYTWYVDVILKLIRMAGDYVSDEVWYRVIQIVVNREDVQGYAIVVNREDVQGYAAKTVFEALQQPTCHENMVKVGGYVLGEFGNLIAGDPRSSPMVQFDILHSKYHLCSITTRCILLTTYVKLCNLFPEIKPHIQIVLRADHNLKNPIVLRADHNLKNPDAELQQRAVEYLQLSKVTSPDVLATILEEMPQFAEKILEEMPQFAEKESSLLAKLKKSKPQAEETDTQQIEKKQRPSAVMSPQKPSAVRDIAVVTVFMLRLFFLKESSPATSTATKLVDLSGKIPIIRFVMKSNGVLYEDETIQIGCKMEKRANLARLGIFYGNKTNFKFSNFQTTVTCPGMLADEILCQAKAVDPDIDAGSQVQQLINVICLQFFTAPPIFNVSFTFSARDGSPQQFSRSFARDGSPQQFSRSFYLPVFISKFFEPSDMSSEQFFARWKQLSLPSQECQKIFATINPIDPSQECQKIFATINPIDSDQIRISLANLGAQILQNVDPNPENFVCAGILQTQAAQIGCLIRLEPNKQTKMFRLTIRSSMFRLTIRSSREGVAATLCELMGGNF

SEQ ID NO: 120951 - protein, 232 aa, Heterodera glycines
MPDAAALPSSPGQPKVLNVTENSIELEWASPERHGSSPITDYLLQYWSPELGESWRNILDVVAKSRFRITGLQPEHSYVFVIRAENSKGIGLPSSMSEIVSTKKSTEIEEGNYRSQRMNRLLDLETARQRLSSEQLVKLLEVRALNATTVLLAWKRQRNEPLVQGYYIKWRGPPLAQDHSWVNVTNPETDHVVINGLRPFNNYEFFVIPYHQTVQGMPSNSLDGTTAESRIL

SEQ ID NO: 120952 - protein, 94 aa, Heterodera glycines
MFKNVKIGEELSESFRIFSGVPQGSVLGPLLFLIFINDLPSFIANEASSVGIKMYADDAILYYTHENDDHSNQLDKAIEAMEKWSKINELSYFN

SEQ ID NO: 120953 - protein, 469 aa, Heterodera glycines
MGLDAEPEQVLEGHLRDAYNAKAFVEESEQVEQQMQQQLDHLDREYSRTDFSLDDGEQMLRQLDSVREYIQQLHARLISLTDRCAQISPLWQRGERISKPLPVMALCEYKSKDKIHIRQGDECTLLDNHDQIQWRVRGMDGVEASVPSVVFRIPPPDPRLASFLSRLHNQFEKLRKLWDRTHHLVRYNMVLNTMRTVRAWDLDTFLSIPSDQRDEIIKALNEDVNKLLSEMDPNDPLAKRLKDELRMTNEHFYDLLARAQKEPEPDYSNQFDAACAELVRKFEEGWKQLNHRVQERVATNLEELERQIKEHKAFEDALQTLDVDVSNVKELYRQLPHPTPTQRAAHDNMVQRWQDIWELSRMYVERLKGLESVLNGLDEVTDIVRRHEITLASFDDMPAALERLRGVHAQLLELNMVLQQQENIVKKLNRDTATLRQHVARTRFGAANHPVLPVKPCRVSGFGLLSSDP

SEQ ID NO: 120954 - protein, 85 aa, Heterodera glycines
MLRQLDSVREYIQQLHARLISLTDRCAQISPLWQRGERISKPLPVMALCEYKSKDKIHIRQGDECTLLDNHDQIQWRVRGMDGVE

SEQ ID NO: 120955 - protein, 122 aa, Heterodera glycines
MKLAIKRLHWNETDGIWYDYDLEREAHSNTYYVSNALPLYSKCYDDEDDVTPYKVFEYLKVVEAFRTSGDLSLMKAAEQMATQWLVVNYKGYVSTYAMFEKYNVSMINEEGVGGSGGEYEVQ

SEQ ID NO: 120956 - protein, 296 aa, Heterodera glycines
NAIKALDGAYIGGSKLTVLFCWTPEVDEEEDKEEGAEEADVDSIEKQILDTGRLFLRNLPFVCSEEQIRQLFEPFGPLAELECVVDAGKCKGYALCTFIFPEHAVAAWKALDGTVFMGRMLHIIAGEEKRVRTNGADDDSTNDGCQSAFQRERNEKRKANDAEGATEAATNNRAKKACTWNALFLGTDAVAETLAENYEVEKRDLLLVDGKQSAAVRVAMAEARLVRETRKFLLDNGVRLDAFAQPKMRRSKTKMRRSKTTILVKNLDATREGKKEWLHSLFGRFGVVKTVLVPPE

SEQ ID NO: 120957 - protein, 384 aa, Heterodera glycines
MAVLIERNPPLLGAVLRYIDRHVDHLDEYAVNILSTVPLGFCTVSAEDISDRLGKWLISRSIDHPASAIARRVLSSLNWDCQSPQPASLHKSSVTSVGSQPQSNRLCLSVEIHDLCAETLVKAHIVQCKQRNNLIAKSVNKAARMALKCPDLEQQFDRFCWDPNCPTPPNDLTAFYVFCVQKCLSSSNLFFEAGLPLFQELVNASCFKAAAVLLIRIVHAFPSSNHMQNFIANPTFCEVFERLLHADESAYAVQLLMGADKFPGPVLSLVSGGIIHQISIDAFHFEQRKVYAQAWVRLLTCDKRTHEWNSDKFVLYLLGCVAKCCHLFDPQDNFGMARHQAWRDTVRGPLSWFSSSSIPPPLIAQAQFTVSPWATFMLLRAEQE

SEQ ID NO: 120958 - protein, 125 aa, Heterodera glycines
MEAVAEHDFNAGEPDELSFKRGQILKVLNKDEDPHWYKAEIVLNKDEDPHWYKAEINGVEGLIPSNYIRMMEHSWYLGSISRSDSELLLLKNGNPDGAFLVRRSESTPGEFSICVRRKSGNSADM

SEQ ID NO: 120959 - protein, 1016 aa, Heterodera glycines
MLEKCSKTKERIAQNARKEQLRDRAVRLDDSLTALVKQAHDKLNESAAMPQCYEQLCNGLAEQIELAEQFGAENGITVGEERIAQAKEVREQLAQRWHHWDEFVRLRDLGTAQLDKARVAIDQTEQKTCRSVAEAESDHDNLLEAQGSLASLNATIDQLQQLADKLDPLATTHAEVRFLDVEFEQLEKHFGDVLDQMHNEIEQEKALMAETERAGRETDDMTAQLPTMANNLKALQHAQQTAIPALEAKVVMLQQQSEKEKPLRQYVLRSTAAPSPDELAQRLALSKGRAQEAAQQLVDTAVVRVQNVLLGTSQAAAELPSDEQIDECAKELQDNIPLEHPHNEQLRQQLEQLREKVMRRDAIRSHIDQHLATIGKELEGFSEQFISSSTTNGKKVPPSSKKEAKKKKGKGGEPEQQKRAEKMASREEHIDELRKALGRLESGILPALNTLHDEAVQQGIPLQPTEEHQHQLMRANQIVQSLKEDLDKSVAENERASVVINDIRLLKSIVDGTVVEAETAAEEATLQLLDVESVEQHKRDMEEAAKKLGEQLAKMAADAHQVSTSLEPEEQALMKRVEEEAGKKMDRLNSLNSVLQHQMEVLRDWARDKDRLEQHTCSLIDQLKRVQEEREEAGPAPAEEELAKLDALQSEVDEARDEMKRMQSWLVQKLPKCGRAAVELQLRPVEESLVKLNTDMDGTMEQLKKNVQIERRLLEERTALLNAANELDEQVQQAHAFEEPQEQISELDKLHNQLEQVEQQMRTVDQQSEQYPTPQKATTLSEQIAHVVHKTRTNIEDARHQLEERIAQNARKEQLRDRAVRLDDSLTALVKQAHDKLNESAAMPQCYEQLCNGLAEQIELAEQFGAENGITVGEERIAQAKEDLLTELGEIGAQIDQLEQSIWQGNDQQRIFVQSFDKKRLRILRERIEQLEKNIWGAFSELSEGPSTEAAEEQPKYDVDAAVEILSAIYPGREPLEVMREHGLDKLELDMNDDYGDGQTEGEEGEDGQKGEIGEF

SEQ ID NO: 120960 - protein, 86 aa, Heterodera glycines
RDQMAKNSGNSLVKHSPRKKRAQLWLGPGAYINHDCANCEFVPNKQQTATINVLRDIKAGAEINCFYGDNFFGDGNCNCECLTCER

SEQ ID NO: 120961 - protein, 103 aa, Heterodera glycines
VLLIFPPLLPWTIRVTGHMLAGQLVIRLVSFLLNFALLRLVDPSLLGFFNVKMTLLYTTICFLSREPIRRLCLSSDFPLHKVPSYASLSPVRCSPWPPFPSAV

SEQ ID NO: 120962 - protein, 259 aa, Heterodera glycines
MTLHDFLPQNTKAIDFTDNGQKTETVQRRTADGRLRLPEWLKRDVVAKQSDEARCPNIGECLGGGPGRPSTAAIMLMGDTCTRGCRFCSVKTARRPPPPDPEEPLNTAKAVASWGVDYIVLTSVDRDDLSDGGAAHISATVRRLKEQCPHVLVECLVPDFAGVLPSVEQVAQSGLDVFAHNLETVRRLTPLVRDPRAKYDQSLRANPGVLTKSSLMLGLGEADAEVEEAMRDLRLVGVEALTLGQYMQPTKRHLAVSEW

SEQ ID NO: 120963 - protein, 117 aa, Heterodera glycines
MADDEDYDGGEMDGDEFMEEEPIEDLDAEHQAGEEEEGAENVQVSDKVASSNRVTTPFMTKYERARVLGTRALQIAMGAPVMVEIEGESDPLEIARKELKVNKYSNFNNSEVPVNLT

SEQ ID NO: 120964 - protein, 292 aa, Heterodera glycines
MASDGLRTFVRFVDSSYCKHLLLFSIALAYKDYVVEKGEANEIPLEGADVNWDDEQILREGMTAICVPGEDFLALEGKEFNARIRDSDGVVDQRKLDQIWPKLRVLARAQPTDKFVLVKGIIESKCTKNREVVAVTGDGTNDAPALKKADVGFAMGIAGTDVAKEASDIILTDDNFTSIVKAVMWGRNVYDSIAKFLQFQLTVNVVAVTIAFVGACATKDSPLRAVQMLWVNLIMDTLASLALATEMPTEDLLKRKPYGRTKSLISRTMVKNIIGHGIYQLAVLFGLLFFGH

SEQ ID NO: 120965 - protein, 290 aa, Heterodera glycines
MSKLCVKRNQLATEKLINAYKDEHGERSKEVQSIGGPNEFAEFYSRLKTLKDVHRKNPNDTARTLTIEFQEMANFIQDPDRLEKEMVRFTDEEGYGKFLDLHSLHEQYVNLKEVTRVDYISYLSKFDHLHELSREKTKKTGAYKTYVLSLEEYLRDFISRAKPLIDIVMELDRVDKDFEEKLKEGKVIGWSNEKPSGAMKKFAQPSAEIDVSNFNSPEELEELGADRLKAALIALGLKCGGTVKERAFRLFSTRSSDGSNAVNGNGKLTAEDTKEENRKYTLAKAEAHIL

SEQ ID NO: 120966 - protein, 80 aa, Heterodera glycines
MDSPAGAQPSNPNAQQQGGARPSNKRLQQTQAQVDEVVGIMKVVTVFRVNVEKVLERDQKLSQLDDRADALQVVVNSLTR

SEQ ID NO: 120967 - protein, 212 aa, Heterodera glycines
AHDIENDPSKADKTWTIIDTGIDMTKADLVNNLGTIAKSGTKAFMEALQTGIVALMPGHFGAGFYSAFSVADRVTSKHNDDDCYQWESSAGGSFIIRNCADPEVTRGTKIVLYLKEDQTAYLQFRCWCWCCACSSVNAVWGERAAKQAVKGAAAGDQTMTAGGQAAERDRNGEEDVAAVAVVEKAMAAVVDEGGGGRGGRAPQHPQEADEEE

SEQ ID NO: 120968 - protein, 164 aa, Heterodera glycines
MKEEDKREEEEDKREEEEDKRDEEEDKREEEEDKREEEEDKRDEEEDKREEEEDKREEEEDKREEEEDKREEEEDKREEEEDKRDEEEDKREEEEDKREEEEDIREEEEDKREEEEDKREEEEDKREEEEDKRDEEEDKREEEEDKREEEEDKREEEEDKREEE

SEQ ID NO: 120969 - protein, 183 aa, Heterodera glycines
MLLISFVKICKKPQIFAATIEHELSLRHKYDLERIDADVRAKARAARDNRDVNLEMMRASEEERRKTVTEQIRTTAGVVGAGLSEFLSDRSKIMAAPSLESRLRDIAITTRNTKRNFGLFRNVLFYGPPGTGKTMFAKSLARHSGLDYAIMTGGDVAPMGRDGVSAIHKIFDWAQTSRKGWAI

SEQ ID NO: 120970 - protein, 128 aa, Heterodera glycines
SQRNGMGENLYMTSSSSISEADALKQACDTWWAELKQYGIQESLELDREQFNKGIGHWSQQAWATTAQIGCAMARCPSADWKTWVVCNYNTTGNRLDEVVYKKGTACASCSDYNGASCNSTSVLCILP

SEQ ID NO: 120971 - protein, 109 aa, Heterodera glycines
LWLQQSNVRLAVPPLSPAFCENPSNAKIHLEYLGQCKQLDECTDELMSQFPGRMADWLFQVMKELKKRRELHNLEWEQLINEAEQDDEKRHVYPPHDKHVSHHGIDPDH

SEQ ID NO: 120972 - protein, 567 aa, Heterodera glycines
MNNEKVEDLMRRTGAKVNIPPPHANNETIIITGERDGVDEAAVEILKIFNEKKESVVSVEVTVPKAQHRYVIGQKRAGLEEIFRETEVLVELPPEDSDSETVILRGPKDKIGDAAGAVYQKASSNIAIELPYKEWMRRLLIGAKGQNLHNLVPNHDQLKIDFEDSVIYIEGPTDLVKQAQQQLSAEIARLESEPRFEAMRNAPDDTRPGEEREPQSKIQFNVDPKHHRHFIIRGAEVLKNIQKDFECQISFPKQETGDSLVTIRGRKELVEGAKARIEAIVEDMEAQAQIQIDVDPKHHRHFIIRGAEVLKQIQKESECQISFPKQETGDSLVTIRGRKEFVEGAKARIEAIVEDLEAQTQIQIDVDPKHHRHFIIRGAEVLKNIQKEFDCQISFPKQETGDSLVTIRGRKELVEGAKARIEAIVEDMEAQAQIQITVDPKYHRHFIMRGAEVLKQIQKEFKCQISFPKQETGDSLVTVRGRVDNVERAKSRIEEIIEELFDLYDESQYIVRRDDPPPPKAEPNDIEMVNAPWQIDSIEQFPGLSGDTVAAQQQKPVTATAVWGQRR

SEQ ID NO: 120973 - protein, 362 aa, Heterodera glycines
MDILSIALGSAEGFEQADKALHSTSRSGRWILLKNVHLATEWLTQLEKKFRLHNPHPHFRLILTAEIGSALPISMIQVLLDTLLDKLFTSNSFDADFILIENIGVNALNMPDETNSKDGLINWVINIKALQKPNWIGLPNNAEKVLIAERGQEFIRKMIKMSDDELAYEADDLERNKQAPTWMVQFSGQCKSWLDALPQQLQRLRRTKENVRDPLFRFFEREINLGARLLSDIRRDLNELLSICHGDQKQNNHSRELIAALVKRKRVPDNWLQFSVPKDVTALEWMRDFVQRMEQLKRLSLSENLRYEEVWLGGMFFPEAYITATRQLVAQTNGWSLEQMYMHITKTEEGQLKSTAFTLTGG

SEQ ID NO: 120974 - protein, 146 aa, Heterodera glycines
SSDDQVKKAMDATTEKFGGLNVLVNCAGIAFAQRLYNPSSRAQMDLDKIRRLIDVNIFGTINVIRHALPLLIDNVPDVNIFGTINVIRHALPLLIDNVPDENDQRGVIINTSSIAAFEGQMGQPSFAQSLASIQVLLRLLARKIGA

SEQ ID NO: 120975 - protein, 359 aa, Heterodera glycines
MSIKKFDSATNKYIILKNNEQVATINMIGSTWIKNLKIIVQGREIYDSNSLYAYKAYFDAELSYSKDVKHSHLQASGYYKDSDNQDGTDNKAPKDLITVQFIAKLDADVFNQDRYMVNGIEIDIQITPNDNDFMIMAASDDKYKVEITSCKLYVKSLEIVDGLALDLQKKLESKEAKYAHRKTLIKSVFISENRTEFNGTLFTGQLPKRVILGMVENSAYVGSQKKSPFNFKPFNLRSVSLIANGKQWPAAPFELNFDKNLYTRAFHEMNESLGMNSTTDSNGITLEKYRSGWTIFVFNMTNSMEENECIDLITEGTTTVSVQFRKPVQSGGITLIAMSEMDSILILDKNRTVMTDTSV

SEQ ID NO: 120976 - protein, 660 aa, Heterodera glycines
TVQIPTIEWSGSGLVAPEQNADNSTAELEIPKDLYLKACVTSVKEGLQSMDDKNITYPVMIKASEGGGGKGIRKCLSDEDFRLNFRRVQAEVPGSPIFIMKCMVNARHIEVQLIADQYGQVIPIFTRDCSIQRRCQKIIEEAPAGIVPQEIQRQMQMDAVNLAKKVGYVSAGTVEYMYLPSEQKYYFLELNPRLQVEHPCTEMVANINIPAVQLQIAMGIPLHRITEIRLFFGMDRYGTSPLPEEQCRTDTNISVIAARITSEDPAEGFRPASGAVEVLNFQSNQNVWGYFSVSSTGKVHEFADSQYEAISALLCALKELELRATFTSQVNYLVGLLHDKEFECNNFHTGWLDARIASRVQASVEYPPHISVAIGATLIGHARITEVFSKFQSALEKGQILPKSGLVETWEFELVHNNTKYSVMVNRFGPINFLVRLNESIVCTVVRELGNGTLLVTHEDQAYTCHLEEESERFKVIIGKTLTIFEKENDPSMLRSKNAGRFLQYLKKDGQYVTIGEVFGEMESMKMVINLEIRKAGGRLVQVAQPGQVLFPGTLIARLEDQEDIAVSKPVNFTGPMEEWDSTREKELQSRNQIRMNTRFEDLIQACNNILSGYAMPEPYFRDQTARLIDDLFVVMDNPRLPYVLFKVMLNAVENRINRN

SEQ ID NO: 120977 - protein, 93 aa, Heterodera glycines
MLSNGQSVLDELGLWTWWKPSSWMRWVMEYAHLTLDIPWWGTIIATTVTLRLLCFPIPVNMRRMMALHQKYAPELKEFTDKMQKASREGNNAL

SEQ ID NO: 120978 - protein, 354 aa, Heterodera glycines
MQKKEGDQVSELLCIIVEKQEDVNAFKDFKGEESVPETIEAKGTPETTKLTQKTLPTAQPEQSQPSPQNVMSDQSRVKASPYAKKLADEKGIDLSSFSGSGPSGRILAADLSKAEGEFPSRGTQSSASSFIDIPLSNMRKTIAKRLSEAKSTIPHYYLTSEMQIDKLLEVRKKLNILLEREAKKKGEKMPSKLSINDFIIKASALACLRVPEANSSFMGSFVRQHSSVDVSVAVSTDVGLITPIIFDAHTKGGTFTVSNLGMFGSVDHFTAIINPPQSCILAIGAARRMLVPMEEEDKSDSNERFRAVTSLKVTLSCDHRVVDGAVGAVWLQNFKQFMEEPFTMILWGTPGNVF

SEQ ID NO: 120979 - protein, 253 aa, Heterodera glycines
GGKRAQFLSRLDFDLGNQELYLLNNLDLLFTIYKARDTFIMQTLKANNTTKYRSSLNLSIYKTLEKQPATYAVRKTEIKSCFISEGRFEIDYNVFSATIPRRMTIALVANGAFNGNYALSPFNFKPFDIRDIAVYAGGMIYPIVPYKLDFAKDIFVRPFVDMYEALGMANSERSFDITKEQFKSGWTFFVIPLTSTLDDSTGYELLRSGTTSIRATFNSAIPEGGVEMIVLGEFDQMIMIDYNRHIVSDSKLS

SEQ ID NO: 120980 - protein, 533 aa, Heterodera glycines
MVHQIFDPNSVSFDDFVVVEQIGSGEAFNYFRGIPPYQRGYGRQRGGGVGDVLRFLWRALLPKLKSAGTLLGREALDTGTRVLDTIEKAETPNKQAIINEVKKGMDNVLEKALSIFTLPPTNVSVSSSSVREYLPLNPLTDIPFHFKIHPTASFFDLNKCYILTEMSIKKLDSDTNKYVNLKVNEQAATINMIGATWIKNLKITVQGREIYDSNSLYAYKAYLDAELSYSKNVKESDLQASGYYVDSENQDGTDITQQGFDLRRKLFSQSQTAQFITKLDADIFNQDRYMVNGVEIDIQLTPNDNEFMVMAAADDKYRIEITACKLYVKTLEVVDGLALDIQKKLESKEAKYAHRKTLIKSTFISENRTEYNGTLFTGQLPKRVILGMVENAAYVGNQKKSPFNFKPFDIRSVTLIANGKQWPAAPFELNFSKNLYTRAFHEMNEALGMASSTDSNGISLEKYRKGWTIFAFNMTNSMEDNEGIDLITEGTTTVCIQFRSPVPSGGITLIAMSEMDSILILDKNRTVMTDTTI

SEQ ID NO: 120981 - protein, 157 aa, Heterodera glycines
MIDVQSSLNLSIYKTLEKQPATYAVRKTEIKSCFISEVYAGGMIYPIVPYKLDFAKDIFVRPFVDMYEALGMANSERSFDITKEQFKSGWTFFVIPLTSTLDDSTGYELLRSGTTSIRATFNSAIPEGGVEMIVLGEFDQMIMIDYNRHIVSDSKLS

SEQ ID NO: 120982 - protein, 174 aa, Heterodera glycines
MNQEQDNIPTFKLVLVGDGGTGKTTFVKRHLTGEFEKKYIGQCAIVMFDVTARVTYKNVPNWHRDLVRVCENIPIVLVGNKVDVKDRKVKAKSITFHRKKNLQYYDISAKSNYNFEKPFLYLARKLIGDPNLEFVAMPALAPPEVQMDPALAAKYEQEVAEAASAELPDDDEDI

SEQ ID NO: 120983 - protein, 319 aa, Heterodera glycines
DATFASLKELFCTDHALDPAKTRFLLGSIEMIADDETPNSLGLEDGDSRLLEMSNVRVPSLPFSFYPEKCTHCLIGLYIHRCLSFSHSTSNNRHNDVAAHKNHYQTLGVSRDASAKDIKTAFFELTKKHHPDMNPTDKTKAAEAFQNITDAYEVLGSEEKRQIYDTLTAPKPQAHFGRTPNFRRTRSNHINMGPAGGHKDWTDLDIDFRDFEHFQRENRSRQTFKDWARANTKSEFYWSSHQSSKSYKSPLALERENLEKKMHDEVMERRRRSATIPMFDELQRDKQKREQEERKKRMKNYIIFLPIALFILLFIADRR

SEQ ID NO: 120984 - protein, 169 aa, Heterodera glycines
KKGTKFKNGKTVEPYFVFKPSQQQIWPAFCESARSREGAVLFAVVGGKLSEGINFSDELGRCVLMVGLPYANRNSAELSERIRYLDQHMPGAGTRFYEQLCQQAINQAIGRAIRHRVDFAGIVLLDERYARDTIAASLPGWIRQRLTRAVPLPEALRRLDNFFSVHNCE

SEQ ID NO: 120985 - protein, 237 aa, Heterodera glycines
INDLPSFYTNEGHQLAKYADDVKLYYAHVMAIRKSNGFEKWSKINGLEISTEKCFVLYLGKNNIKKEYFINSKKISESDNVRDFGIIMHSKLNFSEHISKIIRNAYLRSFQILRVLKTREIKTLTAAYKTFVRPQLEYATEVWNPNLKKDIDKIERVQKFFTRKAFRKCGFVYKKYMERLKIIHKLEERRKINDLTTAFKIIKGAFSLFPLALLSNFAQCSQPFLFNLTKYLKAQIN

SEQ ID NO: 120986 - protein, 145 aa, Heterodera glycines
MVGMGQPKWINPERFDEKSTKLLSERTSFIVHLSEILRKEFASDCPGIAIQTVCPMVVATKLTQRSSRDGLSSLLAASPTEFARQAIQTVGLVPETSGCLSHQIQVELLFSLLLTFVPNSLFDFFVRLEAHLHKSVLNTTSKQHD

SEQ ID NO: 120987 - protein, 89 aa, Heterodera glycines
MKLNPFVSSSARKSRKRHFNAPSHIRRRIMSAPLSKDLRNKHGVRSTPIRIDDEVTVTRGHYKGNIDDEVTVTRGHYKGNAGRIMRVYR

SEQ ID NO: 120988 - protein, 265 aa, Heterodera glycines
GCIETCLLFPQTKLIFRQQLHNVLAVDAIKQLRREGLHLLYRGLLPPLIQRTTTRSIMYFWTEFYLKNAIFRFGTFEKTQTLLQTSKHFDKFKNTGEAFRIMYRNYAPKECYRGFSVIVLRNGYRGFSVIVLRNGCSNVMFFTCSNVMFFTLREPFREFVPESRTKTQHLCANFLSGAILGACISTIFFPFNVIKSRMQSNIGIDFCTSNIGIDFCTPWFMFKKILAERHGSIRALYRGAQLNFSRSLLTWGITNSLYELLMYEL

SEQ ID NO: 120989 - protein, 450 aa, Heterodera glycines
EKTADLHKVEDAFVPLIKLRYDGIELDILFARLALKEIKEDQELSDDNLLKNLDEKSIRSLNGCRVADEILRLVCRVADEILRLVPNRLNFILVLRAVKLWAKNHGIYSHGIYSNVLGFLGGISWAILVARTCQLYPNATPSVLLQKFFLVFSAWDWPHPVILKDVDATPLIDMIWDPRTRASDRYHLMPIITPAFPEQNSTFNVTRSTRQVMTNEFKEGGQSEGIKGGTQAKSKRHSAMVWCPTVRVSFAVCLTENEEDHLNFCGLVESKIRHLVASFERNSCVNLCHVNPRQYKPHTNWSSTSITIHSLLRNPVCTLWFIGLDLNKQLTKKIDLTEELQGFTDTVYKSASVLKDFKETMRIHPSYTRQRNLIKWLLFEKLFLAVPNINSFLLMCHGFASNCRLSKEDLDRGRRAERRCSAAAASPRVSMLNNSLDSTGKSLDTSGSNS

SEQ ID NO: 120990 - protein, 456 aa, Heterodera glycines
MSVIKKIHKDSVEGLEGSLSLFSLPPTKVAINRTNVRELLPLSALNQTGPYLFRLFSDSQYCDLSKTYMYLLSSIERKNAAGEWVPTSDAEPEDKRVGVTQNFGSSFVRSLKINISGIEVFDSSIYYHYRDYIMKELGYSHEIRKTFHEAACYYTDEDDCQDSATNEGFIARAARFSNGKQCETMVRLNFDLAHQSALMLNNQDVIFTIHRNSDSFLLLTPPGKKADGTLQENSKEYRIRVHDLRLYVRTVDVTPSLNLAISRQLESTSAKYPLRKIEMRSIFLGKGRTELAHNVFTSTLPRRLICCFVSTDAYSGDRKLSPFKFEHANVRAISAEANGQSFPSTPYLLSFDGAQQRFVRAFVDMYAGLGLDDSDTKTVSIGMQRFLSGWAFFVIPMTSTLDDTPGFELIRQGTCTLKVQFEKPIKEDGYEMLILGEFDSVLSINADRVLSTDGSV

SEQ ID NO: 120991 - protein, 287 aa, Heterodera glycines
MASTSAAELSTPNTFLGVSLASPFDYAAAREYTAYTQGPAIWITTAYVVTIFGIQWYMKDRKPMQLTLSLRLWNLWLAMFSIAGCLVTSYALLREIGTYGLVSSYTNCRDFFEGFTGLWTWWFCMSKFAELGDTYFIVLRKKPLMFLHWYHHVATLNYGLMSYVDNTAFNTWIVWLNFSVHAVMYTYYFLAACRIRLPAWFAQCLTTSQITQFLITLAILAHVGVRLLVGSHVDTTPMTYVYCLLMEISYVVLFGNFFYHSYIAGGGKKFQKEKQMKQQNGEAVKSE

SEQ ID NO: 120992 - protein, 115 aa, Heterodera glycines
KKQQKKNPLIDRFFQAPEVIRMDGPEPYSTRSDVYSFGICVYELLTSRLPYEEIKNRDQILWMVGSGRLRPSIADLRTDTPKQLRHVFEQCTRFQRDERPEFRIVLERDRDLNTD

SEQ ID NO: 120993 - protein, 141 aa, Heterodera glycines
LVIFDPGFWVQMPHGVSFIYSTIENFRNVLHVNANIQSAPVVSALAGGFSSIFTQIIFVGFSSIFTQIIFVPTDIISQHMMIYNNPAKFLGQHMMIYNNPAKFLGSAKNVAVLDFVRTDGKSGRLTFGLRIVRAVYHIDGL

SEQ ID NO: 120994 - protein, 107 aa, Heterodera glycines
SVDLPSKLVQCFDCRQGAIRAVRFNVDGNYCMTAGSDKSVKLWNPYRRVHLKTYSGLGQEVLDVAGSSDNSLILAGGRDKQPTVFDVESGKMVKRWQSHGGAVNAVA

SEQ ID NO: 120995 - protein, 117 aa, Heterodera glycines
MDLYLFHADRYQQLYNCSYDVNQVPFEDRQHIALGTMFITLAGIMELLYIPCTFAIWKHRENGCYKIMFYIAITDMMAMLMNGIATGWLAIIGAVFCTHPNLTYILGAYGMCKRSNF

SEQ ID NO: 120996 - protein, 341 aa, Heterodera glycines
MEELVALSPGIRVGRWTITKKLGAGAFGAVYLCVNDQGEQAALKTEPVNTPHPLLVMEAHVMTKLDTLRDGDGKHFCRCLDLGRDEQQDQQSGQMKKFNYIVMSLVGRGLDGVVKDAGGRLSLGSAVGVSIQMLAALRGLHTVGYLHRDIKPGNSTIGRPESNEIRLLYLIDFGMARKYTRDDGSQHRPRVATNFRGSPRYAAISAHLGREYSRKDDIESWFYCMIELFKGALPWASVGGMKEIGEAKVKRQKKQPEAVRRQAIADLLSGCPNEFGQVLKYIDDMKYTDKPDYDWIIATLRSSLSNAGVQEFPYDWETGKRNAAPGAGGGGGGGGGDSYFN

SEQ ID NO: 120997 - protein, 499 aa, Heterodera glycines
DLSHTKGHTAPINSLCWHPFVKSEFLSCSDDGSLRIWDTNDFKVITSLRIWDTNDFKVITKCINTQRKLIKTKNATGKRAIPTTCCYSWDGKMIAAGCDDGSIQIWNNAKIFVNTAFLNRSAHSGPVTRLEFSPDGQRIVSRSLDDTLKDDTLKLWSLKDFKKPFRMANGLDTVFPQTDCGYSPHAEFIYTTTNAKDKGFPQTDCGYSPHAEFIYTTTNAKDKGGGERGALLFFDAESLELLYKIEYPKQGCIRAFWHPKIGCIRAFWHPKINQILVGLSDGTSKIYYDPSISLRGALQCVSKPMKRSRESEMVREELVLSPLTLEMFQPRGEDLTLEMFQPRGEDGEEKEVTEWRIRKFLRMQSKQKRPQFRQPAAMPMSGPSAGGAGGRIRQTGGTLHSYIAKEMGMSRNKEFMQHEDIRSSILRHADEAEKNPQFVAMAYKRTQPNPVFQETEAEKNPQFVAMAYKRTQPNPVFQETAEENEEGEEEPVYKVPKLG

SEQ ID NO: 120998 - protein, 409 aa, Heterodera glycines
PLQKTKTFFPFQQVLSEIGPAVLISTLTNIFADGCGWYTSSPELGALCLGNMVSMFVAFIYQMTFYAGLMSLVGRYEIATERRERRELQESIACRRNGRCRHGTGLQRQHSKFHEHTKHYISESIQTYVSIVANKFVAMLIVVLAMLIVVLYFVYLGMSIWGVTQMEVKLSIQQLFTSDSPLLKVDELRVGYQVVDELRVGYQVPHFMSSTVLVFNPGNLSDPERLAKMNKFVAEMEAINGSWGIGTKYFVRDFIAYELRDEGEHNLSSRWRRDGNGTDHTNAKRTYREEDLRAFLRWPESEEWKAYIRLDNDTAFLIMLFEIERFFFTTGYHGDQLKIWTERGHMLNQWRAIVDKYANFNASVYYDDSIFLDLIFNASVYYDDSIFLDLIDNMPTDTLQSVIGTLVSV

SEQ ID NO: 120999 - protein, 683 aa, Heterodera glycines
TGSYGERGMHSFRGAATELGICIEGEVHKISRRWTDDQFEELLIELLIRMRNSKARGVVMFVDEDNLRRFLSNLKRLAEGKQPELSNYFWFVASDSFVASDSWGMKGSVVKGFEHIVNGAITVAPKVRFLNGFDDYFASLSFDDYFASLSPSNTFLSEYWQSMNCSERFHHNFGLCFQSKGFSSPFAFANSSFCRYRFVQEAYVPFVHDAVQLVARALHNSIQEECGLEGQWEECPLSSVGFDGQRLQQEECGLEGQWEECPLSSVGFDGQRLQRSYRNMSLFGGQPPLIGPDGDGTGQGQPPLIGPDGDGTGQYNIFQLDSRGAYRRVGGWMDSGQQLNVAEIRLGLQVVSDFVPSDFVPLSVCSSPCPRGQYRAYQDQNCCWTCIPCDTATSIVPNQTSCVQCPLGEVPNSDLTVCRPIMPSCVQCPLGEVPNSDLTVCRPIMPSHLHWDSPWALVPALFSSVGLLATSWALVPALFSSVGLLATSFVTLVFLRFNYTPVVMASGRELCYCMVMASGRELCYCMLAGIALCYSMTFVLVSRPSELICTFTRLLPGLSMICTFTRLLPGLSMATVYAAILVKTNRLARVFKPNNALRPKWIGPTPQVFFCTVFFCTGLASVQLAIASVWLWLEPPGTAIQYPSRVEAVLTCKATISQLLVSATISQLLVSLFYCLLIIACTI

SEQ ID NO: 121000 - protein, 128 aa, Heterodera glycines
MTHTILLIQSSSKVDSRTWQDFMILLSCSNSLILLRSDYETLTDFMEAVCKIYEEHLKKLNPDVPCIQYDISALFKFIDRLADLSCMVLDKSVYVPKGEDFIKEQIFILLRGQAASNAAKKCPAEGSL

SEQ ID NO: 121001 - protein, 185 aa, Heterodera glycines
MSLLYFRVSRDIDFLKMVYKDVIDSDLSIRNYLKICEDVHNEGIKQPISIYLQRSDYMVHVSESDDGEKKYELKQIEVNGGSIGGANGIPPRITKIHERMLEKAGFPNFPEDVLPRSTKAESASAQMLLTAWKKFKNPKAIIVSLVVKEKSKWHFCKRFDEYEIDRITNKKVKVYYLSMEEAVKM

SEQ ID NO: 121002 - protein, 154 aa, Heterodera glycines
YLIYFRLHSMAARDQNTLNRCFDDIERFVARVQSVALAQRELEMQKNDGKQRKSKKAKEAAKAAQNGILHLRSQMPTQDEFVDIFQKFKLCFNLLAKLKNHIHEPAKLKNHIHEPSSPELIHFLFTPLTVLLDACHWGLGQQVINLINLLLLIE

SEQ ID NO: 121003 - protein, 616 aa, Heterodera glycines
FVLFSFFPISNCPNDEKKRRAHNTIQIVNYPLIRSEISEISQQKTAKKTETVAQNALELASPRHFEMHTFRDAIDVNYQRMCLNGEELSGVPLDDLLRLRSEYMERIGSHFPKTTCNFLNGESRSLKKHFGKIFVLGKYPGGLHAERRKGGAQPCKCLDDIIFSNYTYEPILKEVALIFLSVPDSLVNYCIYLTFLVTFQQPQCHHHRLPRTIGDSVPHRDFYNIRKVDGHAHPRVMFNSLLFPFIKKKMRTDADEVVPINFIITVIMAQLFDKLDVGPHVPINFIITVIMAQLFDKLDVGPHDLSVDRLEVRADDTTAKFCCLFYNFNSDSTSTWHGGPGHDVSEISKNLISANLLIEMRFLIIGHSFNLFSQVWSPNARWIIQVPRLFDIYRANKILKTFKILKTFDDFLDNLFTPLFEVTNDPNTHPELHVTNDPNTHPELHRFLKHVSGIDSVDDESKPENVAFTKDRFLKHVSGIDSVDDESKPENVAFTKDSPEPADYDNDQNPSYSYYLYYMNPSYSYYLYYMYANLTALNAFRRMRGLNTFALRPHCGEAGAVSHLSVSYLTYLTSESIAHGLLLRKVPVLQYLFYLAQIGIAMSPVSNDCLFIKNKK

SEQ ID NO: 121004 - protein, 172 aa, Heterodera glycines
ICFRIPSLLSCPFIFHAAQQSVSIAVECLRRWHWQRSFGTFRRCQRPFRHRFFRVRSSAPGQPISEHGVRAVRQHFQRSERPTDPTAEGSRRALSRLSKCKCAVVSKWTLCIGTAVTCPNPRHTLRRDVVVRKVIDSLIHSTDMMSFVKSLGLRMEYEYIANGFLFTKGDIR

SEQ ID NO: 121005 - protein, 490 aa, Heterodera glycines
AFLWTLFDCEFFPILASHDERRLYEDLLRDYNNLERPVEYHAKPVIVHLKVSLQQLIDVDEKNQIVHISAWLDYLWNDYKLRWDSSEYGNILWNDYKLRWDSSEYGNISNVRFPVGKIWRPDVLLYNSVDSNVRFPVGKIWRPDVLLYNSVDASFDSTFPTNMIVYNDGNVSWVPPGIFKISCKIDITWFPFDEQRCFFKFGSWTYSGFYVDLQPAEGGFDTSEYLPFYVDLQPAEGGFDTSEYLPNGEWALPMTTVARTEKFYDCCPNEPTTVARTEKFYDCCPNEPYPDLTFFLHMRRRTLYYGFNLIMRTLYYGFNLIMPCLLTTTMSLLGFTLPPEAGEKITLQITVLLSICFFLSILSEMSPPTSEAVPLLGLFFSSCMLIVTASTVFTVYVLNLHYRTPETHEMGTKARALLLYWLPWVLRMERPGVVLCWVTLKSFRVLQSKKHSESLMRNVKDCESGARSVQFPNDSLLCPSLMVQQITKGT

SEQ ID NO: 121006 - protein, 226 aa, Heterodera glycines
MTTTAPIATEEGEDSLYPIAVLIDELRNEDVQLRLNSIRKLSTIALALGVERTRKELIQFLTDTIYDEDEVLLALAEQLGNFTPLVGGPEYVHCLLPPLENLANIEETVVRDKAVESLQKIAEKHSAAQLEEYFIPMVLRLSAGDWFTSRTSACGLFSVAYARANPAQKTELRAAFRCLCRDDTPMVRRAAASKLGDFAKVQEEDYLKNEITQMFEDLAKDEQVKN

SEQ ID NO: 121007 - protein, 155 aa, Heterodera glycines
MALNNCFTENRYPNECILSYGSIAVSDPLDAFVCCRFSIHEHQENICAFGTEYGRVVICDVTAPIKGEDFIKHRFATGKNAVFDLCFIPDRPNLLLSLCGASNLELLDIERSSSIFLLGHRDTVRCASVWPENPFCVLTGSRDGDILLWDLREKP

SEQ ID NO: 121008 - protein, 229 aa, Heterodera glycines
AQQSLALCSLARLSMPAFAARLYPKQTNKEQQQQGGGPSNGFHDITSIGGGGGGGSALFHSSNGTAAAGLSSSSGSSPTILQQQQHRQFSSAISQQKSLTPPPLSVSYTDNDDHRYFNYFLFAVRPSSDGDGSSVHRFAGYVNLYRFYHHPDKERVRIAQILVPPTYRRIGLGPRLLRAVYNDLCRAERVTAESPSDAFLFMRDYVDCANCAKLSDFAPEKLRKGFSDE

SEQ ID NO: 121009 - protein, 186 aa, Heterodera glycines
MANIISEHISKIVRNAYLRTFQILRVLKSKEIKTLTAAYKTFVRPQLEYATEVWNPNLKKDIDKIERVQKFFTRKAFRKCGFVYKKYGERLTITDLHKLEERRKINDLTTAFKIIKGFTSLDAGKSFFFSERPRRPLLLRVKRHTAKTQNNFFNRIVKSWNNLPVVAVQINKAKEFRGLLKAMSSE

SEQ ID NO: 121010 - protein, 362 aa, Heterodera glycines
GQKCAWLRRRWQWGIRVTPLLGFFCIITLLLFVKEPVNLINMENNSKKAIKILINIAGEGTIRTKCRTFVWSTLAYTAVVFVTGTLSWWGPTAMWGPTAMEHAKAMDEHLNDTSKLRPAEKNQIALIFGVITCVAGIFGVSLVITCVAGIFGVSLGSLIAQHWKTGKFCFAHHRSERADPHWKTGKFCFAHHRSERADPIVSAVGSFVAAPLMFVAFSLITTDQLLSWFVVFLTILCLCLNWAINVDMLMSIIVPERRSIASAIQILFSHLFGDASGPYLVGAISDFVRGSSDLPTDRFHSLIVAFYLPNALLFLSGAAFLGAAYSLPADLKRMEAEKAAAESERREEKLKGRGREVMRERM

SEQ ID NO: 121011 - protein, 140 aa, Heterodera glycines
LNGRSTNKRTLFLFMLNVLKYFKFLGPMKLNATPLRRIAQAFVIATKTKLDISTVNVPEHLDDKYFKRQSGKVADKSKGGIFAEGANKYAVTDQRKEDQKTVDLQVMEVVRKHPEKKLLFAYLGSRFHLAKGMYPHKITF

SEQ ID NO: 121012 - protein, 300 aa, Heterodera glycines
MDPALLRQRQEFMKQAIKSMGVAQQIKNDRNEQQIPTSSAASSAMPKKKKKKPVQTAAAGQFGTEFAANATTAEDSAQNATNFSIMAKIVDYMKKRHLNSQPWALSLKEILEEMQVYDVNRKSMLWLQEALPRNPRLQSEADDTKFVYKPLYKVKNRVTLLALLKKFHTEGKGGILLSDLNDCVNSAELLVKALGNQVIAIPTQINKRKDIVYFYNDTETDREIDDEFVQLWRTAGVEHLDENKIEEYLQKHGLETARDLAPRKPNANLGPKRKQPRQRVPQRLHNVHLEGVLEDYKTDD

SEQ ID NO: 121013 - protein, 203 aa, Heterodera glycines
MNDFSPLNWDEFFDRKECVKTGDDKFNVYVKGSNGPLFFLLHGGGYTGLTWAVLSEQLSSVIECRILAPDLRNHGETEVKDGDDMAAESQVNDLCNIYQHFYGHDSSKYPPTILIGHRQVKREGARDSTMAVLKMPQNEFNPALFSMGGAIAIRAAASGRLPNVLVVSAIDVVEGSAMSSLCFMQQFLRSRPQHFPSIERSVE

SEQ ID NO: 121014 - protein, 355 aa, Heterodera glycines
AVELPPVDANPSWTGATIICQAAVNGGTKDSPPAAVNGGTKDSPPSVVDVQYLRGVHVVDSNGQGPVHIPNQGFRFYVECVRGTDGQCQQSAARRKTLHCAVQANPAANSFRWLKNGGPSGNGPEFMIGTDMIGHSLQCAANNGLYGCAANNGLYGEELQSPAVYIDSYTAARLIQDNFQQVQSSAPFQQGNRVEMGQRVQVQSSAPFQQGNRVEMGQRVQMSCVVEGNPRPAVFWKLRNPRPAVFWKLRRSNGQVVDAPCPQGLNGQYREVPGLNGQYREVPPTAQQSNSLIRLQAICDLQVANYSFSPTAQQSNSLIRLQAICDLQVANYSFSGQYWCSACSYVSQGLPECSP

SEQ ID NO: 121015 - protein, 570 aa, Heterodera glycines
SGEIMSRRNSIARGARQQRDSSSSRSSDSWSRKSRSRSRASSPSRSSSSPHDRDWRFRSRSGERNKRRCRHSRQSPPPRKRERSRTPVNEQKCINLKNSNQFSRRRSPNETKPSNKVILTSLPNYADNIKLNILLAKQGFHPIDNIKLNILLAKQGFHPIDIRVVRRNTDSGSVRIFGFVEFSDVETAEDWIRHNQGFLKMDDGFQVGFLKMDDGFQVRLEYSREELNRESNPLTSDWTCSKCTINNFNRRTNCFKCGTSRKDSEALDARGYGMVGVSPCDTLLIRELPSSVTEESIRTLLIRELPSSVTEESIRTSLSQFSGLTIQRIQLASSRLYAFVQMKSAEQASYLLNFQQSCTVRQLCRCFFINDFVISLFVKNNYLFASVSQSNFDHGECQFAKHKAELAAQTFKKVKIRFAPVFCISKNPTNSAAQLAQNAIRLAQMGKAVPGAVPPIAHMEGPARQSISTPFGYLPTYTTPDTNLFQYEPSSGTPDTNLFQYEPSSGYLWDVNTGFYYDQKTGYYYSSNTSNGFYYDQKTGYYYSSNTSNWMFWWMFWSSKFSTYITAKEV

SEQ ID NO: 121016 - protein, 91 aa, Heterodera glycines
MYLNFGDIGQNIKGLMNEYQRKAKTHQQLESIADMKKFVEQYPQFKKISGLKGVENIYTQHEPFILQLIDLASRGKLPESVYPSTDLANLK

SEQ ID NO: 121017 - protein, 409 aa, Heterodera glycines
PPPQSQEEQELQQDPEKKNDALSAALAAAAMVAQKLGKGGLISGAGAAVVSSIDLLNRVPQATQKATPLAETVLAKEIGEFVYFGYFTTVDKHETVKREPSEQNDQLTEEQRQRELRRKSRWSTTKSFVPGMPTILPSDIDENQRQVYLLQMEIEETTRRLRQSDFGQNVDPAERSITQKYVALIIITGAKIIIRGKGSIKEGKLANRTGPLPGENEPLHAYVTSTDREAIKRGCDKIREIINAALMIPDGQNELRKLQLRELALLNGTLRPEDVLSGARCTNCGSDQHKTWECMEAPNVTANVICTACGGAGHIARDCKNPRPGFDGAVMDAEYSALMAELGEKPPISLEAGTAPPLVGGKPIPGFPGSGLRPRFALPAPTPIVRVNLAKQQNTPQQQSVSGGGYPGW

SEQ ID NO: 121018 - protein, 173 aa, Heterodera glycines
LGSLVFTLPHFFAEPYTTSYQIENAGLSRCMKGAQSLRCAGPRQITAIGFDLGAVGCNLAIIIFVPNFMCGKCLHTVVFGLSGFDANGYQVHLFHMPKFCGFLKSALPERTNEIVWLQHMKFIVFDDTVLISANLSDQNFVNHQESLFADRDCPLLTDFFVDLFRLVDNPSGG

SEQ ID NO: 121019 - protein, 189 aa, Heterodera glycines
MRFGTAANNEKVGSLKKMPFAYLPLVGLEFDGIQFDVLFVSIPTSDSLPKNGPLSRKEVMALIRKLAGQKEADEKMIKSLAANFIYEPKLGFFNGISLATMATKVMLLYPNASIPFLLDKFFLTFALWYLNNRLNVLITCPPRDWPIPLRLEEYVPDELQTFSWTPKDEEQKRNSPLLMPIITPGKGDK

SEQ ID NO: 121020 - protein, 231 aa, Heterodera glycines
LNLTLIDLPGLTKVPVGDQPPDIEQQIRDMIGTYISRETCLVLAVTPANSDLATSDALKLAREVDPQGLRTIGVLTKLDLMDEGTDARDILENKVFPLRRGILWAFWMPFSSFSECFSLPMPSLPLFCLGYVGVINRSQKDIVGRKDIRQALDAERKFFLSHQQYRHMADRLGTPYLQKALNQQLTNHIKDTLPTLRDNLQKKLYSMEKEVAEYKNFQFNDPSRKTKALMQ

SEQ ID NO: 121021 - protein, 242 aa, Heterodera glycines
MSLENFGNGFMRRLGWKQGDEDEGWSKKAVDSLLKKLQKQHNKEGLTLLENALRTEGKEPSECVTIPRSLDGRLQISHRKALPHVIYCRVYRWPDLQSHHEDVCINPYHYERVDSSNLLPPVLVPRFSDSPPKRQPGGEHRVLLGHDPIPFVPCQHWATISYYELSTRVGHRLRMFFFALFRGDIATSSPKGVTAFCSSIVVPNLDESTVMNELNPSIEETANTRPSGVQAIEVNLSYWRFS

SEQ ID NO: 121022 - protein, 189 aa, Heterodera glycines
SLAPLNKCQFPPHLSQLQYTERNNTAHFYGANKYPQALEKKITLLKFFRSYMNEHLMKAGANIKMRDGDELARLPCLNTWFRTKSAIVLHLSNGTLQINFFQDHSKLDHSKLIVCPLMSAATYIDQQKNVFTCKFQYLEKYGCPKDLCQRLKYTKVMVERLIARHENPNVMVERLIARHENPNAMTAKS

SEQ ID NO: 121023 - protein, 207 aa, Heterodera glycines
DSVGIRRMTTTESLLTVEWEGIQSGDHPDSSIRGFIVEYRAEKESQWNVHSGMIPYKGPNHQYRVQIPKLPTGISYFVRIKVLGDKGEVLVETPEIRARNEIVSIKCEPDEISEPGDVDVKERAQFSVALAWQPPECGSIGEYQIELRGLGSQQFDVHRQTVAQPSASITGLLSGTEYAVKIRAVDRAHIVGPWNAELFTVSTKGEA

SEQ ID NO: 121024 - protein, 375 aa, Heterodera glycines
QVMRSREREVSISASSTRGNVFGILRQGKGKTRINDFRLPIGKTRINDFRLPILPQPMVPSNSKSAAKRMVVFQLSNYTLSSLFFWMDQYRKFDYEISKTDQYRKFDYEISKTTVKDKEIAAYLKTECGPKDICAGTLFPALAQNFPNGLVSIKSRLAQNFPNGLVSIKSRTLTYPTILIERNRINVQVESRIDAFANYSDHNRRFLTATMRAKLQYSDHNRRFLTATMRAKLQLQNTTFVNYVFSAELSIDTFDITNVVSLVDGIDAGDGIDAGSIEFLVNALNELIIADDMRHKLKEGVRLPVLLDFEQFAGDVHLEDGSLVLSADLCFDELCSNTMSNVDMDANYYDSVKGLCSNTMSNVDMDANYYDSVKG

SEQ ID NO: 121025 - protein, 373 aa, Heterodera glycines
MYKNSIKSNGAAQLYISGSLLLGTRTFSSDIDLICIAPGKIIKLANFFGEENVFCKKNECTTEQNDSLFCKFCQNKGVKNLIKTPFGKVFLIRFLLNGIDFDLTFVSIPAKRILPFVLSDDQIGKYINNFKSERNFAHKNMLRALSSYRSIFYLANLFQENHANCAIPLSENKFKVEKFQNKKAKKFQALVLFMKIWAKENHIYSTAYGFLNGPMLAIMAAKVILLYPSASLPFLIERFFIFYLLRPIRVPVQLAKLKLEENFDVNENWDLFFVRKPDEQEMPVYTPMFPEQNVAWHLTHSAARVIRPCQIVPTLLYKTIICFVPLAFSWPRNQWLNLATFLSRPISLFESNYLEFNRQIIFKISKMGEDGRE

SEQ ID NO: 121026 - protein, 302 aa, Heterodera glycines
MTESDSRIRAYKFVAYSAVTFSIVAVLSVVVTLPMVYNYVAHVRRQMQHELGFCKGSAKDIYVEVNHMKSTPDMDMRSNRTARQTGGGYGPVVNAAPACGDCCLPGQPGPQGPPGRPGKPGKPGAPGNPGTPGKPPNAPCEPTTPPPCKPCPQGPPGPPGPPGPPGEPGEAGTPGRPGSDAPNGEPGPRGPPGPPGEAGPQGPPGEPGVPATPEAPVPGETGEQGDQGPPGPPGPPGAPGADGPPGPPGPKGPAGPDGAPGADGQPGPAGPPGPPGTSGEKGICPKYCAIDGGVFFEDGTRR

SEQ ID NO: 121027 - protein, 359 aa, Heterodera glycines
MAFPPPFPNPLLPRLPNQSVQFPGQKFGFFSPQRQSILPGIPLLRPRFRPNFIPRKCGSVCNWKRLQDSGGKFKAFGFCDFMYPDGAKKALSVLKDFPIGDKRLNVKADEQTEKLLDEFSKNKLIAANEESDDAVRASIRKFLEDEAADLVDMPTDEGFRHRVLDLFVFFGQLVASNKEGRQSRSSSVASHRHKKKRSQKSPNRKKLANGTSSTESRRIKRKKNAKRKSLSSAEDSDEAEEKRKLKKEVKEKEESYQARLKKWEEREKRMAKLYDKEREEEKQRQKTLQKEAKKLRQFLEDYVDERDDPKYYRGSALFQRKRNYEREREADAKDRHEERAELEEIRRSILEEEVVSKKE

SEQ ID NO: 121028 - protein, 203 aa, Heterodera glycines
PPPPPRYALGKYTIMQIFVKTLTGKTITLEVEASDTIENVKAKIQDKEGIPPDQQRLIFAGKQLEDGRTLADKQLEDGRTLADYNIQKESTLHLVLRLRGGMQIFVKTLTGKTITLEVEASDTIENVKAKIQDKEGIPPDQQRLIFAGKQLEDGRTLADYNIQKESKQLEDGRTLADYNIQKESTLHLVLRLRGGKNFTKIGR

SEQ ID NO: 121029 - protein, 196 aa, Heterodera glycines
DVKLYYTHENDDPLNQLDKAIEAMEKWSKINGLEISTEKCFVLYLGKNNMKKEYFINSQRISESDNVRDLGIIIDSKLNFSEHISKIIRNAYLRIFILRVLKSREIKTLTAAYKTFVRPQLEYATEVWNPNLKKDIHKIERVQKFFTRKARGFVYKYGERLKITGLLTLEERRKITDLTTAFIIKGFISLDAGKIF

SEQ ID NO: 121030 - protein, 309 aa, Heterodera glycines
MVAVTLGTFLQGSIGTAVVIELKDETALEGSVDSVDPKSLNTQLSNVVLYRRRQKGLKPAHLPSFFCKVTELVNALRNCASELLPLPDEAQKLTLKNIEHDKFRMMDGRTADEAIVATVSKVGENIQLARASVISSSPGTLFGQTHPKEEFNGVQLGRFISLVSLGHKSDESVSDFPTAQLGQVLCQHIIGMAPESLGEPRKKGAKRATQMEIVDNGEGTEKERSANAENESDGGEEEDLNASQVDQSELTRMDGEETQLLHQPFMLNPEQTVNEYLEAHGANIADFLRIEMGQEHTKTNDLSVCSLLV

SEQ ID NO: 121031 - protein, 402 aa, Heterodera glycines
MTFLYETLHTLDSFNRDSPIGRQTIRKFVVNIVLKLEQEEGTHSTRAGAGYHSKLLTPEFVLHHHNMPPIRFCRVLVERIVQASTYTHQPPQFVHRDWRFAEYPPAGQALTSAWVELLASQHTPAAIVDALVDLAIRRPIFRPQDTLNALGLLLTGLPSSFQAFFLDRIEESFDWPQIASVDADPSQLFESLSHEVYLHSESRILSMLALIHSFCQHGGNNSLSIIPDFVINRLAHKVDNEAQLVYFLRIVVPYLQRIHEKERNKHMPEIISIYKVLGDLVKKVGQLHYEDTICDLLYQFKYMFVGYTLKEQTEIFILNFPDSMREKLKFLFTHSSTAAAAVENQQQMLQQQQQQLVGIGFAFGQQLSFPMESATHQQQQQQVLPFHHSQQQQQQQPAALIG

SEQ ID NO: 121032 - protein, 559 aa, Heterodera glycines
SFTFWFCLGGPRDERLEAELFTGVNSGINFDKYEEIPVEATGVECPPPIQSDTNLNLHPWIEENIRKSGYDRQSDTNLNLHPWIEENIRKSGYDRPTPVQISPTRELSLQIYNESRKFAYRTPIVSALLYGGLLYGGRENYRDQINKLRLGVHMLIATPGRLIDLGVHMLIATPGRLIDVIQNGLIGMEACRFLVLDEADRMLDMGFEPQIRQIVQMSCMPQKGERDRMLDMGFEPQIRQIVQMSCMPQKGERITAMFSATFPRDIQILAQDFLMPEYVFLAVGRVGSTSENISQKVVWVEEHNKRHFLMDLHNKRHFLMDLLDASEPEALTLIFVETKRGCGDLSYMLQQEGYHCVAIHGDLKQMERGDLSYMLQQEGYHCVAIHGDLKQMERERHLENFRNGTAPILVATAVAARGLDIPNVKHVINYDLPNDIDEYVNDIDEYVHRIGRTGRVGNIGMATSFFNDKNRNIMATSFFNDKNRNISHELTSLIVEANQELPDWLEEMARDSGRHGGVGGRSHLGAGSKRGGGGNRRGKATFYSHYYGIFYCQRPSCSN

SEQ ID NO: 121033 - protein, 206 aa, Heterodera glycines
KVVLALSNYNSFAAALPVQHAKKTAPAQYIRYTPSQQSGLNAGGAQQRIIRLVEEQKDPMEPPRFQINQKIPRINQKIPRAPPSPPAPVMHSPTRKVSAKEQADWKIPPCISNWKNPKGYTVALDKRLAADGRGLQQVHINENFAKMAEALSIAHINENFAKMAEALSIAERKAREAVETRAQMERRIAQNKKCEGGKANARVAQN

SEQ ID NO: 121034 - protein, 384 aa, Heterodera glycines
MSTLKKIDKASEDGLEGGLSLFDIPPTNVAINKSNNQFCDLNKTFLYLSTSIERKDKSNWIPITKDSEADQHVEDVKKGLCEASCYYVDDVDQDDYTNSGFKNRASRFADGAKCETMVKLNFDLARQPNLLLNNSDVIFSIHRNTDDFLIMAPPYVSGNAVIANPHTYRINIHDIRIYVKTVDITQSLNNVISNQLQTTPAKYPVRKIEIRSLFIPRGTSDLSHNVFTSIVPRRLIVGFVSTGAYTGNPKESPFVFEHAKIRSISVEANGNIFPGSPYSLNFDRNKYIRAFVDMYTGLGMDDGERTMSINIQKFVNGWCFFVIPMTSTLEDTPGFELIRNGTTSIKVQFNEPIKDGGYEMIVLGEFDSILSINANRVLSSDGSI

SEQ ID NO: 121035 - protein, 189 aa, Heterodera glycines
RELIAALVKRKRVPDNWLQFSVPKDVTALEWMRDFVQRMEQLKRLSLSENLRYEEVWLGGMFFPEAYITATRQLIAQTNGWSLEQMYMHITKTEEVQLKSTAFTLTDLRAIGVLCEADEIKLTDEVHVGVPRLQFTWTLEGHSPASVVVPVYLYSNRAKFLFGLNLLPIGFDHSMLSQRGVAFVSNCSL

SEQ ID NO: 121036 - protein, 336 aa, Heterodera glycines
MSGRSGRSGKRRQDGPGRPSRSRQQQHTQRGVQSAYQGPREPPEQPTVRGWEDTRDFCSALKIFVNETTRRNVKELVNEYTELNAMPRPETSPEFTRHMDCNRYRDVICAEQGRVRLDNGRYIHANWITALGEQRFICTQGPLETTCADFWTMIVQENIESIVMLCDTVEQNKTKCHQYWPTPDKKQLHFANKTITVHFIEETALEPDLYRTKLAVLFPNGSMRVHHFHWRRNRTDWNTGGAAHCLQYSAAWTSAQHPHVGAQPPSASGPKCADPGPIPLHILRDFAVGFLFEFVCLNNHPPPPLSYAQNKAAKLNIDERALTTFLREMDERMTRS

SEQ ID NO: 121037 - protein, 301 aa, Heterodera glycines
NSTLCSAFQPQRTQQTRITSPRTVQDLVSEFTELNAAPQPVPSPEFTRNVECNRYRDVICTEINRVRLHTGRYIHANWITTFGENRFICTQGPLETTCDDFWTMIVQENIESIVMLCDTIEQNKTKCHQYWPTPDKKQLHFANKTITVHFIEETALEPDLYRTKLAVLFPNGSMRVHHFHWRRWPDRGVPQNDLAPLRLLFHVQQFRRSVVHCSAGIGRTGTLVALHIAYDTLQRGHRLNILALARNLRQHRAQSVQTLDQYLYIYYVILRYAQNKAAKLNIDERALTTFLREMDERMTRS

SEQ ID NO: 121038 - protein, 209 aa, Heterodera glycines
SSISKKNSPPPPSKNFFASLPQNFISHFLKINPTLKNFPICQVLDARDPLGSRSAQIEQLVLDSGKRLVLLLNKIDLVPRDNLLKWLAHLRRQLPTIAFKASTQQQTQKLGQYQSANLSGTFSAKCIGADLVMKLLANYCRNKDIKTSIRVGIVGFPNVGKSSVINSLKRRFPNVGKSSVINSLKRRKCCQTGAMPGLTSFLKTNVLNN

SEQ ID NO: 121039 - protein, 218 aa, Heterodera glycines
MQLPNLLFVFFESVSKGKKKRGKGGNVSQKEGQQQIGSGSDSEEGAVGAKASGGCIRERGGSGNWVVYTSAFGWKPSGEQRTQIAKDPPRLVHGDIILAKLRPGQEIEASCHCVKGIGRDHAKFSPVATATYRLLPQIKLKKDNFDEEQAARLQSSFSTGVIGRDEQTGRVYVRDARADTSSRNVFIHDDLKDAVEMGKKKTHFICKANTKLFALKCS

SEQ ID NO: 121040 - protein, 171 aa, Heterodera glycines
MRVFPSYAFIQMVLLCLFSHIALAQSQLLGSDDLIALFDLSGAYNRYCGVKKPREDLASFLPHVCAGSHINKKADSQCSLRKLIEDPPIMGREINNLNASQMVGFKLTPEVERKAKKAKSGGAEENGGREKEKKRKKEKKKKKKDREKRTEDEGTKRSGGETKRETVMPFF

SEQ ID NO: 121041 - protein, 172 aa, Heterodera glycines
MPSAQMVDNIKQSANGSKRRVFLIETMGGHCGYLATVSAIATGADNAYIFEEKFTVDDIKEDVKVISQKMQKGVQRYLIVQSEGASHNYDTTFVQKLFSEEGKGEASAINSTGLLSSILDGKAELTEQQQEISRSINAITADEVLVKEFLELMNEVEKKKCRRSNSETPLVT

SEQ ID NO: 121042 - protein, 555 aa, Heterodera glycines
MKLSSSIVDVVVELVELKDKNAIQIDTEKARIVHGTTNERLERLLQAKNELDNKIDELSSMLQYIFKCVFVHRYRDQVADFRIICISELGVWIRIYPALFLDDSYLKYIGWSLFDKLFTHKFKDRLVSMVLDTDVEVATKTCQLMTHIYRAFPALLDPGACVPLYELVYCNNRQLATAAGEFVNAKLFSTAADNSLLTSSTSLLTPPAENRQLIKDLVTFFIDGAVHRHPAYLVDSLIDICPMLKDWSTMVDILLSDEFDQFDTQLISIMCAAVKHAATGEHPPNRIVVSIRRGPGAGTEKKDLRMLHDGRVHLSEVFIPKLPRLLQKFIADQEKVRDLIGLFLYFELEIYSVSRHDQPLYDLMMLLERIVEQYSNDEIASNIASVFQFISTNMTLARSTETNRCRIVDGVVQNLRQQLQVFLANEEDEDQQLDEEDEAALLSAFRKMVAFASTIDVPVNVEFWDMCMALFQNSHRFRSADLVEKAMLLCFLLLSWEMKRFVAAQEHGEVNSARFYSFLFILTDKETIETLKKKRDQFLRTTKSILRDFAIGVET

SEQ ID NO: 121043 - protein, 401 aa, Heterodera glycines
FSVPLSVLFHFLFSSISFSVPLFVSLSLPLHHATKSKHSNHYHRLACLHPFNFLFFFLLFGNTDQKCLSSLFRALRTRTQTTLVSFESQEFVDVHKTRIYIDFQKAFDSVPHNLLLYKLEKIGIRGKLLMWIKSFLSNRTFHVKIGDALSSNKKVGSGVPQGSVLGPLLFLVYINDLPDALPSGVKIKLYADDVKLYISDTEIMHKALHNLFEWANKWQIKVSIQKTFVLYLGSKNPKETYKFDGNTINAVDTIRDLGVNIDNKLQFSDHINQITRNAYLRMRSLFRIIKSKSSKIWITLYKTYIRPLLEYAPEVWNPSLQKNIKKIEKCQKYFTKRVFFKCSLPPIPYQNRLEYLQLPTLENRRKLFDLFMAHKIVYGRTDLKLFSIFNPSTRFNIPFYR

SEQ ID NO: 121044 - protein, 327 aa, Heterodera glycines
MDNALIVQALTDKSYFTRNDLDDEAMGDDGPLTTEVARDKSNDQLVEKGMPLFRHIVLTYLRAHWPLAPEEFIIAVATRIAPTSALAELATQLGLHHVVRTAEFPPTQQTLQSTLLALIGAMDVAKARDFVRRFVLPRLYEVPLEDVLPFRHPFAVLGDYLRKWQGATDIEPRTIGSGAVMTATPFYEVAIYVDKQQIVGQSGGEFPWVALDLAAQNGLLRLWRVADHPRVFPFKFEEVYATRFEQAQQRNHRLSDVCGENTDLSLYTPEELARDPIDMVDMCNQYYTKIRPDVGIPLRRRQRHKFSRGTISRLSRRFLVKPTIFNI

SEQ ID NO: 121045 - protein, 183 aa, Heterodera glycines
MTLEARDFFDRIATEHGVDCTQPRSCARLLDKLIGEFIEPKLINPTFLTGHPQIMSPLAKWHRSRPGLTERFELFACTKELCNAYTELNDPLRQRELFEQQAKAREAGDDEAQAVDENFCTALEYGLPPTAGWGMGIDRLTMMLTDSHNIKEAKIIFENEKFVKKNFIEILQKKKKNYVGFEF

SEQ ID NO: 121046 - protein, 320 aa, Heterodera glycines
MAVPFSLQVDGLIYRVRNSTYGQFPLDVTEHDLRQLCDATMDVFRQQQTLVRIQPPVNVCGDIHGQFTDLLRIFSTLGPPPEKKYLFLGDYVDRGPQSLETVVLLFCYKVKYPESVTLLRGNHECSNINRVVSRATFNWQRMALIQPCFRYGFYSEIEQRYHQADTRRLFDMFNQTFAWMPYVGLIGDRILCMHGGISDRITSLQQLNELRRPLLTLPSPSLEMDLLWADPMLDIRGVEPSPRGAGVVFGEDVVFRICELLNLNYIIRAHELVHEGIEYFADERLVTVFSVPRYHNQMNTGAALTIAEDLSHDVTFFPPN

SEQ ID NO: 121047 - protein, 320 aa, Heterodera glycines
MPGAPFHKVTKENYVIEQVHSVMMQLSVINIKQVVESGPKLVTTTRIVYPPAQQQPLGAQPQTQQIPRQQQNQPKGQWQAKPEQQQQQQQRKIQPQQDGQAQQQQQRQPPPQVPFKTQHQKMAQPTQPPQRQEQYAVQQQPQQHEQYPMQQQPKQQQQAQQYSIQPQLQQPVQQVQKPQNFAKQHQYVHQQVQFQQPQPQQQYEHPQHATEREQHQQAQQYVMKQQQQTQQKQPQRVQIVGQMQLGQIEQQQQRGGGGQQPEQQQKQAVVGQQQQQKENGQAKQQPKQGQFGQEEEQQYNKQKSNRNGTTAQQMNNPIRS

SEQ ID NO: 121048 - protein, 205 aa, Heterodera glycines
CMLHSCFFNLMEMTLNHETVPCLKASSSASGGPPPPSLEAAAEFPSASDETEEPLQAERKRYDYNSETLRELGYDKYPYYVERAYDKYPYYVERAWWKEGHRMTFWPHWRQLADIKRRRLVAEWGPMRMRYKAMKTNNILPRVIIDEFQERMDNMPRRAHPVLIIQMCQFTSKRRGKLNKFRVSRHCFRDIADRGGLSGIQRGIW

SEQ ID NO: 121049 - protein, 165 aa, Heterodera glycines
MASVRWIGPPAVSTRARPVHVYAMVWTTTPWTLPMNNAVAVNRAVEHYALVDFPKDRRFRIIRDLYIVAVEMVPHIAAEFGHEIAVLGTVSGAQLADSGLFYSNAWANNIQALPVLAAPFVSPSAGTGLVHVAYAHGQDDFEAIIFSLFGGEWRKIQAPPLEIEK

SEQ ID NO: 121050 - protein, 150 aa, Heterodera glycines
DSGLFYRTWANNIQALPVLAAPFVSPSAGTGLVHVAYAHGQDDFEAIIEGKQYIQCFVDERGRYTREMGHELCWKEVLGDGQRAALKRLQFDVLHQSEYVHSYPYDWRTNQPVIIRCCPQWFIDVKEVNKRCLAATDDAPAVQIASGCQG

SEQ ID NO: 121051 - protein, 58 aa, Heterodera glycines
MANRADWTSPDFCSLLIYSSIAKELADALGFYYMPAFKMDDILVDRYNNDMRDYYHLV

SEQ ID NO: 121052 - protein, 474 aa, Heterodera glycines
QNNNLLLLQILTLFFTVLCLISGFPPGEGDYRHLYPRLCVTIKINDHKHVLSYFMGMVEDFRWPKVRLSEKYIYAFTNCQLFLGSDAHSFLRKTNFNFGVRSAKVHNFSFLIFRDGKIPSRFLSTDFAQRQIRNWREESLLFGRPTLINLNKMDSSYLTFDQGNIVNYHGNGHPIDVFAFSAYAMNIPIFFSNLHNYGYFISPNSLSKSEQMAVVCHLADWVSNVGPMPFPVSSVLQPWYPVPLADWVSNVGPMPFPVSSVLQPWYPVPIKFGFDQVYLINLRRRPQKLEKMREVIKFGFDQVYLINLRRRPQKLEKMREVLHLVGLDFTHFEAVDGQNLTEHELSAIHFLPGFEDPYYKRPMKRGEIGCFLSHFKIWEEIVRNGHQRAVVLEDDVRFSPNGTLILQKTMEDLTKTRLDWDLIYLPNGTLILQKTMEDLTKTRLDWDLIYLGRKRIGTDETFMVLENRFLSTVA

SEQ ID NO: 121053 - protein, 70 aa, Heterodera glycines
RVEHVKPSGSRLEFLQRCKANDLQKKQHKEGNAPFVALKRKPKEPRGAHLVKVKSTKVERLAPVKFEIVA

SEQ ID NO: 121054 - protein, 88 aa, Heterodera glycines
PVYLAAVLEYLASDVLELAGNASRDNKKTRINPRHLQLAVRNDEELNKLLSGVTISQGLLSGVTISQGGVLPNIQAVLLPKKTQHGES

SEQ ID NO: 121055 - protein, 240 aa, Heterodera glycines
MTIVGKRGSAVNAISRSPFGDDKDSRRSVSPPGTKRVRNGGGGGDDDSARRNDRDSKRSGGRRERTARHDEEERDRSDRDRERDHQERERRRIGLPGKPKSDHVLIGSRTLWFGRIPSGATESDIIDSVKEIGLPEKVSLVFGRGCAYVTMPDRKLAFKILDRLAKNIRVQSKNVKVDWATIPYLKDNMQLMDAYWDLKQGYAQIPFSKLPDGTVDSLMDGAWLELDTLPAHLRGENFQV

SEQ ID NO: 121056 - protein, 469 aa, Heterodera glycines
MSIIKKIDKDSVEGLEGSLSLFNLPPTNVAINKTSVRELLPLSALNQTGPYLFRLFSDSQYCDLSKTYMYLLTSIERKNAAGEWVPTDDAIEEDKHVGVIQNFGSSFVRSLKVNISGVEVFDSSIYYHYRAYIMQELGYSHEIRKAFHEAGCYYPDENSQDSYSNKGFTSRAQRFSNGKQCETMVKLNFDLARQNTLLLNNQDVVFTIHRNSDPFLLLTPKWKTVTDAVKDAQGNIITAARVTWHDNTAEYRIRLHDIRLYVRTVDVTSSLNIAISRQLESTPAKYALRKVEMRSIFLGMGRTELSHNVFTSTLPRRLICAFVSTDAYSGARHLSPFNFEHANVRSISAEANGLTFPSTPYLLSFGNQKKFVRAFVDMYAGLGLDDSDNKTVSISMARFLSGWAFFVIPMTSTLDDTPGFELIRQGTCTVKVQFEQPIKADGYEMLILGEFDSVLSINADRVLSTDGSV

SEQ ID NO: 121057 - protein, 117 aa, Heterodera glycines
MNSSSVGYIPLLYRDRPEWRDVTPIYNSAEENAVVRIATSEEFDDAFAYLRAVMNANELSERTLELTQTCIAQNPANYSVWHNRKTLVDESGIYAAELPFIAQQLHDEPKNYHAWQH

SEQ ID NO: 121058 - protein, 335 aa, Heterodera glycines
KIDIIYLDLQKAFDQVPHDLLIYKLKKTGITGNLLNWLQDFLLGRTFKVRINQKFSNEFPAKSGVPQGSVLGPILFLIFINDLPEKIPKEISIKLFADDTKIYHCYSNESQRKVLETALISVFNWAETWGLYFSVKKSSVLYLGKNKKKIPYTIKHATIPESKIIRDLGILIDNKLKFNEQFSIILQKAYLKSRILFKKIKTKSTKTWITVYKSFIRPLLEYATEIWNPRTKKEINRLENFQKNFTKNVFRKCCLPYISYSERLKFLKLSKLETRRKYLDIITAFKIIKNTTHLNPKNLYNFSNRKITFILVTKRKITKTEHSFTNRTTKHLQEI

SEQ ID NO: 121059 - protein, 96 aa, Heterodera glycines
MALPIYSHGLNRLCIYIEDVASGVKGDGEPKVLKQKGATAWVDGCDLLGAVVGNFCTELAIKLAKEHGIGWVVCKRSNHYGICQHYAKKIANAGLL

SEQ ID NO: 121060 - protein, 155 aa, Heterodera glycines
MKRPFASQFRIGTRPSLPHSLPFAPLQNRMACRIWRSVERSGTEVARANPSRCLPAHGPNGNGVAANQRQQEEEASQFGSKCSFLGFEIQAESTGYIIGGAVVVGVLIVVFAIFAIVVFGVYDVTKFLDEHPGGMEVLMEKAGEDRTEAFEDIGK

SEQ ID NO: 121061 - protein, 129 aa, Heterodera glycines
MFEAKFTNAALLKKIVEAIKELVSEAPFDCTENSMCLQAMDGSHVALISLKLDIGLFEVFRCDRTIALGLSMGELSKDTLMIRFEDSEQDMVTFTFEDTKGRKQDMGGNSSAVSPILLAAVYHTFHQQK

SEQ ID NO: 121062 - protein, 155 aa, Heterodera glycines
  unsure (1)..(155): unsure at all Xaa locations
KTIIRMYKTYVRPQLEYAVEIWNPNLKKDIERIEKVQKFFTRKAFKKCGLLHRSYSERLEICQLIELAKRRNIADLTTAFKIMKGFTSLDASKLFTFSDRPHSXPLLLRMRRTTTKSKNNFFNRIAKNWNKLPIVPIQADKANQFRALLKAMYEF

SEQ ID NO: 121063 - protein, 89 aa, Heterodera glycines
LLNIAREVRMRSPVTGSQFAAWGGMFSVIDCGLVYMRRKEDPLNSIAAGGLTGGLLCARMGWKTALVSAGFGAVILTMIEGVGILMNRD

SEQ ID NO: 121064 - protein, 223 aa, Heterodera glycines
MPCAFRGGRRIVCHDDRYILKTAAEKQAVIVSNDEYRDLVRENPRWRAVVENLLLMYSFVDGKFMPPDDPLGRRGPKLDQFLTFAHTPLNAQLCPYAKKCTYGNKCKYFHPERVNGVWISATERLASRIANGIGIENSKQLLAARPSMIAEHSQRQNASSSSSSLLPTTVRHNNVGRTRSLNCGGGVTVAPPLLVGLASPTTAQMEDEQRSKQREENQQTSIT

SEQ ID NO: 121065 - protein, 118 aa, Heterodera glycines
MCRYQSRVAFTLLNKVLSDFAERILELEWKRMSGESDCSYSELPGFLTRWQNPREADALTRVQDEVEETKAVLHTTMQAVLERGEKLDDLIKASENLSDQSKMFYTQARKMNKCCSYT

SEQ ID NO: 121066 - protein, 95 aa, Heterodera glycines
MSNEFYYSNKYEDDEYEYRHVHVTKEVAKQVPHNRLMSESEWRSLGIQQSPGWVHYLIWPAERHILLFRRPKPKVNGAQKTMMKTTANPSQVRVG

SEQ ID NO: 121067 - protein, 355 aa, Heterodera glycines
MIFLLVKCDEMLYRSIIDEMWAKLEELKRNDRRGIQDVTLIWPFVKEFVEEIGAWRERQQQSKKDFFIRRAFQETKNASPPVLVTIASPDLVDDEPKSLTALRKRRSVEAQQSPNSSVLFVGSVGGCTPKMLNWTLKREEKRCENEQSKKRRTEDETEQRKNKTEKAVKQEVIEVDEQNKEETATKEAAGKELTSATHSQLNVGMASKAVTLDMDKWTEKATRGEEIEKGGIEEEDDSDVYTLSFGDKTMFEIVEDSPQNEPKTDETQPLKEVKREPEESGRKEDENRTEDEPGRGEEEEEMNSEEEDEEEGEEQSDEEEGEGTGSERTGASPPPPPTPADKTLARPYSPIKSPG

SEQ ID NO: 121068 - protein, 142 aa, Heterodera glycines
MLKECEENIKAAEEAMEKQRLYEENVRLGRVKKKGRRSLAELKRDKKEAKKRARQQQKEQRKREREERRQQRKLAAATTAQNGVGTGAETEEMAERRRQRKEQRREAKLAEREERRRHKMQQQQQKQRHKEEKQQHQQQRTK

SEQ ID NO: 121069 - protein, 111 aa, Heterodera glycines
MFGCINGGKRRGKGGVKGFCKTGRHNIQGITKPVIRRLARCGGAKRIPGMNYDEIHTADYDNIQGITNMTIKNFARLDGANDIFNMIDEQIWPNDSNFGTVNISWFSESKN

SEQ ID NO: 121070 - protein, 91 aa, Heterodera glycines
MDGWEARELTLASSGTDRRLHIWDLSKIGDEQSPEDAEDGPPDLADGGQHLQRGGVGPGDGGKCCGRKRRRSDGPTTLNTPEHIQTNSEAN

SEQ ID NO: 121071 - protein, 232 aa, Heterodera glycines
ISPLAPQGVRSKSSPPPRGSAIACCQHSHFDDSICGRFMRRNRYLAPHSAETANAGGTSVRKTAGSSWRPTPVLIATDGHANKRCQKWTKERKMPISVLNGSPGYINILDGLNAWQLVSELKMPISVLNGSPGYINILDGLNAWQLVSELADATGQPAAASFKQFSPAGAAIGVPLNDAEAQALMVSDLPVSDLPLDFRRHSLAVALARARGQFRFSQRLDIFCLAGVCLFY

SEQ ID NO: 121072 - protein, 322 aa, Heterodera glycines
LTVRMIIDVSIIDVSKAVALLSNGTLIKLLRSKELSHRVNAKAWPTILDIEDAPSLSVARSKVRKAGSSTAAVDFAVSTTGQLSGIVVTAVGAAKQCKSLKMACELYPSRTVTVCLDPYSGLGFTLWCLCSVYSGHVYSGHQSILIPPLELEQNPLVWMQTLSQHRSRDTFCTYSVLELCLKELATQVGQLREKSVNLSSLRNCVVVAEERPRVQLCNAFIKVFAPLGLSPRAVSTSFGCRVNPAVGMQGAASPDPTVVYVDARALRNDRVTLVEKGAPHSIALMESGKLLPGVKVEGGKEQNAQNNTVRRPQTLISLLLNK

SEQ ID NO: 121073 - protein, 305 aa, Heterodera glycines
MQETHIVLGIASLCSLLAIIATVVTLPSLYSEMSQLNNKNTVIYYRIPKAFRVNTDSAWTDLMDVQVVVAPPSKARDNPFSSIFRAKRQLPGHCNCGPPQRPNCPPGPPGPAGPPGQPGQPGGAGLQGQPGAPGQPAPPCPPQNIPCPRCPAGPPGSPGGQGPPGQQGAPGQPGAPAPGGGQGPPGPSGPQGQPGQPGRSGTPGQPGQPGNNAVIFNTIPGPRGAPGAPGQPGSPGSQGQPGQSGGQGPPGPPGAPGLPGLSGNSGQPGQPGAPGQPGKDSGYCPCPPRSSAMALKKKMAAVKKA

SEQ ID NO: 121074 - protein, 490 aa, Heterodera glycines
TEKNKNFRSDVAEITPFSLFPTPFPRNLFRLAEKVQKAFNLLYFAFNLLYFRISNDFDFLSETFEPVAKTNENVRRMLNILKQVHDEGIKQTKTVVLARSKINKNYFIFQIEMNAGQIGGLSVSSRITEMHRRTLWRAGIDATKDQVPDNEAGLGAAEVLYKAWKAFADPNAIILFVAKAFADPNAIILFVASRTSKNRYGQRHIEYDIKEEGEALQIVRLSLPECAKMYKDGNDHSLQLEGLTVDHSLQLEGLTVGVVYKLEPPKYSEHDWETLLLFERSTTIMSPTIALDLATQKKVQQILAKPGMVEHYLEDQILAKPGMVEHYLEDQLEIVPLVRSTFAGLWSLTDKDEDTQKAINDAIDAIVHPENYVIKPNLEGGGHNFFDEKLREKLQQFTDEEREAHILMQKLSAMRVKNFMIRNFMIRGHKKPQFGEMTTELGIFGFLLGDKGKVLHNVQRGHFMRTKLAEVNEGGVSHGTGVFDSAFLVP

SEQ ID NO: 121075 - protein, 341 aa, Heterodera glycines
MVHIVFDPNIIGYDEYMQYGSGIESEDYFRGSSPFQRGANSITNALDFFRIPPTNVSVSSSKVFELLPSNPLTDTPYHFKLHSSQNFIDLSKCYLQSEFRIRKENEHGQLVDLTADEVAPIQMIGQTFIRNIKMSINGREVFNSNSLMAYKTYFSHELSYSNTAKDSHLNAAGYYRDIGGSLETGDGCIARRNLFAGSRTAQFIAKIDADLFNQPLYLINFCELDIEILPNDNEFVLITTPAVAQGAAAAPRYRFEVVSLKMYVKKVSLMDGLALDIARKLEVKPARYAVRKTLMKSMFISHGRFEFTANLFMDQIPRRITMGLVANSDYIGTISRSPFNF

SEQ ID NO: 121076 - protein, 236 aa, Heterodera glycines
MTCGLAVKRPLDLGQDGSLVDVKRPRHGGASPQCSPFRPQLGILATSLMQSVPPKVPSPPAFTGTASAGVGPIGNPSSPFADVSGRCRLSSTQLDSYLRAEIQALKRRRLIPRRQGNFPEEGFPLSTTNVVVNANKGTATAVAASTGGIVGTPVSSTSGNAFRKATSPSSSNVSGAIVKTGFYPQDSEGEAMRTGNADEEKRAMLEALYQNPQFSLRQVKLICERLLKEQEMRLRY

SEQ ID NO: 121077 - protein, 357 aa, Heterodera glycines
PINSLQFAFYCFQLVVGRIRSCPDWSGGEDEDVLSLGLFPGTYLEFSMDDRVFFQVFFQFEAAWDSSLHNSPLLNRVSGYGENVYMTISAYMEIENCAQAYMEIENCAQSAIITKDLGLIVYARDSKISAASRFCRSLIGGISKSAEMNRVPGVYLLTVMEDSDPGTARRKRRILDTSSTYVRGEENLGVRGEENLGTWRPRGDSIILEHQLELEKLPRGDSIILEHQLELEKLSKLQQVERMRLFLMATHRATHRWEKSKNKYLIIIFKISPCLPKFPIPNSVKMSEKERKLATKVLELIRLKIPVNKDPPTGKKVGNKCKWKNTYSISSDFSRRDDSNTFIHNKRQKSKENDELI

SEQ ID NO: 121078 - protein, 382 aa, Heterodera glycines
MHVDFDPLQVDWSTFSSEYVQFGGYNIYRGLPYQRGAGVGAVFRSLMRYLLPIGKQIGSAIGRQGMESGNRVLTNVLEGKDLKDSLVIPPTNVYVVRSFFRQVLPLATITQESPYLFRLYSDNLWTDLSRIYLYLELYIEKPGANDKWVAIEDADTSVSAIQGIGQTFVQQLKVTVGNTEVYDSGNLYPFKAYITNELSFPINAKKNFLGSTGYYHTLNQDDSTDEGFKERCKIFKSGKNAQFLSRLDFDLGNQELYLLNNLDLLFTIYKAKDVFLLQTLKANDATKYRLAVHDVKIYAKMVEVQPSLNMSLYKTLEKQPATYAVRKTEIKSSFISVGRYEFEYNVFSATIPRRVITALVGNSAFHGDYKLSPFMFEPFDLR

SEQ ID NO: 121079 - protein, 333 aa, Heterodera glycines
MTCPQKISDSSPLAINSGLNIFSVPPTNVSVVRSFFRQVLPLATITQESPYLFRLYSDNLWTDLSRIYLYLELSIEKPGANDKWVAIEDADTSVSAIQGIGQTFVQQLKVTVGNTEVYDSGNLYPFKAYITNELSFPINAKKNFLGSTGYYHTLNQDDSTDEGFKERCKIFKGGKNAQFLSRLDFDLGNQELYLLNNLDLLFTIYKAKDVFLLQTLKANDATKYRLAVHDVKIYAKMVEVQPSLNMSLYKTLEKQPATYAVRKTEIKSSFISVGRYEFEYNVFSATIPRRVITALVGNSAFHVGGVEMIVMGEFDQMIMVDYNRHIVTDSKLG

SEQ ID NO: 121080 - protein, 337 aa, Heterodera glycines
YCKRALVFLYLAFNFNAIPFSFLQLSLCSLQADVPSCSTAAVSDEADRDELLYRPGYLCAETEVKYVKMARAFRTFSLDHHQTLTTLEKATRQAICADDALLRCIRETYKTSFPAETYKTSFPAQMGNDEHLTSDSSFMSADDVKKFGKGIKTYGKAFNKINRDLLPHHRREQLVAFYYLWKKSRDATRPKPLSNAMKRNQAALIAAGTAAARRITLDDLMDYESASEIEAEQMESAGRACHHCFGIKSKDWHHVGHERLLSKDWHHVGHERLLMCTDCRLFYKKYGQLRPVDRPRTVPPCLLSRTVPPCLLSNTPARTTTTSPTTTRNRRHKHCPS

SEQ ID NO: 121081 - protein, 166 aa, Heterodera glycines
TTMSSMECYRCHETGHIGRDCPNSGGGGPLGGDSVCYNCNEPGHFLGGDSVCYNCNEPGHFSRECPQGRGGGGGGSRGGGGDIVCYNCNESGHFSRDCTQPRGGGGGGSRGGGDSVCFNCNKGDSVCFNCNKPGHFSRECPNGRSGGGGGGSVCYLHKGHFSRVPG

SEQ ID NO: 121082 - protein, 411 aa, Heterodera glycines
RTVDGTRAIIDLFWDEPKEWNGDQLGYTVNCTIDVAKYVLYNISEFKPLIRLFAIDSTDNLVAIQNWTIESVNRKRRQIAHTVKNRKRRQIAHTVKIQYQAMTYVGGELYAIRKEPEMSQLALVKLDINQVDTVIFKASLLGEASLLGEFSQIDAMAADWVANRLLLVSKRELMTVNLQDSPSTVLLKKLFQLSLGAQDAKQLVFDPFTNTAYLLTKNGSLFSLDLNKGIESNLELTTGCLRQKTITSITITSIVGEFIWNKATSPQLYALTWNGLIELKLNSDNNCPDINVNWSLFGESGLKAISLFTVADKVLVFATPTDLLVYDRQAAAVSQFPSPSPPIRQLLAVSQSSQPFPDRYCFQLPPTNQINFNVKNEGINAIYQENASVSATIIQECSPQKQKSVVWCLRR

SEQ ID NO: 121083 - protein, 156 aa, Heterodera glycines
PESASNSDWARWFYYLGRIEALKGTDAETYKAAEVALRKAPQNGAVGFKQEVNKVNKWVVLVKLLIGEIPERSLFHTAELRHVLAPYLLLTQTVRLGDVAGFDQTKREHGPIFVKDRTAALVERIHQSVIRTAIRKISTTYSRIYVSDVATKLNVD

SEQ ID NO: 121084 - protein, 438 aa, Heterodera glycines
MAFHKIDNDSVNSITNALDFFRIPPTNVSVSSSKVFELLPSNPLTDTPYHFKLHSSQNYIDLSKCYLLSEFRIRKENANGQLVDLAADEVAPIQLIGHTFIRNIKMSINGREVFNANSLMAYKSYFSHELSYSTAAKDSHLNAAGYYRDTGGVLEVGDGCTARRNLFVGSRTAQFIAKIDADLFNQPLYLINFCELDIEILPNDNDFVLITPPGVAAATRYHFEVVGLKMYVKKVSLMDGLALDIARKLELKPARYAVRKTLMKSLFISHGRFEFTSNLFMDQIPRRITMGLVANADYVGTVSRSPFNFQPFNVREISIIANGRSYPQAAYDLDYPNGKYVRPFNDMNEAVGFANSSESNGITLAQFGTTHCIYVFNLTSSGDDQAALFDLIKNGTTAVSIKFNQAVPAGGIMLVVMGECDSLVMLDKNRSISTDITI

SEQ ID NO: 121085 - protein, 373 aa, Heterodera glycines
VKDKQTGACFRADHLVKNQVETLIRDKKTDEKAKSELMNVLVMLDGMSCDDLHEVIKKFNFKSPLTGGDLSEPVSFNLMFPTEIGPTCDQRAFLRPETAQGIFINFKRLLEFNQGRLPFAAAQVGSGFRNEISPRQGLIRVREFTMCEIEHFVDPTDKRHPKFEKIAHLELTLFPACNQMESKNPQKISIGNAVKLGIVNNETLGYYMARTHLFLLSVGISPDKLRFRQHLSNEMAHYAQVVNHIVSFICPCFLKDCWDAECFTSYGWIECVGNADRACYDLHQHQKASGVKLVAEKKLGAPKQIEVVEAVPNKQLLGKEFKSDSKQVHISIQFKGSKYRLSLREGKTFELNSSMVEVKRFEKTVHVEEVTPS

SEQ ID NO: 121086 - protein, 225 aa, Heterodera glycines
MTFSASGLTDRGANEITFMMESQQTNLVQYYDQKYNRRLRYPRLQCVIHRRGSQESFFPMEVLQIIDGQRVSLDKQTPKLTEQMIRKCQVLPIDLPRGIETQRDKGMIQNANPFFRAHEVRVETNMMQAEAQHLYPPALDSNLALIVGLSFLVLDFRLADRGQPLPRRYSLPCEFPKVWAVVIVQSAVRKDQCRQFCESLVRCAQARGVQMGMPPRVDHFEDTSL

SEQ ID NO: 121087 - protein, 437 aa, Heterodera glycines
RAAKGIHWRRLEENFLSSHQVLEKLWTPNSCFINSKVAQIHNSPFQNIFLMLYPNGTIWVNYFQNIFLMLYPNGTIWVNYRVRVKGPCRVRVKGPCAMDLTNFPMDIQMCHLIYESFNYTNFPMDIQMCHLIYESFNYNNQEVRMRWNSLNPTPVYPINTILLPDFNLVNIQAYLVVEPYPAGMWPYPAGMWDELHVKLDELHVKLSFERRYVWYFMQAYVPTYLTIFISWVSFSLGSKAIPARTMLGWVSFSLGSKAIPARTMLGVNALLAMIFQFGNIMRAMIFQFGNIMRNLPRVSYVKAIDVWMLGAMFFIFCSLLELLLELAIVGFKVRKCPRRTRNKRTPPAGLIKCKKRWEEKAENREQRKAGLAFQFAQINFVFQKVSRIAFPTMFALFNIVYWSYYGRKAAETIVYWSYYGRKAAETSAELHSSGGMM

SEQ ID NO: 121088 - protein, 113 aa, Heterodera glycines
MDRALLELQLGQEKLFQTFQRIVENINVIIATYEDDDGPMGPIQVDPSIGNVGFGSGLHGWAFTKQFAEMSCVCWQSRHWDESAYPRAELCGRQEGGPLREDHPTVYNNTFPT

SEQ ID NO: 121089 - protein, 315 aa, Heterodera glycines
MAAPLDIVRHMRQDLITNGLVNALATGNWTIRRFKMERHGVTQVLSRLSYISVLGMMTRINSTFEKTRKVSGPRSLQSSQWGMICPADTPEGESCGLVKNLSLLSHITTDSDEAPILQLLYNFGVQDVRPLKFSVVHERRYHIVFLNGSIVGITDDVEKIIGTVRLMRRRGHLGAFVSVSFNTSTNALYLASDGGRLCRPYVIVENGRPCLTQSQIQEVRDGQKTFDHLLAEGCIEFLDVNELNSTRIAVYEHQILPQTTHLEIEPFSLLGVVSGLIPYPHHNQSPRNTYQCAMGKQAMGTIGYNQQKRIDSVHL

SEQ ID NO: 121090 - protein, 336 aa, Heterodera glycines
MSAQRIASNSEWKKTPLGQTGLFNMGNTCFMNATLQPLFHTPGFSQLFQEKSAQRFVNGNNSFGTNGMISGSFSALIDLIWSGKFNALRPTTFLEFFARRVNTEMADRRQHDAQEFQLYLLDALHEDTNRVNKRQSFEQNYDDTDLGASASDFNERSKLFSSSPVNDLFNLTNISMVQCSTCNTTSVRFEVVNQLSLELPTNTDDLTLKDCLEAHFSSASLEDKWDCPKCKSKQPATRSTKIWEIPKVLIVHLKRFSLNDGHYVKNNVEVTFDVAELDLAPFLHEKSPHHNTALSLYGITSKHAFLLYYKRMNSKAERDNNANANPSVLSDEENNG

SEQ ID NO: 121091 - protein, 346 aa, Heterodera glycines
MASIACLNPKAELARHAAALEMNISGAKGLQEVMKTNLGPKGTLKMLVSGSGDLKVTKDGNVLLHEMQIQHPTASLIAKACTAQNDVTGDGTTSTVLLIGELLKQAENYVSEGVHPHLVTEGFQLAHDHLLQLLAASKKTLPIDRPLLIEVARTTLRTKLDQKLADHVTECVVDAVLAIRRDENDTEPDLHMIEIQQMEHEMETDTQLIRGLVLDHGGRHPDMPKSVRNVHILTCNVSLEFEKTEVNSGLFYKTAAERERLLQAEREYITRRVLKIVELKETVCAGGDQGFVVINQKGEDKYTFVEECKSPKSVTLLLKGPNRHSIMQLKDAIYDGQRAVANALKD

SEQ ID NO: 121092 - protein, 346 aa, Heterodera glycines
FIDFQKAFDSVPYELLLYKLEKIGIKGKLLMWIKGFLSNRTFRVKIGDTLSSSKVTSGVPQGSVLGPLLFLIYINDLPDALPSGVKIKLYADDVKLYISDTEIMHKALHNLFEWANNWQIKVSIQKTFVLYLGSKNPKETYKFDGNTINAVNAIRDLGINIDNKLQFSDHVNQITRNAYLRMRSLFIIKSKSSKIWITLYKTYIRHLLEYAPEVNPSLQKNIIKIEKCKKFTKRVFKCSLPPIPYQNRLEYLQLPTLENRRKLFDLFMAHKIAYGRTDLKLFSIFTQRALTSPFTDLTQNINWAKNSFPLLGGTKLWNQLDKELIKTNSLNQFKIKLKSLGSVRPG

SEQ ID NO: 121093 - protein, 107 aa, Heterodera glycines
MSDRRKVLLKIILLGEAGVGKSSLMNQYVNRQFVSAYKATVGCDFLTKTITVDGTEVKMQIWDTCGQERFQSLGNAFYRGSDACILVFDVTNATSWGAESWLDEFLV

SEQ ID NO: 121094 - protein, 266 aa, Heterodera glycines
MSELDQLRQEAEQLKSQIREARKQANDTTLASVAANLEPNGRIQLRNRRTLRGHLAKIYAMHWASDSRNLVSASQDGKLIVWDSYTTNKVHAIPLRSSWVMTCAYAPSGSFVACGGLDNICSIYSLKTREGNVRVSRELPGHTGYLSCCRFLDDNQIVTSSGDMTCALWDIETGQQVTAFTGHTGDVMSLSLSPDMRTFISGACDASAKLWDIREGMCKQTFPGHESDINAVSLDSPLFQTTSFSAQETNTRAAFVAQKAKEMCHD

SEQ ID NO: 121095 - protein, 128 aa, Heterodera glycines
QSAAQLDGLDRLVNKEPSGKRHTSKYRFEQLRHDYNALEMAINSLQNRLTTKWRTAAEREELLTMRFKPNETHLDFEGTELLVNDRLKQSHNAVDDLIAHGNSVLTSLRHQHLRLKDVKRKMLDIGQV

SEQ ID NO: 121096 - protein, 77 aa, Heterodera glycines
ELLYQEGHSKSVFDLDFHADGSLMLTGGLDCYGRVWDLRTGRCIMFLEGHQKGIHTVCWHQNGFLMVTGSADNTCKV

SEQ ID NO: 121097 - protein, 105 aa, Heterodera glycines
VGRAGGGYSSGFYRLEFVFDCDVSCFVQIHFCAREQIDEQQPQLLQIVSRQPQFEHSERFHFPVGANQHFSHFTFKPHRYDMKMMHWDGGPVFPVVIEIRSVSDQ

SEQ ID NO: 121098 - protein, 386 aa, Heterodera glycines
MNSTEFLWHDKETTHVVGSHMLRSFHWIRTCDPPTSVSQSSGLNSPTFQSMGLNLSSIPITGTQFYSILHHSHSRDSISPAFQSLGPILHYSKNWNSISRILRHRNHRDSILLHSNHWDSNLRHSNHWDLTSPGPSASQSSGLNSATFQSPGLNSTQFSIIPITGTQLTCIPIAGTQLTSIPIAGTQFSGIPITGTQFSGIPINGTQLSGIPINGTQLSGIPITGTQSFTIPNNELNFMDSSTCQSPGLNSDLTTLQPYLDAVRRSLEAALCLQQFGSQVEVRTSKELLLTPVMVCRNKQEAVLIEPSINSVRMSIRVKQADEIEKILCNKFTRFMCQRADNFIILRRKPMPGFDISFLITATHTQVMYKHKLIDFLIHFMQEIDK

SEQ ID NO: 121099 - protein, 169 aa, Heterodera glycines; identical to SEQ ID NO: 119536

SEQ ID NO: 121100 - protein, 351 aa, Heterodera glycines
MEERIVLKKNIWLILEGKSLLVCNKFHEDSCSECCIEENNLLPDNNSEFQSNYSINELPAGYLLKGDLIINQLPTPPDGGFGWVIVAAAFVCNFVVDGVSNSFGSFMSAYQAAFHTTKAATSVIGSLLIGVYLLAGIGFSFIYLPAIVIVSQYFESKRALATGISVAGSGFGTFLIPLILKFFLEAFGWQMALYVTALLTLSCAFCGILFRPLPMPTFDLEKQNKLNEELKQQALIAALQQVESESNVSEEEEEANNGGISPPRRSGATRTSSECTDGQPLLMANGVELGAVGEHAEEANEADSSPITPHNRPPLSPILERVVRRLSKKRGGSQHHNPHHQQQQQQQQQSG

SEQ ID NO: 121101 - protein, 371 aa, Heterodera glycines
GKADSNKLKKEFSKSTEEEFENSGRISHLSNNTCNHVSRCIIGSGIFLSPTGVQKDAGSIGLSLLIWLFCGLAGSIGLSLLIWLFCGLFVGLGSYCYAELGTLIKKSGGDYAYIMEAFGPFLAFVRLWVEAFVVRPCTCTIVALTFAKPCTCTIVALTFAKYILHPFFSNCKTPDGSAQIIAAALIIFLTALNCLSVKLATFIQDFLTALNCLSVKLATFIQDTFTLAKIFALIFIIITGFYLLIQGDPQYRVNFRNVFENSETNVGKVLIQGDPQYRVNFRNVFENSETNVGKVSIAFYSGLFAYQGWNYLNFIVEELQNPKRNLPLAILISTVSVTVIYVNLPLAILISTVSVTVIYVLTNIALYVVIS

SEQ ID NO: 121102 - protein, 283 aa, Heterodera glycines
RHPQLLYESKVSFLLQGGVGIPHIRYYGIERDYHCLVMDLLGPSLEDLFNFCCRRFTMKTVLMLADQMIGRIEYMHVKNFIHRDIKPDNFLMGIGRHCPDNFLMGIGRHCNKLFIIDFGLAKKYRDSRTRIHIPYRDNKNLTGTARYASINAHMGIEQSRRDDMESLGYVLMYFNRGNLPWQGLKWQGLKAANKKQKYEKISEKKMSTPVEMLCKGFPSEFSMYLNYCRGLRFDEAPDYMYLRQLFHYDIRTAKQKRTIGRYFHKPSKFAKHNSYSKKSAHQK

SEQ ID NO: 121103 - protein, 71 aa, Heterodera glycines
MAAVVTNNSKTINSQFFISENDYKNVLRHSLKISLKEFIVGVKYKLKRKIGSGSFGDIYLAINIQNGEEVA

SEQ ID NO: 121104 - protein, 447 aa, Heterodera glycines
MFISADARGLFSYAFVDLGDEFVVNDSDGETCKEVLVEYIDCESGDMMTLEGAFHQLEDGDHVVFTDFEHAELNELPPVPVTLKGSNVFNIGNALAAFSGAVQGPVSRGRVQQVKVPKKMSFKPLSLALAEPDFMIWDFAKFDEPAQLHALWQALYSFEATVRHSGHFPFVWVFLSEKLQPFAPFRCRRKIVKGNAAKRCARNAGLTALQLLLPGPFCAFFNFEFLPRLKACGNLQPIASLIGGLVAQEAMKAVTHHTTPLKQFLYTDSLEALPGADSTFDAAKLEKNDCAPRNNRYDGQAAVFGWAFQEALQQQKWFIVGAGAIGCELLKNMVSHLLPIVIKKKKSEVAARSVKAFNSTIHINPMSEIVAESTEHIFGDDFFARLNGVSNALDNVEALVGKVPFKKFTDYFTSVAETVNQYLDNIEVLSTLERALVVEYPKNAEEC

SEQ ID NO: 121105 - protein, 681 aa, Heterodera glycines
ARVDRDQKLHSSTHRPEHSSSLAPNRQIKVGLDSARWRRQLTNLDPAYGFSGYFQPVSLKINYFQPVSLKINGTGGISPLEIFLISFFLLTFLALSTTIVIYFMHVNFVSNLNSWRGIIKQFCPSKNGSHDLLRPGIPPAPIRSDDLPAEYILKHRDSDYQFAQEFEALFWINLDHTISERKENARKNRYNNLDHTISERKENARKNRYNDIKACDATRVRLRRVPGDPNSSDYINANFIKGYKGKKCFIATQGGYKGKKCFIATQGPLECTIGDFWRMIWEQGSRMIIECTIGDFWRMIWEQGSRMIIMVTNLRERGREQCVKYWPDDDEPPLMVTNLRERGREQCVKYWPDDDEPPLVFRTLEVASFSIHSKSSHEVDCLNIGALLVFIRPFNDGGTIRNMPTLRAFGPKKRRVLQFHFTSWNDYKAPECTVALLKVMYKLRKMDEYNHSPVVVHCRFAFDYDSLCLGVSLSAGVGRTGTLVAIDFVMDQMLDCLGVSLSAGVGRTGTLVAIDFVMDQMLDTGIADVYNCVADMRQQRNLMVQSVEQYVFIYKALAEFQLFGDEQYVFIYKALAEFQLFGDTDLTIAAFRRHFGRLRQPLQTLRERHLSLGCVSSRSSSVQLGESSTLARGQSVSLNEKGKDLSITLEKPKSTEWAHKEENLVLNRLFEAVPYNFNRVV

SEQ ID NO: 121106 - protein, 179 aa, Heterodera glycines
MSEKKSEGCAEKKSGGFNTQKFMLDLASGGTAAAASKDRTTDRKRKSAEETETALEANYPSAQLVAEKRAKMEADIRRVAVPPHRYQNLKRQWAKVTAPIVNELKLQIRFNLRTRCVEIRCPDEKAAGITKRISSSIEIIGSLMFQIFVHAFLLGFEVDDAIALIRLDHLFLESFEVND

SEQ ID NO: 121107 - protein, 56 aa, Heterodera glycines
MVHENIHWSRPRKFGPGSRSCRVCFNHHGLIRKYSLNVCRRCFREYASDIGFKKLD

SEQ ID NO: 121108 - protein, 186 aa, Heterodera glycines
MEVNEHASTLSQQQCISSLKRKLKRKLEDGQELDQYDCKFGIRLDPEGDVVMMSDESEISSLNEADVTDLRERYENTQRQEVPKEVMVQREMQIRELESILRLEEAKLMMLKKLQQSQQKAAQKTQQQQNQQQQQQQENVRRLAPGVVQNSTGQAYKPKVAVVNPSQHQTGNTSKTNGTTPQHGKK

SEQ ID NO: 121109 - protein, 351 aa, Heterodera glycines
DAQGRIATFDAVELRLPQNEQKHIGVELTKRREKFKQQHKARFGSHRSLFPHTFLIFFVPNKHVNLLLFVKVPNKHVNLLLFVKLRQKRKKKLKNLKKKKGERKDKGEDAVPKQVPRTIENTQEADDTFVGSDDEEVLEDMDNDAMAHFFEGSANPVLEDMDNDAMAHFFEGSANPKVLITTSPRAKLKTFKLCFELKKVIPKTFKLCFELKKVIPNAEIVSRKNVAIKRVVRQAIERGFSDLMVVHEDRKKPNGIVFCHLPGIVFCHLPNGPTAFFKINSLQYSKQIKQDVGEATQDVGEATEHYPELILTNFNTRLAKTVSRMFACLFPQKADYGGRRVVTFHQRDYVF

SEQ ID NO: 121110 - protein, 269 aa, Heterodera glycines
MAAENALAEMCRYLFASIQTFEQDIRPGLKELMKFLIALCNPHDDTNKSSMILMGLHLLTVAFETGDDFLRTTASLHALLKDELSHTLLQLLSTQKLPIFAAANRVCFLLLQTLRPQLKFQMESYFLKLGQLISTEQLAESVSISSAGSPLAAKAAVCYELRELALEALVDMWRLPGLVAELYLNYDCSLYCSNLFEDLIRTLLYNAFPNGPLLFSTHILSLDTVLAVVELIETNCAAKQLKGFTGKGQIGIEEEGEKRCGCGKRPAPI

SEQ ID NO: 121111 - protein, 216 aa, Heterodera glycines
MFVLSILKHTVKIEPTALGRDFTEALVERLNRQFANYVIPNVGLCITVIPNVGLCITFYDFKKYGASYILPGDASTHTPVLFPGDASTHTPVLFRYVVFQPMINEILEGNILRSNQEGITISMQFFSDITVAPDKLPAISKFFSDESVQVWRWEYQNFSDESVQVWRWEYQNENGDITLYMDPGKRVRFVILRPQFVGGRPSAPRAEEVGGPGARA

SEQ ID NO: 121112 - protein, 102 aa, Heterodera glycines
MFKFRAVLSNLSLCCSSSLLQIQRHFVTASILRKYPSSTKQFANAHRCISRTRSLFMFIQVQETPNPLSLKFLPGQKVLSEPGRTYEFTSARDAAKSSPLGR

SEQ ID NO: 121113 - protein, 441 aa, Heterodera glycines
MTFHKIDASSIDSITNAVDFFSIPPTNVTVSSSKVFEILPSNPLTDTPYHFKIHSSQNYIDLSKCYLLTEFRIRKLTPPNGEWGHLDASDQVVPIQLIGHTFMRDLKIAINGREIFNSNSLMAYKTYLSHELSQSLEAKVSHLTAAGYDREDASNLQNANSEGFKSRRQRYLGGRTAQYIAKIDADLFNVPQYLINHCEIDITIQPHDDNFLLIDTLDPPGQPYSIELVGLKLYCKKVSLMDGLALELAKKLEMKPARYAVRKTMMKALFISPGRYEFNANLFMDQVPRRVTMGLVANSDYVGNTKRSPFNFQHFNVRELSVVANGRSYPQAPYDIDYENWKFVRPYNDMQEALGFANSTYGNGIDYFSFLHTHCIYVFNMTNSGDDHGGLFDLIKKGCTAVNIKFKKPVPDGGITLIVMGEADSIYFLDKNRTIATDTTI

SEQ ID NO: 121114 - protein, 96 aa, Heterodera glycines
MASSIRLAGGALRELRIHLCQTTAASNGVREFIQKDYVDLKQNNRDFPILVRECSGITPRIWARYEHGVETSVSVENQPRQKIMEVIKEMATKKID

SEQ ID NO: 121115 - protein, 291 aa, Heterodera glycines
MSENKSEGGAEKKKSGGFNTKKFLLDLASGGTAAAVSKTAVAPIERVKLLLQVQDASIHITADKRYKGIIDVLVRVPKEQGFLSLWRGNLANVIRYFPTQALNFAFKDTYKRVFTQGVDKEKQFLKFFAMNLASGGAAGATSLCFVYPLDFARTRLAADVGKADAREFKGLADCIMKILKSDGPIGLYRGFFVSVQGIIIYRAAYFGCFDTAKMLFSPEGKQMNFFVNWAIAQVVTVSSGVLSYPWDTVRRRMMMQSGRKDIMYKNTLDCAIKIIKNEGLLKGMFKGALSN

SEQ ID NO: 121116 - protein, 237 aa, Heterodera glycines
MYLGFFNSCELLLHLLQLARLSLFSKVPQAPDDTVQAMKFNPLVAGSPIFLAAGSWDNTCRIWQVNENGMVEPKAMQNVGAPILSLDWSEVDGSKIFIAGADKQAFAWDLGSNQMAVVGTHNEPVRSCHWIATPQYSVLACLMTGSWDRTLRFWDMRQLPTQNSLATIQLPERVYCSDMVFPLMVVALADRHIKMYKLDGTPTSGDSMFAAKGPEGQFHFQMPSVSRTHQQLPGDLP

SEQ ID NO: 121117 - protein, 169 aa, Heterodera glycines
MDKPGLVGSVLFHALFFGFGDLESNVLNYLSVPLREFFADSLQRHYAIEPDSEQFELAYSAIASSFFVGAIIASLMMAWCMDRYGRKGTAVYIRSSLGIIAALAMLMAKWLGMAELFVLGHLLAGAISALKTVVFIYVAECAPDQARVRLGIIRFETARVLDDFLNSRI

SEQ ID NO: 121118 - protein, 143 aa, Heterodera glycines
MEEWEKTYKPKFFYGKAPVLEVDGKPLAQSSAILRYLAEKFDLAGKDEWEKAKANEIIDFLKDATTDLLPYLMVKMGRQEGDLYRTINTVTIAGFQQVANFLYMFTKLEPDTINAYPELIKYVDRVHALPQLQKYLKQRPQDR

SEQ ID NO: 121119 - protein, 148 aa, Heterodera glycines
FDVFEDQIREAFLVFGPIKTINMSIDPSTNHHKGFCFIEFELPEAAFIARDTMNGRMFGGRNIKVNDKHVYVGRQDTMPQAQPIIDMVMSEARQYNRVYVSSVHPDISEQDLRSVFSAFGDVTKCQLARQPSGRGHRMIGYNYFQSLI

SEQ ID NO: 121120 - protein, 52 aa, Heterodera glycines
YNLDLVELSGQMKHGLALYKEKQSHIVATMMGTRSTDPIGKYMKSNIQWTDG

SEQ ID NO: 121121 - protein, 372 aa, Heterodera glycines
LKVGGRGRDGRELAKVNLTDIFDHHMNISVKIDQIISVPLRRCLHMIRLRFPPCRFPDLNLKPVFPPPLAAPTKPTTASTDNSLALPVGVPCEVYVSAHVDAGHFFVQLPTHPSFSSLALLDSYMLSVYTQPGGAPDLPKPCNIGVLCAAPAYNGWFRAITGVLCAAPAYNGWFRAITLAYDQDQDEMLVRFVDYGGFADQDEMLVRFVDYGGFARLPRADLRQIRTDFVTLPLQGITDFVTLPLQGIECYLANVQPADGSLHWSDGSLHWSDKANELFQQLCVSKIIQAALVGYCKTDGIPCVELFVMDSANKKFQTVRIDQILLERGLAKQMDPTLIVRTPMLVKGTSETSTTTTKPTSGRQLKFTKVIC

SEQ ID NO: 121122 - protein, 360 aa, Heterodera glycines
VPSDKGNRLIFVRLMVQRITQSLAGLSLPSFLNKPPKSLKGKSKAFLLRSSINLVCVIFSRKINKRKPCNCTKSMCLKLYCDCFSNGEFCLDCNCKDCHNNLEHDAERSRAIKQSLERNPSAFKPKIGHPSNSSIDMERLHQRGCHCKRIDMERLHQRGCHCKRSNCLKNYCECYEAKVPCTDRCKCQSCRNTEHDRHNKFKDKFTTTAGGLAQLAAAAAAESHARAGTPLSEDDTSDICVGEDETTRQANPKTANRMFPWFYMTEDVIEATTMCLVPWFYMTEDVIEATTMCLVSQAQELVNEKQKMSIQEQSLSEEALEKSVLREFGRCLEQIIESANSCLPQKSNGAPQHFHLTPIE

SEQ ID NO: 121123 - protein, 76 aa, Heterodera glycines
MARGHQKALSQQKNQQKQQQQKKGQGNDQRAAAAKALTFKCSVCMSLMPDPKTYKQHFESKHPKNELPPELVGVEA

SEQ ID NO: 121124 - protein, 67 aa, Heterodera glycines
VRLAKFDDAKKIALIKEVRSVIPGMNLVQTKKLIESAPVEIKGDMGKTEADELKALLEKHGAECEVI

SEQ ID NO: 121125 - protein, 102 aa, Heterodera glycines
MGGTEANGGNSEGEEGGEEARECGEEKETADGKEQREEKEKAKGLQKLKWFCQMCQKQCRDQNGFKCHMMSESHQRQLLLFAENQNSYLRQFSREFEANFMH

SEQ ID NO: 121126 - protein, 119 aa, Heterodera glycines
MESNARGCEIVVSGKLRGQRAKAMKFVDGVMIHSGNPVTEYIQEAVRHVQMRQATHKQIPLNIFRCSSRSKRYFIRVAKSNTNSGPKFASISSPDSSKVTNGKRNAQSADREIENAVES

SEQ ID NO: 121127 - protein, 258 aa, Heterodera glycines
MCRGGRMFAPTKVYRRWHRRVNVAQRRYAIVSAIAASAVPALVQARGHVIDQLNEIPLVISDKIESFTKTKEAVYKSKRFRAGKGKRRNRRYKQKLGPLVIYNNDGGIVRAFRNVPGVTLLSVSHLNLLKIAPGGHLGRLVVWTESAFRQLDPLFGTWTRQSNVKKGFTLPRAKMTNSDFARIIRSEEITKVLRPTMARKVRRVAKIHGNPLKKPSLMAKLNPYAAVLRRAAVLASSKVKKAEANESEGKQKQPKQQK

SEQ ID NO: 121128 - protein, 385 aa, Heterodera glycines
TGFLSSFSITFLKLNKIFEILQINNKHIDYTYIDNSKAFDSVPIELLLQKLKNIGINGKIHKFIENFLNDRSFRVKISERINSKNIYSGVPQGSVLGPLLFLIFINDPPEQLPKNVGIKMFADDIKIYIEHKNDISSALEAINKWSKNNGIKISIEKTMVLYFGENNTKFIYFLDGEPLPETKCVRDLGILIDQKLSFSNHINKILKNSYFSCFQLLRALKTRKLETLILAYKSYIRPVLEYATEIWNPLKKENVHKIEAVQKFFTRKAFNKCGLVPMPYEKRLMFCGIKTLEIRRKINDITTTFKIIKKHTHLKPSNFFAVAKRAIRKPFLLQNRIYITKTKNNFFNRVINSWNLLPKNIMEINDPKKFSCRRNNAIMHIFPIE

SEQ ID NO: 121129 - protein, 552 aa, Heterodera glycines
MGQIPFPITVSDINEKYCIFTTELKKRFDKNVPMKLLKLKIKYKILCREYKKHIHKLYCENEAKFISNGRNTLIDERGQIIFRNKQKCTLIDERGQIIFRNKQKCILLADVFQKSFLYKENNNDLLSHENPNQITDIEFNVYNIWNLLKKLPRRNSTSPDGIPYILLKECALPLAPILTELFRIILDSSKIPEIWKTSICRVMEKIIKLEILKFLNKNQFFSPFQFGFRRQRSTTTQLLSTLNDFYISIENKSCVDVIYIDISKAFDSVPIELLLQKLKNIGINGKIHKFIKNFLNNRSFRVKISEQYSNSKNIYSGVPQGSVLGPLLFLIFINDLPNNLPKNVGIKMFADDIKIYIEHKNDKNRENLSSALEAINKWSKNNGLKISIEKTMVLYLGENNTKFIYFLDGEPLPETKCVRDLGILIDQKLSFSNHINKILKNSYFSCYQLLRALKTRRLETLILAYKSYIRPQLEYATEIWNPLKKENVHKIEAVQKFFTRKAFKKCGLVARMKKDKFCGIKTLEIRRKINDITTTFKIIKKHTHLKPSNFFE

SEQ ID NO: 121130 - protein, 276 aa, Heterodera glycines
MISNCRHCSRDWLGFSVLSGELYLREVPDQLFGRQRAEFRAHLTALDGHWADAVVVVDLNLPPKSGSVGTGAGVGGGDESVPKAATIGHKKHHQQQLATPSGIEIAESSDQASRTVAPTETKIGSLKPAAAASSPRSTPVTSSRSTFATRRKTATTVSPTTVSTSSQQPNRFSSTMSTRATTTVANVFSSTPPSTTSSSTTSRTAASADHSSNAKSTNISDQSSSVDQSDQSSSSSSRSRAPVVGVDQQQQQNEVHFASDQYRAMLPEAIKFKFFD

SEQ ID NO: 121131 - protein, 143 aa, Heterodera glycines
MINYMLLFSRQGKLRLQKWYVAYPDKAKKKITRELVTTILSRKPKMCAFLEYKDTKVVYKRYASLYFCCAIEQTDNELLCLEVIHRYVELLDRYFGSVCELDIIFNFEKAYFILDEFLLAGEIQETSKKQVLKAISAQDLLQD

SEQ ID NO: 121132 - protein, 176 aa, Heterodera glycines
MVEVFRKVIKFIYGPVPVLEVDGKQLAQPAAIMQYLAEKFELAGQNAWETAKALEITCYVNDIITELVPYLGATIGFLPGDEAALRSDVFLRCVKKAFPLLIAQLDQSKSGFMLPSGLSYADFVVSCAFEMLCQLDAAADFLPNEYPSLAKLTERVKALPQLQKYFSTGKNQKHKM

SEQ ID NO: 121133 - protein, 589 aa, Heterodera glycines
MISNMSAPAPASLSVSDNVTPNSQQHHQFTETSVPNSSIKIETISSSPTTQNITSCTNNGTKSSVVLSPSASVNVTVCAATSSNDDNILQQNTTEHIATGETIVNNGRIEPLPQLHQRNTGRTFFRAPGLEAPDENSGDFPTNALVCPDCGFSCSSKFHYNSHRNTHSTHQCPICKFETRTEGRLKKHMLQSHKREQRLAAGINIQSPPPTPTTLKQNSPPSNGDLSGDKCLSQKILASQGMPPDGISILNSMLSAGDNSNGTLALESIQSMLTNTNSVAFSNSTDALLKICTDVIANNGPNKKMLNSSPQVGDFGHIPLEQLRALTERHTALLNTSTAGTLNIAELQIGPEASLIGSDAIHQQNAAQNGSDEKQDTPRRSGKPKQYKCKTCQNISRSKEEQWAHARLHIPKQKQLTCELCDFVTEYKHHLEYHYRNHNGQKPFKCSICDYTCVNKSMLNSHMKSHTPVYQFRCQDCTYQTKYCHSLKMHLKKYSHKRAPGPSGFVDSSDSHGEDRPENASSSSIGREDTASFENGAPIGTLQSDGHSEGTELIGALATTIHQHHLNGPPPGDTAEMELTSHRLLLQQQ

SEQ ID NO: 121134 - protein, 334 aa, Heterodera glycines
MNSVLSISILFLLSQVLSTVSSSDVLEYTDASFDSGMQQHDIALAEFYAPWCGHCKKLAPEYEKAATKLKNNDPPIPLIKVDCTAEKETCDKFGVSGFPTLKIFRKGHVSSEYDGPRDAEGIVKYMRGQAGPSSKELKSISDFDKFVDGDDVSVIGLFEGESKLKDSFHKVADTERDRFRFAHSSNPDLLKKTGYTDDIVVFVSKKLHNKFEPNEFHYDGNYDTDKIKNFLLYETNGLAGIRTQGNLFQFTHRPLVVVYYTVDYLKDPKGSNYWRNRVLKVAQDYKRKVHFAVSDKEEFAQEVEQNGLADRKESDKPLVAAITVDGKYPMNKEF

SEQ ID NO: 121135 - protein, 132 aa, Heterodera glycines
LSNSEFRKLHNSFTREHFVELDVVTKAKAEDNFHFITYVPVDGKIYELDGMREAPICLADIEQESWVDTLRPFIQRRIQKLANSKCQNWQKKKQFLLVLRYTEGEIHFNLMALVPNLKTKYEQRVAELSAVL

SEQ ID NO: 121136 - protein, 234 aa, Heterodera glycines
SITKFFKVRELLRKLRLENSRLNRQIGAIQREEEKVKREIKTAAKKGDREVCILLAKSIVNSRKSVSKLHGTSVSKLHGTIAQINSINMNMQHQLATIRMAGTLKQSTEVMKVMQQLLKVPEVMQVMVPEVMQVMRDMSKEMTKMGIIEEIIEETMESTEMGIIEEIIEETMESTEPDNMEELAQEEVDKILWEVTAGELGKAPAAVRDELGEKKRQKEAAIATANAFIAEQMG

SEQ ID NO: 121137 - protein, 432 aa, Heterodera glycines
FGCVARVGEGKGQLKYLIPPILVFDGIIRLCFKLIPPILVFDGIIRLCFKSVGKCLFKLLHPRPEEEGINSLTLAKYGALTKSFLSAVQIFLMEVDSVQVLFLMEVDSVQVLLSTLRVVTDLVDLFLHFPKLCKSLIKVLTHFWSRKTEEIRCIAFVVLTHFWSRKTEEIRCIAFVALCKIARLDSECFPAVYKNCYTANCYTAYVANCKTIDDETLPFIHFMQCSLAELTFVHPSQAYQYAFVCSLAELTFVHPSQAYQYAFVYIRQFAIHLRNAMIAKRKQDLIQTVQDLIQTVYNWQFVKGLQLWVLVICEASSDKSASWFYELVHPLVEVINSLWRLFPSTKFFPLRIHLFPSTKFFPLRIHSIQMLLDIQRESEVFVPIFPFLCQLFPFLCQLLDELAQIDAKRPTAGKGRTREPNAERMLRLSGEH

SEQ ID NO: 121138 - protein, 212 aa, Heterodera glycines
MFDVGGQRDERRKWIQCFNDVTAIIFVCASSSYNLVLWEDNTQNRLRESLALFKNIWNNRWLKSISVILFLNKQDMLAEKIKEGRHRLETYFPDFANYQLPQDERVPPDEDIGVYRAKCYIRGEFLVSPFGANWASYRGGRRDQQGQQPHAHLLPALHLRGGHGEHPPGVQRLSRHHSAHSPETVRVTVALATPTRLPYAAPMGPTVCAATD

SEQ ID NO: 121139 - protein, 184 aa, Heterodera glycines
QHSPPSLSSASYASSTASSCSEQEKKYFCQRCLNHGEEHPRKGHKPFCRYRECQCIECQMVEQRRVLNNALNPRKRRVLNNALNPRKTNGESAKKGANQQGPKPRDPKCARCSAHGEQAALRGHKKALCPFLECACAKCALVEQRRRLMADQIKLRRQQKKARDGNALKKAYEKKPTYPSTISS

SEQ ID NO: 121140 - protein, 69 aa, Heterodera glycines
TARGEKRQRTAYTRNQVLELEKEFHFNKYLSRKRRIEIAHSLILTERQVKIWFQNRSGEQRKEQREKER

SEQ ID NO: 121141 - protein, 87 aa, Heterodera glycines
MKLDEFCEYFGEDFTYLIDADSCDPNCHVQHCLVDTHDLRMPWCAFFTKKLVKAGEELCWDYAYEIGSVERQVNCKCGTTVCRGRLL

SEQ ID NO: 121142 - protein, 257 aa, Heterodera glycines
MAREDYCFDATAAAEQSRPSTTSSTLVHAPTGTTARWEGDGLSSSFVDAIIRKVRQSPVQRFTDEVKYPANFMLLRGNHECANINRVYGFFDEVNRRYQRPGPRRLYDLFNQTFAWMPYVGLIGDKILCMHGGLSDQINSLEQLSHLNRPQIDPPLRTLEIDLLWADPARGVRGVIPNTRGAGIAFGEDVVERVCDMLCLDYIIRAHQVVMDGVEYFAGRRLITLFSAPRYTGRNNTGATLTIAPNLSHSITRFPPA

SEQ ID NO: 121143 - protein, 448 aa, Heterodera glycines
MIISSKAVQLLTCYRNRITRKLQYSTTENVPVNVPEPVISSSNMAQFRKGAGGRSSFSGNVITVGNTGFTGRRVVNRLARHANQLILPYRCDSYFLRELKVPCDLGQVLFFPFQLDDDESIRKAVKYSNVVINMIGTYVDTPYSIYDANVEGAWRIARICREMGVERLIHVSALNADPSYKTQFIKNGAFLKSKGMAEQAVRAEGAFLKSKGMAEQAVRAEFPSATIIRPSVMYGDIDRLIYNLITRWRVDPFGNVYTFNAGEGIYKMPLFVNDFVNDFADGVNRVAMDSSTAGKTYEFVGPHCYEMCELFDFIFIKGGLVADITSRYRRVGIPIWFLFTSFLCHSYTKIYRRPGVINWEWFDFMEATSDVLSAGDTYLLKDLGVSLTDFEDMGGYYAMQISFQRPYQPRMADYPQCPLPLRSPPLYKRNRSLLRSKISLSKGRSDFE

SEQ ID NO: 121144 - protein, 117 aa, Heterodera glycines
NSRKLSLSPYETFHLIPGVSNPPDCTQNQYSFEASKRIGLIGRKIGMTLQWLKDGTRCLCTLIHVPVNHVLSANDPETWYRHSLTGKQKAFRGILTIDQCAPPMWSVSLIKSNCVLP

SEQ ID NO: 121145 - protein, 348 aa, Heterodera glycines
SKRIGLIGRKIGMTLQWLKDGTRCLCTLIHVPVNHVLKDGTRCLCTLIHVPVNHVLSANDPETWYRHSLTGKQKAFNAKLPLNAKLPLFQQMVGVEDYDSPFLTNEYRALFERAGVPCKKFLAGFMVSSDAVVKPGTRMDVRHFKVGQWGQWITASGRTIDWGFQGVMHRWGMKGQMSKGPTKAHRRVGKGPTKAHRRVGAIGTKGEAKVWPGRCLPGHMGYEWRKMVGIKVLRINPIKQVIYVRGNVPGDINEWILLKDCFAKKKRVEEPPFPTFYPTEEDEEEMKCCRDRTICQTLLGVFRQTLLGVFRLELFFQFSQPSVLYTEADETKRTERDRSRAKTAKVKK

SEQ ID NO: 121146 - protein, 273 aa, Heterodera glycines
MDHNYWQAHPNNPLVNRPERNGTTEQNGAMSSCSHPQRASGEPNQLNVVLVDGTEVVVKIHNVLCCYELPMHIDLRQVAYGSINVDYNRAKGVSNILATCRMPFDIRIQELGRKHREALYEPELMVGLQWNLKEPKANLRIHTTGTVTVTGATSEANVVASIRKIYPFLKEFSSQRASVDVVNLDSIDSAWFSDTLRNRRRRRPPQTNRDYALPNDTDNRSRPIPAKRSRYQQIQGSGFYNNAIHNSDEEDLDFAGDYEDDDYEEEREEEDDE

SEQ ID NO: 121147 - protein, 69 aa, Heterodera glycines
LFGIAYHQCRWNYNDQDDLLSVNRAFDEHDIPVDVLWLDIEHTDGKKYFTWDPVKFPNSLEMIQEIESK

SEQ ID NO: 121148 - protein, 250 aa, Heterodera glycines
MSSENLAKLYKNTGKSEDSRRRRTETSVELRKKKCNEEMMKRRNINLECADDSATSAEEVVTDGEIGEPTGRLSPEMLSLEDAVEVLQKEQNAERFRLAFESVRRVLSRSKCPPIDKVITLGFPCALVQALHYDDDKVKFEAAWCITNIVSGTSEQTMTMVNAGAAVWCIANMAGDGVQLRDLLISEGILPLLVGLADRADTLGISFVRILTWAFSNLCRHKKPQVPLQMLAVMAPSISKLIKYEVDISD

SEQ ID NO: 121149 - protein, 181 aa, Heterodera glycines
MEVFFFEPVEYERLYNCSSYNIDQIPLEKRQNLVIGAIFMPISIILELMFYISITDMMCLLMCGIVTGYLAIVGAVFCSAPSFIYIFGAYGFALWATETTAEMFLAINRCVELCSTWLAELLFYGKRIYLWMVFPTVYGLYAFIFTEPILFSGLHITWFLNPHIGYLNDGTIVKKILLFLI

SEQ ID NO: 121150 - protein, 152 aa, Heterodera glycines
MQLIVPILLLLTFVVSLPICHGMNGLPGEKGEPGYPGMPGMKGEKGQTGEPGAPSYPGLPGWPGEKGDPGYPGLPGLPGPIGEPGPNSMKRTQLIFGVCAENCDRTKRQGAENQWAGIAGTISERSAKLEAELSQIKERLSKLEKAEEIPNE

SEQ ID NO: 121151 - protein, 78 aa, Heterodera glycines
MTVRGREQISLDTLSIRGNNIRYIVLPDSLPLDTLLIDDEPRKKPTQRRFGGRGGRGGPRGRGRGRGGPPRGGGGGRR

SEQ ID NO: 121152 - protein, 687 aa, Heterodera glycines
MDIGNSENKCRNWAVRLEEVLNDFDALQCFQSWLGVDDDSTEHPLRLHFAIIAFREMSASGDARSFQLAKEIFTKFLLPRVGLCDFIGASIRERIGQRLKREQADEDLFDECLAPLDTFLRRQHAVFVQSQEFLDFFNEFCFRNQQKPSTSADEQMMPMLSSPLPATIWHQNSIRRSRRRDSAGKAPQPLTADSLLRSQWEREAIIPVGGAGLFKPVSKFPYMGQTNASKKDSAVSSSFSSEANRRGVAAGANVPGGGGTHSMRQLREGQRRANQQQKTHLLSAFPKPDIFLRENSAGMPPNCHETAQGRREFAEKLAQKLRHVELQHQQDESVNRQIDRINSARQRDTKTSTRELIIAGVAADPLLLDATAADDADDDVENYFRRRMMDSSSNNSAQQSPPPLILSARKTRRKSRGSCSPTAADNRTGPPAEQQRHCSQVGDMPLSSAELGTSQPGMSRPGMSQLGMSQPGMSRTGMSQSCYHPSLNQQQHFDLHFAPPQNGVQKGRQFSLALPFSSPTFSVPPLAPCQLRSPFAALPGMPSSSSPRLLPSSHHHNSVPPPPHSSALSQSVHLAGPSAFPAPALPKKSSPVNPTKQMTRQAGTSRRVPLPVYCDNDGDTSGIGSMTTTHSGNSARGDNDRQRAAMFRRARELSSGGRSERSGAHQQQGLTRTARREQPQMADGKPS

SEQ ID NO: 121153 - protein, 308 aa, Heterodera glycines
MTVAMDHQALIDELPEVEKMPAQQRIALARERREQQLRLCQQREGHLPQPAPRRPRLRFSSDIALLETTVRGDAQEGALSYNISIHNSNLVELMLMDGVNPNSHNEDGLTPLHQCAIDNNERIVRLLLRFGADVNAKDTENWTPLHAAACCGYIEIVRLLIKHSADLLAVNADGNMPYDICDDEQTLDLIESEMAGQGITQEMIDERRQLPEREMLSDMKLLHQQGIPLDQRMPDESTYAASWNQPDLIELLCEYGADISAKTRNGETPLDLTEDPQTQLVIRTIAQTEARRKRIGHFGVRDSRRQSR

SEQ ID NO: 121154 - protein, 194 aa, Heterodera glycines
MESGDFEQLIMEQGWLDSADQWNSTILAHWADQSLAELLDKSFSRLQTPKLRWESMKLRFDDATRINARGIKLPPTPSDEAKRCFISLVMKFAYPQLDANVTVGLNHLLKSPFSVHPENGNIAVPLSAKEIRAFDPNVVPRIDKLLAQLASLRESSQENKENQRSIVYRQTSLAPHIAVFEQWTAQILNSEAQN

SEQ ID NO: 121155 - protein, 37 aa, Heterodera glycines; identical to SEQ ID NO: 120099

SEQ ID NO: 121156 - protein, 138 aa, Heterodera glycines
MPGNETIRGHLEKRKDWIRRTRDHQEKSADIKKLKRSARERNPDEFHFHMLRSQIGKIEKLKAVLHFCDETEKPQNKHIIFAEDEEEGKGKREEPKGRKDEQIQHAISTLGNISTLPNNSWHGLSIDQSKATRGKASA

SEQ ID NO: 121157 - protein, 441 aa, Heterodera glycines
MTCPQKISDNSPLAINSGLNIFSVPPTNVSVVRSFFRQVLPLATITQESPYLFRLYSDNLWTDLSRIYLYLELSIEKPGANDKWVAIEDADTSVSAIQGIGQTFVQQLKVTVGNTEVYDSGNLYPFKAYITNELSFPINAKKNFLGSTGYYHTLNQDDLTDEGFKERCKIFKGGKNAQFLSRLDFDLGNQELYLLNNLDLLFTIYKAKDVFLLQTLKANDATKYRLAVHDVKIYAKMVELQPSLNMSLYKTLEKQPATYAVRKTEIKSSFISVGRYEFEYNVFSATIPRRVIIALVGNSAFHGDYKLSPFMFEPFDLREISIHAGGIVYPAVPYKLNFSKDHYVYAFVDMYEALGMANSERSFDISMTQFKKGWAFFVIPLTSTLDDSCGFELLRSGTTNVRATFNSPIPVGGVEMIVMGEFDQMIMVDYNRHIVTDSKLG

SEQ ID NO: 121158 - protein, 191 aa, Heterodera glycines
MPTEDQQQQQQQQRTVPDNNNYPALPLHGHLLLLDQIAHLATHWPNFNRSLTVSPLLSELDVRALLEHFVHVQIGQLDAEIEGIERQLEAEFDEAERGWPIGFVGTAGHQPVPNRFQAPVWQLFNADGTHLFGNDPDRNVERADQALRDELALVIELAKQKAEEANGGGAAGDLLISGGHFKAGRVRQGYR

SEQ ID NO: 121159 - protein, 181 aa, Heterodera glycines
MFFRGLSSRTVSKSYKANDPDRIFQQFFLEEYQLNHLIGSLSRPYVAFIDGITMGGVESAKLQQVQDELLALPSPTKKDIEQLLRSHGPSDVASFVLDPHLELIDECFAAESVETIIERLMRRNDSDFAREQCEILAKMVFPIEYRLTQRFMAANDFHEGCRASTFQQQSIGIAIPTPKSV

SEQ ID NO: 121160 - protein, 121 aa, Heterodera glycines
MTALIRLVFFASIVCAMETAALGRRSVNSSAAEPTNEQPVNKSSANEKNMDVGANLFVGNLDPEVDEKLLFDTFSAFGVILQPPKIVRDVETGSSKGHAFINFASFEASDAGRLIYFSIKI

SEQ ID NO: 121161 - protein, 546 aa, Heterodera glycines
FTHCLFLPKEEGMDSIHRSEEMCLTQLFLQKEACLTQLFLQKEAAYSCVAELGELGLVQFRDLNEKVNLNEKVNIFQRKFVTEVRRCDEMERKLRFLETEIKKDGIPMLDTGENPEARFLETEIKKDGIPMLDTGENPEAPAPREMFDLEAIFEKLENELRAIFEKLENELREVNQNEEMLKKNFAELTELKHILRKTQQFFDEVPFKRPLILGGAFGFKSLSSSRFYSKPLLGPAEFVDTGGSRLRIERTTFNLRFIAGVILRERLPTFERLLWRACRGNVFLRQAEITEALSDTVTGLAVQKAVFIIFFQGDQLKSRIKKICEGFRASIYPCPETPQERREMSIGVCEGFRASIYPCPETPQERREMSIGVMTRIEDLKTVLGQTQDHRHRVLVSAAKNVRMWLAKVTVSAAKNVRMWLAKVTKIKAIYHTLNLFNLDQKCFVAECWCPVSELDRIQRALKTGSDESGSTVPSILNRMDTADESGSTVPSILNRMDTAESPPTYNRTNKFNQGFQSIVDAYGIANYREINPGNYTFVSFSPLHN

SEQ ID NO: 121162 - protein, 311 aa, Heterodera glycines
MEKMNEANSDNQREKFQDDLKKEIKKLQRLRDQIKGWQNSSEIKDKDSLSKFRKLIEQRMEIFKDVERENKTKPHSKQGLSAEDKLDPREKEKCETIEWLNDEIDRTESKLETMSSMADSNRKRGKKDEAKKNEKEKSEELRKHLERVKFHLLNLEVCMRMINNEKLEIKVVLGKLKEPLEMYIDALDPENDDDPESLDPEDIYEELNFGTYLSQLGGIITTTSVDEEKGPLPNDNGCSSGSPQISGKEKQPQLNLSSPTIAAAPIVTSPESASADITTSVGTASATTAQEDVFLFNGTEAQPRKSKEPQE

SEQ ID NO: 121163 - protein, 248 aa, Heterodera glycines
MDVLFTIYRAKDAFLLQSLAAAAAAAAGQHYALYLHDIKLYVKMVEVQPSLNLSIYKTLEKQPATYAVRKTEVKSVFLTAGRTEMDHNIFSAAIPRRLTIALVANGAFNGQLALSPFNFKPYAIREISVHAAGHVYPAVPHRMDFSGCAYIRPFVDMYEALGMANSERSMDITLEQFHDGWTIFVVPMTSTLDDSCGFELLRSGTTSIRLAFNEAIPAGGVEMVVLGEFDQLIMIDYNRHIVSDSKIA

SEQ ID NO: 121164 - protein, 217 aa, Heterodera glycines
KENTVLRAGVAPQRVFVIPNAIDSALFTPDPALFACQKRTTVVVLSRLVYRKGADLLVEVIPDICERHPTVQFLIGGDGPKRVDIEEMRERCRLHERVKTLGTIPHDTVAIAIGLLDAIRRRENGELPCPLKKHRQVAEMYNWADIAQRTELVYGNSMEEPEDSIDHKLRNQLNAGFWFGLIWAWVTAVNVLFASLLDWVDPRDGIETVDNKAKANN

SEQ ID NO: 121165 - protein, 209 aa, Heterodera glycines
LNGYFEYIRRDLLINHIMPQDEIQLLLNLTIVSDTITKNSQNTINQAMPEPRPCELAKDLEVMFGQNRHTDFKIVCRGEGKEMHELSAHKVVLAARSPVFSAMLEPHTEEAQKSEVFYEDIDFEVMREMLFYMYSGRSPLLQQMALDLLAVADRFQLIGLKEMADQVLRAGLSTDNVCRNLVLADMHNALDLKADALRFIAQYSNNVIM

SEQ ID NO: 121166 - protein, 132 aa, Heterodera glycines
MKFALLGAARAGYLEVCRLLVNGWAADVNQQTIDGTTALMRASGRGHVDVVNFLVEHGADLDHTDFDGYNALMCAVKNRRTETALHLVTIGANTDQIGIDGKRARDLAEESGLAEMIDIFRAAAEQRENADG

SEQ ID NO: 121167 - protein, 199 aa, Heterodera glycines
MPFNLCVGNSFFTVAASIKAKFTTNIDEQEEKFKERTVGLVTLDEVKERQNEIFYRKFSGPSLKFSNEDRPKFEKAIQKRVLSFGAFDDDDDEEDEALIPITKKRHGMDPTVDTSFLPDRERDEQLQRERERIAKEWQEMQEREKNEEITVAFCYWDGSSHRKDSKTKTFRKEFLELKLATVDNLMFVKEDLIIPHFYT

SEQ ID NO: 121168 - protein, 556 aa, Heterodera glycines
YHFVGKNLTINTIHIQKIKFRKMLSQEEIFRNTRTVAQGLDALREENEAIKNKLLVGMDVLTPDERQLIDEKASIVEKNLENIQLGLEESQVMLALASHLQNLEAEKVMLALASHLQNLEAEKQKYKAQVRRLCQENAWIRDELNSTQQQLRQCEQDKAQLEEENKDKAQLEEENKHLKFMNSIKKFDEGSENEENTSEQLRSNEVNTSTTLQELGFGPDEDDDLHASHFSQPTPANAMAASTSAGYDIPQRLKTLHNLVIQYAVIQYAAQGRYEVAVPLCKQALEDLEKNNGHDHPDVATMLNILALVYRDQRKYKEAAALLNEALAIRERCLYRDQRKYKEAAALLNEALAIRERCLGEDHPAVAATLNNLAVLYGKRGKYKEAEPLCKRALEIREKVLGNDHPDVAKQLNNLALICQNQGMYDEVEKYYRRALEIYESKLGPQNQGMYDEVEKYYRRALEIYESKLGPDDSNVAKTKNNLSSAFLKQGKYKEAEMLYKQILTEAEMLYKQILTRAHERQYGRVTDENKPIWMIAEDREDSKSGQRNLPREFAS

SEQ ID NO: 121169 - protein, 239 aa, Heterodera glycines
DITQQMLNNEMALDLVEKCARLHIFCIFWTCELEADLFDHKMNTENLSKSLQTLRHMYDDLAKKQLFCVENLSKSLQTLRHMYDDLAKKQLFCVNESEFRSYDILLNLSDFNLLSQVLSLLSQVLSVRANPQVQLALSLSSALQNNNYIRFFRLVRLQTTFLQACLHHFFPLIRSNALACLHHFFPLIRSNALKVICMPNIFPIETFVEYLSFDSIDEAMKFIRQFNLEMDATDPNLIK

SEQ ID NO: 121170 - protein, 91 aa, Heterodera glycines
MTKGTSSFGKRHNKTHTLCRRCGRSSYHIQKHTCSSCGYPEKRKRFRWSVKSIRRRTTGTGRMRHLKLVHRRFRNGFREGVTAPRKGGVKA

SEQ ID NO: 121171 - protein, 210 aa, Heterodera glycines
MRSPTTVTKQSPEWTWFVHKGPTIFEGGKMMEMLSERIRDFHYNEDQTHAQLNRKLQLRDQLYYAISPIFPSTIELFLINEAQNAPFCCSVCGLYIVGSSLNGFGTKRSDLDLCLMITNRDIDQRTDAVVVLSSVMRTLESNQIVAEQNLILAKVPILRIKFIGTFHDITVDLNVNNSVAIRNTHLMCYYSSCELSSLNGFLSIPERPVF

SEQ ID NO: 121172 - protein, 149 aa, Heterodera glycines
TKKASGSVANDQTHERMCFSPLGWCRNKKYIQIVKKGYRCLVCNKYRCLVCNKVYGRYNSVSYHVTIYHRNPPIRCEEEGCQFTTREARYIHFHKYEARYIHFHKYYRHQIALPESIDLGNRKCPLLGCKHVSKSPAMLDKHIHRHVAD

SEQ ID NO: 121173 - protein, 518 aa, Heterodera glycines
MTFCQALSCARTISACLGSHVHLILPPILSVLDDRKTEEKVRTSALDTLLELARRHSIEDYALPVMQTWLRCIGIKSQQPRLMELLGIIVRKWTQFSVYKENVNAALVRCRVEPMLCHEYQEQLALLQAPSYARQQQQQQQNAVGSGGGVYQQQQGTFSASTSSPLFARQVSFLPPTQNGGATTDTSPLPDTNNGIVGFLPGPGGSSADMSRVHRMSSGKANRKMPGRMVGELFNAAFMSVWTELPEREQNELTNQLIDGPLPIKHRMLSESAEKTRAYAKALRYKEMEILSTRGNGEPNADDCQTMIMLFNKLNLEEGAAGIVQYAKRHNMEISGRWYEKLGEWEKALEMYQNDMTTLPDEQLSWKSISSHSEPQLLPTNREELDQSKPTANAGLGDDAAVSASASTNRIATPQQQNGALGQWSQLDRICETALAEEESNQYNSNFNSATEKQQPQRQLLRKRSSRRSGARLPQLHAPRQPTPLVDAVAAEFLNATLSEVAKRQKIATIGARGCWAV

SEQ ID NO: 121174 - protein, 806 aa, Heterodera glycines
FSPFFALGRCVAHPMIIIIIITVYVISDNSSTEMTLLVAFSKKNLLFYLQKDPTRERARQRIRDKVAINDGTEATVNRAVADDLFENDILLTLPQAKQILEESNKRRGRRQANPTPSSISNKRRGRRQANPTPSSIWGNVNIPYLFQVSQTNWQNNIRKNWQNNIRKGHRHIEWALAISQPSDSFRDYLQYFRGSGCWSQVGKTGGRQPISIGYGCESLGIVAHETLLGIVAHETLHALGLWHEQSRLDRDSFVRINYDSILPGTESNFEKRTPDTSDNGTESNFEKRTPDTSDNLGQPYDLGSAMHYGNRAFASDFRSLGQPYDLGSAMHYGNRAFASDFRSFTILTVDFTILTVDRMYQQTIGQRGGLSFKDAKMINTRYCSEICKTKLDCDNGGYTDPTICKTKLDCDNGGYTDPTDCERCRCPDGYAGDYCQRIPSSSGYAGDYCQRIPSSSINKIINYTLAFVSLKTSSLKTSSLVPRASCYWRIHHRTHRVVIHRTHRVVINIEKLDMPCKDSCASFLELKYKKDKIATGARLCCGNATTIARLCCGNATTIYADIGTDVLVILMSDNNLEAKYTGFELSYKSGKISGRPKETIISKFTEGTSDSNFTNGNSEADNCYNEKAAENIDQHYAKDNNRNNAKDNDNDGHNPRITTETSPRTTTETSLKTTTTSEQRPKRRRNQLPQKKKRQVTWISRLKETLKTDEQGIWSKWGGWSGCSASCGACGHRRRVRTCFKGKCKCRGESGQMERCAFGICRGESGQMERCAFGICPLAKQRTRCQGRLVMPFNGMESLEFGTVIN

SEQ ID NO: 121175 - protein, 702 aa, Heterodera glycines
EALNGDSAETLKEKGNKFYQNEDFTSCIEVYTKALELKPDDKLRLVIYKNRAMAKLKTDDFEGAESDCNNALELNPSDPKSYYLELNPSDPKSYYRRALAREKLDKIGSAFNDAKEAIRLRPGDTVLVELCSRLLKINAVLVELCSRLLKINAERLKQVESVENRAEEMLKIAFGEQQSDKEKHIKAMNNLLVLCRDSAMNNLLVLCRDSNSGAMRVWQNGQIVAQLLGVIKGNASDEEALCAVRILDELAKSRERMPFLVLNYVHFSRSLHYFCKIMHRGRVIFVEAASAVIQRVFNGLAAMDLSKEIKPDSEVVERNKVAILRLILELEEILTDPQYSATAREISIDLLLKNLMHMSGGLPRGWSWRFVEDRGLFKILHIATQLPEQCDYPVTSETRHHVSVFLAQLYDDMIFDQRRAIYKERVDQIFIFDQRRAIYKERVDQIFGGLMSDLNDPKNRINLAALLITLLQGPVDVGVNLVTNDQITEVMLQMASSDDFLQQSVAAELIVLSVSKYERATNMIKQGLPVLKKLFLSSDPNVRVRALVGLCKCASSAGDDCSKQPMDDESRMKLANTCHKFLIETENFSVDVRRFACEGLSYLSLDAEIKEYIVGKSELLKALVDLAKNAGGCVFTMATIYVNCANAYEKPKMDEEMVKLAQFAKHHVPQTHPKDTEECVDKRIRKMTEECVDKRIRKMIEL

SEQ ID NO: 121176 - protein, 339 aa, Heterodera glycines
ELLLYKLEKIGIQCKLLMWIKDFLSNRTFRVKIGDALSSSNVGSGVPQGSVMGPLLFLIYINDLPDALPSGVKIKLYADDVKLYICYSKNRNSMHKALHNLSEWANKWQIRISIKKTFVLHLGNKNPKEIYKIDGNIINVVDTIRDLGINIDNKLQFSNHVTQIIKNAYLRMRSLFRVIKSKSSRIWIILYKTYVRPLLEYAPEVWNQSLLKNIKKIEKCQKYFTKRVLFKCSLPPIPYQQRLEYLQLPTLESRRKLSDLFMAHKIIYGRTEIPLKYSNLLNALTFPFIDLTRNINAKKPFAGRVTKIWNQLDKRLIEKLLNQFKNKIKSRIINSLNKK

SEQ ID NO: 121177 - protein, 286 aa, Heterodera glycines
PLLFLMYINDLPDALPSGVKIKLYADDVKLLKQEPTQKMHKALHNLFEWANKWQIKVSMQKTFVLYLGSKNPKETYKFDGNTINAVDTIRDLGVNIDNKLQFSDHINQITRNAYLRMRSLFRIIKSKSSKIWITLYKTYIRPLLEYAPEVWNPSLQKNIKKIEKCQKYFTKRVFFKCSLPPIPYQNRLEYLQLPTLEKRRKLFDLFMAHKIVYGRTDLKLFSIFNPSARFNIPFYRFNTKYKLGKKFIPFAGRVTKLWNQLDKELIKTNSLNQFKIKKFTRVICKT

SEQ ID NO: 121178 - protein, 306 aa, Heterodera glycines
MGSVVKHMTTPKGSAVGKMDTYQLKSGDLANGYVGGENVGTGLNAHDCFEVGRAAYNQKAKLFLHFAMDARSFRAPAEPRVGSGHHRVLGLRALPAGEPRQSVGIHPTLGIFGTEPSEGGCLCRGEFEIPPENVTQLNCYYKKDKPFLKLAPHKVEIVRFEPLVVLFRGVISDAEISVIKELATPKLRRATVHDPATGQLVFASYRISKSAWLKDEEHEVVARVNKRISDMTNLNLDTAEELQVANYGIGGHYDPHFDFSRAACPVLTGVKWVSNKWIHERGQEFIRPCPLKKEYNEKYVGDVRPF

SEQ ID NO: 121179 - protein, 209 aa, Heterodera glycines
MITEAIINSEQLKEMSTRAVIEKLPEAMDGRALAEQIAEECGVKDKLSPDIHRHPRTRPEGGTKKDRILKVPFLDKFSRDQFLYKFRNALKKFPNLPQFIKVRRDMTQSELKILYSLRQQAYQANIAAGVPQGSVLGPLLFLIFINDLPSVITNEAASVGIKMYADDVKLYYAHENDDHSNQLDKAIEALEKWSKINGTHKQNYTKRIS

SEQ ID NO: 121180 - protein, 292 aa, Heterodera glycines
AEKEREKLKLEQQQQQQLQQKQPKQPLPIQVEKPIDPAIQAELDAQKEREKVPLEERIKQFRQLLEDKKVSATSSWEKELSKIVFDQRYLLLSTVERKAAFEAYCRERAEIERAEKKKRAKEAKDGFLKLMEEAKLHGKSAFQLQIMAQCLDFFNILRSTFASFSTKWVKDARFKAVEKMRDREAYFKDYVEELYKKEKEEKRKEREKAKDEFKALLSEQNDLRRNSIWAIVKKRLDKEARYKNKHLDSETRQRLFEEHVKDCPEPTEVIKLMNIPRKQFVGRGGGSQTVGG

SEQ ID NO: 121181 - protein, 101 aa, Heterodera glycines
MVRTLKFHEKKLLKKVDFINWPAELDNSLHENKIMRRYHVEKREHYTLYNKLSREIREMAKRIRELDDKNPNKLVLARMLLGKLFDMGVIPTADTLERCDK

SEQ ID NO: 121182 - protein, 199 aa, Heterodera glycines
SRVPIMNLNSDLPNSEARIRSAAIDENDSDDIVLIMIGQRASDVRTTGRMSGLRYMIERGERGFSDWNAYKQKHGKAYADQEVENERMLAYADQEVENERMLTYLSAKQFIDKHNEAYKEGKVSFAKQFIDKHNEAYKEGKVSFRVGETHIADLPFSEYQKLNGFRRLMPFSEYQKLNGFRRLMGDSLRRNASTFLAPM

SEQ ID NO: 121183 - protein, 269 aa, Heterodera glycines
MDDNKRELLKLDRKIVAAASIGILGQQHKALQQHQQQQQQLTSNGTITAGGGRPVCAIEFSTIFPELVAVCHDRDKDEPLAPDSVINVWNTRFKTASPECVSVLVLLLYNDDDCPWQGMTFTSSSRVMSMTWDMFNANIIFGACYSGQICIWDTRVNKRMPVCKTPLTAKAHTQPLLCMRMVGTANAHDLVTISTDGRMCSWSIDNLQSPIEATELTCNRTKKPICALSMAFLHNSINNYVLGTEEGELYIGDRHAASGESSRSIAGGW

SEQ ID NO: 121184 - protein, 500 aa, Heterodera glycines
GESDGNEQRSVAVRLFSEDGKEIGQAPVVLLASTTAEQLQVLYHQLLRSEKQQNGECGDDGDFDEGTAPVQFRTVADEKSGGKGTEIVDSLLDSLPSERLFLEKPLELVCLPQAVFRVRPVTRCTASLPGHGEPVLSVQFSPDGSCLASGSGDRTVRLWDLHTNLPKQTLTGHNDWVLCIGWSPDGRALASACKSGVIRVWDARSGAQRRVLNGHQKWVNALAWQPLHEATSDAQCRPLLASAGWDKTIRIWDILLGGTVRVLSGHTASVGNWAKSYYQLVNLFGLIVSLSGDSSSDRTVKVWRAEDGTLCRTLTGHGHWINTLSLSCDYVLRVGYFSAEAQSKGQPTLSPFSDGISTEKVFHFCKFISYQCPGTRPTVAGTARVGLGRLHNVFVGAGRKEAANCADDRPPTVGQSGGPTQPKHGETKCQTTVECSNLNRSNLRPTRGPSPPPLLTSQLNCGTDAPAHSSPLCAATWAPCTKLAGPLTADCSSPALPTRH

SEQ ID NO: 121185 - protein, 271 aa, Heterodera glycines
MDASFDQFGGGGWGDQGEQEFAASQFQKNIYDKVPVPVAIDVLISMTGDEEKYVLGNFSFNTVQLMGKVANVSEVDQCTTYELCDAMATDIHEVFTIGQLVQVIGKLRLYNNRLSAVCFNIREVEIDEIAIHKLECKLAKIYFEKNLTEFSLGIVENDTIFHGKVSNQRPGSSIGHSFAGNMATPNRKLSGTTTQMTANRPQMYQQKQQLNFPTHWTHQQQKIYEFIKHNAIGEAGVHKDVIRNALGLNASCNTDLAILSNEGSIYATIGN

SEQ ID NO: 121186 - protein, 160 aa, Heterodera glycines
MAYLNYDQVQCPCMRANNVVGPRMGGANSSLGRAYTPGGGGIEGVVESANHNNGGTSGQSTARHADHSGIGQPCSSHVRELPTLNTHLTSPAAAVALGLIYLRTGDCWIRETLAIADTFYEIDQIRPDMLMIRTFSRCLVDFEDIKCTREWVDAQIPQII

SEQ ID NO: 121187 - protein, 1378 aa, Heterodera glycines
GSTGVLCFLKGVDFSRNDFSADRFPDEVIEMTQATWLKLNRAQMERLPDVLSNLKHLEHLQMARNKLQNVHGELSDLPLLRSIIVRYNQIKTSAIPTDIFRMKDLTIIDFYNQIKTSAIPTDIFRMKDLTIIDFSNNLLRDVPSNLEYAKCAIVLNLSGNNIENVPNQIFSNLIDLIYLIFSNLIDLIYLDLSNNRLEVVPPQLKRLTNLQVLKLSNNPLTHLQLKQLPGSKSKKLRVLILRNTHRTLSNIPYSFEDVLNLQELDLSMNELQSLPDSELDLSMNELQSLPDSLYALKQLRKLDLSFNKISKIEFPSSVFTQLETLNVSGNNLTSLPAKIVNCQKLQRLYASYNKLKFEGLPASFGQLLQLQVLFLLPASFGQLLQLQVLFLSDNDLELIPEGIGRCVKLRKIKLDNNRLITLPDGIYLLPDLKELDLHNNPDLVMPPKPSDKEKANPDLVMPPKPSDKEKAMAFYNMAFYNIDFSLSNQLRLAGQSPGSSVDSLRLAGQSPGSSVDSLSPNKSQQKDYMQRKKDFIRRRRCQADQDRASKVIQGMSKMAQDAHEMNQSVEKENDANLRPVIGWKEKMEQHKPRLDYSDVFDAVAGADAGLWVWEIENFYPVLVDSGFHGQFYEADCYLVLKTTRETNGALTHAIYYWIGEKTSLDKAMCAAVHAVNLRNHLGASCRTIREEMNEETDEFLEMFSEEIVYYDGARTQSGFYAVEKVAFSNKLYRAFVNGPSVEMEAVPLNAESLDPRFVFLLDCDKVIWIWSGARSRVTIANKVRLFAVKMNKRDKKGKAEIERVTIANKVRLFAVKMNKRDKKGKAEIESCNQLKTPEEFWLALTGSSKRPDEPIFSSKRPDEPIFEHILEDRKPERKRLYEVQLGMGFLELPQVELRNGVLHKELLKPKGVFLLDCTSELFLWVGKNANRLTKMAGQKIASEIHRMIEKIASEIHRMIERPDFCVICRENEDEESTIFRSKFAAWDDIVPFDFTMTADTVQRRGADIKVVIMERDKLKTDLVALVIMERDKLKTDLVALFLDRLPAMPHSDTEKIIEDFNMDLEVIESFVLEGKKFVRLPQNEFEGKKFVRLPQNEFGIFHSMDCYVFLCRYIDDDDEEEEGAEDEKEANDVDFKCVVYFWQGRDASNMGWLHFTFSLQKKFESLFKDKLEVVRMNQQQENHKFLQKKFESLFKDKLEVVRMNQQQENHKFLSHFKCKLVIRYGKRNPSHNLSQAVPELFHMRANGTSICTRTIQVDCNATRLNSAFCFILRVPPSDLQTDEEGIGNVFVWIGSKSDPYFHKLAEEVASELIGRDSVASELIGRDSDFAVQRIEEGNEPLLFWKALGGKKKYDRDADFMEYTRLFRCTNDKGYFSVS

SEQ ID NO: 121188 - protein, 245 aa, Heterodera glycines
MTDADKINLDNIISRLLEGDVHGQYYDLLRLFEYGGFPPESNYLFLGDYVDRGKRRYNIKLWKTFTDCFNCLPVAAIIDEKIFCCHGGLSPDLQSMEQIRRLMRPTDVPDQGLLCDLLWSDPDKDVTGWGENDRGVSFTFGPEVVSKFLHKHDLDLICRAHQVVEDGYEFFAKRQLVTLFSAPNYCGEFDNAGSMMTVDETLMCSFQILKPSDKKGKFSYTGAGQNRPVTPPRATPAEQNKKAKK

SEQ ID NO: 121189 - protein, 332 aa, Heterodera glycines
KFRQVSAVQYLHSKNVIHRDLKAENLLLDADMNAENLLLDADMNIKIADFGFSNTFSPGNKLDTFCGSPPYAAPELFQGKKYDGPEVDVWSLGVILYTLVSGSLPFDGQNLKELRERVLRGKYRVPFYMELRERVLRGKYRVPFYMSTDCENLLKKFLVLNPIRRGTLEMISTDCENLLKKFLVLNPIRRGTLEMIMRDKWMNMGYEEDELKPYTEPTKDVRDERRILKLQAFGYTLQQIHESLERERFDEIFGTYLLMKEAKKHDAQGQSLGGSGPNATAESPFNQSMGPTPTNFGNSTSDSFSSKTNCSGTSDVQNGTKTSRQPSQRSTT

SEQ ID NO: 121190 - protein, 447 aa, Heterodera glycines
MAFHKIDSSSIDSITNAVDFFSIPPTNVTVSSSKVFEILPSNPLTDTPYHFKIHSSQNYIDLSKCYLLTEFRMRKLTPPNGEWGHLDATDQVVPIQLIGHTFIRDMKIAINGREIFNSNSLMAYKTYLSHELSQSLEAKVSHLTAAGYDREDASNLQNANSEGFKSRRQRYLGGRTAQYIAKIDADLFNVPQYLINHCEIDITIQPHDDNFLLIDTLDPPGQPYSIELVGLKLYCKKVSLMDGLALELAKKLEMKPARYAVRKTMMKALFISPGRYEFNANLFMDQVPRRVTMGLVANSDYVGNIKRSPFNFQHFNVRELSVVANGRSYPQAPYDIDYENWKFVRPYNDTQEALGFANSTYGNGIDYFSFLHTHCIYVFNMTNSGDDHGGLFDLIKKGCTAVNIKFKKPVPDGGITLIVMGEADSIYFLDKTERSRPTQPFKSFLKC

SEQ ID NO: 121191 - protein, 75 aa, Heterodera glycines
METALWELEEAQLAEKHALLTQQFRRTHMLARHAKEQEHVRRINQSKEEQLLRALTADRKALPQSVAQRGEERGR

SEQ ID NO: 121192 - protein, 229 aa, Heterodera glycines
MFSVHYKFKATLEYKTLTFDGLHIGVDELKKAICDKENIRTESFDLLLTNAHTKREYAVGELVPRNSSVVVQRIPRENAQKLPKVQAALNKSLVNILFSKFLFKFNSFSYFEEFAGMSEEQRLAHIKRVSTEKYSSTNYQRRSGGIMTGPPPATYVCNRCGQPGHWYKSCPLLNLRRTAGITMEELMETDRDDPLAMLHPSGKFVKPIMHHQARMQRLTRKNMKNKFNF

SEQ ID NO: 121193 - protein, 244 aa, Heterodera glycines
NGEPLEPPQAFATASTSEDSFEEDQEFLELQEREQIVDKYERGPDQNDVDPWENPDFELYKITDRYGFMQANRRAEEGTKRVEARAEMVKDAQGMGAAIWKRLTGADTMKANSREKLYKELLARARLVSRDIKQIDLDINRTYRDNLAFRRRYDVKQQSLFNVLTAYAMLNTEVGYCQGMSQIAALFLMYMDEEEAFWSLHGLLVNRKYGMHGFFVPGFPKLHRFQNHYDKVLLKYLPRVKSHL

SEQ ID NO: 121194 - protein, 154 aa, Heterodera glycines
ASINNQTNVNIVSVNNVGMSYEYPERLDRIEGGLQRVSDITVINTLPTTVLSAFVLKQMRERGRGVVVNLASSAAYFNWFYLAAYSASKKYVCWLSSILRMEYADTDIVIQTVCPMMVATKMAKIRKASFFTPSPEEFAAQALRSIGLVDETTG

SEQ ID NO: 121195 - protein, 84 aa, Heterodera glycines
MSFLVTLAGYLTIAIFLQKLFRSLYNVVFPYLFAVPQNIKVLAGAEWAVVTGSTDGIGKAYALELAKKNFNVVLISRSMDKLNA

SEQ ID NO: 121196 - protein, 355 aa, Heterodera glycines
MDANLLQNVTTDNNNERQIGQQQILLGQTFDWAQFKNRLALDRCVCMGHSFGAASSLSACAEYPSLFNACVLLDAWLYPVERRMYPATVQPVLMLNASKWQWPRNVRRMQRLLAKATTSTNDDKTATETTTTTAPQQQSQDGAATTAATAQPSVTNTDSRMMFTIKDIVHQSFSDFGFLVPGRVARYIGVQGDLDPLLTGTAVLEMVLQFLESQFLHQQQQKEDEEDTEDEEGEEDELEEKEEEGEKESKERGGGGQRDVRTEQGEQDEVARSNASALDRLRRLVAEKYAAFVVEGTDIPQVKLDEVAPLVEAEQQQAVSAEEERNVANDSGVDTPPTTETTTEEAAENNNQPSS

SEQ ID NO: 121197 - protein, 145 aa, Heterodera glycines
MPTQTKKGFSLAKAQLGKRPVRKWLWCPFENEARKDGLALKHWEREDKHSTPYSFVQFNKQLDVPSFTDEEYEEHLVDPRWTREQTQHLLELCKQFDLRWPIIEDRFDQELCRNRKSMEDMKERYYGLGHTLNDVRNVQADPIGL

SEQ ID NO: 121198 - protein, 106 aa, Heterodera glycines
LTSRAAILCRPFYKSTLYDRLSTRPYLTGIEKRWIAFQLLKALAQLRIAMVRHGDIKSDNPSDFTFFFDTNRRRHCYLAPERFRDSEELEARAAVAAGMEFPNFYE

SEQ ID NO: 121199 - protein, 311 aa, Heterodera glycines
MGEQMKLEGSLRGHNGWVTQIATNPLYKNMLVSASRDKTIIVWMLDESGSVLNGKPIKSLHGHGHFVSDVVMSSDGQYALSGSWDKTLRLGQTTRQFVSHTQDVLSVAFSADNRQIVSGSRDKKIKLWNTLAQCKHTIVEECHSDWVSTVRFSPSHANPVIVSAGWDKIVKVWNLATCRLKTNHFGHTGYINSVTVSPDGSLCASGGKDGSAMLWDLNDGKHLYTLGGNDVINALAFSPNRYWLCAAVGPVVKIWDLENKTVVDELKLDIASTSAANPMRVSKKSCPQCISLAWSTDGQTLFAGYTDNMIR

SEQ ID NO: 121200 - protein, 85 aa, Heterodera glycines
MTSQTLSLAKRPHIIVATPGRLVDHLENTKGFDLRTVKFLVLDEADRILNMDFEVELDKILKVLPKARKTYLFSATMTQKVLDFV

SEQ ID NO: 121201 - protein, 1023 aa, Heterodera glycines
MTCSEKIENELAEKQQHGELNQSAKMSKPFVAGTDLTSVASEDVENTPSQLVRKKRIVLSENVISAEKTPNVARWEETPAHIGAGDATPAAGKQWDATPSQTPRRNRWDETPKESVRDGGMTPGWGSETPRDIKVDMSERSEETPGASKRRSRWDLTPAQTPAVGSETPLNGMDAPTPAHFTPKIQNGGMTPSLLTPGGSTPIGTPAMGMKTPAVPFVPMTPEQAAIYKWEKEIDDRNRPLSDEELDALIPPGYRILAPPSGYIPIRTPARKLLSTPTPMTGVGGFMIPPTPERGGAGDKGVGGILDTQPKDPELPALKPEDIQYFDKLLQDVDESTLTKAEKNEREIMGYLLKIKNGAPPQRKSGLRKITENARRLGAGPLFNQILPLLMSPTLEDQERHLMVKVIDRILYKLDDLVRPYVHKILVVIEPLLIDEDYYARVEGREIISNLAKAAGLATMISTMRPDIDNVDEYVRNTTARAFAVVASALGIPALLPFLKAVCKSKKSWQARHTGIKIVQQIAILMGCAVLPHLKSLVEIVESGLVDDQQKVRTITALCIAALAEAATPYGIEAFDSVLKPLWKGIRTHRGKGLAAFLKAIGFLIPLMDAEYASYYTKEVMLILIREFVSPDEEMKKIVLKVGSVEIISRIVDDLKDENEQYRKMVMETIENIVALMGASEIDSRLEEQLIDGILYAFQEQTQEIAKIAPVMNICQEEKLMGHLGVVLYEYLGEEYPEVLGSILGALSAIVSVIGMTKMTPPIKDLLPRLTPILKNRHERVQENCIELVGKIADRGSEFVSAREWMRICFELLELLKAHKKSIRRAAINTFGYIAKAIGPHDVLATLLNNLKVQERQLQINVQNGVLKALSFMFEYIGEMAKDYIYAVTPLLVDAMMERDVVHRQIAIDAVAHLTLGVHGFGCEDALMHLLNFVWPNMLENSPHVIQRFVFACDAMRVSLGPIKVLQYCLQALWHPARKVREPTWKVYNNLILGSQDAVVAGYPRIANTDRNHYTRYELDYVL

SEQ ID NO: 121202 - protein, 446 aa, Heterodera glycines
FRLALRQILGKIILKITLKDNLTNKMFLKFNHPFHQMLQFIAVFHFFFLWVVLPLLSVFVPFYLFFYTKFFFLWVVLPLLSVFVPFYLFFYTKFWWIVCLYFIWFLYDFDTPRRGSRNWLWYKNSFVWKHFADYFPIKLLWYKNSFVWKHFADYFPIKLIKTADLPPNNNYILGCHPHGVFSTASFVHLCTSATGFGQLFPGLKSNILTLNGQFWFPFRREIGIGLGGVGVESSSHSLKFLLNNPGRGRLIGIVIGGAEEVLDAHPGKHHLNIMGRRGFCRFALKTGTTPLVPSYSFGENDLFDQLPNPRGSLLRTVQSTIKRKCGFCIPIINGSTIKRKCGFCIPIINGCCGISDRGLLPRRRSITTVIGAPIEVKRIGSPTPAQVDQLHLRYVIGAPIEVKRIGSPTPAQVDQLHLRYCNALNELFEEHKSKYGVPNDKHLTVH

SEQ ID NO: 121203 - protein, 232 aa, Heterodera glycines
MTCPQKISDSSPLAINTGLNIFLVPPTNVSVVRSFFRQVLPLATITQESPYLFRLYSDNLWTDLSRIYLYLELSIEKPGANDKWVAIDDADTSVSAIQGIGQTFVQQLKVTVGNTEVYDSGNLYPFKAYITNELSFPINAKKNFLGSTGYYHTINQDDSTDEGFKERCKIFKGGKNAQFLSRLDFDLGNQELYLLNNLDLLFTIYKAKDVFLLQTLKANDDSLRCQDLCQNG

SEQ ID NO: 121204 - protein, 49 aa, Heterodera glycines
MTIVPILLQALSALAKERPSDPIEFVANYLLKEKPRFNGAANASATNEH

SEQ ID NO: 121205 - protein, 264 aa, Heterodera glycines
MTLWEIMQARSTLFVHKIFNRSARPSQSLFDQSAIPGNDASRSSRNTSYSSSTTCSSIRNSAGGILCGAEPITLFRLELERLQYILHFPEEVAFQASDPNAFPTEAGLWILFGFVGCDLANISAQDNPSPVKNLVKRLSEVSSWITHIIISQPTHEERKSCLAAIMRVMDTCWNIGNFNATIEILLGLKSPRLRPFWLSLKQEERQRFDEFAAILVPPTNQKQQNQIPTNGCAYQQMNGGGTAHWTPHPAYIEVAKGVGNSSKL

SEQ ID NO: 121206 - protein, 1097 aa, Heterodera glycines
KNLFKNNHLTRILFKLSLDKFKLSLDKQNVRELISANLISLFIDIAVLAHLHTNRAKLHGQTNVIEATKEHCEETEPKEWYYNDRQGQRQGPISFKKMKRLYRDGVLFMKRLYRDGVLFEKSEIWAEGLDKWCHLSSVSQFRWTVCNRKKGRTNDTNRKKGRTNDTADGPNLTDLCSLILDTLIQMCTFFPSRDETDAVIRPMPRIKKVLSEPVLLYQLVQLLLTYDPSIVQRVATLVNDVMQDNPYISRLYLSGIFFFILMYNGSNILPVARFLKDTHLRQAFRSTLSKSELASRSVLCPMLPEANIFYLEEYGAEKYAEVFLGEEYGAEKYAEVFLGEFENPECIWNSEMRRNMIEKIALHVSDFSSRLSSNVKALYRYCPIPPIDYPQLKEELFCHFYYLRHLTDNHRFPNWPIREPVDFLRACLSAWHDEITRKPAKMSVEQACERLGLSTTDSRWKDASAVRRAYFKLAQKYHPDKNPDGREQFEQINYAYEFLTSTLVRANSSSTPDMNRIVIIIRAQSIVYKRNLQVLSPYKYAGLSPYKYAGYTQLIKTIDLESSDDTLFARNGGQLLVAAVELCHWTLRSSSLNAEQLRRDGGLDALYALYKTFERCVPMITAGSLESEMPVQVCTHVCNCFATAARFDACREKIAEMKTLFQSICQLLRFESLHRLACAAAECVCAFSVCTLLQTESLHRLACAAAECVCAFSVCTLLQTQLFQAGVIWQLLPHLFRFDYTLDEGGVAHSEKTNHQAVVAHSEKTNHQAVLNRLARNCCEALACLAGFRPDTPDNDGVQKSLRAMLTPFLRAMLTPFICRQMQLCRNDFVLKLLNANTEDPYLIWDNSTRAELLDFVDKQRNSHENVSEMFGAEFKLSIYATELVVGSEMFGAEFKLSIYATELVVGEIFVRIYNAQPEFRLLEPKRTCMDFEPKRTCMDFLDYLSKHVEELLIGEGVVRPAAVKQKPITIGTVNLNGASGGRFPLQERVRMVLEALRNVLMMNPGIELLLIGHIELLLIGHFSAIFAFLRVHSLSAIQLKALQIISIAANNKECVSDIACSIQLPLLLTLLSKLHKGRENFTELISKKSSNFKMFF

SEQ ID NO: 121207 - protein, 498 aa, Heterodera glycines
MGVPAFFRWLSRKYVSIIVDAVEQRRREIDGVKIPIDATQPNENYQEFDNLYLDMNGIIHPCTHPEDRPAPKTEEEMFILIFEYIDRLFSIVRPRKLLYMAVDGVAPRAKMNQQRSRRFRAAQEAAEKRELIENVRKRLESEGIPLPPPRKEEEHFDSNCITPGTPFMARLSVALRYYVHKRITYDPAWQKIQVILSDANVPGEGEHKIMDYVRRQRASPAHDPNTVHCLCGADADLIMLGLATHESNFNIIREEFLPNQPRPCELCGQYGHEVEHCEGLARAETGPDQADPLKKEKNFIFIRLPVLREYLERELSMPNLPFPFDLERAIDDWVIQSKVSILKLRYSQVMMCFFVGNDFLPHLPSLEIRENAIDRLVKLYKDMVYQAGGWLTENGIVNIERVKKIMGGLGKVEDEIFKQRQVGPEIKQKWQTQKQLKLKELRFKESKKQRKQQQRQAMAKIMPYNANLIAPMPLGQQKRMSGEEMRRLAAGDRQEVAF

SEQ ID NO: 121208 - protein, 123 aa, Heterodera glycines
MISGHRSVGRCLLSLPQFASRLIPIYGHVQAQCFHFMKKQVTVDPEIAKLREGRKRRKLTKAIKKLAEYSKKPVPVEEIEVDLRHQATKGQRERTDNGVQGRDEKKEAYGRKKLLKQYAQSRA

SEQ ID NO: 121209 - protein, 136 aa, Heterodera glycines
MWIKRSIDAQENALEVLKQLSPTLYEAAVQLDERLFYTQIQGPPISPPIDNYNCPDGEYQDVTKKWELPMLEELEKKFGTGRLIKMPEFKKKQIQMMRQKAEEEEEKMAIKDPWLKKDTSCAVEEQNETEVQLAKA

SEQ ID NO: 121210 - protein, 81 aa, Heterodera glycines
MSDWMGRDISTISASIFSLRQDETHPGKGTNKGQQRSGRTNWGSKCQTFYADEPILVTRASMQFLFDENGRRFLDCISNVQ

SEQ ID NO: 121211 - protein, 163 aa, Heterodera glycines
MTQDLLNIENDVYRYETGGAESVDKEVLLDENDDLWADNRHKHIAVVSQEVLNMGTHFHLAEECMNRYKHGVDKLCKVEQDLAIGMDADGERIKDPMKLMVPLLIDPSVKLEDRLRLILLYIFHKNGITDENLNKLLQHANIPQTERETLTNAALLGLNIVID

SEQ ID NO: 121212 - protein, 352 aa, Heterodera glycines
MATTIPGSLVNKTKKHFLGMTAPAGYVAGVGRGATGFTTRSDIGPARDSTDVPMDAAMASAAAAAAAPAPGPPPKKQRNDDDHDEAEDLNDANYDEFEGYGGSLFAKDPYDKDDEEADEIYHAVDMRQDERRREYRERKYKEAVESYRKERPKIQQQFSDLRRQLATVKEEEWAAIPEVGDSRNRAKRNPRGEQLTPVPDSVIASAMSYNQMNTMLDKNVQNGISTPYSGFQSTLGGFQSTFGFQSTFGFQSTLGGFHSVLNGGQMTPGWKTQTGSSTDLDLRKIGQAKNRIMDIRLNQVSDSVSGQTVVDPKGYLTDLQSMIPQFGADMQDIKKGRMLLKSLRETNPEKPQ

SEQ ID NO: 121213 - protein, 537 aa, Heterodera glycines
SQFFLSVTLVAFSLTHFPEDAFEPEELPFFALIGVFCGFIGAGVFCGFIGAGFIFFYRNVVMFLRQNSFIRRNIQKNWLLYPVVIAFLVGVWLLYPVVIAFLVGVLTYPRGYGRLTYPRGYGRFLSGRYKFTRTVLDFFSNCTWSKGVYKFTRTVLDFFSNCTWSKGVHHSVLAPHGCPSELLGTWTNHEDGPYNVFLVLSLFTFTFLVLSALCNTMPIPCGMFMPLFVLVLSALCNTMPIPCGMFMPLFVVGAAFGRLMGEIVSSMFPDGITGGTDQPIFPGIYAVVGAAALTGAPIFPGIYAVVGAAALTGAVTHSVSVAMICCEITGQLIYIIPLMVAMICCEITGQLIYIIPLMIAVIIANAICAYFQPSLYDVMIGIKNLPYLPDIPPSNAEVHHCTVHHCTAENIMVSKVRFLCRLTQFKEIRSLLIEMPKLRSFPVVDDPASMMLLGSISRRTMVELLKASMMLLGSISRRTMVELLKVHLRHKETEERADYDLTEDEVIRETKEESNWGRESKKRRVNRINSLGKEKPS

SEQ ID NO: 121214 - protein, 97 aa, Heterodera glycines
MDEEAKQENLAKELLKLTSSLKQNFTTAGSVLKEDNATLDVMQRVALSNKENLIRERGRLGHHAYQSCFNCVMVMTVIVVIWSFIAMIIMMRMFPKI

SEQ ID NO: 121215 - protein, 580 aa, Heterodera glycines
GHNVLLIQIGESDIIQELHMLLERDSSCHRTCFKLYYEGTALDNYTELRNVPDIKDNAVMRVVEEPYNLREARPYNLREARVHVRHLREIIRSVDISDAVSGVDFASLSCLSTITQSTSDELGKKSKGSSDCLPPEWLLPNSSDIILKPLIPLGKKSKGSSDCLPPEWLLPNSSDIILKPLIPMAEHSNGTLQPTQLIALKQISFSAFNPPPGPRKMKGDILYLVVDTGDILYLVVDTVEDRRFHVTCCTRGFFVNSTIGEKFKPERSSTYGGRVFHSLFDLLSDISAHFKKTLVQLLKLRNEKHIFERLPTPFQLYQWIVPSVENTQDQLRADEQVQPHRLGLWIVPSVENTQDQLRADEQVQPHRLGLEDHMPGQIRDWNEELQTTHDMPQSSFAEKLCRDRARFKVHADFLSACTRGASAVIDGSVHTIVIDGSVHTINPMDEPRMHMFIWNNIFFSLGFDVKDHYKELGGDAAAHASYELGGDAAAHASYSADLAAVQAYAQIDDPKLHTSGMLHTSGMAIIDFKGLRVMAQSIIPGILEREQQDSIVYGSYDSGKTVTTNELYEELLKSAKLLKI

SEQ ID NO: 121216 - protein, 124 aa, Heterodera glycines
MHETLHSLGLGHEQSRADRDKYITINKDNINPQQYDVFAISDQTKYSSYGVKYDYGSVMHYDAHMGAKTWGVKTIHAKFDPEHNDSKMGQREKLSDSDIEALRRMYCMPSKANTVFASMPHNLK

SEQ ID NO: 121217 - protein, 190 aa, Heterodera glycines
NFPLWRLFSTFLIRYLFCLLGLAKDNLFVGSNVEKSFLFDVSSKIYIATDSSPVDMATYELCCDMIDATYELCCDMIDVTIDISSIYGHRNDFRPIGFDQDSSAVITLRTRQVIFVIFLRQINVYLALVCVIKEDNFEKQGLIDFNFNVFKQAIRKQRKGRKKRKKMRKEKRTEGRRKGPIGRSTSAKVC

SEQ ID NO: 121218 - protein, 218 aa, Heterodera glycines
MGAYEVLSNPEKRKVYDEYGEEGLKGGGEGGGMHNPMDIFEMFFGGGGFRGGGEKPTKVRDTVHQLTVSLDKLYNGCTKHLRITRHILCPKCNGVGGAKEGVKQCENCRGRGLEIHNMQIGPGMIQRIQRACSECGGEGEINRNPCKHCGGKKRIKSEETIEVHIEKGMRDGQRLMFYGKGDQQPGLEPGNVIIVLDEEEHPVFTRRGTNVTLNMKLT

SEQ ID NO: 121219 - protein, 148 aa, Heterodera glycines
LCIHIGGGVKFDYFMLNLHPRGPTVADETYDERVIEVRRDPNRTPYIALVAGVKGKRWIYATQNMQAGQIIQTTCHIPERPVIGCEGNSYPLGALVEGTMVNSIELHRNNPNSHVVITEAGGCAEIIRHMDEFTVVRMPNKYEYAVRK

SEQ ID NO: 121220 - protein, 234 aa, Heterodera glycines
LSFHVRSFMPFVRLPVESVLLCYRQGQRHFGENYLQELETKAQQMAEHGADQIRWHYIGRIQSNMINRICAVPNLINRICAVPNLWCVETVDSVKHANGLQRAMNAMGKPLKIFIQVNTSGELNKNTSGELNKGGVHPEGLLPLATHVTEQCHSLNFKGLMTIGSISQSLGSGDENADFALLRKLRDALQTELRLSTLELSMGMSADYQLAIKYGSTNVRVGSTIFGVRNYAKK

SEQ ID NO: 121221 - protein, 107 aa, Heterodera glycines
MNSVLSISILFLLSQVLSTVSSSDVLEYTDASFDSGMQQHDIALAEFYAPWCGHCKKLAPEYEKAATKLKNNDPPIPLIKVDCTAEKETCDKFGVSGFPTLKIFRKG

SEQ ID NO: 121222 - protein, 146 aa, Heterodera glycines
YSHEQSIDQTSIPYQMGSNKYASQKGMTGFGQPRWEVLDPSISYQNRKSQGMVRLQSGTNRFASQAGMTGFGTPRNNTYEAEAGELPYEDMKKSEAIIPSQAGWNKGDSQKLMTNFGTPRDVKGKHLKRIWELEYPEEAEVSLDRL

SEQ ID NO: 121223 - protein, 85 aa, Heterodera glycines
NKTKPIWTRNPDDISNEEYAEFYKSLSNDWEDHLAVKHFSVEGQLEFRALLFVPQRAPFDLFENKKSKNAIKLYVRRVFIMDNCE

SEQ ID NO: 121224 - protein, 650 aa, Heterodera glycines
MPSKANAIGIDLGMTYSCVGVFQHGKVEIIANDQGNRTTPSYVAFTDTERLIGDAAKNQVAMNPSNTVFDAKRLIGRKFDDPAVQSDMKHWPFKVVQGEGARPKVMVEVKGEDKAFFPEEVSSMVLIKMKETAEAFLGQTVTDAVVTVPAYFNDSQRQATKDAGTIAGLNVLRIINEPTAAAIAYGLDKKGQGERHVLIFDLGGGTFDVSILTIEDGIFEVKSTAGDTHLGGEDFDNRMVNHFVAEFKRKHKKDLSSNPRALRRLRTACERAKRTLSGSTQASIEIDSLFDGIDFYTNITRARFEELCADLFRNTMDPVEKALRDAKMDKSQIHDIVLVGGSTRIPKVQKLLSDFFSGKELNKSINPDEAVAYGAAVQAAILSGDKSETVQDLLLLDVAPLSLGIETAGGVMTSLIKRNTTIPTKTSQTFTTYSDNQPGVLIQVYEGERAMTKDNNLLGKFELSGIPPAPRGVPQIEVTFDIDANGILNVSAQDKSTGKQNKITITNDKGRLSKEEIERMVQEAEKFSKEDEVQRDRVSAKNALESYCFNIKQTMEDSNLKDKISEDDKKKVLEKCGEVLAWLDANQAAEKEEFEHQQKELEGICNPIITKLYQAGGAMPGGPMPGGGMPGGGGAAGAGGAGGPTIEEVD

SEQ ID NO: 121225 - protein, 430 aa, Heterodera glycines
IERQVRNDALWAGLAIRRGWKKYFFCSKDQATRAISQSWRQPKNGEDALEFQHKFYRELYPKITADIRQIEQNWREGRHRLERINCQSENSKGVYCLQYDDEKIISGLRDNTIKIWSRPSLGCVQTLSGHTGSVLCLQYDNQMIASGSSDATVRIWDVNTGEQLKTLVHHCEAVLHLRFQDGMLVTCSKDRSIAVWDMASPRDIEVRRVLVGHRAAVNVVDFDHKYIVSASGDRTIKVWNASTCEFVRTLNGHKRGIACLQYRDRLIVSGSSDYSIRLWDIECGNCLRVLEGHEELVRCIRFDSKRIVSGAYDGKIMIWDLAAALDPMTPPNSICIKTLSQHTGRVFRLQFDEFQIISSSHDDTILIWDFLNTGPSAAVAAGAAAAAAHNQAVQHHQAAPAAQPAAAAMPGGAGAAPAAAIIPLAPPPSP

SEQ ID NO: 121226 - protein, 333 aa, Heterodera glycines
MTNERDFSHDDHINNAVGTNGDSKDAAKRKDICRDFLNNICSRGNRCKFYHPEDSVEKNQNSADEPYQFCIDFQNQGCYRENCRYVHAFREDVDRYKRSGDVTLGLARALAALLKGDTINGIPLCKEFQNGHCARGPQCRYWHINRDEERRKRFGGGRNCGGSPSSLAFGAYPAVPPAGAQLSRRRGDEFVSEDFAPPSKRSFAHNQPFATIPGQMAPTSAPTAPSHPSPQLVIELERRNAELTTEVESLKRELNREKERYDDLMSLFRAAQGQPTVQRSVISTPSLVPANLQPNISSLSALQQQHQPQSLQQWSATSTSQQPNWTKFDWGAN

SEQ ID NO: 121227 - protein, 212 aa, Heterodera glycines
  unsure (1)..(212): unsure at all Xaa locations
MHLINLIALFFMLFGPSVQQYTKTPTNEDKEAAVNCHNKFRSQLALGNADNKLGGNKMPKAGNMRKFEWDENLAKLADEWANKCTLSHSWNGWAGENLAMNGGTFSNKDGFEYACGRWWDELNRYGFNPDLIMTGENFSGIGHWTQMAWADTDRIGCAMAQNCPNTNWKTYVVCWYYTGGNYFGAPVYLXREPCSKCKANDKCDKATGLCSQ

SEQ ID NO: 121228 - protein, 212 aa, Heterodera glycines
MHLINLIALFFMLFGPSVQQYTKTPTNEDKEAAVNCHNKFRSQLALGNADNKLGGNKMPKAGNMRKFEWDENLAKLADEWANKCTLSHSWNGWAGENLAMNGGTFSNKDGFEYACGRWWDELNRYGFNPDLIMTGENFSGIGHWTQMAWADTDRIGCAMAQNCPNTNWKTYVVCWYYTGGNYFGAPVYLAREPCSKCKANDKCDKATGLCSQ

SEQ ID NO: 121229 - protein, 231 aa, Heterodera glycines
  unsure (1)..(231): unsure at all Xaa locations
MEHFPSKFVLCLLIAFIAVPCSVLALSAGSRVSMLACHNNYRSQLAKGTADNKSGKMPAGSNLIQQKYDSNIESVAQKWANGCSMSHSGSSGMGENLYMTSSSTISEADALKQACDMWWAELKQFGFQSSLVLDMAQFNKGIGHWSQANEYXELIKLILLLSXQAWASTAQIGCAMARCPSSTWKTWVVCNYKEAGNFLNQPVYKKGAACSKCSDYNGATCDSASGLCKLP

SEQ ID NO: 121230 - protein, 671 aa, Heterodera glycines
MPSPLKMAALPPLAVVVLLVAVVLPEALFALEVFTNHFLVHTNTAGTENAHRVAKRNGFVNRGPVLGSDTQWHFVQPALSHARTRRSVGHNAKLSQDKDIAYVEQMTGYKRLKRGYRPLADRLQKQLDFTSVQSPTDPLYPFQWYLKNDGQSNGKPRLDLNVEKAWALGYTGKNITTAIMDDGVDYMHADLRFNFNAEASYDFSSNDPYPYPRYTDDWFNSHGTRCAGEISAARDNGICGVGVAYDSKVAGIRMLDQPYMTDLIEANSMGHEPNKIHIYSASWGPTDDGKTVDGPRNATMRAIVKGVNEGRFGLGSIFVWASGDGGEDDDCNCDGYAASMWTISINSAINNGENAHYDESCSSTLASTFSNGGRNPESGVATTDLYGRCTRSHSGTSAAAPEAAGVFALTLEANPKLTWRDLQHLTVLTSSRNSLFDGRCRELPPLELEDIKRQLVSRQASCSHFEWQTNGVGLEYNHLFGFGVLDAAEMVLMAKVYKTAPPRFHCEAGTIEMPREIPASGEMVLTLRTDACTGSTTEVNFLEHVQAIVSLNSSRRGDTTLYLISPAGTPSMILSRRPKDDDAKDGFTNWPFMTTHTWGENPRGRWRLVVRFQPGKSTPKGHKYRGTLKKFTLMLHGTKEPPYRGIEPLQGHANSKLSVVQSAHKRMANRR

SEQ ID NO: 121231 - protein, 376 aa, Heterodera glycines
MCDEEVAALVVDNGSGMCKAGFAGDDAPRAVFPSIVGRPRHQGVMVGMGQKDSYVGDEAQSKRGILTLKYPIEHGIVTNWDDMEKIWHHTFYNELRVAPEEHPVLLTEAPLNPKANREKMTQIMFETFNTPAMYVAIQAVLSLYASGRTTGLVLDSGDGVTHTVPIYEGYALPHAILRLDLAGRDLTDYLMKILTERGYSFVTTAEREIVRDIKEKLCYVALDFEQEMATAASSSSLEKSYELPDGQVITVGNERFRCPEALFQPSFIGMESAGIHESTYNSIMKCDIDIRKDLYANNVLSGGTTMYPGIADRMQKEMTALAPSTMKIKIIAPPERKYSVWIGGSILASLSTFQQMWISKQEYDESGPSIVHRKCF

SEQ ID NO: 121232 - protein, 117 aa, Heterodera glycines
MTSSSTISEADALKQACDMWWAELKQFGFQSSLVLDMAQFNKGIGHWSQQAWASTAQIGCAMARCPSSTWKTWVVCNYKEAGNFLNQPVYKKGAACSKCSDYNGATCDSASGLCKLP

SEQ ID NO: 121233 - protein, 249 aa, Heterodera glycines
MADELVALAPGTRVSGRWTILKKLGAGAFGAVYLCKDGKGTVAALKTEPIDTRQPLLVMEATVLDTLGKKLKNADGQHFCRLLDLGRSEQRNATSGDTVFNYVVMTVVGTPLDKLIRNAGDRFSPGTAIGMSIQLLSAIKALHNVGFLHRDIKPANTAIGRAETNEHRLLYLIDFGMARQFLRPDGTQRRPRAFANFRGTPIYGTDPLHISRVTTAAKMTSNRGFMSWSNSTKVLSPENLRMTSRRSEG

SEQ ID NO: 121234 - protein, 170 aa, Heterodera glycines
  unsure (1)..(170): unsure at all Xaa locations
MTDTANRQRRGRGERRTRVLLRDSAKKITKASILRLARRAGVARINARVYDEVRAALRSYLETIIRDAAIYCQHERRKTMKSRDVVHALRRQGNLMYGFEQXAXGGGGWIYLEPAPYDIFGXYYYCTYVCICLYCILLCRCYCTPFYPCNCDPXLLLSXCVDICVFWYDK

SEQ ID NO: 121235 - protein, 152 aa, Heterodera glycines
MEDSDRQLFLRNETIAEQFNSVKRLTDQSHVKWFGNVRIMTERLSEFQGKTKSKNGQKTDGKNKNSPANFKMYPSRDIGILTEQSQRDKMAMAEKRAYVDTQMERIGKALDEIMPKNGQNESFGGDRITQTECHNEVMHTFNKICFNFSKSP

SEQ ID NO: 121236 - protein, 183 aa, Heterodera glycines
  unsure (1)..(183): unsure at all Xaa locations
MFGSILSCKIATDIEGGSKGYGFIHFETEEAANRQLRKXTGCFWMGRKCLLENLCHALLVRSKLVTRPVVSPMFMXKILARQWIRRSXAKCSHSMAKSSVQKXWRMTAANPRGSALSPTRTMKVLRGRWRRXTRFRCQAVRRSSKSLRCAVRXRRASARLSXSVVTSSTKLXAFSVIREXICT

SEQ ID NO: 121237 - protein, 153 aa, Heterodera glycines
DDQLLRDTIFQKWMGILDSSQNMFRHELARIEYLSTADERLQWNNNGMPKDELCTENAIMLRRFNRFPLIIDPSGQSIEFICKEFSTASGKEHQKGGSVATTVQLTSFNDNSFRKNLESALRFGTTLLVQDVESYDPILNPVLNKEVKRTGGR

SEQ ID NO: 121238 - protein, 240 aa, Heterodera glycines
  unsure (1)..(240): unsure at all Xaa locations
MRDLFIEDNSPITPARLAELIRHFYALGWMRDNGGGMAVLCNGAVFGSPTSVQKEKVPENDLFVIDATTGTVLKRPQNAASVPSATCGLLMNTGLNCVIHTHSKYANLVSQLVTGNEFAIQNQEMIQGVENRSSGLRLDNVDRLVVPIVDSELNEQMLSPVLLRTLDKYTEASAILVRGHGFFVFGSSLAGSLPKVMLELFPSTLXLSLALLNXSNTNCXFGAXKFAVNXKIIAXPIFPF

SEQ ID NO: 121239 - protein, 219 aa, Heterodera glycines
  unsure (1)..(219): unsure at all Xaa locations
MNEVSVPGSEKVEQKFTVCRAQKKSERQAELKRRYEQYKAERIQRYQGVNLYVKNLHDTINDETLRSNFESYGNITSAKVMCDEHGRSKGFGFVCFEKADEATKAVVEMNNKIIENKPLYVALAQRKEDRKAQLASQYMQRLAAMRMQNPAGLMGTMYAPASGGFFLPQAIQNQRAXAVHANTESVRGTNAWRCPXLEQYGRLQPSQCKAFMMGSSCWR

SEQ ID NO: 121240 - protein, 132 aa, Heterodera glycines
  unsure (1)..(132): unsure at all Xaa locations
TRDEIQEVRKSRDPITSFKDRIVTAGLVTEEELKDIDKKVRQEVDEAVKVALSDEVLPPETLFSDLYANTPPLAVRGTTADATVTQPFVSTAEVLRKMGREPKNYXENERTDSQRRIDNXEKHGIINCXSII

SEQ ID NO: 121241 - protein, 51 aa, Heterodera glycines
QGQCGSCWAFSATGALEGQHVRDKGHLVSLSEQNLIDCSKKYGNMGCNGGY

SEQ ID NO: 121242 - protein, 366 aa, Heterodera glycines
MAEVGNSYRPPLSEEKQNELRAIAQKILQPGKGILAADESTGSIGKRFDTIGLENTENNRRRYRQLLFTTPSFGQNLSGVILFDETFRQSTDNGVRFVDVIKKAGAVAGIKVDTGVVPLAGTLDEGTTQGLDKLSDRCAEYKKGGCDFAKWRCVLNIGAHKPSHLALMENANVLARYASICQQNGLVPIVEPEVLCDGEHSLERCQKVTELTLAYTYKALADHHIYLEGTLLKPNMVTPGQSHSPKATPDQIGLATVTALRRSVPIAVPGIVFLSGGQSEIEATRNLNAINSVPGPKPWTLSFSYGRALQSSVIKKWNGKDENLGDAQKVLLHRAKANGDAQQGKYTGEEAAASAAESLFVAKHAY

SEQ ID NO: 121243 - protein, 1014 aa, Heterodera glycines
MATTTAPPAAAEIPRKSPQQRKREEMAQLLESRKVDQGATFVEPRKPSGTAGQKGRMKLITNAHILKLLGTQAIYHYEVTINAVSSRSDRKFCVSEPSGPRDRDDFPLLNRRDKCREVFSAFYRTMEQSLKDTGNLLYYDLSKTIFTLKKLQIESEGKFMFNIGTVPTAERPDAARFKHYEFIIRPATGFEVNDLSFITNDVSKMERSLEQFLDIATAQKANMDGKQFIGFTSSRVYLLAPTDYGFGANECPVFDSNHSFLGVGVNKGCRIVEGDQGPGQMTPAIVIQTKKSAFHIPDMCILDKAKTLLFRENQGRFETGDFTQSDYEALCNGLVGIYAEPRYGTSGRFFRISDITKPNTGNGLNSENTYITHQVSGKISVKQYFEDTYQKTLQYPKAPLLVNYRRIGDPAYYPMEVCFVLDGQRVKSSQQNPEQIREMIKETAIPPTVLRVHNERVKESLQLVNNEYLTKASVHFDTTPLHVDYRVLGPPATLYRNNHRVTPAASNCEWRPGDALVNAQIGNWVAYAFGNPAGDSVRRLGLTETMWRNFVDKYAGEMRNKGIVCVPPVRVSFCWFTSVNEVLNVLHKEALNGVEFCLIGHAKGFEGDDVHVTIKAFEQQTEIVTQAITFDVLKEVLDKGSPLTVTNCIHKTNVKMGGLNYALHMDDPSVAQLFDGQTLFLGFAMNFPGGFAPSESAAPINGAVPSGSKAGLTPQNGANGAAATGANTIPLGSNGNVVPSTPVPRVGSSLPPPSCIGWAATIGKRHKDEYIGDFVYQAPRREEKIDIIASVVRRCIESFKKNRNKLPLRVVILRNGCTEGQFEYIMKYEIPLAKKELEELGCTAKLTVIVPNRLQDVRFLRQDARPEDKSNEQNIPPGTVVDTVVVHPKRSEFFLNSHVAIKGTACTPHYTVLRDENDMSMDTLQTMVHYLCFGHQIVTKPTSLPSPVYIADEYAKRGRNIYSHYAKNGIDNSKNLQLFAKNKGVEWPLRTYADMTKVLSFLTTTYLKELRINA

SEQ ID NO: 121244 - protein, 93 aa, Heterodera glycines
  unsure (1)..(93): unsure at all Xaa locations
SMEDSQQNITEQSVSAPTTDRNEYEELSKLVNPISKPLANRKLAKKVYKLVKKAAKEKGFLRHGLADVMKAFRKNEKGIIVWQGTFHRLXVQS

SEQ ID NO: 121245 - protein, 55 aa, Heterodera glycines
  unsure (1)..(55): unsure at all Xaa locations
LKKAYRKLALKYHSDKNPNEGERFKLISXAYEVLSNPEKRKVYDEYGEEGLKGGG

SEQ ID NO: 121246 - protein, 659 aa, Heterodera glycines
MKKSFVSFLFFTALLVIVCSKEEEGGAKEKKYGTIIGIDLGTTYSCVGVYKNGRVEIIANDQGNRITPSYVAFTPDSGERLIGDAAKNQLTLNPENTIFDAKRLIGREFTDKTVQDDMKLWPFKIYNKANKPHVQVKVGNEDKQFAAEEVSAMVLTKMKEIAESYLGHEVKNAVVTVPAYFNDAQRQATKDAGTIAGLNVVRIINEPTAAAIAYGLDKKEGERNILVFDLGGGTFDVSLLTIDNGVFEVLATNGDTHLGGEDFDPRTIEYFIKLIKKKTGKDLRKDNRAVQKLRREVEKAKRALSVQHQVKLEVESLIDGEDFSETLTRAKFEELNMDLFRGTLKPVQKVLEDADLKKEDIHEVVLVGGSTRIPKVQQLLKEFFNGKEPSRGINPDEAVAYGAAVQAGVISGEENSEIVLLDVNPLTMGIETVGGVMTKLITRNTVIPTKKSQIFSTAADNQPTVTIQVFEGERPMTKDNHLLGKFDLTGIPPAPRGVPQIEVTFEIDVNGILHVTAEDKGTGNKNKITITNDHNRLSPEEIERMINDAEKFAEEDKKTKEVVEARNEFESYAYSLKNQLGDSEKLGGKLSAEDKTTIEGAVDEAISWLDSNKDAPPEELKERKKDLEAKVQPIISKLYAGQSPPPGSEPPPTEEKDEL

SEQ ID NO: 121247 - protein, 374 aa, Heterodera glycines
MFLLFLLSMLLLQTNGWRARERAIELADSDESIELQNIGQRKTDIRTPTERMSALRQMIERGFSDWNAYKQKHGKAYADQEVENERMLTYLSAKQFIDKHNEAYKEGKVSFRVGETHIADLPFSEYQKLNGFRRLMGDSLRRNASTFLAPMNVGDLPESVDWRDKGWVTEVKNQGMCGSCWAFSATGALEGQHVRDKGHLVSLSEQNLIDCSKKYGNMGCNGGIMDNAFQYIKDNKGIDKETAYPYKAKTGKKCLFKRNDVGATDSGYNDIAEGDEEDLKMAVATQGPVSVAIDAGHRSFQLYTNGVYFEKECDPENLDHGVLVVGYGTDPTQGDYWIVKNSWGTRWGEQGYIRMARNRNNNCGIASHASFPLV

SEQ ID NO: 121248 - protein, 353 aa, Heterodera glycines
MAFLSRLSILPNSPISLLAVSLAVLAFVALASANPPTARETAPNAQQNNANSVATGEIAKNIAEKMERMNEFIKAKKFIDAHNLAFEKGEVSFKVAPNHLMHFTPAQYNRIRGLQMRSNRQRHNMATLAGNSSTLPEKLDWREKGAVTEVKDQGDCGSCWAFSATGAIEGALAQKKASKIISLSEQNLVDCSSKYGNEGCDGGLMDSAFEYVRDNNGLDTEESYPYEAVTGKCQFKNETVGGTVVSFKDLKKGDEEQLKIAVATIGPISVALDASNLSFQFYKTGVYYERWCSNRYLDHGVLLVGYGTDETHGDYWLVKNSWGPHWGENGYIRIARNKQNHCGIATMASYPVV

SEQ ID NO: 121249 - protein, 119 aa, Heterodera glycines
MNHFGLTFLFVAVSLLVIAPGCDGMQIFVKTLTGKTITLEVESSDTVDNVKEKIQEKEGIPPDQQRLIFAGKQLEDGRTLADYNIQKESTLHLVLRLRGGNGKRNTGKNKKSNKKLDQN

SEQ ID NO: 121250 - protein, 69 aa, Heterodera glycines
RNPDDISNEKYAEFYKSLSNDWEDHLAVKHFSVEGQLEFRALLFVPQRAPFDLFENKKSKNAIKLYVRR

SEQ ID NO: 121251 - protein, 69 aa, Heterodera glycines
  unsure (1)..(69): unsure at all Xaa locations
RNPDDISNEEYAEFYKSLSNDWEDHLAVKHXSVEGQLEFRALLFVPQRAPFDLFENKKSKNAIKLYVRR

SEQ ID NO: 121252 - protein, 69 aa, Heterodera glycines
RNPDDISNEEYAEFYKSLSNDWEDHLAVKHFSVEGQLEFRALLFVPQRAPFDLFENKKSKNAIKLYVRR

SEQ ID NO: 121253 - protein, 69 aa, Heterodera glycines
  unsure (1)..(69): unsure at all Xaa locations
RNPXDISNEEYAEFYKSLSNDWEDHLAVKHFSVEGQLEFRALLFVPQRAPFDLFENKKSKNAIKLYVRR

SEQ ID NO: 121254 - protein, 69 aa, Heterodera glycines; identical to SEQ ID NO: 121252

SEQ ID NO: 121255 - protein, 69 aa, Heterodera glycines
  unsure (1)..(69): unsure at all Xaa locations
RNPDXISNEEYAEFYKSLSNDWEDHLAVKHFSVEGQLEFRALLFVPQRAPFDLFENKKSKNAIKLYVRR

SEQ ID NO: 121256 - protein, 69 aa, Heterodera glycines
  unsure (1)..(69): unsure at all Xaa locations
RNPDDXSNEEYAEFYKSLSNDWEDHLAVKHFSVEGQLEFRALLFVPQRAPFDLFENKKSKNAIKLYVRR

SEQ ID NO: 121257 - protein, 363 aa, Heterodera glycines
ISALIQAGFAGDDAPRAVFPSIVGRPRHQGVMVGMGQKDSYVGDEAQSKRGILTLKYPIEHGIVTNWDDMEKIWHHTFYNELRVAPEEHPVLLTEAPLNPKANREKMTQIMFETFNTPAMYVAIQAVLSLYASGRTTGLVLDSGDGVTHTVPIYEGYALPHAILRLDLAGRDLTDYLMKILTERGYSFVTTAEREIVRDIKEKLCYVALDFEQEMATAASSSSLEKSYELPDGQVITVGNERFRCPEALFQPSFIGMESAGIHESTYNSIMKCDIDIRKDLYANNVLSGGTTMYPGIADRMQKEMTALAPSTMKIKIIAPPERKYSVWIGGSILASLSTFQQMWISKQEYDESGPSIVHRKCF

SEQ ID NO: 121258 - protein, 658 aa, Heterodera glycines
  unsure (1)..(658): unsure at all Xaa locations
MPSKANAIGIDLGTTYSCVGVFQHGKVEIIANDQGNRTTPSYVAFTDTERLIGDAAKNQATFHKINXVAMNPSNTVFDAKRLIGRKFDDPAVQSDMKHWPFKVVQGEGARPKVMVEVKGEDKAFFPEEVSSMVLIKMKETAEAFLGQTVTDAVVTVPAYFNDSQRQATKDAGTIAGLNVLRIINEPTAAAIAYGLDKKGQGERHVLIFDLGGGTFDVSILTIEDGIFEVKSTAGDTHLGGEDFDNRMVNHFVAEFKRKHKKDLSSNPRALRRLRTACERAKRTLSGSTQASIEIDSLFDGIDFYTNITRARFEELCADLFRNTMDPVEKALRDAKMDKSQIHDIVLVGGSTRIPKVQKLLSDFFSGKELNKSINPDEAVAYGAAVQAAILSGDKSETVQDLLLLDVAPLSLGIETAGGVMTSLIKRNTTIPTKTSQTFTTYSDNQPGVLIQVYEGERAMTKDNNLLGKFELSGIPPAPRGVPQIEVTFDIDANGILNVSAQDKSTGKQNKITITNDKGRLSKEEIERMVQEAEKFSKEDEVQRDRVSAKNALESYCFNIKQTMEDSNLKDKISEDDKKKVLEKCGEVLAWLDANQAAEKEEFEHQQKELEGICNPIITKLYQAGGAMPGGPMPGGGMPGGGGAAGAGGAGGPTIEEVD

SEQ ID NO: 121259 - protein, 105 aa, Heterodera glycines
MNHFGLTFLFVAVSLLTLTGKTITLEVESSDTVDNVKTKIQEKEGVPPDQQRLIFAGKQLEDGRTLADYNIQKESTLHLVLRLRGGNGKRNTSKNKKSNKKLDQN

SEQ ID NO: 121260 - protein, 580 aa, Heterodera glycines
MSDDYRSSIGPRPAFNRNSTAYSSTGGPVSGGNRVLKIVTETMSSSTSGGGGGMSPFGANAAQIRDSRDREKKELSDLNDRLANYIEKVRFLEAQNRKLKADLDMLQGRRGKDTITIKTMYESEIQTAKKLIEDTGRSKHELEQDVAKLQRDLDEQRRKYEEAVRSRAGDREKLDDLLVQLSNLEAEISLLKRRIALLEEELSKLRKENSRLQADLQRVRAELDQETLNRIDYQNQVQTLLEEIDFIRRSHDQEIKDLQAMAARDTTSENREFFRNELASAIRDIRNEYDVLNNKDRNDIESWYKLKVQEIETQSARQNMEQGYQKDELKRLRVQLTDLRGKLSDLEARNSLLEKQIQELNYQLEDDQRAYEDALNAKDAQIRKMRDECQALMVELQMLLDTKQTLDAEIAIYRKMLEGEGDGPGLKQLVEQVVRTTGINEVADTETMRVVKGETSSRQSYQRSAKGNVSILETSPEGKYVVLENTHRSKEETIGEWKLKRRIDGKREIVYTLPANFVLRPMARLKVWARNQGGLHAPPDQLIFDGEESFGVGSNVQTILYNAQGEERATHIQRSSQTAA

SEQ ID NO: 121261 - protein, 158 aa, Heterodera glycines
MAMNTNSIHCSSASSSPSVPMMLSMFCFIFAIFLHPASSSDLLSSSDDAKLQQMLCARFPGLAECQPNDEASRGIMTKRKSAYMRFGRAAAAADPSEEYEMEKRKSAYMRFGKRSPAEEGETYQIWAANEPDAQMEKRKSAYMRFGKRKSAYMRFGRK

SEQ ID NO: 121262 - protein, 398 aa, Heterodera glycines
MLRIALLISILALFGDCMDMGKRKLGGISINEPSEYGTKEKEAIATKENAQTSKDPPTSAGGQNEAIPSPKKPSPKGKLKSDFGLNLAKAFPRPVPKGRRGKEKVGEKISVMNTAERIEKMDIAQDKAKMEIDNIDTNAKPKQNEDKAPTIFPKCADNVEVEVELDRNIFRFSTTLDTMMEDLGMYTAEGTNQKLPVSNVSSTVMREVIEWCEHHKNDASIEPIYEEIALDVPTGKDAEASAPNAQAGEVAEAAESNAKPNNEKRLVFPSWDENFLDKEWPELVDIILAANYLNIKLLLTFATTMVDNKWINGKTPQEIRKAFGVEEPYPPGHPEWARVEKENEWEESDEEREARHAKEREEEEERERKEEQKRKEEEAERLHQEQLQQQQNQEQQPQ

SEQ ID NO: 121263 - protein, 245 aa, Heterodera glycines
MLIMVIVLLTGKIAFAATDGMTDLKLINEGLTTDKIASRSIFLTPLQIILPWVLGKQTAGPKPLNVFLWAYPYRLVMSLALALLVYWTPSFREPNGEYPYFYYAIWIGAYYLQQVSSYCIFLSMMAFNAQISDPKIGGTYRTLLNTLNNLGGNWPVTLFLSITDFFNRKNCVAKGTKIVLGVCTSKHDEELCKAGGDACEFVIDGYYISVAICVVVGLLWYRIFYRRIKYFQKISRQDWRVIKTK

SEQ ID NO: 121264 - protein, 158 aa, Heterodera glycines
LAADCGKADARESKGLADCIMRSSSRTVPSGLYRGFFVSVQGIIIYRAAYFGCFDTAKMLFSPEGKQMNFFVNWAIAQVVTVSSGVLSYPWDTVRRRMMMQSGRKDIMYKNTLDCAIKIIKNEGLLKGMFKGALSNVFRGTGGALVLAFYDEIQKYIH

SEQ ID NO: 121265 - protein, 156 aa, Heterodera glycines
RWRRRSGSNDFTLKMFDYSKTAVKRAMKTITEVEPITAVSFHPSGEFFLCATRHPTLRLYSAETQQCFVSTIPKDQHSDSITDVCYSENARMFVTGSRDGNVKVWDGVSNRCIETFTRAHDGAPICSAQFTRNGKYVLTVGMAVCPNYGNCPPIAV

SEQ ID NO: 121266 - protein, 659 aa, Heterodera glycines
MKKSFVSFLFFTALLVIVCSKEEEGGAKEKKYGTIIGIDLGTTYSCVGVYKNGRVEIIANDQGNRITPSYVAFTPDSGERLIGDAAKNQLTLNPENTIFDAKRLIGREFTDKTVQDDMKLWPFKIYNKANKPHVQVKVGNEDKQFAAEEVSAMVLTKMKEIAESYLGHEVKNAVVTVPAYFNDAQRQATKDAGTIAGLNVVRIINEPTAAAIAYGLDKKEGERNILVFDLGGGTFDVSLLTIDNGVFEVLATNGDTHLGGEDFDPRTIEYFIKLIKKKTGKDLRKDNRAVQKLRREVEKAKRALSVQHQVKLEVESLIDGEDFSETLTRAKFEELNMDLFRGTLKPVQKVLEDADLKKEDIHEVVLVGGSTRIPKVQQLLKEFFNGKEPSRGINPDEAVAYGAAVQAGVISGEENSEIVLLDVNPLTMGIETVGGVMTKLITRNTVIPTKKSQIFSTAADNQPTVTIQVFEGERPMTKDNHLLGKFDLTGIPPAPRGVPQIEVTFEIDVNGILHVTAEDKGTGNKNKITITNDHNRLSPEEIERMINDAEKFAEEDKKTKEVVEARNEFESYAYSLKNQVKRFEKLGGKLSAEDKTTIEGAVDEAISWLDSNKDAPPEELKERKKDLEAKVQPIISKLYAGQSPPPGSEPPPTEEKDEL

SEQ ID NO: 121267 - protein, 374 aa, Heterodera glycines; identical to SEQ ID NO: 121247

SEQ ID NO: 121268 - protein, 367 aa, Heterodera glycines
MAEVGNSYRPPLSEEKQNELRAIAQKILQPGKGILAADESTGRSIGKRFDTIGLENTENNRRRYRQLLFTTPSFGQNLSGVILFDETFRQSTDNGVRFVDVIKKAGAVAGIKVDTGVVPLAGTLDEGTTQGLDKLSDRCAEYKKGGCDFAKWRCVLNIGAHKPSHLALMENANVLARYASICQQNGLVPIVEPEVLCDGDHSLERCQKVTELTLAYTYKALANHHIYLEGTLLKPNMVTPGQSHSPKATPDQIGLATVTALRRSVPIAVPGIVFLSGGQSEIEATHNLNAINSVPGPKPWTLSFSYGRALQSSVIKKWNGKDENLGDAQKVLLHRAKANGDAQQGKYTGEEAAASAAESLFVAKHAY

SEQ ID NO: 121269 - protein, 144 aa, Heterodera glycines
SMEDSQQNITEHSVSAPTTDRNEYEELSKLVNPISKPLANRKLAKKVYKLVKKAAKEKGFLRHGLADVMKAFRKNEKGIIVLAGNVSPIDVYSHIPAICEEKGLPYVFTPSREHLGLCAGYKRPAIVLLVKRHDSYADPFDQTH

SEQ ID NO: 121270 - protein, 200 aa, Heterodera glycines
  unsure (1)..(200): unsure at all Xaa locations
MAWLSRATFCPHQLHQKAVKTPLQKAVTSAAERALDIVGNASRVRLQDLRDNPGARTVGRQVRAKGHNQAGHTIGELQHASKPPLGWVWDDYYKPWQRSFDGDRRFNGDINLRREYIPISLVELQRLIDLGWLDTSRLVDIAAICATKLLEQKFKPELRQFGIHLTDEGEEIFSTPINLEVQWASCTAIAAIERAGGRIX

SEQ ID NO: 121271 - protein, 209 aa, Heterodera glycines
  unsure (1)..(209): unsure at all Xaa locations
RKTGVRELEVLKKLNEADRLDKYHILQLYRQFYHRNHLCLVFENLSMNLREVLKKYGNNVGLHMKAVRSYAQQLLLAMKLLKKCNILHADIKPDNIFVNETKMLLKLCDFGSACHVGDAEPAPYLVSRFYRAPEIMLGLPYDFGIDLWSVAVTXFMMDLRGKFPNKVIRKAVFKDQHFDYNCNFLYHETDXVTGQDKSTVLTNIKLLRN

SEQ ID NO: 121272 - protein, 189 aa, Heterodera glycines
  unsure (1)..(189): unsure at all Xaa locations
DVWQYYIIQSGFYLSLLFSLFAFDVRRSNHYEMATHHLATILLLFMSFSINFVRAGTLILLLHDSADVFLELGKLFRYAGWDRAVTIDFCVFMLVWISTRLVYFPLKLVRYMLFDAPKLIMETYXVKIXWTDILQKPIIPRVFLAVLCILLLLHIFWTYLLIKIAIKSVKSGVDDIREDEDDDSEEEAE

SEQ ID NO: 121273 - protein, 165 aa, Heterodera glycines
MSSHNTSVIDENRRWSDLRCLTDRASTFANSGFVPGIKNLKEVHKMPVLVVGAGGLGCEILKDLALSGFHDIHIIDMDTIDLSNLNRQFLFRENDIGRSKADVAAAFIEKRVFGCKVTPHNCKIQDKSLEFYRKFFIIICGLDSIEARRWLNATVCSLVEFDDGN

SEQ ID NO: 121274 - protein, 202 aa, Heterodera glycines
LLRFKFMQFFDMNLRYDPVRINQLYEQAKWSVLLEEVEHTEEESSLFAALQLQAALQRNSPDRESPERDEVDVLLDELEQTLDTTASLSRRDLTYVPELTEYLKYLKPKKLGFNNFKRAYFTFRDLYLSYYNTAQDANGPPLGHYYLKGCEVSQDLSVSQGKFNIKLQVPSSEGMSELILKCDTEQQFAKWMAACRLASRGK

SEQ ID NO: 121275 - protein, 138 aa, Heterodera glycines
LLNVLLQAYDFQPVEKFQAYVHWAAKHFGIQIVESYALAHTSELVKEYKAGSTIPVSQSVLKTYSRVVRVGPVPGIQLPLFIALLQAHAPVGMKIVVKKHSPRDERCRYIPDPQLEDFKETLRNLDDPVVRKLLGWEA

SEQ ID NO: 121276 - protein, 166 aa, Heterodera glycines
MFLTRSEYDRGVNTFSPEGRLFQVEYAIETVKLGSTSIGIHTKEGVLSAAERRSMSKLVVDDSMSKISEVEKHIAVASAGLIADSRTWVEHARVEAQHFWFTYGGKIRVEDITQKVSRLALHFGDDDSTISLGRPFGVSMLFAGIDHTGAHLFHLDPSGTYIKCLA

SEQ ID NO: 121277 - protein, 185 aa, Heterodera glycines
MSDNNLEAKYTGFELSYKSEGTDPTVISPMVTAKPTIAITKRPPKTLTNITPKITVETTPRITTTTDTMPRITTETSPRTTTETSPKTTTTSEPTTETTAEPTTPKEEEGIWSKWGGWSGCSASCGACGHRRRVRTCFKGKCKGESGQMERCAFGICPLAKRRTNRCQGRLVMPCDLMESLEFGT

SEQ ID NO: 121278 - protein, 146 aa, Heterodera glycines
AYLNLEVALGTEESLQEVFKRACAVSNSIQMHRYLIGLLKKQTNAKGREEEIGELYESMIKRFRPLELEPWFEYGRPLLQQNDADAFQNLLKRFFQCSEKKRHLTILMRFAQLEKGCGDKERAKTIDELIKNVKEGKKRTDASPVE

SEQ ID NO: 121279 - protein, 195 aa, Heterodera glycines
HILCPKCNGVGGAKEGVKQCENCRGRGLEIHNMQIGPGMIQRIQRACSECGGEGEINRNPCKHCGGKKRIKSEETIEVHIEKGMRDGQRLMFYGKGDQQPGLEPGNVIIVLDEEEHPVFTRRGTNLTLNMKLTLTEALCGCTKHVVTLDKRILSFTQLPGEVINHRDFYVIQGEGMPTHRHPDQKGDLIIQFFVD

SEQ ID NO: 121280 - protein, 147 aa, Heterodera glycines
MLSINETVLNQLLHQFRWDFKIIEEKIPLNSSSLPEETRDFFANLCPQCIFIFNVSADGLPSMTIEDDSILIKIHNRIAAEVENPTIGESGQKKTAIDLTLSLAVQLIPQVRDGIFHTQLNLKERKIDMKNKTAFPKQMKPVVEELL

SEQ ID NO: 121281 - protein, 133 aa, Heterodera glycines
MNMNQLLVGRSLFPKIIRPFSHTKPLAKSEADPDDYGYFPDPIEHSWGLERKMLIARLKGDDRYEPKVYFRAEHTTRDYPNLVPVHLQDKVVGCLCEPDAEYVNYWHIRKGQMKRCECGHWFKGVQADPDSFA

SEQ ID NO: 121282 - protein, 191 aa, Heterodera glycines
  unsure (1)..(191): unsure at all Xaa locations
MVNWPWSAKQRDEPAQDKQKVVTTHPEPTQGIHGIRTILMGPPGAGKGTQATKLAKKYESCHLSTGDLLRAEIKAGTPLGQKIKGLVEGGDLVSDDIVCEMIDKHLSTAECRNGFILDGFPRNTAQAEKLDALLEKRQRPLQAALELALDDSLLVKRITGRLFHVPSGRSYHEQFNPPXKAMTDDXTGEPL

SEQ ID NO: 121283 - protein, 212 aa, Heterodera glycines
FIDHNNKTTTYNHPRTGRPVGPLGGPGLHMAADKTFKNKVAQFRYLCYSNSVPNHVKISVTRNNLFEDSFQEIMRKNPFDLRRRLYIQFKAEDGLDYGGIAREWFFLLSHEVLNPMYCLFMYANSSNYSLQINPASFVNPDHLKYFEFIGRFIAMALFHGKFIYSGFTLPFYKKMLNRKITLKDLESVDTEFYNSIVWIRDNDIDECDMELY

SEQ ID NO: 121284 - protein, 133 aa, Heterodera glycines
MFLTRSEYDRGVNTFSPEGRLFQVEYAIETVKLGSTSIGIHTKEGVLLAAERRSMSKLVVDDSMSKISEVEKHIAVASAGLIADSRTWVEHARVEAQHFWFTYGGKIRVEDITQKVSRLALHFGDDDSTISLG

SEQ ID NO: 121285 - protein, 196 aa, Heterodera glycines
  unsure (1)..(196): unsure at all Xaa locations
AQRLVAIVTGGASGLGCATVRRLVAKGFNVSLLDLPMSEGAKVVFXLGTTDNVLFSPVDISSDDQVKKAMDATTEKFGGLNVLVNCAGIAFAQRLYNPSSRAQMDLDKIRRLIDVNIFGTINVIRHALPLLIDNVPDENDQRGVIINTSSIAAFEGQMGQTLYSASKGAVASLTVPLARDYSNNGIRVMAIAPGLM

SEQ ID NO: 121286 - protein, 204 aa, Heterodera glycines
  unsure (1)..(204): unsure at all Xaa locations
MPPLFPEKVESIRHLSTKSWEATFTKDYXSYEGQLRFLSRMCYLAMAHYLLYRGVLPKGVFKRRKLEDLAIYCFDGNTRWGRKLSEMMKGIREAIDQKYIKQAFVMINEDKEDPDVATEVFSVGFCYNEQHTMTVLDDKGNRIVSFGYKGEKVFRMQVKHIIKKLSVVTKNLEPLKKGAVPYLKLTYYENTPDDYEPSMFKHCE

SEQ ID NO: 121287 - protein, 87 aa, Heterodera glycines
MTLSFNEAASVVKTLRTSPSNDELLEIYALYKQATCGDNNTCKPGTFDFRGKAKWEAWKKKQGISQEKARIDYVKIVEKMVAKYGVN

SEQ ID NO: 121288 - protein, 148 aa, Heterodera glycines
MAKKQYDLLFKLLLIGDSGVGKTCILYRFSDDAFNTSFISTIGIDFKIKTIELRGKKIKLQIWDTAGQERFHTITTSYYRGAMGIMMVYDITNAKSFDNIAKWLRYIDEHASEDVVKMLLGNKCDMSDRRVVPKERGEKIAIDHGIRF

SEQ ID NO: 121289 - protein, 151 aa, Heterodera glycines
MRTPLELAGKRLAAIRYDRNNRLMAELFSPSYLPDPRAFVPQQRIDHFRRQRMSLEQHQVKSNEELARMAELFSQRKRAIQRDSEAYHEMLKKVCAERPRVDQQRCEELTEQYKEQLLNAWDQFQTKQAAIQAKLEADRRANPVLAELITG

SEQ ID NO: 121290 - protein, 176 aa, Heterodera glycines
MAPAPEKEKTEDKKLKDGQKPNVTTDHAHCLSNVQPNLPVNKVVVHPLVLLSVVDHFNRVNKTHKVNRVVGVLLGCMKHDKTLDIANCFAVPYDEDSENSNIFFLDADFLEDMFGMFYKVAARERIVGWYHSGPRLCKNDILINEVIKRFTPNPVLVIIQAAQGRQDLALPTDAYV

SEQ ID NO: 121291 - protein, 196 aa, Heterodera glycines
QNQKDADSERILARRKRIELYKETNEQVKREKLQKEQAQANKQEEQRRREELKKLQEENKENERRRKLNEQEEIQRKLQSEKLKKYQAHPFFQQLVKEHGEAIFDKVDPDKLIREKRIRFDAERREQQTKLQNLEKKYDHTVRAFHLEEMALWKHLSDERQRIYPGLHEAYETKRIEKAVKERELSFEKYAYLVSA

SEQ ID NO: 121292 - protein, 181 aa, Heterodera glycines
FECIRDNLLTFIKANMRKMLFDKISAVLVLDTLEVPSPSDPFLREIGDSDLDDCFRAIAEIATDEFVPHSPDGPSHIVQGGCARFVFRKLLQADPGRCDGHRLSDFLTDLPADNLSSWTSMDCGCYTLVEVFKSGSDKARKVLRRALSVAMLQNSHLSGAKSLLDLLLGKGKEQPPREHSV

SEQ ID NO: 121293 - protein, 172 aa, Heterodera glycines
ISDSEDERHNPRKAIKLPGTRHTDMAERSIHQPVTVTKMGFCPTGGSFAVVSTEGVALYSLFQMRRFDPFQLEIDVVPNSIVQFSLSGEHAKAISLALRLNDAKLTRRVVESVPILQLSAVVRGIELIYIERLIVWLLFFADKGHQKHVHFYQLLVREILIANASKLKQSVD

SEQ ID NO: 121294 - protein, 185 aa, Heterodera glycines
MASNLTVKVHPIVYMSIVDAYERKSSSNINSRVGTVRSVETTENRALGTLLGFYKKNVVQVTSCYAVPFRETSDDIPEINDALNRQMWHMSKRTSPSEQIVGWFFTVPDLSEMCPHYHGYYTGLVNETPRKEPPPIILITMDFTFSGESADRLPIKAYAAREAGVPGKGATQATIFYPLKVEMDV

SEQ ID NO: 121295 - protein, 151 aa, Heterodera glycines
  unsure (1)..(151): unsure at all Xaa locations
MDHMKPKMVHAFLTSLFYQRRSKMNPFLNTMVVCGMQPVEFHAGXIKPFTGVIDMRGNAYEVDHVATEIGKYLLRQMLETRQTQANGAEQMSKEEALRMVAAALEVSVSRNSRTGQMFDVSTVDANGVKFHDQFQIIGKWDEIEVCDGTYK

SEQ ID NO: 121296 - protein, 179 aa, Heterodera glycines
GICVCVRKRPLGKRELASREVEVITVPNRDHVIVHQPQVKVDLTKYLVNHKFRFDYVFNEAATNEMVYRFSAQPLVRTIFQRGFATCFAYGQTGSGKTYTMGGIIEGRRQDCSNGIYAMTAHDVFAMLHSPEYANQKLTLSCSFFEIYGSKVFDLLNKKSVLRILEDGKHLVQVVGLRE

SEQ ID NO: 121297 - protein, 128 aa, Heterodera glycines
DEVAPIDSITPVFSGAEWYEREIYDMYGVWFNNHPDLRRILTDYGFEGHPQRKDFPLSGYVELRWDHELNRVIYEPTEMTQEFRKFDLNTPWEVFPAFRDESITSGYNVIQKAGKIEAKKLDDASKKP

SEQ ID NO: 121298 - protein, 82 aa, Heterodera glycines
MARSPLFLLSIFIRTEFVLCAVKSKNLLNLNDENWRNILSGQWMMEFHAPWCPACKDLQKSWNSFADWSKDLNINVAEIDVT

SEQ ID NO: 121299 - protein, 147 aa, Heterodera glycines
GNPATVPFVPISGFNGDNMLEPSDRMPWFKGWAIERKDGNASGKTLLEALDSILPPQRPTDKPLRLPLQDVYKIGGIGTVPVGRVETGVLKPGMVVTFAPQGISTEVKSVEMHHESLPEALPGDNVGFNVKNISVKDIRRGSVASDS

SEQ ID NO: 121300 - protein, 123 aa, Heterodera glycines
GNKIHPRPRKVLQLLRLRQINNGVFVKLNKATIQMLRIADPYIAWGYPSQKIIRQLVYKRGYAKESGQRIPITDNAIVERNMGKSDVICVEDMIHQIWTVGPHFKQVTNFLWPFKLSNPVGGF

SEQ ID NO: 121301 - protein, 74 aa, Heterodera glycines
IGGAQKRSKSTLKKYTERQKTAGVEPHLLEQFQAGRLLACISSRPGQSGRCDGYILEGKELEFYNKKLKAKKAK

SEQ ID NO: 121302 - protein, 111 aa, Heterodera glycines
EKIAEMKTLFQSIYQLLRFESLHRLACAATECVCAFSVCTLLQTQLFQAGVIWQLLPHLFRFDYTLDEGGVAHSEKTNHQAVLNRLARNCCEALACLAGFRPDTPDNDGVQ

SEQ ID NO: 121303 - protein, 108 aa, Heterodera glycines
  unsure (1)..(108): unsure at all Xaa locations
EYMSSGSMSRFLQRARSSGSLLNIKAWKSXTRQILTALSYLHSCDPPIVHANLTCNSVFIQQNGLVKIGCVAPKTIHHHVKTFRENIKNVHYLAPEYDHQKKNKKKKK

SEQ ID NO: 121304 - protein, 123 aa, Heterodera glycines
FLGTSGQNINDLRRLTRGKDTLALMERTLEMGYIFPTVPDTLPGFPFSGRDPLVLDQIPHIYFVGNQPTFEKRIVEFGGKPTKRCCLLAVPKFCKTKSVILLNLRTLESNEYCFGANFNESGQ

SEQ ID NO: 121305 - protein, 142 aa, Heterodera glycines
GRLQDVRFLRQDAKPEDKSNEQNIPPGTVVDTVVVFFKRSEFFLNSHVAIKGTACTPHYTVLRDENDMSMDTLQTMVHYLCFGHQIVTKPTSLPSPVYIADEYAKRGRNIYSHYAKNGIDNSKNLQLFAKNKGVEWPLRTYA

SEQ ID NO: 121306 - protein, 165 aa, Heterodera glycines
MSSGVMVNSECQNAFQQLSEGKRYRYIIYKIVDKEVIVEVAVSSEDIGSTGTESYDDNSKAAYETFVKDLKERTEGFVDCRYAVFDFKFQTQRPGAGTSKMDKIVFIQLCPDGASIKKKMLYASSASAIKASLGTAKILQFQVSDESEIAHKELLSKLNEQYRDN

SEQ ID NO: 121307 - protein, 84 aa, Heterodera glycines
  unsure (1)..(84): unsure at all Xaa locations
MMDLRGKFPNKVIRKAVFKDQHFDYNCNFLYHETDKVTGKDKVTVLTNIKLLRNLPAELXMTALDPSKRISCSDALKHPFIVEK

SEQ ID NO: 121308 - protein, 110 aa, Heterodera glycines
YLLYAVLVHSGDFHGGHYVAFINTNLKGSPRWCKFDDDVVSRVTSRDAVTANFGGENPEGVGRSFTNAYMLVYIKKSATGEVLGSVSEEDVPDHLKVRFESEKKKKKKKK

SEQ ID NO: 121309 - protein, 155 aa, Heterodera glycines
GYKRNLQVLSPYKYAGYTQLIKTIDLESSDDTLFARTKEDGGQLLVAAVELCHWTLRSSSLNAEQLRRDGGLDALYKTFERCVPMITACSLESEMPVQVCTHVCNCFATAARFDACREKIAEMKTLFQSICQLLRFESLHRLACAAAECVCAFSV

SEQ ID NO: 121310 - protein, 128 aa, Heterodera glycines
MKVKVISRHPDEYQRETKHDIFKVPRNYAAPPDPFQQQVEYTRALNAAKLERMFAKPFLAAFDGHNEAVNLLVKHPTRLSTVLSGARDGQVRVWHLATRRCLHVLQAHSGPINGLSVDASDGLHFVTV

SEQ ID NO: 121311 - protein, 154 aa, Heterodera glycines
GQDYSSFSRRAKMPIIDGDRPNFNIPELPHNLNTLLDLSEEEILKTDKEVRHLKNQNEALISEEKRILEESAESQFEFVRLQELEQLVSKFCVSAEESSLDECKKLFQKLHKQFEAEFKMYGLDALAMPIVLPKIKRYFMEWDPLNPEQTFFGF

SEQ ID NO: 121312 - protein, 124 aa, Heterodera glycines
DSTFFLVLNSWTKMCDEEVAALVVDNGSGMCKAGFAGDDAPRAVFPSIVGRPRHQGVMVGMGQKDSYVGDEAQSKRGILTLKYPIEHGIVTNRDDMEKIWHHTFYNELRVAPEEHPVLLTEAPL

SEQ ID NO: 121313 - protein, 170 aa, Heterodera glycines
GCDIIKISSMVPNRERFVKRRARLVGQNGATLKAIELLTECFVHIQGGTVSSIGTHFGLKQVRKIVEDCMKNIHPIYNIKTLMIKKELMKDDKLRNENWERFLPKFKKKVQNAKDIRKTKQKSKTKWKTKADYTPFPPPQKARKVDEQLETGEYFLNEKVNHKQKKMKRE

SEQ ID NO: 121314 - protein, 123 aa, Heterodera glycines
MPPKPSGKGAKKAVKSTKAVRTGDKKRRKARKESYSVYIYRVLKQVHPDTGISSKAMSIMNSFVNDVFERIAAEASRLAHYNKRSTISSREIQTAVRLILPGELAKHAVSEGTKAVTKYTSSK

SEQ ID NO: 121315 - protein, 164 aa, Heterodera glycines
GVNKDSYLILEKLPPEYDSRVKAMEVDERPKETYSDIGGCDSQIRELVEAIVLPMTKKDLFINIGIQPPKGVLMYGPPGTGKTMLARAVAAQTKSTFLKLAGPQLVQMFIGDGAKLVRDAFALAKEKAPSIIFIDELDAIGTKRFSSEKAGDREVQRTMLELLT

SEQ ID NO: 121316 - protein, 209 aa, Heterodera glycines
ITAPGDRVTYMINKTSYVNPEHLDYFRFVGRVIAKAIYDNKQLDCYFTRAFYKHVLNKHVRYQDIESEDPDLFKSLEFLLNNAVEDLGAELTFTVEVEEFGVRSTRQLLENGNKTTVTDANKHEYVHLMCQMKMTGSIRQQLNAFLEGFYEVIPKKLISIFNEQELELLISGLPDIDIDDLCANTEYKTYTRTSPQIQWFWRALKAFDA

SEQ ID NO: 121317 - protein, 93 aa, Heterodera glycines
MNHFGLTFLFVAVSLLTLTGKTITLEVESSDTVDNVKTKIQEKEGVPPDQQRLIFAGKQLEDGRTLADYNIQKESTLHLVLRLRGGNGKRNTS

SEQ ID NO: 121318 - protein, 155 aa, Heterodera glycines
GSASKFFLKSNDDEVFEVDRNVIRLSTTLNTMFQDLGMDQAEAGEKMYTDPIPLANVNGAILRKVIAWCNHHKDDVPTGEDAESKERRTDDIPSWDVEFLKVDQGTLFELILAANYLDVRGLLDVACKTVANMIKGKSPDEIRRTFNIKNDFTPE

SEQ ID NO: 121319 - protein, 131 aa, Heterodera glycines
  unsure (1)..(131): unsure at all Xaa locations
SMEDSQQNITEQSVSAPTTDRNEYEELSKLVNPISKPLANRKLAKKVYKLVKKXAAKEKGFLRHGLADVMKAFRKNEKGIIVXWQGTFHRLTCTVIFLPFVKKRVFLMFSLRLVNTLVFVLAINVLQLSFW

SEQ ID NO: 121320 - protein, 167 aa, Heterodera glycines
GERIIEVSHWGGNIAVEENVEILHKGAKLKGSFSRLDFQMDRRGSRQPVIKNFKTILPAASNDIYYRDEIGNISTSNVYPRADRVEVELRPRFPLYGGWRTNYILGYNVPSTSFLRHSGSNFAIKMKLMDRLYDNAVVEKLCVKIILPETSKNIKLVTPYSVKRLPD

SEQ ID NO: 121321 - protein, 50 aa, Heterodera glycines
PVHLQDKVVGSLCDPDPEYVNYWHIRKGQMKRCECGHWFKGVQAAPDSFA

SEQ ID NO: 121322 - protein, 140 aa, Heterodera glycines
MPEELVALSPGTRVSGRWTIIKKLGAGAFGAVYLCQDRDGRTMAALKTEPIDAQRPLLYMEAHVLLSLNELRSNSGRHFCRCLDLGRDEQPDADSGQTMEFNYVVMSLVGRPMDKLLHESGDRFSPGTAIGTSIQLLKAL

SEQ ID NO: 121323 - protein, 138 aa, Heterodera glycines
RNLHSITYAKSNSIIRMLFNHLGEATFQKAIRDYLKKHQYANAETNDLWKSLSDASGIDVKALMSSWTQQMGFPLVTVEEKILDGDRIELHLKQSRFLADGGHDEANPVWQVPFGVTTAADPTHPNAKFLLMKAEDKF

SEQ ID NO: 121324 - protein, 179 aa, Heterodera glycines
MASRPLVSIYNEKNEPTGKQIKLPAVFRAPIRPDIVSFIHDQIRKNKRQAYAVSTAAGHQTSAESWGTGRAVARIPRVRGGGTHRSGQGAFGNMCRGGRMFAPTKVYRRWHRRVNVAQRRYAIVSAIAASAVPALVQARGHVIDQLNEIPLVISDKIESFTKTKEAVGFLQRAHLWDDV

SEQ ID NO: 121325 - protein, 118 aa, Heterodera glycines
MNHFGLTFLFVAVSLLVIAPGCDGMQIFVKTLTGKTITLEVESSDTVDNVKEKIQEKEGIPPDQQRLIFAGKQLEDGRTLADYNIQKESTLHLVLRLRGGNGKRNTGKNKKSNKKLDQ

SEQ ID NO: 121326 - protein, 128 aa, Heterodera glycines
LNDTELTDLSILMGGDSTAKLSGGGNANTMGGSDGLAASIPMLYPPRSQIKRQKMTYHCKFGEFGVIEGQFTEPSGVAVNAQCDIIVADTNNHRIQVFDREGRFKFQFGECGKRDGQLLYPNRVSVNR

SEQ ID NO: 121327 - protein, 215 aa, Heterodera glycines
GSNGWHASNGPALSLLGYRKAVNRDVFGGQMFAQAIAAAEATVDGDEFAPNAAHSMFIRKAFIDHPIEYIVTRTRDGRSFCTRTVEARQNGETVFCAQISLCVKERSSIEHQTEMPAEVPEPEELVPFFETVRRVVTEHDEGRTERNGRTIANLRAVLEDEQQPSVFEFRPIHSDIFLGIRPHSPTPIRYWLKCAVPLGSERTNKALNRFLLAFI

SEQ ID NO: 121328 - protein, 203 aa, Heterodera glycines
GKCRDLFPVCFEGAKAMVQKGLSSHFQVSHNISISPALNGYRFGATYVGYMQATPAEVFPVFFGEMDLQGNTQATVLHQIGNFRGKFQGQIQQNMLAAAQFSLEHRGRLSTYGLTFANPSVSANNCQGTLVAQMLRRVTKNLDLGAEYIYHRDERFPGKQSNTLSYALRYIQPTWIFSGTLAPTELHLCYYHKQSEHLQFGVE

SEQ ID NO: 121329 - protein, 183 aa, Heterodera glycines
MGKEKIHINIVVIGHVDSGKSTTTGHLIYKCGGIDKRTIEKFEKEAQEMGKGSFKYAWVLDKLKAERERGITIDIALWKFETSKYYVTIIDAPGHRDFIKNMITGTSQADCAVLVVACGTGEFEAGISKNGQTREHALLAQTLGVKQLIVACNKMDTTEPPFAEARYTEVMTEVSNFIKKIGY

SEQ ID NO: 121330 - protein, 188 aa, Heterodera glycines
  unsure (1)..(188): unsure at all Xaa locations
GKPNERNYGIGADGLPIEGRLYQQGDCYYGTFNLVSGQFNEHKFTNSEPAYCGLVRIVQEAEXKKNVHVLIQWRIQRNPIIGDKFASRHGQKGINSFLWPPESMPFSESGMVPDIIFNPHGFPSRMTIGMMIESMAGKAAAMHGTSYDASPFVFNEQNTAIEHFGKLLAKSGYNYYGNETMYSGIDGR

SEQ ID NO: 121331 - protein, 143 aa, Heterodera glycines
GSTSFLRHSGSNFAIKMKLMDRLYDNAVVEKLCVKIILPETSKNIKLVTPYSVKRLPDEVHKTYLDTFGRPVIVLEKENLINNHIQPFTLYYEFDRFSMLYEPLLIVVAFGALFLAAVILFRLDFSIAGKDEKEAASGHQKKE

SEQ ID NO: 121332 - protein, 228 aa, Heterodera glycines
FKDRLVSMVLDTDVEVATKTCQLMTHIYRAFPALLDPGACVPLYELVYCNNRQLATAAGEFVNAKLFSTAADNSLLTSSTSLLTPPAENRQLIKDLVTFFIDGAVHRHPAYLVDSLIDICPMLKDWSTMVDILLSDEFDQFDTQLISIMCAAVKHAATGEHPPNRIVVSIRRGPGAGTEKKDLRMLHDGRVHLSEVFIPKLPRLLQKFIADQEKVRDLIGLFLYFELE

SEQ ID NO: 121333 - protein, 128 aa, Heterodera glycines
YNASNNELVRTKTLVKGMIVSIDAIPFRQWYEAHYALPLARKKGQKLTENEKARIGGAQKRSKSTLKKYTERQKTAGVEPHLLEQFQAGRLFACISSRPLQSGRCDGYILEGKELEFYNKKLKAKKAK

SEQ ID NO: 121334 - protein, 168 aa, Heterodera glycines
MVATFEKLVKTDGKAPDDLEKQVATALSELAHNSEIKAQLSELYFVGAQEYEFGNKKCILVWIPVPQLRDYQKIHPKLVRELEKKMSGCHVIFIAKRRILPKPQRGKNRKPLGQKRPRSRTLTAVHDSILADVVFPAEVVGKRTRVKLDGKQIIKVHLDKAQQTTVEH

SEQ ID NO: 121335 - protein, 191 aa, Heterodera glycines
MARNRPNANIITSDLGEAQIKKHRPKDTRLLQQRLVAWQPILTAKTVIPLVFSISILFIPIGIVLLRISQSVQEYVVQYVNDANECKDYHANGQCAVNFTLNEDFKGDVYFYYALENFFQNHRRYMKSRNDQQLSGIDFLNTKDCTPFEKAPDGRPIAPCGAIANSLFNDSFQLNYLGRNGNGYANISWSH

SEQ ID NO: 121336 - protein, 145 aa, Heterodera glycines
  unsure (1)..(145): unsure at all Xaa locations
GISKIREEYPDRIMCSFSEVPSPKVSDTGDEPYNATLSVHQLVENTDETLCIDNEALYDICFRTLKLQNPTYGDLNXHLVSVTMSGVTTCLRFPGQLNADLRKLAVNMVPFPRLHFFMPXCAPLSAKGAAAYQALSVSQLTKQMY

SEQ ID NO: 121337 - protein, 107 aa, Heterodera glycines
LQHLKTYKSNRPVNTASVSPSRDHIVLGGGEEHMEVTQTATTAEQFVARLYHLIFEEEFARFRGHLGPINSIIFDPTGDIVVFGGEDGYVRVQELDQSYKEFHFDIS

SEQ ID NO: 121338 - protein, 174 aa, Heterodera glycines
GDLTGIPPAPRGVPQIEVTFEIDVNGILHVTAEDKGTGNKNKITITNDHNRLSPEEIERMINDAEKFAEEDKKTKEVVEARNEFESYAYSLKNQLGDSEKLGGKLSAEDKTTIEGAVDEAISWLDSNKDAPPEELKERKKDLEAKVQPIISKLYAGQSPPPGSEPPPTEEKDEL

SEQ ID NO: 121339 - protein, 201 aa, Heterodera glycines
  unsure (1)..(201): unsure at all Xaa locations
GEHMVQACLLLASKIEEEPRKPRDVLNVYNRLKQIHHRRNAVASQHPEDLQKLSKKFEHLELCSKRYQELKNIVIKAERRLLNVLGFVVHVHHPHKLIYIYLHILDQLKNDQKKYSASEIRKSRQLLQKAWSFMNDGLRTDMFLRYTPETIACACIQLAVRTVDQPIVLPTEPXAWFELFDASDRDVRAISQTXWELYTRK

SEQ ID NO: 121340 - protein, 219 aa, Heterodera glycines
GQRFGNKSFKKWFERLMSDGQSLLSDLFPENLKSAVLEIWPYLMDSFGNSTRIDYGSGHETSFLIFLFCLYEIGVLHSPDDDRASILRVFHRYLKLARRLQCEYRMEPAGSRGVHAIDDFQFLPFLFGSAQLIDNKQRLIPDYYLRPDMVTQHQDDNLFFEAIHYINQTKIGPFHEHSNQLYNISAVNTWDRINEGMFKMYEGEVLKEVPVVQHFLFGS

SEQ ID NO: 121341 - protein, 178 aa, Heterodera glycines
GFTKSFGAAGGYLAGKSSLIAHLRRHSPTSFYSLAMSAPVAQQVFTSMSIIMGRDNTDQGWRRIERSARNTRYFRLRLKQMGFIVYGSNDSPVIPIMIYHPTKCGLWGRLLLERKISAVVVSFPATAMTESRCRICISAAHDKEMLDRVLDAIDEVGDISATKHSHRTHRYRQLDVKW

SEQ ID NO: 121342 - protein, 180 aa, Heterodera glycines
MSLTGGTVIALAYKGGVAMATDRTVFASGVHRFQNNTRQYRLNNYCLISFSGDFAEFQWLQNLLERRQMELQIDAGMDHMKPKMVHAFLTSLFYQRRSKMNPFLNTMVVCGMQPVEFHAGEIKPFIGVIDMRGNAYEVDHVATEIGKYLLRQMLETRQTQANGAEQMSKEEALRMVAAAL

SEQ ID NO: 121343 - protein, 178 aa, Heterodera glycines
GFTKSFGAAGGYLAGKSSLIAHLRRHSPTSFYSLAMSAPVAHQVFTSMSIIMGRDNTDQGWRRIERTARNTRYFRLRLKQMGFIVYGSNDSPVIPIMIYHPTKCGLWGRLLLERKISAVVVSFPATAMTESRCRICISAAHDKEMLDRVLDAIDEVGDISATKHSHRTHRYRQLDVKW

SEQ ID NO: 121344 - protein, 161 aa, Heterodera glycines
VIRNVKPWEQDPHYFKEVKISALALVKMVMHARSGGNIEIMGLMQGRVDANTIIVLDAFALPVEGTETRVNAQAQAYEFMTNFSESCEAVGRLEKVVGWYHSHPGYGCWLSGIDVNTQSINQQFQEPFVAIVIDPIRTVSAGKVDIGAFRTYPKGYKPPDE

SEQ ID NO: 121345 - protein, 77 aa, Heterodera glycines
MVWKGLNVVKQGRVLLGATNPLASAPGTIRGNFCIEMGRNICHGSDSVPSAAREIAHWFNPEELVDWESAQNAWVYE

SEQ ID NO: 121346 - protein, 103 aa, Heterodera glycines
EVYQVAAATELYSRDWRFHKVERVWLMRAPFSAPPREIGGTYDRCSYLVFAPIQWRRIPREMVLEYKDLEGNPSVPGTGQSSASAGSMPPLKPDSGADQSMFS

SEQ ID NO: 121347 - protein, 86 aa, Heterodera glycines
NWAIAQVVPVSSGVLSYPWDPVRRRMIMQSGRKDIMYKNPLDCAIKIIKNEGLLKGMFKGALSNVFRGTGGALVLAFYDEIQKYIP

SEQ ID NO: 121348 - protein, 122 aa, Heterodera glycines
MAFGQKGKLLAVIGDEDTVVGFLLGGVGQLNKARKPNFVIVDKNTSVAEIEDAFRTFCTRDDIAIILINQHVAEMIRYQVDQHVASIPAVLEIPSKEMPYDASKDSILNRARGLVNTDDLKS

SEQ ID NO: 121349 - protein, 200 aa, Heterodera glycines
MSFAKSCSLAKHCKPLTAAPPRPVITWDKHERIRRNKEIWDNPKSVVHRLPRHYQERYWKNFVLADQTAVNYKVPPFRFYWDEHRKIELETEYFPILPIYCPEMDQGLWAGEGIIKGYSESDAKIKKKILPREWLPRLWIPHLNLVPLYSEVLDKYFKVTVTERLLRAVDKHFGFDLYLLETPDIDINSRLGLDLKRLIL

SEQ ID NO: 121350 - protein, 172 aa, Heterodera glycines
ALASVLLQQQKFSAVASSPNKNLNAVLIDAVRTPFLQSNTTFRELLAVDLQRHALKALVERTKIPFDEIGHIICGQVVQECKTSNIAREAAITAGFPDSIPCNTVTLACISSGVSIQNISLMISTGYLKAGIAGGVELLSDFPIRYNRKVRLSLIDLQKAKSFGERFKHLKT

SEQ ID NO: 121351 - protein, 149 aa, Heterodera glycines
MEKLLSPNIANAQSTSTTTTSATASSNNKEENSKEKDAEQICHWIRELREHEKRENALLQISKRREGVEDLAVWLWFSYGTVSVLLQEIISIYPFILPPTLTAAQSNRVCNALALMQCIASHRNTRKQFLDANVPLYLYPFLHTTSDSR

SEQ ID NO: 121352 - protein, 81 aa, Heterodera glycines
GFDNFLVADSVEDAKKHAADTFDQLKEAEKKQKEAHDEEERKKFEEEEKKRKEEEEKKPKKDEEEVEEDEEEKKEEEHDEL

SEQ ID NO: 121353 - protein, 165 aa, Heterodera glycines
PNEIKECLKDIKVCGPAELRSILKWRKKLVDEQKKEEKASKESVKSAEEMVEGDTGEELEENTEFKELEEIDDLIRPAKAEEKATLKKRKRKLLKAKRNLEERKKLKMVHEGDDPTIGEDLELFSLKTVKRLAERAAKAVKGIKEEEEEKESNDEDAKKKKKKKK

SEQ ID NO: 121354 - protein, 151 aa, Heterodera glycines
IKLPGTRHTYMAERSIHQPVTVPKMGFCPTGGSFAVVSTEGVALYSLFQMRRFDPFQLEIDVVPNSIVQFSLSGVHAKAILLALRLSDAKLKRRVVESVPILQLSAVVRGIELIYIGRVIVWLLFFADKGHQKHVHFYQLLVRGILIANAS

SEQ ID NO: 121355 - protein, 101 aa, Heterodera glycines
GTKVDILDQFHEIKIAIGYELNGRQIEYPPATVDDWANLCVHYKTFEGWQSPTTSARQWEQLPDKCRAYLEFIQNQLGVPVEYIGVGKGREQLIVRTNNGG

SEQ ID NO: 121356 - protein, 173 aa, Heterodera glycines
MLIMVIVLLTGKIAFAATDGMTDLKLINEGLTTDKIASRSIFLTPLQIILPWVLGKQTAGPKPLNVFLWAYPYRLVMSLALALLVYWTPSFREPNGEYPYFYYAIWIGAYYLQQVSSYCIFLSMMAFNAQISDPKIGGTYRTLLNTLNNLGGNWPVTLFLSITDFFNRKNCVA

SEQ ID NO: 121357 - protein, 164 aa, Heterodera glycines
IPDEEANFAAIQFDFSKNIHIELEMLAEGDAKIANFDHIFTRKLETFSNKFDEIFPIDHQEGSDSFNRLGKIALSNLLGGIGVWHGYSLVKIDESDQNNSYGPLSLISAVPSRPFFPRGFLWDEGFHNLIIRHFDPQLTLQILASWLDSMNFDGWMPREMILGS

SEQ ID NO: 121358 - protein, 172 aa, Heterodera glycines
GFSNDYLLCRFQAFRNYAIKKERPPPAKIQVPPPANETGHWKYERDYSYDLRYSNPINKYSSFTRFITLTATGHKELWALFALLMLSSSLAIGIVFYSLGKIEVWVDRSTSTPPWDWARVRDKYWKFPTVLYDPTGITHVRLSPMEKLQDEMLEAAKERGTRDAKGYWVGKQ

SEQ ID NO: 121359 - protein, 61 aa, Heterodera glycines
DAESETNEVHFREIPSHVLQKVCHYFAYKARYTNSATEIPEFFVAPEVALELLMAANFLDC

SEQ ID NO: 121360 - protein, 90 aa, Heterodera glycines
NFFVNWAIAQVVPVSSGVLSYPWDTVRRRMIMQSARKDIMYKNTLDCAIKIIKNEGLLKGMFKGALSNVFRGTGGALVLAFYDEVQKYIP

SEQ ID NO: 121361 - protein, 153 aa, Heterodera glycines
GKADAREFKGLADCIMKILKSDGPIGLYRGFFVSVQGIIIYRAAYFGCFDTAKMLFSPEGKQMNFFVNWAIAQVVTVSSGVLSYPWDTVRRRMMMQSGRKDIMYKNTLDCAIKIIKNEGLLKGMFKGALSNVFRGTGGALVLAFYDEIQKYIH

SEQ ID NO: 121362 - protein, 165 aa, Heterodera glycines
GDAITKNGKMSTRQFAEATDYGPKQIFEKLFFDDINYLLSMADLWKERKKPTPIHFMQVIDEGLGGSRPNEDENEHWGVSKWAELFEDSLFALAERYRGAVKEKRMLIWDKDDEPAMQFVAACANLRAYIFGIGTKPLFDLKAMAGNIIPAIATTNACVAGMIVV

SEQ ID NO: 121363 - protein, 153 aa, Heterodera glycines
FICGSTPLEGVVLNSISSANWINGTVDQPLKLLFASDESLRDIFNDFLVVVVRAYVNLFQTFGHNLSRQMDKFLRVIFDEFGALIIEASKIEAVLETARINLDVDNSDCQIPNMQHLFSNFFLQTILALMHHYFSMAFQMRLVQPYEFHYIYW

SEQ ID NO: 121364 - protein, 73 aa, Heterodera glycines
TGSKEQIAKVAKAFRVYHSEGPRTKRTDDYIVDHTVIMYLIDPEGNFHDYYGQNRRAREITNVIKLKAAEWDA

SEQ ID NO: 121365 - protein, 102 aa, Heterodera glycines
GANGLDTVFPQTDCGYSPHAEFIYTTTNAKDKGGGERGALLFFDAESLELLYKIEYPKQGCIRAFWHPKINQILVGLSDGTSKIYYDPSISLRGALQCVSKP

SEQ ID NO: 121366 - protein, 142 aa, Heterodera glycines
MDSKSLEIVPPNKKWRISNEFVSLFHSILSGIWALAILTRFDFHQIDDLVNKDSLDARYLTYMSFGYLVHDFIDLVINERSARIIELLFHHVVVLVALMVTHLSCKFLYIITLGLLMEVNSILLHSRSLCNLYRQPKQSNLF

SEQ ID NO: 121367 - protein, 183 aa, Heterodera glycines
MDEKKGSIYYRIWDHLFFGFAGRSKFKRVAETGWRFTYYSIIWFVGVSVLYKEPQFSSVIECFREWPKHHLPNDVWQYYIIQSGFYLSLLFSLFAFDVRRSDHYEMATHHLATILLLFMSFSINFVRAGTLILLLHDSADVFLELGKLFRYAGWDRAVTIDFCVFMLVWISTRLVYFPLKTCP

SEQ ID NO: 121368 - protein, 152 aa, Heterodera glycines
  unsure (1)..(152): unsure at all Xaa locations
GNHFEAFIEGLCRVLYDTLRPLVVHNPHLETLAQLCTLLKVEMIDERCARFRRPIRTLXPPPFSATSPTEAIAENVNNMATELSNSRAGFARVMSELVADIVERIVYRTSLFAQSDILEYNAAPDDLVYPERLMMMRDINQGRSVTSAVSTD

SEQ ID NO: 121369 - protein, 112 aa, Heterodera glycines
TQTFIFMASFNSTAITTFKQIFRELKRADKSFTTKSALHKYLRNQLSLHRNTKQCEATKAHHSAQTYAIYLGSKRNLDEIRAKYFKGGERTVKETARMVGLEVPEEQQWVSC

SEQ ID NO: 121370 - protein, 50 aa, Heterodera glycines
  unsure (1)..(50): unsure at all Xaa locations
ERWNDKRYKKXNLGTRWKADPFGGACMAKGIVLEKIGVEAKQPNSAIRKC

SEQ ID NO: 121371 - protein, 190 aa, Heterodera glycines
GIKVTLIGASGGIGQPLGLLLKKNPSIAHLALYDLVGTPGVAADLSHINTPAKVTGHLGPDQLVAALEGADVVIIPAGVPRKPGMTRDDLFTTNAGIVRDMAEAAAKTCPKAFMGIITNPVNSTLPIACEVYKNNDCFDPRRIFGVTLLDIVRAQALVSELKGLDVSQTKVSVVGGHSGVTIVPLLSRCT

SEQ ID NO: 121372 - protein, 212 aa, Heterodera glycines
GALLVNKKAASVPAALLATFLALNITENEANITEKKNQRQIGGKWKSKRSKKYDKQIGKIDAELKEAIETEANFTKTQLATQTIKNVFLTYCRVLKRMPATALLRPVLAGLSKFVHLINAELHEDLARHLANLVHQKQFGFSDVLHCVHTAAVVLEGDGRLLGVDLLSFYRAIFGALPNVCFQPEQTLFTDLSLLSKSLHLLFVRRRKSAVS

SEQ ID NO: 121373 - protein, 123 aa, Heterodera glycines
MSKFEGGFSSHDSYGYGQMPSAFPSIGGAAPSAPPFGFSGAPFGSHAFGGDIPSPLDAEIQIVLREIQSEVHQLENSGEYGEQLKNARRLLATEATKLENNIDPEWLEVDISLLLMAYEQRIE

SEQ ID NO: 121374 - protein, 140 aa, Heterodera glycines
MCEDASMKMLEKECLSLEYYPHLANLCKNSEQNVRVVALRILTKFALVYPEEKVMASFCFKIRLHDDAFSIVCDAMNDLEVKVRAQAANLLGFFENVSESFLDQTLDKKLMRNMTMLNTNVRNTKNALSAGVGYIGGWST

SEQ ID NO: 121375 - protein, 187 aa, Heterodera glycines
ISGSFDKCLKVWDIENTGDQNGMPMAGKNTTRMNSTKRMRMDVPKITPMVTLESHREPVVGCAWHPSNLSQAITASWDHQLMLRDLQLAGPISTLTSNKAFSALSVCPANGLVLTSSVDSLVRLWDFRSRDGSMVKASFHGHVGVVSDVCWHSTDQHLFVSASFDNTVKMWDVRSPRAALYDLMGHS

SEQ ID NO: 121376 - protein, 152 aa, Heterodera glycines
  unsure (1)..(152): unsure at all Xaa locations
FDLECFSLXNRYIESDLSPILVMAXNRGIVNIRGTSVESPHGVPLDLLDRSLIIRTSSYKENEIGEILKIRASDELVEMEDASIAVLVQIALETSMRYCMQLISTADILRQRRKGEKVTEEDVRKARSLFIDVKRCRKEMEKHGDSFINDFN

SEQ ID NO: 121377 - protein, 220 aa, Heterodera glycines
ISWLDGERHAGIRDAGPYGPQGLPGPKGNAGLPGIPGLSGQSLGGVKGEPGLPGLPGRDGVPGPSGEKGDSGVPGVPGFDGEKGSVGAPGFPGQKGESGLPGIPGQRGQDGMPGSPGFPGPVGEPGPLGEPCLAGGPGMPGQPGFPGTKGELGMPGFPGEKGEPGFAGQPGVPGLPGAKGDAGLPGHPGPQGLPGQDGPQGPAGMAGPEPLTQHGQKGLP

SEQ ID NO: 121378 - protein, 205 aa, Heterodera glycines
  unsure (1)..(205): unsure at all Xaa locations
YVVDIDMSLDVAKLTXGCRVALRADSYALHMILPNKVDPLVSLMMVEKVPDSTYEMIGGLDTQIKEIKEVIELPVKHPELFEALGIAQPKGVLLYGPPGTGKTLLARAVAHHTECTFIRVSGSELVQKFIGEGARMVRELFVMAREHSPSIIFMDEIDSIGSSRVEGSHGGDSEVQRTMLELLNQLDGFEPTKXIKVIMATNRID

SEQ ID NO: 121379 - protein, 235 aa, Heterodera glycines
IPGVFTPIEKASAHLKGGAKKVVISAPSADAPMYVMGVNEDKYDPAKDDVISNASCTTNCLAPLAKVINDEFGIIEGLMTTVHAVTATQKTVDGPSGKQWRDGRGAAQNIIPASTGAAKAVGKVIPELNGKLTGMAFRVPTPNVSVVDLTARLEKPAPLDAIKEAVKKAANGKLKGILAYTEDQVVSTDFLGDSHSSIFDAGACISLNPHFVKLASWYDNEFGYSCRLVDLITHC

SEQ ID NO: 121380 - protein, 214 aa, Heterodera glycines
  unsure (1)..(214): unsure at all Xaa locations
MCEDASMKMLEKECLSLEYYPHLANLCKNSEQNVRVVALRILTKFALVYPEEKVMASKGFKIRLHDDAFSIVCDAMNDLEVKVRAQAANLLGFFENVSESFLDQTLDKKLMRNMTMLNTNVRNTKNALSAGVGYIGGWSTGKKMGDDMPIEKLEDESQSLIPTGSCGAFVTALEDEFMAVRXAAVYSLGKLARNRPVFASACIDHLADMFNDEI

SEQ ID NO: 121381 - protein, 219 aa, Heterodera glycines
IHENEREPRHIIEFDVEESFAPVFSGLFVELNVFKEIIKKFIYNIPSIFERSMSSSNCLGSALTVAKNLINEIGGRITVFTASMPNLGIGALKCLEFNTAKKIAFTPQIDFYKSLALECTGKQIAIDLFVVGCQNVDLRTLSDMSRFSSGTVYHFPEYHFLRDQVEVKRFQMILRRYFIRKLGLEAVLRIRCSRGLSLHTFYGNFFVRSTDLLALPNVS

SEQ ID NO: 121382 - protein, 209 aa, Heterodera glycines
IVLDAFALPVEGTETRVNAQAQAYEFMTNFSESCEAVGRLEKVVGWYHSHPGYGCWLSGIDVNTQSINQQFQEPFVAIVIDPIRTVSAGKVDIGAFRTYPKGYKPPDEPPSEYQTIPLNKIEDFGVHCKQYYSLDVTYFKSSLDSKMFDAFWNTYWVSTLCANPLRTNADYITAQLADLGAKLQQVNTRHGASFRERFRKAERRGEVGL

SEQ ID NO: 121383 - protein, 207 aa, Heterodera glycines
MVQYKLYYFDGRGLGESIRLLLHYVGQPFEDIRIKDMEEWEKTYKPKFFYGKVPVLEVDGKPLGQSATILRYLAEKFGLAGKDEWEKAKANEIIDFQKDANTDLAPYLYVKMGFRQGDLDKLRAEVFEPGVKHILPLFEKLLKESGSGYMLKSGLSMVDFQVANFLYTFTKLEPETINAFPELIKYVDRVHALPQLQQYLKQRPQDR

SEQ ID NO: 121384 - protein, 140 aa, Heterodera glycines
AENFRALCTGEKGMGKSGKPLHYKGSKFHRVIPSFMLQGGDFTRGNGTGGESIYGEKFPDENFKEKHTVPGLLSMANAGPNTNGSQFFITTVKTEWLDGKHVVFGRVVEGMDVVKQVEAQGNQSGKTANEITIADCGQLS

SEQ ID NO: 121385 - protein, 235 aa, Heterodera glycines
  unsure (1)..(235): unsure at all Xaa locations
EETAVCXLASVALNRFVLGEGNGPNQRKFDFEKLKGVTKTVTQNLNKVIDVNDYPTECSKRSNKRHRPIGIGVQGLADTFMLMRYPFNSEQARLLNKQIFETIYYGALEASCELAEKFGPYETYEGSPVSKGILQYDMWDVVPTDLWDWPLLKGRISKFGVRNSLLVAPMPTASTAQILGNNESIEPYTSNVYSRRVLSGDFQIVNPHLMKDLIELNLWDDQMKNRLIAENGSVQ

SEQ ID NO: 121386 - protein, 199 aa, Heterodera glycines
  unsure (1)..(199): unsure at all Xaa locations
LVNWMXDSDQENLRTETLRKQFGIVREETNKSHVMHYGDLQIQDEHVSEFMGKEQAQKRNERPPSPHKFPMFPSRDIPMFMMARRQNESKQIQHNLRVAWKKRSFLEQTIKQIVHQLVHDMNNRRQILTTYPQQIRDLDCHHEVVHTFSNFCFKFSENPYALKYAYVLANLCERPELDAERIKMALIEQCAEVELSGVI

SEQ ID NO: 121387 - protein, 101 aa, Heterodera glycines
MGTCSYVLTGTEKGLNDTFGTTCHGAGRAMSRAKSRRALGFEQVLNRLKQQGIAIRVASPKLVMEEAPESYKNVCDVVDTCHIAGISKKAVKLRPIAVIKG

SEQ ID NO: 121388 - protein, 106 aa, Heterodera glycines
  unsure (1)..(106): unsure at all Xaa locations
PPLEVHSRPKDKPFFAGLVKYMASGPIVAMVWEGLDVXKQGRVLLGATNPLASAPWTIRGNFCIEMGRNICHGSDSVPSADREIAHWFKPEELVDWESAQNAWVYE

SEQ ID NO: 121389 - protein, 159 aa, Heterodera glycines
YGCRVIQFVLENVVQPVHGTANANNSLEKEISIQILHVLIEPILKNAYSLAQNEFANYLVQFIIKSPYLRRRRCYIIKTHIIRNVYHLSLLKYSSHVVEQAFKHAEDRCNCLAMLFREVLEGYKPSTDGKQRTALYEMLFNQYGNYVVQRMIPIARDVY

SEQ ID NO: 121390 - protein, 224 aa, Heterodera glycines
KRNLQCFRLQIAGYTQLIKTIDLESSDDTLFARTKEDGGQLLVAAVELCHWTLRSSSLNAEQLRRDGGLDALYKTFERCVPMITAGSLESEMPVQVCTHVCNCFATAARFDACREKIAEMKTLFQSICQLLRFESLHRLACAAAECVCAFSVCTLLQTQPFQAGVIWQLLPHLFRFDYTLDEGGVAHSEKTNHQAVLNRLARNCCEALACLAGFRPDTPDNDGV

SEQ ID NO: 121391 - protein, 154 aa, Heterodera glycines
  unsure (1)..(154): unsure at all Xaa locations
FPPAGTNCKVWNLATCRLKTNRFGHTGYINSVTVSPDGSLCASGGKDGSAMLWDLNDGKHLYTVXGNDVINALAFSPNRYWLCAAVGPVVKIWDLENKTVVDELKLDIASTXPQIRCVYPKNRVAQCIXLAWTTDGQTLFAGYTDNIIRVWRIA

SEQ ID NO: 121392 - protein, 208 aa, Heterodera glycines
KIQKNIMVDNANASMGLRLSYRSTCVDGRTLQDTNTCDGVKVGDTVAFEVTLEALHCVPQRDFALHIGPSGLEEVLTLYVHVICDCDCEDEIVYNAPECNGHGNLVCGICQCAEGYVGTHCECESGGESAVALEAKCKKDNDSLVCSGRGICKCGVCECFPRANADELVSGQFCECGNFNCPRHDRLLCGGHGDCVCGTCQCEPGYTG

SEQ ID NO: 121393 - protein, 176 aa, Heterodera glycines
  unsure (1)..(176): unsure at all Xaa locations
EDRLLNEENVRLFRYPFLKNPFWDGHFDENDSDRMAGKALEWLSYHLKLAKNDETNYDETLTRVIRLLGLSIQRKWTEAKSLAEEIRPKFGGIGENGTXKNYLSKKSAEFEINKAKATEKLSEMLAVRFEPILQKEEERMMEVQRKHFWEWAERRKRLIHSQAQRAEHLARLNEIQ

SEQ ID NO: 121394 - protein, 191 aa, Heterodera glycines
VFEGERPMTKDNHLLGKFDLTGIPPAPRGVPQIEVTFEIDVNGILHVTAEDKGTGNKNKITITNDHNRLSPEEIERMINDAEKFAEEDKKTKEVVEARNEFESYAYSLKNQLGDSEKLGGKLSAEDKTTIEGAVDEAISWLDSNKDAPPEELKERKKDLEAKVQPIISKLYAGQSPPPGSEPPPTEEKDEL

SEQ ID NO: 121395 - protein, 228 aa, Heterodera glycines
MPEVSHGHNVRLGQLQISATPYIISVYKVLGDLVKKVGQLHYEDTICDLLYQFKYMFVGYALKEQTEIFILNFPDSMREKLKFLFTHSSTAAAAVENQQQMLQQQQQQLVGIGFALGQQLSFPMESATHQQQQQVLPFHHSQQQQQQQPAALIGMLQRQSREDEGQQQQHQSRQNQAVQMQQQTNTNQQQVEQMGTAGSSTTASQQQQQSTPAPLSVSSVSSAALSPI

SEQ ID NO: 121396 - protein, 204 aa, Heterodera glycines
MGVKVAITGGSGFLAAHLIKRLRADANVDEIRTIDRKPFRQLGTIVCSSSDDCPPSSVGFPSLIHFQCDLLDVAKLEKALDGVDVLFHLARKAFEYIFFADQKALNDRYSRDNLEATHSLLNTIFKCSVPRLVHVGDAFANIPPGDNFGSAEHIHRGLPSKFLLGHYGETRIKAELAGREKCGKILPNGQPFHALFLRPTFVYG

SEQ ID NO: 121397 - protein, 182 aa, Heterodera glycines
GSPVRTLIAGAGELHLEICLKDLEEDHACIPLKKSDPVVSYRETVTEESEIVCLSKSPNKHNRLFCKARPLPDGLPEAIERGDVNPTDDPKNRAKILTEKFEMDATDSRKIWCFGPEGTGANLLIDVTKGVQYLNEIKDSVVAGFQWATKEGVLCDENMRGVRFDIHDVTLHADAIHRGGGQ

SEQ ID NO: 121398 - protein, 225 aa, Heterodera glycines
PCSLGTDVTECVINVPFFYEENQRRALLNAGRIAGLSLRLITDPAALAYCYGMYNGANLPPPEQPARLVAFVDVGHSSVQASLIAFSAGKAEVLAASFDLTVGGVHFDALLRDYFNEDFGKRFKIDARKTPRAWLRLLDECEKIKKQISANSQPIPFAIECFVKDTDVNGVMQRDQFEQLAEKLFQKVQELLQQLISDANVKVGDIFDVELVGGSSRIPRIKQIV

SEQ ID NO: 121399 - protein, 157 aa, Heterodera glycines
ICLRAMALVYERHCISIGPFADTRHIVEMLAKCTNVAERDHFLFLINKLSLDKQNVRELISANLISLFIDIAVLAHLHTNRAKLHGQTNVIEATKDAAHCEETEPKEWYYNDRQGQRQGPISFKKMKRLYRDGVLFEKSEIWAEGLDKWCHLSLVSQ

SEQ ID NO: 121400 - protein, 90 aa, Heterodera glycines
  unsure (1)..(90): unsure at all Xaa locations
NCLAPLAKXQHEFGIIEGLMTTVHAVTATQKTVDGPSGKXWRDGRGAAQNIIPASTGAAKAVGKVIPELNGKLTGMASPCCPLRTCPSST

SEQ ID NO: 121401 - protein, 112 aa, Heterodera glycines
TLASPLKAFYANVAVKQIDVTGMSSSVGILPTHVPTIAVLKPGVVKVHELDGNVSKFFASSGTLSMNIDGSCQALAEELCSLSELNEQAIKNLIDVSQKKASDLNATDVQKA

SEQ ID NO: 121402 - protein, 215 aa, Heterodera glycines
MCEDASMKMLEKECLGLEYYPHLANLCKNSEQNVRVVALRILTKFALVYPEEKVMASKGFKIRLHDDAFSIVCDAVNDLEVKVRAQAANLLGFFENVSESFLDQTLDKKLMRNMTMLNTNVRNTKNALSAGVGYIGGWSTGKKMGEDMPIEKLEDESQSLIPTGSCGAFVTALEDEFMAVRQAAVYSLGKLARNRPVFASACIDHLADMFNDGIQ

SEQ ID NO: 121403 - protein, 173 aa, Heterodera glycines
  unsure (1)..(173): unsure at all Xaa locations
WGIEPVGGVMTNXTRNTVIPTKKSQIFSTAADNQPTVTIQVFEGERPMTKDNHLLGKFDLTGIPPAPRGVPQIEVTFEIDVNGILHVTAEDKGTGNKNKITITNDHNRLSPEEIERMINDAEKFAEEDKKTKEVVEARNEFESYAYSLKNQLGDSEKLGGKLSAEDKTTIEGA

SEQ ID NO: 121404 - protein, 221 aa, Heterodera glycines
VLDSCWPKTKLMLAQSFYDASVVLCKAAELSSKFFGDFAPQSFLPHFNYGKALIEVARLESLPIKPPMDDIDESDEEDEGEEEQGEELQSKNGTEKEVVEDQQKTEEKGGEKGTDECAEERDGEQQDEAEKADNEMAEVTLKTDNEEEEADEDGGDEDDGQIAWESLEVARKICENHMKSDEAKLWTERKSDVLVALGDCMTVTENFPLALEEFTSALAIR

SEQ ID NO: 121405 - protein, 214 aa, Heterodera glycines
  unsure (1)..(214): unsure at all Xaa locations
GEEGLKGGGEGGGMHNPMDIFEMFFGGGGFRGGGEKPTKVRDTVHQLTVSLDKLYNGCTKHLRITRXILCPKCNGVGGAKEGVKQCENCRGRGLEIHNMQIGPGMIQRIQRACSECGGEGEINRNPCKHCGGKKRIKSEETIEVHIEKGMRDGQRLMFYGKGDQQPGLEPGNVIIVLDEEEHPVFTRRGTNLTLNMKLTLTEALCGCTKHVVTL

SEQ ID NO: 121406 - protein, 218 aa, Heterodera glycines
SSESRTAPAMVDVETGRDINPHIPEFIEKTPWYVPSSGPTLKHQRPHPERQKQMSSVAEWYPKGTTERVAFKYRDGACQNCGALGHNRKNCFEKPRLVGAKFTNSNIAPDDHVLPSLEMGYDAKRDRWNGYNAEDYSLVAAEFEKMEETRKLIRAEQLKEAGEEDKKAEEDEDIYAEDASAPGQSVDMDSRTRITVRNLRIREDTAKYLYSLDPNGAY

SEQ ID NO: 121407 - protein, 186 aa, Heterodera glycines
  unsure (1)..(186): unsure at all Xaa locations
KLPETPSLIDATQQRFCQSAFELLSGYLTKFDLVPIFTIEEFEHFFLPRDDVIYTYVIQNNGEVTDLVSFYSLPSTVMHHSHHKSIKAAYSFYNVAGSVPLSHLLNDALILARNVRFFLFVSVRLGXPNLFHNQLGFDVFNALDLMENKGILEDLKFGIGDGNLQYYLYNWKCPDIPSDRIGLVLQ

SEQ ID NO: 121408 - protein, 128 aa, Heterodera glycines
MQIFIKTLTGKTITLEVEASDTIENVKAKIQDKEGIPPDQQRLIFAGKQLEDGRTLADYNIQKESTLHLVLRLRGGIIEPSLRMLAQKYNCDKQICRKCYARLPPRATNCRKKKCGHSNDLRIKKKLK

SEQ ID NO: 121409 - protein, 221 aa, Heterodera glycines
MLCTSGQIGPGDFGEVVSVRSKDDGKLYAVKSSLDIYRNSADRREKLQEVQKHEMLPPHPNLIHFVKAWEERGRLYIQTELCSQSLDDMARERHEIPEPEIWYYLIDSLMALEHMHSHDIIHVDIKPSNIFVTSDGICKLGDFGLVFDLNKDDPRKASEGDSKYLAAEVLNDKPTKAADIFSLGMTILELATDLDLPNNGLFWHEIRDRMIDEKYIGFLSP

SEQ ID NO: 121410 - protein, 196 aa, Heterodera glycines
MLSSSPKEFVAPVGEVHAFVVKCMQSVGTSAAHAAQLADLLLDADIVGHYSHGLNRLCIYIEDVASGVKGDGEPKVLKQKGATAWVDGCDLLGAVVGNFCTELAIKLAKEHGIGWVVCKRSNHYGICQHYAKKIANAGLLGLSFTNTSPIIFPTRSSQIGLGTNPISCCANSREKGDGFILDMAASTVALGKVEIA

SEQ ID NO: 121411 - protein, 238 aa, Heterodera glycines
  unsure (1)..(238): unsure at all Xaa locations
QAVLSLYASGRTXGLVLDSGDGVTHTVPIYEGYALPHAILRLDLAGRDLTDYLMKILTERGYSFVTXAEREIVRDIKEKLCYVALDFEQEMATAASSSSLEKSYELPDGQGITVGNERFRCPEALFQPSFIGMESAGTHESTYNSIMKCDIDIRKDLYANNVLSGGTTMYPGIADRMQKEMTALAPSTMKIKIIAPPERKYSVWIGGSILASLSTFQQMWISKQEYDESGPSIVHRKC

SEQ ID NO: 121412 - protein, 93 aa, Heterodera glycines
  unsure (1)..(93): unsure at all Xaa locations
RCSVPTWQKLTXQEVEEQIVKLARKGLRPSQIGVILRDSHGVAQVRRITGNKIVRILRSKGMAPEIPEDLYHLIKKAVSIRKHLERFRKDIDS

SEQ ID NO: 121413 - protein, 217 aa, Heterodera glycines
EYLTPGDGGLHFLKKECITAAIPYLEHVIYEWSDESPHFHGELLEQYVLRCNTLLGQFLHSLSSPSIGVPSFVAEDDELSILRRKLQYFLATDQHYSIESARDLIGEDQNLMEERAIIMGKLGQHLNALKIYTEILMDFNGAERHCQTYYDERNASTRNIFFDLFHYYIKGEMPQKEVIQVESDYEIRRKPNISEALKLFKRHPTKIDTVGAFALIP

SEQ ID NO: 121414 - protein, 172 aa, Heterodera glycines
  unsure (1)..(172): unsure at all Xaa locations
PSRTNYLRRPGNSVSNVNESRKFAYRTPIVSALLYGGRENYRDQIXKLRLGVHMLIATPGRLIDVIQNGLIGMEACRFLVLDEADRMLDMGFEPQIRRIVQMSGMPQKGERITAMFSATFPRDIQILAQDFLMPEYVFLAVGRVGSTSENIGQKGVWVEEHNKRHFLMDLLD

SEQ ID NO: 121415 - protein, 205 aa, Heterodera glycines
EGLAKCVDWSMAVVTGGAEKLREAERIAKEKRLRLWKSFTGSSSTVKNAFTAKVVEIGLVDSLSVLKDNGEEMKVYFSSLRAPRREGTDGTSGGVQRQFRPLYDIPFMFEAREFLRRRLIGKSVQVIFDYVQPKQDQFPEKTCCTVMFNNQNVAVMLIERGFARAVRHGRDDDNRSPQYDALFAAEAQAEKDKKGIWAEKCTEKK

SEQ ID NO: 121416 - protein, 216 aa, Heterodera glycines
MPEELVALSPGTRVSGRWTIIKKLGAGAFGAVYLCQDRDGRTMAALKTEPFDAQRPLLYMEAHVLLSLNELRSNSGRHFCRCLDLGRDEQPDADSGQTMEFNYVVMSLVGRPMDKLLHESGDRFSPGTAIGTSIQLLKALKALHSVGYLHRDIKPANSAIGTPETNEQRLLYLLDFGMARKYVREDGTHRRQRDTARFRGTPIYAPISAHIKRDYS

SEQ ID NO: 121417 - protein, 223 aa, Heterodera glycines
LRLAGLSGLGAGSLNATPHDSNQVDTSETVYISSLALLKMLKHGRAGVPMEVMGLMLGEFVDDYTVNVIDVFAMPQSGTGVSVEAVDPVFQAKMLDMLKQTGRPEMVVGWYHSHPGFGCWLSGVDINTQQSFEALSDRAVAVVVDPIQSVKGKVVIDAFRTINPQAIALNQEPRQTTSNIGHLQKPSIQALIHGLNRHYYSIPIAYRTNENEQQMLLNLNKQS

SEQ ID NO: 121418 - protein, 133 aa, Heterodera glycines
MNEFVKKRAATFLRLAVTLYVMFDQKWEEQQADQTTSTQYQRNDMIGREIGEVLARAPLVTGACRKCGFVGHLPFQCRNFIQLKPNQKLDIDVSSTSSEEYTTPLTDREGKKAAKKIKKREKKELKKLEKLKK

SEQ ID NO: 121419 - protein, 134 aa, Heterodera glycines
SGQEVIVEVAVSSEDIGSTGTESYDDNSKAAYETFVKDLKERTEGFVDCRYAVFDFKFQTQRPGAGTSKMDKIVFIQLCPDGASIKKKMLYASSASAIKASLGTAKILQFQVSDESEIAHKELLSKLNDKYRDN

SEQ ID NO: 121420 - protein, 238 aa, Heterodera glycines
RKLKKEVKEKEESYQARLKKWEEREKRMAKLYDKEREEEKQRQKTLQKEAKKLRQFLEDYVDERDDPKYYRGSALFQRKRNYEREREADAKDRHEERAELEEIRRSILEEEVVSKKEGDGEEADESGDTSGRMDIADEQKAEWETVGETAAMVSGPVPPPPLPSEEPTPAQVESPTPVKKTIVTTLQQKQVVPLSKLNGVFQEEEEDEVDTLHQIEKKIKPFEITREDRLQSMTPEER

SEQ ID NO: 121421 - protein, 199 aa, Heterodera glycines
RNSNGIDDVQRLTEDADAAQNGQLPSNKNRKYSWMSFSSVSASVSPDSNPCGLTRFQRIAAFFLCIFAAGFCFTTAMMLIPVLVLQTRKFAALNTLGSVFFIVSFGFLWGPLAYCQFLFSEPRRVVTAVYLLSVLATLYTSLWLQSSLLTVITAALQTFGLIWFLLSYVPGGENGLKWMGRMAKMAFCARQSSTLVLPI

SEQ ID NO: 121422 - protein, 207 aa, Heterodera glycines
MFYHDLHDNENSHDKELKQLVQMDDLAIPKFVMPPLGIKPKKFVRKHFGPNSRLPMAQFLKGTTTLSFVYKPKTPQDKGGVIVAVDSRATGGTYISSKTVEKIIPINDQLVATMAGGAADCQYWTRVVSKYCNLFELREGTQISVAAASKYFANVMYDYRGQELGVHSMVCGVDKFGPSIYMVEAEGTRVKIDTICSLGSGMLHAMS

SEQ ID NO: 121423 - protein, 245 aa, Heterodera glycines
WEDSRRRRTETRVELRKKKCNEEMMKRRNINLECADDSATSAEELVTDGEIGEPTGRLSPEMLSLEDAVEVLQKEQNAERFRLAFESVRRVLSRSKCPPIDKVITLGFPCALVQALHYDDDKVKFEAAWCITNIVSGTSEQTMTMVNAGAVGPLLKLCSSPSLKLSEQAVWCIANMAGDGVQLRDLLISEGILPLLVGLADCADTLGISFVRILTWAFSNLCRHKKPQVPLQMLAVMAPSISKLI

SEQ ID NO: 121424 - protein, 166 aa, Heterodera glycines
AFSCRRYGILVNEQMRTNIEDVFAAGDVCTANWTAKSPHWKQIRLWTQARQMGLFCARCMLIDNVLLDIAFELFTHVTSFFGFKVILLGDFSGERLEKPFEKNYRITEGCEYVKVLTKDHRVHGAVLVGETDLEGAVENLILNQTDIGQIEQVFLDPDFDLEDFFD

SEQ ID NO: 121425 - protein, 211 aa, Heterodera glycines
MEHFPSKFVLCLLIAFIAVPCSVLALSAGSRVSMLACHNNYRSQLAKGTADNKSGKMPAGSNLIQQKYDSNIESVAQKWANGCSMSHSGSSGMGENLYMTSSSTISEADALKQACDMWWAELKQFGFQSSLVLDMAQFNKGIGHWSQQAWASTAQIGCAMARCPSSTWKTWVVCNYKEAGNFLNQPVYKKGAACSKCSDYNGATCDSASGL

SEQ ID NO: 121426 - protein, 166 aa, Heterodera glycines
AIIRKVRQSPVHRFTDEITDEELQQLCMAATDVFRMQPTLVRIQPPVVVVGDIHGQFTDLQRIFDTHGYPPEQQYVFLGDYVDRGPQSLETIVLLFCYKVKYPANFMLLRGNHECANINRVYGFFDEFINRYKRPDPCRLYDLFNQTFAWMPYVGLIGDKILCMHG

SEQ ID NO: 121427 - protein, 220 aa, Heterodera glycines
SKTARRCGHKKDPSDPTQALFLLAENLAELIDSVCKSEDKEKLLPALQAVWNNTLPYLKAKSAKNVRFFLASSQFLASMSSYNYMRSVWKKNAMDLLWDNSFFKMDIHALRQWLIVIDNLMTNDKTSFKELLTRITTSTSTTLSTLITSKEQEYEMRAQYLKRLAFVILSSELDQYAGQLNEIQERLTENLRLCQVPVIHTQVFTCYRVLLVRMSPSSFV

SEQ ID NO: 121428 - protein, 133 aa, Heterodera glycines; identical to SEQ ID NO: 121281

SEQ ID NO: 121429 - protein, 175 aa, Heterodera glycines
  unsure (1)..(175): unsure at all Xaa locations
ETRTVDSFLLCAMISNEREHLSSEALEAARICANKYMVKNCGKDGFXMRVRIHPFHVIRINKMLSCAGADRLQTGMRGAFGKPQGLVARVGIGDMLMSVRVRDQHQAHALEAFRRAKFKFPGRQYIVISRKWGFTPFDREVYEKHRKEGRVIPDGVNCRFLKQHGPLTEWLKNPI

SEQ ID NO: 121430 - protein, 232 aa, Heterodera glycines
  unsure (1)..(232): unsure at all Xaa locations
KSTAISMFFELERKDLEFVKGESQADIEQVDGKSXKYNGFLINLIDSPGHVDFSSEVTAALRXTDGALVVVDCVSGVCVQTETVLRQAIAERIKPVLFMNKMDRALLELQLGQEELFQTFQRIVENINVIIATYGDDDGPMGPIQVDPSIGNVGFGSGLHGWAFTLKQFAEMYADKFGVQIDKLMKNLWGDRFFNMKTKKWTNNQEPETKRGFCQFVLDPIFKVFDAVMNIK

SEQ ID NO: 121431 - protein, 190 aa, Heterodera glycines
MPLHWTSVDTRNALLCAAVPSIGAFVGSTMAIKDQELVQFLKNQNFPSFARCCKYNYLLANTSVTIPFGYASYLVYKIGGGVSCTDSKIALGLYGATLLSGCFLVPTLKKHDTKALTANAVVLAGPSVATSVAFYNIDKISAYWTMPFTLLAILYAGLTVKANCWNSKLTTYEASSGGKNENKKADSCSD

SEQ ID NO: 121432 - protein, 209 aa, Heterodera glycines
  unsure (1)..(209): unsure at all Xaa locations
TEMIHCVVWARXLFNXLFGESDPDDDVSPETVTSDGMGDQKNSQTMDNDGTTTNGSVIFADNGNSSANDAITKNGKMSTRQFAEATDYGPKQIFEKLFFDDINYLLSMADLWKERKKPTPIHFMQVIDEGLGGSRPNEDENEHWGVSKWAELFEDSLFALAERYRGAVKEKRMLIWDKDDEPAMQFVAACANLRAYIFGIGTKPLFDLK

SEQ ID NO: 121433 - protein, 233 aa, Heterodera glycines
  unsure (1)..(233): unsure at all Xaa locations
MRTRRSATLAWSHLARFGLDIKKFRKTEKTTLEIELDANLKHEFSAIQEEGLELVNVSGPGYTGLXNLGSSCYINSALQVLLIVPDFVRAFTEELLLRKQPPEINEDFAAQLAKIFVAMKSGDYSREDNKHGAEKEKGIRPTTFRRIVGRNHPEFSTAKQQDVEEYVRFLFEKVDACSDLSSENPVAAFRFRLVTRFLDELSDCVRYSFRTDNILSVAIPMDLCKESDTVVNG

SEQ ID NO: 121434 - protein, 118 aa, Heterodera glycines
  unsure (1)..(118): unsure at all Xaa locations
GNGAFQKGMPFXAYHGKTGRVFNVTKHALGVVXNKRVFYRIIPKRINVRVEHVXPSGSRLFFLQRCKANDLQKKQHKEGNAPFVALKRKPKEPRGAHLVKVKSTKVERLAPVKFEIVA

SEQ ID NO: 121435 - protein, 164 aa, Heterodera glycines
SLSEEERSRLLTEIAMQESRVSEMRFEVKNKTDEMNKLKAEVESGKTTAHIYNPGNGHLPTEFNDPDDLTNAHIELSTFHEGDVNNVMPQRELDRTNFTDQDMSLKNKLELLTKELDNARDERAITDFDVLHMENKKQGRDRYKTLRQIRSGNTKRRIDQYENM

SEQ ID NO: 121436 - protein, 241 aa, Heterodera glycines
IALAAVRNDAELKLLAEYAVDYAHSIGLVGRSGDDKYKHSNDVSVAPPIALLPSPFPRELYEQATDAQQSLNELYFRIACDHDFLMEAYKDVIKGDPFHAKLIELAKVIQKEGIRQPLMVGLQRADYLSHWNEAAQKMELKQVEVNPGQIGGPGAATAVSKCHRKMLDKVEIMHGKKLPIMAKAVVPENRPGPGIARTLYQAWKMFGDPNAIILYVNQPDLFPVCHFEQLQFVMFQVEKLA

SEQ ID NO: 121437 - protein, 209 aa, Heterodera glycines
  unsure (1)..(209): unsure at all Xaa locations
MNGLRPSKTFLILLSISICWQLSVVSSSPTTHDIAQSAEVQSESEEQLPLLSPATPSEQQQQSADTLATTYCVENVEKDEVLLKQYVRDAKDWALAHGLVLPALPFRCKNEECKEANKALNIVPADVVKIAPFTLFPSPFPRELFVQAQKVHKAIQLMYFRAASNFEFLKGVHKGLLKTDQNFIEXLKALKAXHLEGIKQPLTLFCTEQ

SEQ ID NO: 121438 - protein, 225 aa, Heterodera glycines
LRSFPWPSPRDQLDTILTVLDDATADNRLALHTLLAKSNLADSNCVSQCLKKLLHSLRRFPMDKFSIFGCLSGIGQNHSSLVQPLVNDWLDVHPIFDTPEQSIDDDFYLARLILVLNAASHRSVLCSLIPSYALKHYRYLRRSWPEIVPKILEFDHEKLHQCDSSPFLCPFLAVGPEDKTIEKENDAKTARVLEPSREFRNNETIRFVAGLPTGIFIRILLCNVT

SEQ ID NO: 121439 - protein, 239 aa, Heterodera glycines
  unsure (1)..(239): unsure at all Xaa locations
WNFCAQSTDVVLDXDLVPSQLCEFEAYNCLLKQKLLPALNHLFWVDKCNYGTIVHPLYAQQXHXFPYNIYYMERRRRRMDTTVRAIRKNQQQLTSDAIQALNLLSAKLSDNKYFCGDKPCSIDALVFGCLAPLLRTPLPNDRLQLHLSATPNLVRFVDSILSIYLPLPEKVIKEQAMARKKWQKLKMDAQQTMEEGRIERELRKAEKKERNSMHHILFFAISSITISLLFALHTGIIVV

SEQ ID NO: 121440 - protein, 225 aa, Heterodera glycines
  unsure (1)..(225): unsure at all Xaa locations
AFCFTYAAKFSAVASSPNKNLNAVLIDAVRTPFXIESTFRELLAVDLQRHALKALVERTKIPFDEIGHIICGQVVQECKTSNIAREAAITAGFPDSIPCNTVTLACISSGVSIQNISLMISTGYLKAGIAGGVELLSDFPIRYNRKVRLSLIDLQKAKSFGERFKHLKTVASNWFSPELPAVSEFTTGEVMGNYGDRLAAAFCVSRREHDEFAIRSHTLADKAFR

SEQ ID NO: 121441 - protein, 228 aa, Heterodera glycines
AYLMEVRDAYHFKNASAIVYEYFPKGTLLDLTNVYKKNGTVVGGLLATFFGIHLARALRQVHETANIIHADVKPDNVMLLTAALNAHDSLDNLLKTPVLKLIDWGRSIDMNHFQGVEFHGKAGTENFDCVEMKTGMPWTFQTDFYGFCATMYVMMNGEYLVTFKYSQTDKVVPVKQLKRRMALYDVWTQLFDQFLNIPNCKQLPKWLNTLDQMESRLAEAVKTEPLEW

SEQ ID NO: 121442 - protein, 57 aa, Heterodera glycines
TFTWFSSPNFAPMFGIIAGLSVVLIIAIVFIVVGLLSMEPAKDSIIYRMTTTRLKKD

SEQ ID NO: 121443 - protein, 216 aa, Heterodera glycines
EDNDTESICGEIVAQESGENTANQQNQTQQNTTFEELGVNDELCNACESLGWTKPMPIQQKVIPLALKGRDIIGLAETGSGKTGAFALPILQALMDSPQHLFALILAPTRELAFQISEQFEALGATIGLNVCIIVGGIDMTSQTLSLAKRPHIIVATPGRLVDHLENTKGFDLRTVKFLVLDEADRILNMDFEVELDKILKVLPKARKTYLFSATM

SEQ ID NO: 121444 - protein, 159 aa, Heterodera glycines
MTWWWGPEKNNGREVVGPTFHGDEFYQDRLDRWYPSIRFRKNDEVITPIRHKELGDWKKLSIEEKKLIYRYSFRQTLAEFEALTPYGYLTVTLFFSMLGLTILYASFVRTYVTKFNDRLPDTFDDEYKESQAERRVVLERGNPYGPAYYYDYEKNRWKD

SEQ ID NO: 121445 - protein, 237 aa, Heterodera glycines
MTLTRPQNPTDELSPYGPELEPGKAPEVIARTVASMPPEKMFELMRSMKETVNNNPQMARQLLMENPQLSYALLQAQVVMRVVDPKIAYQMLHREHAQPLVPPTSIPTHIPQQFAGKPPQLPPQFNIPPPSVPSHQFQMQPPPLVPGQFHHGFPSMGMAPPSLLQQQQQQTPFTQQKPTPIAPLAVPPAATAPQQQQAVTPPPLSQQAQQSNSDNLDDEQHAQMLIRVLQLTDEQIR

SEQ ID NO: 121446 - protein, 142 aa, Heterodera glycines; identical to SEQ ID NO: 119609

SEQ ID NO: 121447 - protein, 197 aa, Heterodera glycines
MAFLSRLSILPNSPISLLAVSLAVLAFVALASANPPTARETAPNAQQNNANSVATGEIAKNIAEKMERMNEFIKAKKFIDAHNLAFEKGEVSFKVAPNHLMHFTPAQYNRIRGLQMRSNRQRHNMATLAGNSSTLPEKLDWREKGAVTGVKDQGDCGSCWAFSATGAIEGALAQKKASKIISLSEQNLVDCSSKYGN

SEQ ID NO: 121448 - protein, 128 aa, Heterodera glycines
MSGRGKGGKAKTGGKQKTRSSRAGLQFPVGRLHRLLRKGHYAERVGAGAPVYLAAVLEYLAAEVLELAGNASRDNKKTRINPRHLQLAVRNDEELNKLLSGVTISQGGVLPNIQAVLLPKKTQHDESQ

SEQ ID NO: 121449 - protein, 149 aa, Heterodera glycines
GWRCSHGLVHSLGQAAKEMGMSVNKRKEGMALHAIYISTLHDYDEGFFGDDRVLAAAVWRSFFLQQPDVSPAQINRVVRYMRATMTSLARMDDTRLLTDGIERWDVAEELARLVSAEQFGTIPAAPPSSSMDDDGRNSAQPAPKVAASN

SEQ ID NO: 121450 - protein, 155 aa, Heterodera glycines
  unsure (1)..(155): unsure at all Xaa locations
MGSDCSRTSFSGDDXAPRSVFTSIAGLPRHQSLMVSMGQMTXFVGDYVYCNHRILTTQLPIXHGMGSNWDDLYNILNHTFYNELRVAPNEHPVLVTNVPLNSLCQHXKMTLMMFQTFNTSSIYVVLHTXLFLYSFGRTINLVMDSGDGVTHTVPI

SEQ ID NO: 121451 - protein, 214 aa, Heterodera glycines
  unsure (1)..(214): unsure at all Xaa locations
KLARYAXGLRAFGEXMRKSAAELSMLGMFLLTGIMLFSTAIYFFERDEPNSKFYSIPSAWWWCVATMTTVGYGDLVPVTTGGKVVAAIASVCGIIVLAFPISMIIDKFAESTGHGQRVFDETVAQGEVPLEANKSNVLLGSPTGRGMSRRRKSETESQRKAKGKAKGKRNEKPKESERKAKGKRNEKPKEKPKENPKESETKSQRKAKGKKKKK

SEQ ID NO: 121452 - protein, 216 aa, Heterodera glycines
  unsure (1)..(216): unsure at all Xaa locations
TTEMIHCVVWAKSLXNQLFGESDPDDDVSPETVTSDGMGDQKNSQTMDNDGTTTNGSVIFADNGNSSANDAITKNGKMSTRQFAEATDYGPKQIFEKLFFDDINYLLSMADLWKERKKPTPIHFMQVIDEXLGGSRPNEDENEHWGVSKWAELFEDSLFALAERYRGAVKEKRMLIWDNDDEHAMQFVAACANLRAYIFGIGTXPLFDLKAMAGNI

SEQ ID NO: 121453 - protein, 246 aa, Heterodera glycines
  unsure (1)..(246): unsure at all Xaa locations
FLGPGSVGVIGFQQPXLTVKQLTQTLKEMHAKKMYGELTFYLEACESGSMFDHTLAQSLKIYAVTAANGDESSWGCFCDTKFLPGNCLGDLFSVNWMQDSDQENLRTETLRKQFGIVREETNKSHVMHYGDLQIQDEHVSEFMGKEQAQKRNERPPSPHKFPMFPSRDIPMFMMARRQNESKQIQHNLRVAWKKRSFLEQTIKQIVHQLVHDMNNRRQILTTYPQQIRDLDCHHDVVHTFSNFCFK

SEQ ID NO: 121454 - protein, 156 aa, Heterodera glycines
RDVSKSPPNAAKAEKRQRKEAEEVSKTEEDEAREEEEDEEGQQQEKPEANTKDEEKRRKKKVKLLFHDIQTLDVSTSDVYVWVFDPTPLWKKCVGILIVLGTIGGCLFPLWPDWLRLGIYYLSVIGIALFGLLLGVAFARTILFGLVWLFTLGRHR

SEQ ID NO: 121455 - protein, 187 aa, Heterodera glycines
  unsure (1)..(187): unsure at all Xaa locations
EGLARVTLRRMDTVRSRLAAAGSLVQFRKHLRQALRQRLDRLYSDKMARADVAFDTDAAAREGIDEVLRNYMDAQYYGDISIGSPPQNFTVIFDTGSSNLWVPSKKCSFFDLACRYHSKYDHKKSSTYQPDGREVAIEYGTGSMKGFVSKDTVCIMDGMCVEGXEFAEATSEPGDTFVNTKADGILG

SEQ ID NO: 121456 - protein, 153 aa, Heterodera glycines
  unsure (1)..(153): unsure at all Xaa locations
LKLWPFXLHKANKPHVQVKVGNEDKQFAAEEVSAMVLTKMKEIAESYLGHEVKNAVVTVPAYFNDAQRQATKDAGTIAGLNVVRIINEPTAAAIAYGLDKKXEGERNILVFDLGGGTFDVSLLTIDNGVFEVLATNGDTHLGGEDFDQRTIEY

SEQ ID NO: 121457 - protein, 128 aa, Heterodera glycines
RSVYTLENASAHLKGGAKKVVISAPSADAPMYVMGVNEDKYDPAKDDVISNASCTTNCLAPLAKVINDEFGIIEGLMTTVHAVTATQKTVDGPSGKQWRDGRGAAHNIIPASTGASKAVGKVIPDLNG

SEQ ID NO: 121458 - protein, 80 aa, Heterodera glycines
MNHFGLTFLFVAVSLLVIAPGCDGMQIFVKTLTGKTITLEVESSDTVDNVKEKIQEKEGIPPDQQRLIFAGKQLEDGRTL

SEQ ID NO: 121459 - protein, 174 aa, Heterodera glycines
QLKLRASAMTVQCQTILRSYGEPVMDKHRTLLQIITYFASAYNSTIEGTSRNIETTELCGGARIGYIFHETFKRALEKLNPIENLSTYDILTAIKNATGTRPALFVPEVSFELLVKRQIQRLEEPSLECVNLVYEEMLRIVQHCGFEIQQEMQRFPRLYEKISEVISLLLSNRL

SEQ ID NO: 121460 - protein, 211 aa, Heterodera glycines
  unsure (1)..(211): unsure at all Xaa locations
VENFPPKNIDDIRGELTRTLNWLNTPFAEHQKRLNMDEFRVRMSDFEWALRVVKPSAKREGFATVPDVRWEDIGALNAVREEXEMYPIQKPELFQHFGTSAQPQGILLSGPPGCGKTLLAKAVANETGMSFISVKGPELLSMYVGESERAVRTVFQRARDSAPCVVFFDEIDALCPKRSQRENSGSSRLVNQLLTEMDGLDGRRNVFLIGA

SEQ ID NO: 121461 - protein, 134 aa, Heterodera glycines
  unsure (1)..(134): unsure at all Xaa locations
MLLSTRHIYPAFSRLIFLSSYCKTIGTSPICIFNKNLSSTMSAYQTIEKGSLHTLNYRVFFKNSDGKLISPWHDIPLYASESNKLFNMVVEIPRWTNAKMEIATKEVMSPIRQDEKKGLPRFVNNIFPHRGYIX

SEQ ID NO: 121462 - protein, 193 aa, Heterodera glycines
MRDLFIEDNSPITPARLAELIRHFYALGWMRDNGGGMAVLCNGAVFGSPTSVQKEKVSENDLFVIDATTGTVLKRPQNAASVPSATCGLLMNTGLNCVIHTHSKYANLVSQLVTGNEFAIQNQEMIQGVENRSSGLRLDNVDRLVVPIVDSELNEQMLSPVLLRTLDKYTEASAILVRGHRFFVFGSHCWQST

SEQ ID NO: 121463 - protein, 210 aa, Heterodera glycines
MGISDNDVQKQLRHMMAFIEQEANEKAEEIDAKAEEEFNIEKGKLVQQQRQKIMEYYEKKEKQVELQRKIQRSNMQNQSRLKCLKARDDHLKNVLEEARANLSKISADRERYPAILKGLLLQGLFQLLESKVVLRCRKKDEEMVARILPECLEEFQRTWGNRSEVKIDNEYFLSPESAGGVELLAKDGKIRVSSTLEARLDLIADKITPQ

SEQ ID NO: 121464 - protein, 140 aa, Heterodera glycines
  unsure (1)..(140): unsure at all Xaa locations
SSKNGPAFSPLALIFLCSLFAFIVMMRKHRKYWSNRGISSSSPQLISGNFGSLNGNHLSMXQLMDWTRQYGKQYGVQYGWRNALVTPDPAMVHELLVTKFEYSHARNLSPIFGNWDTNKWISMFLATGGRRKRLRTIANP

SEQ ID NO: 121465 - protein, 179 aa, Heterodera glycines
  unsure (1)..(179): unsure at all Xaa locations
MTGEPKTPSYVXFTPDSGERLIGDAAKNQLTLNPENTIFDAKRLIGREFTDKTVQDDMKLWPFKIYNKANKPHVQVKVGNEDKQFAAEEVSAMVLTKMKEIAESYLGHEVKNAVVTVPAYFNDAQRQTTKDAGTIAGLNVVRIINEPTAAAIAYGLDKKEGERNILVFDLGGGTFDVSL

SEQ ID NO: 121466 - protein, 228 aa, Heterodera glycines
  unsure (1)..(228): unsure at all Xaa locations
MDDKETRPKTKGANESKRNLDREYGXCXFLKKECITAAIPYLEHVIYEWSDESPHFHGELLEQYVLRCNTLLGQFLHSLSSPSIGVPSFVAEDDELSILRRKLQYFLATDQHYSIESARDLIGEDQNLMEERAIIMGKLGQHLNALKIYTEILMDFNGAERHCQTYYDERNASTRNIFFDLFHYYIKGEMPQKEVIQVESDYEIRRKPNISEALKLFKRHPTKIDTVG

SEQ ID NO: 121467 - protein, 151 aa, Heterodera glycines
PGGKDVYEGVKIDYSGTEVNPENFEAVLLGDEQRSEGKPVLKSTEKDKVFVYFSDHGAVGVIGFPAADLTVKQLTQTLKEMHAKKMYGELTFYLEACESGSMFDHTLAQSLKIYAVTAANGDESSWGCFCDTKFLPGNCLGDLFSVNWMQD

SEQ ID NO: 121468 - protein, 207 aa, Heterodera glycines
MFYHDLHDNENSHDKELKQLVQMDDLAIPKFVMPPLGIKPIFFVRKHFGPNSRLPMAQFLKGTTTLSFVYKPKTPQDKGGVIVAVDSRATGGTYISSKTVEKIIPINDQLVATMAGGAADCQYWTRVVSKYCNLFELREGTQISVAAASKYFANVMYDYRGQELGVHSMVCGVDKFGPSIYMVEAEGTRVKIDTICSLGSGMLHAMS

SEQ ID NO: 121469 - protein, 158 aa, Heterodera glycines
MPGMGGGHQQQGMRYQGQPRGMQQQQQAQQPQIAYSSYPQQQSRGGIAPQMGGGASGGGATLATVITSSTHQEPLNTQLLTEANITAQKQMLGERLYAMVARCFRDGDVEKIGKITGMLLEMENAEIVLLLGDEEMLRLRVDEAATVLYQATGQKEAQ

SEQ ID NO: 121470 - protein, 122 aa, Heterodera glycines
LLRKLHFARLSSARSMTWWWGPEKNNGREVVGPTFHGDEFYQDRLDRWYPSIRFRKNDEVITPIRHKELGDWKKLSIEEKKLIYRYSFRQTLAEFEALTPYGYLTVTLFFSMLGLTILYASF

SEQ ID NO: 121471 - protein, 114 aa, Heterodera glycines
  unsure (1)..(114): unsure at all Xaa locations
TLPYLKVKSAKNVRLFLGHLQFLSSMSSYSYMRSEWKKNAMDXLLWDNSFFKMDFRALRQWLIVIDNLMTNDKTWFKELLTRITTSTSTTLSTLITSKEHEYDMRAHYLKRLAF

SEQ ID NO: 121472 - protein, 186 aa, Heterodera glycines
  unsure (1)..(186): unsure at all Xaa locations
PVVVLAGSLLDAAEKLLAXGIHPTTISDSFQRAATFSEKVLEEMATPIDINDDDELVKLAMTSLNSKVVSQYSHLLAPMAVQAVKKLMSSPEDSSVNLKLIKVVKKLGETVEESQLIEGALIDQKSMGHGGPARVEKAKIGLIQFQISPPKPNMENQVVISDYAQMDRALKEERNYILELCKQIKK

SEQ ID NO: 121473 - protein, 198 aa, Heterodera glycines
TIEEILRKRQVEMTSFSDEVEHRYQAKLQEQLQAMRDDFDNRIAQNRAEVDELYRNKLGEAAENANRNRDLAAKAREEAAMWRVRVQDLENSSKDHQGIVESLNRRVKDLEAALRRAHEDADIRIQQRDEQIEQLQKEIALMISDYQDLLDVKVQLDTELQAYQKMLEQEETRLHITPSTSPNTSVVGQNISTPNMVI

SEQ ID NO: 121474 - protein, 184 aa, Heterodera glycines
WEDVLPFRHPFAVLGDYLRKWQGATDIEPRTIGSGAVMTATPFYEVAIYVDKQQIVGQSGGEFPWVALDLAAHNGLLRLWRVADHPRVFPFKFEEVYATRFEHAQQRNHRLSDVCGENTDLSLYTPEELARDPIDMVDMCNQYYTKIRPDVGIPLRRRQRHKFSRGTISRLSRRFLVKPTIFNI

SEQ ID NO: 121475 - protein, 198 aa, Heterodera glycines
MRDLFIEDNSPITPARLAELIRHFYALGWMRDNGGGMAVLCNGAVFGSPTSVQKEKVPENDLFVIDATTGTVLKRPQNAASVPSATCGLLMNTGLNCVIHTHSKYANLVSQLVTGNEFAIQNQEMIQGVENRSSGLRLDNVDRLVVPIVDSELNEQMLSPVLLRTLDKYTEASAILVRGHGFFVFGSHCWQSTKVMLE

SEQ ID NO: 121476 - protein, 199 aa, Heterodera glycines
MDFENGGRDTGASSGLGKATAVLFARNGYHLSLCGRNERALEGVASNCLAEGGLTREQVLTIIGDVCEEKTLQNIVKRTDESFGRIDVLVNCAGVIASGGAENTPTSVLDGLMNVNVKSMIRLSQLVVPYLEKTKGSIVNVSSIAGICAFPAVTYYCISKAAVDKFTECLSMELAPKGIRVNAVNPALIVTELHLRSGM

SEQ ID NO: 121477 - protein, 190 aa, Heterodera glycines
MSDSGRSSIIRKSSSSKLIRQFAEMNIPTNGDEYLDRGESAKREKRFVFECAWEVVNKVGGIYTVLRTKAPISTDELGDQYYMMGPYVEERVRLEVEVLEPETANLKYTLDQMYDWGFRVVYGRWLIDGYPKVLLFDVGSAAWKLDTWKHELWEKCSIGVPFLDREANDCIIFGFLVAIFLKSFLDSSEN

SEQ ID NO: 121478 - protein, 186 aa, Heterodera glycines
GFLKLMEEAKLHGKSTFASFSTKWVKDARFKAVEKMRDREAYFKDYVEELYKKEKEEKRKEREKAKDEFKALLSEQNDLRRNSIWAIVKKRLDKEARYKNKHLDSETRQRLFEEHVKDCPEPTEEEEEEAKRLAAESLEASNGKRRSDHDGVENGEKRKRKEPLTAEEKALEERKREVAEELGEHL

SEQ ID NO: 121479 - protein, 174 aa, Heterodera glycines
  unsure (1)..(174): unsure at all Xaa locations
MTDTANRQRRGRGERRTRVLLRDSAKKITKASILRLARRAGVARINARVYDEVRAALRSYLETIIRDAAIYCQHERRKTMKSRDVVHALKRQGNLMYGFEQXAQGGGGWIYLEPAPYDIFGXYYYCTYVCICLYCILLCRCYCTPXYPCSCDPLLLLSLCIDIXCIWYDKDWRF

SEQ ID NO: 121480 - protein, 198 aa, Heterodera glycines
MIPLNLQIAESALKVLQTKTPGGEIEQSATAGALCTNNTCKKVFTGPDIYSEECVFHPGNAVFHEGLKYWSCCGRKTTDFTTFLDQLGCTRGKHCWKKKEIVTNAREDWFQRGGQVHITIYCKGALPSETSAKSDGLTLEVTINGSTKRYELFGEIAPSESVVIISERKVEIVLKQVAKIGWTKLLKEQTTGLAQSSD

SEQ ID NO: 121481 - protein, 126 aa, Heterodera glycines
MAKGVKFDHDNAFVRFCRYYLWHYCWSGRQYGLQFYDQAFEPHPVVQEALRRLRLKDPYQYDLRLQRILLASQLGSKNERLPKNMWTKWDDETFYLNPYFNEIEEEKLEREASTGMKPGYQLKEQI

SEQ ID NO: 121482 - protein, 120 aa, Heterodera glycines
  unsure (1)..(120): unsure at all Xaa locations
RRTRVLLRDSAKKITKASILRLARRAGVARINARVYDEVRAALRSYLETIIRDAAIYCQHHRRKTMNSRDVVHALKRQGNLMYGFQQXAQGGGGWIYXEPAPYDIFGXYYYCTYVCICLY

SEQ ID NO: 121483 - protein, 105 aa, Heterodera glycines
  unsure (1)..(105): unsure at all Xaa locations
PDLAPYLYVKMGFRQGYLDKLRAEVFEPGVKHILPLFEKLLKDLWSGYMLKSGLSMVDFLXQPSVFFTKLEPETINAFPELIKYVDRVHALPQLQQYLKQRPQDR

SEQ ID NO: 121484 - protein, 168 aa, Heterodera glycines
ALSFSKHTVKIEPTALGRDFTEALVERLNRQFANYVIPNVGLCITFYDFKKYGASYILPGDASTHTPVLFRYVVFQPMINEILEGNILRSNQEGITISMQFFSDITVAPDKLPAVSKFDESVQVWRWEYQNENGDITPFYMDPGKRVRFVIVFWYSNDLNFSIFSRVC

SEQ ID NO: 121485 - protein, 176 aa, Heterodera glycines
  unsure (1)..(176): unsure at all Xaa locations
LQDAFTDXELASDSFPMKLVDDLIYEFKGRHVVRKEGEITMSGANPSAEEIDEGTEEAVERGIDFVLNHRLQEMNCYENQATFKGYVKDFMKKIIEYMEKEQKSADEIAAFKKKIQAWVVSLLAKDRFKNLAFFIGENMAEGKGEGQVAIVEYRQENGEEVPTLMLIKEALIVEKC

SEQ ID NO: 121486 - protein, 212 aa, Heterodera glycines
MNLKACPTLATATVFFHRFYMFHTFDEHHLHMTALACFFLAGKVEETPKKCKDFLTVARELYPHHFTAKVTPDDLMLMERVLLQTIRFDLHVEHPYTFLVQYAKGFRMDKEYMSKIVTNAWTFVNDSLGTTLCLLWEPEVIAIALLYMSFKMERMEEQQIGRTFHFDASTEWWNLYVQNLTVPMMDDICHKVLDSIAPANGEDAPMANGTKN

SEQ ID NO: 121487 - protein, 154 aa, Heterodera glycines
YRNLLLRFCLKDEKAQRILLGGIEQLVQNNKDILMSKTAHIIKALYDNDICEEDVILAWGSKPSKKFADKEVVKEMIKVAQPVLKWLKEAEEGSDESEDDDLDVAFDDRSRDIGMTVEVEKGAKDGVTRVQNGQIATNGKMDDGNADDIDIDNI

SEQ ID NO: 121488 - protein, 186 aa, Heterodera glycines
EKARRYDDMVEAMKKLIKLDPNLTLEERISLSTAYKGAMASRRTSWRALVSIEERTGASLSDAQQQVLENYREKVQNELVNTCQELLTCINEVLFPKASDVEQKVFYLKMKADYYRYISEVATDEDRSGVVELAKVAYQEAIDMAGDKIPATNPTRFGLALNLAVFNYEILNSVTEARKVIQTALD

SEQ ID NO: 121489 - protein, 179 aa, Heterodera glycines
  unsure (1)..(179): unsure at all Xaa locations
FLWAYPYRLVMSLALALLVYWTPSFREPXGEYPYFYYAIWIGAYYLQQVSSYCIFLSMMAFNAQISDPKIGGTYMTLLNTLNNLGGNWPVTLSLSITDFFNRKNCVAKGTKIVLGVCTSKHDEELCKAGGDACEFVIDGYYISVAICVVVGLLWYRIFYRRIKYFQKIPRQDWRVIKTK

SEQ ID NO: 121490 - protein, 166 aa, Heterodera glycines
  unsure (1)..(166): unsure at all Xaa locations
ALHLTKTFNQTEKMFVKTFSNKTVVLXVDPTELSVEQLKALIAEEEEIAVPDQRLVFAGCQLVDGTLLRTYGVDADSTIHLDLRLLGGGKKRKKKQYTGPKKQKHVRKKVKLAVLKLYKVIDDNGKIHRQRLECNSASCGAGIFMAKHKDGRFYCGKCHQTLKEKK

SEQ ID NO: 121491 - protein, 160 aa, Heterodera glycines
MRPRIREIKEARRRKLPVLLPSWVFAANSMDRRLKDTLNVITSEKHLDTHKTPLFAGCEITVSGFPGADRVDIGRLVELHGGVFTGQMNRSSCTHLIAATNSGEKFRKAREWGTVWVVTSRWLRKCIETGYRLSESRFAHSHDEDTQQRVSPSFSLITKK

SEQ ID NO: 121492 - protein, 219 aa, Heterodera glycines
  unsure (1)..(219): unsure at all Xaa locations
YGCRTEQKMGKKGAKKKAVDXPFTRKEWYDIKAPAMFTHRNVGKTLVNRTQGTRISSDFRKFRLICEEVQGKICLTNFRGMTFTRDKLCSIVKKWHTLIEANVAVKTTDGFLLRLFCIGFTKRNANQIKKTSYAKTSQVRMIRAKMVEIMQKEVSSGDLKEVVNKLIPDSIGKDIEKACSFYYPLQDVYIRKVNVLKKPKFELGKLLEMHGEGAGTVAT

SEQ ID NO: 121493 - protein, 199 aa, Heterodera glycines
PSAAELSPPNTFLGVSLASPFDYAAAREYTAYTQGPDIWITTAYVVTIFGIQWYMKDRKPMQLTLSLRLWNLWLAMFSTAGCLVTSYALLREIGTYGLVSSYTNCRDFFEGFTGLWTWWFCMSKFAELGDTYFIVLRKKPLMFLHWYHHVATLNYGLMSYVDNTAFNTWIVWLNFSVHAVMYTYYFLAACRIRLPAWFA

SEQ ID NO: 121494 - protein, 162 aa, Heterodera glycines
ETILTLEPDVMLKLNYNLTVHTPYRPFEGHLIEMKTKIGRQLSEIEFDLESIRPMSSEFLKNSLLSDAMFLYSPSQIALAAVKFGMDKALGEVRSSTLMVDFLAALLDVDIGDAGGRRTADILQLEKLQVRLDQICKLVLQQFAQGVSAEESASLQIKKKQK

SEQ ID NO: 121495 - protein, 160 aa, Heterodera glycines
  unsure (1)..(160): unsure at all Xaa locations
PLSYSYTELHKMADQLTEEQIAEXKEAFSLFDKDGDGTITTKELGTVMRSLGQNPTEAELQDMINEVDADGNGTIDFPGFLTMMARKMKDTDSEEEIREAFRVFDKDGNGFISAAELRHVMTNLGEKLTDEEVDEMIREADIDGDGQVNYEEFVTMMTTK

SEQ ID NO: 121496 - protein, 173 aa, Heterodera glycines
MVQYKLYYFDGRGLGESIRLLLHYVGQPFEDIRIKDVEEWEKTYKPKFFYGKVPVLEVDGKPLGQSATILRYLAEKFGLAGKDECEKAKANEIIDFQKDANTDLAPYLYVKMGFRQGDLDKLRGEVFEPGVKHILPLFEKLLKESGSGYMLKSGLSMVDFQVANFLYTFTKLE

SEQ ID NO: 121497 - protein, 216 aa, Heterodera glycines
MHGIQQHHSERPLVRGKTSPYGFFVKMCYEEHKKKYPNECVQVTEISKKCSQKWKTMTDDEKKRFFELAQKDAERYQAEVAAYGGEDVLKRKKRAKKDPNAPKRALSAFFFFSNEKRQEVSGEHPEWKVGQIAQELGVRWKALSDEERAIYEKKAQEDKERYAEEMRAYRNDSALSSGTCQKPSYLEGGPSMTTAEHVLQSQGGAHVVSTSAGGQP

SEQ ID NO: 121498 - protein, 192 aa, Heterodera glycines
MAQLAVAAPLPPTTNATAATATPAAPSYPMASLYVGDLHPEVTESLLFEKFSVVGPVLSIHVCRDAISRRSLGYAYVNFQQTSDAEKALNSMNFDCVLGKQIRIMWSQRDPSIRRSGSGNIFIKNLDKDIDTKNFFSTFSAFGRILSCKVATDSDGKSKGYGFIHYASEDDANKAIEKINGIHVDGKTVFAG

SEQ ID NO: 121499 - protein, 192 aa, Heterodera glycines
LFRPDNFAFGQSGAGNNWAKGHYTEGAELVDNVLDVVRKKAEGCDCLQGFQLTHSLGGGTGSGMGTLLISKIREEYPDRIMSSFSVVPSPKVSDTVVEPYNATLSVHQLVENTDETFCIDNEALYDICFRTLKLQNPTYGDLNHLVSVTMSGVTTCLRFPGQLNADLRKLAVNMVPFPRLHFFMPGFAPLSA

SEQ ID NO: 121500 - protein, 211 aa, Heterodera glycines
EKECIQYKKSLDHLLRRRADCPFDVEASRIKLDALKSEERDLLEQLTLLEDEERTLLHELDTKQEERKKIGERDEQLYRQLRDNHSILIEQSDEQRSFKLQINQANEQIRRLSRMNVLDLVFHIWVDGEYGTISGFRLGRLRHDQVEWSEINAALGQTAFLLKVIAERLGLDFVGYELVPCGSTSLIRILPKNGGTTTASSTTAPAAHAVE

SEQ ID NO: 121501 - protein, 185 aa, Heterodera glycines
TFRGGENVVDFCFAPFNRQILYSLAVGGAVNTFDLARCTGQDTFFDQGCVRATCLSCSPSGQFIACGSNTGIVNVYDLTKLSPSLAKSNAPRPVRMFDQLTTLVSFVRFNNDSQMLAFGSAVKRMSGRVANCSSGSVFQNFPAKQEHFASDKFTTCDFSPNSAFFSFGTKQGKMRLYQLHHSDVY

SEQ ID NO: 121502 - protein, 203 aa, Heterodera glycines
  unsure (1)..(203): unsure at all Xaa locations
LVDRHMTHNEETYWVPSFVEXRFANWLRDARDWCVSRNRFWGTPINLWVSDDFQEMECPGSIDELERLTGTKVTDLHRENIDHLQIPSKTGHGMLKRVTEVFDCWFESGSMPYAQQHYPFENSEVFEHNFPADFIAEGIDQTRGWFYTLLVISTALFGRPPFKNLVCNGLVLASDGSKMSKSKKNFPNPLDVVRKYGADALRX

SEQ ID NO: 121503 - protein, 233 aa, Heterodera glycines
  unsure (1)..(233): unsure at all Xaa locations
PGKGFSLLTEPGSIGKRFDTIGLENTENNRRRYRQLLXTTPSFGQNLSGVILFDETFRQSTDNGVRFVDVIKKAGAVAGIKVDTGVVPLAGTLDEGTTQGLDKLSDRCAEYKKGGCDFAKWRCVLNIGXHKPSHLALMENANVLARYASICQQNGLVPIVEPEVLCDGDHSLERCQKVTELTLAYTYKALANHHIYLEGTLLKPNMVTPGQSHSPNATPDQIGLATVTALRRS

SEQ ID NO: 121504 - protein, 171 aa, Heterodera glycines
TLLNCLQYRPETRQAKKERLRQRAQDRADGKQEKLTKRPPVVHFGIKDVVKAVENKKASLVVIAHDVDPIEIVICLPAICRKFGVPYAIVKGKAFLGQVVYRKTTSAVCLCDVNPEDRNALKNLAGVAVTNFNERGDELRKNWGGAIMSQRSQARQAKIEKARQKDVGQKV

SEQ ID NO: 121505 - protein, 189 aa, Heterodera glycines
  unsure (1)..(189): unsure at all Xaa locations
GCDLIVDARGVVPTLTMXSDCPELSLAEDYGILVNEQMRTNIEDVFAAGDVCTANWTAKSPHWKQIRLWTQARQMGLFCARCMLIDNVLLDIAFELFTHVTSFFGFKVILLGDFSGERLEKPFEKNYRITEGCEYVKVLTKDHRVHGAVLVGETDLEGAVENLILNQTDIGQIEQVFLDPDFDLEDFFD

SEQ ID NO: 121506 - protein, 201 aa, Heterodera glycines
MREVISIHVGQAGVQIGNACWELYCLEHGIQPDGKMPSDQNNQDDSFSTFFSETGNGRHVPRAVMVDLEPTVIDEIRTGTYKHLFHPEQLITGKGDAANNYARGHYTVGKEIIDPVLDRIRRIADNCTGLQGFLIFHSFGGGTGSGFTSLLMERLSVDYGKKSKLEFSIYPAPQVSTAVVEPYNSVLTTHTTLEHSDCAFM

SEQ ID NO: 121507 - protein, 179 aa, Heterodera glycines
  unsure (1)..(179): unsure at all Xaa locations
KTDQVRDTVHQLTVSLGKLYNGCTKHLRITRHILCPKCNGVGGAKEGVKQCENCRGRGLEIXNMQIGPGMIQRIQRACSECGGEGEINRNPCKHCGGKKRIKSEETIEVHIEKGMRDGQRLMFYGKGDQQPGLEPGNVIIVLDEEEHPVFTRRGTNLTLSMKLTLTEALCGCTKHVVTL

SEQ ID NO: 121508 - protein, 165 aa, Heterodera glycines
ARCRGGNIKHRGLRLDTGNFAWASEGCTRKTRIIDTMYNASNNELVRTKTLVKGMIVSIDAIPFRQWYEAHYALPLARKKGQKLTEDEEARIGGAQKRSKSTLKKYTERQKTAGVEPHLLEQFQAGRLLACISSRPGQSGRCDGYILEGKELEFYNKKLKAKKAK

SEQ ID NO: 121509 - protein, 221 aa, Heterodera glycines
  unsure (1)..(221): unsure at all Xaa locations
LGLALAQRXFNSAADFCFLAVNLLYGFDCFQEQQSDENHRRTIRLISATLPDDGANSFLTRFGWSILDYQATELFDFALQLANPNSPTLLSKSHYYAKVRLQYAQLLDELGGFKHAVELYRLENSNHSKTPSPPPLVPSVHKTKLAHLKRQDHEPTPAVAPAPPTFLPVQLQSASKEDHAPTPFAVAPASHTFQPVQSASTQGQEPTAFAVAPASQTFLPV

SEQ ID NO: 121510 - protein, 152 aa, Heterodera glycines
YELELAKSLHAMATNTNVIKNFFKKIRIAEQNYMKMFTDEVEAFKDRLRKRARDKREAMLSETEVEEKKKRVAQSPGGLDPQEVFDSLPAEMQEAFETQSMAKIFEVAKSMDSEVFKYHLDRCTASGLWIPNAKEAEGHGQEEEEKKETEEK

SEQ ID NO: 121511 - protein, 174 aa, Heterodera glycines
RTSQYDHRRRLHPDKIHNRIAAEVENPTIGESGQKKTAIDLTLSLAVQLIPQVRDGIFHTQLNLKERKIDMKNKTAFPKQMKPVVEELLQDMIKDDVWPAVKRGIEPLIYVKGVELPANCGVDPKSAQLHFGHRKIGASAKLNIKEISLSHCVEQFKSKLPDPATLFKINGTSF

SEQ ID NO: 121512 - protein, 173 aa, Heterodera glycines
QEYTPSSSALFSPPPSASAPSSAIKGGSDLTSDEMFTGEGFSQQGLLNYAVGFFKKGRLFLLPVDKTFEMRKPLRGTIERESTARTTALKPSSSVSSTSTRSVAADSAPSGTASASSSSVAVAAPLRIRFARAENDLQRRRREQSSFYKQKLVEQDQWIPLKVEHRDLLEMYE

SEQ ID NO: 121513 - protein, 174 aa, Heterodera glycines
  unsure (1)..(174): unsure at all Xaa locations
CKVNGMLLDGKKVFVGKFLPRSARXQQIGDPSSRFTNVYVKNFGDAMNSEKLSELFSQFGEIISAKVMEDDSGKSKGFGFVAYKDHESAARAVEKMNEVSVPGSEKVEQKFTVCRAQKKSERQAELKRRYEQYKAERIQRYQGVNLYVKNLHDTINDETLRSNFESYGNITSAN

SEQ ID NO: 121514 - protein, 126 aa, Heterodera glycines; identical to SEQ ID NO: 121481

SEQ ID NO: 121515 - protein, 186 aa, Heterodera glycines
KKPFDHKQLLTLFCRRSLHFWFGNLVTMKWWSDLWLKEGFASFTQYLFTDKNYPEFKIWSDFVDAEVVRAMALDSLRSTHPIEVPIDNPNELEEIYDSITYAKSNSIIRMLFNHLGEATFQKAIRDYLKKHQYANAETNDLWKSLSDASGIDVKALMSSWTQQMGFPLVTVEEKILDGDRIELHLK

SEQ ID NO: 121516 - protein, 154 aa, Heterodera glycines
  unsure (1)..(154): unsure at all Xaa locations
MRRRVPSTMPLKRAIRFLENVREKKEIVPFRHFNGGVGRKAQAQAWGTTQGRWPKKSAEFLLQLLXNAESNAEVKGLDVDHLVIDHIVVQAAAKMRRRTYRAHGRINPYMSSPCHIEVILTEKKDVVAKPAGALVKVKKESKKKQRRQLARGEF

SEQ ID NO: 121517 - protein, 248 aa, Heterodera glycines
  unsure (1)..(248): unsure at all Xaa locations
KILIANSPMDQDKIKVFGSRIRVDSVAKIAELEQAEKDKMKQKVENICNHGINVFINRQLIYXYPEQLFADRKVMAIEHADFEGIERLALVLGGEIASTFDSPSEVKLGSCKLIEEVTVGEDTLLRFSGVPLGNACSVVLRGSTQQIIDEAERSLHDALCVLSTHVKDQRVVPGAGASEMLMAMAVMGESQKVAGKESIAMEAFARALAKLPTIICDNAGLDSAEIISHVXAEHSKWNRQFGIDVENG

SEQ ID NO: 121518 - protein, 172 aa, Heterodera glycines
  unsure (1)..(172): unsure at all Xaa locations
LCIVARSLHFWFGNLVTMKWWSDLWLKEGFASFTQYLFTDKNYPEFKIWSDFVDAEVVRAMALDSLRSTHPIEVPIDNPNELEEIYDSITYAKSNSIIRMLFNHLGEATFQKAIRDYLKKHQYANAETNDLWKSLSDASGIDVKALMSSWTQQMGXPLVTVEEKILDGDRIE

SEQ ID NO: 121519 - protein, 209 aa, Heterodera glycines
TRRGVAQWKLCLVGAAIFLCFALLYPSVFSPMLSNLFGGGTQRQQPAAADRPMHPSMMGPNQQQQQQRERAHRPPPHHPGASMRMPDMHNQQQQQQQGGFWSGKSGGSMAWMLPFYTVGVVCFLLYTLFKSKTKRQKRRRDRPLDLLYGDDDDDEGTEDGLEYGVRGAKLRSVQHRLRKTEQAMADILSQLEQISAHSKDINDDDTKAA

SEQ ID NO: 121520 - protein, 215 aa, Heterodera glycines
DDMDDLKYVVEFDFLGKDSIRYYNRVPVEKQVFKNLKLFMEEKDPGDDLFDRLDTSSLNQYLNELMDGLTAKVFRTYNASITLQEQLDKLTNPSDSVHEKMLSYNRANRQVAILCNHQRAVPKTHEKSMENLENKIKEKKQEYKELKDQLKKIKSVDEKMAKKYERLKEQIAKLNTQRTDKDENKQIALGTSKLNYLDPRISVAWCKKNDVPVEK

SEQ ID NO: 121521 - protein, 211 aa, Heterodera glycines
MPKDELCTENAIMLRRFNRFPLIIDPSGQSIEFICKEFSQHLARNIKREDRFNDNSFRKNLESALRFGTTLLVQDVESYDPILNPVLNREVKRTDGRVLITIGDQDIDLSPAFKIFLFTRDSSVEFPADVCSRVTFVNFTITRASLEAQCLHQVLRSERPDIDKKRNDLLKLQGEFAVRLRHLEKALLNALNECKGKILDDDSVIATLEKL

SEQ ID NO: 121522 - protein, 132 aa, Heterodera glycines
  unsure (1)..(132): unsure at all Xaa locations
MILSSLDCSSRHFATASAAAKWGPAVEPIQEKTTLLPNGLSVASVELQGPISQLMFAFRSGARFEQHDXAGLTHQLRNAIGTDSINYLGVRLLWVTGQSGATLQAKLSKDLMLVHMSVPRTMSPVAISVLGD

SEQ ID NO: 121523 - protein, 179 aa, Heterodera glycines
FAHGDVVCAVTMARNGRHVFTGGKGAVKMWDIGERIGLASSVGGSISPSSSTIADGTNGRVGSAEPWTPVNTFPCLKDSYVRSCKLFPDASTLIVGGETRTICVWDLNSEKVKAMLDCDAEACYALAISADCRLCFACCSSGSIVIWDLQSEQKVAQLDGHTDGASCVDLNGDGLRLWT

SEQ ID NO: 121524 - protein, 216 aa, Heterodera glycines
YMVDPIDEYCVQQLKEYDGKKLVSVTKEGLELPESEEEKKKFEEDKVKFEKLCKVIKDILDKKVQKVSVSNRLVSSPCCIVTGEYGWSANMERIMKAQALRDSSTMGYMASKKNLEINPDHSIIKSLRDRVEKEQDDKTAKDLVVLLYETSLLTSGFSLEDPQQHASRIYRMVKLGLDIPDEEEPAEQQPSTSGEPTIAEKIAGAEDDASRMDEVD

SEQ ID NO: 121525 - protein, 122 aa, Heterodera glycines
  unsure (1)..(122): unsure at all Xaa locations
KLQPHEFQGGTFTVSNLGMFGSVDHFTAIINPPQSCILAIGSARRMLVPMEEEDKSDFSNXFRAFSSLKVTLSCDHRVVDGAVGAVWLQNFKQFMEEPFTMILWGTPGNVFLIVSPHSRPNY

SEQ ID NO: 121526 - protein, 216 aa, Heterodera glycines
MTSRILSCNLRRYFSKMNQHIEFGTTKSASSDKQSPPSPTNNQTQHEGMSQECREQIEQMERLKSDNEMLTDKYKRTLADMENLRKRTQRQIEEAKLFAIQPFCKDLLEVADVLDLALNSLEKMKTEDGAASLDSGVNKGIKMTKEVLLKTFKKHGLVPVQPEGQKFDPNLHEAVYEIPKDQSDRPAGHIAHVLNIGYSLHDRPIRPAKVGVVKME

SEQ ID NO: 121527 - protein, 119 aa, Heterodera glycines; identical to SEQ ID NO: 121249

SEQ ID NO: 121528 - protein, 221 aa, Heterodera glycines
VGGVMTKLIPRNTVIPTKKSQIFSTAADNQPTVTIQVFEGERPMTKDNHLLGKFDLTGIPPAPRGVPQIEVTFEIDVNGILHVTAEDKGTGNKNKITITNDHNRLSPEEIERMINDAEKFAEEDKKTKEVVEARNEFESYAYSLKNQLGDSEKLGGKLSAEDKTTIEGAVDEAISWLDSNKDAPPEELKERKKDLEAKVQPIISKLYAGQSPPPGSEPPPT

SEQ ID NO: 121529 - protein, 208 aa, Heterodera glycines
MSSPPSSVLPQDVFILSAVRTPIASFRSSFASLNAVDLGTFVATEAIQRAGLRPDQVEETVTGCVLSAGSGQNVSRQIAIKSGIPEARQAYTVNKVCSSSLKALILGTQSVQLGQRSMVLVVGVESMSQAPFYLARGDNNYGDIKLLDSIQRDGISDAMLGQPMGVCAEKTVAEFGFTREQHDAYALASYARATRAWAGGAFGAEIVP

SEQ ID NO: 121530 - protein, 119 aa, Heterodera glycines
MNHFGLTFLFVAVSLLVIAPGCDGMQIFVKTLTGKTITLEVESSDTVDNVKTKIQEKEGVPPDQQRLIFAGKQLEDGRTLADYNIQKESTLHLVLRLRGGNGKRNTSKNKKSNKKLDQN

SEQ ID NO: 121531 - protein, 189 aa, Heterodera glycines
SQDRWHKRRKTGGKRNPIHKKRKFEMGRPAANTKIGPKRIHLVRCRGGNIKHRGLRLDTGNFAWASEGCTRKTRIIDTMYNASNNELVRTKTLVKGMIVSIDAIPFRQWYEAHYALPLARKKGQKLTEDEEARIGGAQKRSKSTLKKYTERQKTAGVEPHLLEQFQAGRLLACISSRPGQSGRCDGYIL

SEQ ID NO: 121532 - protein, 181 aa, Heterodera glycines
IPKTDKKNRRSSPVSPPSNSPISLLAVSLAVLAFVALASANPPTARETAPNAQQNNANSVATGEIAKNIAEKMERMNEFIKAKKFIDAHNLAFEKGEVSFKVAPNHLMHFTPAQYNRIRGLQMRSNRQRHNMATLAGNSSTLPEKLDWREKGAVTEVKDQGDCGSCWAFSATGAIEGALAQ

SEQ ID NO: 121533 - protein, 189 aa, Heterodera glycines
IKNVYSKVYDVPRRPFEKERLDQELKLIGEFGLRNKREVWRVKLSLAKIRKRARELLTLEDKDPKRLFEGNALLRRLVRIGVLEEDKMKLDYVLGLRVEDFMERRLQTQVFKLGLAKSIHQARVFIRQRHIRVRRQVVNIPSFAVRLDSQKHIDLSAKSPYAGGRPGRVKRKNAKKGAGGGGSGGEEED

SEQ ID NO: 121534 - protein, 193 aa, Heterodera glycines
MPTAANDCNNNSIEDIQSDRRRGPIDPTNFDHLVRLSELIRSMADLGTLQPEFGIICGSGLGAIADQMEGARILPFSEVPGFPQPSVIGHKGNLAFGRIGGHFCMCLQGRFHPYEHKMDMALCTMPVRLMAFLGVRTMIVSNAAGALNGDFQTGDLMVIKDHIFLPGLSGYSPLLGISDPRFGSRFVSLHNAY

SEQ ID NO: 121535 - protein, 193 aa, Heterodera glycines
NGQQQAITKKRKAVQAGIFKAELNNFLMKELAEDGYSGVEVRRAPSRTEVIIMATRTQSVLGERGKRIRELTALVQKRFGYSAGQIELYAEKVSSRGLCAVAQCESLRYKLVGGLAVRRACYGVLRFIMESNARGCEIVVSGKLRGQRAKAMKFVDGVMIHSGNPVTEYIQEAVRHVQMRQGVLGIKVKIMLP

SEQ ID NO: 121536 - protein, 203 aa, Heterodera glycines
PFLILFFLGIDLQKFVNSAFTQDTEEKYCVENIESDEKVLMERIRDAKDWALTNGLTFPVPRRKLKCDACDKINENVVLDDMAQFVPFTLYPSPFPRELFDQAMDVNKTLLLMYFRASLPSNFEFLKELHKSVLAVSPSLRSTADLIERKHKEGIRQPLMLICIRADYMASEEIDEKSNEKKYALKQIELNGGSIGGYGTPQP

SEQ ID NO: 121537 - protein, 182 aa, Heterodera glycines
DTIYDEDEVLCGMWPNNSGNFTPLVGGPEYVHCLLPPLENLANIEETVVRDKAVESLQKIAEKHSAAQLEEYFIPMVLRLSAGDWFTSRTSACGLFSVAYARANPAQKTELRAAFRCLCRDDTPMVRRAAASKLGDFAKVQEEDYLKNEITQMFEDLAKDEQDSVRLLSVEAGIVIVGLLSE

SEQ ID NO: 121538 - protein, 198 aa, Heterodera glycines
ETGVLKPGMVVTFAPQGISTEVKSVEMHHESLPEALPGDNVGFNVKNISVKDIRRGSVASDSKNDPAKETKSFTAQVIIMNHPGQIAAGYTPVLDCHTAHIACKFAELKEKVDRRSGKKVEDNPKALKTGDAGIVDLIPTKPMCVEAFTDYAPLGRFAVRDMRQTVAVGVIKAVEKTEGGGKVTKSAQKAAAPGGKKK

SEQ ID NO: 121539 - protein, 198 aa, Heterodera glycines
DEPEVDGNASTIEQYFNNKYGRRLDYPNLPLIAMNSRFANEKRVNYYPIEVLDIIDNQRVTTQQQTPTMIQQSIKKCAIPPLVFKRQVHNTAKSIHLWDSEYLDEAGIKLTTEPIALRAHQLNHPEVKAGDGNMQRPMVEGSAAWRINSALVPQSVFADGTYSWMLACFVQLGGRGLSEPDLHKFIQLLEDQAKRRSL

SEQ ID NO: 121540 - protein, 225 aa, Heterodera glycines
MAKEEYCFDAKAAAAAGQSRRPSTTASVLVQGDGQSSRFVDAIIRKVTQPPLQRFTDEITDEELKQLCKAATDVFRMQPTLVRIRPPVVVVGDIHGQFSDLQRIFTTHGPPPEQQYMFLGDYVDRGAHSMETIILLFCYKIKYPSNFMLLRGNHECSNINKAYGFYEEIDRRYPRPGARRLFDLFNQVFAWMPFVGLIGEKILCMHGGISDKMRSLDQLSTLRRH

SEQ ID NO: 121541 - protein, 242 aa, Heterodera glycines
  unsure (1)..(242): unsure at all Xaa locations
TCFGHRSHTTIAVPNAQLIKAPLITGESALLAPVLYRGIALVADELGPLQMILMTASSTAYSHNPNKTVEEHPSAVGKSTILLGALQARNNARVILSGSLDFFSNKFFTATVNQAGGHTANAVKSGNQQLAASVLKWLLKESGVLRIKSVKHHTVGQKSPPAEYTIMDDVRYEIGIEELQNGKWVPFQGKDVQLEFVRIDPFVRVTLKNNNGKFSAXIKIPDVYGVYKFLVDYHRIGYTHLT

SEQ ID NO: 121542 - protein, 202 aa, Heterodera glycines
  unsure (1)..(202): unsure at all Xaa locations
MLMFSDWLVDIPXTLSTEWTMLPSPVGRRTLVVANRGETRVYFKNGHLATNFHSLLPGGNAKTKGSLTILDAIFDAKKRKLYLLDLLWWNKLLYTDMEFTARRFFLQSRIDEMNEDIERKNSRASISKNQERNGCKIAEQDKMSSSEISPYEMSPPSDTSPEQNAVEPKSRRDIKFVPVPSCACSPDEIGQFMRTLFPFRLD

SEQ ID NO: 121543 - protein, 232 aa, Heterodera glycines
AFSTFFSETGNGRHVPRAVMVDLEPTVIDEIRTGTYKHLFHPEQLITGKEDAANNYARGHYTVGKEIIDPVLDRIRRIADNCTGLQGFLIFHSFGGGTGSGFTSLLMERLSVDYGKKSKLEFSIYPAPQVSTAVVEPYNSVLTTHTTLEHSDCAFMVDNEAIYDICRRNLDVERPSYTNLNRLISQVVSSITASLRFDGALNVDLTEFQTNLVPYPRIHFPLATYSPVISAE

SEQ ID NO: 121544 - protein, 197 aa, Heterodera glycines
MDKKMKEMEQKTTKTKRRKKEKDTENGGTNREKPKDSEKENLDGRISKRNKMQSEEATVDAECAELRGNAKVFVDGKGRCYDVMLSQTNIQQNNNKFYLIQLLCNQTAANKFWVWFRWGRVGFKGQTNLVPFGTDFDGALELFHRKFTDKTQNDFLTDIKKFKKVAGKYDLIKIDHSREVTTETERDAKVRRKVAKT

SEQ ID NO: 121545 - protein, 168 aa, Heterodera glycines
MGISQDRWHKRRKTGGKRNPIHKKRKFEMGRPAANTKIGPKRIHLVRCRGGNIKHRGLRLDTGNFAWASEGCTRKTRIIDTMYNASNNELVRTKTLVKGMIVSIDAIPFRQWYEAHYALPLARKKGQKLTEDEEARIGGAQKRSKSTLKKYTERQKTAGVEPHLLEQF

SEQ ID NO: 121546 - protein, 152 aa, Heterodera glycines
  unsure (1)..(152): unsure at all Xaa locations
MVGRIKNVYSKVYDVPRRPFEKERLDQELKLIGEFGLRNKREVWRVKLSLAKIRKRARELLTLEDNDPKRLFEGNALLRRLVRIGVLEEDKMKLDYVLGLRVEDFMERRLQTQVFKLGLAKSIHQARVFIRQRHIRVRRXVVNIPSFAVRLD

SEQ ID NO: 121547 - protein, 81 aa, Heterodera glycines
  unsure (1)..(81): unsure at all Xaa locations
QPVLLLSTMDRALLELSLXEELFQTFQRIVENINVIIATYGDDDGPMGPIQVDPSIGNVGFGSGLHGRAFTLKQFAEMYAD

SEQ ID NO: 121548 - protein, 159 aa, Heterodera glycines
  unsure (1)..(159): unsure at all Xaa locations
MPTAANDCNNNSIEYIQSDRRRGPIDPTNFDHLVRLSELIRSMADLGTLQPEFGIICGSGLGAIADQMEGARILPFSEVPGFPQPSVIGHKGNLAFGRIGGHFCLCLQGRFHPYEHKMDMALCTMPVRLMAXLGVRTMIVSNAAGALNGDFQTGDLMVI

SEQ ID NO: 121549 - protein, 122 aa, Heterodera glycines
  unsure (1)..(122): unsure at all Xaa locations
MAQQQAITKKRKAVQAGIFKXAELNNFLMKELAEDGYSGVEVRRAPSRTEVIIMATRTQSVLGERGKRIRELTALVQKRFGYSAGQIELYAEKVFSRGLCAVAQCELLRYKLVGGLAVRCAC

SEQ ID NO: 121550 - protein, 87 aa, Heterodera glycines
  unsure (1)..(87): unsure at all Xaa locations
THAQRILINLLTDTIYDEDEVLLALAEQLGNFTPLVGGPEYVHCLLPPLENLANIEETVVRDKAVESLQKIAXKHSAAQLEEYFIPM

SEQ ID NO: 121551 - protein, 170 aa, Heterodera glycines
FKIGGIGTVPVGRVETGVLKPGMVVTFAPQGISTEVKSVEMHHESLPEALPGDNVGFNVKNISVKDIRRGSVASDSKNDPAKETKSFTAQVIIMNHPGQIAAGYTPVLDCHTAHIACKFAELKEKVDRRSGKKVEDNPKALKTGDAGIVDLIPTKPMCVEAFTDYAPLGR

SEQ ID NO: 121552 - protein, 180 aa, Heterodera glycines
MQIEVDGNASTIEQYFNNKYGRRLDYPNLPLIAMNSRFANEKRVNYYPIEVLDIIDNQRVTTQQQTPTMIQQSIKKCAIPPLVFKRQVHNTAKSIHLWDSEYLDEAGIKLTTEPIALRAHQLNHPEVKAGDGNMQRPMVEGSAAWRINSALVPQSVFADGTYSWMLACFVQLGGRGLSEP

SEQ ID NO: 121553 - protein, 171 aa, Heterodera glycines
FWTWADTTIAVPNAQLIKAPLITGESALLAPVLYRGIALVADELGPLQMILMTASSTAYSHNPIITVEEHPSAVGKSTILLGALQARNNARVILSGSLDFFSNKFFTATVNQAGGHTANAVKSGNQQLAASVLKWLLKESGVLRIKSVKHHTVGQKSPPAEYTIMDDVRYE

SEQ ID NO: 121554 - protein, 155 aa, Heterodera glycines
PVQDMLMFSDWLVDIPGTLSTEWTMLPSPVGRRTLVVANRGETRVYFKNGHLATNFHSLLPGGNAKTKGSLTILDAIFDAKKRKLYLLDLLWWNKLLYTDMEFTARRFFLQSRIDEMNDDIERKNSRASISKNQERNGCKIAEQDKMSSSEISPY

SEQ ID NO: 121555 - protein, 208 aa, Heterodera glycines
  unsure (1)..(208): unsure at all Xaa locations
PPTKQPDDSFSTFFSEXGNGRHVPRAVMVDLEPTVIDEIRTGXYKHLFHPEQLITGKEDAANNYARGHYTVGKEIIDPVLDRIRRIADNCTGLQGFLIFHSFGGGTGSGFTSLLMERLSVDYGKKSKLEFSIYPAPQVSTAVVEPYNSVLTTHTTLEHSDCAFMVDNEAIYDICRRNLDVERPSYTNLNRLISQVVSSITASLRFDGA

SEQ ID NO: 121556 - protein, 162 aa, Heterodera glycines
MLSSSPKEFVAPVGEVHAFVVKCMQSVGTSAAHAAQLADLLLDADIVGHYSHGLNRLCIYIEDVASGVKGDGEPKVLKQKGATAWVDGCDLLGAVVGNFCTELAIKLAKEHGIGWVVCKRSNHYGICQHYAKKIANAGLLGLSFTNTSPIIFPTRSSQIGLG

SEQ ID NO: 121557 - protein, 183 aa, Heterodera glycines
IVGYMQAPPAEVFPVFFGEMDLQGNTQATVLHQIGNFRGKFQGQIQQNMLAAAQFSLEHRGRLSTYGLTFANPSVSANNCQGTLVAQMLRRVTKNLDLGAEYIYHRDERFPGKQSNTLSYALRYIQPTWIFSGTLAPTELHLCYYHKQSEHLQFGVEFEANFKLQEVNTTFAYQIEVPDSLTL

SEQ ID NO: 121558 - protein, 158 aa, Heterodera glycines
SSGVHRVKFKNELERNITIKLGYANAKIFRCSNIKCPRPHCYRSAGSSTPDRFPCERPNCGGDFVCVRHVSFVDCPGHDILMATMLNGAAVMDAALLLVAGNEPCPQPQTSEHLAAVEIMKLKHLLILQNKIDLINESQAKDQHDQIKSFVEGTVADS

SEQ ID NO: 121559 - protein, 123 aa, Heterodera glycines
GGGGGGGGKGRADARPRITARAGAIPNEGSVPGSDKVEQKFTVCRAQKKSERQAELKRRYEQYKAERIQRYRGVNLYVENLHDTINDETLRSNFESYGNITSAKVMCDEHGRSKGFGFVCFEK

SEQ ID NO: 121560 - protein, 102 aa, Heterodera glycines
  unsure (1)..(102): unsure at all Xaa locations
ILNGDCGVSTSTAVKSQQINEMTSKDYYFDSYAHFGIHEEMLKDEVRTVTYRNAIYHNRHLFKNKVVMDXGXSGTGILSMFAARAGAKKVFAVEYSKMATQS

SEQ ID NO: 121561 - protein, 208 aa, Heterodera glycines
  unsure (1)..(208): unsure at all Xaa locations
ILRHQLQQQQQHIDNDLVSQSPGTLSEERFASDYELVSLSPGTRVCGRWTIIKELGQGAFGTVFLCKDTTTGRQAAMKTESADAEPFLWQEAAIMRSVHSRGAQAXEHFCRCFDEGKDIQRDAKRGTLVSFNYIVMSLIGRGLFGLLSKANDKFSPGTAIGVSIQLLQALKTLHNIGYLHLDVKPENAVIGRREXNERQLIFLIDFGL

SEQ ID NO: 121562 - protein, 155 aa, Heterodera glycines
VVLKRHRRIESFWARIRSRGKAPEVIARTVASMPPEKMFELMRSMKETVNNNPQMARQLLMENPQLSYALLQAQVVMRVVDPKIAYQMLHREHAQPLVPPTSIPTHIPQQFAGKPPQLPPEFNVPPPSVPSHQFQMQPPPLVPGQFHHGFPSMGM

SEQ ID NO: 121563 - protein, 202 aa, Heterodera glycines
RVFTQGVDKEKQFLKFFAMNLASGGAAGATSLCFVYPLDFARTRLAADVGKADAREFKGLADCIMKILKSDGPIGLYRGFFVSVQGIIIYRAAYFGCFDTAKMLFSPEGKQMNFFVNWAIAQVVTVSSGVLSYPWDTVRRRMMMQSGRKDIMYKNTLDCAIKIIKNEGLLKGMFKGALSNVFRGTGGALVLAFYDEIQKYIH

SEQ ID NO: 121564 - protein, 183 aa, Heterodera glycines
STLQEAVKLPDSEQHRPDDAVSIINSAFSNRKSFSCPKTKSDLLTGTSTANLSPEDIGIIASMGDSLATGAGLWPRTDIEFRGAAFPIVGDATIDGLVTVPNILREFIDSNLLFGVSHGMGQRDQLPENQLNVAVSGASSSSMPGQAVELVRRMKRLRELDVFNTWALIIVTIGTEEVCKNCT

SEQ ID NO: 121565 - protein, 210 aa, Heterodera glycines
  unsure (1)..(210): unsure at all Xaa locations
PHLSIIRNPQGPTFXFRVEKYSLARDVLSVQKRPVIYEELFQHAPLVVMNGFSSEDGSXKKHLQLVQTVVQNMFPSIDVDRVKLASIRRTLLLNYDTEDGLMEFRQYSIKSVPAGVSRSAKKLMQSKVPDLSKYKDISDFMLKPEQLSDSEFEGEQTELELTQDIGGRGKKRGQQTKLRLMEIGPRMTLRLMKIEEGVNAGTALWTHSST

SEQ ID NO: 121566 - protein, 112 aa, Heterodera glycines
  unsure (1)..(112): unsure at all Xaa locations
MLEVVLEYLPSWIRTLNSFIDYEGQRKSERXFQVILIVHGVLGFFAGYLTQQLSVTMYSVGVGFLTSCLIVLPPWPFYRQNPLNWQPNSPVEEDKAANPSSSSGNKNSKKTR

SEQ ID NO: 121567 - protein, 192 aa, Heterodera glycines
CYGLVARTPQPVTACTQSDVEIKVHKFFIVSQAEPRLPLQLEDAVRPDNDQEELAVVKLDTRLDNRVLDLRTPTSQAIFRLQGGVCDAFRKILSSRGFMEIHTPKIISAASEGGANVFEVSYFKGHAFLAQSPQLYKQMAIAGDFGRVFTIGSVFRAEDSNTHRHLTEFIGLDLEMAFNFHYHEVLQTIAEM

SEQ ID NO: 121568 - protein, 133 aa, Heterodera glycines
  unsure (1)..(133): unsure at all Xaa locations
LWLGDSILKVLAEXHYEPDLKLNLRFEIEVLCRELNVNLRSIEVGGYLKEQRRLPRLVPPSKLGTAAASSTLAQCQLPPIQPPHIGAGISSHSTADYTPTDIANILAEMSISRKYSPASYTPGGSQQQVSSIT

SEQ ID NO: 121569 - protein, 142 aa, Heterodera glycines
LEDIQSDRRRGPIDPTNFDHLVRLSELIRSMADLGTLQPEFGTICGSGLGAIADQMEGARILPFSEVPGFPQPSVIGHKGNLVFGRIGGHFCMCLQGRFHPYEHKMDMALCTMPVRLMAFLGVRTMIVSNAAGALNGDFQTG

SEQ ID NO: 121570 - protein, 176 aa, Heterodera glycines
MLSIFLQNMARTKQTARKTQSQKGFSSSSGSQHMQSQLHNLRKQLATKRPNPKRGIGYKELPPVKIAQKRHHKKGALALKEIRKYQKSVNLLIPRRPFMRLVREVTQDMSQSTDLRWQGLALLAIQEAAELYLVSLFDDTNLCAIHASRVTIMPKDMQLVRKIRGETFLKPLSSQY

SEQ ID NO: 121571 - protein, 232 aa, Heterodera glycines
MDEPLLQENPNRFVIFPIKYHDIWQFYKKAVASFWTVEEVDLSKDISDWKSLTDNERFFISRVLAFFAASDGIVNENLVERFAQEVQVPEARCFYGFQIAIENIHSEMYSLLINSYVKDLEERAKLFNAIFEFEFIKKKADWALRWIASSEASFAERLVAFAAVGGIFFSGSFAAIFWLKKRGLLPGLTHSNELISRDEGLHRDFACLLYTHLKNTPPKERIYEIISDAVKI

SEQ ID NO: 121572 - protein, 244 aa, Heterodera glycines
DFDSFQNPADELSPYRPELEPGKAPEVIARTVASMPPEKMFELMRSMKETVNNNPQMARQLLMENPQLSYALLQAQVVMRVVDPKIAYQMLHREHAQPLVPPTSIPTHIPQQFAGKPPQLPPQFNIPPPSVPSHQFQMQPPPLVPGQFHHGFPSMGMAPPSLLQQQQQQTPFTQQKPTPIAPLAVPPAATAPQQQQAVTPPPLSQQAQQSNSDNLDEEQQAQMLIRVLQLTDEQIRMLPPTERA

SEQ ID NO: 121573 - protein, 228 aa, Heterodera glycines
MLSPIPKRIGGINIGADAQKENFALNELVSEGDLRECLLLAGGDGTDTDDSQMAYGLAGELLKAVRNEAEQRISARMALEDKDKADLYQNITKLKSQLAIKREQVSSLRSVLRSNKSSTESVLQCLREKFESEFRLKDEANEVLRNQLKQFKEDAATFASHRATFTARSEELQQQVESLQDSLKMAEEEKKTINQLLRMSIQQKLALTQRLEELEMDRERQMQQANSR

SEQ ID NO: 121574 - protein, 214 aa, Heterodera glycines
LSFRPFLFLPPSFWPLPPHFFCLLPTFFRHALSSPKEFVAPVGEVHAFVVKCMQSVGTSAAHAAQLADLLLDADIVGHYSHGLNRLCIYIEDVASGVKGDGEPKVLKQKGATAWVDGCDLLGAVVGNFCTELAIKLAKEHGIGWVVCKRSNHYGICQHYAKKIANAGLLGLSFTNTSPIIFPTRSSQIGLGTNPISCCANSREKGDGFIFDMAA

SEQ ID NO: 121575 - protein, 187 aa, Heterodera glycines
SARPCGIMQATPAEVFPVFFGEMDLQGNTQATVLHQIGNFRGKFQGQIQQNMLAAAQFSLEHRGRLSTYGLTFANPSVSANNCQGTLVAQMLRRVTKNLDLGAEYIYHRDERFPGKQSNTLSYALRYIQPTWIFSGTLAPTELHLCYYHKQSEHLQFGVEFEANFKLQEVNTTFAYQIEVPDSLTLR

SEQ ID NO: 121576 - protein, 194 aa, Heterodera glycines
KAISGVHRVKFKNELERNITIKLGYANAKIFRCSNIKCPRPHCYRSAGSSTPDRFPCERPNCGGDFVCVRHVSFVDCPGHDILMATMLNGAAVMDAALLLVAGNEPCPQPQTSEHLAAVEIMKLKHLLILQNKIDLINESQAKDQHDQIKSFVEGTVADSAPIIPISAQLKYNIDVICEYLCKKVPIPPRDFSS

SEQ ID NO: 121577 - protein, 192 aa, Heterodera glycines
  unsure (1)..(192): unsure at all Xaa locations
LDFLRYYTSASGEEPXQLQDYVSRMKENQTCIYYITGESKDVVQNSSFVERVKKRGFEVIYMVDPIDEYCVQQLKEYDGKKLVSVTKEGLELPESEEEKKKFEEDKVKFEKLCKVIKDILDKKVQKVSVSNRLVSSPCCIVTGEYGWSANMERIMKAQALRDSSTMGYMASKKNLEINPDHSIIKSLRDRVE

SEQ ID NO: 121578 - protein, 153 aa, Heterodera glycines
MHEVSVPGSEKVEQKFTVCRAQKKSERQAELKRRYEQYKAERIQRYRGVNLYVKNLHDTINDETLRSNFESYGNITSAKVMCDEHGRSKGFGFVCFEKADEATNAVVEMNNKIIENKPLYVALAQRKEDRKAQLASQYMQRLAAMRMQNPAGL

SEQ ID NO: 121579 - protein, 224 aa, Heterodera glycines
MSQTHILNGDCGVSTSTAVKSQQINEMTSKDYYFDSYAHFGIHEEMLKDEVRTVTYRNAIYHNRHLFKNKVVMDVGSGTGILSMFAARAGAKKVFAVEYSKMATQSKKIIKDNQMDGVIEVIHSKIEDIEQLPGGIEHVDVIVSEWMGYCLFYESMLNTVIYARDKWLASDGILFPDKATLFLCAIEDRQYKDEKINWWDNVYGFNMSSIRQLAITEPLVDVVD

SEQ ID NO: 121580 - protein, 211 aa, Heterodera glycines
GIVKYMRGQAGPSSKELKSISDFDKFVDGDDVSVIGLFEGESKLKDSFHKVADTERDRFRFAHSSNPDLLKKTGYTDDIVVFVSKKLHNKFEPNEFHYDGNYDTDKIKNFLLYETNGLAGIRTQGNLFQFTHRPLVVVYYTVDYLKDPKGSNYWRNRVLKVAQDYKRKVHFAVSDKEEFAQEVEQNGLADRKESDKPLVAAITVDGKYPMN

SEQ ID NO: 121581 - protein, 150 aa, Heterodera glycines
  unsure (1)..(150): unsure at all Xaa locations
MCDEEVAVLVVXNGSGMCKAGFAGDDAPRAVFPSIVGRPRHQGVMVGMGQKDSYVGDEAQSKRGILTLKYPIEHGIVTNWDDMEKIWHHTFYNELRVAPEEHPVLLTEAPLNPKANREKMTQIMFETFNTPAMYVAIQAVLSLYASGRTT

SEQ ID NO: 121582 - protein, 164 aa, Heterodera glycines
  unsure (1)..(164): unsure at all Xaa locations
SGEDFAACLVEAIRAINRGTNPERIPQGSSGYIXKNLQGEVIGVFKPKNEEPYGSLNPKWVKWAHKLLCPCCFGRSCLVPNQGYLSEAGASLVDQKLGLDIVPRTAIVALAAPTFYYGRIDRTVTNTKEQIARNYPDLGRHFKRIGLPPKRGSFQLFVRGFKDA

SEQ ID NO: 121583 - protein, 204 aa, Heterodera glycines
  unsure (1)..(204): unsure at all Xaa locations
TLILRHQRQQQQQHIDNDLVSQSPGTLSEERFASDYELVSLSPGTRVCGRWTIIKELGQGAFGTVFLCKDTTTGRQAAMKTESADAEPFLWQEAAIMRSVHSRGAQAXEHFCRCFDEGKDIQRDAKRGTLVSFNYIVMSLIGRGLFGLLSKANDKFSPGTAIGVSIQLLQALKTLHNIGYLHLDVKPENAVIGRRESNERQLIF

SEQ ID NO: 121584 - protein, 165 aa, Heterodera glycines
PELEPGKAPEVIARTVASMPPEKMFELMRSMKETVNNNPQMARQLLMENPQLSYALLQAQVVMRVVDPKIAYQMLHREHAQPLVPPTSIPTHIPQQFAGKPPQLPPQFNIPPPSVPSHQFQMQPPPLVPGQFHHRFPSMGMAPPSLLQQQQQQTPFTQQKPTPIA

SEQ ID NO: 121585 - protein, 213 aa, Heterodera glycines
  unsure (1)..(213): unsure at all Xaa locations
ALNFAFXDTYKRVFTXGVDKEKQFLKFFAMNLASGGAAGATSLCFVYPLDFARTRLAADVGKADAREFKGLADCIMKILKSDGPIGLYRGFFVSVQGIIIYRAAYFGCFDTAKMLFSPEGKQMNFFVNWAIAQVVTVSSGVLSYPWDTVRRRMMMQSGRKDIMYKNTLDCAIKIIKNEGLLKGMFKGALSNVFRGTGGALVLAFYDEIQKYIH

SEQ ID NO: 121586 - protein, 163 aa, Heterodera glycines
  unsure (1)..(163): unsure at all Xaa locations
KTTLLIVLPNSSPIVLLHNLGKQSVNALALGRKSVHNDVQLPNFDAYPNDXTKDPAQRFHVTEDRRKGVSSFIFYGVGGAITLMTAKFGVRKAVTYKWMPRDQAAMASTEIDLSLGPLGKTKTFDWSGKAVFVKHRTDKEIERERAVEVGKLRHPERDEDRVL

SEQ ID NO: 121587 - protein, 218 aa, Heterodera glycines
SEERNPEDLINSELSAVKLPDSEQQRPDDAVSIINSAFSNRKSFSCPKTKSDLLTGTSTANLSPEDIGIIASMGDSLATGAGLWPRTDIEFRGAAFPIGGDATIDGLVTVPNILREFIDSNLLFGVSHGMGQRDQLPENQLNVAVSGASSSSMPGQAVELVRRMKRLRELDVFNTWALIIVTIGTEEVCKNCTGPNTKALVQALDILNRGIHKALVIL

SEQ ID NO: 121588 - protein, 125 aa, Heterodera glycines
NRVYGFYDEIDRRYPRPGARRLFDLFNQVFAWMPFVGLVGEKILCMHGGISNQICSLDQLSNLLRPQTEPLLRSLEIDLLWADPSTSITGVAPNNRGAGVMFGADVVESVRNPLGIDYIVRAHQL

SEQ ID NO: 121589 - protein, 212 aa, Heterodera glycines
  unsure (1)..(212): unsure at all Xaa locations
TFPHLRIIRNPQGPTLHFRVEKYSLARDVLSVQKRPVIYEELFXHAPLVVMNGFSSEDGSXKKHLQLVQTVVQNMFPSIDVDRVKLASIRRTLLLNYDTEDGLMEFRQYSIKSVPAGVSRSAKKLMQSKVPDLSKYKDISDFMLKPEQLSDSEFEGEQTELELTQDIGGRGKKRGQQTKLRLMEIGPRMTLRLMKIEEGVNAGTALWTHSST

SEQ ID NO: 121590 - protein, 112 aa, Heterodera glycines; identical to SEQ ID NO: 121566
  unsure (1)..(112): unsure at all Xaa locations

SEQ ID NO: 121591 - protein, 188 aa, Heterodera glycines
NIPKESIVDVYGLVARTPQPVTACTQSDVEIKVHKFFIVSQAEPRLPLQLEDAVRPDNDQEELAVVKLDTRLDNRVLDLRTPTSQAIFRLQGGVCDAFRKILSSRGFMEIHTPKIISAASEGGANVFEVSYFKGHAFLAQSPQLYKQMAIAGDFGRVFTIGSVFRAEDSNTHRHLTEFIGLDLEMAFN

SEQ ID NO: 121592 - protein, 160 aa, Heterodera glycines
  unsure (1)..(160): unsure at all Xaa locations
LTFFLVLNSWTKMCDEEVAALVVDNGSGMCKAGFAGDDAPRAVFPSIVGRPRHQGVMVGMGQKDSYVGDEAQSKRGILTLKYPIEHGIVTNWDDMEKIWHHTFYNELRVAPEEHPVLLTEAPLNPNANREKMTQIMFETFNTPAMYVAIQAVLSLYASGX

SEQ ID NO: 121593 - protein, 126 aa, Heterodera glycines
LKVLAEIHNEPDLKLILRFEIEVLCRELNVNLRSIEVGGYLNDQRRLPRLVPPSKLGTFLASSTLAQCQLPPIQPPHIGAGISSHSTADYTPTDIANILAEMSISRKYSPASYTPGGSQQQVSSIT

SEQ ID NO: 121594 - protein, 182 aa, Heterodera glycines
KFWVVHMLSIFLQNMARTKQTARKTQSQKGFSSSSGSQHMQSQLHNLRKQLATKRPNPKRGIGYKELPPVKIAQKRHHKKGALALKEIRKYQKSVNLLIPRRPFMRLVREVTQDMSQSTDLRWQGLALLAIQEAAELYLVSLFDDTNLCAIHASRVTIMPKDMQLVRKIRGETFLKPLSSQY

SEQ ID NO: 121595 - protein, 197 aa, Heterodera glycines
MDEPLLQENPNRFVIFPIKYHDIWQFYKKAVASFWTVEEVDLSKDISDWKSLTDNERFFISRVLAFFAASDGIVNENLVERFAQEVQVPEARCFYGFQIAIENIHSEMYSLLINSYVKDLEERAKLFNAIFEFEFIKKKADWALRWIASSEASFAERLVAFAAVGGIFFSGSFAAIFWLKKRGLLPGLTHSNELISR

SEQ ID NO: 121596 - protein, 236 aa, Heterodera glycines
MTLTRPQNPTDELSPYGPELEPGKAPEVIARTVASMPPEKMFELMRSMKETVNNNPQMARQLLMENPQLSYALLQAQVVMRVVDPKIAYQMLHREHAQPLVPPTSIPTHIPQQFAGKPPQLPPQFNIPPPSVPSHQFQMQPPPLVPGQFHHGFPSMGMAPPSLLQQQQQQTPFTQQKPTPIAPLAVPPAATAPQQQQAVTPPPLSQQAQQSNSDNLDDEQHAQMLIRVLQLTDEQI

SEQ ID NO: 121597 - protein, 192 aa, Heterodera glycines
TRKNRLSGTEVNPENFEAVLLGDEQRSEGKPVLKSTEKDKVFVYFSDHGAVGVIGFPAADLTVKQLTQTLKEMHAKKMYGELTFYLEACESGSMFDHTLAQSLKIYAVTAANGDESSWGCFCDTKFLPGNCLGDLFSVNWMQDSDQENLRTETLRKQFGIVREETNKSHVMHYGDLQIQDEHVSEFMGKEQA

SEQ ID NO: 121598 - protein, 212 aa, Heterodera glycines
QNFLKELEGIKIGADAQKENFALNELVSEGDLRECLLLAGGDGTDTDDSQMAYGLAGELLKAVRNEAEQRISARMALEDKDKADLYQNITKLKSQLAIKREQVSSLRSVLRSNKSSTESVLQCLREKFESEFRLKDEANEVLRNQLKQFKEDAATFASHRATFTARSEELQQQVESLQDSLKMAEEEKKTINQLLRMSIQQKLALTQRLEEL

SEQ ID NO: 121599 - protein, 229 aa, Heterodera glycines
MPRYDATDDLSGAEYLASIYGTEKDKVNCSFFFKIGACRHGDNCLRAHHRPTFSNTVLLKHFYQSPIVNPAQADAFDKVGKKDELEQRHFDEFYEEVFTELQRTYGPVEELNVCENIGEHMIGNVYVKFVYEEDAEKAVQGLENRWFNGQPIYAELSPVSDFREARCRQHEISTCSKGGFCNFMHLKDVSDEVYERCYANRGARYRSTRRHDRFYADDGYDRREGGNRD

SEQ ID NO: 121600 - protein, 217 aa, Heterodera glycines
MAQAVAAVAPAPNANAASAQATQPQVMAPSYPLASLYVGDLHPDVTEAMLFERFSNAGPVLSIRVCRDAITRRSLGYAYVNFQQPADAERALDTMNFDMILNKPIRIMWSQRDPSIRRSGAGNIFIKNLGKEIDTKAIYDTFSMFGSILSCKISTDIDGGSKGYGFIHFETEEAANSAIAKVNGMLLDGKKVFVGKFLPRSARDKQIGDPSSRFTNV

SEQ ID NO: 121601 - protein, 113 aa, Heterodera glycines
  unsure (1)..(113): unsure at all Xaa locations
VLEEFWPGQNVKIGHMTMNSFREVNRHSELPIARIKKIMKIEEGVKTQMISAEAPVLLAKAAELFIEELTLRAWLNTNDNRRKTIQKSDIAAGAAKSEMFDXLIDILPRDELQ

SEQ ID NO: 121602 - protein, 149 aa, Heterodera glycines
HLNIEIMRENPKLLRVRKWFGIRKELAAIRTVCSHIENMIKGVTVGFRYKMRSVYAHFPINITLQENNTVVEIRNFLGEKFVRRVGLPQGVSAVMSTKQKDELIIDGTDIQKVSQAAARIQQSTTVKNKDIRKFLDGIYVSEKVAIADE

SEQ ID NO: 121603 - protein, 164 aa, Heterodera glycines
MASAAPPLGPSLGQRGVNVANFCKEFNNLTSTIRFGTNLPVSIHVKPDRTYEIDISTPTTEWLLQQAAGIRRNRQEEGEIVGMISVKHVYEIAKVKSQDKSLIGVPLKEICQLVIERADSIGIKVQNEDLDPEEYRKFLEHRQEVVQRQLEEIAKQEEAKLART

SEQ ID NO: 121604 - protein, 207 aa, Heterodera glycines
  unsure (1)..(207): unsure at all Xaa locations
VIDSGEVDVFVXGEFVLSIKEGGSFGELALIYGTPRAATVVAKTNTVKLWAIDRITYRAILMGSTMRKRRMYDEFLSKVQILADLDKWERANVADALEQCQFPSGTHVVEQGHPGDEFFIIVEGEAEVLQRPNDDAPFEVVGKLGPSDYFGEIALLLDRPRAATVVAKTLLKCLKLDRARFERVMGPVREILKRDVSNYNSYVKLMT

SEQ ID NO: 121605 - protein, 133 aa, Heterodera glycines
PDRLDRWYPSIRFRKNDEVITPIRHKELGDWKKLSIEEKKLIYRYSFRQTLAEFEALTPYGYLTVTLFFSMLGLTILYASFVRTYVTKFNDRLPDTFDDEYKESQAERRVVLERGNPYGPAYYYDYEKNRWKD

SEQ ID NO: 121606 - protein, 172 aa, Heterodera glycines
  unsure (1)..(172): unsure at all Xaa locations
MSEKKVKKVKKKPRTGSEASSFDQKTIQEFKEAFGIMDQDKDGVISKQDLKDLYATLGVVASDSQMDNMLKEAPGPINFTVFLTLFGERLTGTDPEATIIGAFQMFDKTDCGEITEETLMKILKNKRGEPLTEDEVQGMYXGNPPISGGKVDYKAFAHLITTGAAEELAKVG

SEQ ID NO: 121607 - protein, 180 aa, Heterodera glycines
VRPSNSYCPFPAFEAAPADGGNATVEKAPDFSPPSPDVVELSAFLGQELSKSERPELGGANIVISGGRGLKSGENFSLLYALADVMGAAVGASRAAVDAGYVPNDMQVGQTGKIVAPQLYIAVGTIGAIQHLAGMKDSKVIVAINKDNDAPIFQVADFGLVADLFKAVPELTEQLKKANK

SEQ ID NO: 121608 - protein, 239 aa, Heterodera glycines
RKSYSHVDLVVMCDGFDGERGTNVAGGRGYFLKGPLVFLEQALIALALQMLNKKGFTPLYTPFFMRKDVMQEVAQLSQFDEELYKVTTAKKTDAANEDGSPDEKYLIATSEQPIAAFHRDEWLNPSDLPIKYAGMSTCFRQEVGSHGRDTRGIFRVHQFEKIEQFVICSPFDNESWKHMDEMIDNAEEFCKVLGLPYRIVAIVSAELNNAAAKKLDLEAWFPGSGAFRELVSCSNCTDY

SEQ ID NO: 121609 - protein, 190 aa, Heterodera glycines
MAQAVAAVAPAPNANAASAQTTQPQVMAPSYPLASLYVGDLHPDVTEAMLFERFSNAGPVLSIRVCRDAITRRSLGYAYVNFQQPADAERALDTMNFDMILNKPIRIMWSQRDPSIRRSGAGNIFIKNLGKEIDTKAIYDTFSMFGSILSCKIATDIEGGSKGYGFIHFETEEAANSAIAKVNGMLLDGK

SEQ ID NO: 121610 - protein, 254 aa, Heterodera glycines
IGAVHWVIDTMIMVGHSFGGYLASSYALEHPSRVRHLVLVDPWGFPERPQIEQLHIPIWMRVFGRLLSLFNPLATLRAAGPFGARLVKKLRSDLGIRYAHQDPDAIYEYIYQCNAMEPTGEIAFGTMSKNFGWAKRPMINRFGGISPSVPVTFIWGGKSWMDPGPAYEIQYRRQDAYVDVQIVTRAGHHVYADAPADFCRLLAHVSDMVDGDSDLAGSADMEDAMDRMADTLPSMASQKMAWLMQQSTTATEAA

SEQ ID NO: 121611 - protein, 270 aa, Heterodera glycines
REITSRLKPGIENSERRFDVHKFTCAALELPDFSDFARLRPLIDALIAELDLNDFLGCTAALEMLAETAATAPKCVPFFGQIGLLDKVYALFIRTKEEPDMGIIHIACIRFFAYLCTTDDNALTKFPKFTADVFDAVFRFDAFDVTRRQLAFETLAVISSTSGAKQIFSQNETLYNMQRAMSNLAVAVATAAEPSLKARHLEAVRMFFDRIADESGCQPEQKCTAASAAEEQLLHRWFRWLGEPFPRLLLQCVRDPIEVQLAALRVLMAL

SEQ ID NO: 121612 - protein, 228 aa, Heterodera glycines
  unsure (1)..(228): unsure at all Xaa locations
NFRREGVRVIXDIGKTMNLKACPTLATATVFFXRFYMFHTFDEHHLHMTALACIFLAGKVEETPKKCKDLLTVARELYPHHFTAKVTPDDLMLMERVLLQTIRFDLHVEHPYTFLVQYAKGFRMDKEYMSKIVTNAWTFVNDSLGTTLCLLWEPEVIAIALLYMSFKMERMEEQQIGRTFHFDASTEWWNLYVQNLTVPMMDDICHKVLDSIAPANGEDAPMANGTKN

SEQ ID NO: 121613 - protein, 206 aa, Heterodera glycines
  unsure (1)..(206): unsure at all Xaa locations
MAAMNPEYDYLXKLLLIGDSGVGKSCLLLRFADDTYTESYISTIGVDFKIRTIELEGKTIKLQIWDTAGQERFRTITSSYYRGAHGIIVVYDITDQDSFNNVKQWLQEIDRYASESVNKLLVGNKCDLTTKRAIETNVAKEYADQLNIPFLETSAKNSTNVEQAFITMATEIKNRMGPLQQAGGNASAVRIGPSQPVQDKKTGGCC

SEQ ID NO: 121614 - protein, 188 aa, Heterodera glycines
FANYRELIGRLPKIMANDANIFVAASATKCVMLFAKGLRAEFTPHVSLVVPVIFDKFKVEKRLLRDALVECIDVIAAYTSFDHLSKALLEAMTSKQNPSQKSQTDLFIYRLFRSLPAKDVPKGLLKDLVAILSKHGFDAASEVRDSSFAALGAIMKCIGEKALGCFISPELAKDANKMAKIALKRDTA

SEQ ID NO: 121615 - protein, 225 aa, Heterodera glycines
IGTDFALFGVCFYCLISGNFGSLYGDYPSMFQLRDWTRQYGKQYGIQYGWRNALVISDPAMVHELLVTKFEYFHARNLSPIFGNLDTNKWISMFLARGGRWKRLRTIANPAFSVANLKKCMWLIDDSVKNAINFLEKARNEGKSFNIQRHFVEMSFDVIARVALGQRESRQFETEMAHLAIESMQKYNNTPFDYVGFAFPWFGIHFLEPFISWSGILRKDPLIIL

SEQ ID NO: 121616 - protein, 213 aa, Heterodera glycines
MKLAIKRLHWNETDGIWYDYDLEREAHSNTYYVSNALPLYSKCYDDEDDVTPYKVFEYLKREGVLNFTRGIPTSLAMGSIQQWDKENAWPPMVHMVVEAFRTSGDLSLMKAAEQMATQWLVVNYKGYVSTYAMFEKYNVSMINEEGVGGSGGEYEVQKGFGWTNGVILDLLDKYGSKISVSGAAVPNGVRFLPLALVVLLFMTVVEIAIAQCF

SEQ ID NO: 121617 - protein, 191 aa, Heterodera glycines
MADAEHPTDAAVVDNFETRARRFFDLINDGNIQQLRVLIDALDADELNILLRWMVDPVERDYTRSRSALWSAFFRQHIDIVDLLLEKGADPNEPVVGRENDINTNLTPLFVAALHAHFPLCRVLVDRGANVDLGSDFATTPLMMACKRSQMEIVAFLIENGADINLQNGDGETALMIACSRANVDIVRLLL

SEQ ID NO: 121618 - protein, 219 aa, Heterodera glycines
  unsure (1)..(219): unsure at all Xaa locations
SLLTLQTDPGCRVALRADSYALHMILPNKVDPLVSLMMVEKVPDSTYEMIGGLDTQIKEIKEVIELPVKHPELFEALGIAQPKGVLLYGPPGTGKTLLARAVAHHTECTFIRVSGSELVQKFIGEGARMVRELFVMAREHSPSIIFMDEIDSIGSSRVEGSHGGDSEVQRTMLELLNQLDGFEPTKNIKVIMATNRIDILDPALLRPXRIDRKIEFPAP

SEQ ID NO: 121619 - protein, 83 aa, Heterodera glycines
MLCLEAMRLKSTSIVQDDAITEHGHDDHGHGHHAVNYGPPITYDYTPIPSQPYKKVYKELKQKFITYLAMSFVFFMFCCYVGY

SEQ ID NO: 121620 - protein, 204 aa, Heterodera glycines
FPLMKAAVVGEGAVGASVALAIRRAHPNANITVFSDRDFEKTTSYGPEGIFRVDVPGTERLAKESFEFWAKTERDELAHKTGVRLISGYCQSNDRKWIEAQESSMSDIVYNWKWLSERELRTLFVRPYCYGAHYTTYAAEGRLYVPWLRAQLVAESGQGLLHFQRQRIESLEQLIDSGQFTLVVNCAGLEGGRLAGDDGTSVYP

SEQ ID NO: 121621 - protein, 188 aa, Heterodera glycines
MENVPEKYLPETEIKGLTFTVAIEPLDQEEKKDESVTDEREPRADKEELSGPSEVEHAQNDVENMPENCLLSDDTETKGLTNSHKTPLLAGCQITASGFMGTDRVKIGRLVELHGGVFTGQMSRATCTHLIAAASSGEKYRRAREWGTVKVVTSEWLFKCDEMGYRLREDHFLLDNDGEKRRSSADIE

SEQ ID NO: 121622 - protein, 216 aa, Heterodera glycines
MPEELVALSPGTRVSGRWTIIKKLGAGAFGAVYLCQDRDGRTMAALKTEPIDAQRPLLYMEAHVLLSLNELRSNSGRHFCRCLDLGRDEQPDADSGQTMEFNYVVMSLVGRPMDKLLHESGDRFSPGTAIGTSIQLLKALKALHSVGYLHRDIKPANSAIGTPETNEQRLLYLLDFGMARKYVREDGTHRRQRDTARFRWTPIYAPISAHIKRDYS

SEQ ID NO: 121623 - protein, 205 aa, Heterodera glycines
MVQYKLYYFDGRGLGESIRLLLHYVGQPFEDIRIKDMEEWEKTYKPKFFYGKVPVLEVDGKPLGQSATILRYLAEKFGLAGKDECEKAKANEIIDFQKDANTDLAPYLYVKMGSRQGDLDKLRAEVFEPGVKHILPLFEKLLKESGSGYMLKSGLSMVDFQVANFLYTFTKLEPETINAFPELIKYVDRVHALPQLQQYLKQRPQ

SEQ ID NO: 121624 - protein, 140 aa, Heterodera glycines
  unsure (1)..(140): unsure at all Xaa locations
PNVTGTLHLXHALSTAVEDTIARWHRMCGRTVLFVPGCDHAGIATQVVVEKKLKRERGLSRHDLGRADFVKEVWKWKNEKGHIIYDQLKKMGAGVDWDRVVFMMDPKIMRAVTEAFVRMHEKGVIYRSXRLVNWSCALSS

SEQ ID NO: 121625 - protein, 253 aa, Heterodera glycines
WHPEVVQKIGHTQLCDWWSVGVILYEMVYGRPPFLSQRDDPAETQFMIVHWRRFLDLRNAMGVRLSKQCVDCVAKLCCDQENRLGHRNGAKDIKAHPWFKGIDFANLRNTFPEYVPRVQNPEDTSNFDTFEVENEELIRTNGNGNDRLKCAAYGGGKPLGPNFIDFTFRHFFSEGMCPPARGRSPQVRPSLAPLMESSTEGGNAAKSPAGEVFAKPKQIVTITGKAKVVPFTSSKRVPAPSIPSDSSKATTVN

SEQ ID NO: 121626 - protein, 221 aa, Heterodera glycines
MKPISAQDGGGKNMQWMYEGAKSVVNREDYLLGKKIDKNFEMFSDVVVHDQEEEKRDAFFQQSLLKPSTSAHTAPSAARNQHKVSALDTRVVRTEDPLVALKFQEEHRRRQLLENPLLKLKAQRVLRKAFEKELKKAVKKKSSKRKKRKRSSSPSSSSSFSSPERRKEEQKRRRHHHHHRRSEGRKSGDSEREGRAKRSSRSSSRTERHRRRRSSAGSSRR

SEQ ID NO: 121627 - protein, 237 aa, Heterodera glycines
  unsure (1)..(237): unsure at all Xaa locations
AGPGLMLLDRSGQGKVYHLITRRRFDQMSVMEGQNILVTISGKKRRVRVYYLSWLKQKILRTEGLQQTEKRNGWTNVGEFQCATHFKIVRYERIKFLVIGIEDSISIYAWAPKPYNKFMAFKSFGQLSHAPVIVDLTIEENARLKVLYGSLAGFHAIDLDSASIYDIYSPQQSTMCQGMCPHCIVILPNTNGMQLLLCYDNEGVYVNTYGKIVKNVQLQWSEIPSSVAYISTNQIMX

SEQ ID NO: 121628 - protein, 224 aa, Heterodera glycines
KLCQPVGAARKSIWSSLNGMNSEQRQLFFGRILHVWPYPWERRAITLPQTTLAFTNICCSGYITAKVCGDVFLVDPKIGWLSSLRSVPTLIPNVVVAFSTVVASSLLFHRFVYVPFIEHEGLLHTKSIFWRTFGINFMTAAAVPCMFAPVAAHYHNIRILAAAGKPPIPANAVLDLIVTCWESTRSVWRKLPLIVAINFTTVLLATVAMAWGCDRLHTTMHLDS

SEQ ID NO: 121629 - protein, 216 aa, Heterodera glycines
NFFQMAGSPQLSASLSTTFRRFRPVFFSRLEGAWKTYAEEQEERVISDLEAFDLFYICRKEAEHNQNVDSLELMKHFPVLSTFDKMLLLSSELFNIEFREVTNDYENQSFERCDPSVRLFDVTDNATNSRIGFLYVDIFSRETKKIGRGQWLSMLGRPPNQLRDLDALVYFLGAHPHSENEHESFLHHEELSEMLSAFGRALQLLLSRAPCHFLSL

SEQ ID NO: 121630 - protein, 199 aa, Heterodera glycines
MFSSALPSARMDGYLTAQIQFPAWFGKRSTGQKRQRLMRQPLLHTHLKITGSSQALVQDYLSILRDRLYRPLVEKESGGVKDVLEVFNNYFLLREDTEAISELGVWPLAGKTRKDLAAMVSTKAKSALTRQLNKEKRVLPFSQGVMVKTGARRKGGGESSKGGGVMELKEEKNDDIEEEEEFNNPDEEEDEALLIGLDF

SEQ ID NO: 121631 - protein, 238 aa, Heterodera glycines
VEVSPKSDSNAFDSKHRQKTCTISKQRQPEKGIRQNSELNKFERRNDSLFGFYKKQRIVPDSEWDRFCEIFATELPSSFRIQRSLPERDCLANFLEQHFFKQIASIAATSESDGVGIHPPKSVPFVPYAYQTKMPRSMLRRHPILKEFHEFLVNETELGNMSRQETCSMVPPLLLDVQPHHRVLDACAAPGSKTMQIIELMHEHCPNPEWFVLANDSDYKRCYLLVRQTLKRMPTANV

SEQ ID NO: 121632 - protein, 205 aa, Heterodera glycines
LTVLLRSPSVALPHLYWSFALPLLRFSWLLQSVQFVCQMRHSFYDIHRQRALVEQCSLALHWSLVLVQLYFLPDNLARLQYFLVSNLFAGFLIAHVVTYNHYSTDKFAYDDPILENFACLQLYTTRNMRPGPFIDWLWGGLNYQIEHHLFPTMPRHNLKKVMPLVKEFCAENDIPYMVDDYFTGFRLVIEHLRRVAEAATETLVS

SEQ ID NO: 121633 - protein, 140 aa, Heterodera glycines
NCRVKEAFSLFDKDGDGTITTKELGTVMRSLGQNPTEAELQDMINEVDADGNGTIDFPEFLTMMARKMKDTDSEEEIREAFRVFDKDGNGFISAAELRHVMTNLGEKLTDEEVDEMIREADIDGDGQVNYEEFVTMMTTK

SEQ ID NO: 121634 - protein, 106 aa, Heterodera glycines
  unsure (1)..(106): unsure at all Xaa locations
EDKSNEQNIPPGTVVDTVVVHPKRSEFFLNSHVAIKGTARTPHYTVLRDENDMSMDTLQTMVHYLCFGHQIVTKPTSLPXXXVYIADEYAKRGRNIYSHYAKNGIX

SEQ ID NO: 121635 - protein, 154 aa, Heterodera glycines
  unsure (1)..(154): unsure at all Xaa locations
RALFGSTLFLTSFYECEQKEGDSTKCDDIEYRIKDALPQTQLNAYLTIEKFRQKLSEQKNFVPFGELITKFCLKGGEKKTAKRCXQFDQGCKFLERVQALAHWYIDAVSYTDNDDHRYFNYFLFAVRPSSDGDGSSVHRFAGYVNLYRFYHHPD

SEQ ID NO: 121636 - protein, 219 aa, Heterodera glycines
MSLNTANTPDGRGVIIYSGEMILLFVREVNLSFDKFTNAAFKGTKKGNLYLTTHRIIFNNTETSSRGNFKSLSMPFGCIRNVKLEQPTFGANYLAGELVAQPDGNWEGGVNWKLTFNRGGCIEFGQALQKTSEMANNFCPRPANAPPPYAPPPGAYYSPPPAYYWSGGQFNGYQAPVHAFPDQPPPESVFMYEQPPPYAGDWANSWSKSGPIPVEYAPV

SEQ ID NO: 121637 - protein, 217 aa, Heterodera glycines
MLNRRPRKFENKLSACGDQKNFKAMLENFNSLRVNRQLCDVEIECQGKSLLVHKVVLAATIDYFRGLYNFGMVDAQADKIEIKEVSFIGLSQIIDFAYTYEVKINEENVRELLHAANYLGVTFVKDGCEHFLIKLMTIENCLGLRELSDQHSCEQLLAAIEAFMLEHFMEICHKEEFMALDSVTTLERLAKSDDLNITDERFLFEFLVKWVEMDKTG

SEQ ID NO: 121638 - protein, 218 aa, Heterodera glycines
GQILLALGTSWHVWCFKCAECAAVLQGEYMAHSGRPLCLRDYNQMFGVRCCECDRFIAGRVLEAGGYKFHPTCARCSRCQLPFDDGAEMYMQGNEIWHPNCEHYRTTENIAISKPSVKGSKFQSQFGQHLTYMYMLPETEQTLLKHPIAPNPPQPTQYHTPQGPVIKIRKSRYSMLKTGMQRLTEDLERTRPRSRSSSVDNDEPIELAHFPGAKVPDK

SEQ ID NO: 121639 - protein, 86 aa, Heterodera glycines
NCRVQEAFSLFDKDGDGTITTKELGTVMRSLGQNPTEAELHDMINEVDADGNGTIDFPEFLTMMARKMKDTDSEEEIREAFRVFDK

SEQ ID NO: 121640 - protein, 236 aa, Heterodera glycines
GGLPPWPNGWVTQIATNPLYKNMLVSASRDKTIIVWMLDESGSVLNGKPIKSLHGHGHFVSDVVMSSDGQYALSGSWDKTLRLWDLNTGQTTRQFVSHTQDVLSVAFSADNRQIVSGSRDKKIKLWNTLAQCKHTIVEECHSDWVSTVRFSPSHANPVIVSAGWDKIVKVWNLATCRLKTNHFGHTGYINSVTVSPDGSLCASGGKDGSAMLWDLNDGKHLYTLGGNDVINALAFS

SEQ ID NO: 121641 - protein, 212 aa, Heterodera glycines
  unsure (1)..(212): unsure at all Xaa locations
MHLINLIALFFMLFGPSVQQYTKTPTNEDKEAAVXLYNKFRSQLALGNADNKLGGNKMPKAGNMRKFEWDENLAKLADEWANKCTLSHSWNGWAGENLAMNGGTFSNKDGFEYACGRWWDELNRYGFNPDLIMTGENFSGIGHWTQMAWADTDRIGCAMAQNCPNTNWKTYVVCWYYTGGNYFGAPVYLAGEPCSKCKANDKCDKATGLCSQ

SEQ ID NO: 121642 - protein, 47 aa, Heterodera glycines
MAQLLAGEKVVLSDGSKVEAEVFLKDKVVAVYFSAGWCPPCRAFTPK

SEQ ID NO: 121643 - protein, 130 aa, Heterodera glycines
MSGRGKGGKAKTEDGKNKSRSSRAGLQFPVGRLHRLLRKGHYAERVGVGAPVYLAAVLEYLTAEVLELAGNASRDNRKTRINPRHLQLAVRNDEELNKLLSGVTISEGGVLPNINPVLLPKKSQHSEVSE

SEQ ID NO: 121644 - protein, 164 aa, Heterodera glycines
MACKFSSKHNWPSNTLEVESSDSIENLKRKITDKEGIPADDQRLIFAGKQLEDGRTLADYGVQKEAKIHLVLRLRGGMQIFIKTLTGKVITLEVDSMDSVENVKRKITDKEGIPADHQRLVFAGKQLEDGRTLADYGVQKEATVHLVLRLRGGGSMMNFDDDVL

SEQ ID NO: 121645 - protein, 236 aa, Heterodera glycines
  unsure (1)..(236): unsure at all Xaa locations
KSYSHVDLVVMCDGFDGERGTNVAGGRGYFLKGPLVFLEQALIALALQMLNKKGFTPLYTPFFMRKDVMQEVAQLSQFDEELYKVTTAKKTDAANEDGSPDEKYLIATSEQPIAAFHRDEWLNPSDLPIKYAGMSTCFRQEVGSHGRDTRGIFRVHQFEKIEQFVICSPFDNESWKHMDEMIDNAEEFCKVLGLPYRIVAIVSAELNNAAAKKLDLEXAWFPGSGAFRELVSCSNC

SEQ ID NO: 121646 - protein, 201 aa, Heterodera glycines
FFQMAGSPKLSASLSTTFRRFRPVFFSRLEGAWKTYAEEQEERVISDLEAFDLFYICRKEAEHNQNVDSLELMKHFPVLSTFDKMLLLSSELFNIEFREVTNDYENQSFERCDPSVRLFDVTDNATNSRIGFLYVDIFSRETKKIGRGQWLSMLGRPPNQLRDLDALVYFLGAHPHSENEHESFLHHEELSEMLSAFGRAL

SEQ ID NO: 121647 - protein, 200 aa, Heterodera glycines
  unsure (1)..(200): unsure at all Xaa locations
GILNGKEPSRGINPDEAVAYGAAVQAGVISGEENSEIVLLDXNPLTMGIETVGGVMTKLITRNTVIPTKKSQIFSTAADNQPTVTIQVFEGERPMTKDNHLLGKFDLTGIPPAPRGVPQIEVTFEIDVNGILHVTAEDKGTGNKNKITITNDHNRLSPEEIERMINDAEKFAEEDKKTKEVVEARNEFESYAYSLKNQLG

SEQ ID NO: 121648 - protein, 203 aa, Heterodera glycines
QKTFIFLDTEYMRPSFYENVLKVWKSVTNNQSRAIFGFTGEDSMGKSAFPAIEAAPCFSSSFPEIFNGRRDIPCLIPCAIDQDPYFRMSRDVAPRLKYPKPSLIYSTFLPALQGAQSKMAASEANSCIYLDDTPKKIKEKINKYAFSGGRDTKEEHRQFGGDCTVDTSFQFLRFFLDDDERLEDIREQYASGAMFSGELKAIA

SEQ ID NO: 121649 - protein, 238 aa, Heterodera glycines
MIIRSKAVQLLTCYRNRITRKLQYSTTENVPVNVPEPVISSSNMAQFRKGAGGRSSFSGNVITVFGNTGFTGRRVVNRLARHANQLILPYRCDSYFLRELKVPCDLGQVLFFPFQLDDDESIRKAVKYSNVVINMIGTYVDTPNYSIYDANVEGAWRIARICREMGVERLIHVSALNADPSYKTQFIKNGAFLKSKGMAEHAVHAEFPSATIIRPSVMYGDIDRLIYNLITRWRVDPF

SEQ ID NO: 121650 - protein, 245 aa, Heterodera glycines
MRSFCTSNSLSVFSNFRFIQKLLSVLRKVAGKCHLSQIWRISPSNWTWIISNGWHASNGPALSLLGYRKAVNRDVFGGQMFAQAIAAAEATVDGDEFAPNAAHSMFIRKAFIDHPIEYIVTRTRDGRSFCTRTVEARQNGEAVFCAQISLCVKERSSIEHQTEMPAEVPEPEELVPFFETVRRVVTEHDEGRTERNGRTIANLRAVLEDEQQPSVFEFRPIHSDIFLGIRPHSPTPIRYWLKCAV

SEQ ID NO: 121651 - protein, 166 aa, Heterodera glycines
SRLLRLQLCATLHVLKWTAAAVGSRTDFLGTKERIEQGNFFRDVLDKALAINPEEYTLLHMRGRLVLSVASLSWIERKAATVLFGPPPEVSLNEATRDFTAVLELAPDWLENTLFLAKAYLANSDRESAVHHLKQLIDSYQQNENDKDQPEALKEAKALLKKHGRK

SEQ ID NO: 121652 - protein, 211 aa, Heterodera glycines
  unsure (1)..(211): unsure at all Xaa locations
HKALLGDEKARLXXLSFMYDAPAGINKKKEEGPEPKFEWQRKYNAPREEWAKGNELIQDQPFGIQVRNVRCVKCRAWGHLNTDRECPLYGMSGNAEDHGYANNPSDIIRDLNVEKKTKTVSDVTTNEQIDIKPKIEVRKSHEEKKKKRRHYSSEEEEEGTEEEEKKPEPIDQEQLLVNMREEHNLKFKTGILIGLRADEHIKKMSAMVGGW

SEQ ID NO: 121653 - protein, 76 aa, Heterodera glycines
RDRKKVENVKHSGNLTIEQVINIARQMRPRSIARKLQGTVKEILGTAQSVGCTVDGQHPHDIVDMTRAGEIEVPEE

SEQ ID NO: 121654 - protein, 171 aa, Heterodera glycines
NGRTSRSRTKGIYDVFSLKASVNTSNMVLFDAAGCLRKFDSPEQICLEFFECRRELYKKRKRYLEGMLQAQSDQLSEKARFIVMKIKNEIHIENKRKSAIVEQLQKHKFRPDPVKRWKDEQKRKELELCGEANVSDDEEDEDEHADQAVDEALEKRCSDYDYLVGMAIWKL

SEQ ID NO: 121655 - protein, 240 aa, Heterodera glycines
  unsure (1)..(240): unsure at all Xaa locations
RWYTPVVVLAGSLLDAAEKLLAXGIHPTTISDSFHXAATFSEKVLEEMATPIDINDDDELVKLAMTSLNSKVVSQYSHLLAPMAVQAVKKLMSSPEDSSVNLKLIKVVKKLGETVEESQLIEGALIDQKSMGHGGPARVEKAKIGLIQFQISPPKPNMENQVVISDYAQMDRALKEERNYILELCKQIKKAGCNVLLIQKSILRDAINEMALHFFAKMKIMVIKDIERDDIEFYAKILGC

SEQ ID NO: 121656 - protein, 134 aa, Heterodera glycines
MGRAEGNEGPIKNARAISDEQAHRLIYEKELAPFGANPMIAQDAVSQMLDVSVDNALGPNVRENLLKNLSGKQLAQLPLAPLPKMKKSDSDKLAKRKHQITHLATVAVSREEQLKDKWADSKQTKKMSRQKLGF

SEQ ID NO: 121657 - protein, 228 aa, Heterodera glycines
PPRTGRPVGPLGGPGLHMAADKTFKNKVAQFRYLCYSNSVPNHVKISVTRNNLFEDSFQEIMRKNPFDLRRRLYIQFKAEDGLDYGGIAREWFFLLSHEVLNPMYCLFMYANSSNYSLQINPASFVNPDHLKYFEFIGRFIAMALFHGKFIYSGFTLPFYKKMLNRKITLKDLESVDTEFYNSIVWIRDNDIDECDMELFFVVDYDLLGEVKTHELKENGTEIAVTEA

SEQ ID NO: 121658 - protein, 200 aa, Heterodera glycines
  unsure (1)..(200): unsure at all Xaa locations
GYYPVELVSFYYKMTLPSSTFDPAKGGTGRNEGDLAKLSXQYSSRDMPSHMTLKYRQKGQAHPEEVVAKNLRRDIEEREQHSRERRSRDSLDSFGTGPTNKKQRVEDTSSARNLDADEPFDELNEDDTDLDEDSDNEAELMAELERIRKERAAERASKEAKEREEQERIREENILHGNPLLNPASSEFKVKRRWDDDVVF

SEQ ID NO: 121659 - protein, 228 aa, Heterodera glycines
ARDSMTPFFFKTGTLTEFPEDYLESVRKVHSEGGFGSIGYRYDWKLEEAQKNLLRTHTTAVSARQLYLLAQKPFQPSKMFSIDRVFRNETLDATHLAEFHQVEGVVAERNLSLAHVIGLFTEFFRKCGIENLRFKPTYNPYTEPSMEIYAFHTGLNKWVEIGNSGMFRPEMSLPMGLPEDVAVAGFGLSLERPTMIRYGISNIRELFGHKIDLEMIYRNPLCRLEQKN

SEQ ID NO: 121660 - protein, 183 aa, Heterodera glycines
EFVEPYLKELMDGLTAKVFRTYNASITLQEQLDKLTNPSDSVHEKMLSYNRANRQVAILCNHQRAVPKTHEKSMENLENKIKEKKQEYKELKDQLKKSKSVDEKMAKKYERLKEQIAKLNTQRTDKDENKQIALGTSKLNYLDPRISVAWCKKNDVPVEKIFSKTQRDKFRWALDMAKEDFIF

SEQ ID NO: 121661 - protein, 199 aa, Heterodera glycines
MLVKSFLGPTKLCQFRLSFFHNSVVKMNSDNFRVERDTFGELRVPSDRYYGAQTARSMQFFKIGGPEERMPLPVIHAFGHLKKAAATVNQDFGLNSKVAAAICEAADDVISGKLDEHFPLVIWQTGSGTQSNMNVNEVISNRAIEILGGELGSKTPVHPNDHVNMSQSSNDTFPTAMHVAVAVEINTRLLPSLRLLHDE

SEQ ID NO: 121662 - protein, 97 aa, Heterodera glycines
MCDEEVAALVVDNGSGMCKAGFAGDDAPRAVFPSIVGRPRHHGVMVGMGQKDSYVGDEAQSKRGILTLKYPIEHGIVTNWDDMEKIWHHTFYNELRV

SEQ ID NO: 121663 - protein, 127 aa, Heterodera glycines
MSGRGKGGKAKSGGKAKSRSSRAGLQFPVGRLHRLLRKGHYAERVGAGAPVYLAAVLEYLAAEVLELAGNASRDNKKTRINPRHLQLAVRNDEELNKLLSGVTIAQGGVLPNIQAVLLPKKTHGESQ

SEQ ID NO: 121664 - protein, 97 aa, Heterodera glycines
  unsure (1)..(97): unsure at all Xaa locations
ACKFAEXKEKVDRRSGKKVEDNPKALKTGDAGIVDLIPTKPMCVEAFTDYAPLGRFAVRDTRQTVAVGVIKAVEKTEGGGKVTKSAQKAAAPGGKKK

SEQ ID NO: 121665 - protein, 124 aa, Heterodera glycines
  unsure (1)..(124): unsure at all Xaa locations
QLYEGRWNYKEGCTAEKMARAGFFCTEKRKKPSDAAKCYICHXHEMYWDPEDEPWEEHKKHRPDCPLVTIGKQNEEEFTVPEVLLLLAYEHSTKMYPVADASMKELDVLMKQLLADTQKAVEGI

SEQ ID NO: 121666 - protein, 185 aa, Heterodera glycines
  unsure (1)..(185): unsure at all Xaa locations
IAVAENVEILXKGAKLKGSFSRLDFXMDRRGSRQPVIKNFKTILPAASNDIYYRDEIGNISTSNVYPRADRVEVELRPRFPLYGGWRTNYILGYNVPSTSFLRHSGSNFAIKMKLMDRLYDNAVVEKLCVKIILPETSKNIKLVTPYXTKRLPDEVHKTYLDTFGRPVIVLEKENLINNHIQPFT

SEQ ID NO: 121667 - protein, 203 aa, Heterodera glycines
  unsure (1)..(203): unsure at all Xaa locations
MGISQDRWHKRRKTGGKRNPIHKKRKFEMGRPAANTKIGPKRIHLVRCRGGNIKHRGLRLDTGNFAWASEGCTRKTRIIDTMYNASNNELVRTKTLVKGMIVSIDAIPFRQWYEAHYALPLARKKGQKLTEDEEARIGGAQKRSKSTLKKYTERQKTAGVEPHLLEQFQAGRLLACISSRPGQSGRCDGYXLEGKELEFYNKK

SEQ ID NO: 121668 - protein, 222 aa, Heterodera glycines
LCPRRFGTPSTDISSTDTLNALGLLLTGLPSSFQAFFLDRIEESFEWSQIASADADPSQLFESLSHEVYLHSDSRILSMLALIHSFCQHGGNNSLSIIPDFVINRLAHKVDNEAQLVYFLRIVVPYLQRIHEKERNKHMPEVSHGHNVRLGQLQISATPYIISIYNVLADLVQKVGRLHYEDSICDLLYQFKYMFVGTTLKEQTEIFILNFPYSMREKLKFL

SEQ ID NO: 121669 - protein, 232 aa, Heterodera glycines
  unsure (1)..(232): unsure at all Xaa locations
EMNDILXQVATNTETTKNVGNAILYETVLTLMETKSESGLRVLAVNILGRFLLNTDKNIRYVALNTLLKTVAIDFQAVQRHRTTVVECLKDADISIKKRALELCFALMNQTNIASMSKEIIIFLETADSDFKAECSSKMYVATERFSPSLVWHLDTMINVLQLAANHVPDEVVSAMIQLISSQQELQHYATVQLFHASKREHIVNAQPLMQIAFWSIGEFGDLLVTPGNTED

SEQ ID NO: 121670 - protein, 192 aa, Heterodera glycines
MAFLSRLSILPNSPISLLAVSLAVLAFVALASANPPTARETAPNAQQNNANSVATGEIAKNIAEKMERMNEFINYFRAKKFIDAHNLAFEKGEVSFKVAPNHLMHFTPAQYNRIRGLQMRSNRQRHNMATLAGNSSTLPEKLDWREKGAVTEVKDQGDCGSCWAFSATGAIEGALAQKKASKIISLSEQNLV

SEQ ID NO: 121671 - protein, 195 aa, Heterodera glycines
TSFERCDPSVRLFDVTDNATNSRIGFLYVDIFSRETKKIGRGQWLSMLGRPPNQLRDLDALVYFLGAHPHSENEHESFLHHEELSEMLSAFGRALQLLLSRAPCHFLSLPLAPYYASDFDANDFMPAFMKFCIYKPRFLGLLSSPNSQNGQQLCDEKATTYAKALQRATFWDSHRILFWTDFDLTIHNMQDWRKK

SEQ ID NO: 121672 - protein, 96 aa, Heterodera glycines
  unsure (1)..(96): unsure at all Xaa locations
TAEIVAFSLFPSPFPRQLFEQAKNVQMDFNLLYFRVSNDYEFLVETYVELAKTNEQIRMHLQILKKTHEEGIKQTXPLCWPQSSDYMCHEAKNNDE

SEQ ID NO: 121673 - protein, 229 aa, Heterodera glycines
  unsure (1)..(229): unsure at all Xaa locations
MDFELFDEKAKEKRSLRLSRDQLDLLNLNYGSNDARFSITSYYQGTAWCSCHIXKLPLPDKLVIFFIDGXITKSDVLGHVIPAIGGTWAHSGVAELYTGIKKNGYQMVYLSSRAIGQSHYTKTYLQNFAQGSRTLPDGPVLLSPSSVLMAFRKEVIERKPEEFKIACLTDLKSLFPXGQPFFAGFGNRETDVKSSLAVQIPPERIMIIDPQGSLRRADNKAGGYVSDYP

SEQ ID NO: 121674 - protein, 236 aa, Heterodera glycines
  unsure (1)..(236): unsure at all Xaa locations
MIVCSXTLHTWQYNGWRLSICTFPQWIDLKGQDSVPETVHQVVCMVDPCEDKSWIRLRSKPGQSVQTDSVHARDQLRPGSDNPETLSEAVKVLKGEYLVKAVEEHKMDQAIVFCRTKLDCDNMEKFLAPRGYKCVCLHGDRSADERTRNLLSFKEKIVRFLICTDVAARGLDIKGVPYVVNVTLPPAEEKANYVHRIGRVGRAERMGLAISLVSTVPEKVWYHQCRSRRANCNNTR

SEQ ID NO: 121675 - protein, 123 aa, Heterodera glycines
MPPKPSGKGAKRAVKSTKTVRTADKKRKKSRKESYSVYIYRVLKQVHPDTGISSKAVSIMNSFVNDVFERIAAEASRLAHYNKRSTISSREIQTAVRLILPGELAKHAVSEGTKAVTKYTSSK

SEQ ID NO: 121676 - protein, 235 aa, Heterodera glycines
MEVVPQQPADVAEEHKAIGGAEEIAVNDVQPSAAGDAQQQFNSEQLEECDRPPDAEDDVSAFWVDGDSHELVAMTIVNELLFTQKISPGGAPVFATRYDVDTIVWQLDPNVSPSDQKQNNVLVNHLFTLNAFGYIQAGHQDKRFLGCSPDGRYAALINRTNHCFLYFQNSAISSEHELKNRRTGKRAEHIAKQLVLSMSDLDKEFDPNDSSNEFIAFHATAETLFLLTRCAIYAV

SEQ ID NO: 121677 - protein, 230 aa, Heterodera glycines
MPLHACHNVVGPRMGGANSSLGRAYTPGGGGANHNNGGTSGQSVARHADHSGIGQPCSIHLRELPTLNTHLTSPAAAVALGLIYLRTGDCWIRETLAIADTFYEIDQIRPDMLMIRTFSRCLVDFEDIKCTREWVDAQIPQIIRKYVKRFLEVKSKEDMWWSDFNDMATVAKAYFYGFAGASFAMALRFASKWEIKALQVIQSFYEILKTDTSELATSTEGHSPVDLAHQ

SEQ ID NO: 121678 - protein, 206 aa, Heterodera glycines
  unsure (1)..(206): unsure at all Xaa locations
CYFPTHALNFAFXDTYKRVFTQGVDKEKQFLKFFAMNLASGGAAGATSLCFVYPLDFARTRLAADVGKADAREFKGLADCIMKILKSDGPIGLYRGFFVSVQGIIIYRAAYFGCFDTAKMLFSPEGKQMNFFVNWAIAQVVTVSSGVLSYPWDTVRRRMMMQSGRKDIMYKNTLDCAIKIIKNEGLLKGMFKGALSNVFRGTGGAL

SEQ ID NO: 121679 - protein, 174 aa, Heterodera glycines
MAFLSRLSILPNSPISLLAVSLAVLAFVALASANPPTARETAPNAQQNNANSVATGEIAKNIAEKMERMNEFIKAKKFIDAHNLAFEKGEVSFKVAPNHLMHFTPAQYNRIRGLQMRSNRQRHNMATLAGNSSTLPEKLDWREKGAVTEVKDQGDCGSCWAFSATGAIEGALAQ

SEQ ID NO: 121680 - protein, 213 aa, Heterodera glycines
LSLRAQFAPRHRPSPAFPVPSFAPFAFLLFGFLVGLCLLLTFAVPFRCWLLKKKGIPSGVVGSSSSTDSAIALLKQFQQKRHSPAPLQRQAPLGFEQSCSASVDGVTLVQRSIALDLQLMEVFARGRYGELRKAFYRGTVVAVKIFYTTEEESWQNERDIYQCQMLNHENILQFVAADILSSVESLTQMLLITDFHPLGPLYDFLRANGRLSL

SEQ ID NO: 121681 - protein, 230 aa, Heterodera glycines
  unsure (1)..(230): unsure at all Xaa locations
VDLVAQSLTVNPNMAIFXTMNPGHSGRSNLPDNLMQQFRSLTMTSPDRGLIAEVMLFSQGFQSFERLANKIVLLFTLCKEQLSNQCHYDFGLRALKYVLVSAGNIKRDAIQRSYDEPSQSGDGAGEQAVASQMSEQQMLFQSVYDTLTPKLVSEDITLFKSPLHQFFPDNSPKQVESLKNEVLSICKTEHFSCSPITGEKGNLWLEKVLHVYQITNRNHGLMLVGASGSG

SEQ ID NO: 121682 - protein, 227 aa, Heterodera glycines
MDCAFRSSYLQRNTAMARNASKSPQLLVLYCDQLFFISARNMEDEKMDENLDALMTVFIYIDDKDMFQAFFHKFLCKRLVYDTSASEEQERCMIAKLKHMCGFEYTSKLERLLTDVALSRDHSEQFKQQPRTSNVDFSVIVVMSSVWPLQQPVKFEIPRPLLDCIDSYTQYYTNRFNGRKLTWALQMCRGELVSTSNTFPSKYSFLCNTQHIAVLMQFNERNTYTLG

SEQ ID NO: 121683 - protein, 69 aa, Heterodera glycines
IRRLARRGGVKRISGLIYEETRSVLKVFLENVIRDAVTYCEHARRKTVAAMDVVYALKRQGRTLYGFGG

SEQ ID NO: 121684 - protein, 164 aa, Heterodera glycines
MPPKPSGKGAKKAVKSTKAVRTGDLKRRKARKESYSVYIYLVLKQVHPDTGISSKAMSIMNSFVNDVFERIAAEASRLAHYNKRSTISSREIQTAVRLILPGELAKHAVSEGTKAVTKYTSSKSTSVSGKGARRVNNRDVSQKDSTAHASNHSAETFSDSLVTE

SEQ ID NO: 121685 - protein, 174 aa, Heterodera glycines
KHSASFPISAFTLLFSKNVSGYKIVDHTFDAIVVGAGGACLRAAMGLSEGGMKTFATTKLFPTFSHTVAAQGGINAALGNMNPDDWRWHSYDTVKGSDWLGDQDALPYMTREAPRAAIDSENYGMPFSRTEEGKIYQRAFGGQSNDFGRGGQAHRTCCVADRTGPSLLHTLYGA

SEQ ID NO: 121686 - protein, 116 aa, Heterodera glycines
LRLCDHAFRLYRQFFVLDDSAGTRASMTPTTPASLLFSFWPVQPHSNHFEAFIEGLCRVLYDTLRPLVVHNPHLETLAQLCTLLKVEMIDERCAALPSSHPNAFPPPFSATSPTDA

SEQ ID NO: 121687 - protein, 212 aa, Heterodera glycines
RDMVVCSAYGHELPKYGIKVGLTNYAAAYATGLLLARRHLNKLKLDSVYKGKENVDGEDFDVEQEGDNPNPFTCVLDTGLARTTTGAKLFGVMKGVADGGIHVPHSETRFFGYDPEEKKYSAEAHRDRIFGKHVADYMAHLKEEDEEAYKRQFSQFIKNGIESGTLEEMYKKAHDAIRADPSFTKKEPKKPKEQKHWNKKKYTLTERKHRVA

SEQ ID NO: 121688 - protein, 141 aa, Heterodera glycines
MPRHCAKPRSFHAGLKFPVGRVHRKMKKGPFAKRLANGVPVYMTAVSVHITGDLLKIIGDITQSEGMKRLSAFHIRSAARENDELRKLFSGVSLAEVCVLPELESDVEQSSEGSGESDSDESTEGSASGSHEGGGAAGAQQ

SEQ ID NO: 121689 - protein, 185 aa, Heterodera glycines
KGEEWSDIPISECRMAELVRHFFALGWMCDNGSGMAVRVKDYRTGEHLILNSSNSLDIDIFSENDLFVMKMNGEILKSPSKSDRSPTAPFYLLRDNPDLACVIHTHSKWANLITQLIRGDEFKISNQEMIQGCENRLTKGRLDNIDVLVVPIVQTEINEHLLYPILLRTLKQNAGASGILVRGHG

SEQ ID NO: 121690 - protein, 200 aa, Heterodera glycines
KHQSQPEKMCDEEVAALVVDNGSGMCKAGFAGDDAPRAVFPSIVVFSRHQGVLVGMGQKDSYVGDEAQSKRGILTLKYPIEHGIVTNWDDMEKIWHHTFYNELRVAPEEHPVLLTEAPLNPKANREKMTQIMFETFNTPAMYVAIQAVLSLYASGRTTGLVLDSGDGVTHTVPIYEGYALPHAILRLDLAGRDLTDYLMK

SEQ ID NO: 121691 - protein, 154 aa, Heterodera glycines
EEYDPTIEDSYRKQVLIDGETCLLDILDTAGQEEYSAMRDQYFRTGEGFLLVFALNDVLFFENIHAYREQIRRVKDSDEVPMVLVGNKCDLAQRAMDQRSIQELARSFGIPFIETSAKTRRHVDEAFHALVREIRKHKDKHRERPKRRKRCAVL

SEQ ID NO: 121692 - protein, 226 aa, Heterodera glycines
LPAEWDGRLGTLSVEQLGGDNFEWTVAVQKKFTGVGKASAIDLDLACSVPVGSDHLADLVDLCYKFRHTDSAGDLLPSTEYTLCRLLLEFGEFGVFMNLLNDPINYGIFPNEHICCMFLDHFLGSAQLQYAAKIAIYVMLQEMFDFPLLTFLATRALLEWTQGERKLDEQIHPKMAPSLEDETNFNEENVRLFRYPFLKNPFWDGHFDENDSDRMAGKALEWLSYH

SEQ ID NO: 121693 - protein, 255 aa, Heterodera glycines
DDTEEQRVIRNVKSWEQDPHYFKEVKISALALVKMVMHARSGGNIEIMGLMQGRVDANTIIVLDAFALPVEGTETRVNAQAQAYEFMTNFSESCEAVGRLEKVVGWYHSHPGYGCWLSGIDVNTQSINQQFQEPFVAIVIDPIRTVSAGKVDIGAFRTYPKGYKPPDEPPSEYQTIPLNKIEDFGVHCKQYYSLDVTYFKSSLDSKMFDAFWNTYWVSTLCANPLRTNADYITAQLADLGAKLQHVNTRHGASFR

SEQ ID NO: 121694 - protein, 163 aa, Heterodera glycines
EKKLENIEKELRQVKELYDTNKEFKSFIDNPILNKQKKKEAVEDVLKKQGVSQQVQNFFGLLAENGRINKLTGVVSSFETIMRAHRGELHVEVASAEPLDKKHEQSLNDALQKFATRGQKLNLTFTVKPDLVGGLVVNIGDKYIDLSMATRLKKMDAVVKGSI

SEQ ID NO: 121695 - protein, 213 aa, Heterodera glycines
  unsure (1)..(213): unsure at all Xaa locations
ISRSSGLPIYDSANRRVEDLECRLCNKFILNRIXGFHILWHLNTDLNIVRYGCKHCNFKHDRPQSVAAHGIREHGDEASCEDLLYNFEDELKQMSKACFGVERLFEKEIRRRNRLERFARCSTENSSAGRAEDDDNSQHGNNESKLSQQIVRRRSQQHIMNLRVSLKSENVDRDWTPKEPVRKRRSGGRRFFGSRGRKPMSRKARDVMIKLRD

SEQ ID NO: 121696 - protein, 242 aa, Heterodera glycines
  unsure (1)..(242): unsure at all Xaa locations
IICWFLPCAERLRYQPLGWANSYEFTDADFRVACDTLDSTVDMVAQNRANVKPDKLPWLALRTLLSQCIYGGKIDNDFDQVLLDTLLDKLFTSNSFDADFILIENIGVNALNMPDETNSKDGLINWVINIKALQKPNWIGLPNNAEKVLIAERGXEFIRKMIKMSDDELAYEADDLERNKQAPTWMVQFSGQCKSWLDALPQQLQRLRRTKENVRDPLFRFFEREINLGARLLSDIRRDLNE

SEQ ID NO: 121697 - protein, 174 aa, Heterodera glycines
  unsure (1)..(174): unsure at all Xaa locations
NLYVKNLHDTINDETLRSNFESYGNITSAKVMCDEHGRSKGFGFVCFEKADEATKAVVEMNNKIIENKPLYVALAQRKEDRKAQLASQYMQRLAAMRMQNPAGLMGTMYAPASGGFFLPQAIQNQRAXAVHANTESVRGTNAWRCPSLEQYGRFQPSNARLHDGSSCWRSVRRC

SEQ ID NO: 121698 - protein, 139 aa, Heterodera glycines; identical to SEQ ID NO: 119931

SEQ ID NO: 121699 - protein, 99 aa, Heterodera glycines
  unsure (1)..(99): unsure at all Xaa locations
SPNTEKKRKLGKAARKRLAVERTIESDIIFDNLEEQMLFQHSSDFPFFXYPVESEIEKSSKFHSLRRDGRIFRPFRRVCLLSVDQFLQFASSVVRSFSV

SEQ ID NO: 121700 - protein, 226 aa, Heterodera glycines
  unsure (1)..(226): unsure at all Xaa locations
LPRDPAGEEILFLGDYVDRGAQSVETICXLLCYKVKYPTSIVLLRGNHETSNINATYGFKKELEERYPAHSQALFDSFNDTFAWMPLTGLIGQKILCMHGGISDKIRSIEQLKQLERPMLLPPTDSLHIDLMWADPMEAQGQLPNPRGAGVLFGEDVVIRTCQLLKISCIIRAHQFIQSGYEPMFNQRLITVFSAPAYTGQTNTGAVLEVKTSSHFTTHFFPPQSQ

SEQ ID NO: 121701 - protein, 202 aa, Heterodera glycines
GGIGTDFALFGVCFYCLISGNFGSLYGDYPSMFQLRDWTRQYGKQYGIQYGWRNALVISDPAMVHELLVTKFEYFHARNLSPIFGNLDTNKWISMFLARGGRWKRLRTIANPAFSVANLKKCMWLIDDSVKNAINFLEKARNEGKSFNIQRHFVEMSFDVIARVALGQRESRQFETEMAHLAIESMQKYNNTPFDYVGFAFP

SEQ ID NO: 121702 - protein, 190 aa, Heterodera glycines
MTTKSEGDENNSVDENGEPSGNHAENCSTGPSSPAPSVSCEACGTNFSQLEKDAFAAVREMAPYVKTIAISEILSRTPELIFLNIVTLENESYCVELTQRGWRVSSDRLDCMNGDIQKLEMHVTYYDAIEQLLDSLSEQYRENFGAALSSKLAALQTEQKQRQQDGESEGNGGGAAERSDAGQRTDDEPN

SEQ ID NO: 121703 - protein, 130 aa, Heterodera glycines
PSPFHCAGCALCEKAGNEKKLVVCVGSVTDDKRIYTVPAMTVCALRFTDAARARIIAAGGECITFDQLALRAPKGENTLLLQGRRKAREAEKHFGPPPGVPGSHAKPLVRAKGRKFERARGRRKSRGYKN

SEQ ID NO: 121704 - protein, 209 aa, Heterodera glycines
NRKGRALCCSGSEYIVHAVHLAILAHQLRLLMTVPKVSDELLTTDVHEPSVCRLNLARLLLLFVKDFELSNIEYAINYCFFARDFKLDTPSADNATIRQEGRSVFVAAVSRIVFMSGHREAILGRLDSQGNRVPGLIDKFKDAMDICELIASIAFDTHVQGHSLAACHLYALAKCHEKAIKLANCQLSMCVSNPMAKETCEMVECAKWL

SEQ ID NO: 121705 - protein, 117 aa, Heterodera glycines
  unsure (1)..(117): unsure at all Xaa locations
QLATKAARKSAPSXGGVKKPXRYRPGXVALREIRRYQKSTELLIRKLPFQRLVREIAQDFKTDLRFQSAAIGALQEASEAYLVGLFEDTNLCAIHAKRVTIMPKDIQLARRIRGERA

SEQ ID NO: 121706 - protein, 150 aa, Heterodera glycines
LSFCVTTTFIALSPMARTKQTARKSTGGKAPRKQLATKAARKSAPATGGVKKPHRYRPGTVALREIRRYQKSTELLIRKLPFQRLVREIAQDFKTDLRFQSSAVLALQEASEAYLVGLFEDTNLCAIHAKRVTIMPKDIQLARRIRGERT

SEQ ID NO: 121707 - protein, 81 aa, Heterodera glycines
  unsure (1)..(81): unsure at all Xaa locations
DENLTEKPPSPGFSHGHAGPNTNGXSQFFVTTVKTEWLDGKHVVFGRVTDGMDVVKAVEAQGSQSGRASKDIMIADCGQLS

SEQ ID NO: 121708 - protein, 188 aa, Heterodera glycines
FANYRELIGRLPKIMANDANIFVAASATKCVMLFAKGLRAEFTPHVSLVVPVIFDKFKVEKRLLRDALVECIDVIAAYTSFDHLSKALLEAMTSKQNPSQKSQTDLFIYRLFRSLPAKDVPKGLLKDLVAILSKHGFDAASEVRDSSFAALGAIMQCIGEKALGCFISPELAKDANKMAKIALKRDTA

SEQ ID NO: 121709 - protein, 202 aa, Heterodera glycines
MGKEKIHINIVVIGHVDSGKSTTTGHLIYKCGGIDKRTIEKFEKEAQEMGKGSFKYAWVLDKLKAERERGITIDIALWKFETSKYYVTIIDAPGHRDFIKNMITGTSQADCAVLVVACGTGEFEAGISKNGQTREHALLAQTLGVKQLIVACNKMDTTEPPFAEARYTEVMTEVSNFIKKIGYNPATVPFVPISGFNGDNML

SEQ ID NO: 121710 - protein, 172 aa, Heterodera glycines
MSDEERAEFEVSAPLRDALETIDTHLAGGANANTKEEQAEMEWAYKYCQHEWMKLTIKENANAYIVEQFIDALEAFSNRLMEKVVNMTDQNGNTALHYAVSNENFDVVSVLLDSKVCRVDEMNKAGYSALVLGALCELRNETECAIVQRLFQMGNVNAKAMKHSQTALMLAA

SEQ ID NO: 121711 - protein, 206 aa, Heterodera glycines
  unsure (1)..(206): unsure at all Xaa locations
SPGTAIGTSINXLKALKALHSVGYLHRDIKPANSALGTPETNEQRLLYLLDFGMARKYVREDGTHRRQRDTARFRGTPIYAPISAHIKRDYSRRDDIESWFYMLIKFYKGSVPWNSLRDKNEIGLYKCRRMEDQPPEVRRQAIDELTAGCPPEFTEILSYIDGLQPESRPDYEMIERLLRGYLTRKNIQEHPYDWEEGRKKTQSAQ

SEQ ID NO: 121712 - protein, 208 aa, Heterodera glycines
  unsure (1)..(208): unsure at all Xaa locations
TAPGDRXLNDHKTSYVNPEHLDYFRFVGRVIAKAIYDNKQLDCYFTRAFYKHILNKHVRYQDIESEDPDLFKSLEFLLNNAVEDLGAELTFTVEVEEFGVRSTRQLLENGNKTTVTDANNHEYVHLMCQMKMTGSIRQQLNAFLEGFYEVIPKKLISIFNEQELELLISGLPDIDIDDLCANTEYKTYTRTSPQIQWFWRALKAFDAE

SEQ ID NO: 121713 - protein, 203 aa, Heterodera glycines
KCFGLSAETVVDRATELRYIGGIYAGNIKPAQFLCLTLKLLQLQPDKDIIIEFIRQDDFKYVRALGAMYIRLVFNSVEVFKYLEPLYNDYRKLRYMNRMGKFELLYMDEFVDNLLREDHYCDIQLPRLQKRQALEEKDQLELYASALDEDLERLSTDSEDEQETRKARPIIVSRRRSRSRSRGRSRSKSRERRRRSLSTDDRR

SEQ ID NO: 121714 - protein, 200 aa, Heterodera glycines
MAAVVTNNSKEFIVGVKYKLKRKIGSGSFGDIYLAINIHNGEEVAVKLESVKARHPQLLYESKVYKILQGGVGIPHIRYYGIERDYHCLVMDLLGPSLEDLFNFCCRRFTMKTVLMLADQMIGRIEYMHVKNFIHRDIKPDNFLMGIGRHCNKLFIIDFGLAKKYRDSRTRIHIPYRDNKNLTGTARYASINAHMGIEQS

SEQ ID NO: 121715 - protein, 116 aa, Heterodera glycines
  unsure (1)..(116): unsure at all Xaa locations
IFVMKPXREGGGNNFWGDEIPKKLREMSRAELSGHILMQKVHPFSAPNYMVRPNERVQHGNVVTELSTFGTLLGHVNTKAVLHNAQQGHYARSKPEGATEGGVYGGGGVVDSPFLF

SEQ ID NO: 121716 - protein, 185 aa, Heterodera glycines
WKGADPNEPVVGRENDINTNLTPLFVAALHAHFPLCRVLVDRGANVDLGSDCPTPLMMACKRSQMEIVAFLIENGADINLQNGDGETALMIACSRANVDIVRLLLSHGANVEQTDYEGFRFALKNAANEGHLEVCRLLVEEWAADVNQQTIQDRTTALICAASRGDLAIANFLIEHGADLQHVDV

SEQ ID NO: 121717 - protein, 200 aa, Heterodera glycines
MGKEKIHINIVVIGHVDSGKSTTTGHLIYKCGGIDKRTIEKFEKEAQEMGKGSFKYAWVLDKLKAERERGITIDIALWKFETSKYYVTIIDAPGHRDFIKNMITGTSQADCAVLVVACGTGEFEAGISKNGQTREHALLAQTLGVKQLIVACNKMDTTEPPFAEARYTEVMTEVSNFIKKIGYNPATAPFVPISGFNGDN

SEQ ID NO: 121718 - protein, 199 aa, Heterodera glycines
MHQTVLENRRQREHDKKFGKTVQNEVVDRNSTLKRVFRCIFVNIASVLLVLALTLFIDLIGPSFFSKFVKYLGSLLLVPIFGTVRLLSILWFADVASAALKYRGQFGQKITDLSHAASDFVHAIFLELIFLLQAMFIISIEVPILSNWSCCFASFLFHLTFSLGFVYMSLLHSLYSFDYIWMSNGVTLNSRLALIERRW

SEQ ID NO: 121719 - protein, 177 aa, Heterodera glycines
WRKLCKCGERRLSSTAPDQSSESRFNQLERNLELFQENARHMGVIASDFTSKSQEPLNQKIHTLISGLQVLDQLKSQFTDVRVPIELLDYLDRGQNPQLYTKELLERTRQRNKELNGKTEMYRKFQACLLQELHREMPSDVEEYVRIRKPSGMNGAAAGNAMANSAMAAEETQHAME

SEQ ID NO: 121720 - protein, 185 aa, Heterodera glycines
HKEELVQRAKLAEQAERYDDMAQSMKKVTELGAELSNDERNLLSVAYKNVVGARCSSWRVISSIEQKTEGSEKKQQMAKEYREKVEQELREICHDVLDLLDKYLIPKAGNPESKVFYLKMKGDYYRYLAEVATGDDRNAVVEKSQQSYQEAFDIAKDKMQPTHPIRLGLALNFSVFYYEILNSPG

SEQ ID NO: 121721 - protein, 220 aa, Heterodera glycines
PRKTLYEPGGKDVYEGVKIDYSGTEVNPENFEAVLLGDEQRSEGKPVLKSTEKDKVFVYFSDHGAVGVIGFPAADLTVKQLTQTLKEMHAKKMYGELTFYLEACESGSMFDHTLAQSLKIYAVTAANGDESSWGCFCDTKFLPGNCLGDLFSVNWMQDSDQENLRTETLRKQFGIVREETNKSHVMHYGDLQIQDEHVSEFMGKEHAQKRNERPPSPHKF

SEQ ID NO: 121722 - protein, 195 aa, Heterodera glycines
  unsure (1)..(195): unsure at all Xaa locations
HAAIVPIEVEETATIGEVKRKIQQVKGAEYPAENQKLFFNGRVLEDAMLVSELYXSAPKFIVFMVMRKPAQASSTVRPATSSASPQKNTSTADGQAPKAEKSAENKATGATSNTSVAQPGAATGVPAEHAQTVANIEAMGYPRQEVVRALQAAFFDADRAVEYLCNGIPEGLSLQKSNSDADNDAVNEEWELMES

SEQ ID NO: 121723 - protein, 212 aa, Heterodera glycines
NGGKERFLQLCIDCNGCFVIQKLVENGSKETNQMLLNLVRPFAFKMVLNRFACRIVHMLVVNLSGSQVRQLFCQQFKGHENTLVTDQNGNHFVQCVVDHFAPDVYGPFILALANCPTRLSAVFENKYGCRVIQFVLENVVQLVHGTANANNSLEKEISIQILHVLIEPILKNAYSLAQNEFANYLVQFIIKSPYLRRQRCYIIKTHIIRNVY

SEQ ID NO: 121724 - protein, 137 aa, Heterodera glycines
MGIFDNDVQKQLRHMMAFIEQEANEKAEDIYAKAEEEFNIEKGKLVSHQRQKILEYYEKKEKQVELQRKIQRSNMQNQSRLKCLKARDDHLKNVLEEARANLSKISADRERYPAILKGLLLQGLFQLLESKVVLRCR

SEQ ID NO: 121725 - protein, 112 aa, Heterodera glycines
KKKEELMKMLEEQKTELASLQVSKVTNGAVSKLSSIHVVRIIIARILTVINQAQKMILLKFYKGKKYRPIDLRFKKTRAMRRELTKHELSLKTHKQKVKERRCPTRIYALKA

SEQ ID NO: 121726 - protein, 127 aa, Heterodera glycines
  unsure (1)..(127): unsure at all Xaa locations
RDSGISLAQSTTSHYSCFAKIYFPTLFDFGFKQYSLDTVELSQVPHKAFRSINADRFYTLWXSLTEEQFQRRFILIDCRYPYEYDAGHIWYSLNLWETTSIEKLFYPEEEERFGEIIVRTPIFYCEY

SEQ ID NO: 121727 - protein, 100 aa, Heterodera glycines
NGEWRVFSGNEMGILLTWWAWTNWRAANPTADSSRVFVLHSAVSSQMVATMAKKEGFKAAHSSTGSKYISNLAHKLRSERNTVIAGWEESIGFTPGSTLD

SEQ ID NO: 121728 - protein, 189 aa, Heterodera glycines
PPLFPEKVESIRYLSTKSWEATFTKDYLSNEGQLRFLSFMCYLAMAHYLLYRGFFSKGVFKLRKLEDLAIYCFDGNTRWGRKLSEMMKGIREAIDQKYIKQAFVMINEDKEDPDVATEVFSVGFCYNEQHTMTVLDDKGNRIVSFGYKGEKVFRMQVKHIIKKLSVVTKNLEPLKKGAVPYLKLTYYEN

SEQ ID NO: 121729 - protein, 184 aa, Heterodera glycines
MLESRQIVNTLEEITSRKIKSRFITLKEAFSRLKIDPVDKSLIFDDKYVVAVLVDRIGREISDAELALCVEFERSTAIKSRPMSFFVSHTKRMQQVLSTPGIVERFFTGPGEEGMAQAIRKVQIKGWPIGADENIEEGIRQKAMENPQDYVLKANDCGPTGTYFNEDMVKKLKSMAPAERDFYY

SEQ ID NO: 121730 - protein, 176 aa, Heterodera glycines
  unsure (1)..(176): unsure at all Xaa locations
HTTILSEKKVKKVKKKSRTGSEASSFDQETFYEFKEAFGIMDQDKDXSISKQDLIDLYATLGVVASDSQMDNMLKEAPGPINFTVFLTLFGERLTGTDPEATIIGAFQMFDKTDCGEITEETLMKILKNKRGEPLTEDEVQGMYKGNPPISGGKVDYKAFAHLITTGAAEELAKVG

SEQ ID NO: 121731 - protein, 141 aa, Heterodera glycines
PQTFPIFVGDLSPEIDNKTLKDAFVPFGDVSDSKVIRDPTTLMSKGYGFVSFPKREEAERAIEQMNGQWLGRRTIRTNWATRKPGAMGGGVEYSSKPTVDEIMAQTSPENTSVYVGGVPPGATEEDIRSTFRRFGNIVDIR

SEQ ID NO: 121732 - protein, 171 aa, Heterodera glycines
MLPNSSSILLLHNLRKQSVNALPLGRQAVHNDVQFPNFDAYRNELTKDPAQPSHVTEDRRKGVSSFIFYGVGGAITLMTAKFAVRKAVTYKWMPRDQAAMAATEIDLSLVPLGKTKTFEWRGKPVFVKHRTAKEIERERAAEVGKLRHPERDEDRVLKPEWSVLIGVCTHL

SEQ ID NO: 121733 - protein, 161 aa, Heterodera glycines
  unsure (1)..(161): unsure at all Xaa locations
GNQQQRDQKVAAQKEADKEKKPKYAHLLAKAHKQRELSKLLVEDNTYKKEREKEAGQFEDEXLFVTGAYRQQIEERERHKTEMEREEALEKMRDVRDQKMWRQAFNRTMLENISRGPLTEEGKMEEDDGAEEKRIKTEAKTEKMAKMGVKEEAIYKKKNKK

SEQ ID NO: 121734 - protein, 168 aa, Heterodera glycines
MDHNYWQAHPNNPLVNRPERNGTTEQNGAMSSCSHPQRASGEPNQLNVVLVDGTEVVVKIHNVLCCYELPMHIDLRQVAYGSINVDYNRAKGILHKQLRKPSCSIRIANSGKVVIHGCKSEEDCKRVARAIGRMIQRNTGRLDQRICIRNYRVSNILATCRMPFDIRI

SEQ ID NO: 121735 - protein, 113 aa, Heterodera glycines
  unsure (1)..(113): unsure at all Xaa locations
HRQKNNSFSISFKDITLHDVWASNLFXEFAKLLDLIDDYPFVAMDTEYPGVIATPVGQFRSKEDFNYQQLRLNVDCLKLIQVGFTLMNEKGQLPPARDIFQFNLHFDPSTDSF

SEQ ID NO: 121736 - protein, 186 aa, Heterodera glycines
MAPAPEKEKTEDKKLKDGQKPNVTTDHAHCLSNVQPNLPVNKVVVHPLVLLSVVDHFNRVNKTHKVNRVVGVLLGCMKHDKTLDIANCFAVPYDEDSENSNIFFLDADFLEDMFGMFYKVAARERIVGWYHSGPRLCKNDILINEVIKRFTPNPVLVIIQASQGRQDLALPTDAYVEVQEVHNDGS

SEQ ID NO: 121737 - protein, 134 aa, Heterodera glycines
INAILDGTDGDEALNLNDLDEKEVLGDDEEDQHQNQHTTKEEVEDLYDEAMAPSGALSEKRESAEVISSLPSSIQHKSSFAMPMMIKSEPGIAGGSQSGKRYCCYIGNMTWWTTDDQLQKLIQTLGVDDMIDVK

SEQ ID NO: 121738 - protein, 147 aa, Heterodera glycines
MNEEYCFSTSTVVAQSWAQTNFRPVDEQPNSLVDTLIAKLSCTTFEQFTSEVSAQDIHKLCDVTVGVLQQQSMLIHLQPPVVLCGDIHGQFRDLLRIFKTMGFPPDKKYLFLGDYVDRGTQSLETMVLLFCYKVKYPDSVILLRGNH

SEQ ID NO: 121739 - protein, 194 aa, Heterodera glycines
  unsure (1)..(194): unsure at all Xaa locations
MPELPFKTITQQSFQLKLXETATIGEVKRKIQQVKGAEYPAENQKLIFNGRVLEDAMLVSELNFAAPKFIVIMVMRKPAQASSTVRPATSSASPQKNTSTADGQAPKAEKSAENKATGATSNTSVAQPGAATGVPAEHAQTVANIEAMGYPRQEVVRALQAAFFDADRAVEYLCNGIPEGLSLQESNSDADNDA

SEQ ID NO: 121740 - protein, 210 aa, Heterodera glycines
  unsure (1)..(210): unsure at all Xaa locations
MGKEKIXINIVVIGHVDSGKSTTTGHLIYKCGGIDKRTIEKFEKEAQEMGKGSFKYAWVLDKLKAERERGITIDIALWKFETSKYYVTIIDAPGHRDFIKNMITGTSQADCAVLVVACGTGEFEAGISKNGQTREHALLAQTLGVKQLIVACNKMDTTEPPFAEARYTEVMTEVSNFIKKIGYNPATVPFVPISGFNGDNMLEPSDRMPW

SEQ ID NO: 121741 - protein, 205 aa, Heterodera glycines
  unsure (1)..(205): unsure at all Xaa locations
HCGGEFSLXSVLHALLLFPGLPAHSSKECILLIASLSSVDASPLRHTFEQLKMRSVRCSIVSFGAEVFAFKRLCATTEGKYSVALDEQHLELLLDEHVQPPPVQRRPGQQDSIVRMGFPQLRRVTEPSFCACHELNGEAAPPSAIDGAADEKASSSALPRAFFCPQCGSRYCQTPVECRICGLLLLTAPQLARAHQHLEALPTFA

SEQ ID NO: 121742 - protein, 172 aa, Heterodera glycines
  unsure (1)..(172): unsure at all Xaa locations
MPNIQKLLNYTEHFNYPYVSEVTYYEQLLKIGQGTFGEVFKARCKRTGKLVALKKILMENEKEGFPITALREIKMLQRLRHQHITELVEVCTSKQKSGKEKFCFYLVFTFCEHDLAGLLSNTQVKIRLVDIKTMMQHILRGLHKIHSSQILHRDMKAANVLITXTGVLKLAD

SEQ ID NO: 121743 - protein, 143 aa, Heterodera glycines
TDKKFTTPAASQNIEDQIAADEKAIERYLQASLDSTQRSRQQLSSSEGLAESTARELLEQREKLERAEQNLDTIHHTTQHTQRSLNSLKSWFGGLVRNKLSRAPKGLGTANANANNQQQQLEQTVQQQHQQRPLHAHLVQSSA

SEQ ID NO: 121744 - protein, 164 aa, Heterodera glycines
SEIKISPIAVFEVERNWAYAMQMKFEMIDSPLSRKKFHMRQKLRRAVKSAHFLHSLIDDNPLVHEVTRVETVSYVSFIFGSLELELKNWKRAIETFDRARIGYSELLEQVRNSDLSETYATKCREVENLLILCRAQTGDANVLLSTVSSVNLNASEDDRKPSPE

SEQ ID NO: 121745 - protein, 80 aa, Heterodera glycines
QLSVLGQLNKARKPNFVIVDKNTSVAEIEDAFRTFCTRDDIAIILINQHVAEMIRYQVDQHVASIPAVLEIPSKEMPYDA

SEQ ID NO: 121746 - protein, 176 aa, Heterodera glycines
  unsure (1)..(176): unsure at all Xaa locations
QFSDLQRILQRXGPPPEQQYMFLGDYVDRGAHSMETIILLFCYKIKYPSNFMLLRGNHECSNINKAYGFYEEIDRRYPRPGARRLFDLFNQVFAWMPFVGLIGEKILCMHGGISDKMRSLDQLSTLRRPHTRPPLRSLEIDLLWADPAQGIRGVVPSTRGAGILFGEDLVAQILTR

SEQ ID NO: 121747 - protein, 117 aa, Heterodera glycines
MTNYEMIKVERVGADDVVALITLNRPKALNALCSQLMDELAHSLTYLDKDDGVHAIVLTGSERAFAAGADIKEMVPKKFAEVFGGGFLENWSQVATVRKPTIAAVNGHALGGGCELA

SEQ ID NO: 121748 - protein, 207 aa, Heterodera glycines
  unsure (1)..(207): unsure at all Xaa locations
YGFVSFPXREEAERAIEQMNGQWLGRRTIRTNWATRKPGAMGGGVEYSSKPTVDEIMAQTSPENTSVYVGGVPPGATEEDIRSTFRRFGNIVDIRYFKPQGYAFVKYETKLAAGKAIHEMNSNKFMGQTLRLNWGKVDGGGTKTTEPTSFGTNTAPTGMFNSSSTASSQAASAQMQQYWQYYQQYYQQNPLWNGYWQGGATGNGQQK

SEQ ID NO: 121749 - protein, 200 aa, Heterodera glycines
  unsure (1)..(200): unsure at all Xaa locations
MQTGRFGDGRLVKMEVDYSAQVDSQLIVADNLAKEGKTAEAIESLEKLEKDSRINCDMRSNQRLLCHMVKLAFDANNWQLLCETAKTLCKKRLLIKSSIKKMVQECCEMVPKAPDASSKSTLIDTLRAVTAGKIYLEVERARLTKQVAEKLEAEGKLDEAREMMMELQVETYGTMEVEEKVNYLLHQMRXSIANNHFTRA

SEQ ID NO: 121750 - protein, 162 aa, Heterodera glycines
LNFLIKKDVAFVLIKPSAEQNKTFPVLVVIHGGAYEIGSSARYTKYEVIGQRFVTDANSRGIVFVSIQYRLGVMGFATTGDEELPGNLGIWDQISALQFVKDNIAEFGGDPSRVTVFGYSAGSGSTALLSISPKSRDLFQQAIRMSGTPFSVSGSGTFVAEE

SEQ ID NO: 121751 - protein, 162 aa, Heterodera glycines
MSENKSEGGAEKKKSGGFNTKKFLLDLASGGTAAAVSKTAVAPIERVKLLLQVQDASIHITADKRYKGIIDVLVRVPKEQGFLSLWRGNLANVIRYFPTQALNFAFKDTYKRVFTQGVDKEKQFLKFFAMNLASGGAAGATSLCFVYPLDFARTRLAADVGK

SEQ ID NO: 121752 - protein, 217 aa, Heterodera glycines
YGLCGIGGILSCGITHTAIVPLDLVKCRIQVDPAKYKGIIGGFKVTLQEEGVRGLAKGWAPTAIGYSMQGLGKFGLYEMFKNVYAGMIGEELAYSCRTYLYLAASASAEFFADMMLAPMEATKVRIQTSPGAPPTLRGCAPFIYRTEGLMGFYKGLPPLWMRQIPYTMMKFACFERTVELLYKHVVPKPRAECTKPEQLVVTFIAGYIAGVFCAIVS

SEQ ID NO: 121753 - protein, 164 aa, Heterodera glycines
  unsure (1)..(164): unsure at all Xaa locations
MAARKTVARRARPQRATSNVFAMFDQPQIQEFKEAFNMIDQNHDGFIDEHDLKDMFASLGKEVSEKFIENMVNDASGSINFTMFLTLFGEKLTGTDPEEVIKNAFQCFDEDNSGTIAEDRLRELLTTMGDRYTEEQVDELFRDAPIKNGRXDYVEFTRMLKHGT

SEQ ID NO: 121754 - protein, 177 aa, Heterodera glycines
  unsure (1)..(177): unsure at all Xaa locations
PLPAPFPLPPPPLALTVPHPRPALLSGHVLAPRPLPTWEEIRAAVPKECFEKSLLRSLLYSAMDFLLLGXLYACVPFVDTDFGLIGLFVWYCLLGMYVSSLFCLGHDCGHGTFSDWTWVNDIFGHISHALLMVPFWPWQKSHRQHHQFTSHVDKDKGHPCVLEDDYEGGGWLRKHFA

SEQ ID NO: 121755 - protein, 209 aa, Heterodera glycines
KKNPSYKKFYGEINFAFGSALLVVLFVICCVNFADATQPNEDDNEAKDQLLAIGAFELKRMAQYAIEWCHNNALILRRKEDEGNRGDAALFPPLTLFPSPFPRDAFEQALKAQKAMNLLYFRVARDYEFLMNAYKDVIKGDEHIAKLVDILKKVHEEGIRQPITVMLQRADYLLDVVENNDTNEVKYEPKQVEVNTGAIGATGLKRRTT

SEQ ID NO: 121756 - protein, 80 aa, Heterodera glycines
YLRKNWGPIGINIWQVKSGPIFDNILVADSVEDAKKHAADTFDQLKEAEKKQKEAHDEEERKKFEEEEKKRKKKKKKEKK

SEQ ID NO: 121757 - protein, 94 aa, Heterodera glycines
TTMIEFLLLNGAKINGLDGGKNTPLHLAAERGHTIIVYQLLKRNAEKTHQNVNGRTALELAVERCHADIVTLLRLHDMKEEFNDDQNSTMDETV

SEQ ID NO: 121758 - protein, 194 aa, Heterodera glycines
TEPCRWVAEVRHELTNVTKCIIEFAKMVKEFLELEQDHKIHALKKTTFDLAIIAMAQHYHQQSQTLHVNNLVLPVYQFRCSDRKDEEFGKEFISRLQYLSSFQLTSTETALLSAFVLMDQSQAPGMEAFVGQLKSCLGGQLHQRMPDGDEALRQLLEFLPRLRELAKTHRKCLGRFRLQMVDQQSEHQTDRGAA

SEQ ID NO: 121759 - protein, 167 aa, Heterodera glycines
GKKAQVQIGNVMPIGELPEGTTVCNLEEKAGGRGRLARTSGNYAIIVAHNPDTKRTRIRLPSGAKKVVPSANRAMIGIVAGGGRTDKPLLKAGRAYHKYKVKRNCWPKVRGVAMNPVEHPHGGGNHQHIGHPSTVKRGTSAGRKVGLIAARRTGRIRGGKPEKRGKE

SEQ ID NO: 121760 - protein, 119 aa, Heterodera glycines; identical to SEQ ID NO: 121530

SEQ ID NO: 121761 - protein, 182 aa, Heterodera glycines
QGETDLQLERINVYYNEAHGGKYVPRAVLVDLEPGTMDSIRAGPYGQLFRPDNFVFGQSGAGNNWAKGHYTEGAELVDNVLDVVRKEAEGCDCLQGFQLTHSLGGGTGSGMGTLLISKIREEYPDRIMSSFSVVPSPKASDTVVEPYNATLSVHQLVENTDETFCIDNEALYDICFRTLKLQ

SEQ ID NO: 121762 - protein, 193 aa, Heterodera glycines
MSGWDAYIQSLTSSCAEITRVAIIGNSDASVWARTEGENEFKASEPELKKLVGQFDDLSQVPSVGADLEGIHYIVPRTDENLIFGKRDKTGFFAVKTKSAILIAIYKDEESVVGADVRGAVEKMAKYLEDAGYRAVARFPKRLLCCQTKSAENGDLFFQMHSFSIPNDHLLFYYYTFCEVRVPISFLLFDLWM

SEQ ID NO: 121763 - protein, 132 aa, Heterodera glycines
CSCSFASAHALTPERVGCAQAMGHCAASLDHADLVLTELENIAKWEHTKKGISGGVGGAAGSGSSSSGGGIFSYIRDYSFGRTVDVEVLNLRATLVLSYGYVVFYCPTEGLVLRLQQTVLPFLRQYTANAKK

SEQ ID NO: 121764 - protein, 133 aa, Heterodera glycines
MMRKHREYWSNRGISSPTPQLISGNFGSLYGNYPSMFQLRDWTRQYGKQYGVQYGWRNALVISDPAMVHELLATKFEYFHARNLSPIFGNLDTNKWISMFLARGGRWKRLRTIANPAFSVANLKKCMCPIDDS

SEQ ID NO: 121765 - protein, 230 aa, Heterodera glycines
SFWFLCSLFGLFLLFFLCFRAGIRCLKRVENVTRSPVFEHLTTSLDALPTIHAFGQTQRFVEQLKQHLDENSGALFLYHSAMRWQAVWLDLLVVGLTFFVSLFIVLLTGRIDPAEAGMAIAFAMQMSGIFQFAVRSQTELEAKLTSVERVSFYYKNIEVESDKDGDDPAELGPAWPQSGTLEFDHVILRYVPQMNPALNDVSFIIYSGQKVGIVGRTGSGKTSLCNALFR

SEQ ID NO: 121766 - protein, 150 aa, Heterodera glycines
MTTTITLPLHIAVENNQTTMIEFLLLNGAKINGLDGGKNTPLHLAAERGHTIIVYQLLKRNAEKTHQNVNGRTALELAVERCHADIVTLLRLHDMKEEFNDDQNSTMDETVESFIGDLAAKQQHLRIKSGQSEPKPNNEEEGEEKIVEKL

SEQ ID NO: 121767 - protein, 67 aa, Heterodera glycines
LKLRKFVLLFVRLYTVKPAKEMGKEKIHINIVVIGHVDSGKSTTTGHLIYKCGGIDKRTIEKFEKEG

SEQ ID NO: 121768 - protein, 176 aa, Heterodera glycines
YANVVEWRVGDATGLQFDEGSVDLVFTNWLLMYLADQEAVQFVANALQWLRPDGYLHLRESCSEPSTKKSADHSTTTTTTSTSSSSSSSLHNNSKPNPTRYRFSSAYIQLLRSLRHTDVQSGTQWRFDVQWACSVGVYIERQSNWRQVHWLAKKSACNISRKQHPKIYWIVGHPIC

SEQ ID NO: 121769 - protein, 166 aa, Heterodera glycines
  unsure (1)..(166): unsure at all Xaa locations
KMPRILAKVEGKGNGIKTVIANMPEIXKALSRPPTYPTKYFGCELGAQTNFDLKNERYIVNGEHDANKLQDILDGFIRKFVLCPSCDNPETVLTVKRQVINGKCKACGHAFIVDPKQKLSTFILKNPPPPDNIESEKEVKSDGGLPAEESNDVPVVDNSGGCDAGS

SEQ ID NO: 121770 - protein, 167 aa, Heterodera glycines
MNEEYCFSTSTVVAQSWAQTNFRPVDEQPNSLVDTLIAKLSCTTFEQFTSEVSAQDIHKLCDVTVGVLQQQSMLIHLQPPVVLCGDIHGQFRDLLRIFKTMGFPPDKKYLFLGDYVDRGTQSLETMVLLFCYKVKYPDSVILLRGNHECSNMNRAYGFFEEVERRYG

SEQ ID NO: 121771 - protein, 123 aa, Heterodera glycines; identical to SEQ ID NO: 121314

SEQ ID NO: 121772 - protein, 178 aa, Heterodera glycines
  unsure (1)..(178): unsure at all Xaa locations
GSGSLSXAIAPAVAPDGHLYSFDIDEKRAKTVHNDLKLHGLSQNATVLCRDVSQHGFAATDCAEKEWRCDGVFLDLPAPWLAIGHAHKVLLQNGPERRPSRLVSFSPCIEQVQRVCAELEQHGFVDIETVEVVPRKLKVVDLPCESLSEYAAKGANAQTFFQKESQQNNTDCEQQRQK

SEQ ID NO: 121773 - protein, 216 aa, Heterodera glycines
  unsure (1)..(216): unsure at all Xaa locations
GGFAPSESAAPITVXNGSVPSGSKAGPTPQNGANGVAATGANTVPLGSNGNVVPSAPVPRVGSSLPPPSCIGWAATIGKRHRDEYIGDFVYQAPRREEKIDVIASVVRRCIESFKKNRNKLPLRVVILRNGCTEGQFEYVMKYEIPLVKKELEELGCTAKLTVIVPNRLQDVRFLRQDAKPEDKSNEQNIPPGTVVDTVVVHPKRSGFFLNSHVAI

SEQ ID NO: 121774 - protein, 210 aa, Heterodera glycines
EEGDKRKRRPEDQEKYTEDEELNKTKPIWTRNPDDISNEEYAEFYKSLSNDWEDHLAVKHFSVEGQLEFRALLFVPQRAPFDLFENKKSKNAIKLYVRRVFIMENCEELMPEYLNFIKGVVDSEDLPLNISRETLQQSKILKVIRKNLVKKCMDLFEEISEDKDNFKKFYEQFAKNIKLGIHEDSVNRKKLSDFLRYYTSASGEEPCSFK

SEQ ID NO: 121775 - protein, 128 aa, Heterodera glycines
MSILTASKVCTLPRLSSARSMTWWWGPEKNNGREVVGPTFHGDEFYQDRLDRWYPSIRFRKNDEVITPIRHKELGDWKKLSIEEKKLIYRYSFRQTLVTFRRTFSLALALFRFDSLLLFFLFRPSLRH

SEQ ID NO: 121776 - protein, 173 aa, Heterodera glycines
  unsure (1)..(173): unsure at all Xaa locations
HMLFLCRLTENTPPLKGEPDKVLLRVYFNPETESHLVAESVIFTLLSERHLGPKLYGIFSGGRLEEYIPSRPLTCHEIALPTMANKIAKRLARVHQLEVPIWKEPEYICDALERWLIQLKQMPSGSRDFDLPAESHEWAPPSINCEDLQKEIEHLRRLIVKSRSLVTXCHNDL

SEQ ID NO: 121777 - protein, 148 aa, Heterodera glycines
  unsure (1)..(148): unsure at all Xaa locations
ESGQFYVPDEPKLAFVVRIKGINKIHPRPRKVLQLLRLRQIXNGVFVKLNKATIQMLRIADPYIAWGYPSQKIIRQLVYKRGYAKESGQRIPITDNAIVERNMGKSDVICVEDMIHQIWTVGPHFKQVTNFXWPFKLSNPVGGFKKKS

SEQ ID NO: 121778 - protein, 187 aa, Heterodera glycines
MKLIELLPFCFAVSALLLPSQTDGMQIFVETLIGRVITLEVESSDSIENLKRKITDKEGIPADDQRLIFAGKQLEDGRTLADYGVQKEAKIHLVLRLRGGMQIFIKTLTGKVITLDVDSMDSVENVKRKITDKEGIPADHQRLVFAGKQLEDGRTLADYGVQKEATVHLVLRLRGGGSMMNFDDDVL

SEQ ID NO: 121779 - protein, 162 aa, Heterodera glycines
  unsure (1)..(162): unsure at all Xaa locations
VKNADGXHFCRLLDLGRSEQRNATSGDTVFNYVVMTVVGTPLDKLIRNAGDRFSPGTAIGMSIQLLSAIKALHNVGFLHRDIKPANTAIGRAETNEHRLLYLIDFGMARQFLRPDGTQRRPRASANFRGTPIYAPXSLHISSVTTAAKMTSNRGSMSWSNST

SEQ ID NO: 121780 - protein, 173 aa, Heterodera glycines
  unsure (1)..(173): unsure at all Xaa locations
LCKRLVYDTSASEEQERCMIAKLKPXCGFEYTSKLERLLTDVALSRDHSEQFKQQPRTSNVDFSVIVVMSNVWPLQQPVKFEIPRPLLDCIDSYTQYYTNRFNGRKLTWALQMCRGELVSTSNTFPSKYSFLCNTQQIAVLMQYNERNTYTLGELHVALGTDPGDQLCAAVQS

SEQ ID NO: 121781 - protein, 98 aa, Heterodera glycines
MSTGNVMMMMSPKRMDKGNGGEKGQRQKAPGKERPKDGKERVHKCDQCQKAFRFKSNLFEHKSLHLGSSSRNPFVCPFCSKTCRLKGNLKKHLQVHVT

SEQ ID NO: 121782 - protein, 98 aa, Heterodera glycines
  unsure (1)..(98): unsure at all Xaa locations
VVWRVKGWVTEVKNXGMCGSCWAFSATGALEGQHVRDKGHLVSLSEQNLIDCSKKYGNMGCNGGIMDNAFQYIKDNKGIDKETDYPYKAKTGXKCLFK

SEQ ID NO: 121783 - protein, 118 aa, Heterodera glycines
MTKDGQKRRERLHDCVGEHNVRMVAKYYSRITFQRMAKLLEFGIEQMEAFVCKMIVDGVIPEVKIHRPSQIIYLSPKKNGAEVLDEWVFNVRKLTDTMNKVSHLIAKEEMVHGLQIPQ

SEQ ID NO: 121784 - protein, 182 aa, Heterodera glycines
TIERTLEAHPNGRPVLDVIRQLFQSRISQTISCANCLRTSETVGEYRSLQIGIDGHSTLISAIQAFFAPEPLRDFRCDQCRETNCVTRSSRFTQLPELLIVQLNRYVLASNGNLRKLQNAVHYPRLLTELGGEGIPDYELCAVMIHEGKSTNSGHYYDVIRDPVIDRWFTYNDETVNQKRTA

SEQ ID NO: 121785 - protein, 164 aa, Heterodera glycines
  unsure (1)..(164): unsure at all Xaa locations
GIETVGGVMTKLITRNTXVIPTKKSQIFSTAADNQPTVTIQVFEGERPMTKDNHLLGKFDLTGIPPAPRGVPQIEVTFEIDVNGILHVTAEDKGTGNKNKITITNDHNRLSPEEIERMINDAEKFAEEDKKTKEVVEARNEFESYAYSLKNQLGDSEKLGGKLS

SEQ ID NO: 121786 - protein, 155 aa, Heterodera glycines
TDFGLNSKVAAAICEAADDVISGKLDEHFPLVIWQTGSGTQSNMNVNEVISNRAIEILGGELGSKTPVHPNDHVNMSQSSNDTFPTAMHVAVAVEINTRLLPSLRLLHDELSKKSKEFEHIIKIGRTHTQDAVPLTLGQEFSAYVTQIGNGISRV

SEQ ID NO: 121787 - protein, 167 aa, Heterodera glycines
VRPEKLADCFAEILEKLTEDQGRDDVDVRVIVYQSHAGAIIGKQGSKIKELRELMQAHIKVFQECAPQSTDRVVLITTQQSKMPDAIKHLMEFMREVPIKGPTKPYDPSSHDPRIVQCYGGFSGPMPPPPMGGPPMGMHGGGGGYASFGPRGGPPMPGGMGMPGGFM

SEQ ID NO: 121788 - protein, 219 aa, Heterodera glycines
RKFVLCPSCDNPETVLTVKRQVINGKCKACGHAFIVDPKQKLSTFILKNPPPPDNIESEKEVKSDGGLPAEESNDVPVVDNSGGCDAGSNGEDDEDWAPEPVEDEEKLSGQIGKLVIDKDLDKSVDERLDLLHQFFLKAVKNNTIQDSKMMLNEAERLELKSKAPLLLADVLFDTNVITQIKQHRNLLLRFCLKDEKAQRILLGGIEQLVQNNKDILMS

SEQ ID NO: 121789 - protein, 236 aa, Heterodera glycines
  unsure (1)..(236): unsure at all Xaa locations
MLSNIYFTITKCDCMRLSFFPAVRQVHQMHTQSAVEKAKGARPEEGIPLKGEPHRPPSLFDDIGKYHLYEPLPKVPKDFKEFPERDLVNFPYPEKAEYPPRTRFVAIPDSWCREIEKVTGTSGPYLFFGGLLAXFLLNKEIIIMEENFCCFVFGWINIYLFFHTAFRYKFEKYVYKVTRERFGKMKAYIDNELKEAVEFRKTSKEHADSLKAVHENFPTXFQENLALQLEATYRKM

SEQ ID NO: 121790 - protein, 248 aa, Heterodera glycines
  unsure (1)..(248): unsure at all Xaa locations
NGWVTQIATNPLYKNMLVSASRDKTIIVWMLDESGSVLNGKPIKSLHGHGHFVSDVVMSSDGQYALSGSWDKTLRLWDLNTGQTTRQFVSHTQDVLSVAFSADNRQIVSGSRDKKIKLWNTLAQCKHTIVEECHSDWVSTVRFSPSHANPVIASAGWDKIVKVWNLATCRLKTNHFGHTGYINSVTVSPDGSLCASGRKDGSAMLWDLNDGKHLYTLXGNDVINALAFSPNRYWLCAAGGPVVKNWDL

SEQ ID NO: 121791 - protein, 98 aa, Heterodera glycines
KVIVVGRKLPTANDPNPTLHEMVIFASNHVVAKSRFWYFTSMLRRVKKTHGEIISCQEVFEKKPGSVKNFGIWLRYDSRTGHHNMYREYRDVCEAGAV

SEQ ID NO: 121792 - protein, 247 aa, Heterodera glycines
  unsure (1)..(247): unsure at all Xaa locations
KKGVEFVLVGHPKGHSGDSIHHQMKSXELSTEVFTQSVLISTVNRIKNRSSGETMENIVNKTNVKMGGLNYALPIISDGMPMETLVIGFAVNHPAGGFGMDSDQKNGNGSNGTSDTGSDAASDNGNGANGHKPQKKPQVFEKSVPSVVGYSANIGENNNFEFVGDYKYQEARRDEKLQIIDHIVRHCLEMYKQRRNNKNPSSLIIYRNACGEGFYQHLLAYEVPVXKRLLAERCNGTKLTLIVVNKL

SEQ ID NO: 121793 - protein, 106 aa, Heterodera glycines
  unsure (1)..(106): unsure at all Xaa locations
PKLKKFYXELKKAGKNFEVLFVSRDRAAKDLVEYYRDHXGAWAYLEFGNPKIQELLEKYEVKTIPTCKVIKPDGTIVVNDARTEVQEKGVENALGLWEEWLGFYEA

SEQ ID NO: 121794 - protein, 71 aa, Heterodera glycines
KMKEIAESYLGHEVKNAVVTVPAYFNDAQRQATKDAGTIAGLNVVRIINEPTAAAIAYGLDKKEGERNILV

SEQ ID NO: 121795 - protein, 255 aa, Heterodera glycines
MRTCTTQKNLLHSVLMNLQSKHHFLALCALRLIRRIIGLKDDTYIRHICDKGTLDQIVQCFVANGQRYNLLNSSLIELFEFIKRERIYPLIEYLINNHWENTFSKVDYVQTFVKMHDIWEAHLANKSDEGEKVKENGQTTPLAMTPPNAQWRKEREHDDEELFFSKDDDDEMPTAQCRKSGVDPLFPSLLRKRKANDEDGIASVFGGNITPPAGGAVSVSRISKIVIRMSSKEPSSAAVPLVTAGGGQSKRSTYK

SEQ ID NO: 121796 - protein, 238 aa, Heterodera glycines
WPNQQQQQQRERAHRPPPHHPGASMRMPDMHNQQQQQQQGGFWSGKSGGSMAWMLPFYTVGVVCFLLYTLFKIMFKSKTKRQKRRRDRPLDLLYGDDDDDEGTEDGLEYGVRGAKLRSVQHRLRKTEQAMADILSQLEQISAHSKDINDDDTKAAEKNVNDPNIANAQNEEENAETLQEKDGTLREAQSAKVEQSLRELKMLSDLCKSDRRLRRLRAAQRQQNLHSSSSANSDNEFLG

SEQ ID NO: 121797 - protein, 168 aa, Heterodera glycines
IVVGRKLPTANDPNPTLHEMVIFASNHVVAKSRFWYFTSMLRRVKKTHGEIISCQEVFEKKPGSVKNFGIWLRYDSRTGHHNMYREYRDVCEAGAVTQCYRDMGARHRAQADRIQIIKVQTISVADCKRAGVKQFQNSKIKFPLPHRVNSKRRNMTPFTTQRPRTHFV

SEQ ID NO: 121798 - protein, 111 aa, Heterodera glycines
LQLYIIYTLLGLERHLVMVHGLVTADLLAKAQRKADSGRCKLCSKQYAVAPPTKSWNGIWRRNIRTPGPTSNSSNINNSSSSSNAFQLICYGTEMGRGAKWRTNSKHVNNS

SEQ ID NO: 121799 - protein, 160 aa, Heterodera glycines
MPRGTTKTVAQRRGGRRPREAEDHQLTDEDKDRRAKRRERNKQAAARCRRRREEKMQSLQEQVDELRKQNERRENEIRKMREKEQRLLEMLRLRNGGIVQQQLHHHLQAVHVQQQHQSVADHPTVSRPTSLLQPFLVGLNNKKRFCEAPAVPSSSSSAAS

SEQ ID NO: 121800 - protein, 172 aa, Heterodera glycines
  unsure (1)..(172): unsure at all Xaa locations
SVDSFLLCAMISNEREHLSSEALEAARICANKYMVKNCGKDGFXMRVRIHPFHVIRINKMLSCAGADRLQTGMRGAFGKPQELVARVGIGDMLMSVRVRDQHQAHALEAFRRAKFKFPGRQYIVISRKWGFTPFDREVYEKHRKEGRVIPDGVNCRFLKQHGPLTEWLKNPI

SEQ ID NO: 121801 - protein, 195 aa, Heterodera glycines
LSHRWHQKLFHCRFALFNFLRRPLPSLVFRRSLFKSPLDAPFCGIYRTNGGICRTDDILVCQRKMDYHLGANVRHQRGRNQHLLKANCDGTVVITRGKTFEEFKQEYERESVSRRAAFTRGTIFTVLFYPGIFVGILAVISVMSHRWHTYHGTGRELRPVSNAFVRFVAAFFGCYSYFPYNTDPDPEPIAVVEKE

SEQ ID NO: 121802 - protein, 173 aa, Heterodera glycines
EDEGEEESTTYTNILGEEKDVTKGVGAMLKLAGQKGYLESGERRLEEGKLKHLESKRFSKVEQGRYDIEDKTMRKLERMGTAGTGPTRPFPEKAEYEPKIEINYADQKGRILDPKEAFRVLSWKFHGKGPGKKQAEKHAAQVVKREKLKKMNSMDTPLGTLNKQSKKQEQLQA

SEQ ID NO: 121803 - protein, 217 aa, Heterodera glycines
  unsure (1)..(217): unsure at all Xaa locations
MPEELVALSPGTRVSGRWTIIKKLGAGAFGAVYLCQDRDGRTMAALKTDXFYAQRPLLYMEAHVLLTLNELRSNSGRHFCRCLDLGRDEQPDADSGQTMEFNYVVMSLVGRPVDKLLHESGDRFSPGTAIGTSIQLLKALKALHSVGYLHRDIKPANSAIGTPETNEQRLLYLLDFGMARKYVREDGTHRRQRDTDRFRWTPIYAPISAHIKRDYSR

SEQ ID NO: 121804 - protein, 240 aa, Heterodera glycines
  unsure (1)..(240): unsure at all Xaa locations
CQFSADGQWLASACADKTVKIWSTVDGKLENTIQGHKLGISDVCWSYDNRMIVSCSDDKTLKLFDVQQGKTLKTFRGHHNYVFCCNFNPXSTLLVSGSFDETVRIWDIRNGNCVRTLPARSDPVSAVAFNRDGSLIATSSYDGLVRIWETSSGQCMTTLFDNENPPVSFVKFSPNGKYILAATMDSQLKLWDFNKGKPLKSYQGHVNKKYCIFANFSVTGGKCIVSGSEDNRIYIWNLQT

SEQ ID NO: 121805 - protein, 203 aa, Heterodera glycines
  unsure (1)..(203): unsure at all Xaa locations
GACGTREFEAGISKNGQTREHALLAQTLGVKQLIVACNKMDTTEPPFAEARYTEVMTEVSNLMQLFIGYNPATVPFVPISGFNGDNMLEPSDRMPWFKGWAIERKHGIASGKTLLEALDSILPPQRPTDKPLRLPLQDVYKIGGIGTVPVGRVETDVLKPGMVVTFAPQGISTEVKSEEMHHESLPXALSGHNVGFNVKNISV

SEQ ID NO: 121806 - protein, 171 aa, Heterodera glycines
  unsure (1)..(171): unsure at all Xaa locations
TEKKVKKVKKKSRTGSEASSFDQKTIQEFKEAFGIMDQDKDGVISKQDLKDLYATFXVVASDSHMDNMLKEAPGPINFTVFLTLFGERLTGTDPEATIIGAFQMFDKTDCGEITEETLMKILKNKRGEPLTEDEVQGMYKGNPPISGGKVDYKAFAHLITTGAAEELAKVG

SEQ ID NO: 121807 - protein, 98 aa, Heterodera glycines
  unsure (1)..(98): unsure at all Xaa locations
QLYIIYTLLGLERHLVMVHGLVTADLLAKAQRKADSGRCKLCSKQYAVAPPTKSWNGIWRRNIRTPGPTSNSSNINNSSSSSNAFQLICYGTEMGRGX

SEQ ID NO: 121808 - protein, 233 aa, Heterodera glycines
  unsure (1)..(233): unsure at all Xaa locations
PYLKAKSAKNVRFFLASXQFLASMSSYNYMRSVWKKNAMDLLWDNSFFKMDIRALRQWLYLIDNLMTNDKTSFKELLTRITTSTSTTLSTLITSKEQEYEMRAQYLKRLAFVILSSELDQYAGQLNEIQERLTENLRLCQVPVIHTQVFTCYRVLLVRMSPSSFVSIWPSMVTELVHAASSPVDEQKSARDEQCMQLFLAACKLLETLCALPSGYMSQFQMCRWTFISPMNAV

SEQ ID NO: 121809 - protein, 143 aa, Heterodera glycines
  unsure (1)..(143): unsure at all Xaa locations
MPRHRAKPRSFHAGLKFPVGRVHRKMKKGPYAKRLANGVPVYMTXLVLEHITGELLKKIGEITQAEGMKRLSAFHIRTAARDDDELRKLFSGVSLAEVCVLPELESDVEQSSEGSGESDSDEESTEGSASGSHEGGGAAAAQQ

SEQ ID NO: 121810 - protein, 182 aa, Heterodera glycines
MAFLSRLSILPNSPISLLAVSLAVLAFVALASANPPTARETAPNAQQNNANTVATREIAKNIAEKMERTNEFINYFRAKKFIDAHNLAFEKGEVSLKVAPNHLMHFTPAQYNRIRGLQMRSNRQRHNMATLAGNSSTSPEKPDWREKGAVTEAKDQGDCGSRWAFSATGAIEGALAQKKAPK

SEQ ID NO: 121811 - protein, 235 aa, Heterodera glycines
  unsure (1)..(235): unsure at all Xaa locations
HVGIPTHRSAQLKEQAKEERAQRQLKISMKEEIESAQRELEVAQGRIRRLEDQIYELIDAXRLLEEKEHELQTLNTELASERAMSKEERARLLTEIALQESRVSEKRFEVKNKTEEMNKLKAEVESGNGHLPTEFNDPDDLTAHIELSTFHEGDVNNVMPQRELDRTNFTDQDLSLKRKLELLTKELDNARDERAITDFDVLHMENKRHARDKYNTLRQIRSGNTKRRIDQFENL

SEQ ID NO: 121812 - protein, 237 aa, Heterodera glycines
  unsure (1)..(237): unsure at all Xaa locations
SLFEEYPKCLLVGVDNVGSKQMQEIRGAMRGHGEILMGKNTMIRKAIRGNLQKFPLLDNLLPYIVGNVGFVFTNEDLGDVRKKLLXDKRGAPAKAGAIAPCDVRLPPQNSGMGPEKTSFFQALQIPTKISRGTIEILNEVHLIKTGEKVGASESALLNMLGIQPFSYGLVVEQVFDNGAVYSPDVLDVTTADLLARFQQGVLNVAALSLGIGYPTKASAPHLIANAFKNLLAVAAET

SEQ ID NO: 121813 - protein, 196 aa, Heterodera glycines
MMRKHRKYWSNRGIPSPTPQLISGNFGSLYGDYPSMFQLRDWTRQYGKQYGIQYGWRNALVISDPAMVHELLVTKFEYFHARNLSPIFGNLDTNKWISMFLARGGRWKRLRTIANPAFSVANLKKCMWLIDDSVKNAINFLEKARNEGKSFNIQRHFVEMSFDVIARVALGQRESRQFETEMAHLAIESMKYKYSI

SEQ ID NO: 121814 - protein, 239 aa, Heterodera glycines
MMRKHRKYWSNRGIPSPTPQLISGNFGSLYGDYPSMFQLRDWTRQYGKQYGIQYGWRNALVISDPAMVHELLVTKFEYFHARNLSPIFGNLDTNKWISMFLARGGRWKRLRTIANPAFSVANLKKCMWLIDDSVKNAINFLEKARNEGKSFNIQRHFVEMSFDVIARVALGQRESRQFETEMAHLAIESMQKYKYSIAQTADTEKEVAFSGQSVITPKSVTVGLKLRDEDGTAHLNNLC

SEQ ID NO: 121815 - protein, 172 aa, Heterodera glycines
MMRKHRKYWSNRGIPSPTPQLISGNFGSLYCYYPSMFQLRDWTRQYGKQYGIQYGWRNALVISDPAMVHELLVTKFEYFHARNLSPIFGNLDTNKWISMFLARGGRWKRLRTIANPAFSVANLKKCMWLIDDPLKNAINFLEKARNEGKSFNIQRHSVQMSFDVIPPCGVGA

SEQ ID NO: 121816 - protein, 237 aa, Heterodera glycines
  unsure (1)..(237): unsure at all Xaa locations
PPQQGEDAEERLINEEYKIWKKNCPFLYDMVMTHALEWPSLTVQWLPDVQRQEGADYTIHRLILGTHTSDEQNHLVIAKLLLPNDDAQFDASRYDTDRGEFGGFGTVTGKIEVEIKMNHEGEVNRARYMPQNPVLIGTKSPSSEVYVFDYTKHPSTPADVECKPQLRLRGHTKEGYGLSXNNNLPGHLLSASDDMTVCLWDIQAATANANXLDAKSICTAHTAXVEDVAWHVLHDTV

SEQ ID NO: 121817 - protein, 184 aa, Heterodera glycines
YLVEVSEKARRYDDMVEAMKKLIKLDPNLTLEERISLSTAYKGAMASRRTSWRALVSIEERTGASLSDAQQQVLENYREKVQNELVNTCQELLTCINEVLFPKASDVEQKVFYLKMKADYYRYISEVATDEDRSGVVELAKVAYQEAIDMAGDKIPATNPTRLGLALNFAVFNYEILNSVTEAR

SEQ ID NO: 121818 - protein, 120 aa, Heterodera glycines
LNLWETTSIEKLFYPEEDERFGEIIVRTPIFYCEYSQKRGPKMALALREFDRVRNESRYPYVDYKEIYLLDRGYRYFFKERKFGKYCTPQAYVQMWDSAYTEQRKRFDSHRRGKKRRRNN

SEQ ID NO: 121819 - protein, 123 aa, Heterodera glycines
  unsure (1)..(123): unsure at all Xaa locations
MPPKPSGKGAKKAVKSXKTVRTADKKRKKSRKESYSVYIYRVLKQVFSDTGISSKAMSIMNSFRNDVFERIAAEASRLAHYNKRSTISSREIQTAARLILPGELAKHAASEGTKAATKYTSSK

SEQ ID NO: 121820 - protein, 230 aa, Heterodera glycines
MREVISIHVGQAGVQIGNACWELYCLEHGIQPDGKMPSDQNNQDDSFSTFFSETGNGRHVPRAVMVDLEPTVIDEIRTGTYKHLFHPEQLITGKGDAANNYARGHYTVGKEIIDPVLDRIRRIADNCTGLQGFLIFHSFGGGTGSGFTSLLMERLSVDYGKKSKLEFSIYPAPQVSTAVVEPYNSVLTTHTTLEHSDCAFMVDNEAIYDICRRNLDVERPSYTNLNRLIS

SEQ ID NO: 121821 - protein, 130 aa, Heterodera glycines
  unsure (1)..(130): unsure at all Xaa locations
PVLLMSKMDRALLELHLGQEELFQTFQRIVENINVIIATYGDDDGPMGPIHVDPSVGYVGYGSGLHGWAFASKQXAEMSADKFGVQQATLMRTLWGDRFLTGRPRKWTNNQXPGTMRGFSQSVLDPIFSG

SEQ ID NO: 121822 - protein, 168 aa, Heterodera glycines
MSTGNVMMMMSPKRMDKGNGGEKGQRQKAPGKERPKDGKERVHKCDQCQKAFRFKSNLFEHKSLHLGSSSRNPFVCPFCSKTCRLKGNLKKHLQVHVTSAEDLECLWERSFSRSSGRPSKNAPPAPLPKPGDDLGMVPVLVSQQDASSSSPFGSPPTIKWTLPQNRSA

SEQ ID NO: 121823 - protein, 111 aa, Heterodera glycines
  unsure (1)..(111): unsure at all Xaa locations
AVNSTNAVRTENKKRKKALKESYSVYIYRVLKQVHPDTGISSKAMFIMXSVVNDVFQRIAAEASQLAHYNKRSTIXSPEIQTAVRLILPCELADHAVYEGTXAVTKYTSLK

SEQ ID NO: 121824 - protein, 266 aa, Heterodera glycines
  unsure (1)..(266): unsure at all Xaa locations
PETVLRQXIAERIKPVLLMSKMDRALLELQLGQEELFQTFQRIVENINVIIATYGDDDGPMGPIQVDPSIGNVGFGSGLHGWAFTLKQFAEMYADKFGVQIDKLMKNLWGDRFFNMKTKKWTNNQEPETKRGFCQFVLDPIFKVFDAVMNIKKDEVAKLVEKLNIKLTLEEKEQEGKPLLKTMMRKWLPAGDTMLQMIVMHLPSPVTAXRYRMEMLYEGPHDDEAXAVAMKNCDPNGPLMMYISKMVPTSDXGRFYAFGRVFAGRV

SEQ ID NO: 121825 - protein, 210 aa, Heterodera glycines
IGGIGTVPVGRVETGVLKPGMVVTFAPQGISTEVKSVEMHHESLPEALPGDNVGFNVKNISVKDIRRGSVASDSKNDPAKETKSFTAQVIIMNHPGQIAAGYTPVLDCHTAHIACKFAELKEKVDRRSGKKVEDNPKALKTGDAGIVDLIPTKPMCVEAFTDYAPLGRFAVRDMRQTVAVGVIKAVEKTEGGGKVTKSAQKAAAPGGKKK

SEQ ID NO: 121826 - protein, 204 aa, Heterodera glycines
VPVGRVETGVLKPGMVVTFAPQGISTEVKSVEMHHESLPEALPGDNVGFNVKNISVKDIRRGSVASDSKNDPAKETKSFTAQVIIMNHPGQIAAGYTPVLDCHTAHIACKFAELKEKVDRRSGKKVEDNPKALKTGDAGIVDLIPTKPMCVEAFTDYAPLGRFAVRDMRQTVAVGVIKAVEKTEGGGKVTKSAQKAAAPGGKKK

SEQ ID NO: 121827 - protein, 100 aa, Heterodera glycines
  unsure (1)..(100): unsure at all Xaa locations
FLLGGVGXLNKRGSPFCIVDKXTSVAEIEDAFRTFCTRDDIAIILINQHVAEMIRYQVDQHVAGIPAVLEIPSKEMPYDASKDSILNRARGLVNTDDLKS

SEQ ID NO: 121828 - protein, 91 aa, Heterodera glycines
KVSSNLNLRRALKEIYPGKEISLRALNIMNSFVMDALDRIATEATRMAHYDRCKTVTLRDMEFSCRLCLPDTMAKHANQKAQKTVTKFYAA

SEQ ID NO: 121829 - protein, 232 aa, Heterodera glycines
  unsure (1)..(232): unsure at all Xaa locations
DFLRYXTSASGEEPXQLQDYVSRMKENQTCIYYITGESKDVVQNSSFVERVKKRGFEVIYMVDPIDEYCVQQLKEYDGKKLVSVTKEGLELPESEEEKKKFEEDKVKFEKLCKVIKDILDKKVQKVSVSNRLVSSPCCIVTGEYGWSANMERIMKAQALRDSSTMGYMASKKNLEINPDHSIIKSLRDRVEKEQDDKTAKDLVVLLYETSLLTSGFSLEDPQQHASRIYRMV

SEQ ID NO: 121830 - protein, 238 aa, Heterodera glycines
  unsure (1)..(238): unsure at all Xaa locations
RIVKYMRGQAGPSSKELKSISDFDKFVDGDDVSVIGLFEGESKLKDSFHKVADTERDRFFFAHSSNPDLLKKTGYTDDIVVFVSKKLHNKFEPNEFHYDGNYDTDKIKNFLLYETNGLAGIRTQGNLFQFTHRPLVVVYYTVDYLKDPKGSNYWRNRVLKVAQDYKRKVHFAVSDKEEFAQEVEQNGLADRKESDKPLVAAITVDGKYPMNKEFSIENLKQFVEDLXAGKLEPYFKSE

SEQ ID NO: 121831 - protein, 168 aa, Heterodera glycines
RKPSGEDFAACLVEAIRAINRGTNPERIPQGSSGSYFVKNLQGEVIGVFKPKNEEPYGSLNPKWVKWAHKLLCPCCFGRSCLVPNQGYLSEAGASLVDQKLGLDIVPRTAIVALAAPTFYYGRIDRTVTNTKEQIARNYPDLGRHFKRIGLPPKRGSFQLFVRGFKDA

SEQ ID NO: 121832 - protein, 228 aa, Heterodera glycines
VSLFLSTDPNPSTGTNTRTKRQLPPLFAACATHFFSWRTFMREPIREKLLPDPVKPPWHQPKITVVMEMRNVLVCPKWEYKKGHYFVKRPALDYFLDMVGYPNFELVIHTSETMMQAAPVVQQLDPKGSRISNALFRECTKTRFIDGTAMKDLSRLNRDLSKVIYIDWDPQAFQLNPENVLRVPKWEGNMDDTTLIDLAELLKTIHLSDIDDVRPTLQFYSQFDNPMQ

SEQ ID NO: 121833 - protein, 138 aa, Heterodera glycines
TRFRLVVNQTHNDVQLPNFDAYRNELTKDPPQPSHVTEDRRKGVSSFIFYGVGGAITLMTAKLVVRKAVTYKWMPRDQAAMASTEIDLSLVPLGKTKTFDWSGKPVFVKHRTDKEIERERAVEVGKLLHPERDEDRVL

SEQ ID NO: 121834 - protein, 163 aa, Heterodera glycines
  unsure (1)..(163): unsure at all Xaa locations
KHQSQPEKMCDEEVAALVVDNGSGMCKAGFAGDDAPRAVFPSIVGRPRHQGVMVGMGQKDSYVGDEAQSKRGILTLKYPIEHGIVTNWDDMEKIWHHTFYNKLRVAPEEHPVLLTEAPLNPKANRXKMTXIMFETFNTPAMYVAIQAVLSLYASGRTTGLVLD

SEQ ID NO: 121835 - protein, 214 aa, Heterodera glycines
HVCGIVCGNLMQGFSLGGWKEQHNVHHAAPNVDGRDGDLDLLPLWATIGTQLKRIDGASPLAHLLPFQHLYWSFALPLLRFSWLLQSVQFVCQMRHSFYDIHRQRALVEQCSLALHWSLVLVQLYFLPDNLARLQYFLVSNLFAGFLIAHVVTYNHYSTDKFAYDDPILENFACLQLYTTRNMRPGPFIDWLWGGLNCQIEHHLFPTMPRHNLK

SEQ ID NO: 121836 - protein, 151 aa, Heterodera glycines
MCADDSATSAEELVTDGEIGEPTGRLSPEMLSLEDAVEVLQKEQNAERFRLAFESVRRVLSRSKCPPIDKVITLGFPCALVQALHYDDDKVKFEAAWCITNIVSGTSEQTMTMVNAGAVGPLLTLCSSSSLKLSEQARWCIAHMAGDGVQL

SEQ ID NO: 121837 - protein, 250 aa, Heterodera glycines
PTVNGNGFGLTNGTHFADDFSESIKDVGIIGIELYFPKSYANQEDLEKFDNVTSNKYVLGLGQQEMCFCHENEDVCSLSLTVTAALMDNYKVNPKDIGFLAVGTETLVDKSKSVKSVLMDLFADSGNMDLEGADEKNACFGGTQALFHAVDWMYANYATEKRLAIVVCADVAVYSAGPARCTGGAGAVAFLIGPNAPIALERGLRACHSQNVYDFYKPIVGVSTQFPRVDGPNSVETYLNAVDMCYGRFC

SEQ ID NO: 121838 - protein, 207 aa, Heterodera glycines
MVQYKLYYFDGRGLGESIRLLLHYVGQPFEDIRIKDMEEWEKTYKPKFFYGKVPVLEVDGKPLGQSATILRYLAEKFGLAGKDECEKAKANEIIDFQKDANTDLAPYLYVKMGSRQGDLDKLRAEVFEPGVKHILPLFEKLLKESGSGYMLKSGLSMVDFQVANFLYTFTKLEPETINAFPELIKYVDRVHALPQLQQYLKQRPQDR

SEQ ID NO: 121839 - protein, 112 aa, Heterodera glycines
SVRRGYWGNKIGKPHTVPCKVTGKCASVLVRLIPAPRGTGIVGAPVPKKLLQMAGIDDCYTSAVGQTATLGNFAKATYYAIQRTYSYLTPDLWKENELPRNPLDHIGGGGAQ

SEQ ID NO: 121840 - protein, 237 aa, Heterodera glycines
  unsure (1)..(237): unsure at all Xaa locations
MVSAQSDSPVPNWLLNIGPISCHAWNKDKTQLAVSPSNNEIXIFARSETVWNPLHVLREHDLLITGLDWAPNTNRIVSCSHDKNAFVWTWEAEKNSWKPEMVVVRINRAATCVKWSPNENKFAVGTGARLVAICYYERENDWWVAKQIKKLIRSTVTSLNWHPNNILLAVGACDFKTRVFSAYVKEIDEXPTPNPWGTKMPXGELLKEYQSTGWVHDLAFSPSGCKLAWVSHDSSIA

SEQ ID NO: 121841 - protein, 189 aa, Heterodera glycines
  unsure (1)..(189): unsure at all Xaa locations
SARGSDQFPFRPFCGFVLTGISDVRSSVRSLCFDILSLLLRKYVQLCRKNREIFDAFLQLMEGQRKPENRTKLLDSLSQFVTVFGDEANSNNKLWPERTLDISFENGEATIRSPSLSLLPSPAYFHFPVLCPSNDGTTSDGTSPLMTRDGLLNCCKVLCPLLEAVIRAXEDADGTXFSSTWAELTMSSL

SEQ ID NO: 121842 - protein, 169 aa, Heterodera glycines
  unsure (1)..(169): unsure at all Xaa locations
TGHNHHRPLLGILWGEHSSFPSCSTMDTTEPAFFEDLYTDRDELNCDNFXRNMGYNPXTVSFFPVSGFNGHYMLLPADRMPGLSGWAIHHQHRTAYATTLVQCSXPSLIPQMHQLHNPLRQPVQDAYEIGGTVTAPIWPFPTLVYLDIYQWPATSRSSHVFARPHTLRH

SEQ ID NO: 121843 - protein, 88 aa, Heterodera glycines
MNTDDRRLNAWAPIKKLNQYQSEEEEHKQLMFFQRKSQHIEKKRKLLEEIDFALPKKAQKSKAKTEEQKAKREEATESKDKKKKKKKE

SEQ ID NO: 121844 - protein, 216 aa, Heterodera glycines
RDCLCKFSADGQWLASASADKTVKIWSTVDGKLEKTIQGHKLGISDVCWSYDNRMIVSCSDDKTLKLFDVQQGKTLKTFRGHQNYVFCCNFNPQSTLLVSGSFDETVRIWDIRNGNCVRTLPAHSDPVSAVAFNRDGSLIATSSYDGLVRIWETSSGQCMTTLVDNENPPVSFVKFSPNGKYILAATMDSQLKLWDFNKGKPLKSYQGHVNKKYCI

SEQ ID NO: 121845 - protein, 208 aa, Heterodera glycines
  unsure (1)..(208): unsure at all Xaa locations
MTAEVQGFGFVAYKDHESAARAVEKMNEVSVPGSEKVEQKFTVCRAQKKSERQAELKRRYEQYKAERIQRYQGVNLYVKNLHDTINDETLRSNFESYGNITSAKVMCDEHGRSKGFGFVCFEKADEATKAVVEMNNKIIENKPLYVALAQRKEDRKAQLASQYMQRLAAMRMQNPAGLMGTMYAPASGGXFLPQAIQNQRAXAVHANT

SEQ ID NO: 121846 - protein, 264 aa, Heterodera glycines
  unsure (1)..(264): unsure at all Xaa locations
CLPEEEDYFVWSAIDPGIGSIAHSLKHLDDERKLLDRFERFVCKMIEPVAAKLGWEPKEGETIHVGRLRALLLSRLSHFRHQPTIQMALSKFNALIEKGVDVVPDLRKLIFRAVGSTNXKKIIAALKNLMETSGYAQVELSCVLGLGQCSDLKMLEDIFNYGVIQGKIRDQDLYLLFAATEMAPMACCGHFAWDFFKNNFALLIEKYGSVNSNVFLHCFDCVTSGFCSNAMAXTFMEFFXKELDEHSLKTLERXLRQAVESIKV

SEQ ID NO: 121847 - protein, 88 aa, Heterodera glycines; identical to SEQ ID NO: 121843

SEQ ID NO: 121848 - protein, 277 aa, Heterodera glycines
  unsure (1)..(277): unsure at all Xaa locations
PFALCCVEHAPSFAGTDHFDAFRSAHQKGAFASSPRRPLLISIDECSVALEEASISHNFSRLSKSLDILLGRATVEQQFCYYELILKAMSLSLDGKWPRALVDKLQLAWERFDSVIPRRLHEDSVRLWLSSANAAKISGLDQRDNSFLIAHTPLVLFRVDSRIFRSPPHLRCLCRSLSFYLAASRDMNTLQLVRSSLNSSKSEIEEKEALLRSFGGTQRLAVVQTYIELCDDEDGTEIDDIXEIRQNLCSQIHQLFIADTHLPSSSISICIPSGLSL

SEQ ID NO: 121849 - protein, 242 aa, Heterodera glycines
FRPDNFLFGQSGAGNNWAKGHYTEGAELVDNVLDVVRKEAEGCDCLQGFQLTHSLGGGTGSGMGTLLISKIREEYPDRIMSSFSVVPSPKVSDTVVEPYNATLSVHQLVENTDETFCIDNEALYDICFRTLKLQNPTYGDLNHLVSVTMSGVTTCLRFPGQLNADLRKLAVNMVPFPRLHFFMPGFAPLSAKGAAAYQALSVSELTKQMFDAKNMMAACDPRHGRYLTVAAMFRGRMSMREV

SEQ ID NO: 121850 - protein, 102 aa, Heterodera glycines
MAQLPPEDVATMPTHNVVFNAPFYNKATYYMRVINPGTKRIGYAFKTTKPKRINMNPPNGVLGPKESVNVAVSCDAFDPGSDDTNGDRVTVEWTNTPDPFAT

SEQ ID NO: 121851 - protein, 167 aa, Heterodera glycines
  unsure (1)..(167): unsure at all Xaa locations
CCVHMISNEREHLSSEALEAARICANKYMVKNCGKDGFTXRVRIHPFHVVRINKMLFCAGADRLQTGMRGAFGKPQGLVARVGIGDMLMSVRVRDQHQAHALEAFRRAKFKFPGRQYIVISRKWGFTXFDREVYEKHRKEGRVIPDGVNCRFLKQHGPLTEWLKNPI

SEQ ID NO: 121852 - protein, 258 aa, Heterodera glycines
  unsure (1)..(258): unsure at all Xaa locations
LLRFGGRPRWCLTGTPIXNKLWDLFSLIRFLRISPFSEEKMWKEFIMTSSGTSAQRLNVIVKSILLRRTKNQICTETNRPIVDLQPKKYELVTLELQKLEQHCYSILFEASKQKVRELLRDGAFGGCGTLRRFKPGAKIKNPFIGGGARMAVDANFKAYSCILSLLLRLRQACVHLSLTRNAIDIDAFKQDEGETDSDAENLVAKALEMSMAQMGLEEEALERNKEREKGRRQQIERLFEKEHQSTKVNALMNRLDGV

SEQ ID NO: 121853 - protein, 234 aa, Heterodera glycines
  unsure (1)..(234): unsure at all Xaa locations
YCGKAERMNEXIKAKKFIDAHNLAFEKGEVSFKVAPNHLMHFTPAQYNRIRGLQMRSNRQRHNMATLAGNSSTLPEKLDWREKGAVTEGDCGSCWAFSATGAIEGALAQKKASKIISLSEQNLVDCSSKYGNEGCDGGLMDSAFEYVRDNNGLDTEESYPYEAVTGKCQFKNETVGGTVVSFKDLKEGDEEQLKIAVATIGPISVALDASNLSFQFYKTGVYYERWCSNRYLDH

SEQ ID NO: 121854 - protein, 218 aa, Heterodera glycines
MGNVFGSSVAAADEEDNFEERTRQFFAFVNQGNIGQLRALVDSLDADELSIWLQMNQPDVQHARPALVNAILNRRTETAVFLLEKGADPHQTMIGQLNGLNMNVTPLWAAVVFVNLELCRALIAHGANIEMGTDSGESPLLCACFNGNLEIATFLVENGANVNLADTDGMTPLIATTFLLRLTSPTILSDLNINSSNSGTLCLDVFAEEMILMGQMRR

SEQ ID NO: 121855 - protein, 214 aa, Heterodera glycines
  unsure (1)..(214): unsure at all Xaa locations
MIILEXNNRVIAELLEMKFTNARTNSKFDTVDVVFADFDGILYHASNPDGGDKSKLMLSISLKFYKELQEHGADELIRSIYGKFLSESPEAGYSVSLVYDVADIPENFTALVEQASYLKRNCFASVFEKYFQFQESGQEGEKRAVIHYREDETLFIEAKSDRVTVIFSTLFKDPDDVVIGKVFLQEFREGRRASQTAPQVLYSVGEPPLELRNN

SEQ ID NO: 121856 - protein, 232 aa, Heterodera glycines
  unsure (1)..(232): unsure at all Xaa locations
CDFANWRSVLNIGAHKPSHLALMENANVLARYASICQQNGLVPIVEPEVLCDGDHSLERCQKVTELTLAYTYKALANHHIYLEGTLLKPNMVTPGQSHSPKATPDQIGLATVTALRRSVPIAVPGIVFLSGGQSEIEATHNFNAINSVPGPKPWTLSFSYGRALPSSVIKKWNGKDDNLGDAHKVLLDRANANGDAXNGKSTGEEAAASAAEXSLFVANHALLKQNCGICHE

SEQ ID NO: 121857 - protein, 94 aa, Heterodera glycines
DDDLYLRKDWGAIGIDIWQVKSGTIFDNILVADSVEDAKKHAADTFDQLKEAEKKQKEAHDEEERKKFEEEEKKRKKKKKKKKKKSTLVVPPLH

SEQ ID NO: 121858 - protein, 239 aa, Heterodera glycines
  unsure (1)..(239): unsure at all Xaa locations
QRKRLWRTLLMTTVTNSFAKSGPAVELNRQKFTTPAASQNIEDQIAADEKAIERYLQASLDSTQRSRQQLSSSEGLAESTARELLEQREKLERAEQNLDTIHHTTQHTQRSLNSLKSWFGGLVRNKLSRAPKGLGTANANANNQQQQLEQTVQQQHQQRPLHAHLVQSSADEFAGAIGGGGGGVXPPQQHSLNSSSRAYIQGTRWEAMDDKIDNNLDLMSAHLGRLRTFGVALGDEVQD

SEQ ID NO: 121859 - protein, 111 aa, Heterodera glycines
  unsure (1)..(111): unsure at all Xaa locations
VNWGKNKELTPINPDRYCVARGTPSARRYVHLXSPASVGPFPNVSGGKNRHGVTPIHFTMASGAVILKALQSIDEIKWVEKXDALVDCKLTEQGQKDLDRIASHLPDRAEQ

SEQ ID NO: 121860 - protein, 182 aa, Heterodera glycines
MRGKAIFKKSFIASGIPSEFGKYRPLPSDRKCSRKGCASDPPPATHCQPGHSSENGTVQPTKTSSLISSKNGCAEAEEEQCLFVEHFGPIPQYSETDEKENLRLRKLHEVALEIYQKQRAYVMKLQLIGLNYPRHLNDCEKRMNKKLLHSKHVIRRIADHFQTILNVHLTFLHNFYDKILKW

SEQ ID NO: 121861 - protein, 52 aa, Heterodera glycines
  unsure (1)..(52): unsure at all Xaa locations
VMTEVSNFINKIGYTPXTVPFVPISGFNGDNMLEPSDRMPWFKGWAIERKDG

SEQ ID NO: 121862 - protein, 194 aa, Heterodera glycines
MSGWDAYIQSLTSSCAEITRVAIIGNSDASVWARTEGENEFKASEPELKKLVGQFDDLSQVPSVGADLEGIHYIVPRTDENLIFGKRDKTGFFAVKTKSAILIAIYKDEESVVGADVRGAVEKMAKYLEDAGYRAVARFPKRLLCCQTKSAENGFDLFFQMHSFSIPNDHLLFYYYTFCEVRVPISFLLFDLWM

SEQ ID NO: 121863 - protein, 158 aa, Heterodera glycines
TCCRLPQKVVGARRSSWRVISSIEQKTEGSEKKQQMAKEYREKVEQELPEICHDVLDLLDKYLIPKAGNPESKVFYLKMKGDYYRYLAEVATGDDRNAVVEKSQQSYQETFDIAKDKMQPTHPIRLGLALNFSVFYYEILNSPDKACQLAKQAFDDAI

SEQ ID NO: 121864 - protein, 225 aa, Heterodera glycines
EFLRTVEGRRVGQHLVPSQLCEFEAYNCLLKQKLLPALNHLFWVDKCNYGTIVHPLYAQQVTFPYNIYYMERRRRRMDTTVRAIRKNQQQLTLDAIQALNLLSAKLSDNKYFCGDKPCSIDALVFGCLAPLLRTPLPNDRLQLHLSATPNLVRFVDSILSIYLPLPEKVIKEQAMARKKWQKLKMDAQQTMEEGRIERELRKAEKKERNSMHHILFFAISSITIS

SEQ ID NO: 121865 - protein, 218 aa, Heterodera glycines
  unsure (1)..(218): unsure at all Xaa locations
WWSAGTICGLSSQKCVKSGILHPFGHILQDGDKIGCHFQPQNDPITLAKMAVVGTPGVIFSMSHLKDAFLVSSRGTSALPMDRFQFPTLRYDFTMRQFYSSAQMGSEFLFACNNIVQRARYDEKEGMLFTLNINGXLIRQRLNGDVEIFCRPRQIICSPELSTVHLRTANVEMEVQTDKKAYVKYGSKRVHVSRSGMVVSNENCSASMDHIGRIVSAS

SEQ ID NO: 121866 - protein, 195 aa, Heterodera glycines
SGLGATEFVTSKNALQLLSRASELVLDSERVLNSEHTTNEIKECLKDIKVCGPAELRSILKWRKKLVDEQKKEEKASKESVKSAEEMVEGDTGEELEENTEFKELEEIDDLIRTAKAEEKATLKKRKRKLLKAKRNLEERKKLKMVHEGDEPTIGEDLELFSLKTVKRLSERAAKAVKGIKEEEEEKESNDEDDK

SEQ ID NO: 121867 - protein, 240 aa, Heterodera glycines
  unsure (1)..(240): unsure at all Xaa locations
MIRSRNSHNKALLGDEKARLGLXFMYDAPAGINKKKEEGPEPKFEWQRKYNAPREEWAKGNELIQDQPFGIQVRNVRCVKCRAWGHLNTDRECPLYGMSGNAEDHGYANNPSDIIRDLNVEKKTKTVSDVTTNEQIDIKPKIEVRKSHEEKKKKRRHYSSEEEEEGTEEEEKKPEPIDQEQLLVNMREEHNLKFKTGILIGLRADEHIKKMSAMVGGGRGKTEAFLKDWMRKTKKLMKKS

SEQ ID NO: 121868 - protein, 224 aa, Heterodera glycines
MSPPCSFSPSSASSSSDSPSAEGQAQQNGQVLAPRPLPTWEEIRAAVPKECFEKSLLRSLYYLAIDLLVIGFLYAVVPFVETNFGLIGLFFWYCLLGMFLSSLFCVGHDCGHGTFSDWTWVNDIFGHISHALLMVPFWPWQKSHRQHHQFTSHVDKDKGHPWVLEDDYEGGGWLRKHFAKIPLSGLISLAPKKLAQIGVKHLPVRGTEAGHIRWNPIYTVAGLP

SEQ ID NO: 121869 - protein, 196 aa, Heterodera glycines
AGGGQFGGANQIARGGPRSGGGGGMRQYGGQPRQQQNRMPGMGGGHQQQGMRYQGQPRGMQQQQQAQQPQIAYSSYPQQQSRGGIAPQMGGGASGGGANAGHVITSSTHQEPLNTQLLTEANITAQKQMLGERLYAMVARCFRDGDVEKIGKITGMLLEMENAEIVLLLGDEEMLRLRVDEAATVLYQATGQKEAQ

SEQ ID NO: 121870 - protein, 108 aa, Heterodera glycines
  unsure (1)..(108): unsure at all Xaa locations
DLPSGGSAAALSKSAVAPIERVXMLLQVQDASIHITADKRYIGIIDVLVRVPKEQGFLSLWXGYLTNVIRYFPTQALYFAFNDTYKRFFTLGVDNVNQFLMFFLMNLA

SEQ ID NO: 121871 - protein, 76 aa, Heterodera glycines
  unsure (1)..(76): unsure at all Xaa locations
EKLGGKLRAEDKTTIEGAVDEAISWLDSXKDAPPEELKERKKDLEAKVQPIISKLYAGQSPPPGSEPPPTEEKDEL

SEQ ID NO: 121872 - protein, 252 aa, Heterodera glycines
  unsure (1)..(252): unsure at all Xaa locations
GKLFNEPGGKDVYEGVKIDXSGTEVNPENFEAVLLGDEQRSEGKPVLKSTEKDKVFVYFSDHGAVGVIGFPAADLTVKQLTQTLKEMHAKKMYGELTFYLEACESGSMFDHTLAQSLKIYAVTAANGDESSWGCFCDTKFLPGNCLGDLFSVNWMQDSDQENLRTETLRKQFGIVREETNKSHVMHYGDLQIQDEHVSEFMGKEQAQKRNERPPSPHKFPMFPSRDIPMFMMARRQNESKQIQHNLRVAWEK

SEQ ID NO: 121873 - protein, 156 aa, Heterodera glycines
DEIEKMIDVVDILHREEATIPIEPLFISVDPERDTAERIRVYCAEFSPKLRGFTGSKEQIAKVAKAFRVYHSEGPRTKRTDDYIVDHTVIMYLIDPEGNFHDYYGQNRRAREITNVIKLKAAEWDAKKRKEQFWLNKILRGSNGEGKANATAKAIS

SEQ ID NO: 121874 - protein, 169 aa, Heterodera glycines
  unsure (1)..(169): unsure at all Xaa locations
FFFSRRCGQKNPHCFQPRPQPTADFIYTTTHAKDKGCGERGASLFLYAESFDILYKLEYPTQGCIRAFWHPXINQILVGLSDGTSKIYYDPSIQSXGALQCVSKPMKRSLESEMVRXELVLSPLTLEMFQPRCEYGQEKEVTEWRIPTFLPMLTKQKRPQFRQPAVMPM

SEQ ID NO: 121875 - protein, 237 aa, Heterodera glycines
  unsure (1)..(237): unsure at all Xaa locations
RSNVLVLGXTNRPNSIDPALRRFGRFDREIDIGIPDAIGRLEILRIHTKNMKLADDVDLEKIANECHGYVGADLAALCSEAAMQQIRQKMELIDLESENIDAEVLAQLAVTMDDFQFALGKNSPSALRETVVETPNVTWEDIGGLENVKRELQELVQYPVEHPEMFLKFGMQPSRGVLFYGPPGCGKTLLAKAIARECQANFISIKGPELLTMWFGESEANVRDVFDKARAAAPCVL

SEQ ID NO: 121876 - protein, 119 aa, Heterodera glycines
  unsure (1)..(119): unsure at all Xaa locations
KGNGAFQXGMPFKAYHGKTGRVFNVTKHALGVVVNKRVRHRIIPKRINVRVEHVKPSGFLLEFLQRCKANDLQKKQHKEGNAPFVALKRKPKEPRGAHLVKVKSTKVERLAPVKFEIVA

SEQ ID NO: 121877 - protein, 204 aa, Heterodera glycines
MQNALRAKLAELQNSRRTKEEEKEQQKEEPPQKLDFSLFDDSEFANRSWVELIEEEEAAARKTQKTKAATAETTAASAAPPIASVAAVASSSASPSNKRRNSERAEKEENVPKAQKFDFSLFDDSDFANRSWVDIIDEEERERSKSTALSTTPSVVSSSAPNKRRHILPTPQKGWAEPNTGWCTDEATLERRDKELQKMKEKPS

SEQ ID NO: 121878 - protein, 240 aa, Heterodera glycines
HESEIDPVRINQLYEQAKWSVLLEEVEHTEEESSLFAALQLQAALQRNSPDRESPERDEVDVLLDELEQTLDTTASLSRRDLTYVPELTEYLKYLKPKKLGFNNFKRAYFTFRDLYLSYYNTAQDANGPPLGHYYLKGCEVSQDLSVSQGKFNIKLQVPSSEGMSELILKCDTEQQFAKWMAACRLASRGETMADSSYNSEVESIKKVLQMQAGRAAAAQNGAQNKKKSQPVQLPTDFNS

SEQ ID NO: 121879 - protein, 247 aa, Heterodera glycines
  unsure (1)..(247): unsure at all Xaa locations
RSSPVSPPSNSPISLLAVSLAVLAFVALASANPPTARETAPNAQQNNANSVATGEIAKNIAEKMERVNEFIKAKKFIDAHNLAFEKGEVSFKVAPNHLMHFTPAQYNRIRGLQMRSNRQRHNMATLAGNSSTLPEKLDWREKGAVTEVKDQGDCGSCWAFSATGAIEGALAQKKASKIISLSEQNLVDCSSKYGNEGCDGGLMDSAFEYVRDNNGLDTEESYPYEAVTGKCQFXNETVGGTVVSFKD

SEQ ID NO: 121880 - protein, 219 aa, Heterodera glycines
PRRGVAQWKLCLVGAAIFLCFALLYPSVFSPMLSNLFGGGTQRQQPAAADRPMHPSMMGPNQQQQQQRERAHRPPPHHPGASMRMPDMHNQQQQQQQGGFWSGKSGGSMAWMLPFYTVGVVCFLLYTLFKSKTKRQKRRRDRPLDLLYGDDDDDGGTEDGLEYGVRGAKLRSVQHRLRKTEQAMADILSQLEQISAHSKDINDDDTKAAEKNVNDPNIA

SEQ ID NO: 121881 - protein, 122 aa, Heterodera glycines
VVGFLLGGVGQLNKAREPNFVIDDQDTSVVQIEDAFHTFCTRDDIAIIVINQHLAEMIRYHVDQHVDSIPDVLEIPCKEMPYDASKDSILNRARCLANTDDLKSYKKTLHETNYPLLVNECV

SEQ ID NO: 121882 - protein, 191 aa, Heterodera glycines
  unsure (1)..(191): unsure at all Xaa locations
MEDADGKPRGFGFVNYLEHENAAKAVEQMHGSLVPNGKPDQKFTVCRAQKKSERQAELRRRYEQYKCERIQRYNGTNLYVKNLVDTINDETLRGYFDSYGKITSVKIMCDESGRSKGFGFVCFEHMEAASKAVVEMNNKIIAGKPLYVAPAQRXEDRKALLASQYIQRLASMRLQNPTGILGTMYAPANGG

SEQ ID NO: 121883 - protein, 140 aa, Heterodera glycines
KSWDNAGDGNIWAVLVAGSSGWFNYRHQADICHAYHTLLAHGVAKERIITMMFDDIANNKHNPYPGKLFNEPGGKDVYEGVKIDYSGTEVNPENFEAVLLGDEQRSEGKPVLKSTEKDKVFVYFSDHGAVGVIGFPAADL

SEQ ID NO: 121884 - protein, 227 aa, Heterodera glycines
EVVVEFDFLGKDSIRYYNRVPVEKQVFKNLKLFMEEKDPGDDLFDRLDTSSLNQYLKELMDGLTAKVFRTYNASITLQEQLDKLTNPSDSVHEKMLSYNRANRQVAILCNHQRAVPKTHEKSMENLENKIKEKKQEYKELKDQLKKSKSVDEKMAKKYERLKEQIAKLNTQRTDKDENKQIALGTSKLNYLDPRISVAWCKKNDVPVEKIFSKTQRDKFRWALDMAK

SEQ ID NO: 121885 - protein, 88 aa, Heterodera glycines
  unsure (1)..(88): unsure at all Xaa locations
TALEHFLMAERDRSVLRIMKRNRELENEVMKDVPGWKTGTWYGEPVYXTLGDKWIEPNAMEVSPHLSFRDSDFNHYYRLNTLRPQRKC

SEQ ID NO: 121886 - protein, 83 aa, Heterodera glycines
  unsure (1)..(83): unsure at all Xaa locations
CDHADKHLKPYYRNHHRTWAYLXFRNPITLELLEKYEVKTLSTCTTIKPHGTIVANDARTXGXENGVENALGLCDEWLPFYEA

SEQ ID NO: 121887 - protein, 151 aa, Heterodera glycines
MAQLLAGEKVVLSDGSKVEAEVFLKDKVVAVYFSAGWCPPCRAFTPKLKKFYEELKKAGKNFEVLFVSRDRAAKDLVEYYRDHHGAWAYLEFGNPKIQELLEKYEVKTIPTCKVIKPDGTIVVNDARTEVQEKGVENALGLWEEWLGFYEA

SEQ ID NO: 121888 - protein, 203 aa, Heterodera glycines
MCDEEVAALVVDNGSGMCKAGFAGDDAPRAVFPSIVGRPRHQGVMVGMGQKDSYVGDEAQSKRGILTLKYPIEHGIVTNWDDMEKIWHHTFYNELRVAPEEHPVLLTEAPLNPKANREKMTQTMFETFNTPAMYVAIQAVLSLYASGRTTGLVLDSGDGVTHTVPIYEGYALPHAILRLDLAGRDLTDYLMKILTERGYSFVT

SEQ ID NO: 121889 - protein, 159 aa, Heterodera glycines
ILPKVEYTGTTLVGMECFGGIVVATDSRSSSGTYISNRTTDKITMLNDRIVILRAGTQADTQALADIVMYYAEAHAIMDEEDEITVRNVANYARKMHYNYRGQLNSTFLVAGYDSLNMGQLYVIPGGGYTTRHPYYTSGSGSSYIPEYLQNQWKEDLDG

SEQ ID NO: 121890 - protein, 204 aa, Heterodera glycines
DSIGGERGNGEWRVFSGNEMGILLTWWAWTNWRAANPTADSSRVFVLHSAVSSQMGATMAKKEGFKAAHSLTGFKYIRNLAHKLRSEGNTVIAAWGESIGFTPGTTLDKDGVSSAAVFAEMANWLRTQKGVSLREQLFRLFSIYGFHLQRNSYWGVKSTEVTKKLFADLRSDYPETIGQNFDVKFVRDLTTGYDNAQPDDRAIL

SEQ ID NO: 121891 - protein, 253 aa, Heterodera glycines
  unsure (1)..(253): unsure at all Xaa locations
AQTSARLFFDFAHLKQITGGEYTTKPLQINRLGGRCPITRKKLCIHIGGGVKFDYFMLNLHPRGPTVADQTYDERVIEVRRDPNRTPYIALVAGVKGKRWIYATQNMQAGQIIQTTCHIPERPVIGCEGNAYPLGALVEGTMVNSIELHRNNPNSHVVITEAGGCAEIIRHMDEFTVVRMPNKYEYAVRKECMXXVGKLSHVDWEKKQWGSAQMHRRFGFRMASGPSKRRRDQYQGKKHPRNPPLCTIDGVRP

SEQ ID NO: 121892 - protein, 217 aa, Heterodera glycines
MSEKKVKKVKKKSRTGSEASSFDQKTIQEFKEAFGIMDQDKDGVISKQDLKDLYATLGVVASDSQMDNMLKEAPGPINFTVFLTLFGERLTGTDPEATIIGAFQMFDKTDCGEITEETLMKILKNKRGEPLTEDEVQGMYKGNPPISGGKVDYKAFAHLITTGAAEGVGQSGLSGAMDGREGPTSDLPIRGKTDHPSRRSFHPYDRSPFSPSPIVSP

SEQ ID NO: 121893 - protein, 240 aa, Heterodera glycines
  unsure (1)..(240): unsure at all Xaa locations
MREVISIHVGQAGVQIGNACWELYCLEHGIQPDGKMPSDQNNQDDSFSTFFSETGNGRHVPRAVMVDLEPTVIDEIRTGTYKHLFHPEQLITGKEDAANNYARGHYTVGKEIIDPVLDRIRRIADNCTGLQGFLIFHSFGGGTGSGFTSLLMERLSVDYGKKSKLEFSIYPAPQVSTAVVEPYNSVLTTHTTLEHSDCAFMVDNEAIYDICRRNLDVERPSXTNLNRXISQVVSSITASL

SEQ ID NO: 121894 - protein, 121 aa, Heterodera glycines
  unsure (1)..(121): unsure at all Xaa locations
YLVEYRQKQRQLVALKREAKKVGNYYVPDEPKLAFVVRIKGINKIHPRPRKVLQLLRLRQINNGVFVKLNKATIQMLRXLXXPXYIAWGYPSQKIIRQLVYKRGYAKESGQRIPITDNGHC

SEQ ID NO: 121895 - protein, 230 aa, Heterodera glycines
WRGRGQKKKKTRRSGEITEDEELNKTKPIWTRNPDDISNEEYAEFYKSLSNDWEDHLAVKHFSVEGQLEFRALLFVPQRAPFDLFENKKSKNAIKLYVRRVFIMENCEELMPEYLNFIKGVVDSEDLPLNISRETLRQSKILKVIRKNLVKKCMDLFEEISEDKDNFKKFYEQFAKNIKLGIHEDSVNRKKLSDFLRYYTSASGEEPCSFKDYVSRMKENQTCIYYITGE

SEQ ID NO: 121896 - protein, 196 aa, Heterodera glycines
WGGTFLVEYRQKQRQLVALKREAKKVGNYYVPDEPKLAFVVRIKGINKIHPRPRKVLQLLRLRQINNGVFVKLNKATIQMLRIADPYIAWGYPSQKIIRQLVYKRGYAKESGQRIPITDNAIVERNMGKSDVICVEDMIHQIWTVGPHFKQVTNFLWPFKLSNPVGGFKKKSNHFVEGGDYGNREDQINKLLEKMI

SEQ ID NO: 121897 - protein, 185 aa, Heterodera glycines
MPEELVALSPGTRVSGRWTIIKKLGAGAFGAVYLCQDRDGRTMAALKTEPIDAQRPLLYMEAHVLLSLNELRSNSGRHFCRCLDLGRDEQPDADSGQTMEFNYVVMSLVGRPMDKLLHESGDRFSPGTAIGTSIQLLKALKALHSVGYLHRDIKPANSAIGTPETNEQRLLYLLDFGMARKYVRE

SEQ ID NO: 121898 - protein, 140 aa, Heterodera glycines
PVRAPCGWVYAILKVLAEIHSEPDLKLNLRFEIEVLCKELNVNLRSIEVGSYLKEQRRLPRLVPPSKLGTAAASSTLAQCQLPPIQPPHIGAGISSHSTADYTPTDIANILAEMSISRKYSPASYTPGGSQQQVSSITAH

SEQ ID NO: 121899 - protein, 247 aa, Heterodera glycines
LQPPVVLCGDIHGQFRDLLRIFKTMGFPPDKKYLFLGDYVDRGTQSLETMVLLFCYKVKYPDSVILLRGNHECSNMNRAYGFFEEVERRYGQMDAYALWNHFNQTFAWLPYVGLIGNKILCMHGGISDKFTSLEQLNDLRPTTEPPNPSLEIDLLWADPVPGIQGVRPNNRGASVQFGEDMVHKICNLLGVDLIIRAHQVVQGGVEFFADRRLITLFSAPHYENMHNTGAIIAIAGGSQLHRSYLAI

SEQ ID NO: 121900 - protein, 243 aa, Heterodera glycines
MNEEYCFSTSTVVAQSWAQTNFRPVDEQPNSLVDTLIAKFSCTTFEQFTSEVSAQDIHKLCDVTVGVLQQQSMLIHLQPPVVLCGDVHGQFRDLLRIFKTMGFPPDKKYLFLGDYVDRGTQSLETMVLLFCYKVKYPDSVILLRGNHECSNMNRAYGFFEEVERRYGQMDAYALWNHFNQTFAWLPYVGLIGNKILCMHGGISDKFTSLEQLNDLRPTTEPPNPSLEIDLLWADPVPGIQGVR

SEQ ID NO: 121901 - protein, 251 aa, Heterodera glycines
  unsure (1)..(251): unsure at all Xaa locations
QFLRSAPPHSKFNSTAWDWLTEYQRDAAPIPMNILCRACQVGRSYGLVSXLSNFVQMAIEQLGSTYANDKMQNYFTFLVSLFGILIENSTADGTVDDQLLARLMPFLSVALKSKLEAFKCAGIMLLICLAVNVATLDNETVQNALKLLLYKLRPNTFPLVLRAVCVLCQRLSLDTLPRNATLRIVYNDDELKATTEIQKLMELFDLSHFLVPFWRILVDAYRTGENETWRDAYLTMLLKTMDLGNGQIPSR

SEQ ID NO: 121902 - protein, 88 aa, Heterodera glycines
  unsure (1)..(88): unsure at all Xaa locations
QEVLFDEAGKTVCGVATGDVGIXKDGSPKESFERGMELKAKCTIFAEGCRGHLTKSVIEKFGLSEGRDPMTFGIGLKELWEIDPSKHR

SEQ ID NO: 121903 - protein, 163 aa, Heterodera glycines
MPEELVALSPGTRVSGRWTIIKKLGAGAFGAVYLCQDRDGRTMAALKTEPIDAQRPLLYMEAHVLLSLNELRSNSGRHFCRCLDLGRDEQPDADSGQTMEFNYVVMSLVGRPMDKLLHESGDRFSPGTAIGTSIQLLKALKALHSVGYLHRDIKPANSAIGTP

SEQ ID NO: 121904 - protein, 254 aa, Heterodera glycines
VNDERRLKLRAEWNAQNCQDMHKKAIYGLFLGFDCPEINGTIEDWLWAKLFHCKFAVDPARALRQLQTTLCTQHGERYFVGEGGSHLIYFSVLLFTGQIERAVHVLFRSEYIVHAVHLAILAHQLRLLMTVPKVSDELLTTDVHEPSVCRLNLARLLLLFVKDFELSNIEYAINYCFLRATLKGRSVFVAAVSRIVFMSGHREAILGRLDSQGNRVPGLIDKIKDAMDICELIDSIAFDTHVQGHSLAACHLYA

SEQ ID NO: 121905 - protein, 166 aa, Heterodera glycines
MPRHRAKPRSFHAGLKFPVGRVHRKMKKGPYAKRLANGVPVYMTAVLEHITGELLKIIGDITQSEGMKRLSAFHIRSAARENDELRKLFSGVSLAEVCVLPELESDVEQSSEGSGESDSDESTEGSASGSQEGRCCWCAAMRGGFILETAVITLTSNLKEDRYLCL

SEQ ID NO: 121906 - protein, 70 aa, Heterodera glycines
  unsure (1)..(70): unsure at all Xaa locations
NFQWAGGKGKAGKDSGKAKSKKIISRSARAGLQFPVGRIHRFLKKRTTSTGRVGATAAVYSAAILEYLTX

SEQ ID NO: 121907 - protein, 234 aa, Heterodera glycines
  unsure (1)..(234): unsure at all Xaa locations
MKQPEPIINKENLRPANQPSNKMHEGINYSEFGKEWNEKQWTLSDFDIGRPLGKGKFGNVYLARDRKYRIPVALKILFKSQLVTGNVEHQLVREIEIHAHLRHPNILRMFNYFHDDKKVYLILEYALHGELLKVLQKSRRFSESTSAQYIFQVSDALNYCHSKKVIHRDIKPENILLCADGKIRIADFGWAVHAKNRRQTMCGTLDYLPPEMVLKRQHDEXVDYWSVGVLCYEF

SEQ ID NO: 121908 - protein, 176 aa, Heterodera glycines
SSVVLKLYKFPLPNLPLHWTSVDTRNALLCAAVPSIGAFVGSTMAIKDQELVQFLKNQNFPSFARCCKYNYLLANTAVTIPFGYASYLVYKIGGGFDYTDTTVALGLYGATVLSGCFLVPVLKKQDTKALTANAVVLAGLSVATSVAFYNIDKISAYWTMPFTLWAIFCAGLTVKA

SEQ ID NO: 121909 - protein, 230 aa, Heterodera glycines
  unsure (1)..(230): unsure at all Xaa locations
MPNCGRSCAKFAATIAVFLANEEDEDQQLDEEDEAALLSAFRKMVAFASTIDVPVNVEFWDMCMALFQNSHRFRSADLVEKAMLLCFLLLSWEMKRFVAAQEHGEETIETLKKKRDQFLRTTKSILRDFAXAFMCICDILILFNWKLAADNGPDHPIHSLAIKLDREMAFRLGDFVMDNVFVLEENDSVRDLNEPERIQLMAKRRNILAQYSKLFICGLLPIIESVGILR

SEQ ID NO: 121910 - protein, 111 aa, Heterodera glycines
  unsure (1)..(111): unsure at all Xaa locations
VKAAEQMATSMXLVVNYKGYVSTYAMFEKYNVSMINEEGVGGSGGEYEVQKGFGWTNGVILDLLDKYGSKISVSGAAVPNGVRFLPLALIVLLFMTVVEIAIAQCFWCISG

SEQ ID NO: 121911 - protein, 203 aa, Heterodera glycines
MCDEEVAALVVDNGSGMCKAGFAGDDAPRAMFPSIVGRPRHQGVMVGMGQKDSYVGDEAQSKRGILTLKYPIEHGIVTNWDDMEKIWHHTFYNELRVAPEEHPVLLTEAPLNPKANREKMTQIMFETFNTPAMYVAIQAVLSLYASGRTTGLVLDSGDGVTHTVPIYEGYALPHAILRLDLAGRDLTDYLMKILTERGYSFVT

SEQ ID NO: 121912 - protein, 235 aa, Heterodera glycines
EACRGTFGIDVDTLREQNMYSEGDITHYGMHLHQCNIRRCWTECQKLANYDQRKLKLQECNSRNKFLKRGIYMVPTKFGIAFGFKRLNQAGALVNVYTDGSVLISHGGMEMGQGLHTKILQIASRCLGIDVSTIQIIDTATDKVPNASATAASVGSDVNGLAVKNACEILLKRLEPLRSELPKEASWKDLVMHAYSNRVQLSATGFAIIHSEPPDFVESRGSESYSYCVYGVGCA

SEQ ID NO: 121913 - protein, 195 aa, Heterodera glycines
  unsure (1)..(195): unsure at all Xaa locations
LEALCNGLVGIYAEPRYGTSGRFFRISDITKPNTGNGLNAENTFITHQVFWKISVKQYFEDTYRKTLQYPKAPLLVNYRRIGDPAYYPMEVCFVLDGQRVKSSQQNPEQIREMIKETAIPPTXLRVHNERVKESLQLVNNEYLTKASVHFDTTPLHVDYRVLGPPATLYRNNHRVTPATSNCEWRPGDALVNAQI

SEQ ID NO: 121914 - protein, 126 aa, Heterodera glycines
IVCNFNPTQRRARRNNGKRGLRLRCNGGGSGGAVSAFGNHFNAILAARLLGHRPFSIIRKVRQSPVHRFTDEITDEELQQLCMAATDVFRMQPTLVRIQPPVVVVGDIHGQFTDLQRIFDTHGYPP

SEQ ID NO: 121915 - protein, 211 aa, Heterodera glycines
  unsure (1)..(211): unsure at all Xaa locations
MNEEYCFSTSTVVAQSWAQTNFRPVDEQPNSLVDTLIAKLSCTTFEQFTSEVSAQDIHKLCDVTVGVLQQQSMLIHLQPPVVLCGDIHGQFRDLLRIFKTMGFPPDKKYLFLGDYVDRGTQSLETMVLLFCYKVKYPDSVILLRGNHECSNMNRAYGFFEEVERRYGQMDAYALWNHFNQTFAWLPYVGLIGNKILCMHXGISDKFTSLEH

SEQ ID NO: 121916 - protein, 208 aa, Heterodera glycines
MAENENGGNSVEMADESELDPLDAYMAEISQKNKGGDEKKARVLVIGAVSKSAPNKGDIVEPEDETVPITDELDIEQTASSLLAKGRMLAQTDHTKVYYRPFRKNFYVEVPEITAMSKKEVDEYRKELEEITVRGKNVPKPIKSWSQCGVDLKMLNILKIHNYVKPTPIQAQAIPAIMSGRDLIGIAKTGSGKTLAFLIPMFRHVMDQ

SEQ ID NO: 121917 - protein, 85 aa, Heterodera glycines
  unsure (1)..(85): unsure at all Xaa locations
MYAAVSSSRPMEDWKSELAMPDKDLRYKTSDVTATKGVEFEEFGLTRDPLKGIFEXGWEHPXPGQEPXFGIALPGTKIFPSPQKG

SEQ ID NO: 121918 - protein, 152 aa, Heterodera glycines
LGHCTPGILSLLTRSYYRGAAGALLVYDITRRDTFNHLTSWLEDARQHSNSNMVIMLIGNKSDLEARREVKKEEGEQFARENGLVFMETSAKTAANVEEAFIDTAKEIYRKIQEGVFDINNEANGIKLGPQHPPSSPSSPGGAPLGRASNCC

SEQ ID NO: 121919 - protein, 83 aa, Heterodera glycines
INGWHASNGPALSLLGYRKAVNRDVFGGQMFAQAIAAAEATVDGDEFAPNAAHSMFIRKAFIDHPIEYIVTRTRDGRSFCTRT

SEQ ID NO: 121920 - protein, 216 aa, Heterodera glycines
  unsure (1)..(216): unsure at all Xaa locations
KTGTENPWDEEKRNQILXTAHVMVESHAFMTEKCPRFELNRTIHLGGESFSIEDLLGQGGFARVYRANSREDGCTYAIKYESPACPWEVYICSALKRRIPSQFAAYLMEVRDAYIFKNASAIVYEYFPKGTLLDLTNVYKKNGTVVGGLLATFFGIHLARALRQVHETANIIHADVKPDNVMLLTAALNAHDSLDNLLXTPVLKLIDWGRSIDMNH

SEQ ID NO: 121921 - protein, 243 aa, Heterodera glycines
  unsure (1)..(243): unsure at all Xaa locations
KWHHSQIIQETHFAIEDIMMKLGDYVSQWTRYQALWDFNXEMLFERLGTDLCNWMKVLLDTKKARTMVDSPETRHNIFPFVVDFTRVQSKVSIKYDFWQREVLNKFGSALGSSMQQFFSDISKDRHELESQSIDSTNTSSTVALIMHVQSLKKRIKASQEQVDTFLSGQKLLTVHRYPFPQSWLYAENVEGEWSALLDVLNRKDVAIQSQVANLQTRILEEEQLLEKHINDLFAEWNKSKPVH

SEQ ID NO: 121922 - protein, 192 aa, Heterodera glycines
  unsure (1)..(192): unsure at all Xaa locations
FCWIVILVATFEKLVKTDGKAPDDLEKQLXSALSELAHNSEIKAELCELYFVGAQEYXFGNKKCILVWIPVAXLLDCQMIDPKLXRELEKKMSGCHVIFIAKRRILPKPQRGKNRMPLGQKRSRSRTLTAVHDSILADAVLPTEVGGKRTRVKLDGKQIMKVHLDKAQXTTVEHNVDTFWHLYKRLTGKDVG

SEQ ID NO: 121923 - protein, 246 aa, Heterodera glycines
  unsure (1)..(246): unsure at all Xaa locations
KKARPRGGGGGFPGIGNLFGVGQSTARVINREDVKTAFADVAGCEEAKIEIMEFVNFLKNPAQYKALGAKIPKGALLTGPPGTGKTLLAKATAGEANVPFITVSGSEFLEMFVGVGPSRVRDMFEMARKKAPCILFIDEIDAVGRKRGGRGAMGGHSEQENTLNQLLVEMDGFSTDESNVVVIAATNRVDILDPALMRPGRFDRQIFIPVPDIKGRASIFRVHLTPIKTTLDKIELSRXLAAHTPG

SEQ ID NO: 121924 - protein, 55 aa, Heterodera glycines
FGYMQIFVKTLTGKTITLEVEASDTIENVKAKIQDKEGIPPDQQRLIFAGKQLED

SEQ ID NO: 121925 - protein, 85 aa, Heterodera glycines
  unsure (1)..(85): unsure at all Xaa locations
MFCEAGAGTQCYRDMGXARQRAQADRIQIIKVQTXTVADCKRAGVKQFHNSKIKFPLPHRVNSKRRNMTPFTTHRPRTHFVYRKK

SEQ ID NO: 121926 - protein, 225 aa, Heterodera glycines
MIIIHSEGSDEEEEVEEERKSEKWAKCDANRSAFAAVKCCFEKLDNHLPWKFKRNLNGETFGRHFSQWFHFLESGQFSILLHGLGSKRRILEDFRDFLSLRNRRSFVGDGLNPSDTMPKMIDRMTEELKLKGMAKTKEKSVEAAAKALRNAVDAQLRFPIVFILLNIDSPQLRSREHQKALSVLAKSSKVQLIASVDHVNAALIWDQSLRDAFAWLHFPISTFHC

SEQ ID NO: 121927 - protein, 67 aa, Heterodera glycines
  unsure (1)..(67): unsure at all Xaa locations
DRXSAAVAIRSKDYAVVVALMRAQNELSSYQQKVFKLDDHLGLSMSGLISDGRILARFMQSECAEFR

SEQ ID NO: 121928 - protein, 67 aa, Heterodera glycines
  unsure (1)..(67): unsure at all Xaa locations
REIDTIGLYDTFXLFGSILSCKIATDIEGGSKGYGFIHFETEEAANSAIAKVNGMLLDGKKVFVGKF

SEQ ID NO: 121929 - protein, 150 aa, Heterodera glycines
SAVKTDVLPAPFMKNVIGAFAELPDWHFIVKIEPDDEQSRRMAENVPNIRLTSWAPQPAILSHPRLRLFITHGGYNSLLEGAQSGTPVLSIGFFADQRRNALVAQRNGWGRAFENWKLLEGMNEFRETVKEMWEEDNDHLSRAANRVKTI

SEQ ID NO: 121930 - protein, 70 aa, Heterodera glycines
  unsure (1)..(70): unsure at all Xaa locations
SGAKKVVISAPSADAPMYVMGVNEDKYDPAKDDVISNALCTTNCLAPLAKGINYXFGIIERLMTTVHAVT

SEQ ID NO: 121931 - protein, 193 aa, Heterodera glycines
  unsure (1)..(193): unsure at all Xaa locations
RFDREIDIGIPDAXGRLEILRIHTKNMKLADDVDLEKIANECHGYVGADLAALCSEAAMQQIRQKMELIDLESENIDAEVLAQLAVTMDDFQFALGKNSPSALRETVVETPNVTWEDIGGLENVKRELQELVQYPVEHPEMFLKFGMQPSRGVLFYGPPGCGKTLLAKAIARECQANFISIKGPELLTMWFGE

SEQ ID NO: 121932 - protein, 67 aa, Heterodera glycines
MSPSSISILLGAQWGDEGKGKVLDFLIGHHRIDIVARCQGGNNAGHTVLANGREYHFHLLPSGLASD

SEQ ID NO: 121933 - protein, 207 aa, Heterodera glycines
  unsure (1)..(207): unsure at all Xaa locations
TVCRAQKKSERQAELKRRYEQXKAERIQRYQGVNLYVKNLHDTINDETLRSNFESYGNITSAKVMCDEHGRSKGFGFVCFEKADEATKAVVEMNNKIIENKPLYVALAQRKEDRKAQLASQYMQRLAAVRMQNPAGLMGTMYAPASGGFFLPQAIQNQRAXAVHANTESVRGTNAWRCPSLEQYGRFQSSNARLHDGSSWWRSVRRR

SEQ ID NO: 121934 - protein, 203 aa, Heterodera glycines
MRDLFIEDNSPITPARLAELIRHFYALGWMRDNGGGMAVLCNGAVFGSPTSVQKEKVSENDLFVIDATTGTVLKRPQNAASVPSATCGLLMNTGVENRSSGLRLDNVDRLVVPTVDSELNEQMLSPVLLRTLDKYTEASAILVRGHGFFVFGSHCWQSTKMMLECYEYLFELACEMIKYKLPLVPKSPKIKIMRQFTRNTTTA

SEQ ID NO: 121935 - protein, 171 aa, Heterodera glycines
  unsure (1)..(171): unsure at all Xaa locations
IICGLDSIEARRWLNATVCSLVECDDXXPKIHTIVPLIDGGTEGFKGNSRAIIPFMTPCIQCTIDLYTSQVNFPLCTIAHTPRLAEHCVEYVKVLLWEKEKPFGQDVKLDADDPAHVQWAFRAAQQRANEYEIKDVDLRLSQGVLKRIIPAVGSTNAVIAGSCALEALKLA

SEQ ID NO: 121936 - protein, 98 aa, Heterodera glycines
  unsure (1)..(98): unsure at all Xaa locations
LKSEKVNGEMKRIVMITQGPLPVLVAHDRELTQFPVEPISEDKIVDTNGAGDAFCGGFLAAFSTGRSLDLCVRAGNFAARTIIXHIGCTFPNECAYLE

SEQ ID NO: 121937 - protein, 174 aa, Heterodera glycines
VNRKGRALCCSGSEYIVHAVHLAILAHQLRLLMTVPKVSDELLTTDVHEPSVCRLNLARLLLLFVKDFELSNIEYAINYCFFARDFKLDTPSADNATIRQEGRSVFVAAVSRIVFMSGHREAILGRLDSQGNRVPGLIDKFKDAMDICELIASIAFDTHVQGHSFAACHLYALA

SEQ ID NO: 121938 - protein, 119 aa, Heterodera glycines; identical to SEQ ID NO: 121530

SEQ ID NO: 121939 - protein, 114 aa, Heterodera glycines
  unsure (1)..(114): unsure at all Xaa locations
QIAAGYTPVLDCHTAHIACKFAELKEKVARRSGKKVEDNPKALKTGDAGIVDLIPXKPMCVEAFTDYAPLGRFAVRDMRQTVAVGVIKAVEKTEGGGKVTKSAQKAAAPGGKKK

SEQ ID NO: 121940 - protein, 212 aa, Heterodera glycines
  unsure (1)..(212): unsure at all Xaa locations
EHSDCALWLXHEAIYDICRRNLDVERPSYTNLNRLISQVVSSITASLRFDGALNVDLTEFQTNLVPYPRIHFPLATYSPVISAEKAYHESLSVSEITNMCFEPSNQMVKCDPRHGKYMAVCLLYRGDVVPKDVNAAIASIKTNRSIQFVDWCPTGFKVGINYQPPTVVPGGDVAKVPRAVCMLSNTTAIAEAWARLDHKFDLMYAKRAFVHW

SEQ ID NO: 121941 - protein, 197 aa, Heterodera glycines
  unsure (1)..(197): unsure at all Xaa locations
SRVFPQFLCKRLVYDTSASEEQERCMIAKLKHMCGFEYTSKLERVLTDVALSRDRSEQYKHAAEXCNVDFSVIVVMSNVWPLGQAVQFDIPRPLLDCIDSYTQYYTNRFNGRKLTWALQMCRGELVSTSNTFKDKYSFLCNTQQIAILMQYNERNTYTLDELHVALGTDFPADQLCAVVQSLVKTNLLKLTSAHGTA

SEQ ID NO: 121942 - protein, 156 aa, Heterodera glycines
RKPEKIKEQLLGENASGPVLVEPDNPKNVLVRRITLVSDDQVKHSMDLPAKGDFVFCVKESCTYRIRFEFVVQREIICGLKYAHKVSRLGVGVTKELYMLGSYGPRHEPYTYETSPEEAPSGILSRGKYRVHSLITDDDKNIWLDWSWHIEIAKSW

SEQ ID NO: 121943 - protein, 43 aa, Heterodera glycines
  unsure (1)..(43): unsure at all Xaa locations
AVLSLYASGRTXGLVLDSGDGVTHTVPIYEGYALPSRHTTFWT

SEQ ID NO: 121944 - protein, 36 aa, Heterodera glycines
KRGILTLKYPIEHGIVTNWDDMEKIWHHTFYNELRV

SEQ ID NO: 121945 - protein, 42 aa, Heterodera glycines
DWASDSRNLVSASQDGKLIVWDSYTTNKVHAIPLLSSWVMTC

SEQ ID NO: 121946 - protein, 53 aa, Heterodera glycines
MLPSNPDDKIDEVDKILSKLDGKIERKMDPLMCRHNQRQKCTNCLPLDPYDEK

SEQ ID NO: 121947 - protein, 89 aa, Heterodera glycines
FEEISSRFNSKELTDVTRVDCGGGSVLPGMADAHSHPVFSGDRVHEFAMKLAGATYMEVQAAGGGIHFSTEKTREATEEQLLEDFLEIA

SEQ ID NO: 121948 - protein, 101 aa, Heterodera glycines
HYPNIQNVKSLEKVCEQLIRGAKDENLVVKGPVRMPTKILRITTRKTPCGEGSKTWDRFQMRIHKRIINLNSSSDVLKKITGISIEPGVDVEVTIAESPSN

SEQ ID NO: 121949 - protein, 130 aa, Heterodera glycines
MPTAANDCNNNSIEDIQSDRRRGPIDPTNFDHLVRLSELIRSMADLGTLQPEFGTICGSGLGAIADQMEGARILPFSEVPGFPQPSVIGHKGNLVFGRIGGHFCMCLQGRFHPYEHKMDMALCTMPVRLM

SEQ ID NO: 121950 - protein, 82 aa, Heterodera glycines
  unsure (1)..(82): unsure at all Xaa locations
GRKGGVLKSLSNDWEDHLAVKHFSVEGQLEFRALLFVPQRAPFDLFENKKSKNAXKLYVRRVFIMENCEELMPEYLNFIKGV

SEQ ID NO: 121951 - protein, 67 aa, Heterodera glycines
  unsure (1)..(67): unsure at all Xaa locations
AAKERSNSHPFNLAIMQIFVKTLTGKTITLEVEASDTIENVKAKIQDKEGIPPDQQRLIXRWGKQLE

SEQ ID NO: 121952 - protein, 108 aa, Heterodera glycines
  unsure (1)..(108): unsure at all Xaa locations
AARAEFRKGIYFTPGIGQASSMGSLLLTAGAKGMRTSLPNARIMVHQPSGGAYGXAADIVIRAEEINRMRKRLNEIYAMHTGQTVETIDQALDRDRFMSALEAQEFGL

SEQ ID NO: 121953 - protein, 195 aa, Heterodera glycines
  unsure (1)..(195): unsure at all Xaa locations
MADFDKHAAQREAESLRTLAFFGVCLSTVATVIAVLSVPFAYQHFXQIGAQMQNEVDFCKMRSGNMWREVTRTQAYSKVSHDSRHKRQAGGCCGCGVSPPGPPGPPGPSGQPGGDGQPGGSGQPGAPGQAAPRPYPPSGGCVPQCEAAQPGLPGPPGPPGPEGQNGQPGQSAPPASPGXPGPQGPPGPDGQPGNP

SEQ ID NO: 121954 - protein, 133 aa, Heterodera glycines
  unsure (1)..(133): unsure at all Xaa locations
MVEGGVITLHTRKVLNNRLLFRKQMVVDILHPNRASVPKSEVRERLAKLYKTTQDVVVAYGFRCQFGGGRSTGFANVYDSLDYAKRFEAKYRLLRQGXWSEKKKGGRKQRKERKNRQKKVRGVKKVKVQAGKK

SEQ ID NO: 121955 - protein, 65 aa, Heterodera glycines
MREVISIHVGQAGVQIGNACWELYCLEHGIQPDGKMPSDQNNQDDSFSTFFSETGNGRHVPRAVM

SEQ ID NO: 121956 - protein, 122 aa, Heterodera glycines
MAKEEYCFDAKAAAAAGQSRRPSTTASVLVQGDGQSSRFVDAIIRKVTQPPLQRFTDEITDEELKQLCKAATDVFRMQPTLVRIRPPVVVVGDIHGQFSDLQRIFTTHGPPPEQQYMFLGDY

SEQ ID NO: 121957 - protein, 69 aa, Heterodera glycines
MTESDSRIRAYKFVAYSAVTFSIVAVLSVVVTLPMVYNYVAHVRRQMQHELGFCKGSAKDIYVEVNHMK

SEQ ID NO: 121958 - protein, 169 aa, Heterodera glycines
  unsure (1)..(169): unsure at all Xaa locations
MQNEVDFCKMRSGNMWREVTRTQAYSKVSHDSRHKRQAGGCCGCXVSPPGPPGPPGPSGQPGGDGQPGGSXQPGAPGQAAPRPYPPSGGCVPQCEAAQPGLPGPPGPPGPEGQNGQPGQSAPPASPGRPGPQGPPGPDGQPGNPGESGQPGQPGKLTQAPPSLGPPGPA

SEQ ID NO: 121959 - protein, 80 aa, Heterodera glycines
PPRFERSNSHPFNLAIMQIFVKTLTGKTITLEVEASDTIENVKAKIQDKEGIPPDQQRLIFAGKQLEDGRTLADYNIQKE

SEQ ID NO: 121960 - protein, 144 aa, Heterodera glycines
GRQGLAEFDFSLCERNHALKRQMDGEGFGKQFENMTKMTSSGTTVVGAIFQDGVVLGGDSRSTQGNIIANKNSMKVHYLTDRIYASGAGGAADLEKVSQIISAELRLFELNSGLQARVVMAVRRLRQYLFKYMGHVSCYYLVGG

SEQ ID NO: 121961 - protein, 88 aa, Heterodera glycines
GRQGDSENDHGESGAKPKGISASGGWFSAFKSLVGTKQLARGDIEPAMEKMKEMLITKNVASEPAERICESVAAKLEGKVIGTFNRVA

SEQ ID NO: 121962 - protein, 154 aa, Heterodera glycines
GRLAPELLNKSVGGLAEFDFSLCERNHALKRQMDGEGFGKQFENMTKMTSSGTTVVGAIFQDGVVLGGDSRSTQGNIIANKNSMKVHYLTDRIYASGAGGAADLEKVSQIISAELRLFELNSGLQARVVMAVRRLRQYLFKYMGHVSCYYLVGG

SEQ ID NO: 121963 - protein, 137 aa, Heterodera glycines
AAKFFLEEEGREGRPFNQNLTPGSVIQEKVTRADITEFFLQPHAPIQGTGKPVEYAMLEDEIGISMDELQGVIMALSYSHQIVNVAVSMPEPVYQAHELAKRGKNNFVTLKRFKPERVPKIDKQIVAKGGKRQIISI

SEQ ID NO: 121964 - protein, 170 aa, Heterodera glycines
MADFDKHAAQREAESLRTLAFFGVCLSTVATVIAVLSVPFAYQHFQQIGAQMQNEVDFCKMRSGNMWREVTRTQAYSKVSHDSRHKRQAGGCCGCGVSPPGPPGPPGPSGQPGGDGQPGGSGQPGAPGQAAPRPYPPSGGCVPQCEAAQPGLPGPPGPPGPEGQNGQPGQ

SEQ ID NO: 121965 - protein, 181 aa, Heterodera glycines
PPSSSDALDKIRYQALTDPSQMESGKELFIKIVPNKADKTLTIIDTGIGMTKADLVNNLGTIAKSGTKAFMEALQAGADISMIGQFGVGFYSAFLVADRVTVTSKHNDDDCYQWESSAGGSFIIRNCVDPEVTRGTKIVLHLKEDQTDYLEERRVREVVKKHSQFIGYPIKLLVEKERDKE

SEQ ID NO: 121966 - protein, 71 aa, Heterodera glycines
HPFNLAIMQIFVKTLTGKTITLEVEASDTIENVKAKIQDKEGIPPDQQRLIFAGKQLEDGRTLADYNIQKE

SEQ ID NO: 121967 - protein, 150 aa, Heterodera glycines
PSRAAAKIVIIYCSSSAHFNPTKRRARRNNGKRGLLLRCNGGGSGGAVSAFGNDFNTCSCYGLSSSFVDAIIRKVRHSPVQRFTDEITDEELKQLCMAATDIFRMQPTLVRIQPPVVVVGDIHGQFTDLQRIFHTHGNPPEQQYVFLGDY

SEQ ID NO: 121968 - protein, 208 aa, Heterodera glycines
  unsure (1)..(208): unsure at all Xaa locations
MSEQSGETFAFQAEIAQLMSLIXNTFYSNKEIFLRELISNFFDALDKIRYQALTDPSQMESGKELFIKIVPNKADKTLTIIDTGIGMTKADLVNNLGTIAKSGTKAFMEALQAGADISMIGQFGVGFYSAFLVADRVTVTSKHNDDDCYQWESSAGGSFIIRNCADPEVTRGTKIVLHLKEDQTDYLEERRVREVVKKHSQFIGYPIK

SEQ ID NO: 121969 - protein, 134 aa, Heterodera glycines
MGAYKYMQELWRKKQSEVMRYLLRIRCWQYRQMEAIHRCTRPTRPEKARRLGYKAKQGFLIYRVRIRRGGRKRQVTKGQTYGKPKTHGVNQLKNTRSLQAVAEARAGRRLGELRVLNSYWVGQDSTYKFFEVIL

SEQ ID NO: 121970 - protein, 130 aa, Heterodera glycines
EIKDSKLCLNICVGESGDRLTRAAKVLEQLTGQTPVLSKARYTVRSFGIRRNEKIAVHCTVRGPKAEEIIDRGLKVKEYELYRENFSDTGNFGFGIQEHIDLGIKYDPSIGIYGMDFYVVLGRAGLRVAK

SEQ ID NO: 121971 - protein, 230 aa, Heterodera glycines
  unsure (1)..(230): unsure at all Xaa locations
GRQENIENFLRAYAGVHFSFCQLLLLVAALMLPFTMLKSPKDFWWAVIGAMVTTTVAVSIILFATASDFSVCASAARYPPVTASKFFMSFGTVMFAYGGHGAFPTIQHDMRKPYRFRRSVFCAYLIIFCMYLPVSLLGYLAYGDSLIDSIIPSLQDLILQQAVNILITLHVVLALTIVFNPLNQELEELLNVPQEFGFRRILCRSGMMLAVVAVAETMPNFGVLLDLXRR

SEQ ID NO: 121972 - protein, 220 aa, Heterodera glycines
MADIEAAPAPKSDEEAKRQALAAKKAEVRKRLEEAGKFGKKKKGFLTPERKKKLRKLLMIKAAENLKNQQKQLDSERQNVLSKRIPQCPNIDAIEDKGQLEKMYNDLFQQMLKLEEEKYDINFVVSQKDAEISEITISVNDLRGKFVKPTLKKVSKYDNKFRKAALTEGESTAPKEDFRSKLKTVEKKNVMEELESKQKNRRRSRNGRRMWKMTPRDAGR

SEQ ID NO: 121973 - protein, 203 aa, Heterodera glycines
AINMDLWQEAFKSAEDLHSFMQLGKEKHKKIIRPTSYANYYEKISLVFWKGGNILFHAASLLQRFCIFKHMRRQFGGEEAMDQATRVLLATLSIPEGAESASMLTTHLHIEEQHSANIRILSSLLRLPITPSRSGILKEIVRLHIPELASPAAYALYKCVEMELNPLRTAVNVQMHLSDIEKLGHLEYNQYADPVKDVVRHGF

SEQ ID NO: 121974 - protein, 74 aa, Heterodera glycines
AAKTLSIWLSCGGWGRTLTGKTITLEGEGSDTIENVKAKIQDKEGVPPDQQRLIFAGKQLEDGGAWGDYNIQKE

SEQ ID NO: 121975 - protein, 65 aa, Heterodera glycines
  unsure (1)..(65): unsure at all Xaa locations
GRQEKGVDLSSFSGSGPXGRILAADLSKAEGEFTSRGTQSSASSFIDIPLSNMRKTIAKRLXEAK

SEQ ID NO: 121976 - protein, 169 aa, Heterodera glycines
QCLKRAGETFAFQAEIAQLMSLIINTFYSNKEIFLRELSSNSSDALDKIRYQALTDPCEMESGKELFIKIVPNKADKTLTIIDTGIGMTKADLVNNLGAIAKSGTKACMEALQAGADISMIGQFGVGFYSAFLVGDRVTVTSKHNDDDCDQWESSGGGSFIIRNCADPE

SEQ ID NO: 121977 - protein, 142 aa, Heterodera glycines
  unsure (1)..(142): unsure at all Xaa locations
MSSDKNKERTFIAIKPDGVQRGLGAKIIKQFEQRGYKLVAMKLAKATVPHLEVHYQDLKDKPFFAGLVKYMASGPIVAMVWEGLDVVKQGRVLLGATNPLASAPGTIRGNFCIEMGRNICHGSXSVPSADREIAHWFKPEEL

SEQ ID NO: 121978 - protein, 95 aa, Heterodera glycines
SNASCTTNCLAPLGEVINDEFGIIEGLMTTVHAVTATQKTVDGPSGKQWRDGRGAAQNIIPASAGAAKAVGKVIPELNGKLTGMAFRVPTPNVSV

SEQ ID NO: 121979 - protein, 48 aa, Heterodera glycines
  unsure (1)..(48): unsure at all Xaa locations
MATYNPNYESIGQAFVQHFYTKFDVPDGATRTVGLHDLYDAEHSFMTX

SEQ ID NO: 121980 - protein, 157 aa, Heterodera glycines
  unsure (1)..(157): unsure at all Xaa locations
MAKSDVPALSTTNQPYPYKEQTPKGVFEKMGLRKTPDGASIGEFAVMRMDDMMNLIGRGSLWPLTFGLACCAVEMMHFAAPRYDMMRFGVVFRATPRQCDLSIGSGTVTNKMAPALRRSYDQMPHPKWVISMGSCANGGGDYHYSYXVLRGCDRVIP

SEQ ID NO: 121981 - protein, 99 aa, Heterodera glycines
  unsure (1)..(99): unsure at all Xaa locations
AAKTKPIWTXNPDDVXNEEYAEFYKSLSNDWEDHLAVKHFSVEGXLEFRALLFVPQRAPFDLFESRKSKNAIKLYVRRVFIMENCEELMPEYLNFIKGV

SEQ ID NO: 121982 - protein, 207 aa, Heterodera glycines
SFHFYCYSFKMTQNGMTTASNEFNELNDFLSTRAYLHGFLPSHEDQYVFKCIAAAPSASEYPHIARWYKHIKSYEDAERATWPKKAGQPPQKVVSKDSAPPAKKADAEEDFDLFGDEDSDDEEKKRITEERLKAYAEKKAKKPGPVAKSNVIYDVKPWDDTIDIKDIEANVRSIECDGLVWGTSRILPVAFGVQKLQIGCCVVDEKV

SEQ ID NO: 121983 - protein, 118 aa, Heterodera glycines
  unsure (1)..(118): unsure at all Xaa locations
RITQELAEXKQEPITGCTATPMDDGKDLHHWRASIKGPPESPYEXGTFHLDIVLRRDYPCTPPIVKFINDIHHPNVGERGDICLDIXKQMWAPALTISKVLLSISSLLCTRIRTVRSA

SEQ ID NO: 121984 - protein, 135 aa, Heterodera glycines
PQGLSRATFCPHQLRQKAVKTPLQKAVTSAAERALDIVGNASRVRLQDLRDNPGARTVGRQVRAKGHNQAGHTIGELQHASKPPLGWVWGDYYKPWQRSFDGDRRFNGDINLRREYIPISLVELQRLIDLGWLDT

SEQ ID NO: 121985 - protein, 97 aa, Heterodera glycines
  unsure (1)..(97): unsure at all Xaa locations
MAPRGNNMLPNAHFXKHWQRRIKTWVNQPARKERRRAARSAKAARLAPRAAGGLLRPVVRCPSVRYNKKCRVGRGFTLEELKRSGMGKYEARSLGIA

SEQ ID NO: 121986 - protein, 188 aa, Heterodera glycines
  unsure (1)..(188): unsure at all Xaa locations
MVKPKVGINGFGRIGRLALRAAIEKDTVQVVAVNDPXIKLDYMVYMFNYDSTHGRFKGKISTNAGNLVVEKEGKSAHTIKVFNLKDPAEIKWGEAGAEYVIESTGVFTTIEKASAHLKGGAKKVVISAPSADAPMYVMGVNEDKYDPAKDDVISNASCTTNCLAPLAKVINDEFGIIEGLMTTVHAVT

SEQ ID NO: 121987 - protein, 65 aa, Heterodera glycines
MRRIFVKTLTGKTITLEGEASDTIENVKAKIQDKESIPPDQQRLIFAGKQVEDGRTLADYNIQKE

SEQ ID NO: 121988 - protein, 125 aa, Heterodera glycines
  unsure (1)..(125): unsure at all Xaa locations
TNSSRSKSGGVRQHAAQREAESLRTLAFFGVCLSTVATVIAVLSVPFAYHHFQQIGAQMRSEVDFCKMRSGNMWREVTRTQAYSKVWHDSRHNRHAGGCCGCGVXPPGPPGPPGPSGQPGGDGVP

SEQ ID NO: 121989 - protein, 99 aa, Heterodera glycines
KTKWVPRKQHASNAHFHKHWERRIKTWVNQPGRKERRRAARSAKGGRLGPRPAGGLLRPVVRCPSVRYNKKCRVGRGFTLEELKRSGMGKYEARSLGIA

SEQ ID NO: 121990 - protein, 69 aa, Heterodera glycines
MTEWGSRIRAYKFVAYSGVTFSIVGVLSVVGTLPMGYNYVAHVRGQMQHELGFCEGSAKDIYVEVNHMK

SEQ ID NO: 121991 - protein, 178 aa, Heterodera glycines
GRQGYYSYNVYLLLGNVSSNWVKYLSLGTALVVGYAVYIDRKRRLDPEYKQKIRQNRKQKQANFLYAKMSGGVDFPDPSDPQANEIFFFSQITLGEEKMQTGHIEEGITHLSNAIVTCSKPDELLRIFQQTIPPECVSLLVQAIPGAKMRRNASSSYRHGREPIDLDCAKIDDIGDNA

SEQ ID NO: 121992 - protein, 71 aa, Heterodera glycines
GRQAESDGRIRAYKFVAYSAVTFSMVGVLSVVGTLPMGYNYVAHVRRQMQHELGFCKGSAKDIYVEVNHMK

SEQ ID NO: 121993 - protein, 175 aa, Heterodera glycines
  unsure (1)..(175): unsure at all Xaa locations
MCPLFLLLSAFALTAFCLFPPSFAAKDAQQLVEDGKIGQMPPKCLMSLGEQKSKWHDEGEKIEAGSIVYECRGAKMVPIGCLDEFGQQIXLNETTVAKGLLMRCSLSRWATDLQLKIIGCVPKGKANETILVGEKWTEKESQTWWECAAEGTTVRARLGGCVDEPSRSRLRIGES

SEQ ID NO: 121994 - protein, 103 aa, Heterodera glycines
AAKLRSHCKKWLYVGGQDDHEYGPYTSTEMLHWLNNSYFDGSLRLRTTNDNRFYTLSEWIQACGNEIPFALDVHSMESLRATANSRNYRGIQPTIDSVHNHQQ

SEQ ID NO: 121995 - protein, 110 aa, Heterodera glycines
MGGIHGVGRPDNSTKSCKARGSDLRVHFKNTHETARAIKHMPWKRAIRFLENVREKKEIVPFRHFNGGVGRKAQAQAWGTTQGRWPKKSAEFLLQLLRNAESNAEVKGLD

SEQ ID NO: 121996 - protein, 135 aa, Heterodera glycines
  unsure (1)..(135): unsure at all Xaa locations
MVGIASLCSLAAILATLVGIPQLYTQINEMNNRVMDGVQAFRVNTDSAWTELMEVXISVTPPTRPRENPFNSIFLRQKRQGLPPQCVCQLQQPSCAPGAPGPPGPPGTPGEPGGAGHPGSPGQRRTTSTAMPSAR

SEQ ID NO: 121997 - protein, 31 aa, Heterodera glycines
MKLVRFLMKLSHESVTIELKNGTQVSGAIQG

SEQ ID NO: 121998 - protein, 94 aa, Heterodera glycines
MLILQELDPPTEAVIETEGQVVAHWENHCLGQGTLYWIESALVWISHGTKNGFRLPIPSIVVHAASGANEDFSEPCLFLMVDYSKTDIEYVPAE

SEQ ID NO: 121999 - protein, 88 aa, Heterodera glycines
  unsure (1)..(88): unsure at all Xaa locations
PPREMVARILPECVEEFQRTWGNRSEVKIDNEYFLSPESAGGVXLLAKDGKIRVSSTLEARLDLIADKITPQVRTALFGPNQNRRFFD

SEQ ID NO: 122000 - protein, 86 aa, Heterodera glycines
  unsure (1)..(86): unsure at all Xaa locations
MARRYDTRATIFSPXGRLYQVEYAMEAIGQAGTCLGIRAPDGIFIAAQKLTANKLLDDRIMSEKIYKVSANIFCTVAGITSDANVL

SEQ ID NO: 122001 - protein, 86 aa, Heterodera glycines
MGQKLAGGLDDYFHPETAPRIDRPPTFDPLYGFPKGRKPREMQASWEELEKMKMPISERDYCAHKMVALRKCVWDRAPFASHYCHG

SEQ ID NO: 122002 - protein, 86 aa, Heterodera glycines
  unsure (1)..(86): unsure at all Xaa locations
MARRYDTRTTVFSPXGRLYQVEYAMEAIGQAGTCLGIRAPDGIFIAAQKLTANKLLDDRIMSEKIYKVSANIFCTVAGITSDANVL

SEQ ID NO: 122003 - protein, 145 aa, Heterodera glycines
MGISQDRWHKRRKTGGKRNPIHKKRKFEMGRPAANTKIGPKRIHLVRCRGGNIKHRGLRLDTGNFAWASEGCTRKTRIIDTMYNASNNELVRTKTLVKGMIVSIDAIPFRQWYEAHYALPLARKKGQKLTEDEEARIGGAQKRSK

SEQ ID NO: 122004 - protein, 95 aa, Heterodera glycines
PPRLSETEVEEKKKRVAQSPGGLDPQEVFDSLPAEMQEAFETQSMAKIFEVAKSMDSEVFKYHLDRCTASGLWIPNAKEAEGHGQEEEEKETEEK

SEQ ID NO: 122005 - protein, 78 aa, Heterodera glycines
AAKAGCAADRSIFLFDTRQKVPLSRVVLKLRTNSIAWHPLEPFTFVAANEDYNLYTFDMRRLDSARHVHQGHTSAVMD

SEQ ID NO: 122006 - protein, 105 aa, Heterodera glycines
  unsure (1)..(105): unsure at all Xaa locations
AVDESMHQLVTLNLSEIKLFREWYLNDVDFSVLSLFDYVAVNRKCXKYLPPKCGCYLHNRFRQVTCSVVERLDSSLMMYWRNNRDRLMVVRIVKHVSEIIDLITA

SEQ ID NO: 122007 - protein, 88 aa, Heterodera glycines
MRLSFLRASEKHFGNLSKAYGWYYVRIAPVEQKVWKGFFFDAFVKPVKEQLPHWWMFFFPVVTYFLVTDWAKKEYRRLGRIKEFTDEE

SEQ ID NO: 122008 - protein, 108 aa, Heterodera glycines
MNSLYFEDLFTVKNIDPDGKKFDRVSRLFCDSESFKMDLILDVNTQLYAMGINDKFRLMLCTSIRDDGLTEEGEYDKSIENIPRVRMFEYVMYGKIYRIENDEGTAET

SEQ ID NO: 122009 - protein, 85 aa, Heterodera glycines
PPRLAVSLDDYFHPETAPRIDRPPTFDPLYGFPKGRKPREMQASWEELEKMKMPISERDYCAHKMVALRKCVWDRAPFASHYCHG

SEQ ID NO: 122010 - protein, 52 aa, Heterodera glycines
  unsure (1)..(52): unsure at all Xaa locations
MGISQDRWHKRRKTGGKRNPIXQKKRKFEMGRPAANTKIGPKRIHLVRCRGG

SEQ ID NO: 122011 - protein, 173 aa, Heterodera glycines
GQLAGLIAIADPVKPTTPAALRALEAEGVHVIMLTGDNRTTAAAVARRLGIAEVEAEVLPEQKSAVVAKLKAQGKVVAMAGDGVNDAPALAAAEVGIAMGTGTDVAMESAGVTLLKGDLTGIVRARRLSQATMANIRQNLFFAFIYNAAGIPIAAGVLYPVFGLLLSPIIAAA

SEQ ID NO: 122012 - protein, 47 aa, Heterodera glycines
MSDNKEELVQRAKLAEQAERYDDMAQSMKKVTELGAELSNEERNLLS

SEQ ID NO: 122013 - protein, 150 aa, Heterodera glycines
GRQASLRKENARSENIVGIASLCSLAAILATLVVIPQLYTQINEMNNRVMDGVQAFRVNTDSAWTELMEVQISVTPPTRPRENPFNSIFLRQKRQGLPPQCVCQLQQPSCPPGPPGPPGPPGTPGEPGGAGQPGSPGQPGQQAPPCPPPV

SEQ ID NO: 122014 - protein, 70 aa, Heterodera glycines
MAEQREDHIQRAKLAEQCERYDEMAKEMKQVAEMSVELTEEERTLLSAAYRRAISTRRSAWRVIESHVKK

SEQ ID NO: 122015 - protein, 95 aa, Heterodera glycines
AAKKQIRTCWVWRKNNRWWRYLPRRNDSHNLIDMDELGEQCATFSDPMPADPPKLWVAWLYTDSYGSGRKIRDQVTKLFGKDAKTGEMQVFKNTL

SEQ ID NO: 122016 - protein, 71 aa, Heterodera glycines
AAKRNSYWGVKSTEVTKKLFADLRSDYPETIGQNFDVKFVRDLTTGYDNAQPDDRAILPLSTSSEMVTFTL

SEQ ID NO: 122017 - protein, 77 aa, Heterodera glycines
PPRSNSHPFNLAIMQIFVKTLTGKTITLEVEASDTIENVKAKIQDKEGIPPDQQRLIFAGKQLEDGRTLADYNIQKE

SEQ ID NO: 122018 - protein, 78 aa, Heterodera glycines
AAKRSNSHPFNLAIMQIFVKTLTGKTITLEVEASDTIENVKAKIQDKEGIPPDQQRLIFAGKQLEDGRTLADYNIQKE

SEQ ID NO: 122019 - protein, 140 aa, Heterodera glycines
PPSENIVGIASLCSLAAILATLVVIPQLYTQINEMNNRVMDGVQAFRVNTDSAWTELMEVQISVTPPTRPRENPFNSIFLRQKRQGLPPQCVCQLQQPSCPPGPPGPPGPPGTPGEPGGAGQPGSPGQPGQQAPPCPPPV

SEQ ID NO: 122020 - protein, 71 aa, Heterodera glycines; identical to SEQ ID NO: 121966

SEQ ID NO: 122021 - protein, 77 aa, Heterodera glycines; identical to SEQ ID NO: 122017

SEQ ID NO: 122022 - protein, 132 aa, Heterodera glycines
KCNYGTIVHPLYAQQVTFPYNIYYMERRRRRMDTTVRAIRKNQQQLTLDAIQALNLLSAKLSDNKYFCGDKPCSIDALVFGCLAPLLRTPLPNDRLQLHLSATPNLVRFVDSILSIYLPLPEKVIKEQAMAA

SEQ ID NO: 122023 - protein, 79 aa, Heterodera glycines
GRQERSNSHPFNLAIMQIFVKTLTGKTITLEVEASDTIENVKAKIQDKEGIPPDQQRLIFAGKQLEDGRTLADYNIQKE

SEQ ID NO: 122024 - protein, 190 aa, Heterodera glycines
AATFEEEIIDDYFSPVLKMKGRAKQQQRMGSFPDFLLLQLGRFAFDWILGTQHKLDVDVHVSDELDINAFFSTGELQPNEKSLPVDDTSAVIKERLWQEPNHEIVAKLLSMGFTENAAKKAALFTKNESAESAINWILQHSDDTDVNDPHPMLTKQSTPPLTSNQGQNASQKVRHGKGHYRLRAFISHIG

SEQ ID NO: 122025 - protein, 109 aa, Heterodera glycines
MSSRATPGGIGFQVVAKQASKFNDQEGKLILDWVKKLSGENFSTDGSRENFYKLLKDGTLLCKLANGIQPGSVKKIQQPTGNFACMENINAFVSFAKAQGVPTEETFQS

SEQ ID NO: 122026 - protein, 67 aa, Heterodera glycines
GRQVQIFVKTLTGKTITLEVEASDTIENVKAKIQDKEGIPPDQQRLIFAGKQLEDGRTLADYNIQKE

SEQ ID NO: 122027 - protein, 144 aa, Heterodera glycines
AAKNARSENIVGIASLCSLAAILATLVVIPQLYTQINEMNNRVMDGVQAFRVNTDSAWTELMEVQISVTPPTRPRENPFNSIFLRQKRQGLPPQCVCQLQQPSCPPGPPGPPGPPGTPGEPGGAGQPGSPGQPGQQAPPCPPPV

SEQ ID NO: 122028 - protein, 721 aa, Heterodera glycines
MSEQSGETFAFQAEIAQLMSLIINTFYSNKEIFLRELISNSSDALDKIRYQALTDPSQMESGKELFIKIVPNKADKTLTIIDTGIGMTKADLVNNLGTIAKSGTKAFMEALQAGADISMIGQFGVGFYSAFLVADRVTVTSKHNDDDCYQWESSAGGSFIIRNCADPEVTRGTKIVLHLKEDQTDYLEERRVREVVKKHPQFIGYPIKLLVEKERDKEISDDEAEEEKKEDEAKEEEKKPEDDVSDDEAEKKKEEGDKKKKKTKKIKEKYTEDEELNKTKPIWTRNPDDISNEEYAEFYKSLSNDWEDHLAVKHFSVEGQLEFRALLFVPQRAPFDLFENKKSKNAIKLYVRRVFIMENCEELMPEYLNFIKGVVDSEDLPLNISRETLQQSKILKVIRKNLVKKCMDLFEEISEDKDNFKKFYEQFAKNIKLGIHEDSVNRKKLSDFLRYYTSASGEEPCSFKDYVSRMKENQTCIYYITGESKDVVQNSSFVERVKKRGFEVIYMVDPIDEYCVQQLKEYDGKKLVSVTKEGLELPESEEEKKKFEEDKVKFEKLCKVIKDILDKKVQKVSVSNRLVSSPCCIVTGEYGWSANMERIMRAQALRDSSTMGYMASKKNLEINPDHSIIKSLRDRVEKEQDDKTAKDLVVLLYETSLLTSGFSLEDPQQHASRIYRMVKLGLDIPDEEEPAEQQPSTSGEPTIAEKIAGAEEEASRMEEVD

SEQ ID NO: 122029 - protein, 374 aa, Heterodera glycines
MFLLFLLSMLLLQTNGWRARERAIELADSDESIELQNIGQRKTDIRTPTERMSALRQMIERGFSDWNAYKQKHGKAYADQEVENERMLTYLSAKQFIDKHNEAYKEGKVSFRVGETHIADLPFSEYQKLNGFRRLMGDSLRRNASTFLAPMNVGDLPESVDWRDKGWVTEVKNQGMCGSCWAFSATGALEGQHVRDKGHLVSLSEQNLIDCSKKYGNMGCNGGIMDNAFQYIKDNKGIDKETAYPYKAKTGKKCLFKRNDVGATDSGYNDIAEGDEEDLRMAVATQGPVSVAIDAGHRSFQLYTNGVYFEKECDPQNLDHGVLVEGYGTDPTQGDYWIVKNSWGTRWGEQGYIRMARNRNNNCGIASHASFPLV

SEQ ID NO: 122030 - protein, 570 aa, Heterodera glycines
MDLLKSYDGSSSSDNEQELADIPSSSNHNKLLALKIPSINLTPNVIEQRAIQQVAVVDPKTKELYHNPRFDELFRPESGPQNPFKSEHQRAEKNTLTGYVEPAHFNAFHFERSLRSYDTLGYADNPTADTTSAKFVGDVGQAQEKAGESLFESVKTGGQKRKRVINYDASNVDGYTGPWARFEDEKTFARPDPELQKEMDEIVRKRKLKSRAGRRAAIAELHLAEESTKLHIKDDTDYLGRSFMEPPKYTGTNLREDFVPDRCFPPTKQAHTYSSHTKPVTAIRWFPRSAHMFISCSMDGKVKLWEVYGNRKLIRTYTGHKVPVKDIYFNNTGTEFLSAAYDNYIKLWDTETGQVKNRYTIGGHRAYVVKFNPDDDKQNIFMAGMSNKKIIQWDTRTGEIEQEYDRHLGPVNSITFFDKNRRFVSTSDDKSLRIWEFGIPVDTKLIQHAGLHSIPSMTRAPNEKWIVGQSMDNRIVLFQIVDDKLRFARKKAFRGHNTAGYACSTDFSPEMSFLASGDADGKITMWDWRTHKIVSTWKAHDNVCISTLWHPHEKSRMISCGWDNVIKMWV

SEQ ID NO: 122031 - protein, 121 aa, Heterodera glycines
MAENIEEILAEIDGSQIEEYQRFFDMFDRGKNGYIMATQIGQIMNAMEQDFDEKTLRKLIRKFDADGSGKLEFDEFCALVYTVANTVDKDTLRKELREAFRLFDKEGNGYISRPTLKELNA

SEQ ID NO: 122032 - protein, 150 aa, Heterodera glycines
MSEEESQYSDEEVEEESIAADEVSVQEPAPPKEEEPAPEAEAEAPPAEEKEEEEEEEPGSPGGAGDAPKEEFRRTSVTESVAPMAQLRRAPPPQPKPAEESMTEAEAAMLAVKKRHEEEEEAKMRDNDERRRQELAAVEDELRVLKELNA

SEQ ID NO: 122033 - protein, 128 aa, Heterodera glycines
MQIFVKTLTGKTITLEVEASDTIENVKAKIQDKEGIPPDQQRLIFAGKQLEDGRTLADYNIQKESTLHLVLRLRGGIIEPSLRMLAQKYNCDKQICRKCYARLPPRATNCRKKKCGHSNDLRIKKKLK

SEQ ID NO: 122034 - protein, 209 aa, Heterodera glycines
MDQFDFSYLNKAFKRALEPKLPSTDIRPIPDERCVNTAHLGEAEKERLEQIGLKAIAEGRVAAVVLAGGQASRLGSAQPKGVLRLGTGLGQDDVDSLLFIQAAQIVRLQRMAAEQFPAEAAKSGGRITWLVMTSNTTNAAVHDHLNAVLAETGLSSDQVLIFTQKEIPAFDFDGNALMKSSTELVTAPDGNGGFYDVVRPLLAELEKRG

SEQ ID NO: 122035 - protein, 288 aa, Heterodera glycines
MEQHENAGRKRHTKDRFRYGNYNRYYGVRNQGFDHDPRVDLFPVQWFHGRRVLDIGCNVGHLTLEIAKKLGPAHIVGIDIDDHLVGVARKNIRHYCGSAQKLIGKFPASLRKMGKEEGPSSTTAKPAVLPYGQFPKNVWFLRENYVLDCDEFLEMVREEYDVILALSITKWVHLNWGDDGLKRFLRRTFLNLRPGGRLLLEAQPFPSYYKKAKMTSDMFETYKAIQFKPYQFKDFLLSDTVGFSECEELGTPTAISKGFERPILVFKKASSSTTPTTTKRKRERCLRP

SEQ ID NO: 122036 - protein, 113 aa, Heterodera glycines
MPEAIPEGDYERGKKIFKQRCLQCHVIDSTATKTGPTLNGLWNRKSGSVPTFDYSAANKSKGVIWNKETLFEYLLNPKKYIPGTKMVFAGLKKAEERADLIKFIEVESQKPPS

SEQ ID NO: 122037 - protein, 180 aa, Heterodera glycines
  unsure (1)..(180): unsure at all Xaa locations
EVRHAVTGKHNSKGWQVIPCQGWNLLDGCDGVGSWXREGAKHEITLQNSRYCDVLDKCKETVKGAHKYVNDRKAEEFLRQNKLCPPPKAHRTMTCSKIFTIEDLPKSFFGPLQSNEYWLTFSFTDGKDKKLGCARLWVDVCKYHLQDKQQKCLRDPNAFKNFINEISSQAEQIRQRTNSG

SEQ ID NO: 122038 - protein, 150 aa, Heterodera glycines
MPPTSKKTGKAVAKAVEAKKKLAKGQHIVRKKKMRTSVHFYRPRTLKLARSPKFPRKAVPKRNKLDSFSIIKHPLTTESAMKKIEDTNTLVFIVDVKANKHQIKSAVNKLYNIEAQKVNTLVTPDHTKKAYVRLAADYDALDVANKIGII

SEQ ID NO: 122039 - protein, 150 aa, Heterodera glycines
MAGGKRKAGKDSGKAKSKKIISRSARAGLQFPVGRIHRFLKKRTTSTGRVGATAAVYSAAILEYLTAEVLELAGNASKDLKVKRVTPRHLHLAIRGDEELDSMVTATIAGGGVIPHIHRSLMRKPPSQLNHSHQQNHSQQQMTNVGNGDN

SEQ ID NO: 122040 - protein, 70 aa, Heterodera glycines
MPRQITDIKQFLLTARRKDAKSVKIKKNKENTKFKVRCTRFLYTLVVDDKEKAEKLKQSLPPGLQVKELK

SEQ ID NO: 122041 - protein, 264 aa, Heterodera glycines
SLRFANLSVLTKRHEMALCMWQHGEEALAKALVACRIYKSLANEAAEDYLEVEVCEELKTYAEEFRQLSLELLDHCYKEDDAQTLQLLTYELSYWGHQTCLSLAVIVNNKQFLAHPCCQILLADLWHGGLRIRSNSNIKVLMGILFPPSIFLLEFKSREELLLQPQTAAEHQKDINESSSSSSDSSSSTSSSDSESDGDESDAGERGGATAEERRRTSHSHGSMQSLNFTSIFKSKRKRRRPSHSRSSTTAKEDIEMGKQRNRV

SEQ ID NO: 122042 - protein, 87 aa, Heterodera glycines
IQYPFNLAIMQIFVKTLTGKTITLEVEASDTIENVKAKIQDKEGIPPDQQRLIFAGKQLEDGRTLADYNIQKESTLHLVLRLRGGKN

SEQ ID NO: 122043 - protein, 232 aa, Heterodera glycines
MKRPIMQKDCTSKGENVSQLDKSTSKMEGSKPLQIEEYDTSDEEDLRNTIGNIPVQWYNDYDHVGYTLSGDKIKKDAIKTDEIDAFLQKEEDSDYWRKVFDRQSGQQMALTDQQVEKLNAIADNRFPEIGYNPYPPFLDIFSSVREIHPISNRPPDKRSFVPSADERRIVGRMVHAIKMGWLKRKEPPKGSEEEEEPRLYDLWDDEGDEQRKSKSQMARVRMHLPAPKVKPP

SEQ ID NO: 122044 - protein, 220 aa, Heterodera glycines
EESEDDESEAITYGVLSIVPLNGTQNFQSQVAALVLQRSKKHATDEIFKKFENVLGVGRVSSKVGFLINERMLNFPAQIAGPAFHSLAEDYNGLAEERRFEHILAILKVRICTEQCASSSTSPNIGKKRKLGKAARKRLAVERTIESDIIFDNLEEQMLFQHSSDFPFFQYPVESEIEKSSKFHSLRRDGRIFRPFRRVCLLSVDQFLQFASSVVRSFSV

SEQ ID NO: 122045 - protein, 206 aa, Heterodera glycines
MPNIMGLHGGSMIAMRSKDSVVIACDLRLGEQAMKNIATNATKIHPISDNVFIGLTGFNADATTVLNKLRTHQAIYEMREQRPMSPKALTSYLAWMLYKRRFGPFLIEPIIVGLNQQNEPFISHMDVVGSVSEPEDYTVGGTGGDLAMSLCEALWRPDMTSEEMTVAVGQAMLAVVERDASTGWGVVIHTITAEGVTTKMIKSRMD

SEQ ID NO: 122046 - protein, 198 aa, Heterodera glycines
MASSSSDHSAYSKQVLEEFWPGQNVKIGHMTMNSFREVNRHSELPIARIKKIMKIEEGVKTQMISAEAPVLLAKAAELFIEELTLRAWLNTNDNRRKTIQKSDIAAGAAKSEMFDFLIDILPRDELQKEQSVDYDGTEIQVVDDGAEEGPTMADGQQNVQYILQYADSGEMENSMVQLEDGRIIHATQIGQPIPLSSA

SEQ ID NO: 122047 - protein, 313 aa, Heterodera glycines
MSENKSEGGAEKKKSGGFNTKKFLLDLASGGTAAAVSKTAVAPIERVKLLLQVQDASIHITADKRYKGIIDVLVRVPKEQGFLSLWRGNLANVIRYFPTQALNFAFKDTYKRVFTQGVDKEKQFLKFFAMNLASGGAAGATSLCFVYPLDFARTRLAADVGKADAREFKGLADCIMKILKSDGPIGLYRGFFVSVQGIIIYRAAYFGCFDTAKMLFSPEGKQMNFFVNWAIAQVVTVSSGVLSYPWDTVRRRMMMQSGRKDIMYKNTLDCAIKIIKNEGLLKGMFKGALSNVFRGTGGALVLAFYDEIQKYIH

SEQ ID NO: 122048 - protein, 96 aa, Heterodera glycines; identical to SEQ ID NO: 121114

SEQ ID NO: 122049 - protein, 188 aa, Heterodera glycines
MHDIDEPREIFLSADDAFVSDALETIGLTFVGTEDELETAPVFAPEFAHQHFESEKIVGYKNLKVSVLYSDPTLFLTSFYQCEQKEDDSTKCDDIEYRIKDALPQTQLNAYLTIEKFRQKLSEQKNFVPFGELITKFCLKDSEIEHNFILYKFEKKQQNDAQFDQGCKFLERVQALAHWYIDAVSYTD

SEQ ID NO: 122050 - protein, 385 aa, Heterodera glycines
SDSPVPNWLLNIGPISCHAWNKDKTQLAVSPSNNEIHIFARSETVWNPLHVLREHDLLITGLDWAPNTNRIVSCSHDKNAFVWTWEAEKNSWKPEMVVVRINRAATCVKWSPNENKFAVGTGARLVAICYYERENDWWVAKQIKKLIRSTVTSLNWHPNNILLAVGACDFKTRVFSAYVKEIDEKPTPNPWGTKMPLGELLKEYQSTGWVHDLAFSPSGCKLAWVSHDSSIAVIDKSNSQPQERPIQHKTAFLPFTSVRWVNETHIVTAGHDCSPMLFTFDGTALNFKCKLDVPPENKNGSNVSSAFAMFRSIDKKALSADSPLGSTALKTLHQNSIMQIQPHTVSSQSGTISKFTTCGLDGVVALWDVQKPLGMPLANGAAQMS

SEQ ID NO: 122051 - protein, 200 aa, Heterodera glycines
MPEQSSGADEYESLAPTYSLWVHLAAGAAAGMAEHCVMFPLDSVKTRLQSLCPCPESTCPTPIHGVASMVRREGFWRTFRGVNAVAVGSVPAHALYFTVYEKFKSSLTGNTHGHSNSFSYALAGMAATVVHDLVMNPAEVVKQRMQMLYSPYGGSLECVRCIFRNEGMAAFYRSYSTQLFMNVPFQAVHFVCYEFWQEQF

SEQ ID NO: 122052 - protein, 184 aa, Heterodera glycines
VISSTLFLESLFDLSINSCKMTISKNNKMMAHLNYKMKVIVQDSRVFIGYFKAFDKHMNIILADCEEMRRIKPKQGAKKSNVEEEKRILGLVLLRGDKIISISVEGPPQKEDSGVQLPKAGGLGGPGQGRGAGRGMPMGVVPPMGAVPPGLQGAVRGIGGPGMGGPMQPGYMQGMPQGMPPRPF

SEQ ID NO: 122053 - protein, 190 aa, Heterodera glycines
MQIFVKTLTGKTITLEVESSDTIDAVKAKIQDKEGIPPDQQRLIFAGKQLEDGRTLADYNIQKESTLHLVLRLRGGGKKKKKKTYTTPKKIKHVHKKVKLAILKFYKVDDNGKITRLRRECPAKTCGAGVFMAWHVDRQYCGKCGLTYKLDPATIKKNMAAAAKASKPAAAAKPAAEAAAAAGKGKGKKK

SEQ ID NO: 122054 - protein, 309 aa, Heterodera glycines
LRRFKPGAKIKNPFIGGGARMAVDANFKAYSCILSLLLRLRQACVHLSLTRNAIDIDAFKQDEGETDSDAENLVAKALEMSMAQMSLEEEALERNEEREKDEGQQIERLFEKEHQSTKVNALMNRLDGVVQNGDKCVIVSQWTSMLALIEFHLRQKAISFTSITGEVRTEERQSRVDAFNRTNTGPKVMLLSLTAGGVGLNLIGGNHLFMIDLHWNPALELQASDRIHRLGQKKNVFIHKFVCASTIEQRVLQLQEKKNAMATSVLEGAAKKLGNLSKDDVMYLFELEKRPNNQQKAGQSQKPTTSSQM

SEQ ID NO: 122055 - protein, 216 aa, Heterodera glycines
MTRGSSAGYDRHITIFSPEGRIYQVEYAFKAANTATLSAVGIALDETAVIAVQRRVPDKLVDPSSVKSIYKLSSTVSCGVIGIVPDAMFQVRRAQSEAARWKYENGYEMPISELARKMAEINQYYTQVAELRSLGTLMLMISYDDEKGASVFSIDPAGHYISVRGYGIGVKQQQINGFLEKKLKSKDRKFGDTEVIQLALEALQTGLGIDLNADQV

SEQ ID NO: 122056 - protein, 148 aa, Heterodera glycines
MADAAAQEQKKKRTFRKFVYRGVDLEQLLEMNEKQFNQMIPARQRRKMNRGLNRKHKSLLVRLRKAKLNCPELMKPECVKTHLRDMIVLPEMVGCVVGIHSGKAYNQVEIRAEMIGYYLGEFSITYKPVKHGRPGIGATHSSRFIPLK

SEQ ID NO: 122057 - protein, 425 aa, Heterodera glycines
MTAKLYGNQDNFRVKKVLIAAKLSGKDIKAIPQLPPTNLFPLGQAPAFDDGKVCLFGAEAISKYLLGTGSIYLPQNPELDQWIGWTASSLQPNVLSYVLPCVSAAKIDQNALETAKNELLAQLSLFDQILLPKTFLVGERLSLADISVAIDLLPAYQYVLGEEARKGLVNVNRWFQTVVSQPGIREVLGEFSFIKDPLTFDEKEYNKLLNAAGQPAKKEQKPEKQKGAKEEKPKSAKEEKPKKKAKEEADEEMDAADEAIAAQPKFSDPLAALPPGSFVMDSFKRVYSNEDTATKAIPYFWENFDPTNYSIWFSEYKYPEELKLVYMSCNLIGGMFQRLEKMKKHAFASVCLFGTDNNSTISGIWIWRGQQLAFELCQDWQVDYESYEWKKLEPENEADKKMVNEYFMWEGDFGGKKFNQGKIFK

SEQ ID NO: 122058 - protein, 190 aa, Heterodera glycines
MSKQIRTCWVWRKNNRWWRYLPRRNDSHNIIDMDELGEQCATFSDPMPADPPKLWVAWLYTDSYGSGRKIRDQVTKLFGKDAKPGEMQVFKNTLSTNKQLWKIKHLLEIRPVTFPNGEPGQEDATHLEIMADGRCVINRQSLPNVDDFQLIDHSKQFSPRYLASRLMSKDVTKQDVYEDTVYNPENISIG

SEQ ID NO: 122059 - protein, 521 aa, Heterodera glycines
MKFMASMVTSFPVSFFLFFSTALIHGTMGGLFWSKKPADSADDSLWSRYHDQNAMEELLEKVHSKCPNVTRLYSVGRSVQGRDLAVIEFSLHPGRHQILKPEMKYIGNMHGNEAIGRELLLRLAQFLCDGWRQGQRSVVEMLNSTNIHIMPSMNPDGFELTLKTKPEQRGWVTGRTNAHGVDLNRNFPDLDAIFYKANAQRLPFFDHLLEVFHDSDNGQQFEPEVTAVANWVLSWPFVISANLHEGDLVANYPFDESLNPNELRAYSKSPDDVTFRYIAETYARAHAHMAKNDHAPCDGTAGDNFARQGGITNGAKWYSVAGGMQDFNYLSTNAFEITLELSCEKMPAPERLPQFWVDNKLALLEFIRLAHIGIKGMVSDARNGEPIANAVVWVRNVTDGDGQTAIKHPVTTWITGDYFRPLVSGCYQIAVEADGYEIGIKTLNISQKDVKERRPHIVNFQLRPIEVEVPEARIGREMGEEERGEEENGPLTPEQAAEFLQLIRMQQPVGVRTANAPSFSQ

SEQ ID NO: 122060 - protein, 143 aa, Heterodera glycines
MGKPKGIRTARKLKKHRQEQRWNDKRYKKTNLGTRWKADPFGGACMAKGIVLEKIGVEAKQPNSAIRKCVRVQLIKNSKKITAFVPNDGCLNFIEENDEVLVSGFGRSGHAVGDIPGVRFKVVKVANTSLLALFRGKKERPRS

SEQ ID NO: 122061 - protein, 127 aa, Heterodera glycines
MDKGRSKSPNHNNEAEETQSAKEDKTDHKTNEQMLLVRTGLKLKRGTLFKKKRNVDPKTIDLTIKKEQEGPRKTKAELAFLKRQEETAFDRLSKRAQISHREKVEKFNKQMEELTEFNDIPKVSWTK

SEQ ID NO: 122062 - protein, 257 aa, Heterodera glycines
MFEAKFTNAALLKKIVEAIKELVSEAPFDCTENSMCLQAMDGSHVALISLKLDIGLFEVFRCDRTIALGLSMGELSKVLKCSKSEDTLMIRFEDSEQDMVTFTFEDTKGRKQDITLKLMDIDNEHLGIPDQKYAAVVEMPSTEFQKVCRDIASFSDSMNITATKSGVVFSGSGDSVTNTIRYSKDKTADDDDDKDRVDITVKEKVNLNFSIKYLTNFTKATSLADRVRLSMGDKVPLVGEYDVEGNGFLRFCLAPKL

SEQ ID NO: 122063 - protein, 178 aa, Heterodera glycines
KVEGVIFDGMGVPHFCLEGYWNEHVNIASVVGRRKDEKGNLVIQMGEKRRIWTANAPFGDSSQYNFTKLAIEMNQPDDSVAPTDSRRRPDQRLMEDGDWDEANKRKNQLEERQRKARRQAEAEAERAMDNNQMTAEYQARWFKKVQDSHTGSVIHVVRDEEYWRCKINRDWSRCPEIF

SEQ ID NO: 122064 - protein, 56 aa, Heterodera glycines; identical to SEQ ID NO: 121107

SEQ ID NO: 122065 - protein, 235 aa, Heterodera glycines
  unsure (1)..(235): unsure at all Xaa locations
MSSLIRGEIQQFASFANVFHWFDELHGCFRPLHSFNQLRIPWLSAHLATXVGCGAGILSTSLCRRGALVTGLDADKSVLEIAXVIRKQWRRPLRKKIEFIPGTIERLAQEKDRIGTFDAVVSSEVVEHVSDLPLFIRSCCKLARPNSPIFFTTINRTIWSQLLAKTIAEDLLRILPQGLHQFEQFVAPRDLRKLLLDEQCSVGPVLGMAYNPFFNIWNWTRFTGVNYALVAHTKN

SEQ ID NO: 122066 - protein, 219 aa, Heterodera glycines
PFKACAMEQLFQQANMDLHQIHLEMRHLELCKNESEAQPLFQKLHQQIRQSAAQLDGLERLVNKEPSGKRHTSKYRFEQLRHDYNALEMAINSLQNRLTTKWRTAAEREELLTMRFKPNETHLDFEGTELLVNDRLKQSHNAVDDLIAHGNSVLTSLRHQHLGLKDVKRKMLDIGQVLGLSTTTLQMIEKRLEDDWLLFLVLCVLCVVFMYCFYRFWKG

SEQ ID NO: 122067 - protein, 174 aa, Heterodera glycines
MFYHLSLEHEIQLHPKYFGQNLMETVKQKLFSEVEGTCTGKYGFVIAVTTIDTIGHGMIQPGRGFVTYPVKYKAIVFRPFKGQVIDAVVSQVNKVGIFCEIGPLSCFISRHCIPPDMEFEPNNIPPCYKTADESIVIKQDDEIRLKLIGIRVDANDIFAIGTLMDDYLGLCSTE

SEQ ID NO: 122068 - protein, 175 aa, Heterodera glycines
MFFSNFVALTFCIFSIFILIPNVSAAACESPKYSANGYSTQDGFFHYKTSYIVEFAIQCSNNYKDAPFYALVGEKTLQLAVSEETNKYQVSWQLEHADSGAQTFDIRVYDEDKFAEHKKADESGSSSVQPLFTVQHYHGGTSHKTWISSESVFLLLGVVALYFTMNLRQLLAKRD

SEQ ID NO: 122069 - protein, 169 aa, Heterodera glycines
MVRHVTASCFRAPWPFEKKGSTGWRKNGPVVIESHKWPGQQKEFPELSPKFLGANFKQLWRYTGVAPTGFNDPKTDDFVHVPEMVPELVVPDLANFELKPYVSYKTDAKIEERLRNFDKKLTKFGGNEKAAIANSKETELWPPPPIDAKILFDFFYAEKIRQAFEKGKK

SEQ ID NO: 122070 - protein, 335 aa, Heterodera glycines
MINNHVNGANDVDMERTENESFGELNQRLIALKAEKNNKESATLAVKVLAFFVNCDNLSAAQDFVEALKNLPESASNSDWARWFYYLGRIEALKGTDAETYKAAEKHFEVALRKAPQNGAVGFKQEVNKWVVLVKLLIGEIPERSLFRTAELRHVLAPYLLLTQTVRLGDVAGFDQTKREHGPIFVKDRTAALVERIHQSVIRTAIRKISTTYSRIYVSDVATKLNSTEQEAHRELVKAIKEGIVRAQLVAGDPLAGGRHYVKFGTTDDQYRGIEPRREFDARVNELLELYHQAVKALRYPDMRNPEVETIDEQRRREQLALEMAAAEEEDDDDF

SEQ ID NO: 122071 - protein, 198 aa, Heterodera glycines
MTSRILSCNLRRYFSKMNQHIEFGTTKSASSDKQSPPSPTNNQTQHEGMSQECREQIEQMEKLKSDNEMLTDKYKRTLADMENLRKRTQRQIEEAKLFAIQPFCKDLLEVADVLDLALNSLEKMKTEDGAASLDSGVNKGIKMTKEVLLKTFKKHGLVPVQPEGQKFDPNLHEAVYEIPKDQSDRPAGHIAHVLNIGY

SEQ ID NO: 122072 - protein, 246 aa, Heterodera glycines
KVSIFNTRGDTVWELSEGHRNEVYFNPQSTILVTCGFGNIASGKMEFWNLETRSEICAFCAPHTTHFEWAPDGQHICTSTTAPRLRTDNGFKLWTYRGDFVYEQKYDREELWEIKWRPCAAYNKFKIEEPNREQSTSNSSRINDGNAKTPFDNLPKGSLTQTARYVPPHLRGKPQKKEEKGKNETNSEETDVGKKIRTLQKKLDDISKLKTKRAAGHQLELNQMDKIRNEDRLLEEMERLTATANC

SEQ ID NO: 122073 - protein, 113 aa, Heterodera glycines
MPKKHTQSNKTRKRSGRDLDEIHADLIRPDKMQRIQERPFDDDLPGGGWHYCVACDRHFVDEQTKAGHEKTKGHKRRLRALREKPYTQREAELAGGLGVEEQIKLESLADLTF

SEQ ID NO: 122074 - protein, 294 aa, Heterodera glycines
KAILDSIQFFVPDDMKRQFEPMEQHQGRMSSGTKRYRADGYNDALAEGKFELRLLIPTKSAGAVIGKGGESIKSLRAKYDAIVTVPDRSTPERVLTIVCAQEKLADCFAEILEKLTEDQGRDDVDVRVIVHQSHAGAIIGKQGSKIKELRELMQAHIKVFQECAPQSTDRVVLITTQQSKMPDAIKHLMEFMREVPIKGPTKPYDPSSHDPRIVQCYGGFSGPMPPPPMGGPPMGMHGGGGGYAGFGPRGGPPMPGGMGMPGGFMQEQVTTTQVTIPNELGGTIIGKGGDRINR

SEQ ID NO: 122075 - protein, 149 aa, Heterodera glycines
MAFVNSLSSNTKTIHFLKKYLLLAHNYCTFSREWSEMEYERRAEDTLVALTEYLDTLPDRVDCESAFDVSYSMGVLTAHISPRIGTYVINKQTPNKQIWLSSPVSGPKRYDLSDKGRWVYKHDGVTLHELLEKEFRHIFKNDQISLHQS

SEQ ID NO: 122076 - protein, 206 aa, Heterodera glycines
MKKSAKPEIQTAQTRIAIVNPDRCKPKNCGQPCKKNCPVVRTGKQCIVVEPTSKIAEISEILCIGCGICVKKCPYGAIQIINLPSNLERETTHRYSANSFKLHRLPTPRLGSVLGLVGTNGIGKSTALNILSNRLKPNLGSFKSPPDWPSILQYFRGSELQNYFTKLLENKFKAITKPQYVDQIPKFLEKQPLKKVGELLEKRAQK

SEQ ID NO: 122077 - protein, 114 aa, Heterodera glycines
MAHIQFGPQQPEVEEDLVNWDEVPDDELEETAFERFEGLKEMFPTPVRSALSTTVQLTWVVAQNSFSFARSAAWVLSTSALLMVMPYIVDKELQDVEKAQLKQQQQLLLGGRPS

SEQ ID NO: 122078 - protein, 154 aa, Heterodera glycines
MAQNTAQIEEFVRLVLSSWPSYQFAIKNQLAGSLTSAKDAWFVEELSAHLLKHKDICPFALSDWMEDILDTEFSLISDDGTLEPTAKLLVELADLTVGRGAHKGAEAAAKLEEHLQRLRTLSAKSCTNSTTPRLDSSSSESEENNGSDEENDWQ

SEQ ID NO: 122079 - protein, 308 aa, Heterodera glycines
MLPIRLLFLLAVPSSAMGQFDLGGLLGNVNQFTSQAGVNLGGIFGQMGQQQPNTAQSNDQPPRHFHRGGPPPHHHRDGGGGGGLGNIGGAVEGILSRVGVNPQLANQFGKIQIPPIPSLAVHNVLDGVPGILRQFLPAQTVGQITAIARQAIESICSSDNCLQQRPEWLHQRATVAQFETLIRKTFSPGQSDSQIGRDVEIRLSRTFQVKKALIRKAGLEGRVEPANNGVFQQDLLLTEQQANVLITEINQNEVGVGAVPPSDNRRFSRRHNFNRRRFTRAGNSLFFEASPTQKWPVGQPILYMFDQS

SEQ ID NO: 122080 - protein, 428 aa, Heterodera glycines
  unsure (1)..(428): unsure at all Xaa locations
MSPSLSVANSNVSRPLGQPKVAGFKDKDKPESVRTSNIVAAKAVADAVRTSLGPRGMDKMIQSGNGEVTITNDGATILNQMSVVHPTAKMLVELSKAQDIEAGDGTTTVVVLAGSLLDAAEKLLAKGIHPTTISDSFQRAATFSEKVLEEMATPIDINDDDELVKLAMTSLNSKVVSQYSHLLAPMAVQAVKKLMSSPEDSSVNLKLIKVVKKLGETVEESQLIEGALIDQKSMGHGGPARVEKAKIGLIQFQISPPKPNMENQVVISDYAQMDRALKEERNYILELCKQIKKAGCNVLLIQKSILRDAINEMALHFFAKMKIMVIKDIERDDIEFYAKILGCRPVASVDHFVPESLGTADLVEEIETADGKVLKVTGLKHTGCAVSILVPGSSKLVLDEAERSLHDTLCVIRCLVKNXALLTGRGAP

SEQ ID NO: 122081 - protein, 261 aa, Heterodera glycines
SSRVPISHLNGEQLESLFVDERVQRLLLSLTGHDTDKILRHRRINQTERKHYALMTDGMVKEFMSRLDQRAGKFLRIVPFKEPRSNRTEVLARDAEIDGFDTAKFVFTDISFDATDMDRTVVVREQDGTLRTALPEEHDRMNRLFFVQPNRPVNEPPLFAMTDEWLQKTLDRDEHEFVLDWACHFYEPDAPKFVELCKYIFDHTLENDKLDVLYSTRHFGTLAFYLVINGKMDKLLEFYEQKNRNDGVDQTRQLWQILSCY

SEQ ID NO: 122082 - protein, 210 aa, Heterodera glycines
MAPRGNNMLPNAHFHKHWQRRIKTWFNQPARKERRRAARSAKAARLAPRPAGGLLRPVVRCPSVRYNKKCRVGRGFTLEELKRSGMGKYEARSLGIAVDTRRVNRSVESTERNVARLKEYRSRLIIFPKKMNKPKKGDSSPEELKLAAQMPGSVVMPPVVKQRRLKAEPITEAMNKFSAYCHQRRVRADKRLKGKREKKARNGGRRAGQK

SEQ ID NO: 122083 - protein, 91 aa, Heterodera glycines
MTSWRLCLGKIRRKEMVRLYKVKIMRSDGSVIFGRCDEPREIIQLPVDLRTLSDDERRMRIAERKPIAKKVVEDTLDDSFDFHKYVSQWKR

SEQ ID NO: 122084 - protein, 196 aa, Heterodera glycines
MISGHRSVGRCLLSLPQFASRLIPIYGHVQAQCFHFMKKQVTVDPEIAKLREGRKRRKLTKAIKKLAEYSKKPVPVEEIEVDLRHQATKGQRERTDNGVQGRDEKKEAYGRKKLLKQYAQSRARLARTDIMWIKRSIDAQENALEVLKQLSPTLYEAAVQLDERLFYTQIQGPPISPPIDNYNCPDGEYQDVTKKW

SEQ ID NO: 122085 - protein, 288 aa, Heterodera glycines
SCRIRHEAFFAIFSFSLLFILCHHCSFAAFLITNYPNPLNNASLWKCGISSPGPLCDPDSLLNETARHEALELLKQFQDQTDIDDNGDGSCKGKGVIVGLALTKQPIIARNARINVTDDLMKNIWQLDNRCNKALMLTLSVQPTPVVRFTRYMTTPVFDDELHHLIWTEMHWLRDRNYIMWVRLVLDGLRALIVDRHNTLGIGPAQQLAAANKKCASHGFVIFSAFIAVLCSIVGTMCAPLLWHKCCERFGPIVGKPSLPFPMVRFNNERDIGPYTTTNNGHQQQQQQ

SEQ ID NO: 122086 - protein, 329 aa, Heterodera glycines
MAAVVTNNSKEFIVGVKYKLKRKIGSGSFGDIYLAINIQNGEEVAVKLESVKARHPQLLYESKVYKILQGGVGIPHIRYYGIERDYHCLVMDLLGPSLEDLFNFCCRRFTMKTVLMLADQMIGRIEYMHVKNFIHRDIKPDNFLMGIGRHCNKLFIIDFGLAKKYRDSRTRIHIPYRDNKNLTGTARYASINAHMGIEQSRRDDMESLGYVLMYFNRGNLPWQGLKAANKKQKYEKISEKRMSTPVEMLCKGFPSEFSMYLNYCRGLRFDEAPDYMYLRQLFRILFRTLNHQYDYTFDWTLLKQKATMNNANSTATYPTEAAAGTSAQQ

SEQ ID NO: 122087 - protein, 317 aa, Heterodera glycines
MSFLVTLAGYLTIAIFLQKLFRSLYNVVFPYLFAVPQNIKVLAGAEWAVVTGSTDGIGKAYALELAKKNFNVVLISRSMDKLNAVAEEIKQKYPNVEVKCISFDFTNANLKDYEQTIFSQLSTIEVGMLVNNVGMSYEYPERLDRIEGGLQRVSDITVINTLPTTVLSAFVLKQMRERGRGVVVNLASSAAYFNWFYLAAYSASKKYVCWLSSILRMEYADTDIVIQTVCPMMVATKMAKIRKASFFTPSPEEFAAQALRSIGLVDETTGCLSHQIQAELMFGYVPAPLLNKFVRDNSLQTRKRALKKKEATVAKSE

SEQ ID NO: 122088 - protein, 122 aa, Heterodera glycines; identical to SEQ ID NO: 121348

SEQ ID NO: 122089 - protein, 181 aa, Heterodera glycines
MFNLQDRCKGVDQDRDYHATRISIRDKLLSQETKELEQNLRDLPTCKLIFPSTSALHEMELTVKPNVGLYKGGAFKFSITVPPEYNNVPPIVKCLTRVWHPNINEDGSICLSLLRQNSLDGYGWMPTRRIRDVILGLDQLFTDLIDFDDPLNAQAAQQWQTNKDGFAQKVKEYMTKYCPRN

SEQ ID NO: 122090 - protein, 125 aa, Heterodera glycines
WKGGDEQKNVPVPSPKEMAQRPAEFDELTHTGQAWDIADWRRSRFEYMPKQVNPNIAAHLIAELAPVPSEERVVRCDGGHRELGHPRVYINLDKPGTHACGYCGQRFYNVHMTKAEGLDIHHIQV

SEQ ID NO: 122091 - protein, 241 aa, Heterodera glycines
MKLNIADPSTGSQKTFEIDDEKRYHVLIDKRISQEIPGDQLGDEFKGYIFKITGGNDKQGFPMKQGVLVNHRVRLLLSEGHSCYRPRRTGERKRKSIRGCIINHDISVVSLVVVKKGEADIAGVTDVTVPKRLGPKRASKIRKMFNLTKEDDVRKYVIRREVPKKSGKPESKAPKIQRLVTPLTLQRKRAHHAEKRNRAVAAREAAASYKKLLADRAHELYAKKHAKRVQRRSSTHASSTA

SEQ ID NO: 122092 - protein, 196 aa, Heterodera glycines
MGTPSRRGRKRKSEVVPDKRTSTSSARSKPLMPRKSFVPLSIEQFRPTAVGTRVLSCGEGEQLGHPNRNTTKKPRAVGTFPTDMTFVQVAAGGVHSLVLTTDGRVFSCGINEKGTVPVQGLEAEGTTDTFSEIVFTTDIQRLGKIVQITAGASFSAALTEKGSVIAWGNLRDTQGEVNVHETLTDIQKKPMVVMRH

SEQ ID NO: 122093 - protein, 266 aa, Heterodera glycines
MLLSKIPPPFCIALRAASTNPPARGPSVKTFEIYRYNPEKPEQKPFLQKYDVDLNQCGPMVLDALIKIKNEMDPTLTFRRSCREGICGSCAMNIGGENTLACICNIEKKTKYSTKIYPLPHMYVVKDLVPDMTLFYEQYASVQPWLQKNKPTKLGEAENFQSQAERTKLDGLYECILCACCSTSCPSYWWNSDKYMGPAALLQSYRWIIDSRDDKANERLERLTDPFSVFKCHTILNCTKTCPKHLNPAKAIGEIKKLLTGMETKP

SEQ ID NO: 122094 - protein, 162 aa, Heterodera glycines
  unsure (1)..(162): unsure at all Xaa locations
SRLVRCFGQRIQPLPYCWRRSTAEEEEXXXXXXXLFYLXYESTKKHPFACLCTFRTGLRHYVDICSPVKSHVLKALVEVSADEETKAKLTLLSTASEEGLREYPQFIVEERRSIVDVLQHFPACKPPLDLLLELLPSLQARYYSISSSPRVDASLVAGTAVV

SEQ ID NO: 122095 - protein, 190 aa, Heterodera glycines
MSGELRLDSSLDLMRRLPPQNCEKHLTDLVALAPDLCESLLTAVDQPLKVAKDKTTGREYLLCDYNRDGDSYRSPWTNAYDPPLEDGVSPSDTIRKLEIEVNAAFEAYRDMYFEGGVSSVYLWDIDNGFAGVVLLKKETDNSLSGRQGVKGCWDSIHVLEVNEKTKAAKFAKYKLTSTVMLWLQTQNPTT

SEQ ID NO: 122096 - protein, 136 aa, Heterodera glycines
MARTKQTARKSTGGKAPRKQLATKAARKSAPSTGGVKKPHRYRPGTVALREIRRYQKSTELLIRKLPFQRLVREIAQDFKTDLRFQSAAIGALQEASEAYLVGLFEDTNLCAIHAKRVTIMPKDIQLARRIRGERA

SEQ ID NO: 122097 - protein, 148 aa, Heterodera glycines
MDEYSREPCPHRIYADAGSAFAMGLIGGSIFHGIKGFSSAPRGQGLLNIAREVRMRSPVTGSQFAAWGGMFSVIDCGLVYMRRKEDPLNSIAAGGLTGGLLCARMGWKTALVSAGFGAVILTMIEGVGILMNRVMVAQSDAALAPSPA

SEQ ID NO: 122098 - protein, 114 aa, Heterodera glycines
EHSSHFQVYMFNYDSTHGRFKGKISTNAGNLVVEKEGKSAHTIKVFNLKDPAEIKWGEAGAEYVIESTGVFTTIEKASAHLKGGAKKVVISAPSADAPMYVMGVNEDKYDPAKD

SEQ ID NO: 122099 - protein, 204 aa, Heterodera glycines
MSSESDEQSADVNGLCSQSLRSDEKVCPDPDTIKMFIGQIPKAWDELQLKEYFEEFGPIYQLSVLRDKETASSRGCCFVTYYHRKDAISAQNELHNVRTFPGLSHPIQMKPADVENKNERKLFIGMLPKSMDEESVRALFKEFGQVEDCSILREDGKSKGCAFLTLVSRSCAQQAIRKMHHSQIFEGCSKPVVVKFPDSCREKT

SEQ ID NO: 122100 - protein, 177 aa, Heterodera glycines
GGGGGFGGYRGGGAGGMGMNRTQSSRYGPPIQTRYRMLVTNLSTRCSWQDLKDLMRNAGEVTYADAHKKVRNEAVVCFATHEDLRRAVERYQGKDINGRRIKLVDDSEGYAGRKSRSRSPRSRSRSPRSRTRSPPSRSRSPRSRSASPAENGRSRSRSRSRSPTPSRSRSRSPNDEK

SEQ ID NO: 122101 - protein, 136 aa, Heterodera glycines
MGEKFVGKWNLESSENFDDFLKEIGVSYLTRKAGACIKPVLEFEVNGNKWKMTSTSTFITISWEFELGQEKEVKTADGRIVKTTFTFVDGKLIENQKKTKAEEKDSYYERYVDADGKLMITMDCDGVKAKRVYIKA

SEQ ID NO: 122102 - protein, 181 aa, Heterodera glycines; identical to SEQ ID NO: 120385

SEQ ID NO: 122103 - protein, 89 aa, Heterodera glycines
MEKRVTESLVFHDEVEIEDFEFDDEFQLYHFPCPCGDRFEITREQLESGEDVATCPSCSLMLRVIYDMEQFVKLETLRLEPTNAVEAVK

SEQ ID NO: 122104 - protein, 163 aa, Heterodera glycines
MLCNFRNFNCSSSRHFSLASVLLQQQKFAAVSSPPNKNWNAVLIEAMRLKSTSIVQDDAITEHGHDDHGHGHHAVNYGPPITYDYTPIPSQPYKKVYKELKQKFITYLAMSFVFFMFCCYVGYSTDVLGHSAWKLPGSYRNRKAINARLDAEEAKAKAGEGEQ

SEQ ID NO: 122105 - protein, 239 aa, Heterodera glycines
MLYNFRNLNSLSSRHFSLASALLQQQKVTAGTSMANKRVLIDAVRCKSTGSSQQYILAAHGQDSHGYGHRAFSTSGAAQELSSALDEEIKAEKELVQDKLGGTSAPSVPGFKITTKGAEVRLSKTHGNEKIEVILNVNHSVDIEEDEEYEDEPQAEMEPESVPVSLPHFTISITKNNQSMFFALEMVKTEDGGFDFTVEEFFIAPSVNGEPVNEVGDDVYSSSGKYIDPKLHDLLFVRY

SEQ ID NO: 122106 - protein, 215 aa, Heterodera glycines
MSGGCPLAGGASVNGCPMSNGGDQIDPSNAMPPPNQKPAPDQPFVLSTNRQKSTIPKAKVMVDGQLETWEYPSAQMFWNAMLKKGWRWRDDQLDQRDMDNIIRIHNANNELAWQEVLKWEHSLHPECDMPKLKSFHGDAKNLSPRARFRSWLGYQLPFDRHNWLVDRCGREVPYIIDYYDVGHVNPETKLFAHLDGRPAIRDASTMWDRMVVGYW

SEQ ID NO: 122107 - protein, 56 aa, Heterodera glycines; identical to SEQ ID NO: 120012

SEQ ID NO: 122108 - protein, 238 aa, Heterodera glycines
MKLNIAYPATGAQKLFEIEDEKKLRIFFDKRMAQEVEADSLGDEWKGYVLRISGGNDKQGFPMKQGVITNSRVRLLLSKGHSCYRQRKKGERKRKSVRGCIVDSNMSVLALVVVKKGEQEIEGLTDRVVPRRLGPKRATKIRRLFNLNKEDDVRKYVIRRTLPAKEGKKPRTKTPKIQRLVTPVTLQRKRRRIALKNKRRVKRREEAALYHQTLAKYAKEKQAEKVARRHSSASHSQG

SEQ ID NO: 122109 - protein, 132 aa, Heterodera glycines
MTKKRRNNGRNKKGRGHVQPIRCTNCGRSCPKDKAIKKFVVRNIVEAAAVRDITDASVYDQYALPKLYHKLHYCVSCAIHSKVVRNRSREARKDRNPPPRFGQRSAVDRPQRPGGAAPGGPGGVGMMQAIRT

SEQ ID NO: 122110 - protein, 252 aa, Heterodera glycines
  unsure (1)..(252): unsure at all Xaa locations
MAKSAIDVNRGITEDQTATIRNYFTQPHLIYKTVTGVRGPLVILGDVKFPQYAEIVKLTLPNGEKRMGQVLEVTKDKAVVQVFEGTSGIDAKNTICEFTGDIMRTPVSEDMLGRIFNGSGTPIDKGPNVLAEDYLDIDGQPINPWSRIYPEEMIQTGISAIDVMNSIARGQKIPIFSAAGLPHNEIAAQIVRQGGLVKQPNRKKENEVEGDDDFAIVFAAMGVNMETARFFKQDFEXNGSMENVCLFLNLAK

SEQ ID NO: 122111 - protein, 199 aa, Heterodera glycines
VGLNRKDSSESQEPGLHPFQYVQAGFFTGVATRAIIQPFDVLKIRLQLQEEPLRGKSRGKYSGIFQSAKLIYHEEGIAAFWRGHIPAQGLSIVYGLVQFCTFELLTKQAGDFGFHNFSKSVDFVCGASAGCLATTCAMPFDVVRTRMVAQGAHRTYRNMAHAFIKTWRYEGPAGYFRGLVPSLVQIAPFTGLQFTFYNL

SEQ ID NO: 122112 - protein, 85 aa, Heterodera glycines
MKEGQKPRQSRHKGRLSKKTRIVRELVREVVGFAPYERRVQELLKISKDKKALKFLKKRIGQHTRAKRKRDEMQQVLVAQRKAHK

SEQ ID NO: 122113 - protein, 206 aa, Heterodera glycines
MMSAKFFTHLINSASVRPISTSCCRKELRELWKLDKRNPFQEIPEAWVTSLDDIEQKNCGLIQLHPDIFRVKPRLDLLHRNITWQSNYRNLTLLKMLSRAEMPGGGRKPWPQKKMGRHHAGSIRSPHFIRGGFAHGVRGPCTQFYMLPNTVRIHGLRTALTLKHAQDDLVIVDSYDTLNSAEPQFLNDLADARNWGYSVLFVDLTV

SEQ ID NO: 122114 - protein, 130 aa, Heterodera glycines
MVEAAEQSQQQPIRRRAGPKSARRLYVKAVFTGYKRGHRSQHENTSLLKLDGVNDKSDASFYLGKRAVYMYKGHKTIARGGGPKTRVRAIWGRITRVHGNSGVVRAKFRHNLPPTAMGKRIRVMLYPSNI

SEQ ID NO: 122115 - protein, 151 aa, Heterodera glycines; identical to SEQ ID NO: 121887

SEQ ID NO: 122116 - protein, 223 aa, Heterodera glycines
MTTAHRPTFDPAKGGTGRNEGDLAKLSQQYSSRDMPSHMTLKYRQKGQAHPEEVVAKNLRRDIEEREQHSRERRSRDSLDSFGTGPTNKKQRVEDTSSARNLDADEPFDELNEDDTDLDEDSDNEAELMAELERIRKERAAERASKEAKEREEQERIREENILHGNPLLNPASSEFKVKRRWDDDVVFKNCARGIDERKKTPSFINDAIRSEFHRKFMEKYIK

SEQ ID NO: 122117 - protein, 247 aa, Heterodera glycines
  unsure (1)..(247): unsure at all Xaa locations
MEMQASPGPDCGFTTPSRTSTNSKFIVDVPLSTKREKLLRGTPTRFRLPPVRRLMKSAPNIHHRFYLARDHIEPFAQIVSFKRSEDRPSLSNRYRPELEETYLQQCFVLQGRLGQGDFGEVVSVRSKDDGKLYAVKSSLDIYRNSADRREKLQEVQKHEMLPPHPNLIHCVKAXRXRGRLYIQTELCSRSLDDMARERHEIPEPETRYYLIDSLKALEHMHSHDIIHVDIKPSNILVSTDGICKHGD

SEQ ID NO: 122118 - protein, 248 aa, Heterodera glycines
RIVLPSDFITGSTISVATQVPKLIGHGLEKRPDGVYALMAGVLHENEQKMWLNTSTKRYVPHSGDRVLGTVTSKAGDYFKVDIGSIDLALLNFTSFEGATKRNRPNVKVSDLIYGLVILTSKQLEPELSCVDSEGRARGMGLISAPGLVLSVSLGYARRLLSADCKILAELSKQLKFETTIGMNGTIWIGGDEDVVLAVRNALIAGETMFDSNIALLVQNAVQNVHFQKPPADDNADGGAEQMPMETT

SEQ ID NO: 122119 - protein, 123 aa, Heterodera glycines; identical to SEQ ID NO: 121314

SEQ ID NO: 122120 - protein, 234 aa, Heterodera glycines
MASNLTVKVHPIVYMSIVDAYERKSSSNINSRVGTVRSVETTENRALGTLLGFYEKNVVQVTSCYAVPFRETSDDIPEINDALNRQMWHMSKRTSPSEQIVGWFFTVPDLSEMCPHYHGYYTGLVNETPRKEPPPIILITMDFTFSGESADRLPIKAYAAREAGVPGKGATQATIFYPLKVEMDVFPGESVALSFIMRGLDSERREIKIANSQEQFLENGKQMVHWLEKMLGYL

SEQ ID NO: 122121 - protein, 77 aa, Heterodera glycines
MSKTHPPELKKYMDKQVNIKLNGNRNVSGILRGFDPFMNIVVEDCIEHLKTGESQSIGMVVVRGNSVVIMEPMERIG

SEQ ID NO: 122122 - protein, 191 aa, Heterodera glycines
MSVLITERNQDATIYVGGLDEKVTEAILWELFVNAGPVTNVNMPKDRITGTHQGFGFVEFMSEEDADYAIKIMNMIKLFGKPIKVNKASANEKNMDVGANLFVGNLDPEVDEKLLFDTFSAFGVILQPPKIMRDVETGSSKGYAFINFASFEASDAALEAMNGQFLCNRPITCSYAFKKDTKGERHGTTAE

SEQ ID NO: 122123 - protein, 198 aa, Heterodera glycines
MTISIFPRICPSFPPFLRHFPSSSANSLAFRRHFSLTGPRHSFFFDYFTKHPKDMPPLRDYLPRPTWVKHGNEFPLRQLLPGHYDDPEWHPKDRGYAGSPRFGDKIPEDIMIYRRSPTEEEVPFLHKAMHKLMSMVFWYWVFYTIYWHHQEQFTGEWYFPYHYEWTDEELGVPPDDAPDPEERQFWGHPGELIGTYRA

SEQ ID NO: 122124 - protein, 348 aa, Heterodera glycines
MAPPPATVDEYTLSQSRFPSVASLAPPTVLMMSTAGQTPVHRRRHCSAGSNNAQPNNSHEAISRMDVLSERIRDFHYNEDQTHAQLNRKLQLRDQLYYAISPIFPMCGLYIVGSSLNGFGTKRSDLDLCLMITNRDIDQRTDAVVVLSSVMRTLESNQIVAEQNLILAKVPILRIKFIGTFHDITVDLNVNNSVAIRNTHLMCYYSSFDWRVRPLVMVVKEWAKRHGINDSACSSFTSYSLVLMVIHYLQCGAQPPVLPNLQQMYPKRFSVRADVRTLNVSLPFEPIPTAMGWQFKDDATLSELLLGFLRYYAFQFDFDADAISIRMGKKVNRAQVAQNQSPFNTLSQ

SEQ ID NO: 122125 - protein, 292 aa, Heterodera glycines
  unsure (1)..(292): unsure at all Xaa locations
MVLTDSAHADPKNAVPFRLRIDGHWVRVDERLLRAHPGSGAMLAYRDREASTVFHSFHAGSKRAYRWMTEHRENGGATAETEATTEANGTAAKTKKSNGTGAGAALWPDKIDAINMGKFGRSAEANEKICRSFDVLRSRVRSLGXLRADDALFVLKFIQCVALIAFAVFLQSRDFFLASALCMGIAWPXEYGHQQHFGSWWWNDVCGYVCGNLMQDFSLGGWKRIDSVSPLAHLLPFQHLYWSFALPLLRFSWLLQSVQFVCQIRHSFHDXHRQRALVEQCSLALHWSLVFV

SEQ ID NO: 122126 - protein, 150 aa, Heterodera glycines; identical to SEQ ID NO: 119655

SEQ ID NO: 122127 - protein, 217 aa, Heterodera glycines
MVRKLHAELDYARHFPKAYLDKAQRHVPMKVYDNRFGAPPVIRWAIRPDDWAMRTKRPWEYGEVENVIRQEKMYQRQLFSTKFYRKKWNKMPIIPAENWTIFPGDTVQVMVGKHKGRKSNVSHVIKESNAVFVEGLHTKLVDKFNKDRMKEMGIGDVFFDQWEEQPLFLHKGEVQLVDPSDGEPCMAKWVLNDSKTEYQRISSRTGFLIPLPSRAFT

SEQ ID NO: 122128 - protein, 251 aa, Heterodera glycines
MDYELSNQQLRPFSRSFTSSSFSQQRSNNPSLFQYINPNSDKALRVFQAHTRHSGKAEENYKTVMCQNWLEQAECRFGSKCRFAHGPEELRVATTPLPINNKYKTRLCEKYTKNGVCPYGERCLFIHPDQQFGLPSSTFAASLPLSLFRFQQMTTATFHHRSHQKFPSNRQIRNLLPQIEEELRREREEIKQQNHQQKCNGLRVEIPQPSVGASSSHTPEQIEWRGMVEMVDKLTLTPSANNKLCPADFPS

SEQ ID NO: 122129 - protein, 105 aa, Heterodera glycines
MLLRFSLTVQLLLLFFAFEVLGAEPPEGAQNEEGQRDSKRLEMARKGLNVHMFSSPNFAPMFGIIAGLSVVLIIAIVFIVVGLLSMEPAKDSIIYRMTTTRLKKD

SEQ ID NO: 122130 - protein, 199 aa, Heterodera glycines
MGISRDSRHKRAHTGAKRAHYRKKRKFELGRQAANTKLGATRVHQVRVRGGNIKFRALRLDTGNFSWGSESCTRKTRILGVVYNASNNELVRTNTIVKGGIVEIDATPFRQWYESHYVQALGRKQKDVAEVEELNKKRSSRVLRKVEARQANAKVDPHLASQFQKGRLYARIASRPGQSGRADGYILEGKELDFYLRKL

SEQ ID NO: 122131 - protein, 297 aa, Heterodera glycines
MLSKKLFQSILNKSPKTAFSTSARLSASSAEVSRILEEKILGQASQINLEETGRVLSIGDGIARVYGLKNIQAEEMVEFDSGMKGMALNLETDNVGVVVFGNDKVIKEGDVVKRTGSIVDVGVGEALLGRVVDALGNPIDGKGPINVSKRSRVEVKAPGIIPRVGVREPMLTGVKAVDSLVPIGRGQRELIIGDRQTGKTAIAIDTIINQKRFNSSTEEKKKLYCIYVAIGQKRSTVAQIVKRLTDTDAMKYTIIVSATASDATPLQFLAPYSGADMGEIFRDNGKHGMNIDDESLQ

SEQ ID NO: 122132 - protein, 159 aa, Heterodera glycines
MKTETCVYSGYKIHPGHGKRVVRADGKIQIYLSKKAQRGAALKRNPRDVPWTVLYRRKHKKGVHAEEGTQRKRVKRTVQIASRPIADLTVEALLAQRNQKPEFRKQQRDAAIKAAKESARVKKDETKKKQQKIDKKAAPTKTKAAKQVKAPKQFVGGKR

SEQ ID NO: 122133 - protein, 260 aa, Heterodera glycines
CALKANMIQAWRTHFVLEEGMLEVECTSLTPEYVLKASGHVDRFIDWMVKDKQTGACFRADHLVKNQAETLIRDKKTDEKTKSELMNVLVMLDGMSCDDLHEVIKKFNFKSPLTGGDLSEPVSFNLMFPTEIGPTCDQRAFLRPETAQGIFINFKRLLEFNQGRLPFAAAQVGSGFRNEISPRQGLIRVREFTMCEIEHFVDPTDKRHPKFEKIAHLELTLFPACNQMESKNPQKISIGNAVKLGIVNNETLGYYMARTH

SEQ ID NO: 122134 - protein, 126 aa, Heterodera glycines
MIETLETSEVLKRVLKSALIVDGVARGLNEAAQTLDKREAHFCVLAKSCDEASFEKLVRSLCKEHIIPILEVEDKAELGQMVGQCKYDKDGKARKIVGCSVAVVKDYGRDEEAKNDLQEVLKKISD

SEQ ID NO: 122135 - protein, 84 aa, Heterodera glycines
MSTGVIQPLNPKPFLNNLTGKPIICKLKWGMEYRGILMSIDGYMNLHLANTEEYIDGTNTGALGEVLIRCNNVLWISAAEEGEQ

SEQ ID NO: 122136 - protein, 315 aa, Heterodera glycines
MNREETNKHPLIVTYAGRHYDISGFVSRHPGGERVLRMVAGANVDSFIDGTSELLGLRHEHSAAAYGILARYSLDQEFKRDPLVDSKAPMLWRVGELRERYWTWIHHPYDGVLRLFESDLLEQLTRTKWWLIPLIWLPIVSYFFFTGLSLLREDFGFSGGPLLAFGLFAFGCLAWTLLEYSLHRGLFHWHPNAHSYRQITLHFLLHGLHHKTPMDSDRLVFPPAAAVLIVGFFYTIYRSLLPFPIFCCFASGKLFGYIVYDITHYYLHHGRPETNSGWHYRKIYHHNHHFKDSDSSFGISTTFWDYVFGTVGTFN

SEQ ID NO: 122137 - protein, 268 aa, Heterodera glycines
RTLQKSTQILYTPDIGTILLLLDVKPGARICETGTGSGSLSHAIATAVAPDGHLYSFDIDEKRAKTVHNDLKLHGLSQNATVLCRDVSQHGFAATDCAEKEWRCDGVFLDLPAPWLAIGHAHKVLLQNGPERRPSRLVSFSPCIEQVQRVCAELEQHGFVDIETVEVVPPKLKVVDLPCESLSEYAAKGANAQTFFQKESQHNNTDCEQQRQKGRRGAKRKADNAGEKTKMEEDADTCQNGLNGKVAAASIAQESDGPQTETDAMPFP

SEQ ID NO: 122138 - protein, 422 aa, Heterodera glycines
MSEIGNFEIRNVSKVERIGAHSHITGLGLKANFEPIFISDGMVGQCAARKAAGLIVRMIKDGQIAGRALLIVGEPGTGKTAVAMGISKSIGGDTPFISISASEVFSMDLSKPEALTQSFRKAIGVRIKEETEVLCGEVVQLEIDRPQSGAGPRVGKLTLKTTDMEAIYDIGNKMTESVIKERITAGDVIQIDKATGKISKIGRSLARSKDFDALGPQDKLVACPSGEIQSRVETVNTISLHDIDVINSRSSGYLAVFSGDTGEIKSEVREQIDKKVMAWREENKAQIIPGVLFVDEVHMFDLECFSFINRYIESDLSPILVMATNRGIVNIRGTSVESPHGVPLFLLDRSLIIRTSSYKENEIGEILKIRASDELVEMEDASIAVLVQIALETSMRYCMQLISTADILRQRRKGEKTKCLRH

SEQ ID NO: 122139 - protein, 207 aa, Heterodera glycines
  unsure (1)..(207): unsure at all Xaa locations
MSVPGSQPPQQGEDAEERLINEEYKIWKKNCPFLYDMVMTHALEWPSLTVQWLPDVQRQEGADYTIHRLILGTHTSDEQNHLVIAKLLLPNDDAQFDASRYDTDRGEFGGFGTVTGKIEVEIKMNHEGEVNRARYMPQNPVLIGTKSPSSEVYVFDYTKHPSTPADVECKPQLRLRGHTKEGYGLSXNNNLPGHLLSASDDMTVCLW

SEQ ID NO: 122140 - protein, 184 aa, Heterodera glycines
MNYDNGISDDDDLEMDENGSDGVEIVDFVEEPHKEDNSAAKIAAHSKDVFCLALSPDGHWLASGSEDETAAVWDLRHGMTSPLLHRTISSHSDSVHLLAWNVSANILASADMAGRIICTKVTGDEATQTASLTIDDCFVEPSRRDDDNGEDEEGQGSDPEQIGWLFWHSTVEGILFAGCNDGSL

SEQ ID NO: 122141 - protein, 205 aa, Heterodera glycines
MSDFEMDDGEDYGLQYSDDSGSEPDVALENQYYAAKTLKSDGDQRGALDAFRRVLELETEKGDWGFKALKQMMKLNYAMGNFEEMLRHYRNLLTYIRSSVTKNYAEKSINSILDYVSLSKNTALLQQFYKITLEALKEAKNERLWFKTNTKLGKLYFDLKEFDRLKQVLKQLRNSCQTEHGEDDQRKGTQLLEIYALEIQMYTEQ

SEQ ID NO: 122142 - protein, 261 aa, Heterodera glycines
LIKVLTHFWSRKTEEIRCIAFVALCKIARLDSECFPAVYKNCYTAYVANCKTIDDETLPFIHFMQCSLAELTFVHPSQAYQYAFVYIRQFAIHLRNAMIAKRKDLIQTVYNWQFVKGLQLWVLVICEGSKRFRPSSDKSASWFYELVHPLVEVINSLWRLFPSTKFFPLRIHSIQMLLDIQRESEVFVPSLAFAVELLDELAQIDAKRPTAGKGRTREPNAERMLRLSGEQLDDAGVRAHLAQRLFALITDCLNLLNSRES

SEQ ID NO: 122143 - protein, 132 aa, Heterodera glycines
MATYNPNYESIGQAFVQHFYTKFDVPDGPTRTVGLHDLYDAEHSFMTFEGNQVKGRQAILDKYGALPFRTIQHGITKTDSQPLPDGSILVTVIGQLKTDDDPVNSFNHCFILRPNSSGGFFISNEVFRLVLH

SEQ ID NO: 122144 - protein, 161 aa, Heterodera glycines
MVNPKGYRRGTRYMFARPFRKHGVEPLSTFYRVYKRGDIVTVKGNGAFQKGMPFKAYHGKTGRVFNVTKHALGVVVNKRVRHRIIPKRINVRVEHVKPSGSRLEFLQRCKANDLQKKQHKEGNAPFVALKRKPKEPRVAHLVKVKSTKVERLAPVKFEIVA

SEQ ID NO: 122145 - protein, 129 aa, Heterodera glycines
MNSPVISRGMHGFSTTISKRFASSISEGHAEYYREFNRLASAGIWDQLNMRPKVFSTKTEKAAAMKVWQKMLPEDAGWFDRRPGGVFLKMLLHISLACFAVFMIPYTYEKVVPEEYRCKIKYKKNDGHH

SEQ ID NO: 122146 - protein, 151 aa, Heterodera glycines
MASRKGKVKEEQPAVSLGPQVQEGENVFGVAHIFASFNDTFVHVTDLSGRETIVKITGGMRVKADRDEASPYAAMLAAQDVAERCKQVGINALHVKLRATGGTKTKTPGPGAQAALRALARSGMKIGRIEDVTPIPSDSTRQKGGRRGRRL

SEQ ID NO: 122147 - protein, 341 aa, Heterodera glycines
MVKPKVGINGFGRIGRLALRAAIEKDTVQVVAVNDPFIELDYMVYMFNYDSTHGRFKGKISTNAGNLVVEKEGKSAHTIKVFNLKDPAEIKWGEAGAEYVIESTGVFTTIEKASAHLKGGAKKVVISAPSADAPMYVMGVNEDKYDPAKDDVISNASCTTNCLAPLAKVINDEFGIIEGLMTTVHAVTATQKTVDGPSGKQWRDGRGAAQNIIPASTGAAKAVGKVIPELNGKLTGMAFRVPTPNVSVVDLTARLEKPAPLDAIKEAVKKAANGKLKGILAYTEDQVVSTDFLGDSHSSIFDAGACISLNPHFVKLVSWYDNEFGYSCRLVDLITHCASKA

SEQ ID NO: 122148 - protein, 205 aa, Heterodera glycines
MRVLSFAGLQLKLDTIGDGEKIAAKIRECAGLEVLEMRGNTLGVGATAPIAEALECQSNLKRALWSDMFTGRLKEEIPRTLKTLCDAMILSGARLTELDLSDNAIGPMAVPGIKEFLAGEAAFALKTLKLNNCGLGIAGKTIAHCLIECHRRSVSHGTPLCLKIFVARRNRLEYTSTAALAEAFQIIGTLEEISMPQNGISAEGI

SEQ ID NO: 122149 - protein, 296 aa, Heterodera glycines
AVTEQCFCKRWAFSLKKSMESENFERHFRLAIQSVTAEDYEKMRQYRHREDSLATLAGRLFLRKAVQCLCGVRWADIEISRTERGKPFIVRPENISIGLNVSHQGDYTVFASSCTNQVGVDVMRLDMCRGNKTADEYINSMAKSASAGELRTMRGQPTEQKKMTVFYRYWCLKETIMKATGHGLVNDLSRFDFIIDPNERYKQGSFITSTTFTEDAIKQPQWVFEESFVDANHVAAVCREKALPAVCTFRKEQCAKIFFSKIDFEFLLDDASILNPLADGGASEYNNFMQKPRKKF

SEQ ID NO: 122150 - protein, 91 aa, Heterodera glycines
LSDRIQHPFNLAIMQIFVKTLTGKTITLEVEASDTIENVKAKIQDKEGIPPDQQRLIFAGKQLEDGRTLADYNIQKESTLHLVLRLRGGKN

SEQ ID NO: 122151 - protein, 204 aa, Heterodera glycines
MSSSNTILLDCSDDSAVVVGFEQCATSEGGGAVEPQQKLTKNQQKKRARMERFNAGKAEWRRKQRERHKERKRARKADGQTATVVHNDRPNKLNTMNESKCRVRVAVDMAYDDLMDERSVCKTVSQLRHCYASNRRAADPLQFYVVNLDEKAKKVLDGITGWQQWDVHLLAQPLAKLWDDREIVYLTADSENVLSALDEQKVYV

SEQ ID NO: 122152 - protein, 224 aa, Heterodera glycines
MTQNGMTTASNEFNELNDFLSTRAYLHGFLPSQEDQYVFKCIAAAPSASEYPHIARWYKHIKSYEDAERATWPKKAGQPPQKVVSKDSAPPAKKADAEEDFDLFGDEDSDDEEKKRITEERLKAYAEKKAKKPGPVAKSNVIYDVKPWDDTIDIKDIEANVRSIECDGLVWGTSRILPVAFGVQKLQIGCCVVDEKVSTDWLEEQITGFEDLVQSVDVVAFNKV

SEQ ID NO: 122153 - protein, 159 aa, Heterodera glycines
MNAEKIKKLQQNAEHVRTGGKGTARRKKKVVHKTTAMDDKKLQTNLKKLSVTNIPGIEEVNMIKDDGTVIHFNNPKVQASVPANTFSITGTAENKQITDMLPGILNQLGAESLTHLKKLANNVTTQFKPSAEDDDVPDLIGDFEEASKNESKTTEELVH

SEQ ID NO: 122154 - protein, 194 aa, Heterodera glycines
MAKSDVPALSTTNQPYPYKEQTPKGIFEKMGLQKTPDGTSIGEFAVMRMDDMMNLIGRGSLWPLTFGLACCAVEMMHFAAPRYDMMRFGVVFRATPRQCDLIIVSGTVTNKMAPALRRIYDQMPHPKWVISMGSCANGGGYYHYSYSVLRGCDRVIPVDIYVPGCPPSAEALLYGVLQLQKKIKRLKKVQMWYR

SEQ ID NO: 122155 - protein, 206 aa, Heterodera glycines
TSQTDKRRQMGVAFVLCCFSVAFTPSLFIFRRFVAPDPLRIILFVLGAFFWLCSLLLSAVVFAVFGQHLLLVAIFFSILFQEVARALFYLLLYKTQSNLARLMAADANRTGTVSSMRLLYSSRHILAIVCGLGMGTAAALFHLANVLAAYWDDGVVGLPGAVQANRTMAEPTDASATAQPNAVPLPHHSDPAILLSAAADGGVTAV

SEQ ID NO: 122156 - protein, 362 aa, Heterodera glycines
MSDSIKRIFARYIYDSRGNPTVEVDLETEKGLFQAAVPSGASTGVYEALELRDNDKTVHHGKGVLKAVDNINSKIGPALVGQNFAVMQQNQIDKFLIDLDGTDNKGKLGANAILGVSLAVCKAGAVHKGLPLYKHIAELAGTRKVILPVPAFNMINGGSHAGNKLAMQEFMVLPTGAKTFKEAMQIGSEIYHHLKKVIKERYGLDATSVGDEGGFAPNIQNNREGLDLLKEAFAASGHQDKVIIGMDVAASEFYKEGKYDLDFKNPNTDKAQWLTGEQLADMYKSFINDYPVVSIEDAFDQDDWENWSKLQAAIDIQLVVDDLTVTNPKRIQKAVQKKACNCLLLKVNQIGTVTESIEASKL

SEQ ID NO: 122157 - protein, 156 aa, Heterodera glycines
MAGIDFGNLTCYMAVARNKGIEIVENDYSLHATPSCVSFGQFARMMGFGAKQQLNVNYGNSVVNFKHILGRTFNDKVVQTFRQHIPCGLMGKFTDDQIEIKVTHLGTTRVLSPEQVVACLLTHLRVQLSRSLGTDATECVINGPIFYQENQPRALL

SEQ ID NO: 122158 - protein, 237 aa, Heterodera glycines
MAFPPPFPNPLLPRLPNQSVQFPGQKFGFFSPQRQSILPGIPLLRPRFRPNFIPRELRPPNPLARPTGPPTTTTVFIGNISDKCPDRIIQEVLKKCGSVCNWKRLQDSRGKFKAFGFCDFMYPDGAKKALSVLKDFPIGDKRLNVKVSLVLKVSEIVAIFRRTNKRRNCWMNSPRISSSPPTRRATTPSELRSESFWRTRRPTWWTCRRTKVFGEGRRIVTKQFRRIQRKKPGRRKH

SEQ ID NO: 122159 - protein, 250 aa, Heterodera glycines
MASSIIFAPLALKIPLKFAKMDNFGKQKICPILLMDDHEFMEGMEQEDEDEFIEEPMSADFDLGNINDPIGVDEPINHEVQPKPPTVNSAGIDLDSLSNDYTDYALMNRLLFIADVCPPLKVEALKMLITYVIKKTQNWSMLSAAYQRVESAKASGIQGVESIPELDRTWVEVTTVKGNSRLEALLAEFKRQKDEAVKESIRRALEDLFQQYVQMGNLQEALKLYGRGMREYCTAPNQIVQMLINWISVT

SEQ ID NO: 122160 - protein, 356 aa, Heterodera glycines
MAHLIQDGFVVNDATWKLGIFITDMNISRELFVRGDMTIGSLMMQLVGQIGETQDWSDHYMWWPDRRKWLKHTRSTLDQIGITAATYLEFTPMHKHAKVQLPDLQIIDARLDFSVPILKVTQKICQELAIRHPEELSLKRDIPPDILRKGASVESEAQIQPYMKPGEESIGPGTLRTAKPIRASTVNLTSGRGSPALSQASAMGPGHLFNASEIGTLPKMGTIPRGMSPGPAAYREVLGRTPEPGYSEGGGLECDQFDENLINSPKITPGRETFRPQNYLEKAALNRGWLDSSRSLMEQGICEGDVVLLRFKFMQFFDMNPLRKCCRCKQEGQRQRKTVHKTRRNRNRCSCPRISI

SEQ ID NO: 122161 - protein, 232 aa, Heterodera glycines
MTTGSDRTQLQLQLHFNANNSSEASQSQNSSEQMQNCSTNERVSGEDSVPFIDRETFGDAESDRGRGPPPDRFRLVYLIVLLHGMGMLLPWNTFITIAGDYYLQFKFANVSNEDNYKVYFFNYLTVCAQIPNLLLSFLNLFVVIRGGFYRRIYFTLAVIFGICLVTIAMVYVPTDNWTFGFFLFTMLSVVLLNSASGVYQNSIWGLVADFPGEFAGAIILGNNLCGILMAVL

SEQ ID NO: 122162 - protein, 247 aa, Heterodera glycines
PYIFRLFSDNQFCDLNKTFLYLSTSIERKDKSNWIPITKDSEADQHVGVIQNFGHSFVKTLKVSISGVESYDSGIYYAFRAYMMNELGFSEDVKKGLCEASCYYVDDVDQDDYTNSGFKNRASRFADGAKCETMVKLNFDLARQPNFLLNNSDVIFSIHRNTDVFLIMAPPYVSGNAVIVNPHTYRINIHDIRIYVKTVDVTQSLNNIISNQLQTTPAKYPMRKIEIRSLFIPRGTSDLSHNVFTSI

SEQ ID NO: 122163 - protein, 291 aa, Heterodera glycines
PSKIHEGVFAIVRKVGGEHIRLCRLISGQRVLIERLSFNPKDAIGHFYGIFEVSNGGDMLCPIEFASKLFFTEFSNGNSAGDRGHGNESTQQLTSNQIMSLKEDGITTNELVSKLVSGNCHFQSRTKFSKEKYMRKKVQKHSDRVVILQPNIRLLADCYYRKDPERLGHLRIDQLGLMLQLSGLHSGKCNAFVFDQVLGLLGAAVLERINPFGHCIFLHRGDWPQSIPCLDSFTTDAQKSRGFLTLRITTLLQRNNGRDEEKTNNLKNTEEREPGKREDVAEERREQQIQK

SEQ ID NO: 122164 - protein, 214 aa, Heterodera glycines
  unsure (1)..(214): unsure at all Xaa locations
MGRHRRYPMKKTAKNTNQAQKIERLSFDTDQTPLQTPKDSRKNKNMNKKPSNSMLEEQPTTWKEQMLKKLTDEVAQQKNKIQKRNKKPKNRLLEETQKLGYHHMPWESAKTLIYRIQQDQNKAINEELLKARFAKAGRDVKEIAEEYKIMDEKNKMKKERRKALHEKQSKLRAXKKTLTKESERIRKKKWTKTKWKKGREKTEEAEKRKRKEQV

SEQ ID NO: 122165 - protein, 337 aa, Heterodera glycines
MRCSHSLPLFLCFVLFAGLASLISARLAHESFAKHRHHSRGGAATRPEAAAGDQPQKRKSIYNSNKCYRQPSDAERVQKRTSMRLYEFDDYLFDELPETWDWRNVNGVNYASTDRNQHIPQYCGSCWAMGATSSLADRINIKRKNAWPPAYLSVQEVIDCSEAGSCEGGTPDKVFEYAHKNGIPHETCNNYQARDGKCDPYNRCGSCWPDKCFTVQNYTLYKVGDFGSANGIQKMKAEIYHHGPIACGVAATPRFDNYSGGIYKERTNEDINHVISVVGWGKDAASGVPYWIGRNSWGTAWGEQGWFRVVTSEYRDAGNKYNLKIEEDCTWGEPIII

SEQ ID NO: 122166 - protein, 204 aa, Heterodera glycines
MSDNKEELVQRAKLAEQAERYDDMAQSMKKVTELGAELSNEERNLLSVAYKNVVGARRSSWRVISSIEQKTEGSEKKQQMAKEYREKVEQELREICHDVLDLLDKYLIPKAGNPESKVFYLKMKGDYYRYLAEVATGDDRNAVVEKSQQSYQESVDIAKDKMQATHPIRLGLALNFSVFYYEILNSPDKACQLAKKAFDDANGE

SEQ ID NO: 122167 - protein, 106 aa, Heterodera glycines
MPKVDFDYLDMFSPILVAFIFAVILFFISFTCINWYCITHKDDLTVFEKFGTRLNLRLGPHSMAVIKRGGYASTYAREEAKRSECTGPQQQQLNTLGDGKCQISHA

SEQ ID NO: 122168 - protein, 342 aa, Heterodera glycines
MNTSTPRDAPTAQDARTLRQMASLRRSMRSTLSPIVAEEGEREVGTSAAAATQRRSTDLAQSLLQRRSVLSQFGSAQSSVSSSVGSYTPSMMASKIDNRPAIVIEIGTRLTRIGFAGDFLPQEIFRSEFVDPLDGPSPSSPIALFDRSRTEQQQYEVLVKFFKNIVFGKLLTTMSSRRVVVVESLLVSNWQRNAIARALFQCPSLSAHSILFAPSHLCCTFPFNTKTCLVIDMGADEAVLFPVAEGVLMLNSLETSVAPSATALEQNVRRLMAQFGRLRTGAEDDAEGRPLTETELEQADRMRLWEDVAVRFCFATTAARGKRIQTYLANSAASSSADCSAA

SEQ ID NO: 122169 - protein, 217 aa, Heterodera glycines
EKGGDPEQIRKSQVGRFADVSLVDKVISADSEWRKERFFLDGLNRAIKVCSTAIGDKMKKKESAGDSDAIPEGQIKSLAELKMDDIKEMKISQIKTVKGMVDEEVRRTKLRMETLEGDRNEHLAKIGNLLHNSVPISDNEDENRVERTFGDCASRKSYSHVDLVVMCDGFDRERGTNVAGGRGYFLKGPVGVLEQALIALALQMLNKKGFTPLYTPF

SEQ ID NO: 122170 - protein, 216 aa, Heterodera glycines
GYKSQLQHHHLQNSFLRRRLHHQHRRVRRSGQQSATAAFSLDNGATAPAASPLRFDDKAPPARINQAVFRQQSLLNAASAELSPCVQPLRRGNCQEASLRYFYDLALDQCRLFYFSGCDGNENNFATLAECEVRCKIGFTPNSVPAQQQQQQQQKGSIGPCPSGELPLGGKNPVLCGDRSDSIGCPSGFFCADGPPSVCCPGHKSAASVGDVRRKP

SEQ ID NO: 122171 - protein, 154 aa, Heterodera glycines
RNYNKMADQLTEEQIAEFKEAFSLFDKDGDGTITTKELGTVMRSLGQNPTEAELQDMINEVDADGNGTIDFPEFLTMMARKMKDTDSEEEIREAFRVFDKDGNGFISAAELRHVMTNLGEKLTDEEVDEMIREADIDGDGQVNYEEFVTMMTTK

SEQ ID NO: 122172 - protein, 139 aa, Heterodera glycines; identical to SEQ ID NO: 119931

SEQ ID NO: 122173 - protein, 215 aa, Heterodera glycines
MVLQKKKKSFSGFKIQNFVYGLDSQISSLDKYLLNFKAKKNGGSCLLSGRTNTGKTLVLESLIQKHFSDDDCDINIRRVDGLSKMTKLFEKLDLEGPVLIVVDHFELFAYKQQQNFLYSILNGSQTLPWFVVLIGTTENSVNLLEKRVKSRFSALRVNFNVTFSLEQFDEGFGQLLDCSSLSKKMIKKTKEDDNGKKLLCAFDCPDHWFGYLKKN

SEQ ID NO: 122174 - protein, 212 aa, Heterodera glycines
  unsure (1)..(212): unsure at all Xaa locations
MASSSAASDDSSAVSSPPPPLLSSPIRSEMVAAAKQFLANPRVRNTPISEQTEFLRGKGLTETEIQKAMKLTTDGGGEVPSTSLSSLPPASAPSPSARAVVDLARSALLFGTAGYMVYRFVRSWLLPQLLNVPDPAEERMQRLEQQVERLSDSTRCIAESVTQTLVAVTEQNEQLSRTMMMVQGGTXGTVCTADIDRVHTEIGIVKSLLLNQ

SEQ ID NO: 122175 - protein, 173 aa, Heterodera glycines; identical to SEQ ID NO: 119685

SEQ ID NO: 122176 - protein, 135 aa, Heterodera glycines
RLQYFLVSNLFAGFLIAHVVTYNHYSTDKFAYDDPILENFACLQLYTTRNMRPGPFIDWLWGGLNYQIEHHLFPTMPRHNLKKVMPLVKEFCAENDIPYMVDDYFTGFRLVIEHLRRVAEAATETLVSHHSQKVP

SEQ ID NO: 122177 - protein, 161 aa, Heterodera glycines
SKLPPELTQQVMRGEMPDLTKLPLDLQQWIKDNFDRLVASLENNPDLSIDEIMKKLPTFEHPLMSTFSPYDINKVDADLVVQQRNEEEANHRFWRIFAASALALAGAVTLGVLSAFFWYLKRSRRLADPPMAPPIGIDGGPELPSVIREQYFRPSASSTLK

SEQ ID NO: 122178 - protein, 231 aa, Heterodera glycines
MHEQAQEFLKRAIKLCPTNASIWVLLGHEYLETKNHQLASTAYKKATEIDSVCYRGWYGLGQLYEILKQSETALYYYQKAHKCRPADSRILIALGVIFSKIDRKSDAEKCFKKAFQIGDVEGNALTHLAKLYEEQENQQNAAKAYEAYLTLYTEELVGDLSLIAEACRFLARHNLDLGDLDTSYAYAQRCLNYDLAKEEGQRILRLIMSKRKEEQERKLALPVGTPQQQNI

SEQ ID NO: 122179 - protein, 216 aa, Heterodera glycines
MLFFQNGPVEQCPHQQQQNAAPLSHRPTAFSLPATSPFSTISSVGSLPSEPTTPTERMSTGNVMMMMSPKRMDKGNGGEKGQRQKAPGKERPKDGKERVHKCDQCQKAFRFKSNLFEHKSLHLGSSSRNPFVCPFCSKTCRLKGNLKKHLQVHVTSAEDLECLWKRSFSRSSGRPSKNAPPAPLPKPGDDLGMVPVLVSQQDASSSSPFGSSPTIK

SEQ ID NO: 122180 - protein, 130 aa, Heterodera glycines
MTEGGEEVNPKAYPLADIQLSQKLLDLVQQATNYHQLKKGANEATKTLNRGIAEVIILAADAEPLEIILHLPLLCEDKNVPYVFVKSKAALGRACGVTRPVIATSIIQNEGSQLKSQIQKIKEDVEKLLI

SEQ ID NO: 122181 - protein, 217 aa, Heterodera glycines
  unsure (1)..(217): unsure at all Xaa locations
MFKTYGPRPESFTLDDGERYYVGADVGQYLKYHRGTLYKRYPQLWKRMASVEEKKKIQELGCATSYINSNIMLVKANEVEDIFDGQEEKYRASVSGGSAYGRAEGAQTLRSRGSAPWLNQQVAKXTNVTSGSHHLESVPCSTPSAHGRGHFKNRDYAYVADDLESYRRVMENAQAGECLVPIRLDMELDNIKLRDCFCYNKNDKLITPEMVAEVLCE

SEQ ID NO: 122182 - protein, 227 aa, Heterodera glycines
  unsure (1)..(227): unsure at all Xaa locations
MSEEESQYSDEEVEEESIAADEVSVQEPAPPKEEEPAPEAEAEAPPAEEKEEEEEEEPGSPGGAGDAPKEEFRRTSVTESVAPTAQLRRAPPPQPKPAEESMTEAEAAMLAVKKRHEEEEEAKMRDNDERRRQELAAVEDELRVLKERQAERRAEREKEEAEFAERRRQDEDRRRKDEEERKARLEAEKAKRDEEKXKRHLMMAGGIGGFVAADAEGAGKNFGVPQK

SEQ ID NO: 122183 - protein, 431 aa, Heterodera glycines
MAAFLNGNAHSSIECNGVVHDKNGIDQNGTKLADRLQHSVQIGTKKAPVSKGSINVNKYVLEVISDTDQLHTLEQYAIDYAHSIGLVAPLSDPPEGKFTNIYAVPPPIALLPSPFPRELYDHAVNVQQAMNELYFRVASDHDFLMDAFKDVVKGDPFMARLVQIAQVVHDEGIHQPLAVQLQRSDYMAHWDPSDGSMALKQVEVNIGPIGGPGFAFGVSKLHQKMLDKLAIAHDGKPAILANSEAPLNRSRQNIAYTLYQSWKLFGDPKAVLLFLDTPNITHFEQLQFIQFEVEKLGKQQGNFVKVLVLSLTEASKRISLDESGDFSLYLDGTKRVALVHIADGNVPHEYPTEHEWTARTTIERSNAILSPNIRFHLSSTKKIQQVLAKPGMVERFFPNDPKRVALIRSTFTGLWGLEVEDEATREVIEDA

SEQ ID NO: 122184 - protein, 204 aa, Heterodera glycines
MENAHTKSEDELFRFFGTGPDGLTEEQADELRDKYGYNEMPAEEGKKLWELILEQFDDLLVKILLLAAIISFVLALFEEHDDQTSAVTAFVEPFVILLILIANATVGVWQERNAESAIEALKEYEPEMAKVIRAGKHGIQMIRAKELVPGDLVEVSVGDKIPADLRLVKIYSTTIRIDQSILTGESVSVIKNLDGVPDPRAVNQ

SEQ ID NO: 122185 - protein, 221 aa, Heterodera glycines
LSSKIPFWTKLCPFSKQQPEQQQSSPVAEDTIPPQQQKEGAAMSAEGNDAPPAAEQPPPAEAAPAEAVPVQEAAAPPVEAAAETAPAEAAQPVEEAAPPAEAPVEAAPAEAAPPIEEAAPPAEAPVEAAPAEAAQPIEEAAPPAEAPVEPAPPVEEPKAAEPEAPVSEAVPAAEAPVKEAVAAPIEVAPAEAEPVSAPPAEAVPAEEAPAAEVAQLSLEEQ

SEQ ID NO: 122186 - protein, 216 aa, Heterodera glycines
MASKFVFSLRFSYPRLLTSSALNNKKLVPNLIQSRSIVTKFDLELPDDYPEPWPYKQWGFNQFMQHLDKTLKRWHINSKLIVFESNIGVGRSSIAKELADALGFYYMPAFKMDDILVDRYNNDMRDYYHLFPKRFRFPDINMFYKDPADDQTAVMQDLMYDCRWEQYLNAQAHLFNTGQGVVLERCVHADFVFANAMRAKDWISREYLNFYMYKRK

SEQ ID NO: 122187 - protein, 339 aa, Heterodera glycines
MTYYNDSNSPFLITLLGRICLSLLLAKVCRSLYNILYPYVIAKPRDLHELAGGDANWAVVTGATDGIGKAYAAELALRGFNLVLISRSAHKLEAVATELKQYSATSGQRGEVQLRTVQFDFTNANPADYERHIFGAISDLNIGILVNNVGMGNPNDYPERFDEMSTKLLSDMTIVNTLPVTVLSSFVLRQMVKRRRGAVINISSASAYMKWYQYAVYSSTKSFIVHLSEILRKEFASDCPGIAIQTVCPMVVATKLTQRSSRDGLSSLLAASPTEFARQAIQTVGLVPETSGCLSHQIQVELLFSLLLTFVPNSLFDFFVRLEAHLHKSVLNTASKQHD

SEQ ID NO: 122188 - protein, 209 aa, Heterodera glycines
  unsure (1)..(209): unsure at all Xaa locations
MLASVINDRFNRHSQYAPFFSLEFYPPLKEHPKNLADFFEMLDHLKQAQPLFVDITWSRRNDPGNLAKLNSSSAIAIATAASFXGKERTMLHICCNDHTRTESISHVKQTLSHGIANIMALRGDDMPTEQTLLTKNTKHFAIDLVKWTRELEETDGYFGNDRLTGAVAGHIYPPMKNISYRQCMEHLRAKVNAGADFVVTQFFLDANLF

SEQ ID NO: 122189 - protein, 197 aa, Heterodera glycines
CTGFTLRPVAGLLSSRDFLAGLAFRVFHSTQYIRHSSKPHYTPEPDICHELLGHCPLFADPDFAQFSQEFGLASLGASDEMVEKLATLYWFTVEFGICIQNGAKKAYGAGLLSSFGELEYALSGQPELAAFNPPETCQTKYPITSYQPKYFVAESFADAKNKLATWSTSIPRQFQVNYNPYTQRIEMLDNESAANKL

SEQ ID NO: 122190 - protein, 224 aa, Heterodera glycines
  unsure (1)..(224): unsure at all Xaa locations
MFRNQYDSDVTVFSPQGRLHQIDYAVEAMRQGSAAVAIRSKDYAVVVALMRAQNELSSYQQKVFKLDDHLGLSMSGLISDGRILARFMQSECAEFRWNYHNPISVELLNRKLGLKLQSNTQYYGRRPFGVGLLIIGYDDKGPHVVKAEPSGDVSEMFAASIGARSQSARTYLEKNLPEFETADRDALIRHAIRSLKETLQADAGSLDENNTXIAIIGLDNLLPF

SEQ ID NO: 122191 - protein, 210 aa, Heterodera glycines
MAKEEYCFDAKAAAAAGQSRRPSTTASVLVQGDGQSSRFVDAIIRKVTQPPLQRFTDEITDEELKQLCKAATDVFRMQPTLVRIRPPVVVVGDIHGQFSDLQRIFTTHGPPPEQQYMFLGDYVDRGAHSMETIILLFCYKIKYPSNFMLLRGNHECSNINKAYGFYEEIDRRYPRTGARRLFDLFNQVFAWMPFVGLIGEKILCMDGGIS

SEQ ID NO: 122192 - protein, 340 aa, Heterodera glycines
SGPINGLSVDASDGLHFVTVGQDAQFKVWPLPIEFDGNAQPTQPVHSLSLDGVPHGCSHVAMSSDFVTCGEGISVWRLHRSSPIRHYAVGPNTVQHINCNPIEEGIMAGCAADRSIFLFDTRQKVPLSRVVLKLRTNSIAWHPLEPFTFVAANEDYNLYTFDMRRLDSARHVHQGHTSAVMDVDFAPSGHEFVSGSFDRSLRIFPVEQWRSREVYHTPRMQYVLSVLWSSDNKFVLSGSDDMNIRLWKANAAEKLGPLCPREKAAIEYSQKLRDTFQGHPEVRRIVKHRHVPKAIYSATREHRIIRESQRRKDKNRRKNTKSAATEPFTSERAKAIVSEG

SEQ ID NO: 122193 - protein, 195 aa, Heterodera glycines
MHAIRTISRTFSRSTTAPVGIPFVVDNDGKTERVYDIYSRLLKDRIVCVMNPIDDFFAASVIAQLLFLQSESGKTAINMYINCPGGSVTAGLGIYDTMQHISAPVATWCIGQASSMGSLLLTAGAKGMRTSLPNARIMVHQPSGGAYGTAADIVIRAEEINRMRKRLNEIYAMHTGQTVETIDQALDRDRFMSAL

SEQ ID NO: 122194 - protein, 212 aa, Heterodera glycines
TNKRIVWIDGGMHAREWASIHTALWFIDQLISLYGVDPQVTAYMDTLNFYVLPLANPDGFEYSRSDVNPQTRFWRKNRGQQVCKKDRWRRERCCGGVDLNRNFDFHWGETGSSSDMCSDIYQGAYAFSEPESRAIRDKMMSSELYGKVDAFLTLHTYSQMWIHPYNHERKSFPNDIEDLQEVGRRGVRALEQLYGTRYRFGTGADILYPSAG

SEQ ID NO: 122195 - protein, 216 aa, Heterodera glycines
MAQEPPLQIVIPRLDDDKPLVRRPTPQAQPAAPAVPAELRVSNREEDAQNIEPSMSGKQIVGLIIPPPDIRTIVDKTALFVARNGLEFEMKIKEREASNMRFNFLNPTDPYFAYYRNKVNEFETGVASADTQSKVKLPEAVREHVQRAEFIPRLPPKPFEFCADPLTLNAFDLDLIHLTALFVARNGRQFLTQLMNREVRNFQFEFLKPQHSTFQY

SEQ ID NO: 122196 - protein, 340 aa, Heterodera glycines
MRIKKRIFRGELMSREVRASGVLAIGKLCLLDEQLAKKCIPVFVRQLRENPDHFVRNNIVVVICDLCIRYTSEVDRYSTILASCLWDSSILIRRQTLLLLTNLIKEQYLKWEGTVIYRFVTTLLDPEQCIEEYANFCLTDILLPQFRERMFFHHFLECMFNFNGVRHVSWIPSAGYELSEEVQKRCSLEGRELFDSRMRLYKYMLNTFEDQQKVYILEKIGLEIFVPIVEGRLKLSDVKVRNLLFDAFKIMGTEEIKLKMQLGKMDADYEGDDDEPPELVKTAAKKFIATTFRKSIAETVMPHLFLLKSFLCEKRSPLAKNCYSVILDFCREHEEQLDAF

SEQ ID NO: 122197 - protein, 232 aa, Heterodera glycines
MSLENFGNGFMRRLGWKQGDEDEGWSKKAVDSLLKKLQKQHNKEGLTLLENALRTEGKEPSECVTIPRSLDGRLQISHRKALPHVIYCRVYRWPDLQSHHELKASQCCRFCFESGQKDVCINPYHYERVDSSNLLPPVLVPRFSDSPPKRQPGGEHRVLLGHDPIPFVPCQHWATISYYELNTRVGEQAKVSAIECVVDPSSGETNDQHKISLGLFSNVNRNSTVENTRREI

SEQ ID NO: 122198 - protein, 203 aa, Heterodera glycines
MQHISRTSKHFLNKFSPNTFWQPSRNAYKYVGETAASDGTLQGDTSAAMASALFHEMIKGAATIVGHTFMEPVTINYPFEKGPLSARFRGEHALRRYPSGEERCIACKLCEAICPAQAITIETETRPDGSRRTTRYDIDMTKCIYCGLCQEACPVDAIVEGPNFEYSTETHEELLYNKEKLLSNGDRWEPELAANLQSEFLYR

SEQ ID NO: 122199 - protein, 204 aa, Heterodera glycines
MGAYKYMQELWRKKQSEVMRYLLRIRCWQYRQMEAIHRCTRPTRPEKARRLGYKAKQGFLIYRVRIRRGGRKRQVTKGQTYGKPKTHGVNQLKNTRSLQAVAEARAGRRLGELRVLNSYWVGQDSTYKFFEVILVDPSHKTIRRNPDTQWITKPVQKHREQRGLTSAGRKSRGLGKGMKHTKTIGGSRRKCWKRQNTVEFHRKR

SEQ ID NO: 122200 - protein, 451 aa, Heterodera glycines
IVTEEGEDSLYPIAVLIDELRNEDVQLRLNSIRKLSTIALALGDERTRKELIQFLTDTIYDEDEVLVALADQLGNFTPLGGGPEYVHWLLPPLENLANIEETVVRDKAVESLQKIAEKHSAAQLEEYFIPMDLRLSAGDWFTSRTSACGLFRVAYARANPAQKTELRAAFRGLCRDDTPMVRRAAAYKLGDFAKVQEEDYLKNEITQMFEDLAKDEQDSVRLLSVEAGIVIVGLLSEDSAKLAQVKPIAVSLVQDKSWRVRYMAADKIVQIQQAFRTKIGIEEIVGWYTGLLKDCEGEVRDAAAEKLQSFCAALSEEGRKKGIIEEILPVIRPLTTDANQHVKIALAQVVMGLAPLLGNQCTIEHLLPIFLSMLRDDTPEVRLNIISSLEKVSDVIGADELQYSLLPAIIDLAQDGKWRVRLAIVEYMPLLAKQLGQKFFDEKLLKLCMNW

SEQ ID NO: 122201 - protein, 194 aa, Heterodera glycines
ERGVANRWRSLFIIIGDKAKDQAVTLHHILAKATTGGRPSVLWCYKKETEFSSHRKKRIKELKKRKESGLFQSKEDNLFEQFILSTQISYCYYADSHRILGNTFGMAVLQDFEALTPNLLARTVETVEGGGLVVLLIQSGTSLKHVFTMNMDVHKRYRTEAHADVVGRFNERFILSLASCANCVVMDDCLNVLP

SEQ ID NO: 122202 - protein, 194 aa, Heterodera glycines
MSNDNDKRDASSIPTNALVNKEESPDGNEEKKIFCGGISYETSNEDLAVYFGQYGKVKEVQVKYDRVTGRSRGFAFVEFDTVAACQASLVQREQVIKGKQCEIKPAKSREVGYMNKKVFVGGLPGDFPEEELRKHFNQYGKVEEIEWPFDKLSKTRKNFAFVVFEDEESADRATALPKQNFASRECDVKKGGPQ

SEQ ID NO: 122203 - protein, 171 aa, Heterodera glycines
MAEKRKLLNEIDKCYKKIDEGFEIFDDIMEKMNEANSDNQREKFQDDLKKEIKKLQRLRDQIKGWQNSSEIKDKDSLSKFRKLIEQRMEIFKDVERENKTKPHSKQGLSAEDKLDPREKEKCETIEWLNCQIRRIQDEIDRTESKLETMSSMADSNRKRGKKDEAEKNEKE

SEQ ID NO: 122204 - protein, 301 aa, Heterodera glycines
KCRNEDEYDYLFKVVLIGDSGVGKSNLLSRFTRNEFNLESKSSAGVELFFEFSPSIKVDGKTMKAQIWDTAGQERHQPIVSAFYRRAVGALLVYDISVRLTYENVGRWLKELRDHSDPNIVIMLVGNKSDLGNLRAVPTDEANAYAERNQMAFIETSALDGTNVGAAFTNILTTICRSQSTTAGSTPKIDINDDLIDEDALLEPEDLQRPEQSAACGVPSDGDEQSKKRRACKNCTCGLAEQMQTAADANGDTNNKMEAKSACGNCYLGDAFRCSTCPHLGKPPFKAGEDGTIKLASVDDF

SEQ ID NO: 122205 - protein, 215 aa, Heterodera glycines
RIHCFGQESDKRLILDLDDQQAGPSEQKVGRRGPGRKSANPTLDNLLGHANLEHARGRTKEAMTFLFEVVKLAPYHVQTYKELSDLYSELGQKEKSFEFKMLAALLNSKTTAEEWDEIAGTAKSFNRLELAVACLAKAIRCDPENWLYYEKRIQILDASGETDLAMKTRLQAAQSINCQTSKINFAWIDKLIKTAADYYCTLKDEERATEALETF

SEQ ID NO: 122206 - protein, 243 aa, Heterodera glycines
MDGLTEPMLSTRPSPSIGAEGKERFARENHSEIERRRRNKMTHYINELADMVPQCAALGRKPDKLTILRMAVSHMKVIRGANAQSNNLSGTMPSQPSFLTDQELKHLILEAANGFLFVVSCESARVVFVSDSIGPILNVSPEQWLNSPSFYDVIHPQDVEKVRGHLLGTDFSHNSRVLDLKTGTVKREHSSARVHLNCRRGFICRMRIGDVNCLPRLRNRHPIFESEGRSFIPVHCTGYVKKT

SEQ ID NO: 122207 - protein, 201 aa, Heterodera glycines
MTDAKTDQKDNVKSEVGDVPNGGTSFTAQLSDDFTIQSNTNEVVDSFDNMQLKDTLLRGIYSFGFEKPSAIQQRAIVPCCSGRDVIAQAQSGTGKTATFSISVLQRVDENAPDVQALVMAPTRELAQQILLVMRALGEYMGVKFHTCIGGTSVRDDQRKLEGSVQVIVGTPGRVNDMIPPGALKNDKIKMVVLDEADEMLS

SEQ ID NO: 122208 - protein, 343 aa, Heterodera glycines
NVIHKFVRDKYEKRFPELESLVPMPLDYINTVKLLANDIDTNSRKEIIHQILPAATCIVVSVTASTSQGKPLEQNELDVIIEACSMAEELYDLRMKMHLFVELRMALIAPNLCRIVGAGTAAMLISQAGGLVPLAKMPACNVLILGKQKRTLAGFSSSVILPNTGFIYHHPIVQTLPPDLRRKAARLVAAKCTLASRVDSIHSSLDGRIGERLSVEIKGKLEKMQEPPPVKNAKPLPKPLDKASKKRGGKRVRKQKELLKATELRRKANRMNFGELQEDVMQDHLGFTLGQANSHSLPSGGRLRASQVDNKTRVKVSQKLQRTIEKTRQHGGITSLAAKSHGS

SEQ ID NO: 122209 - protein, 285 aa, Heterodera glycines
  unsure (1)..(285): unsure at all Xaa locations
MSAYQTIEKGSLHTLNYRVFFKNSDGKLISPWHDIPLYASESNKLFNMVVEIPRWTNAKMEIATKEVMSPIRQDEKKGLPRFVNNIFPHRGYIWNYGALPQTWEDPGHKDENTGENGDNDPIDVIEIGSKVQKRGAVIRVKVLGVLALLDEGETDWKLVAIDENDELAPKLNGIEDIEKHLPGLLSATHEWFRIXKIPTGKPANKFAFNGQFKDRNFAHKIIEQTHQFWKKLVTSASPHPLNTDCHKEEAVFKANLSDWESFISKQPKFGHAQQVPEHVDKWHFI

SEQ ID NO: 122210 - protein, 362 aa, Heterodera glycines
MPAFRLILSPFPSVFARLSHSHVPLFRQCSAAASSNSPSVNFLSSNFALPAEWDGRLGHLSVEQLGGDNFEWIVAVQKKFTGVGKASAIDLDLACSVPVGSDHLADLVDLCYKFRHTDSAGDLLPSTEYTLCRLLLEFGEFGVFMNLLNDPINYGIFPNEHICCMFLDHFLGSAQLQYAAKIAIYVMLQEMFDFPLLTFLATRALLEWTQGERKLDEQIHPKMAPSLEDETNFNEENVRLFRYPFLKNPFWDGHFDENDSDRMAGKALEWLSYHLKLAKNDETNYDETLIRVIRLLGLSIQRKWTEAKSLAEEMFITVAPSDNARQMIYSSMEQMQQFLNFDEQIEAAEKQTEREKDDQNSE

SEQ ID NO: 122211 - protein, 210 aa, Heterodera glycines
VRCIKDQNGNHVVQKIIERVQPHQLQFIIDTMVNGFTDSVTSLSVHPYGCRVIQRVLEHCTEGQKRPVLEQLHENVLTLVTDQYGNYVIQHVIEHGLFDDRERIVRALHGDILKYAQHKFASNVIEKCLICGTTDQKNALIDEVCADNGSSNPPLLEMMKDPFANYVVQKMLDVADSTHRKKMMFAIKGHIPALRRFNYGKHIITKLEKY

SEQ ID NO: 122212 - protein, 202 aa, Heterodera glycines
IGLLLEQPVKKRKIEVGESDGNEQRSVAVRLFSEDGKEIGQAPVVLLASTTAEQLQVLYHQLLRSEKQQNGECGDDGDFDEGTAPVQFRTVADEKSGGKGTEIVDSLLDSLPSERLFLEKPLELVCLPQAVFRVRPVTRCTASLPGHGEPVLSVQFSPDGSCLASGSGDRTVRLWDLHTNLPKQTLTGHNDWVLCIGWSPDG

SEQ ID NO: 122213 - protein, 219 aa, Heterodera glycines
  unsure (1)..(219): unsure at all Xaa locations
KVRHSPVQRFTDEITDEELKQLCMAATDIFRMQPTLVRIQPPVVVVGDIHGQFTDLQRIFHTHGNPPEQQYVFLGDYADRGPQSLETIVLLFCYKVKYPANFMLLRGNHECANINRVYGFFDEVNRRYQRPGPRRLYDLFNQTFAWMPYVGLIGDKILCMHGGXLSDQINSLEQLSQLNPPANTTPRLRTLEKRILLWGETLPNRKYRWQAYPRTTMEK

SEQ ID NO: 122214 - protein, 218 aa, Heterodera glycines
MMYSLGSFYGAPPIAYNPTPLAAATPGVGPMRPPVPMSVHGASPQQIYQFKPPTFDPYLCDQFFPRSSTEAEETAQTQFLLAKHNDILPSTVEQSAISALVGKVKQTLDKIIVAPETFNSVAIEEVREVGSYKKGTMLAKHNVADLVIVLKTLPLIEAVNALGQKIVLDLKAENHADIFGCVIREFGCEIAGTHAVVRVLITILPQLATQLDKDLHLP

SEQ ID NO: 122215 - protein, 113 aa, Heterodera glycines
MKYVAAYMLASLGGNGDPSPKDLEKILAAGGLEVDMDNVNAVINAVKGKSIDEVITAGQKKLATMPTGGGAAAPAAAAATGAAAPAGKEEKEEKKKEEVKEESDDDMGFGLFD

SEQ ID NO: 122216 - protein, 159 aa, Heterodera glycines
  unsure (1)..(159): unsure at all Xaa locations
MVAANLKLSLIFVAGFCLLFIADSDAGKSCKPGEKGPPGPPGKPGNKGKPGVTVANALRMPCSFGLLALSTTPXPAGPPGDAGIAGPPGPPGEPGKCYGSGSKESKEKEYKPSKRSIDNFEHGLRVARGYKQEVGPPGPAGPPGPPGPDGPPGECECKY

SEQ ID NO: 122217 - protein, 270 aa, Heterodera glycines
MVSFPPSLMPSFQCFCASSSRLFCSSAFVRPVRVRFAPSPTGELHLGSVRTALFNFLWARKYNGKFVLRIEDTDRERLVEGSEQRIEQTLSHFGLTPDESPLRGGQFGSYYQSERLPLYRELADQLVDIGHSYKCFCSQERLDFLRRKANSERIPFRYDGICRQLSTEETRARERNEEQFVVRFKFDGRRAGFTDIVFGDYEHYSEEGDFVILKRDGFPTYHFANVVDDRRMKISHVIRGAEWICSTTKHLQIYSAFGWSPPHFAHLPLI

SEQ ID NO: 122218 - protein, 218 aa, Heterodera glycines
  unsure (1)..(218): unsure at all Xaa locations
ALEMIEDLRGAFQQMLVANDWMDSDTREFAMEKAQQMINLIGFPDFLFNDTQLDDYYKNLVLHPNDHYAEMVEKVSAWAHKKLFRRLIEEVDRSEFGTSSTVVNAFYSXSKYAITFPAAILQAPFFDQAFPKAVNYGGIGAVIGHEITHGFDDQGAQFHGIGNLKDWCDPNTQQHFVERKRSIIDQYSSFEVPDINLHVNGILTQGRKIADNGGHKQA

SEQ ID NO: 122219 - protein, 267 aa, Heterodera glycines
VKTAFADVAGCEEAKIEIMEFVNFLKNPAQYKALGAKIPKGALLTGPPGTGKTLLAKATAGEANVPFITVSGSEFLEMFVGVGPSRVRDMFEMARKKAPCILFIDEIDAVGRKRGGKGAMGGHSEQENTLNQLLVEMDGFSTDESNVVVIAATNRVDILDPALMRPGRFDRQIFIPVPDIKGRASIFRVHLTPIKTTLDKIELSRKLAAHTPGFSGADIANVCNESALIAARDAHDEVTSKDFENAIERVIAGMEKKSQVLQPDEKK

SEQ ID NO: 122220 - protein, 302 aa, Heterodera glycines
  unsure (1)..(302): unsure at all Xaa locations
MATITLTSQHSQIVPEVIRQQFLAADLEESVRLREEAKKGQFKTQIVWRNVLLFVLLHFGALVGLCQLISSAKWATIGWCIFLWFAGGVGITAGAHRLWSHKSYKARFPLRVLLVVLNCVAFQNDVIEWSRDHRCHHKWTDTDADPHNINRGFFFSHMGWLLVKKHPQVKAKGSTLDLSDLTSDPLLAFQRKFYLPLVLLFCFLLPTLIPVLLWNESSSVAFYTAAVFRYTFTLHATWLINSVAHIFGYRPYDVSISSAESVWTTLLAVGEXGHNYHHTFPQDYRTSEMRTLLNFTKAFIDL

SEQ ID NO: 122221 - protein, 362 aa, Heterodera glycines
LFSALLHLISAAHRLHRQRHAMEELVALSPGIRVGRWTITKKLGAGAFGAVYLCVNDQGEQAALKTEPVNTPHPLLVMEAHVMTKLDALRDGDGKHFCRCLDLGRDEQKDQQSGQMKKFNYIVMSLVGRGLDGVVKDAGGRLSLGSAVGVSIQMLAALRGLHTVGYLHRDIKPGNSTIGRPESNEIRLLYLIDFGMARKYTRDDGSQHRPRAVTNFRGSPRYAAISAHLGREYSRKDDIESWFYCMIELLKGALPWANVGEMKAIGEAKIKRQKKQPEAVRRQAIADLLSGCPNEFGQVLKYIDDMKYTDKPDYDWIIATLRSSLSNAGVQEFPYDWETGKRNAAPGAGGGGGGGGGDSYFN

SEQ ID NO: 122222 - protein, 296 aa, Heterodera glycines
MASGHYEVWHSQSVGFPIFYLPYEYDDKWALEKRVWNPAQAKWLHPVFIRHWHISFFLVFLYIAGIHYLKWWMRDRKPFELRNFLVFWNAGLAIFSTFGALRFSEEFLYVMKNRSFQDSVCLSISPTQPAALWAFLFSLSKVAEFGDTVLLVLRKRPLIFLHWFHHSVVLIYSWHSATELTAAGRWFIQLNYSVHAIMYTYYTFASLGIRFPKWVSMTVTTLQTTQMLIGVFISLYVARLKLFSSRPTVCQQSVENMCICFSIYTAFAFLFIRFFVNSYLLGKKPTAAKAVAKKAQ

SEQ ID NO: 122223 - protein, 213 aa, Heterodera glycines
MLSSPPKEFVAPVGEVHAFVVKCMQSVGTSAAHAAQLADLLLDADIVGHYSHGLNRLCIYIEDVASGVKGDGEPKVLKQKGATAWVDGCDLLGAVVGNFCTELAIKLAKEHGIGWVVCKRSNHYGICQHYAKKIANAGLLGLSFTNTSPIIFPTRSSQIGLGTNPISCCANSREKGDGFILDMAASTVALGKGEIAKVNGKSAIPSAWGADSA

SEQ ID NO: 122224 - protein, 168 aa, Heterodera glycines
MIKAILVFNNHGKPRLLKFYTQYSEEEQQQIVRETFQQVSKRDDNVCNFLEGGKLIGGSDCKLIYRHYATLYFVFCVDSSESELGILDLIQVFVETLDRCFENVCELDLIFHVEKVHHILNELVMGGMVLETNMNEILLRIQEQDKIERQEAGIAAAPARAVSAVKNM

SEQ ID NO: 122225 - protein, 443 aa, Heterodera glycines
YVETADRLVEIARNELPNARLPAFQVAQAVDVLTLGSYPRLPQNIKDRFIPPLPLGAAERRLTLRQLNKLIEFHLAQQAAQLSPRIRHITVQNGMACLVVPGEFEMELTRLGDEPTTRWTLLNIRILVESAEVGEGQQMVHPLQINFLHQMVQEKLDTANEPIMAAYIVLHWFCRSLHLDILLCQALQIAKINRSGKGSEGSSQQYIRVDEYNEKECRLAISYWLRREGGTIHGRLSSHYRMLIFGDKNNSHVGLKIRHHPPSTELPTIDHEQSPSLQRLLNETVLFRCRERLLAGKQLLEAAFRTLSSQSNTKCPSSASPSSTNSEDTAQQFVHQSGHSLLTLSCPLVLIGDCHPDECLTVAVNTFSGAVIARVEVLGQREEIHKLEHQLNTCPTVLLHSSASSLSAFSVSSIGRLLARLRVLVIGERLNRALVGMQVNSLN

SEQ ID NO: 122226 - protein, 226 aa, Heterodera glycines
MPMNEIDRAVEVRLERVQEVKKSMLKEAGLETDIEPANDGVFQGDLLLTTEQCDELINQLQNDTTAEGTAVVSLEAQSLLDSETDTEVGSNSPSLATYNATHSILPDAEIEGTASAVAALAPHLRAKRAGNALFFELIPIEKWPYDKPIAFFLDKALRNDERKQVRFALKQIQSNSCIKFKEYAAKPTHTTHLHYLKETSLGACGFSEIGMVKPFNRIMLSFRCPS

SEQ ID NO: 122227 - protein, 205 aa, Heterodera glycines
MHIYKDPYAPPLAPKVPDDPPPWFPSWKEYKRRTEWWASLGYKDLDLKRGLTTGFYPFFEERDIRYVDSKVPDGTSMVGPQGKDSRYHQRKMVKWGIPGKFEDFQKQIRENCSQYKQIAEKWDLRDEHPGIAVNPSLDSIIRQKYRPIGTVFPLFPKILAWPRFWDKPMNEGCFKKGLALAKYSLPITWIAYAGALRGYDPPATN

SEQ ID NO: 122228 - protein, 299 aa, Heterodera glycines
MPFCPMASQRTHCALFQQRHLATKYVRFPLVPPDNKNSVQTLQQLIASQKDPNAFVFGTNMAGRVGQWLTKRSFEKTVDTELRILLLKSANQMYLCCANKYPFIPLLNEFGLPDHYSSWYRLTLLHIWMALCRVQQSLEAMAYIYFMHQVLEVFNTDWYTRLDKAAKEMGMSVNKRKEGMALHAIYISTLHDYDEGFFGDDRVLAAAVWRSFFLQLPDVCPAQINRVGRYMRATMASLARMDDTRLLTDGIERWDVAEELARLVSAEQFGTIPAAPPSSSMDGDGRNSAQPAPKVAASN

SEQ ID NO: 122229 - protein, 288 aa, Heterodera glycines
MILKLKVPILLYCFVQCLSAVKVDNAEQSDQPTGDSSSGQFPISYPPIKYENDLAYVEKPSGNERCLFYAEGLSVVVFATKKSQSAWADYRSDTKESPKYTASIECQGNMNVGSSFDVYLKIDGKAEGVVRADIGKKDAKSVFTVEGAEFILNFNVTQVGFWQLVGATVERIEVKGSSDFLNKNLNVDKKWTLEPSVVPSTNINGFKDYSFACGQTNPIVWALKDSNDYAVGITLNNVQFQPFNATYTAGGKEADRLKFGWKVNDCQGLVSIGTWMGLVVATLLIGVL

SEQ ID NO: 122230 - protein, 344 aa, Heterodera glycines
TTHTQKLFNEPGGKDVYEGVKIDYSGTEVNPENFEAVLLGDEQRSEGKPVLKSTEKDKVFVYFSDHGAVGVIGFPAADLTVKQLTQTLKEMHAKKMYGELTFYLEACESGSMFDHTLAQSLKIYAVTAANGDESSWGCFCDTKFLPGNCLGDLFSVNWMQDSDQENLRTETLRKQFGIVREETNKSHVMHYGDLQIQDEHVSEFMGKEQAQKRNERPPSPHKFPMFPSRDIPMFMMARRQNESKQIQRNLRVAWKKRSFLEQSIKQIVHQLVHDMNNRRQMLTTYPQQIRDLDCHHEVMHTFSNLCFRFSENPYALKYAYVLANLCERPELDAERIRMALIEHC

SEQ ID NO: 122231 - protein, 171 aa, Heterodera glycines
ANTNSLCLTMPLHWTSVDTRNALLCAAVPSIGAFVGSTMAIKDQELVQFLKNQNFPSFARCCKYNYLLANTAVTIPFGYASYLVYKIGGGFDYTDTTVALGLYGATVLSGCFLVPMLKKQDTKALTANAVVLAGLSVATSVAFYNIDKISAYWTMPFTLWAIFCAGLTVKA

SEQ ID NO: 122232 - protein, 203 aa, Heterodera glycines
MLRYVCLFPRRSFHFSTFLPKDYYKILGLSKTAKESDIKKAYYEMAKKYHPDVNKAKGASEKFQELSEAYEVLGDPKRRAEYDRFGAGGPQPGAASGSPGGPQSARDFGWEFHSGKSAEQVFRDIFRDFDPFGNAGAFGSGRRSFGETQHGFDAAQEVVVNVTFEEAARGVRKEVRINVVDSCWKCNGSGVQPGFKKVSCPYC

SEQ ID NO: 122233 - protein, 254 aa, Heterodera glycines
LARDRKYRIPVALKILFKSQLVKGNVEHQLVREIEIHAHLRHPNILRMFNYFHDDKKVYLILEYALHGELFKVLQKSRRFSESTSAQYIFQVSDALNYCHSKKVIHRDIKPENILLCADGKIRIADFGWAVHAKNRRQTMCGTLDYLPPEMVLKRQHDEKVDYWSVGVLCYEFLVGRPPFETKTQEETYTRIMKVQYSFPSFMSPDARDLISKLLVKEPSRRLSFEHVLKHHWIIAHCNKNNDADSSTASSECW

SEQ ID NO: 122234 - protein, 164 aa, Heterodera glycines
RIQHPFNLAIMQIFVKTLTGKTITLEVEASDTIENVKAKIQDKEGIPPDQQRLIFAGKQLEDGRTLADYNIQKESTLHLVLRLRGGMQIFVKTLTGKTITLEVEASDTIENVKAKIQDKEGIPPDQQRLIFAGKQLEDGRTLADYNIQKESTLHLVLRLRGGKN

SEQ ID NO: 122235 - protein, 198 aa, Heterodera glycines
LASDETAYLIADTYYRTHKYLSALSLSIPCVSYKWIQQCVAEKQLTDHRPFLLPAGESSLDTKQQFEWRPLKGVLMKGKRVLIWSSSAETDPGIVSFAEIWTPILQNLGATLVGIGPGEPFASKSSANLEEKMEFCSKIEPPVDVLLAETDCQAEVAKLVEERGGLAVSSEWVIQAIVTGSLPDLGEPGGEKFRYDFV

SEQ ID NO: 122236 - protein, 194 aa, Heterodera glycines
MIVNGSLKICRTALGPFVRRASASALGLPLEDGPSVSPPSVDRAKDISPRVRSLVDQIAELSLVEVSDLNFALKKRLNIPDTPAMAMSPEMFAAAGMFGAQAGGAAGAQTSQANADDDSASTKTSYAVRLAKFDDAKKIALIKEVRSVIPGMNLVQTKKLIESAPVEIKGDMGKTEADELKALLEKHGAECEVI

SEQ ID NO: 122237 - protein, 331 aa, Heterodera glycines
VSIQYRLGIIGFSSTGDKQMAGNFGLWDQFAALEFVSENIAQFGGNPADITLFGESAGAASVSFLGLSPHSQGLFQKCVQLSGSPLSAWALNGRVINETAQLAAAINCAENGREGIKECLKGKTVDELFEGVEKVGKTRQEYDFTKWGPLLDGDFLPADIPQLIERAPPKPTVMGIADLETLLWTLAIGHNDSISLYAIPWDEMANFDRRRFEMFVQNFVTKRELFGQQMATELQREIVQFYTRDKAVERIENEGEYYVRKITLLLSDLQFAVPVIWEAAQKAQKGWPIYFFKNSYFNEVVFPKVVKVRQNFHANDFIYFFDRKVYRFEFN

SEQ ID NO: 122238 - protein, 240 aa, Heterodera glycines
MLLNNRSQLPLSVYGGGIGSGVSALSAGAKDHSATASSASVRRPPVSQYQSTECVLFGSIFNDQKDQLIQRLKGLCDPDGPTPFFEHNMVFKLKTGIESPVQVQMRRRFKVDTVHWHCRYVSQPEAHIKDVVVRKVIDSLIHSTDMMSFVKSLGLRMEYEYIANGFLFTKGDIRILLYQLQCSETIGNYNKLKQFGDSFLVEASVLLPGHGLEHLQQAAKSVKEFADQLHPLCKLSYVDY

SEQ ID NO: 122239 - protein, 202 aa, Heterodera glycines
MHANLPAAVIDCGTGYTKLGYAGNSEPQFIIPSAIAVKDANILKSVGGKIPDLDFFIGDEALSPSAANYFVKYPIRHGIVDDWDLMERFWEHCIFKYLRAEPEDHYFLLTEPPLNTPENREFTAEIMFESFNVPGLYIAVQALLALAASWQTREFNHRSLTGLVVDSGDGVTHCIPVCDGYVIGSCIKHIPIAGRDITYFLQ

SEQ ID NO: 122240 - protein, 211 aa, Heterodera glycines
NSSLGRAYTPGGGGIEGVVESLNGANHNNGGTSGQSAARHADHSGIGQPCSSHVRELPTLNTHLTSPAAAVALGLIYLRTGDCWIRETLAIADTFYEIDQIRPDMLMIRTFSRCLVDFEDIKCTREWVDAQIPQIIRKYVKRFLEVKSKEDMWWSDFIDMATVAKAYFYCFAGASFAMALRFASKWEIKALQVIQSFYEILKTDTSELATS

SEQ ID NO: 122241 - protein, 208 aa, Heterodera glycines
MIQTGGAPLIIINRSAEREQGHRVQKQNIAAAKMVADVIRTSLGPRAMLKMLMDPMGGIVLTNDGNAILREITVKHPAAKTMIEIARTQDEETGDGTTSVIILAGEFLAQAEQFLEQSIHPTVIIHGYRMALEDIIEWTEEKFSKPVDLASESELTTVVKSCLGTKMLAKYMDLAVNIALSAVRTIDVTNNDFREIDIKRYCRIEKIP

SEQ ID NO: 122242 - protein, 203 aa, Heterodera glycines
  unsure (1)..(203): unsure at all Xaa locations
GRRPPPDRFRLVYLIVLLHGMGMLLPWNTFITIAGDYYLQFKFANVSNEDNYKVYFFNYLTVCAQIPNLLLTFLNLFGVIRGGFYRRIYFTLAVIFGICLVTIAMGLXGFFLFTMLSVVLLNSASGVYQNSIWGLFADFPGEFAGAIIIGNNLCGILMAVLDILIIVLVGANAALAATVYFGLALFTVVLCIFSFHFLQKLVL

SEQ ID NO: 122243 - protein, 256 aa, Heterodera glycines
  unsure (1)..(256): unsure at all Xaa locations
MTSSDEEFKKECTFASLPRTVRGMPLVVSSNSDGTKFLYCNGNSVFIRDEENIADCDVYTEHATLTTVAKYSPSEFYIASGDQSGKIRFWDTTQSTHILKSEFALLSGAIRDISWSEDSKRVAIVGEGHERFGHVFLFDTGTSNGNLSGQSRPMNSIDFRPTRPYRLVSGSEDNTVAIFEGPPFKFKSIFHEHSRFVQSVRYNKDGXSLFAAGGMDGKVILFEGQEGGKVGELVDETCKGTAAHSGGVFALNWHSG

SEQ ID NO: 122244 - protein, 231 aa, Heterodera glycines
MDVNQAYKILSNPQRRKAYDTFGFTDEQFEGMRKEFFREQQQHQFQFVRWPQPPRKKQTDISQFLLPFGSVLGTLFFIFVVGYFLNHMNVSEQSKRRRQPQNRAEEANKMGGGDTKTEDNEKELAEDQKAPLTEEERQQKLQARVWRVMGPMIRELRAETQFGLIRLLKPGCRSIIVLVDKDSKDKLLQQFARHLYCLRNNKTFSFGFLMVPKNLSWFRSLLELTLPDEQQ

SEQ ID NO: 122245 - protein, 266 aa, Heterodera glycines
MASIACLNPKAELARHAAALEMNISGAKGLQEVMKTNLGPKGTLKMLVSGSGDLKVTKDGNVLLHEMQIQHPTASLIAKACTAQNDVTGDGTTSTVLLIGELLKQAENYVSEGVHPHLVTEGFQLAHDHLLQLLAASKKTLPIDRPLLIEVARTTLRTKLDQKLADHVTECVVDAVLAIRRDENDTEPDLHMIEIQQMEHEMETDTQLIRGLVLDHGGRHPDMPKSVRNVHILTCNVSMEFDKTEVNSGLFYETAAERERLLQAER

SEQ ID NO: 122246 - protein, 212 aa, Heterodera glycines
MPCQRKKSPAIRSGRKRWVFGGFGRKFFIFKINSFIFQPLGQTGLFNMGNTCFMNATLQPLFHTPGFSQLFQEKSAQRFVNGNNSFGTNGMISGSFSALIDLIWSGKFNALRPTTFLEFFARRVNTEMADRRQHDAQEFQLYLLDALHEDTNRVNKRQSFEQNYDDTDLGASASDFNERSKLFSSSPVNDLFNLTNISMVQCSTCNTTSVRF

SEQ ID NO: 122247 - protein, 214 aa, Heterodera glycines
MGRRPARCYRYIKNKPYPKSRFCRGVPDPKIRIFDLGRKRATVDEFPCCVHMISNEREHLSSEALEAARICANKYMVKNCGKDGFHMRVRIHPFHVIRINKMLSCAGADRLQTGMRGAFGKPQGLVARVGIGDMLMSVRVRDQHQAHALEAFRRAKFKFPGRQYIVISRKWGFTPFDREVYEKHRKEGRVIPDGVNCRFLKQHGPLTEWLKNPI

SEQ ID NO: 122248 - protein, 375 aa, Heterodera glycines
MPESENDFDEEAPNATMETKVAGGGAAPKRVGRWTLSQLRQTDGIIPSQAGWNKGDSQKLMTNFGTPRNTTTKVKVENLAEIPEDILLKSHGEVRLQSGTNRFASQKGFVSFGTGRDVCREGVNVNILPADLEPLPEEKIRASDGIVRLQAGTNKFDSQKGMTLFGTGRRETTRMKDSKHPEYSHERDIDNTEIPLQMGTNKFASQKGMTGFGTNRRETTKMLDTSHPEYSHEQSIDQTSIPYQMGSNKYASQKGMTGFGQPRWEVLDPSISYQNRKSQGMVRLQSGTNRFASQAGMTGFGTPRNNTYEAEAGELPYEDMKKSEAIIPSQAGWNKGDSQKLMTNFGTPRDVKGKHLKRIWELEYPEEAEVSLDRL

SEQ ID NO: 122249 - protein, 257 aa, Heterodera glycines
  unsure (1)..(257): unsure at all Xaa locations
MTTTETPTAPRLDHTTGWTCLACKLVFSSGQLQRDHYRSEWHLYNMKRQIANLPPVTECDFLEKLQYFLQHQQKNAFDADHRRLSSLSLSSSSPSSLVCTVCRNKRFRSRNAFDNHLQSRRHXKRKNNCNSSRRRQRQLRLMSAKRRGEKMAAWKQNCQRLWXNIDGEEEAVLPIESDNDDDEEAEQKEDNSFAKKEDGIPPNECLYCELKSDTWEANLAHMSKQHGFLVPDSPFXRNVPGLLTYLVVALCFSNFFF

SEQ ID NO: 122250 - protein, 365 aa, Heterodera glycines
MQNQQNMDNSARSIFVGNISYDVSEDELRKLLSACGQIVSFRLVHDRETGRPKGFGFCEFADVPQAEAAILYFNGFEFRGRPLRVDSATGNDRSADEMQHFQMTLTRPQNPTDELSPYGPELEPGKAPEVIARTVASMPPEKMFELMRSMKETVNNNPQMARQLLMENPQLSYALLQAQVVMRVVDPKIAYQMLHREHAQPLVPPTSIPTHIPQQFAGKPPQLPPQFNIPPPSVPSHQFQMQPPPLVPGQFHHGFPSMGMAPPSLLQQQQQQTPFTQQKPTPIAPLAVPPAATAPQQQQAVSPPPLSQQAQQSNSDNLDEEQQAQMLIRVLQLTDEQIRMLPPTEKCGCKCVTISNRTDRGRKAN

SEQ ID NO: 122251 - protein, 244 aa, Heterodera glycines
MTEAKKLPEVPETLLKRRKIRAAQRAARAKNSLNTIKKAKAKKTEIFKRAEHYLVEYRQKQRQLVALKREAKKVGNYYVPDEPKLAFVVRIKGINKIHPRPRKVLQLLRLRQINNGVFVKLNKATIQMLRIADPYIAWGYPSQKIIRQLVYKRGYAKESGQRIPITDNAIVERNMGKSDVICVEDMIHQIWTVGPHFKQVTNFLWPFKLSNPVGGFKKKSNHFVEGGDYGNREDQINKLLEKMI

SEQ ID NO: 122252 - protein, 247 aa, Heterodera glycines
  unsure (1)..(247): unsure at all Xaa locations
MSEQSGETFAFQAEIAQLMSLIINTFYSNKEIFLRELISNSSDALDKIRYQALTDPSQMESGKELFIKIVPNKADKTLTIIDTGIGMTKADLVNNLGTIAKSGTKAFMEALQAGADISMIGQFGVGFYSAFLVADRVTVTSKHNDDDCYQWESSAGGSFIIRNCADPEVTRGTKIVLHLKEDQTDYLEERRVREVVKKHSQVIGXPIKWVVKKERDKEISDDEAEEEKKEDEAKEEEKKPEDDVSDD

SEQ ID NO: 122253 - protein, 262 aa, Heterodera glycines
MAVGKNKKMGKKGAKKKAVDPFTRKEWYDIKAPAMFTHRNVGKTLVNRTQGTRISSDFLKGRVYEVSLGDLNSTDADFRKFRLICEEVQGKICLTNFHGMTFTRDKLCSIVKKWHTLIEANVAVKTTDGFLLRLFCIGFTKRNANQIKKTSYAKTSQVRMIRAKMVEIMQKEVSSGDLKEVVNKLIPDSIGKDIEKACSFYYPLQDVYIRKVKVLKKPKFELGKLLEMHGEGAGTVATITTATGEKIESRPDAYEPPVQQSV

SEQ ID NO: 122254 - protein, 272 aa, Heterodera glycines
SEFGKYRPLPSDRKCPRKGCASDPPPATHCQPGHSSENGTVQPTKTSSLISSKNGCAEAEEEQCLFVEHFGPIPQYSETDEKENLRLRKLHEVALEIYQKQRAYVMKLQLIGLNYPRHLNDCEKRMNKKLLHSKHVIRRIADHFQTILNVHLTFLHNFYDKILKWDSRKPDLAEVFQKNADFLKICRLFLTEKQKLVAELQQTLNENHELAEATLTFEQALSKETSTRHSFSGGRSNCASVNDLKGISIVLQLDAVHQNVVQYKLLMERYRK

SEQ ID NO: 122255 - protein, 351 aa, Heterodera glycines
MELQKQPVMATKEQLRLAELTQTGHDATIAHDDIAGQKRVKKVIELTRCTQSQAEVALIDSEGNVEDAVARLLDSPEKLVLWSQQGKKQKTKSSTPSVARTTTTHNQTKGKGQNEQNSAGPRVRTERQGQGFKGQNRTFTAGGAYRRDNVAANKQTTNKVVGTGTNTGDFSSTVEQSYGETAGHENDEWKNGPRVFMPSSAATVVMAETSTNGGVKWPALDNFTPSVEPAEPAAVHKPKTFAAVAAAKKASPQPSPPQHQQQQQQQQTITYESREPDWTKENWTTEPTNWSSENWASTGKLESTEILDNPEKLDTTEKLENTDMLGTAGNIEAANNLDTSVMLDTSCKLDT

SEQ ID NO: 122256 - protein, 163 aa, Heterodera glycines
IQYPFNLAIMQIFVKTLTGKTITLEVEASDTIENVKAKIQDKEGIPPDQQRLIFAGKQLEDGRTLADYNIQKESTLHLVLRLRGGMQIFVKTLTGKTITLEVEASDTIENVKAKIQDKEGIPPDQQRLIFAGKQLEDGRTLADYNIQKESTLHLVLRLRGGKN

SEQ ID NO: 122257 - protein, 211 aa, Heterodera glycines
EYWKSYAKKFCEICKIWYADNKVSAERHEQGLRHKAMVQQRLRESAKKAKDKEVEDHELRMTLLSMEQAARASFSSREEREVPMVPAPRIITSQKQTAEPTEEDEVKAKLREQKRKLAALKKRSKQSQFWSPDEGEMGEGDLPLEEELADWVQAETSDGQFYYWHIYTGETRWEQPEKFYTSAQYAERYANIVEETTDQREVGQCANSAYD

SEQ ID NO: 122258 - protein, 273 aa, Heterodera glycines
MSPPCSFSPSSASSSSDSPSAEGQAQQNGQVLAPRPLPTWEEIRAAVPKECFEKSLLRSLYYLAIDLLVIGFLYAVVPFVETNFGLIGLFFWYCLLGMFLSSLFCVGHDCGHGTFSDWTWVNDIFGHISHALLMVPFWPWQKSHRQHHQFTSHVDKDKGHPWVLEDDYEGGGWLRKHFAKIPLSGLIRWNPIYTVAGLPDGSHFWPFSRLFSNNTERFKCLISSSLCLITSWAIFVLLDHSPWAFLKYYYVPLMFQGYWMVIITYLQHQDEQI

SEQ ID NO: 122259 - protein, 217 aa, Heterodera glycines
MVIKSNSVISRSHSDHFQEASGSLSATSGSEDAIKHWGWWRHFVAGATAGCVSRSVTAPLDRLKVFLQVNANHKTPHTLPSAVDYLYREGGFLSFWRGNGINILKIAQESAIKFMFYEQIKQEFQKLTGHRDLDIFERFMAGASAGVIAQTAIYPLEVLKTRLALRRTGELNRGLCHFAREMYHREGFTCLYRGYAANCIGIIPYAGIDLAVYETLK

SEQ ID NO: 122260 - protein, 198 aa, Heterodera glycines
  unsure (1)..(198): unsure at all Xaa locations
MAPAPEKEKTEDKKLKDGQKPNVTTDHAHCLSNVQPNLPVNKVVVHPLVLLSVVDHFNRVNKTHKVNRVVGVLLGCMKHDKTLDIANCFAVPYDEDSENSNIFFLDADFLENMFGMFYKVAAREKIVGWDHSGPRLCKNDILINEVIKRFTPNPVLGIIQASQGRQDLALPTDAYVEVQEVHNDGSPPVKXFEHVPSG

SEQ ID NO: 122261 - protein, 186 aa, Heterodera glycines
MGKIHYCKRPDNSTKSCKARGSDLRVHFKNTHETARAIKHMPLKRAIRFLENVREKKEIVPFRHFNGGVGRKAQAQAWGTTQGRWPKKSAEFLLQLLRNAESNAEVKGLDVDHLVIDHIVVQAAAKMRRRTYRAHGRINPYMSSPCHIEVILTEKKDVVAKPAGALVKVKKESKKKQRRQLARGEF

SEQ ID NO: 122262 - protein, 214 aa, Heterodera glycines
  unsure (1)..(214): unsure at all Xaa locations
MSNNDIIFGNEEGVNYLAPWTYSCLIKTSIDRLKTALSENREAIHALNHLQEVFRQIDRASPSFLYDFSKLLLIESGVAGTNVQESYLRMHANAATEELELPQFAHIAEFQYLSMRAVSLCKVLARIPDEMTDRRPFLETIKEIASSIKQLLDTTNAIIALVPRCYQPRQINLTPFLSYFXNWLSVEKRKREFVQVSKRVSSTLKDYFKHQEPN

SEQ ID NO: 122263 - protein, 145 aa, Heterodera glycines
MRRRRRLPRKMLSQEEIFRNTRTVAQGLDALREENEAIKNKLLVGMDVLTPDERQLIDEKASIVEKNLENIQLGLEESQVMLALASHLQNLEAEKQKYKAQVRRLCQENAWIRDELNSTQQQLRQCEQDKAQLEEENKHFEIIEQ

SEQ ID NO: 122264 - protein, 160 aa, Heterodera glycines
MGSRSVAGGVGASIMNKQASKYNESEGELLLNWIKQVTGATMTVNGTRENFQAQLKDGTLLCKVALKLEPNSIKGVTDKASSTFQQMSNLELFIEFCRKQGVITQELFRAVDLVEARDLYSVCMTLNSLGRIMQKKGKSHPKHVSASEIVNIPSTDALRL

SEQ ID NO: 122265 - protein, 406 aa, Heterodera glycines
MLSSFPLLLSLVGLIAVHAEVFFKEEFSDDSWTDRWVTSKSKDDYGKFELSAGKFFGDKVRDQGLKTSQDARFYAISAKFPKKFSNKGKPLVVQFTVKHEQNIDCGGGYMKLMASDISQENFHGETPYHLMFGPDICGPGTKKVHVILGYKGKNQLIKKDIRCKDDELSHLYTLILSPDNTYEVQIDGEKVESGELEADWDLLPAKKIKDPDAKKPEDWDDKEYIDDPDDKKPDDWEKPEHIPDPDAKKPDDWDDEMDGDWEPPMIDNPEYKGTWKPKQIKNPNYKGKWIHPEIDNPEYQPDDDLYLREDWGAIGIDIWQVKSGTIFDNILVADSVEDAKKHAADTFDQLKEAEKKQKEAHDEEERKKFEEEEKKRKEEEEKKPKIDEEEVEEDEEEKKEEEHDEL

SEQ ID NO: 122266 - protein, 236 aa, Heterodera glycines
MARNRPNANIITSDLGEAQIKKHKPKDTRLLQQRLVAWQPILTAKTVIPLVFSISILFIPIGIVLLRISQSVQEYVVQYVNDANECKDYHANGQCAVNFTLNEDFKGDVYFYYALENFFQNHRRYMKSRNDQQLSGIDFLNTKDCTPFEKAPDGRPIAPCGAIANSLFNDSFQLNYLGGNGYANISWSHEGLVWPVDLESKFRNPTCDGQPCKTIAELCHKFSLTVRPPNWEKDLC

SEQ ID NO: 122267 - protein, 472 aa, Heterodera glycines
MPIILNQGILSTTCDDQQRETLKLQLEPAAEYNETNFKRTVLNASGTPINGAFTFWSAPSTAAPAATASVSNLSATTTVISSEPDLTPLTPSTSDVTVNGHSSNVKVLKPVPLVIRTQSADEIAGAVAHPTKPSEIRKLIRSKMARCRICRNRFLDKHIYERHLRDRHPKEHAAYLSQQEDEVRQQRKEEFEANRLDELVRGGFIPPQEDLDASKYEVNIKEIPLPGELTGGVPARFDRFGVLFQPKRVYKKKVSPQCPFCDKRYRNEYSLKKHIAKKHTECAEWAQCLKCFKAVPSKAEMVDHLGEMIYLCFECVPPRNLCNDVRLYNHRTKFHRGQNSGFKCNLCNQKFLTPRKLRKHKKMSHVFTKTYQCHFCEELFINETAVTTHERIHTGIIKFECKICDYKCNRFLNMEDHVKEDHGYLCSICQSKLSEWGDLKNHMLMDHGGYLSSEFNSGYIESPRVWLMFKGD

SEQ ID NO: 122268 - protein, 259 aa, Heterodera glycines
MMVKSALSNSLSILNGFTSRAFTTSNIRSLRFRSQRPQNELRTVGKMVAQSDSPYEKGQCFVHKLFAYRGVIIRSKNCSVFTKRISDTQTVQQEVLPFYQVLIDKDDWSEMNFETDMTTFLKSTGNREETAISGMDIVSHDEILPFEPSVSELKSLSDGSGEAAPIKHYLYDQLFKKKTGEETKRDAGVNRQRPEEEMCWIFPIAVTKQTTDCFEVQVSTFNLGSNNLNRSHSPHNWRIVLRVENSQNNTMYLRNTVLK

SEQ ID NO: 122269 - protein, 441 aa, Heterodera glycines
MREIVHIQAGQCGNQIGSKFWEVISDEHGIQPDGTYKGETDLQLERINVYYNEAHGGKYVPRAVLVDLEPGTMDSIRAGPYGQLFRPDNFVFGQSGAGNNWAKGHYTEGAELVDNVLDVVRKEAEGCDCLQGFQLTHSLGGGTGSGMGTLLISKIREEYPDRIMSSFSVVPSPKVSDTVVEPYNATLSVHQLVENTDETFCIDNEALYDICFRTLKLQNPTYGDLNHLVSVTMSGVTTCLRFPGQLNADLRKLAVNMVPFPRLHFFMPGFAPLSAKGAAAYQACSVAELTKQMFDAKNMMAACDPRHGRYLTVAAMFRGRMSMREVDDQMMSVQNKNSSYFVEWIPNNVKTAVCDIPPRGLKMSATFVGNSTAIQELFKRISEQFTAMFRRKAFLHWYTGEGMDEMEFTEAESNMNDLISEYQQYQDATVDDEGEYEAEDT

SEQ ID NO: 122270 - protein, 231 aa, Heterodera glycines
SKRRNKIQAEEKRKKETLKATLDLDEIFGNENEGGKSAGSSSSSTSSSRSSSPDLTKSRSPSPEVKQEIKTRDEIIRCQLFRRKLAKFVHAPFFAKTVVGCFVRISIGPNKSDGKQVYRAAQVVEVVETAKVYEVEPNSDIRTNKGFRLKVSDGEPMRVYRLEFVSNSLIMESEFLFWFNKMRSSNTPMLTVDFVDRKRKEIVNALNYKYNEAEINLLIKEKQRFKRQPTN

SEQ ID NO: 122271 - protein, 376 aa, Heterodera glycines; identical to SEQ ID NO: 121231

SEQ ID NO: 122272 - protein, 436 aa, Heterodera glycines
ISKMNGSLTNGNKVDRGVTILLGAQWGDEGKGKVMDFLIGHHKIDIDARCQGGNNAGHTVLANGREYHFHLLPSGLASKKVLNIVGNGAGLNLDALFEELESNKIEDSADRLFVSDSAHLVLPVHIATDIMRQNALGQNSKLGTTKRGIGPAYSSKCFRNGIRLGELLHQPEKFEQNYRSLVAHFKTLFPDIELDTESDVKQLKAHAARLLQMGIVCNTTVFLHKKRLEGKSILVEGANGTLLDIDFGTYPFVTSSNSTVGGCITGLGIPPTAVRRVIGVVKAYQTRVGSGPFPTELLDADGQPSEEGKRLQEVGAEIGVTTRRKRRCGWLDLVLLRYSAMINGFTSLAVTKVDILDQFHEIKIAIGYELNGRQIEYPPATVDDWANLCVHYKTFEGWQSPTTSARQWEQLPDKCRAYLEFIQNQLGVPVEYIGVG

SEQ ID NO: 122273 - protein, 307 aa, Heterodera glycines
MVAACVATPSVTVTATAATYFNHNQTGFAGTLGGGGGSKKGMEANSNPSKASKGVTMTTAEVDQLRQQLQSVVENGDLTASNVCVEQLESAVLSKDTLEATRIGRFVNDVRKQTAQQWPDFSKRCRALIKQWQKVAEYRPSSSCEGSSNGGTPQLVSPALKRGLTPRAGAVTTPGKRTTPHQPQQQLRVTSTGLCPPDSRQHTGRSSSTLASSVSPVENGVPTASGSYAPLPSTVKKESPRQITATVQQQHSIHKSASVGASLSCLGGSSAAKRTGPMLNGIAEDGGTVSGGAHLASSSFYGTRPFL

SEQ ID NO: 122274 - protein, 405 aa, Heterodera glycines
GIVPFMGDTPEALFANIINEDVEYPEGDEALDSDAESLIHLLLEKNPLDRLGTVGGAPQVSAHPFFAPLDFDTILRQKAEFVPQLENDEDTSYFDSRSDRYNHDANESAEDDDAAAVPMFWSFSTASPRHSIVGLELPAGGMAMLQAAHAAAIERSGQPLQQQDRIVDDDRVESRRRLLSSATTASSGIGSGPNSAFGPLSSTLLTRGGNCSDSQDSSHESAVGRRATAAASEFACDVMPSAVILRRRFSNQRHHTNDSSTSSSAGTTIGTTAGGGVGSSTDDSSSLDIATTMHLEQPRRSQGQLPRLAISPCGTTFNSSTGGAIVTHQRESACGTGGEFLSPVNERHITAGGGSGGMKRMEKRPSAVVHELITDVVRVSSSYGQSLARQSRSSSCRVSNMSPGA

SEQ ID NO: 122275 - protein, 269 aa, Heterodera glycines
MFVVVRCCLFPPAVRRSVLPMSANANGSQSHHFHCRPLTLFALGNNSSRKRRQKAEHSAAGSPQSLTDCSSAMGVELPPTITERLSTLKKDVIDALLDKNAVPPELITSLMAGVGGSAFSKALELVPSYNQNLQKMAKYYFTAKGGKLIRPTVSLLMSAACNQCAKRPTTPADTAPGRTPTSIVNESEEQPIEISMNQYRIAMVAEMIHNATLVHDDVIDESNTRRGQPTANARWGNKQAVLVGDFILARATKVLCSIGEPPVIETMAE

SEQ ID NO: 122276 - protein, 322 aa, Heterodera glycines
  unsure (1)..(322): unsure at all Xaa locations
NRLEVLDASLRRAGRFDREIALGMPDQRARMEILKIVTRHMKLDVDVDLAVLARLSPGYVGADLLALVQESNSKXSVVRALCSVVDANVNTENIVENFPPKNIDDIRGELTRTLNWLNTPFAEHQKRLNMDEFRVRMSDFEWALRVVKPSAKREGFATVPDVRWEDIGALNAVREELKWSILYPIQKPELFQHFGTSAQPQGILLSGPPGCGKTLLAKAVANETGMSFISVKGPELLSMYVGESERAVRTVFQRARDSAPCVVFFDEIDALCPKRSQRENSGSSRLVNQLLTEMDGLDGRRNVFLIGATNRPDIVDPAITRP

SEQ ID NO: 122277 - protein, 188 aa, Heterodera glycines
AGDEEENQFIQNCQRIRSYQVASEKNCNHEAIVPYDVEYQQLKKTNTPAKLYEFKLDMFQSQALKCLDNQQSVLVSAHTSAGKTVVALYAIAMALRDKQRVIYTSPIKALSNQKYRELVEEFEDVGLVTGDVTLNPNASCVVMTTEILRSMLYRGCEIVREVGWVIFDEIHYMRDKERGVVWEETLIL

SEQ ID NO: 122278 - protein, 211 aa, Heterodera glycines
MFDFHQFMGLGGGAVATYSVQLRAFSAPFFQRHDERRINELNYGGKILLPNSCLDNLMRRNIQYPMLFKLTNVGPALQRGTHAGVLEFLAEEGRCYLPSWMMAQLALREGDLITVEYKALPNATYAKFKPMSTDFYNISNPRAMLEVELRKFSCLTKGDVIAVQYNEQVYEFQVKALKPENAVTIVECDINIEFDAAEGYVEPNRTHQQRN

SEQ ID NO: 122279 - protein, 233 aa, Heterodera glycines
MPSRNLSAKKKQQNSLVRDESTSSPSRTPKSVSKASNSNSSQQKLQKKQNSSELSTISSESVEKDLSSSMSTNPHGHPTDKKWTIGEKVLCRYLNSEHIYYEAKVMFLKDLSGGDVGYGIHYPGWSNRHDEVVPQHEALIRFKNYSDEEATKAKEDVKRAQQMLNAKKRKRSELKNRSQAHDESSRSSTPGSADNASKRKIARRTTIETSAVAKKDMPQVTLTDPLRRILIDD

SEQ ID NO: 122280 - protein, 212 aa, Heterodera glycines
HDDRVPAFTELTLIRHSPDSENIQMQFAAFFIYSGLGRLMRPVRNLLFDQIEQIGIFEQVYLSIIIDPEEAEPGVTMHQELHPSSLFSFAGNLIPFPDHNQSPRNVYQCQMGKQTMGVPVHAWQTRTDNKMYKLQTAQKPLLKLEAHDKYEMDEYPLGTNACVAVISYTGYDMEDAMVINKASYQRGFAHGTVVKVQRISLVDRSTGGFGQN

SEQ ID NO: 122281 - protein, 213 aa, Heterodera glycines
FLGLSSRNVFPQSVRPSSLFACHFSSGTNDDVLFERVNQKLVITLNRPKALNALNFPMIRKIYPQLRNSSFDLALVKGTGGLAFCAGGDVLAVSKSYKANDPDRIFQQFFLQEYQLNHLIGSLSRPYVAFIDGITMGGGCGLSLHGAFRAATERTILAMPETALGLFPDVGGTYFLPRLSGQLGMFLALTGFRLHGADVFHAGLATHYVESAK

SEQ ID NO: 122282 - protein, 298 aa, Heterodera glycines
  unsure (1)..(298): unsure at all Xaa locations
QFAVPLFPDAVKKQCLKELKQRYENKEIKSPPENFEEWVLHHFGPQILDVFFNPYSKKVWTVKPSKMSPIWVGTRVAKLPQEKLEELCSMDANVLKNADFGWGPNAQFNFPKYGGTGAVWKNMTEKLPSEWFKYNSKVLRVDHRQKCVHYVQLNANGQPTGPTKSLKYDALINSSPIDAFVADNKICEMPLLEHNKVFVIGVGLKLPMTEFCEKYTWLYFPDPDVPFYRVTXSRYGEVTPDNTKFWSVLCECARPSDDTMTEAEIRQWAIEGLITKSIIKREQIINEYSICLPYGYPI

SEQ ID NO: 122283 - protein, 211 aa, Heterodera glycines
MMDEDMEEVEIVFAQRLASGEPTARQRAMKHLRTHIRERTKTDAKGFSSVSLARLCKGLHYALWMQDKMTLQEELADEICALCNYFRTDEQLLEFVVVLFTTLSKEWPYIDRWRMDKFLMLVRRLVRTLFRRLSSHRWDPPLCDQFLQMFCSSLLSANSPLCESLKFHCASVWLDELDTAATAKVTPSEGNAGKNCEAFPLDAQRSLDFVW

SEQ ID NO: 122284 - protein, 229 aa, Heterodera glycines
MGESTWAIRSSKPWSTISRYGQYQAESFRHSLKEETEKLRQANPKLFQQQTPSTSDTPPVDCASPAPSKKRKTAASMAAGSGTPTSRGRVEESSPYKIIKFGTNIDLSDERKFYVQLKELNKLPAFCRLHSASNMLSYLGHTVFGMNTVQLYLKVPGCRTPGHLENNSFASVNVNIGPGECEWFGVPYEYWPVLENLCKERNIDFLRGAWWPSVSDLVKSDVPFYRFTQ

SEQ ID NO: 122285 - protein, 437 aa, Heterodera glycines
MLEMNGVGNSKDYDTKVKAILEQCRISQKLLNYTEHFNYPYVSEVTYYEQLLKIGQGTFGEVFKARCKRTGKLVALKKILMENEKEGFPITALREIKMLQRLRHQHITELVEVCTSKQKSGKEKFCFYLVFTFCEHDLAGLLSNTQVKIRLVDIKTMMQHILRGLHKIHSSQILHRDMKAANVLITGDGVLKLADFGLARIMYKQPEHCYTNRVVTLWYRPPELLLGTRNYGPAIDIWGAGCIMAELWIRAPILQGNTEQSQLELISKLCGSINPHSWPGVCWRLAFPKKPNPPKGQNLPRRVRERINPFLQNNEQALSLIDFMLTLNPEKRPSASAALDHNFFFETPIPAINIQELLQQLRGTNLFEYTSGCGAHANRRRPVAPAAPMHQQQIRGKMPSVGGAMHRATGGAPQRAQHQTVGGPPNIHRSTGGAPQR

SEQ ID NO: 122286 - protein, 271 aa, Heterodera glycines
INMIGATWIKNLKITAQGREIYDSNSLYAYKAYLDAELSYSKNVKESDLQASGYYVDSENQDGTDITQQGFELRRKLFSQSQTAQFITKLDADIFNQDRYMVNGVEIDIQLTPNDNEFMVMAAADDKYRIEITACKLYVKTLEVVDGLALDIQKKLESKEAKYAHRKTLIKSTFISENRTEYNGTLFTGQLPKRVILGMVENAAYVGNQKKSPFNFKPFDIRSVTLIANGKQWPAAPFELNFNKNLYTRAFHEMNEALGMASSTDSNGISL

SEQ ID NO: 122287 - protein, 212 aa, Heterodera glycines
MIISSKAVQLLTCYRNRITRKLQYSTTENVPVNVPEPVISSSNMAQFRKGAGGRSSFSGNVITVFGNTGFTGRRVVNRLARHANQLILPYRCDSYFLRELKVPCDLGQVLFFPFQLDDDESIRKAVKYSNVVINMIGTYVDTPNYSIYDANVEGAWRIARICREMGVERLIHVSALNADPSYKTQFIKNGAFLKSKGMAEQAVRAEFPSATI

SEQ ID NO: 122288 - protein, 342 aa, Heterodera glycines
LFGSSIGTSSPFGSKPSGGLFGAANTAVVQPSTSTTTQQDIEVPQAPDDTVQAMKFNPLVAGSPIFLAAGSWDNTCRIWQVNENGMVEPKAMQNVGAPILSLDWSEDGSKIFIAGADKQAFAWDLGSNQMAVVGTHNEPVRSCHWIATPQYSCLMTGSWDRTLRFWDMRQLPTQNSLATIQLPERVYCSDMVFPLMVVALADRHIKMYKLDGTPSEIQDVESQLKFQSRCIAIFKDKMTGQPNGFALGSTEGRVAIQCLQPKDPKDNFTFKCHRSAELINNYQEIYPVNDVAFHPTHQTLATAGADGKYSFWDKDARTKLKGSDALPMPITKCAIHSGGNIM

SEQ ID NO: 122289 - protein, 238 aa, Heterodera glycines
HGQFPDLMRIFNCLGTPPEKKYLFLGDYVDRGAQSVETIMLLLCYKVKYPTSIVLLRGNHETSNINATYGFKKELEERYPAHSQALFDSFNDTFAWMPLTGLIGQKILCMHGGISNKIRSIEQLKQLERPMLLPPTDSLHIDLMWADPMEAQGQRPNPRGAGVLFGEDVVIRTCQLLKISCIIRAHQFIQSGFEPMFNQRLITVFSAPAYTGQTNTGAVLEVKTSSHFTTHFFPPQSQ

SEQ ID NO: 122290 - protein, 299 aa, Heterodera glycines
KSFIDSAIAFVRKHGFDGIDIVREYPKGGEQKRNFSRFFKELKDAVRKEASSSGRPRLLITAAVAAGTENIDNGYDIPTVGKLLDFVLLMGYDFHGSWEQQTGMNAPLYGRSKDVPEKRLWNVAGAANYWAKKGMPKSKIIIGIPTYGRGWTLSNPQQFRGIEAPAQVAKATKFVKLAGIGSYFEFCEMLANGAQRYVDRETLVPFLVADNDQWFSYDDVESIRNKLSWIRQNSFGGAFVWTLDFDDFNGQCPGSQLGRYPLIRTIAQELGGIQLSQTPVSALSNSPSPSTGAALPAVT

SEQ ID NO: 122291 - protein, 278 aa, Heterodera glycines
MQETHIVLGIASLCSLLAIIATVVTLPSLYSEMNQLNNKVRDGVEAFRVNTDSAWTDLMDVQVVVAPPSKARDNPFNSIFRAKRQLPGHCHCGPPQRPNCPPGPPGPSGPPGQPGQPGGAGLPGQPGAPGQPAPPCPPQNIPCPRCPAGPPGSPGGQGPPGQQGAPGQPGAPAPGGGQGPPGASGPQGQPGQPGRSGTPGQPGQPGNNAVIFNTIPGPRGAPGAPGQPGSPGSQGQPGQPGGQGPPGPSGAPGLPGLSGNSGQPGQPGAPGQPGKDSG

SEQ ID NO: 122292 - protein, 211 aa, Heterodera glycines
MGNYYSPPKRVGQNPFTRSGAPPPKLVIRKDKDVPMHRVNDPMSLQLHMADERVRTAGLSKAEREWREKWVHDQSMHPDEPIHVDAVHRQLNPIRVLYRWPMDKLYKHFLRPTFGNYWATIIRVYVPKFFWFFMTFEFFYYVWKYESKSWQKRIGFSTINRPDRYVLVKDHDEETLKLGLTDYSRSDYFDKEFYQRIKTANIDFGPPKRPW

SEQ ID NO: 122293 - protein, 140 aa, Heterodera glycines
MSKRGRGGASGAKFRVSLALPVGAVINCADNTGAKNLFVIAVYGIRGRLNRMPSAAVGDMFVCSVKKGKPELRKKVLQAVVVRQRKQYRRKDGTFIYFEDNAGVIVNNKGEMKGSAITGPVAKECADLWPRIASNASSIA

SEQ ID NO: 122294 - protein, 155 aa, Heterodera glycines
MSSDKNKERTFIAIKPDGVQRGLVAKIIKQFEQRGYKLVAMKLAKATVPHLEVHYQDLKDKPFFAGLVKYMASGPIVAMVWEGLDVVKQGRVLLGATNPLASAPGTIRGNFCIEMGRNICHGSDSVPSADREIAHWFKPEELVDWESAQNAWVYE

SEQ ID NO: 122295 - protein, 231 aa, Heterodera glycines
  unsure (1)..(231): unsure at all Xaa locations
MPGNETIRGHLEKRKDWIRRTRDHQEKSADIKKLKRSARERNPDEFHFHMLRSQIGFDGTHRDLETEEEEKSEAQRLLSDVSDINFVQFKLGMERKKIEKLKAVLHFCDETEKPQNKHIIFAEDEEEARNFDPRQYFNTSEQFLARTFNRPIEGDARKSLSVTEKRKLKETEKERRRPYAELCKRMERERELTVVLQKVELKRDLALFKKSELKPKLIKKRDAXEAAIYKW

SEQ ID NO: 122296 - protein, 196 aa, Heterodera glycines
MDQNNDQRRAVNEYRLNEDNELRLEVGKEEVILELLEGSAEIFGSQISMHKRYSLPPGFRAAVFTYKGALIEVVGRTDSAYIAQQTPMIIYLNTHAALESMRKSAETQLVADRTSSARGPRLLVAGPTDVGKSTLCRILCNYAVREGRTPLYVDLDIGQGSVSIPGTIGCLYIEKPADIVDGFDRKAAYVHNFGHI

SEQ ID NO: 122297 - protein, 192 aa, Heterodera glycines
MASKIVPIAVSPSFNFLRRPLPSLVFRRSLFKSPLDAPFCGIYRTNGGICRTDDILVCQRKMDYHLGANVRHQRGRNQHLLKANCDGTVVITRGKTFEEFKQEYERESVSRRAAFTRGTIFTVLFYPGIFVGILAVISVMSHRWYTYHGTGRELRPVSNAFVRFVAAFFGCYSYFPYNTDPDPEPIAVVEKE

SEQ ID NO: 122298 - protein, 214 aa, Heterodera glycines
MEVDHQSLDSICENILSISRHLDLPLADNLDNAHLSLFKTKLTEFAKESKKQKAIPSLLLPSNLSLNDNEWAKFGQYVDLMNADYAERALLLKRRAEVTIDSFLWSDRVKQIEDKIRQVLEVGGFTNVHFDPVHADDVLAANLDLLYVTKTSDAQLRRGKRTFVTDHRVKADIVPDRGGRTEQMQPMQRETFHQQETQRQQQQQFRGGGAGAGR

SEQ ID NO: 122299 - protein, 340 aa, Heterodera glycines
GELHQQKLLYKIDLGAVYNRPPCDRKNIGEFFPVERELVFDIDLNDYDTIRQCCKDKSVCKKCWRWIIIAVDVLEHLLRTHFGFQHLLWVFSGRRGIHCWVADKKARALSSRGREAITKYLTFNKDGSAINKYRVHPFVTESYRKIMESDDFEQLIMEQGWLDSADQWNSTILAHWADKNLAELLDKSFSRLQTPKLRWESMKLRFDDATRINARGIKLPPTPSDEARRFFISLVMKFAYPQLDAKVTAGLNHLLKSPFSVHPENGNIAVPLSAKEIRAFDPNVVPRIDKLLAQLASLRESSQENKENQRSIVYRQTSLAPHIAVFEQWTAQILNSEAQK

SEQ ID NO: 122300 - protein, 350 aa, Heterodera glycines
MLCFLRSANGCSSVGFSSSVCSRFAFPRLCVLASLSNESGLSECLPQSVESVSASAAAIRERERRERLLTISDAMKFYLERKQDEMAILEKEKLLYAQGKRHLANIMGFDPDSISGDQISQSIRYLFPSGLFDKKALPVMKPPEEVFPKIVKIDVDASGSPKHSLFFTAKPKFYSLLSDINKRTQKLVNAFDGHQTKVNEVEKMQTMELALLGEKPAEKGQINLMGTQWVTKDQLQQQMQEILSDDEYANFIIALEYISQLPNSAEEEDFIMSLRRGIGASEKNRLFRAKVPEVTINEDGRRECWRICKTRASAVKIVVRDGGTGLFTVNGQHYCTFRSLLARECLLAPM

SEQ ID NO: 122301 - protein, 285 aa, Heterodera glycines
  unsure (1)..(285): unsure at all Xaa locations
PPTLVQTQVEGGSTLFSLNFFGESAFLTQSSQLYLETCIASLGDCYCISQSYRAEKSRTRRHLAEYSHVEAEFPFITFEDLMVRIEEMTCDTVNRVMADPEIRELIQQQWQKDSQYEFVAPKRPFLRMTYAEAIEWLQNNEVMNEEGKPFQFGEDIPEGPERFMTDTIGQPILLNRFPHGIKAFYMSRCADQPELTESVDLLMPGVVXIVGGSMRIWKEDELLGAFQKADIDPKPYYWYVDQRKYGGCPHGGFGLGLERFVCWLANQHHIRDVCLFPRNIGRCAP

SEQ ID NO: 122302 - protein, 72 aa, Heterodera glycines
MPKEEVPEGVDQLTYFREQCEHKVAHLKSILEECNERVRSKPKTTEICHMEMIDYVEGLDHCAKPKAFKALK

SEQ ID NO: 122303 - protein, 106 aa, Heterodera glycines
VTQKIVKKKQKKGAQAGKYVTKTVTNESFFNFFDPKVTTITEEMDDIEEQKTNDDFEVGQIIREQLIPRAVLFFTGEAAEEDEYDEFDDEEEMGDEQSEEEDNAMH

SEQ ID NO: 122304 - protein, 287 aa, Heterodera glycines
DFDKHAAQREAESLRTLAFFGVCLSTVATVIAVLSVPFAYQHFQQIGAQMQNEVDFCKMRSGNMWREVTRTQAYSKVSHDSRHKRQAGGCCGCGVSPPGPPGPPGPSGQPGGDGQPGGSGQPGAPGQAAPRPYPPSGGCVPQCEAAQPGLPGPPGPPGPEGQNGQPGQSAPPASPGRPGPQGPPGPDGQPGNPGESGQPGQPGKLTQGPPVVGPPGPSGPPGQPGQPGENGQPGQPGNPGPQGYPGDGGSPGQPGNPGGSGEPGQPGAQGSSGQCYHCPPPRTAPGY

SEQ ID NO: 122305 - protein, 214 aa, Heterodera glycines
MLSWLEDKNEKFLNIVTDIMQKVITKNSEQMTFFIGMNGHQKLVGLIANCRQEALLWRVTKLMDKIVQMDAERMVGAGLLEALQRHLDHPSQRLLRQVLSCVRSVSHVPTADRTVQPLLQKLLQLLGTSDIRLKENCVDILANLCANNSQNKSFLVENGAVPSMFQLLYELDSVRSGGGEQPTGDDPFQRQLEGIQETALTLLKSLCSGQNDDA

SEQ ID NO: 122306 - protein, 202 aa, Heterodera glycines
MRRFDNRSSGGRFAKISANKRGCALNRVDISKLNINFESPKWQERKEALDALQQLLLQSPRLADLPNYRELIGRLTKIMANDANIFVAASATKCVMLFAKGLRAEFTPHVSLVVPVIFDKFKVEKRLLRDALVECIDVIAAYTSFDHLSKALLEAMTSKQNPSQKSQTDLFIYRLFRSLPAKDVPKGLLKDLVAILSKHGFD

SEQ ID NO: 122307 - protein, 183 aa, Heterodera glycines
MLCSLRGVLPNFFKRHLSVAIQKNIPEEHDEGFVDVANTEILCKYVFINYQFGAEGPGPKIQHNSEYPAWLFTLDLEPSKELEDLDPENSGWKYWEKWEERRQQQMLRHDELKYKYFWLQNSPAVQTHMRFTTEKYKTHKFLTIPVTTPGVYLKHTRRLRLKQRVWKSLEESEQMMKENDGWG

SEQ ID NO: 122308 - protein, 216 aa, Heterodera glycines
NPEQYLANLHELYLKTHKLLGLLQEKFRTNSLDPQFLPTLTQSVFGPYLVTYAKIEHKFIADKCTFTLRKFYESKGHQKRSILSSGLQELKSRLLTAEDFGGETFLSEIIAINILQEFKNAFARCSSLCKKTESLELNTVLFDMLLKFLYTEHVEYAIELGLACIPLSEPRIEPSPNFFKVIQQKSAITHLFAKLFDDTIHPGKRDTQIEGRIASK

SEQ ID NO: 122309 - protein, 199 aa, Heterodera glycines
MTKTDNGKFTEKNNTLMANGRTKPSEKTSLSTCIYNKQDGTFLGRSAKSWAQIIGFYIVFYIFLALFWLGCLWTFLNTNDDFIPRYHGENTIIGANPGVGYQPWLASNPESTLIKFYENDTSSYKDYLNAIDTFLEKYHNTENTRFCDENGIDSNSQHVKDGKVSSLNDVKACRFELGFLDDNGCGKKDDYGFNKGQPC

SEQ ID NO: 122310 - protein, 166 aa, Heterodera glycines
MPSPSLVPISATADTANASPAADDNCCAVCADDAHGVHFGVQVCRACAAFFRRSTIAARVYRCRYDGNCDIAQREVRCVCRACRLAKCLALGMDPDAVQRHRDQIGPRQNKTKLENEKRRTEDGGRKCQRHSPPTTDSMCQQHFESTNAEGTRPNNFMRETEQQQN

SEQ ID NO: 122311 - protein, 302 aa, Heterodera glycines
  unsure (1)..(302): unsure at all Xaa locations
LHQAFLESGRQHWIGVTEDMNGYRQEGLGKMDMTIKDGRRWSASSAYLTNILDRPNLFTTAGVTCTSVLFNNHRAIGIEFIRYHRFMLTEEVDAYSREKIYCEDSVILCAGAINTPQLLMLSGVGPASHLKVHQIPVVQDMPGVGQXNLQDHLELYVQQKCTKPITLYNKSTWRHPHRMVINGLQWFLTKKGLAATSHLESGGFARSSTEIDHPDLQFHFLPSTVHEDGRQSPNCHAFQVHVGPMRTKSAGEITLQSKDPRTSPLMNPNYLSHENDFVEFRKAVRLSRELFAQKAFDEFRGE

SEQ ID NO: 122312 - protein, 123 aa, Heterodera glycines
MTRVKTHELRAKKKEELMKMLEEQKTELASLQVSKVTNGAVSKLSNIHVVRKNIARILTVINQAQKMNLLKFYKGKKYRPIDLRFKKTRAMRRELTKHELSLKTHKQKVKERRCPTRIYALKA

SEQ ID NO: 122313 - protein, 206 aa, Heterodera glycines
AIIATVCTIPSLYSQMNEISNKVHDGVEVFRVNTDSAWTDLMDVQVAVAPPSKPRENPFGSIFRAKRQLPGYCQCGPIAQPSCPPGPPGPPGPAGHPGQPGHPGGPGQPGAPGQPSAPCPVQHVACPKCPAGPPGHPGGQGPPGPAGGPGQPGAPAHGGGQGPPGPPGPQGSPGQPGHPGGKGQPGNPGAPGTSSKSIPGPKGPPG

SEQ ID NO: 122314 - protein, 189 aa, Heterodera glycines
MAQPAKRVAVSSVNWAKLAERLTPQQEEELNRLKAQNSSYHAEVVQHQADLPKVDWATLKKQMPENSTVLDSLQKQWEALSIPYGTIPDNLKKQIDQWVKFNEARVKFHELKTADGLVEMKKIEDKWAKMPPVEQLWRDQLVQYFPHKYQDLRYLNEYYDPWGIGVNDTNWRERFKDFQSRPREGATLH

SEQ ID NO: 122315 - protein, 208 aa, Heterodera glycines
  unsure (1)..(208): unsure at all Xaa locations
RLWNLWLAMFSIAGCLVTSYALLREIGTYGLVSSYTNCRDFFEGFTGLWTWWFCMSKFAELGDTYFIVLRKKPLMFLHWYHHVATLNYGLMSYVDNTAFNTWIVWLNFSVHAVMYTYYFLAACRIRLPAWFAQCLTTSQITQFLITLAILAHVGVRLLVGSHVDTTPMTYGDCLLMEISYRGLVGNFFYHSYIXGGGKKFQKEKQMKQ

SEQ ID NO: 122316 - protein, 213 aa, Heterodera glycines
MSHSQSEKSLDQQFDCCECVVDDLLKGRLGDSQFAQRNNVLRDCIQSLQSVAKTIDGLSLFSANDSVEELPTNSLRFLLVPAYLATALQEIGVEMDKRGAYLRASKTYYREFLQNMSIFGLVNFRLPWLNEDERNSDDQQKENGRNRSKLISSFDDAKARRQHTISRLQQLEQLEKTVEQLKNEKRRNDDEAAQRELIFALLRFWSIRSVKEL

SEQ ID NO: 122317 - protein, 230 aa, Heterodera glycines
MVNWPWSAKQRDEPAQDKQKVVTTHPEPTQGIHGIRTILMGPPGAGKGTQATKLAKKYESCHLSTGDLLRAEIKAGTPLGQKIKGLVEGGDLVSDDIVCEMIDKHLSTAECRNGFILDGFPRNTAQAEKLDALLEKRQRPLQAALELALDDSLLVKRITGRLFHVPSGRSYHEQFNPPKKAMTDDFTGEPLVHREDDNEKVLRKRLADYHSVTMPLIDYYSKRRIHHRID

SEQ ID NO: 122318 - protein, 322 aa, Heterodera glycines
FERMTEIQAKSIPPLLEGKDVLGSAKTGSGKTLAFLIPSIELLLRNGWKQQQGTGVLIVSPTRELSMQTYGVLYELMEKHPNISHGLVMGGANRQNEEKRLAGGVAILVATPGRLLDHLQNTSNFVVRNLKCLIVDEADRIFDIGFEQEMHQIVKLLPKKRQSMLFSATCSPKVDELVKTALKTDPLKIGVMEQQRDPNDMATVEGLEQGYVVCPSEKRFLLLFTFLKKNRNKKIMVFFSSCASVRFHSDLLNFIDLPVMNIHGKLKQQQRTRTFFQFCQASAGTLLCTDVAARGLDIPRVDWIVQYDPPDEPREYIHRVGR

SEQ ID NO: 122319 - protein, 202 aa, Heterodera glycines
MDEEQLLDYEEEQEETQEQQSKNDAATNGDATKKIKGNYASIHSSGFRDLMLRPELLRAIIDCGFEHPSEVQHECIPQAILGMDIVCQAKSGMGKTAVFVLATLQQLTPTDGTVSVLVMCHTRELAFQISKEYERFSKYMPGVKVSVFFGGMPIKKDEEVLAKNTPHIVVGTPGRLLALGRTGHLKLKGGKFFVLDECDKMI

SEQ ID NO: 122320 - protein, 385 aa, Heterodera glycines
  unsure (1)..(385): unsure at all Xaa locations
LAADNFDAQRVLNILAERDNFQSNELADQLSIDHQRLIGGLKSLQVKEGLGCASEVKIKRIQLTAEGEEIIQKGSHEFNVCKIVGEKGISKSEIEKTSFGRIGLGKAMQCGWVGMDTRERVPLVVRKVANGEDGDKERLKLVKNGKGDQLTAQCVAQLRKRXWIMDSAIKALSVAKGANFATTVQKQELDLTSEMIASGSWRGKQFKQYNISAMGVPPPSGHLHPLLKVRAEFRDIFFQMGFSEMPTNRFVESSFWNFDALFQPQQHPARDSHDTFFLSRPALSTEFPEDYLESVRKVHSEGGFGSIGYRYDWKLEEAQKNLLRTHTTAVSARQLYLLAQKPFQPSKMFSIDRVFRNETLDATHLAEXHQVEGVVAERNLSLAHV

SEQ ID NO: 122321 - protein, 336 aa, Heterodera glycines
MPSGGDDEQQFEEAVKPALESLLADLQKTTEVLRQGKHGKGRRQQKEDESAALLDLKKLRNSPRQRNQSPAAVANLRNGRSEELQPRRDPMLEGDKLGIHTIPKGDCASCNQAVIGPVVIALGKMWHPEHFCCAHCGDSIENRNFFERQGKAYCESDYHDLFSPRCSYCNGPIKERCVTALGGKNFHVEHFVCAECGKSFGDGGFHEKSNSAYCRDCFYRTYAPKCQSCKQPITHKFITALNTHWHPECFCCQECGQPFHCVSLFDHLGRLLCEMCLHTRVGSICARCRLPISGRCVSAMSQKFHPEHFTCSYCTDQLDKGTFKESAGRPFCLRCY

SEQ ID NO: 122322 - protein, 286 aa, Heterodera glycines
LFLSFVLFFSINFSPSVVAQRTQWDAFNFPNPTAPGDFHRCKMRSTALLCDPDEVLSEQERYRLNYELGLIESATRQENGREFCERKGINAAVAIARQVKGGQEQDVRNMANDLLRRWTLDKQCEKALVIVLSLEDRRFWVARMPRVPVYAQEFTELFKREQGTFKTGRNSEGLQNVIRAIRDRALSKQFPSARPDDDGRSKGTPFVPMPKPTPHPEGKHKQRGGGGVLSWLFILLVIVFVVIPLACCCCCLYFCFFRKKDSGSNNRTPHNAENGGSGAERRGGTG

SEQ ID NO: 122323 - protein, 210 aa, Heterodera glycines
KLTRVCSWLGSELNYDPAKIMLYKNVLHGDKPGMWIPHQQLLELQVSQMLNLNTGSYDPRFQRIFKFFYAKLPLPMVDFDNHAHVLLHLMNEKFQLTEMSIFVDKNASVQTLLDEARKEFRFSSMGTKTLRLVQASADGTFRVYQVLKNDILYKDIQLRPSLMLRVEEIPKDQLEVGTDEYLLPVAHFDREPNRTFGVPFFIKICNGEKV

SEQ ID NO: 122324 - protein, 186 aa, Heterodera glycines
VLRVSDLTKANERVPFRLLNLSLASLDVNMRPFCDSEGHSAVRLPGFLLILSGQMVLSRPLPPLNASSLRLSLTLEQNSVWVGRICDKGRSQSAFLSDDFSTFSLCSLLPDACNSLEALASKYAESDFPLLLPLSDLFPTDQPIALVPMANFPLLEGYWKAQAQIQADDGNAMEEEEDEQNEQHIL

SEQ ID NO: 122325 - protein, 220 aa, Heterodera glycines
ATINHISASNGNDQKRRHLASGNEPLQRFGEAKKWMTDIYGQLDGHVGELLEFYLGLVKNGQKFVPPAQIDEIGHFRDSVRAIREVIGRDKMKVVFFGRTSNGKSSVINAMLSCRVLPQGMGHTTCCFLQVEGGSEQDKYFMMEDGAKHFPIAELDSVGHALGSEGMGSLGRDSLIHIFYPKSASKLLQNDVLIVDSPGVDLSPEFDSWIDKHCLDADVF

SEQ ID NO: 122326 - protein, 208 aa, Heterodera glycines
MATLSNTDSEEIPQKRPRENDKKDLTTSAEKNNSANGGSSESAKTTAVSHRAPFDATHRINRLGGKYHVLLAVTGSVASIKVNELIAELYKQSPENRLAIKVVATQSALNFFDAADTQEIVYDDRDEWNMWKKRGDPVLHIELRKWADSMLVAPLDANSLAKIANGICDNLVTSVVRAWDQRKPLYFAPAMNTAMWENPLTYQHLKTL

SEQ ID NO: 122327 - protein, 289 aa, Heterodera glycines
AHLNAAERGRPYLFIVAHYDTYGIIPSLGIGSDSNGSGTAVLLELLAILSQIYSLPSHKARYNLVFVLSAGGKFSYQGSRSFIDDFNERHSDERIALAICLDSLARGDSLFVHASKIPSDETKAFRFIQTLRHFANRPVELISKKISLASDRLAWEHEIYNIRRIHAVTISHFSNHSNPFRNSLLDIPTSLDFSMLEDNAKLIANALVSFVFDLDSRLCNNAKENNLACSLLNDAVEVDPKRLKAWVSMFGSKSRPIVVSQHQLVANLFEVVKRLAHSAHVSEIVVNDY

SEQ ID NO: 122328 - protein, 267 aa, Heterodera glycines
MTNEAGNWCLIESDPGLFTELISGLGVKGTQVEELYSIDDEQHLSSLRPIYGLIFLFKWRPGEELEGTPMPDAPVYFAQQVITNACASQALINLLLNISSSDVQLGPILDHFKSFTVGFDPATRGLTLSNSEDIRKLHNSFTREHFVELDVPKAKAEDNFHFITYVPVDGKIYELDGMREAPICLADIEPGKESWVDTLRPFIQRRIQKYTEGEIHFNLMALVPNLKTKYEQRVAELSAVGMDSDEVTKELNELHMLISGEEEKFRN

SEQ ID NO: 122329 - protein, 208 aa, Heterodera glycines
MTEPSASIVRPTFFDSVERWADRDFGEDLRNFLEEISYSDLASYAQLIHHKDIIIQCLLRHLADRSLSLPAFCDFCSAIATDLRDDFHTHFWQIFDAISNLVLASKGKEQCSDNELECTFRAMEQIVRINFRFVSARLKQLFSRLLPLFAFPSDGRLRFISARTFSFVFLKSPFPHKLAKFLLVKCFSDCGHLRDGLSLVFFDPFLGV

SEQ ID NO: 122330 - protein, 167 aa, Heterodera glycines
TYGLTFANPSVSANNCQGTLVAQMLRRATKNLDLGAEYIYHRDERFPGKQSNTLSYALRYIQPTWIFSGTLAPTELHLCYYHKQSEHLQFGVEFEANFKLQEVNTTFAYQIEVPDSLTLRACCDTNWKVGAVLEKKLSKQLPFSLAISGVLDHVKAQGKFGIGLLIG

SEQ ID NO: 122331 - protein, 509 aa, Heterodera glycines
ATLKLQDFLRQRLFSISQPKVVSVQARQFPVTIYFERRTPTNYLEATFKKVCKIHEEYPAGGILAFVTGQREVTHLVKLLENKYTKISASKLLRKEKMKKCRKKETKEEEEEGLLLDNDEFGTSDMDLEDEAWQNTFFGSDDESLNASQSFKKYPPLLAIPLYSLLPVNLQKKIFNEPPDDGSRVCVVSTNVAETSLTIPNVRYVIDSGREKKREYDPITGVSRFVVGWCSKASADQRSGRAGRVQSGYAFRLYSSAVYEDMRDHSTPEILNKPIDQLILMLKAMNFTKIDNFPFPTPPRLDQIKSSELRLSHIGALRVQEGLYTITQLGQSLAQLPLTPSFAKVVISSIRGGLLPFAVTLVSALSVREPLLFISSTKEDGTEERRKRMSEVIKQRFLWCAVGEARLFGDLTVILNTVGAADYEEENARAIEALGLRPKALKEINKQRHQLTLLLNKSDSVEKLPEKFRMDAPSQEQLRRLRHIMVKCHPDKLAKKVQSLDAPKGAYKT

SEQ ID NO: 122332 - protein, 448 aa, Heterodera glycines
MREVISIHVGQAGVQIGNACWELYCLEHGIQPDGKMPSDQNNQDDSFSTFFSETGNGRHVPRAVMVDLEPTVIDEIRTGTYKHLFHPEQLITGKEDAANNYARGHYTVGKEIIDPVLDRIRRIADNCTGLQGFLIFHSFGGGTGSGFTSLLMERLSVDYGKKSKLEFSIYPAPQVSTAVVEPYNSVLTTHTTLEHSDCAFMVDNEAIYDICRRNLDVERPSYTNLNRLISQVVSSITASLRFDGALNVDLTEFQTNLVPYPRIHFPLATYSPVISAEKAYHESLSVSEITNMCFEPSNQMVKCDPRHGKYMAVCLLYRGDVVPKDVNAAIASIKTNRSIQFVDWCPTGFKVGINYQPPTVVPGGDVAKVPRAVCMLSNTTAIADAWSRLDHKFDLMYAKRAFVHWYVGEGMEEGEFSEAREDLAALEKDYEEVAIDTVEGDGAGDDDY

SEQ ID NO: 122333 - protein, 456 aa, Heterodera glycines
MLKHCTQIRSFATHQSTFYDVVIVGGGLVGSAMACSIGTNSALGPSTRVLLLESGRLHSVKQSKEAETKHTYNNRVSAVSPSSPFLFYSQFGVWDEICSKRVHPISALYVEDGCAKSKIHFKQLDKRSPIAHIVENELIVAALQQCIRDRCANVEVRQGAVVDQNLSVPDNLGQNVTIQFEDGTIEASLMIAADGSKSTARKRAGIDFEETAYEQRAVVGTLALQHNSESDESFAWQRFVPSGPVALLPLGRELCSLVWTVSTADAARLLQLSPEHFVEELNGTLQFDNSSANSLVNNSLDCLGKALNFLPSKESPAKCTIPRVLSLPYDDRAVFPLSLGYAYDYIRPRVALIGDAAHRVHPLAGQGVNLGWSDVRFLTAALQRAFDEGGDLGSLTYLRDFDSASQRRNGPIIFAIDCLNRLYSTDHPFCTLFRSVGLNILDRILPAKDLIVHLAS

SEQ ID NO: 122334 - protein, 209 aa, Heterodera glycines
MSAVKGRREQDRKEWAAYWNIRWKEVENSFVGKYSYYTNRFLDWPVTWFRENIVERLHDKHKMPYYHRKISRVPEIDECGVNDRICLFEAEEQFRLDKLVDHYIRDILYQRFTQCVRAEGYDHLYKCAKHVDDYENAELNFFIKYGELGSEQTVVACYMKQKHRLIWERRHPEIMEERKRAHEEHTENMNKDKFNMHFWIKDNIYRKKQ

SEQ ID NO: 122335 - protein, 154 aa, Heterodera glycines
MEDSEQNITEQSVSAPTTDHDEYEELCKLVNPISKPLANRKLAKKVYKLVKKAAKEKGFLRHGLADVMKAFRKNEKGIIVLAGNVSPIDVYSHIPAICEEKGLPYVFTPSREHLGLCAGYKRPAIVLLVKRHDSFAELFDQTHESTYALVVEPE

SEQ ID NO: 122336 - protein, 232 aa, Heterodera glycines
KIKMFVLDEADEMLSRGFKDQIYEVFKSLPNDVQVVLLSATMPNEVLDVTKKFMRNPIQILIKKEELTLEGIRQFYIFVDKEEWKFETLCDLYDTVNITQAVIFANTRRKVEDLARNMTQKKFTVSLIHGEMEQQDRDVIMREFRSGSSRVLITTDLLARGIDVQQVSVVINYDLPGNRENYIHRIGRSGRFGRKGVAINFVTKQDQQMLKEIETYYSTQIEEMPANIGDMI

SEQ ID NO: 122337 - protein, 217 aa, Heterodera glycines
MNNSNHTQSVEVKLLKDDDWKRIQQNTFTRWVNQHLKKAPGSPKIENLATDFHDGILLIQLAEVLAQRNLVRFNRKPTMRTQKLDNISTVLNFFQKEEHIKIVNIDSSHIADHNLKLILGLMWTLILHYSLSQSIASTESVNGDEDGLGNGTDHQRHPSPRKSTSSSASEQQSPKKRLLAWIQERVPHLVVTNFTSDWTNGIVLGALVDACLGSGAF

SEQ ID NO: 122338 - protein, 321 aa, Heterodera glycines
LNLLFNSPISVHYLFRRHFAHFPLMKAAVVGEGAVGASVALAIRRAHPNANITVFSDRDFEKTTSYGPEGIFRVDVPGTERLAKESFEFWAKTERDELAHKTGVRLISGYCQSNDRKWIEAQESSMSDIVYNWKWLSERELRTLFVRPYCYGAHYTTYAAEGRLYVPWLRAQLVAESGQGLLHFQRQRIESLEQLIDSDQFTLVVNCAGLEGGRLAGDDGTSVYPNRGVGLEVEAPGHVHFTYWGRDIFCIPMVSNNRLMIGTLRQDNCWELEVTEQDRSAIWTRFIELQPNFRDAKIVSAWCGLRPNRHGGVRIEHQLRT

SEQ ID NO: 122339 - protein, 169 aa, Heterodera glycines
MSASKFFLKSNDDEVFEVDRNVIRLSTTLNTMFQDLGMDQAEAGEKMYTDPIPLANVNGAILRKVIAWCNHHKDDAPTGEDAESKERRTDDIPSWDVEFLKVDQGTLFELILAANYLDVRGLLDVACKTVANMIKGKSPDEIRRTFNIKNDFTPEEEEQIRRENAWCED

SEQ ID NO: 122340 - protein, 650 aa, Heterodera glycines
MPAKANAIGIDLGTTYSCVGVFQHGKVEIIANDQGNRTTPSYVAFTDTERLIGDAAKNQVAMNPSNTVFDAKRLIGRKFDDPAVQSDMKHWPFKVVQGEGARPKVMVEVKGEDKAFFPEEVSSMVLIKMKETAEAFLGQTVTDAVVTVPAYFNDSQRQATKDAGTIAGLNVLRIINEPTAAAIAYGLDKKGQGERHVLIFDLGGGTFDVSILTIEDGIFEVKSTAGDTHLGGEDFDNRMVNHFVAEFKRKHKKDLSSNPRALRRLRTACERAKRTLSGSTQASIEIDSLFDGIDFYTNITRARFEELCADLFRNTMDPVEKALRDAKMDKSQIHDIVLVGGSTRIPKVQKLLSDFFSGKELNKSINPDEAVAYGAAVQAAILSGDKSETVQDLLLLDVAPLSLGIETAGGVMTSLIKRNTTIPTKTSQTFTTYSDNQPGVLIQVYEGERAMTKDNNLLGKFELSGIPPAPRGVPQIEVTFDIDANGILNVSAQDKSTGKQNKITITNDKGRLSKEEIERMVQEAEKFSKEDEVQRDRVSAKNALESYCFNIKQTMEDSNLKDKISEDDKKKVLEKCGEVLAWLDANQAAEKEEFEHQQKELEGICNPIITKLYQAGGAMPGGPMPGGGMPGGGGAAGAGGAGGPTIEEVD

SEQ ID NO: 122341 - protein, 195 aa, Heterodera glycines
SFQISTFNLFNLKVDIFSSSGFVASCLNWVSKLHSPNVIVALPNQPNDVAAELLKKWASKFKQLQAFGVSNCQSLNDVLREVDFRQILRNDFMLIQNLATFCFSYLTRQIEKFRNDRRQNNKNVLTLLYYSKRNYGRKFEEDRSLIGYIEQTQKLTHYENIGKHRTFTVPKSEFLHDTVFRVDLFSCGIALCGIE

SEQ ID NO: 122342 - protein, 190 aa, Heterodera glycines
MGIDINHKYDRKVRRTAPKSEDPYLRVLVKLYRFLAKRVDTSKRFNAVVLKRLFMSKRNRPPLSIARIVRYVKKPGNEKKLVVCVGSVTDDKRIYTVPAMTVCALRFTDAARARIIAAGGECITFDQLALRAPKGENTLLLQGRRKAREAEKHFGPPPGVPGSHAKPLVRAKGRKFERARGRRKSRGYKN

SEQ ID NO: 122343 - protein, 321 aa, Heterodera glycines
  unsure (1)..(321): unsure at all Xaa locations
PQYGVSQPICTKEPTEKDLRLTKELESYLRSSGIFESDLDIQKRFDVLRRINSLVKSWVKQAFFLXVPPEQLDTVGGKLFTFGSYRLGVHTPGADIDSLCVVPRHIERIDFFTSFYQMLKEDEKTADLHKVEDAFVPLIKLRYDGIELDILFARLALKEIKEDQELSDDNLLKNLDEKSIRSLNGCRVADEILRLVPNRLNFILVLRAGKLWAKNHGIYSNVLGFLGGISWAILVARTCQLYPNATPSVLLQKFFLDFSAWDWPHPVILKDVDATPRIDIPYFIDMIWDPRTRASDRYHLMPIITPAFPEQNSTFNVTRST

SEQ ID NO: 122344 - protein, 251 aa, Heterodera glycines
MDQQEKSSGWFANVEMGPPDVILGVTEAFKRDDNPKKVNLGVGAYRDDQGMPFVLPSVKQAEKELLEANLDKEYAGIAGLPDFTAKAIELALGRDSEVLKAKRNATVQSVSGTGALRTGAEFLSKWFPHNKVVYQPTPTWGNHVPVFKFAGFEIQKYRYYDPKTCGFDENGCLEDILNIPAKSVILFHACAHNPTGVDPTPEQWTKISDACKSRDLYVFFDMAYQGFATGDVDGDAHALRYFVQQGDNICL

SEQ ID NO: 122345 - protein, 302 aa, Heterodera glycines
MGVPAFFRWLSRKYVSIIVDAVEQRRREIDGVKIPIDATQPNENYQEFDNLYLDMNGIIHPCTHPEDRPAPKTEEEMFILIFEYIDRLFSIVRPRKLLYMAVDGVAPRAKMNQQRSRRFRAAQEAAEKRELIENVRKRLESEGIPLPPPRKEEEHFDSNCITPGTPFMARLSVALRYYVHKRITYDPAWQKIQVILSDANVPGEGEHKIMDYVRRQRASPAHDPNTVHCLCGADADLIMLGLATHESNFNIIREEFLPNQPRACELCGQYGHEVEHCEGLARAETGADQRDPLKKEKNFSFI

SEQ ID NO: 122346 - protein, 303 aa, Heterodera glycines
IDENRRWSDLRCLTDRASTFANSGFVPGIKNLKEVHKMPVLVVGAGGLGCEILKDLALSGFHDIHIIDMDTIDLSNLNRQFLFRENDIGRSKAEVAAAFIEKRVFGCKVTPHNCKIQDKSLEFYRKFFIIICGLDSIEARRWLNATVCSLVEFDDGNNPKSNTIVPLIDGGTEGFKGNSRVIIPFMTPCIQCTIDLYTPQVNFPVCTIAHTPRLPEHCVEYVKVVLWEKEKPFGQDVKLDADDPAHVEWAFRAAQQRANEYEIKDVDLRLTQGVLKRIIPAVASTNAIIAGSCALEALKLASK

SEQ ID NO: 122347 - protein, 426 aa, Heterodera glycines
MGQLLVAFRGAANGNRNNDNQNAATNPSAGLRRLFVLLSAFLPFGQQTANNLEQRNDNNQQGESAEMGQFRAGFGRRRRRHAPAPPDLSGSGEAGGHGSPCGANGGGSFFGSHFLMGGELYDSSKPEVFLFGDQQDLELLGSKSVKFPFSAKGVTDSIGVLNALVNVRKDSVKFTKVGRAGGGYSSGFYRLEFVFDCDVSCFVQIHFCAREQIDEQQPQLLQIVSRQPQFEHSERFHFPVGANQHFSHFTFKPHRYDMKMMHWDGGPVFPVVIEIRSVSDQFPEQVQTTLCSIERSNDQSAVLILKPMKQKLFSDGVLFLLQEIFGIENKEMETAPPALADENGAECIICMANSRDTMILPCRHLCICNGCAETLRYKLNNCPICRSPFKALLKIKAMRNSLVGKGVGSDGSMTTARIRHEPVTLI

SEQ ID NO: 122348 - protein, 133 aa, Heterodera glycines
GTDSTNYLGVRLLWVTGQSGATLQAKLSKDLMLVHMSVPRTMSPVAISVLGEFVQPALKSWDVLSVQEEMAYDLSQQSPYDLTIEGLYRAAFRNGSLSNALLSPHYQIGNITNKRTQQFVNSRWLTKETALIG

SEQ ID NO: 122349 - protein, 246 aa, Heterodera glycines
MLYNGKFLNKKNYTITFELAGSFVENHRGTVYSVSFNPFTHSEAPIYFATVGKNRVSVYLCPPEKGFQLVRQFEDQDAKDEFYYTVTWAYNLEKAQHVLVVGGFRGIIRVISPLNGRLHCALIGHGDSINELCTSPVSPMIVASASKDLTVRIWNVTYSQCLAILGGTNGHRDQVISLDFDSSGAFLATASMDHAVKLWHIGKGTEVHENITASLRGQLNSVQSVEMHFPICHSKDQHTNYLDCVR

SEQ ID NO: 122350 - protein, 194 aa, Heterodera glycines
  unsure (1)..(194): unsure at all Xaa locations
VSAQSDSPVPNWLLNIGPISCHAWNKDKTQLAVSPSNNEIHIFARLETVWNPLHVLREHDLLITGLDWAPNTNRIVSCSHDKNAFVWTWEAEKNSWKPEMVVVRINRAATCVKWSPNENKFAVGXRENDWWVAKQIKKLIRSTVTSLNWHPNNILLAVGACDFKTRXFSAYVKEIDEKPTPNPWGTKMPLGELL

SEQ ID NO: 122351 - protein, 219 aa, Heterodera glycines
DGDHVVFTDFEHAELNELPPVPVTLKGSKVFNIGNALAAFSGAVQGPVSRGRVQQVKVPKKMSFYSLSLALAEPDFMIWDFAKFDEPAQLHALWQALYSFEEMKNYSPLPRSDADAKLLKEMLPKDAPEMPDSLLLNFSYQACGNLQPIASLIGGLVAQEAMKAVTHHTTPLKQFLYTDSLEALPGADSTFDAAKLEKNDCAPRNNRYDGQAAVFGWAF

SEQ ID NO: 122352 - protein, 189 aa, Heterodera glycines
MGNSSTTARSDDPQSTLTAGETLSDYDENIINRGRVAPRKESFCKGLAFSNRPISINEIVCIRLSEIGTNWSGVMRFGVTNVDPASFRDIELPKFACPDLTSKGGYWAKSLAERYSVEGSILHFFTNANGEMYYGVNGVHKGLFLSGINVLSPLWIIVDIYGNSIAVEFIDPSEVQLQSKRTSSKNRAG

SEQ ID NO: 122353 - protein, 201 aa, Heterodera glycines
  unsure (1)..(201): unsure at all Xaa locations
MNQRSEMPAQLRFQPSNAIGTHQRSIITAQQFQQQPFCVKRARYDYDLYEGQSHHNFQRQRFNQTPPSAIHPMRTFQIRHRSTDKTRGLRHFAQKVCEKVKQKVQTNYNEVAEELVNEYFDNIAEVPSDPEKLQYDTRNIRRRVYDALNVLMAMNIIEKEKKEIXWVGLPTSSLAECRRLEEEKXQRQERIRQKTEQLQEL

SEQ ID NO: 122354 - protein, 221 aa, Heterodera glycines
  unsure (1)..(221): unsure at all Xaa locations
MFKLTKMLNVPHRPDKSSNIGKEETAPKKDRVGEDSTKVTTQKRFAEMFGHLHFHEVGKNDTTEGYVRTENTERLLREHVKAGGGKVVTRFPPEPNGILHIGHAKAINIDFGLAKARGGICYLRLDDTNPEKEEERFVQEIEDMVNWIGYSPYKITHASDXCDQLYSWALTLIRKNLGYVWPPSTDEKRGFNPSPSPWRDRXLEECLGLIQAKKDGALDGG

SEQ ID NO: 122355 - protein, 279 aa, Heterodera glycines
MPSVSFVDVPVNSPFTFENLPFGVFSTNENSKKRIGVAIGAQILDLSVVKHLFTGPLLSERQNVFSQETLNQFMGLSRQCWLEARLTLQSLLSNANPMLRDDSELRERAFVAQSEAKMHLPALIGDYTDFYSSIYHATNVGTMFRGKDNALMENWKWLPVAYHGRASSIVVSGTAVNRPWGQVKAEDDTQPNFVTSRLMDFELEMAFFVGGPENALGTPIPIEKTEEHIFGMVLMNDWSARDIQKWEYVPLGPFLGKSFATTISPWVVTMEALRPFVVD

SEQ ID NO: 122356 - protein, 191 aa, Heterodera glycines
SVRPRTSFARFFRRYTLISHSPTKHFTNKSSRRITKRKSREMPSQGELKEIFNLYDEELEGKIDATQIGDVARACGLKPTNAMVWKAAGEEYKRKGEKKLAFEEWLPIFEQLQKEKEVGTYADFVEGLKVFDKDESGKIMAAELRHVLLALGERLSAEEADELLLGAQDGEGMINYDQFIKKVLAGPYPED

SEQ ID NO: 122357 - protein, 373 aa, Heterodera glycines
MLLFGSKNLSTLKIILRKNATAAVQAESPKQQKVEVTIDDKKVLVDPGMTILQACALVGVDIPRFCYHDRLSIAGNCRMCLVEVEKSVKPVASCAMPVMNGMRVKTNSAATKKAREGVMEFLLVNHPLDCPICDQGGECDLQDQSMAFGSDRSRHQNEYDGKRAVEDKDIGPLVKTIMTRCIHCTRCIRFANEIAGVPDLGSTGRGSDMQIGTYVEKLFASELSGNVIDLCPVGALTSKQYSFVARPWETRKTESVDVMDALGSNIVIAHRTGEILRIIPRMNDEVNEEWLSDKARFICDGLKRQRLLQPMLKNESDVLSPCNWEEALFTAAQKLRQITPNAIAGLAGGLVDAESLIALKDLLNQINSENVFS

SEQ ID NO: 122358 - protein, 338 aa, Heterodera glycines
MSSDIVEKKETNPNETDDKTKEIKSLDEDEIAALSNYNMGPYADQLKQAEKDIDEIQKRINTLCGVKESDTGLAPPILWDIAADKMAMSHEQPLQVARCTKIIKEEGKETRYMINVKQFAKFVVDLHENVAPTDIEEGMRVGVDRNKYQIHLPLPAKIDASVTMMQVEDKPDVTYADIGGCEEQIKKLREVVEFPLLQPERFTSLGIEPPKGVLFFGPPGTGKTLCARAVANRTDACFIRVIGSELVKKYVGEGARMVRELFSLAKTKKACILFFDEVDAIGGARFDDGKGGDNEVQRTMLELVNQLDGFDSRGAIKVLMATNRPDTLDPALIRPGRI

SEQ ID NO: 122359 - protein, 338 aa, Heterodera glycines
MLDETSASRAIGSNETAVMINSDEHELDTDPGVQGSDNGASSSMQRQLSAAMQAVVEEPTFNLRLIDAVRQSHCLYDASDKQYRSADYKIKVWNRLVHVLGFQGDARTLYNRWKQLRDKYGKEKKKLKYSGEQHSQWQYFKHLEFLDPHMVDRTQQRFERNKEGKTEQRQIVITDPNFALHLINQVRTQPCLYDIKDTKYRHTEYRNQAWAEIAKNLAFPGDVSALYKQWKKIRDRYVREKRKLRMTNGTENEEPNWELYRELVWIDRYLDERAAQVKRKQESSDLSGEEFIEDAYSTQNASGLSNSLPGNSATPLDSAHPHHHPQQHHYANVLMPNS

SEQ ID NO: 122360 - protein, 186 aa, Heterodera glycines
  unsure (1)..(186): unsure at all Xaa locations
MNQEQDNIPTFKLVLVGDGGTGKTTFVKRHLTGEFEKKYIATLGVEVHPLTFHTSRGQIRFNVWDTAGQEKFGGLRDGYYIQGQCAIVMFDVTARVTYKNVPNWHRDLVRVCENIPIVLXGNKVDVKDREXVRRKSITFNRKKNLQYXHISAKNNYNFKKPFLYLARKLIGDPKLXEFWGKPALPP

SEQ ID NO: 122361 - protein, 247 aa, Heterodera glycines
KVEEIRRTVYVGNLPKGCDGEEVLNFFNACIGEVMYLRMAAGNDYLPCDYAYVEFSQQSSVPLALQNSDSLEFQGRPLRIQHSKVAIIKPQRKTADQALEEVEEAIKSGSDGRTTTDTGRGYSPFRPGVSAPRVVPTSPRPSVKRSTRSRSTSSSHSRRSRSRSRRRRSRSRSTRSPSRSRRRRSRSRDRKRSRSRRRSRSRDKDRKKASKRSRSRDRSTRESGSKASKRDKDRSSRERDKEKSSKK

SEQ ID NO: 122362 - protein, 218 aa, Heterodera glycines
  unsure (1)..(218): unsure at all Xaa locations
MASECCIQVFCRVRXPLNESEKKNSSTNVVKFQSKDTIVVGGKPYAYDHVFEPSSNQEAVYSTAARHIVQDVLTGYNGTIFVYGQTSSGKTHTMEGVIGDSEKQGIIPRIVNDIFTHIYNFVDTEMEFLIKVSYFEIYNERIRDLLDVTKTNLAIHEDKNRIPFVKNITEVFVTNPDEVLAYIEEGKTNRQVAVTNMNEHSSRSHSVFQIQVQQDNKT

SEQ ID NO: 122363 - protein, 205 aa, Heterodera glycines
DGRHGVFFRNDLFPYSSGSSPVASFRLAVHHSRAPSTCGKFNESLLGELANSATLQSSLCVCTSIRRTAAVVEEEEEATEGRKLKLKEHPVTDEYKVSHEIVGIGESGKVMACFHKRRGEKCALKVLRDNARSRRELALHLSVFGHPHVVSIEDMFENSFDGFKCLLVGVEFMGGREVLTIFEQNGRLGYSEKCVGRIVSQIGSG

SEQ ID NO: 122364 - protein, 105 aa, Heterodera glycines
LFWRILCSLSVLSLAHCAYSAAQHRSYLRLVGQPFTHLPADLTTQTLLSLLFAIVSASFVVGDFQPIRTDLLISKKSWDVLGNCPSFYVYNHRAKCLMPKFDDID

SEQ ID NO: 122365 - protein, 175 aa, Heterodera glycines
MSANTECYRCHEFGHISRDCPNAGRSGGGGGGGGGSRGGGGETKCYNCGRSGHFARECRDAGDRDRGRGGGGGGGGRGGDDRGSKCYNCGGYGHFARECRDERSASGGGRGGRDDRDDRGNKCYNCGKSGHFSRECPEGSDRRGGGGGGRDRDDRRCYNCNEPGHMSRDCPKEAR

SEQ ID NO: 122366 - protein, 260 aa, Heterodera glycines
MADRAGFQSGFGGAAPPSARGRGGPRGRGRGAARGRGRGKDAEKEWVPVTKLGRLVKDRKVLTIEEIYLHSLPIKEFEIIDLLLSGLKDEVLKIMPVQKQTRAGQRTRFKAFVAIGDHNGHVGLGVKCSKEVATAIRGAIIAAKLAIIPVRRGYWGNKIGKPHTVPCKVTGKCASVLVRLIPAPRGTGIVGAPVPKKLLQMAGIDDCYTSAVGQTATLGNFAKATYYAIQRTYSYLTPDLWKENELPRNPLDHIGGGGAQ

SEQ ID NO: 122367 - protein, 111 aa, Heterodera glycines
MAVGKQKKSAENINARLAMVTKSGKYCLGYKQALKTLRSGKAKLVIISSNTPTLRRSEVEYYAMLSKTGVHEYHGNNIELGTACGKLFRVSMLSITDPGDSDIIRTMPTEA

SEQ ID NO: 122368 - protein, 173 aa, Heterodera glycines
MSARPKVFFDVMVGGKSTGRIVMELFSDIVPKTAENFRALCTGEKGMGKSGKPLHYKGSKFHRVIPSFMLQGGDFTRGNGTGGESIYGEKFPDENFKEKHTVPGLLSMANAGPNTNGSQFFITTVKTEWLDGKHVVFGRVVEGMDVVKQVEAQGNQSGKTANEITIADCGQLS

SEQ ID NO: 122369 - protein, 164 aa, Heterodera glycines
MPSHSSCHRNQRSMSLGGPAHESLLSKQHSSSPPQTVELSRADNGDCVVLVVENTRFIVNPALLVVKPDTMLGRMFSLRARTGGGTNTLSVPSSSSSANDPGADRGSPSDLVRPNERNEYDVAEGLSAACFRVVMDFYHRGFMHVPQSISVAELREACDYLLVP

SEQ ID NO: 122370 - protein, 263 aa, Heterodera glycines
MAQQQAITKKRKAVQDGIFKAELNNFLMKELAEDGYSGVEVRRAPSRTEVIIMATRTQSVLGERGKRIRELTALVQKRFGYSAGQIELYAEKVSSRGLCAVAQCESLRYKLVGGLAVRRACYGVLRFIMESNARGCEIVVSGKLRGQRAKAMKFVDGVMIHSGNPVTEYIQEAVRHVQMRQGVLGIKVKIMLPHDPKGQMGPRNPLPDHIQVKEPPIDVAPTTPYSEHREPMTTGMPPQTQMPPAHQQQQLPMVGQVPPPAQF

SEQ ID NO: 122371 - protein, 110 aa, Heterodera glycines
YDIARGVQKILQDYKSLQDIIAILGMDELSEDDKLTVSRARKIQRYLSQPFQVAEVFTGHKGKFVTLEQTIDGFESILKGEMDHIPEVAFYMQGAIDDVHKKADELAKQS

SEQ ID NO: 122372 - protein, 208 aa, Heterodera glycines
MKRLECAVQHYAWGKSGKDSFVAHLLPAERVDLDKRYAELWMGTHPNGPSRVIDGGAEASTNLKDFLAQNPQLLGHHEKGELSFLFIILSVDKALSIQSHPTKEQAKVLHAKDPANYPDDNHKPEMAIALTDFELLCGFQTPHGIISNVKAHRELLQLVGEPLLDELAQAEHHEPDWGERALRRMFCQVWTSPAEQIAHVVAQIVDRI

SEQ ID NO: 122373 - protein, 151 aa, Heterodera glycines
MGRMHNPGKGISRSALPYRRSVPTWQKLTNQEVEEQIVKLARKGLRPSQIGVILRDSHGVAQVRRITGNKIVRILRSKGMAPEIPEDLYHLIKKAVSIRKHLERFRKDIDSKYRLILVESRIHRLARYFKTKRMLPPTWKYESATASALVS

SEQ ID NO: 122374 - protein, 185 aa, Heterodera glycines
MGIDIKNHHVKKTQRREAASRNPYLLLLVKLYKFLARRTDAGFNKVVLQRLVKSKIYKPPVSLSKLSVSMKGREDKIAVVVGPITDDNRFHEVPKLTVAALRFTESARARIVKAGGECLTLDQLALRAPTGANTVLLRGSRQRVALKHFGKAPGTPGSTASPYIRSKGRKFQRARGRRASRGYRN

SEQ ID NO: 122375 - protein, 218 aa, Heterodera glycines
MADDKSCDGASSALPPCLIVLGMAGSGKSSFVQRLASHLHSKKVFPYLVNLDPAAATVPFPANIDIRDTVNYKKVMQEYGLGPNGAILTSLNLFCTRFNQVLDLLDRQKGSMPYAIFDTPGQIEVFTWSASGTVITDSLAASFPTVVAYVMDSARSTNPTTFMSNMLYACSILYQTKLPFFVVLNKSDVVDPAFAVEWMKDFEQFQTALDQNSSSFMN

SEQ ID NO: 122376 - protein, 184 aa, Heterodera glycines
MVVLSKLGSPLRPFSNDYLLCRFQAFRNYAIKKERPPPAKIQVPPPANETGHWKYERDYSYDLRYSNPINKYSSFTRFITLTATGHKELWALFALLMLSSSLAIGIVFYSLGKIEVWVDRSTSTPPWDWARVRDKYWKFPTVLYDPTGITHVRLSPMEKLQDEMLEAAKERGTRDAKGYWVGKQ

SEQ ID NO: 122377 - protein, 177 aa, Heterodera glycines
AESEGAKGDGTEAEGSDRSPLLTSVDVSRFRFLNERLCSQTSASSAKLFEEDPDSFRLYHRGYRHQVSKWPVNPLEKIVLDLGSLPPGSVVADLGCGDAEIAKRLGERLRVHSFDLVASNERVLAADMADLPLEAESVDVCVYCLSVMGNNLAQFFREAHRVLKTHGKIQIGQITKR

SEQ ID NO: 122378 - protein, 123 aa, Heterodera glycines
MAKQKGEKKGKSALNKVVTREYTIHLHKRIHGIGFKNRAPRAIKEVKKFAEQQMGTPDVRVDTRLNKFLWSRGVRNVPFRVRVRLSRRRNDDEDSPHKLYTLVTHVPVTSFKRLTTVNVESED

SEQ ID NO: 122379 - protein, 159 aa, Heterodera glycines
MHSKDIKEKGGQQIGGQGEVGEGGTAENGQQRQNRGQSADAGALPQRTMGALYEMTPELENNQDEIRKLDSQLDHLNDYMDRVEERLKTHNDKLMETLRQQREDREKRRRSFHERLEQSRQEDDDFQQQLSSVLSRVDSVRSKKTEPKVKLEGDQLSSN

SEQ ID NO: 122380 - protein, 98 aa, Heterodera glycines
SCRIRHEDFSHTNEMPLAEDLLYPDPQKERQKHKLKRLVQHPNSFFMDVKCPGCYKITTVFSHAQTVVVCVGCSTVLCQPTGGKARLVEGCSFRKKGH

SEQ ID NO: 122381 - protein, 208 aa, Heterodera glycines
MSAAVSSSRPMEDWKSELAMPDKDLRYKTSDVTATKGVEFEEFGLTRDLLKGIFEKGWEHPSPVQEASIGIALTGQDILARAKNGTGKTGAYCIPCIEKIDPSKEYIQAMIIVPTRELALQTSQICVELSKHLKIKIMVTTGGTDLRDDILRLNGIVHLVVATPGRILDLMEKGVANVAYCKTIVLDEADKLLSQDFQGVLDRLVQFL

SEQ ID NO: 122382 - protein, 193 aa, Heterodera glycines
MLIQENFRLQFYEPIRREHSLIVTNTDVDSLCATNILTHIFSCDDASYTLSPVDSFPTLEKAINDHVRQAKNIVLVNCIGSRSVSELSIARLTDEVTFWVLESRRPLNLEDIYNANSVRVLAPAAEVAEWTLPEASAIFETMVEQEDEDDDDEASDGDEENRPPSDDREEAEDGEAAMAGDSDRESDEEDSNG

SEQ ID NO: 122383 - protein, 501 aa, Heterodera glycines
  unsure (1)..(501): unsure at all Xaa locations
MDPFHRNEAKVEVAVEPPTAIDQRVDDIMQTGRFGDGRLVKMEVDYSAQVDSQLIVADNLAKEGKTAEAIESLEKLEKDRRINCDMRSNQRLLCHMVKLAFDANNWQLLCETAKTLCKKRLLIKSSIKKMVQECCEMVPKAPDASSKSTLIDTLRAVTAGKIYLEVERARLTKQVAEKLEAEGKLDEAREMMMELQVETYGTMEVEEKVNYLLHQMRLSIANNHFTRASIISRKISTKFFEREGTQVQLMKLEFYKYMVQIGLSENNYLDVCKHFLAILNTPQIQENNVKKIEILKCVVFYLLLSAHDNEKWELLHRVNAMRELEQIPKHKELLELFIHQELIFWSKTIESEFAPILFAAQPPVEVISDSFLPSTHVFPMTKEDGQKRRERLHDCVGEHNVRXMVAKYYSRITFQRMAKLLEFGIEQMEAFVCKMIVDGVIPEVKIHRPSQIIYLSPKKNGAEVLDEWVFNVRKLTDTMNKVSQLIAKEEMVHGLQISQRI

SEQ ID NO: 122384 - protein, 216 aa, Heterodera glycines
MADELVALAPGTRVSGRWTILKKLGAGAFGAVYLCKDGKGTVAALKTEPIDTRQPLLVMEATVLDTLGKKLKNADGQHFCRLLDLGRSEQRNATSGDTVFNYVVMTVVGTPLDKLIRNAGDRFSPGTAIGMSIQLLSAIKALHNVGFLHRDIKPANTAIGRAETNEHRLLYLIDFGMARQFLRPDGTQRRPRASANFRGTPIYAPISAHIKRDYSR

SEQ ID NO: 122385 - protein, 344 aa, Heterodera glycines
  unsure (1)..(344): unsure at all Xaa locations
MASRPLVSIYNEKNEPTGKQIKLPAVFRAPIRPDIVSFIHDQIRKNKRQAYAVSTAAGHQTSAESWGTGRAVARIPRVRGGGTHRSGQGAFGNMCRGGRMFAPTKVYRRWHRRVNVAQRRYAIVSAIAASAVPALVQARGHVIDQLNEIPLVISDKIESFTKTKEAVGFLQRAHLWDDVEKVYKSKRFRAXGKGKRRNRRYKQKLGPLVIYNNDGGIVRAFRNVPGVTLLSVSHLNLLKIAPGGHLGRLVVWTESAFRQLDPLFGTWTRQSNVKKGFTLPRAKMTNSDFARIIRSEEITKVLRPTMARKVRRVAKIHGNPLKKPSLMAKLNPYAAVLRRAAVLA

SEQ ID NO: 122386 - protein, 115 aa, Heterodera glycines
MIEDAIASAINGGGSATVADIALLRNGRLSGASSVVAAGANDDFVRRLVDVVRREPALYDPSHEHYGNRHASTHFRTAIWQRLCKELDYPDDPQALQKQWKSIRDKYIKEKKRRK

SEQ ID NO: 122387 - protein, 271 aa, Heterodera glycines
MLRNLSKFGTILNGVADPLSALVVPSAAAGDASSLLLPCSAGAVQRQSRRWGFPRGHKHPPRLFFDFAHLKQITGGEYTTKPLQINRLGGRCPITRKKLCIHIGGGVKFDYFMLNLHPRGPTVADETYDERVIEVRRDPNRTPYIALVAGVKGKRWIYATQNMQAGQIIQTTCHIPERPVIGCEGNSYPLGALVEGTMVNSIELHRNNPNSHVVITEAGGCAEIIRHMDEFTVVRMPNKYEYAVRKECMAVVGKLSHVDWDKKHWGSAQMH

SEQ ID NO: 122388 - protein, 200 aa, Heterodera glycines
ELPPSAKDGDPTRNGSPLTINGNPFVPLNERAYGRKKEAVEADGIRWQLAKKDEELLNLQKALKERDSEIGTMKLRVEMAKTQLAETTGKGGISVEMELLRQRCTGLENDLKRQKDEYEQQLDQLRQQLAEEHNRTREFSKKALFANMQNQQQQAAASALTMNASPGSVSASPLSRVGSSSGASTMGATDTTHGAASDVS

SEQ ID NO: 122389 - protein, 127 aa, Heterodera glycines
MRQSPNQTPVTRTTTTTITEQQREGGGDQQTNSEQFVLRLEAPPDTRPRVQWSTGTVDNENMGKKKSKCCCIYKKKRSWDDPNASSEDDDGECESSHCRGHVEKQRKPPPSDDGNGGGGPGPSSIST

SEQ ID NO: 122390 - protein, 211 aa, Heterodera glycines
INLKASMLIKRAFSFSSRALQQHSVVRPPVQVTGIEGKYASALYSSGIKEKKLENIEKELRQVKELYDTNKEFKSFIDNPILNKQKKKEAVEDVLKKQGVSQQVQNFFGLLAENGRINKLTGVVSSFETIMRAHRGELHVEVASAEPLDKKHEQSLNDALQKFATRGQKLNLTFTVKPDLVGGLVVNIGDKYIDLSMATRLKKMDAVVKGS

SEQ ID NO: 122391 - protein, 310 aa, Heterodera glycines
LVEELAFFNEVEDGSVLRKEEIPQEYREEAKILRQELLENLANCDDVIAECYLNEVTPSVKEIKEAIRRATIKRSFVPVLVGSALKNKGVQQMIDAIVHYLPNPSEVDNFVNLYDKNDNAERVLMDPLRTANSEKQKPFIGLAFKLEAGNFGQLTYFRIYQGRLVKGDTIYATRDGRKVRIQRLVRMHANTMEDVDVAYAGDICATFGVDCFSGETFCSDEQLRVHCESMHIPDPVISMSIKPIGKRDMENYLRALKRFAKEDPTFKLCYSKEHKETVVSGMRELHLEIYAQRMGNEYNCPVELGRPTVS

SEQ ID NO: 122392 - protein, 198 aa, Heterodera glycines
MAAMNPEYDYLFKLLLIGDSGVGKSCLLLRFADDTYTESYISTIGVDFKIRTIELEGKTIKLQIWDTAGQERFRTITSSYYRGAHGIIVVYDITDQDSFNNVKQWLQEIDRYASESVNKLLVGNKCDLTTKRAIETNVAKEYADQLNIPFLETSAKNSTNVEQAFITMATEIKNRMGPLQQAGGNASAVRIGPSQPVQ

SEQ ID NO: 122393 - protein, 291 aa, Heterodera glycines
MLSKCLRSSIFGCFNCALQNVSSAAVLMNSVRHAGTAEHWRRAYLKDLYNRRQMVGPEPLRGRASEDNWNYPSEISALSHRLHIPDMDNALIVQALTDKSYFTRNDLDDEAMGDDGPLTTEVARDKSNDQLVEKGMPLFRHIVLTYLRAHWPLAPEEFIIAVATRIAPTSALAELATQLGLHHVVRTAEFPPTQQTLQSTLLALVGAMDVAKARDFVRRFVLPRLYEVPLEDVLPFRHPFAVLGDYLRTWQGATDIQPRTIGSGAVMKATPFYQGADYVDKQQIVGPSGGE

SEQ ID NO: 122394 - protein, 132 aa, Heterodera glycines
  unsure (1)..(132): unsure at all Xaa locations
MVGRVRTKTVKKASRVIXEKYYTKLTNDFHTNKRICEEVAIVPSKKMRNRIAGFITHLMKRIERGPVRGISIKLQEEERERRDNYMPEISYLDAQNHQTISTDQETKDMIEYLGLGLNLEVKGPVPTGAGRR

SEQ ID NO: 122395 - protein, 133 aa, Heterodera glycines
MTMNRLLPGRSLLPKIMRNFSHSNRLAASEADPEHYGYFPDPTEQTWGLEREMLAARLKGEDRYSPKIYYRAEHSTKDVPNVVRVHLEDKVVGCLCEHDGDHVNYWHIRKGDTKRCECGHWFKGVQADTDSFD

SEQ ID NO: 122396 - protein, 253 aa, Heterodera glycines; identical to SEQ ID NO: 120924

SEQ ID NO: 122397 - protein, 209 aa, Heterodera glycines
MSSPRKKILLKVIILGDSGVGKTSLMNQYVNKRFSNQYKATIGADFLTKDVMIDDRLVTMQIWDTAGQERFQSLGVAFYRGADCCVLVYDVTHAPSFKSLESWRDEFLVQASPRDPEHFPFVLLGNKIDNDAARAVNAKRAQSWCQSKNGMPYFEVSARDGVNVEEAFQAIARAALARDSQETHDFPEFPDQIRLDQSRNGRQQNSSCC

SEQ ID NO: 122398 - protein, 190 aa, Heterodera glycines
MASIVDSAKVNNFGIGTVVEPILVNKNGSTGGGGRRKNKTLFGISQAVHAEHPQQQLSEFAGGISPVDAVPMPTAANDCNNNSIEDIQSDRRRGPIDPTNFDHLVRLSELIRSMADLGTLQPEFGIICGSGLGAIADQMEGARILPFSEVPGFPQPSVIGHKGNLVFGRIGGHFCMCLQGRFHPYEHKMD

SEQ ID NO: 122399 - protein, 199 aa, Heterodera glycines
MTKAEQAAEKKEKKLGNPMRDLKIQKLCLNICVGESGDRLTRAAKVLEQLTGQTPVLSKARYTVRSFGIRRNEKIAVHCTVRGPKAEEIIDRGLKVKEYELYRENFSDTGNFGFGIQEHIDLGIKYDPSIGIYGMDFYVVLGRAGLRVAKRRRIQGRIGASHRVQKEEAVKWFQQKYDGVILPPKPKESRKGGHRGRKR

SEQ ID NO: 122400 - protein, 610 aa, Heterodera glycines
MASKSKRTTRSQREAAIHIDASADETIESSSNGSTINSSSGHLSSRQDEKNHLCNLNDRLAGYIERVRSLETENARLQIQVREVEVVERKEKENLSARYEIKIDELRKQLEFFTREKAKLQIESDKAQSGFEELKARVGKLEKDLRKAEKERTAAQADVQELTARFNNTDTALGNAEREIEQLRNEFNNSENMVDMLRRQLEDEVLLRTELENRLHTAKDDLDFARRSHSNQIEEIRRKRQVEMTSFSDEVEHRYQAKLQEQLQAMRDDFDNRIAQNRAEVDELYRNKLGEAAENANRNRDLAAKAREEAAMWRVRVQDLENSSKDHQGIVESLNRRVKDLEAALRRAHEDADIRIQQRDEQIEQLQKEIALMISDYQDLLDVKVQLDTELQAYQKMLEQEETRLHITPSTSPNTSVVGQNISTPNMVISTPRPVSPRLATPVTQSESLTTVRRGVKRRRLNQDDIVSFDKTSSSWKSNGHSNGNLVIGEVDKEGQYVSVINKGKEDVAVGNWTLKSSAGGREVQYKFHSRQTVKAGKTLMVWSTNSGQEHQPPNNLVFKNQQWPHDDAIRTELLNADREVEAWNEAFLQHSFSSRVEEGTDIDKNCRIM

SEQ ID NO: 122401 - protein, 211 aa, Heterodera glycines
MRDLFIEDNSPITPARLAELIRHFYALGWMRDNGGGMAVLCNGAVFGSPTSVQKEKVSENDLFVIDATTGTVLKRPQNAASVPSATCGLLMNTGLNCVIHTHSKYANLVSQLVTGNEFAIQNQEMIQGVENRSSGLRLDNVDRLVVPIVDSELNEQMLSPVLLRTLDKYTEASAILVRGHGFFVFGSHCWQSTKMMLECYEYLFELACEMI

SEQ ID NO: 122402 - protein, 198 aa, Heterodera glycines
IKLALVGQEPILFARSVAENIAYGLERCTIVDVVEAAKMANAHTFIQQTRDQYETNVGEKGSQMSGGQKQRIAIARALVRRPAILLLDEATSALDTESEHLVQEAIYKNLKGRSVILIAHRLSTVEKADKIVVISRGRLEQIGTHEQLLAQEGMYRSLVQRQMISVGDNGSELEMAGEVPTEGQEETLSGDGTDGAAR

SEQ ID NO: 122403 - protein, 211 aa, Heterodera glycines
MRHSAYFVERKFRLISFHFLRRVLSTSAMPTKPSRHSPSKIVHGAGKSIWVEFTALAVECNAVNLGQGFTDSPMPDFLTRHLADIGKSPERTDFHQYTRGYGHPRLVSVLAKLYSRLLSVSVDAQSEVLITVGAYLSLYYAFMGWLNAGDEAIIFEPAYDSYVSQIKMAGGIPVPVVLELDPEARGSSGYRLDMEVVRSKVTDRTKMIVIN

SEQ ID NO: 122404 - protein, 111 aa, Heterodera glycines
MAVGKQKKSAENINARLGMVTKSGKYCLGYKQSLKTLRSGKAKLVIISSNTPSLRRSEIEYYAMLSKTGVHEYHGNNIELGTACGKLFRVSMLSITDPGDSDIIRSMPTEA

SEQ ID NO: 122405 - protein, 89 aa, Heterodera glycines
MAPPTNKVQKVMVQPINLIFRCLQSRSRIQIWLYENASSRIEGYIIGFDEYMNVVIDEAEEVQLKSLNRHKLGRILLKGDNITLIQTIQ

SEQ ID NO: 122406 - protein, 170 aa, Heterodera glycines
MLQRLFVGKNFTCLPLFTSHRNYPGSNFTFPIDWYENKYVLLHQRAREKVSPDFHKQTTGLNGLYVNENPHKDLRLLYHRILRVIGMIPDSSQYRMAVEEIVKHRLSLVEAEPDIQQLEQKIGMGQIEEVVQQAEYELECIRLFVAHKCWEPLVEKADEAQWRWPIGPGP

SEQ ID NO: 122407 - protein, 207 aa, Heterodera glycines
MVQYKLYYFDGRGLGESIRLLLHYVGQPFEDIRIKDMEEWEKTYKPKFFYGKVPVLEVDGKPLGQSATILRYLAEKFGLAGKDECEKAKANEIIDFQKDANTDLAPYLYVKMGFRQGDLDKLRAEVFEPGVKHILPLFEKLLKESGSGYMLKSGLSMVDFQVANFLYTFTKLEPETINAFPELIKYVDRVHALPQLQQYLKQRPQDR

SEQ ID NO: 122408 - protein, 277 aa, Heterodera glycines
PPYVHYINTHTTSEPQRGFAFMPKRGMNSLENEINRIYKVTTKGVVDILQFFVPRKSDLWQADLYPDTRSLIPALTAEEFVGGKNAPPNLIPVNPEAAKAGPKVQVAKKANILAQMPPQQEHPPEPPMQRPAPPQQQRAAPVRHDEEMGIVRSQRREPSPPEQQTPAPRQQVQLRSREARDETGGSQTAGQRRAAAELDRIRREQNRSGAGEADGQSTAATTPNASRRPSNSSAAAVSGSVEDELAKIKVVLRQHERRIRLLEDQLADANMANAYGI

SEQ ID NO: 122409 - protein, 195 aa, Heterodera glycines
IQTVPPFFTVKRLRETMSRFDGLGRVYLQSEKRGAQRKKRYTEGWVEFKNKKVAKEVVRLMNGRVVGGRRRSAAYDSVWTMKYLHGFKWEHLMEQLNYEQRIEQQRLRTEIVQEKRKADFFAQQVEKGESLKKLEEKILKKCGLWEQYQRQHKQLKNCGEGRSRNWRRTNHCCFKYLEETTEGKTLTIRGKGNQT

SEQ ID NO: 122410 - protein, 184 aa, Heterodera glycines
MSTFYSLNVSSNWLKYLSLGTALVVGYAVYIDRKRRLDPEYKQKIRQNRKQKQANFFYAKMSGGVDFPDPSDPQANEIFFFSQITPGEEKMKTGHIEEGITHLSNAIVTCSKPDELLRIFQQTIPPECFSLLVQAIPGAKMRRNASSSYRHGREPIDLDCAKIDDIGDNAVDKKMFVLQDDELE

SEQ ID NO: 122411 - protein, 260 aa, Heterodera glycines
MANNFLSVRRFLHCCPPLRNVVNGRWTTTHYTQRPREKDGRWKCVDMARVEDEFDVVIVGGGPAGLSAAIRLKQLAAEKAKELRVCLVEKAPEIGAHTLSGAIIETGGLDRLFPNWRELDSPIKQPVKKDAFAILTKNGRIPVPLVPGVPLNNHGNYIVRLGHLVRWLGERAEEHGVELYSGIAAQEVLFDEAGKTVCGVATGDVGIHKDGSPKESFERGMELKAKCTIFAEGCPGHLTKSVIGKFGLREGRDPMTFGNG

SEQ ID NO: 122412 - protein, 238 aa, Heterodera glycines
MFMAADDSNSEKESNSLSIRTDKLLSVPFNGEETSENTSQQQQQQTPVALPTSSSKILSKQHPLKTKWNFWFLNNKKKDMDWLERLSKVCTVSTVEEFWAFFDNIHPPSGMYGCDYNFFRDGIEPLWEVAQNKDGGRLVIQVDKQRNELLDGWWMEFLLACIGEQFGDDSDQVCGAVCNIRNKGSKISIWTTNASEEDKNRRIGHVLKDRLQASGGLKPIKINFEDHEVVQQKTSSAI

SEQ ID NO: 122413 - protein, 249 aa, Heterodera glycines
MARRYDTRTTIFSPEGRLYQVEYAMEAIGQAGTCLGIRAPDGIFIAAQKLTANKLLDDRIMSEKIYKVSANIFCTVAGITSDANVLVDKLREMAVMNTLDFGENIPVEQLVIRLCNTKQHYTQVGGKRPYGVSLLYAGWDTHHGFQLYQSDPSGNYGGWKATCIGKGHQNALSILKQEYKDEDMTLEKAKDLAMKVLSKTIEAKMLPEQLEMAQLTLDEKGRPELRILEEAERKQLTDKWEASEEAKQP

SEQ ID NO: 122414 - protein, 277 aa, Heterodera glycines
KEQNSGDEEAEEADEHRTKKRGILSLEDGIIVDAEPLAKREKKQLVIPVLQVSSRAQISRIQKLVDEGTATETDLARLSLLIDSLDDEQRKTTTLPLDARHQTVPTVAVADDDDPDYASVPVGEFGLAFLRGCGWKDEKSCIGKSNPQVVPLRVIEPRPKGLGLGAVLPTTAPPTANALKAAENGDEEATTLGKHSYVRCLSGLNKGSYGQVMSMDEENASIFVELAWPPANVGKTVRVSQWAGEVVRRKEYRECVKGGSGGGGTAENGRRLERVRV

SEQ ID NO: 122415 - protein, 139 aa, Heterodera glycines
LKMQIFVKTLTGKTITLEVEASDTIENVKAKIQDKEGIPPDQQRLIFAGKQLEDGRTLADYNIQKESTLHLVLRLRGGKVHGSLARAGKVRAQTPKVEKQEKKKKKRGRAFRRIQYKRRYVNVAAAGPGRRRGPNSNAA

SEQ ID NO: 122416 - protein, 208 aa, Heterodera glycines
SCRIRHEATSLPPLLLERLKKRGIVASKNEDEEVFAESYDQDDDSKLEISREKYRGGAPGCPNKHNPFHVCTDFCFDHWQEGYPESRLSDKYLEQRNKMLRNYPLPKDWVEIYDPGMHRHYYWNQMTDEVSWLSPKHPKAVISEAAAKSAKEAWNMSKIERSEGERGGRRGGREGDEREGTERRGKERYKGKRTKDYEIALPDSDEEE

SEQ ID NO: 122417 - protein, 172 aa, Heterodera glycines
  unsure (1)..(172): unsure at all Xaa locations
GSLSLTVTAALMVNHKVNPKDIGFLADGTETLVDKSKSVKSVLMDLFADSGNMDLEGADXKNACFGGTQALFHADDWMYAFYATQKRLAIDVCADVALYSAGPARCTGGAGAMAFLIGPNAPIALERGLRACHSQNVYDFYKPIGGVSTQFPRVDGPNSVDTYLNAVDMCLR

SEQ ID NO: 122418 - protein, 199 aa, Heterodera glycines
TPFAKKSEEQREAEEKKRAEKLQQFVDSRNLGFHKRKSGEYDDEMLTVCGELLKNNPDIYTLWNVRREAIEKRATKCEDESDEELAKRISELINGELKLTQSCLLRNPKSYSTWHHRYWSCLRHPTPPLRQELALCEKALGQDCRNFHCWDHRRSIARTAQLSAEEELRFSDTLVGRNPSNYSAWHYRGTLLPLMKPNT

SEQ ID NO: 122419 - protein, 116 aa, Heterodera glycines
MVRLIQNQFWRGTLTQPWGVKMFKYIWRKHSRFLVKTVMVQENDIDSAFHLLNRLMEREGLLKIIRNTQRYQKPFMQRSQLSIEASKAILEEDRDRKLKFLVRKHRADAYPGQLTM

SEQ ID NO: 122420 - protein, 380 aa, Heterodera glycines
FIYNHEITAMARNASKSPQLLVLYCDQLLRKSARNMEDEKMDENLEQVMTVFKYIDDKDMFQAFFHKFLCKRLDYDTSASEEQERCMIAKLKHMCGFEYTSKLERLLTDVPLSRDHSEQFKQQPRTSNVDFSVIDVMSNVWPLQQPVKLEIPRPLLDGIDSYTQYYTNRFNGRKLTWTLQMYHGELVSTSNTFPSKYSFLCNTQQIAVLMQYNERNTYTLGELHVALGTDFPGDQLCAVVQSLVKTNLLKLTSADGKALTETKLNDNEQKFTFNPGFHSRKLKVDLVRAMSSARETKKESEDVQKTVDEDRKLVIQAAIVRIMKMRKSLKHQLLVAEVLNQLTTRFQPKVPIIKKCIDSLIEKEYLKRSEEDRDMYEYLA

SEQ ID NO: 122421 - protein, 235 aa, Heterodera glycines
MEIIYAILSFFGLLFLLCLLFKFLRAIWRCVYPYFIARPKDLRRLVGAKWAVVTGASDGIGKEYAKQLANKGFNLMLISRSADKLKAVKEEIQPKQFLQPEVKWISFDLTNANIEDYEKWLFPELSKMDIGMLVNNVGSFPPLMRFHELPGGHRSIAKDLILNTMPHTILTAFVLKQMTERNKGIIVNIASVAAVFPLFHTALYSSVKKYLTWFSAILRKDYADTGIIIQSILPG

SEQ ID NO: 122422 - protein, 86 aa, Heterodera glycines
MSAPTALATNSRRQTPSEFLKKIVGKPVVVKLNSGADYRGILSCLDGFMNIALEQTEEYHGGQLKAKYGDAFIRGNNVLYISTQKQ

SEQ ID NO: 122423 - protein, 139 aa, Heterodera glycines
QDNTNTIQSKSKSGYPTKMVIVYRPYVSRWRRAWTVIKAKPRFWLKYYPEFSAGWYMLVPSVIICLGTRFYFGGYPNNFGMGWNEKPFYRQFFEVRRPDDPLVLKWRLPEEYPARFQTNRQSDYYPTTAHNKHYAWDVK

SEQ ID NO: 122424 - protein, 198 aa, Heterodera glycines
MLSSVTFRFSYAISSSVAFPSSAFCPFFHNFRHISLLPKDGMTLHDFLPPGSTKAISFADDGQKTETAQRRTADGRLRLPEWLKRDVVAKQSDVNLIRMKKQLRGLKLATVCEEARCPNIGECLGGGPGRPSTAAIMLMGDTCTRGCRFCSVKTARRPPPPDPEEPLNTAKAVASWGVDYIVLTSVDRDDFGRTAARH

SEQ ID NO: 122425 - protein, 126 aa, Heterodera glycines
NVDMLMSIIVPERRSIASAIQILFSHLFGDASGPYLVGAISDFVRGSSDLPADRFHSLIVAFYLPNALLFLSGAAFLGAAYSLPADLKRMEAEKAAAESPKPTTSATIGPSSANIGPQGRQNEAFE

SEQ ID NO: 122426 - protein, 229 aa, Heterodera glycines
VHFEGADVDASGSRYGASIPFEKAMRPEVIIAYEMNGDVLTRDHGFPIRLVVPGHVGARQVKWLNAIRLSDEESPSTWQQRDYKAFPSSVQIGDPLPFDTTPAIQEYPVQSVICEPNSNTKIAPGAKTITVRGYAWSGGGRGIIRVEVSPDNGTTWKCAELEQCPEQNIEQMWGWTLWSVELPISEATIRNGRMELVCKATDRSYNTQPETGIALWNVRGLLHNAWHRV

SEQ ID NO: 122427 - protein, 185 aa, Heterodera glycines
MGKGFQNFMSKKDFHPSAWWNLKRKWEAEQKNDLEKRRQDELRVQYEKEQEILNNKALLGDEKARLGLSFMYDAPAGINKKKEEGPEPKFEWQRKYNAPREEWAKGNELIQDQPFGIQVRNVRCVKCRAWGHLNTDRECPLYGMSGNAEDHGYANNPSDIIRDLNVEKKTKTVSDVTTNEQIDIK

SEQ ID NO: 122428 - protein, 179 aa, Heterodera glycines
MKIGHRTPPRQKRATDPPPQFDSSDLGSPQKVWSLLCEKDEKLRRDPHVFSRQKKINAKMRAMLLDWLMDVCADKQLHRETFHLCIDYIDRFIALSDHQMQPQRLQLFGSTALVIASKVEEIYPPKIAEIAEYTDGCCSEADIRGIEEIMLEKLDWTCYPVTAVHWLALFMQLMNTDEV

SEQ ID NO: 122429 - protein, 409 aa, Heterodera glycines
MFLLIGKYPFLTSTSIRAFSTIKEAFILEACRTPIGSFRSQLASVSAPALASECIKELLKRTKVPAKEVQEVFLGQVCQANVGQAPARQAALGAGLDVAVAVTTVNKVCSSGLKSSMLAAQQIQLNHQQLVIGGGMESMSHVPFYLERGELPYGGAKLIDGIVKDGLTDAYDSVHMGNCAEKTAKECQIGREEQDNYAIQSYKRAAQAWQNGQIGPEIVPVEIKTRKGTFKMERDEEYSKVDFDKLKALRTVFQKENGTVTAGNASTLNDGAAAVLMASEEKADALGVKPMAKVIAYGDAATHPMDFPIAPALVIPKILSAASLSIGDISLFELNEALSVVPLAVIKKLGIDPAKVNAHGGAVSIGHPIGMSGARILAHLVHALKPGQFGLAAICNGGGGASGMVIKKL

SEQ ID NO: 122430 - protein, 415 aa, Heterodera glycines
  unsure (1)..(415): unsure at all Xaa locations
VKLGSAVITRDDECGLALGRLASIVEQVSELQQTGRQMLMVSSGAVAFGRQKLRQELVMSMSMRQTLRGPAGMQTDKRACASSGMPGLMSLYEQLFQQYGITVAQVLLTKPDIDDPQRRKNLQATIESLLRLNIIPIVNANDAVAPDPKLNMHISDNDSLAGRLASEISADLMIILSNVNGVYTGPPEQEGTRLLHSYCPAEASSVSFGSNSKFGTGGMEAKVQACVTALHHGVSTVITNGMQNNVITDVVYGRKVGTMFCNTSRYEGPPIAETAAKVKESGRLLQSLSNEERAQMVRHMADLLMARESDILEANRLDLHNAKGAKLEAAMXDRLKLTKGKLLDLHSGLNMIADSANTLIGRVLKRTKVAENLILEQTTVPIGTLLVIFESRPDCLPQVGGLSIASGNSLLLKGG

SEQ ID NO: 122431 - protein, 167 aa, Heterodera glycines
ENLKFKRERREKFSQSAAIPSNLPPSTSNGQMGSLLLHDEMASASSGSSTFALDMDKLEQQRVQEQTTLLLDDTEQFHQSRFNAMESIESSISELGTIFRQLATLVSEQGEMITRIDSNVEESSLNVEAAHHELLKYFNNISRNRWLIIKVFGVLMAFFVFFVIFLT

SEQ ID NO: 122432 - protein, 216 aa, Heterodera glycines
WWQWQLLVHLAIIHVNQVKVIPPQKYLNVSETIKKMFHELGIKEYEPQLVLQLCDISYSLTKEILVDARSVSEFSGKKQVDRSDVDLAIKTFDEKHTNDRPPKAFVSELAAEKNALPLHPIRQNYGLRLPNDRFCQLQPNYIYIGDDPNNEDQAVHMEERPRQNGSSKFNAINNFDPESVSNLLMTDKNATQRKRPYTNGEMQKHTQEEDYDDEYD

SEQ ID NO: 122433 - protein, 176 aa, Heterodera glycines
MASPLQRLITCNSPQIGFVAGRIRFVPHFEKLAVSWSANSPKSEGAERFVKEFWPIIRENNPNIEYLLTRSHTECDPFVVGTFRWDRTRKQRLCWKHPHQILAIIEQWSIGGDYRPGRKRKVATIIPRGMQIIDNETKGHEVFKVFSRWKGEPTGNAMDPKKHPNYLYHLINEARK

SEQ ID NO: 122434 - protein, 321 aa, Heterodera glycines
MGEQMKLEGSLRGHNGWVTQIATNPLYKNMLVSASRDKTIIVWMLDESGSVLNGKPIKSLHGHGHFVSDVVMSSDGQYALSGSWDKTLRLWDLNTGQTTRQFVSHTQDVLSVAFSADNRQIVSGSRDKKIKLWNTLAQCKHTIVEECHSDWVSTVRFSPSHANPVIVSAGWDKIVKVWNLATCRLKTNHFGHTGYINSVTVSPDGSLCASGGKDGSAMLWDLNDGKHLYTLGGNDVINALAFSPNRYWLCAAVGPVVKIWDLENKTVVDELKLDIASTSAANPMRVSKKSCPQCISLAWSTDGQTLFAGYTDNIIRVWRIA

SEQ ID NO: 122435 - protein, 197 aa, Heterodera glycines
RRFAFDWILGTQHKLDVDVHVSDELDINAFFSTGELQPNEKSLPVDDTSAVIKERLWQEPNHEIVAKLLSMGFTENAAKKAALFTKNESAESAINWILQHSDDTDVNDPHPMLTKQSTPPLTSNQGQNASQKVRHGKGHYRLRAFISHIGSTPNSGHYVAHVKADNGQWHIFNDEKVAKSQHPPKTLGYLYLFQRAT

SEQ ID NO: 122436 - protein, 172 aa, Heterodera glycines
MSRPKVFFDITIGGKAAGRIVMELYSDIVPKTAENFRSLCTGEKGMGKSGKPLHYKGSKFHRVIPNFMLQGGDFTRGNGTGGESIYGEKFVDENFKEKHTQPGILSMANAGPNTNGSQFFVTTVKTEWLDGKHVVFGRVTDGMDVVKAVEAQGSQSGRASKDIMIADCGQLS

SEQ ID NO: 122437 - protein, 147 aa, Heterodera glycines
MALKRIQKELQDLGRDPPAQCSAGPVGDDLFHWQATIMGPPESPYQGGVFFLTIHFPTDYPFKPPKVAFTTRIYHPNINSNGSICLDILRSQWSPALTISKVLLSICSLLCDPNPDDPLVPEIARIYKTDRERYNTLAREWTQKYAM

SEQ ID NO: 122438 - protein, 210 aa, Heterodera glycines
MTSASSDQQDRVDGVLLSLATSLGGGVPELFDHIFSFLSRKTDFYTGASVDEARKIVLDAFEKHASGAKKEAEQKRMRKETEERKLAERRAAQKAKEEAEFTRVRELTDAEAAELQRKLDAEKLAEQKTTNADESMPINSSAKTSESGADGPTSTEEEKSSNKTKPNAGNGCDLERYQWTQTLGELEVRVPFPSLGFPLKAKDVIVEVKR

SEQ ID NO: 122439 - protein, 249 aa, Heterodera glycines
MSSSLDVFKLTDDDAMKFLVCESHIGTKKMDYQMEHYVWKRRSDGIHIINIRKTWEKLLFAARAIAAIENPSDVVVVSAQPYAQRAVLKFAAHIGATPIVGRFTPGSLTNQIQKNFKEPRLLVVSDPQLDHQAVREASYVNTPVIAVANTDSPLKFVDIAIPANNKQKHSVGLIWWLLAREVLLLRGKISRQTGFMVDDKLIMPDLYFFRDPQEQEKEGTEGEAEADITVKEGGWGATGGMDTMGGDFP

SEQ ID NO: 122440 - protein, 380 aa, Heterodera glycines
REIFHIQAGQCGNQIGSKFWEVISDQHGIQPDGTYKGESDLQLERINVYYNEAHGGKYVPRAVLVDLEPGTMDSIRAGAYGQLFRPDNFVFGQSGAGNNWAKGHYTDGAELVDNVLDVVRKEAEGCDCLQGFQLTHSLGGGTRSRMGTLLISKIREEYPDRIMSSFSVVPSPKVSDTVVEPYNATLSVHQLVENTDETFCIDNEALYDICFRTLKLQNPTYGDLNHLVSVTMSGVTTCLRFPGQLNADLRKLAVNMVPFPRLHFFMPGFAPLSAKGAAAYQALSVSELTKQMFDAKNMMAACDPRHGRYLTVAAMFRGRMSMREVDDQMMSVQNKNSSYFVEWIPNNVKTAVCDIPPRGLKMSATFVGNSTAIQELFKRI

SEQ ID NO: 122441 - protein, 205 aa, Heterodera glycines
ETFKLWRVRKTVMQMCHDRGYLVTQDELDQTLDQFKDQFGDRPSERRPGRGELTILVAHNDDPTDQMYVFFPDDPKIGIKTIKQICQQMQEQNITRAIIVVQSGMTPSAKQAIVDMAPKYILEHFLEAELMINITEHELVPEHVVMSSEEKAELLARYKLRDNQLPRIQVSDPVARYFGLKRGQVVKIIRASETAGRYITYRLCN

SEQ ID NO: 122442 - protein, 140 aa, Heterodera glycines
LSSTAAKTPVQEFGSEYLKRQMNLGRPLSPHLQIYKPQLTWVMSGVHRILACIMSGALLVGVFGFGICSIDFTSFAERLNSWNLWRPAFDMAKGTELASVYRSGYLVIGLSTLISLLIVANSKHLTKEQFQQKYKKEANK

SEQ ID NO: 122443 - protein, 181 aa, Heterodera glycines
  unsure (1)..(181): unsure at all Xaa locations
MNKTDDQLAECREIFCYFDSKGDEKINVKQVGDVLRALGQSPTESEVRKCCEHWTEPDTRISFEEFVPIFQTVSKSRAQYTKDQFVEGLSHFDREGNGTIAVAELKHLLTNLGERLSEEEVXATXXAGHDVANGFVSIDSFIETVLRFPLTPPDNEKCRRFRRPSAKRAKNCPFSIDNVSI

SEQ ID NO: 122444 - protein, 417 aa, Heterodera glycines
HIFTGEFGRIGAYEKQRPPFEPKNPFLATLTLNRELHSVASDRSCRHIELAVDKALIRYETGDHIAIFPTNDTEKVDKLGNLLVVELDTVFKLVNTDEESTKKHPFPCPCTFRTALTHYVDICSPVKSHVLKALVEVSADEETKAKLTLLSTASEEGLREYAQFIVKERRSIVDVLQHFPACKPHLDLLLELLPRLQARYYSISSSPRVDASLVAVTAVVLRYNTSDGRLVKGVCTNFLADRAPGVSTAPVFVRKSTLRLPHRVQQPVIMVGPGTGFAPFRGFLHDRLWHKQQGKEVGEMHLFFGCRHPDHDHIYKEEMEEFVRVGLLTQLHVAYSRLGSEKVYVQHKLWEARQQIWELIQAGASVYICGDARNMARDVQNMFYKIFAEVGGLSDQESQKMMKDMERQRRYQADVWS

SEQ ID NO: 122445 - protein, 288 aa, Heterodera glycines
MLNDDDFPALPNSVLQSNQSQQISAQQRLPSQHTHQNNSLLVNDDATNARLSRMKQQMALENSDKVGIQTHPDGRVTNIPSGMLNDQCVTNETNIRLQINSFPLRFAMDGLLTFLRTIESAPSIVGLALGHDLTNLGLNLNSSKRNLFQTFGGPWADFPCRIQDLDAKVPDEYLTNATIRDKLPNIKMNKLHEDVLFYLFYNCPGEVYQVAAATELYSRDWRFHKVERVWLMRAPFSAPPREIGGTYERRSYLVFDPIQWRRIPREMVLEHKDLEGKPSVPGTGQSSA

SEQ ID NO: 122446 - protein, 248 aa, Heterodera glycines
MPSTAIQKLLLAVSIFLIVAGIVLTVAGVFSPAWQVVDIREFRAEHQHGLWWDCIRAEKHVVAVGDFYEEAPLHCMYKFDESAALVIERALNHVDEDGAAGEAEHHRFWGWHKVVLSLILLSQLAAFVAVCTGVCAPYFAPSTFCFAISLFIAMLLSVLADGIFFFSANRVDIRFVTGMVGTYEQVIGYAFYLHLGGTLCWAFAFVCAIATTYKFLTSNGQQRKLFDDGPRLHSANLASVYRRPVVEW

SEQ ID NO: 122447 - protein, 234 aa, Heterodera glycines
MFEGPIKIWSWNVAGLRACVKKGGHKHIRESGADIVSLQETKCSEFPAEINALDEYPYKKLLMTNEKKGYAGVALLSKEKPIKVEEGMGDVDFDDHARYIQAEFAAFFLIAVYVPNAGQKLVNLQKRGRFDELLLNKLSALNERKAVIIAGDMNVAHQEIDLRNPETNRNKTAGFTDQERNAFTRLLDVGFVDVWRTRNPETTGAYTYWSYIGKRFADNIGWRLDYFVVSQRLF

SEQ ID NO: 122448 - protein, 162 aa, Heterodera glycines
MAFRALSFARRPFTTSSICRKEIDLVAGVYLNKVREVVGKQSEILNSPQLKKELNDQLNRLAQKFHLPDADAVAKLGLQFKGASVVSSVDQLVDGGQSVDAQLNALNDSRAKYEAEQKGKRQAEQERIGAISGDADYAKEFFPIPPPHIEAQQLAAAAKAAQ

SEQ ID NO: 122449 - protein, 215 aa, Heterodera glycines
MTEVFKRPALPLVPASGKRQRLSSEDVSLVSLGDSTRTGEQRASGLQCPIMLLTGHEGEIYAAQFSPDGTCLASVGYDQRIFFWNVYGECENFSTLSGHKGAIMDVHFSTDGSFLFTCSTDKTVRVWDMESGKCVRRFRTHTDFVNGCHPARRGPSLVVSGCDGGKIIVHDVRRRGPVATFESVNNYQVTSVTFNDTAEQIISGGIDNVLKIWDI

SEQ ID NO: 122450 - protein, 64 aa, Heterodera glycines
MSGRQGGKLKPLKQAKKDDKVLTEEDVEFKKKQMEEQKKLKEAAQKAAEKGGKLGGGIKKSGKK

SEQ ID NO: 122451 - protein, 218 aa, Heterodera glycines
MDFQNRAGGKTGGGGVASATDANVDRRERLRQLALETIDLQKDPYFMRNHLGGYECKLCLTLHNNEGSYLAHTQGKKHQANLARRAAKEASDVPDMPVPQQAKIEPKKFVKIGRPGYKVTKERDHASGQQALLFQIDYPEIADGVVPRHRFMSSYEQKIQPPDKRWQYLLFAAEPYETIAFKIPAREIDRSEDKLWTLWNRESRQYGMQYALRHMHDD

SEQ ID NO: 122452 - protein, 208 aa, Heterodera glycines
MKLLRLRSYLHFSCNLHVRNLTNLSKFGTYNEKAIQLIQQHYDEATSSSHQFVDSPSQEVFRMVLPPPNVTGNLHIGHAITVALEDAICRYQRLLGKKVRWTPGFDHAGMATEQVVQRQLAQRFGKQTDEMSQSEFVAHCEEWKEARIRDISGQLRSMACSLDWPDLFYTMDQNFSRAVRVAFCRVQSLGLIVRETRPVFTALSADEE

SEQ ID NO: 122453 - protein, 383 aa, Heterodera glycines
MGPKKAPPARRKAEPSEGEEEVKRKKAKRIVIEDEPEEEANGTGSQLQQNGHEEAMAPVVKGGDEEDEVVSEVGIYLLPLAPSDAGGIAKMANSAGAASSVSINRLQFPQQHPNVLRRRFNGALSGRGNAQDGEEEEEDQEEQRTDRTGRKLFAQYKAQVKHLRLGFGSDCDEEAMASAVMPTFAGGGGIAELLTKNHTPSSSALFSPPPSASASSSAIKRGSDLTSDEMFTGEGFSQQGLLNYAVGFFKKGRLFLLPVDKTFEMRKPLRGTIERESTARTTALKPSSSVFSTSTRSVAADSAPSGTASASSSSVAVAAPLRIRFARAENDLQRRRREQSSFYKQKLVEQDQWIPLKVEHRDLLEMYEKDINKVLLSSECPPK

SEQ ID NO: 122454 - protein, 275 aa, Heterodera glycines
MFTKLMPFLSLRQPLAVASYSLIQQARKFSTAVMTNYEMIKVERVGADDVVALITLNRPKALNALCSQLMDELAHSLTYLDKDDGVHAIVLTGSERAFAAGADIKEMVPKKFAEVFGGGFLENWSQVATVRKPTIAAVNGHALGGGCELAMMCDIIYAGEKAMFGQPEIKIGTIPGAGGTQRLARIVGKSLAMKMCLTGEPINASKALESGLVAEVFPPDQLVSEAIKLGEKIAANSPLMVGMAKQAVNRSYETTLQEGLLFERRLFHASFATND

SEQ ID NO: 122455 - protein, 123 aa, Heterodera glycines; identical to SEQ ID NO: 119521

SEQ ID NO: 122456 - protein, 205 aa, Heterodera glycines
MLKNNLLIRGKSVLFSLPLRAFSLSAQCANGEPIRRVVLIPGDGIGPEISSAVQKIFEAAKTPIDWDPVDVTPVQGRDGIFRIPNKCIELMHKNKVGLKGPLETPIGKGHRSLNLAVRKEFNLYANVRPCRSLEGHKTLYDNVDGVTIRENTEGEYSGIEHEIGSGGVQSIKLITEQASRRVARFAFEYARQNGRKEVTAVHKAN

SEQ ID NO: 122457 - protein, 206 aa, Heterodera glycines
MAAHSPGSSGDTSTPSLRKFLTDALVGGTAAGIAKTGMAPIERVKLILQSQDASSQITADKRYKGIVDVLVRVPKEQGFLALWRGNLPNVLRYFPTQALNFAFKDTYQRMFMEGVDKDKQFWKSFVMSLASGGAAGATSLCFVYPLDFARTRLAVDVGKADTREFKGLADCIMKILKSDGPIGLYRGFFVSVQGIIIYRGRYFGCF

SEQ ID NO: 122458 - protein, 194 aa, Heterodera glycines
MNRILSKNLFNRFFVGYENLPSCRHYPTLRSSANAPKPDDLYEPRFESDRKYPDVPLLNVLLQAYDFQPVEKFQAYVHWAAKHFGIQIVESYALAHTSELVKEYKAGSTIPVSQSVLKTYSRVVRVGPVPGIQLPLFIALLQAHAPVGMKIVVKKHSPRDERCRYIPDPQLEDFKETLRNLDDPVVRKLLGWEA

SEQ ID NO: 122459 - protein, 204 aa, Heterodera glycines
MSSKPAYKVADISLADFGRKEITIAENEMPGLMAMRAKFGAQKPLKGARIAGCLHMTVQTAVLIETLLELGAEVQWSSCNIFSTQDHAAAAIAKRGVPVYAWKGETDEEYEWCIEQTLIFPDGKPLNMILDHRGNLTNLVHHQHAELLPGIIRLSEETTTGVHNLPKMLAAGLLKTAAINVNDSVTKSKFDNMYGIRESLPDGI

SEQ ID NO: 122460 - protein, 186 aa, Heterodera glycines
MSKFEGGFSSHDSYGYGQMPSAFPSIGGAAPSAPPFGFSGAPIGSHAFGGDIPSPLDAEIQIVLREIQSEVHQLENSGEYGEQLKNARRLLATEATKLENNIDPEWLEVDINKPIKVSKKVLIPSFRHPKFNFVGKVLGPKGTTLQNIAKSYKCHVYILGRGSTRDRTKEQEMLSSGDPQYAHYCG

SEQ ID NO: 122461 - protein, 104 aa, Heterodera glycines
MADESGTNAGGAGAAGGAQPAEYIKLKVVGQDSNEVHFRVKYGTSMGKLKKAYAERTGVQVTSLRFLFDGRRVNDDDTPKSLEMEEDDVIEVYQEQLGGYIVEE

SEQ ID NO: 122462 - protein, 168 aa, Heterodera glycines
MASTTIRFCSLFKRLPAKTFVSCRTLSTSRPMFADILYTDKHEWLSLDEARSVGTVGITNHAQESLGDVVYVELPEIGKKLDSGDTAGAIESVKAASDLYAPVAGEVVERNAEVEDKPALVNKDCYGKGWLYKMKVSNLKELDELMSEQSYKNFLAEESNKDDETQHF

SEQ ID NO: 122463 - protein, 1023 aa, Heterodera glycines
MAILQNLNEKEAKIPTSVGVQLRILNSMPILANIEGQMKIKAESASLMSPLGIQFDVNTLASARLSQIQKMELWTPFASSGVESVRSAQVNLPLQAELNANSDQGISLKANLPKQKTQLASVHSLPITFTAKVDQNTKLVREPRQIVTIHDPKLERQQYELNSVQGQKNLAMPLHFRGHYHWPAEPTSYQQFAQLLLATENAVNIHYQPSRESPREAIFRVTGQHFEQLAQSEQPDAQLRNFFSEKFANAYSCDDEQCQQRGDCEQCEQIEQQQREDAQELEDQQMRQQSLHSFISAYKPRQQYKHSLKMVAQTNGGAKDAKAQGDIQAICDEQTAYCKVLVKVERPPIGNENQKWMLNAQAHVLMPETAASVEQLQTQPKQLKQFIAQAKAQWGQQGQQTQQVNIRVHGAQAHTQQVRAVLQQQQGSQLISAQHLRNMQRRSAFLNKFQIEAIYSLKANAQNAINRVLELFKSAYFWNTKSQLMSGQSAQKDGKIAATILIDPVTQKSANITIRTPAQQLRMEQIEVPYKVRPFALIRQRSAQQTHSLAQLFHQFSIKYRPQCTVDGRKVNTFDDLIYTAPLSSNCYSVVAKDCGSDQPQFVVLMKKVAQQQQQQTNKRAQNAAKVLKVITPEQQIECHPKTNAAGIPTQLICKVNGQQVTGDEQCQDSSSCVQFNNKQQDDVTIQTEAIAVRFNGRKAWLKVSQAYKNTQCGLCGHYDDSDDQGEELRMANGQRASDLAEFHRSYALEDAEECPQQVMNNFYSEQQQQNSEQDTFYGQFNQFEDEDEADDEQQQQSEKDEWQNEQFNGQFEEQNDGQVTDGGNPFEGIFNDQQQQQKCCCCCDDDEDEEGTNEQSQCRQNCQNGGECPEKCNKNDQKQCRKSSPPQPQQQQNCKGSDDEQCKGICNDGDEACAEQQQQWKAVWPILRTKTHEQNHAVCFSTRPVKHCPPDAYPYNPMNGYEQQQQPKTKKVSFVCMERAEPETRRLLRSLRRGQRVVDVNARGASFTENVSEPHQCWRRRY

SEQ ID NO: 122464 - protein, 216 aa, Heterodera glycines
MDDKSPAAIFAREFEHRQARDVDELRRIFHRHIEEESRNDEQQRHEKTAAPMLTTAPAMAAALPSARIVRTPHIGTNARENGTASLSAITPIAAAFRWCTPLANTPTVSRLTLPFRTPCFVHISVHVNPGHFFVQLPSHPTFSSLALLNQYMLTVYTHNQPGVGAPGLAKPYDVGVLCAAPAYNGWCRAITVAYDQDQDGMVGRFVDYGGFARLAR

SEQ ID NO: 122465 - protein, 211 aa, Heterodera glycines
MFQKVFLVLLFLLAFTVSNLRSDEGIGEMDANQKPLNSARILASKFTLSQYAVESMDLVMEYNLFNVGDRTAFRVVLDDRNSFPTHSFDIVRGMLHIRWEKISPGENVTHSVVVRPRSYGIFNYTSAMVTYYVTEDAKQATVGYSTAPGEGNIYRLKDYERRFSSKIGIWLVFLLLALPTTLLPFFLWYKFQQKYATKSGTSGQQNSKKAQ

SEQ ID NO: 122466 - protein, 165 aa, Heterodera glycines
MPPKFDPNETKIITLRVTGGEVAGGSALAPKIGPLGLSPKKVGDDIAKATQAYKGLRVTVQLTVQNRQAAISVVPTASSLVIGALKEPPRDRKKEKNIKHSGNLTLDAIIDVARQMRPKSMARTLTGSVKEILGTAFSVGCTVDGMSPKEVQEKIDAGEIEIPEE

SEQ ID NO: 122467 - protein, 241 aa, Heterodera glycines
DTSPTSGAGFLQQLLDFLSAENYGELATIVGRYYAMDRDNRWERIKVAYEALVAGEGEKCEPANAVQLVNERYANQQTDEFLTPIVFSDEARVKDNDTLVFFNYRADRMREINKCMGDLQNLQDLGTNVALPNGLHIKTMTQYNAEFPFPILFPPVTHKNVLAEWLSVQQVSQFHCAESEKYAHVTFFFNGGREVQFEGEERELVPSPRVATYDLQPEMNCEGIADKVRNGSIMFRDSLRS

SEQ ID NO: 122468 - protein, 201 aa, Heterodera glycines
MSSNGTVSNQIGNLSNVGAIGNWVEAVDQETAQKRIEFLKDGIKTVIDYVDEPDGSKSKVIATYKVINKKVPRVVAERKKWKKFGTSKDDGPGPNIITTYVADEVEVQFTNRGGEQDDRDDKLAEALLKGQSSKAHCRFCKSDDHWSVTCPYKDMFKETSEEEQQEADKGGAKQTPGRYIPPSQRGGPAGERTMMTGGEQR

SEQ ID NO: 122469 - protein, 231 aa, Heterodera glycines
YSLILYIFLHKMGREHRSDRKRDYEKEHSPLADESSSGSRKRTKREKNRSVSPARSRSHTYSPSPRREISPKRRARSRSRSRDLPSSRGGGGGGGGYYGSRRFHDGRDNPNPNPCLGVFGMSLHTTERDLKHLFGRYGEVDSVQIVYDRLSGRSRGFGFVYFTHTKDAARAKENLVDAVIDGMKVRVDYSVTRGGGTHSRHVRKSFSRSPVRNNRSRTRSRSRSESRSVSR

SEQ ID NO: 122470 - protein, 227 aa, Heterodera glycines
  unsure (1)..(227): unsure at all Xaa locations
VVELLPNDGDFLVRXTEEISGTERVYALSVNVGGFLNHVIFRRHKGMFSVDLNSDKGFRTIERFVDNYLRTGVSVTTQQYVALIRAVPRAHWELSHTSIILGNELGRGTFGVVKSGVYVDQQGTRAAVAIKEVSQTSTKEQIKEFMNEARVMRQLPHPNVIQFYGVAVGQEPLMIVMELATEGSLTNYLKHQRRSARVKLYMCLGASGGLDHIHSKGIIHCELACRK

SEQ ID NO: 122471 - protein, 213 aa, Heterodera glycines
LNPWEKQQPNNNNRQNKGKENGTRQPQAMPVGWVLGVRSKTTSINEDAGPSHPSTSDALSTTVKPPASTSSIASVLPPHPSFSLIQENGFEQRVYTDWRSQCKKQREALGYDIPEMHTLYRIWSLFLRDNFNRSMYNEFRKFALEDADHGLRYGIESLFRFYSYGLEKKLRPKLYNDFQEATLQDVKRGHTFGLEKFLASLKYCKHSTQIGGD

SEQ ID NO: 122472 - protein, 228 aa, Heterodera glycines
MQETHIVLGIASVCSLLAIIATVVTLPSLYSEMSQMNSKVRDGVEAFRVNTDSAWTDLMDVQVVVTPPSKPRDNPFNSIFRAKRQLPGHCQCAGLQQPSCPPGPPGPSGPPGQPGQPGGAGQPGQPGQPGQPGANGVVSRPIPGPKGPPGAPGQNGNPGSQGQPGQPGGQGPPGPPGAPGQPGQPGNSGQPGQPGAPGQPGKDSGYCPCPPRSSVLAVKKKMAAAKKA

SEQ ID NO: 122473 - protein, 186 aa, Heterodera glycines
DIVAILHLLITLALHYRAPIRFPNNVNVQVLIYTRHGKQISKSIVTEQLTTKQTELAPKGERDAFDTLFDYGPDKLQHVKNSLVAFCNKHLNKINLEVTDLETQFQDGVFLILLMGLLEGYFVPLYKFHLQVNNNDEKLKNVQFAYFLMEEAGMAKPKCRPADIVNGDLKSTLRVLHALFTKYKHV

SEQ ID NO: 122474 - protein, 269 aa, Heterodera glycines
MFYHDLHDNENSHDKELKQLVQMDDLAIPKFVMPPLGIKPKKFVRKHFGPNSRLPMAQFLKGTTTLSFVYKPKTPQDKGGVIVAVDSRATGGTYISSKTVEKIIPINDQLVATMAGGAADCQYWTRVVSKYCNLFELREGTQISVAAASKYFANVMYDYRGQELGVHSMVCGVDKFGPSIYMVEAEGTRVKIDTICSLGSGMLHAMSILDTKYKEAMTDAEALELGRKTIVYATFRDAASRGHCNLGHITSEGKTIYPPFDVNDKYYEF

SEQ ID NO: 122475 - protein, 212 aa, Heterodera glycines
MVNKFLPLIIFVFLLIDTAICRHHHRHSHHHHQQNEQPEMISVPLRRMDTVRARLALTGSLEQFRKHRTESLRRTVERMNNNYNNNEEYSSAESDQEQMEMAQNGARVGTEIDELLRNYMDAQYYGDISIGSPAQNFTVIFDTGSSNLWVPSKKCPIYDIACSLHHKYDGAKSTSYQPDGRKVAIQYGTGSMKGFVSKDIVCMANICVQKQE

SEQ ID NO: 122476 - protein, 157 aa, Heterodera glycines
MAVVSRMWYIGKETCKFFHGAVKVFFDPNWQIPKTKLDPRMPAYPTQLHEWLRMFPWRHYWAYYPILRNFCYVFASAFVVTSITQPTSVKITKEHVINHELHHIEAKMLHAYTQRKEDLKYFKENDVMAKLRPKNFARDLSMGDFNYFPWGYSFGAH

SEQ ID NO: 122477 - protein, 162 aa, Heterodera glycines
MHNILKRFFAHVSPSLLKKPLNDPFPIAAWRSHPANMAKGVKFDHDNAFVRFCRYYLWHYCWSGRQYGLQFYDQAFEPHPVVQEALRRLRLKDPYQYDLRLQRILLASQLGSKNERLPKNMWTKWDDETFYLNPYFNEIEEEKLEREASTGMKPGYQLKEQI

SEQ ID NO: 122478 - protein, 232 aa, Heterodera glycines
MLKQGDSNCHSKKASGSRYSELFECIRDNLLTFIKANMRQMLFDKISAVLVLDTLEVPSPSDPFLREIGDSDLDDCFRAIAEIATDEFVPHSPDGPSHIVQGGCARFVFRKLLQADPGRCDGHRLSDFLADLPADNLSSWTSMDCGCYTLVEVFKSGSDKARKVLRRALSVAMLQNSHLSGAKSLLDLLLGKGKEQPTREHSVANGGGAGRKNPRKAAAPFQKRRERKTNQA

SEQ ID NO: 122479 - protein, 133 aa, Heterodera glycines; identical to SEQ ID NO: 121281

SEQ ID NO: 122480 - protein, 310 aa, Heterodera glycines
  unsure (1)..(310): unsure at all Xaa locations
MSSESNMENFPVKLDMDYIKRLARIERTGPNTFNANFLVAGYRKAVNKDVFGGQMFAQAIAAAEATVDGDEFAPNAAHSMFIRKAFIDHPIEYIVTRTRDGRSFCTRTVEARQNGETVFCAQISLCVKERSSIEHQTEMPAEVPEPEELVPFFKTVRRVVTEHDEGRTERNGRTIANLRAVLEDEQQPSVFEFRPIHSDIFLGIRPHSPTPIRYWLKCAVPLGSERTNKALNRFLLAFITDATMASTANRAHASHNYHPSMVVSLDHIVHFHXDNFFADEWLLCENTSPIARNGRALTDGRIWNRKGQLL

SEQ ID NO: 122481 - protein, 232 aa, Heterodera glycines
MSLNTANTPDGRGVIIYSGEMILLFVREVNLSFDKFTNAAFKGTKKGNLYLTTHRIIFNNTETSSRGNFKSLSMPFGCIRNVKLEQPIFGANYLAGELVAQPDGNWEGEVNWKLTFNRGGCIEFGQALLKTSEMANNFCPRPANAPPPYAPPPGAYYSPPPAYYWSGGQFNGYQAPVHAFPEQPPPESVFMYEQPPPYAGIGPIRGQNPVPYPSNTPLYPPQQQPLPTNTPS

SEQ ID NO: 122482 - protein, 225 aa, Heterodera glycines
MNLRDQFSTNKYVAHRFMQLPTHNKVQVEYVWIDGSGENVRSKTRTVDFVPSKVDDLPVWNFDGSSTGQASGADSDVFIKPVAMYNDPFRMGNHKIVMCEAFDNKMQPHVTNNRARCKQTMDAAAKEHAWFGMEQEYTLLDVDQHPFGWPKAPFGFPGPQGPYYCGAGANKAYGRDIVDSHYRACLYAGILISGTNAEVMPGQWEFQVGPCEGIQMGDQLFMARF

SEQ ID NO: 122483 - protein, 103 aa, Heterodera glycines; identical to SEQ ID NO: 119330

SEQ ID NO: 122484 - protein, 133 aa, Heterodera glycines
MSGWDAYIQSLTSSCAEITRVAIIGNSDASVWARTEGENEFKASEPELKKLVGQFDDLSQVPSVGADLEGIHYIVPRTDENLIFGKRDKTGFFAVKTKSAILIAIYKDEESVVGADVRGAVEKMAKYLEDAGY

SEQ ID NO: 122485 - protein, 169 aa, Heterodera glycines
MASFLRFLACRHFSMSSVLRKEAEQLTNEHIDKIRQRTRFSETSAFHGRGSGGRTNGESGEDAFTNPFYIASYYDSKRFEAIRGVSIFASISLLLIYVAWFKEPNEVDELWDYDMRLVYFVAKKRVLKDQIEQAKKGGQGTVDLETDLINIEVQEQKIREEEEKKAKKI

SEQ ID NO: 122486 - protein, 222 aa, Heterodera glycines
MAVFVKDQNFVPEKRVDEAGHILNDPSKSLADRFRALFLLRSVKSDRAVHWICKCFSDPSALLKHELAYCLGQMQNPAAIQKLIFVLQDTEQEPMVRHEAAEALGAIGDPSNEHGLSKLFEQYSGDAVREVAETCLLALRRTQWVKEKGKDDTESRSIYDSIDPAPAADGGKGAAEVEQLGQMLVDHNMALWDRYRAMFALRNLNNDRATKALADGLLCDDS

SEQ ID NO: 122487 - protein, 225 aa, Heterodera glycines
MATEVDENTAVADPWSTVEDVSGGESMHQLVTLDVPEIKLFGKWSLNDVDVSDISLVDYVAVKEKAAKYLPHSAGRYQQKRFRKATCPVVERLVSSMMMHGRNNGKKLMAVRIVKHAFEIIHLLTGENPVQVLVNAVINSGPREDSTRIGRAGTVRRQAVDVSPLRRVNQAIWLLCTGSREAAFRNIKTIAECLADELMNAAKGSSNSYAIKKKDELERVAKSNR

SEQ ID NO: 122488 - protein, 201 aa, Heterodera glycines
MSLPVEIVNHDQSEAPKLFGKWSFEEVRCNDLALVDYIQISSPIYLPHTAGRYAAKRFRKAQCPVVERLTNSLMMHGRNNGKKLMATRIVKHAFEIIHLLTDANPLQILVDAIVNTGPREDSTRIGSQGTVRRQAVDVSPLRRVNQAIALLTTGTREAAFRNVKTIAECLADELINAAKGSSNSYAIKKKDELERVAKSNR

SEQ ID NO: 122489 - protein, 222 aa, Heterodera glycines
DKDSKMTSKTSPKMPRNYQIASGLQRFSKARMFHAKGMWVKLKKPFEKKAKHAQKAEKFVVKKIGGEKNGGERKVLKKKEPKLLPQVPSVQIKNKNRPKKVPLRKSISPGTVLIILAGRHRGKRVIFIKQLPKSGLLLVTGPLKLNATPLRRIAQAFVIATKTKLDISTMNVPEHLDDKYFKRQSGKVADRSKGGIFAEGANQQYAVTDQRKEDQKTVDSQV

SEQ ID NO: 122490 - protein, 112 aa, Heterodera glycines
MKYVAAYMLASLGGNGDPSPKDLEKILAAGGLEVDMDNVKAVLNAVKGKSIEEVIAAGQKKLATMPTGGGAAAPTAAAAATAAPAAAEKKEEKKKEEVKEESDDDMGFGLFD

SEQ ID NO: 122491 - protein, 212 aa, Heterodera glycines
MKPTIDLKQDISKYKERFQKLHHKREESRKINHEHVVEEDRRLKLPNNFEAKRKRQEWELEELVARKEAEERGEDYDRIKALGTQADIADKMEAAKRRKANPDTGFASYEAMSIRQYERMTNGIKPDMESYQKMKGVVGEDQFYASANTLIQGSHYPTDKALDKLSEDVHNQMKKRDQYHRRRMFDPDAPIDFINERNRKFNHKLERYYGKY

SEQ ID NO: 122492 - protein, 329 aa, Heterodera glycines
  unsure (1)..(329): unsure at all Xaa locations
MQQCSRLMSVRMKSSSIKVTLIGASGGIGQPLGLLLKKNPSIAHLALYDLVGTPGVAADLSHINTPAKVTGHLGPDQLVAALEGADVVIIPAGVPRKPGMTRDDLFTTNAGIVRDMAEAAAKTCPKAFMGIITNPVNSTLPIACEVYKNNDCFDPRRIFGVTLIDIVRAQAFVSKLKGMDXSQTKVSVVGGHSGVTIVPLLSRCTPKVSLSDSETKALTERIQEAGTEVVKAKAGAGSATLSMALAAEYFVSALINALKGQKSVQCAYVKSDVVEGLDYFAGPLELGPNGVEKILPLGDLTAYEKELISKAVPELKKEIAKGVNFIKQG

SEQ ID NO: 122493 - protein, 415 aa, Heterodera glycines
MVETAEQPAKKEDEKMETAEDEIDAEILQMSTDQIRERSLLLDNEIRIMRSEIQRISHSMQTLKEKTKENNERIKINKTLPYLVSNVIELLDLEEQQEEEGANIDLDAHKTKCAVIKTSTRATYFLPVVGLVDPEEMKPSDLVGVNKDSYLILEKLPPEYDSRVKAMEVDERPKETYSDIGGCDSQIRELVEAIVLPMTKKDLFINIGIQPPKGVLMYGPPGTGKTMLARAVAAQTKSTFLKLAGPQLVQMFIGDGAKLVRDAFALAKEKAPSIIFIDELDAIGTKRFSSEKAGDREVQRTMLELLNQLDGFQPNDDIKVIAATNRVDVLDPALLRSGRLDRKIELPAPNEKARAHIVRIHSRNMNVDKDVNFDELARCTDDFNGAQCKAVCVEAGMIALRRESHIILHEDFMDA

SEQ ID NO: 122494 - protein, 213 aa, Heterodera glycines
  unsure (1)..(213): unsure at all Xaa locations
MDTLFDVRNNFYLGAFQQCINEAQKVKCKSEEEKELKDAFMYRAYIGLNKCSVPLGEIDATDGNGSAALMAIRRFATFMSGAPEKRSEIVDQVAKEFETKKYADNEICLLISTLIFMHGEKTEEALRVLNRTASDSLECAALRVQCLLKLNRGDLAAKEVKRMQEMDEDATITQLAQAWLNMAMGRDKLKDAFYIXQEMVDKYGATPLLLTSQ

SEQ ID NO: 122495 - protein, 143 aa, Heterodera glycines
MLRQLDSVREYIQQLHARLLSLTDRFAQISPLWQRGEPISKPLPVMALCEYKSKDKIHIRQGDKYTLLDNHDQIQWRVRGMDDVEVVSTPGTSGATGATAVSQLIEEDEEKCARCATASATVRKIATSVESEELFLLSFVRLF

SEQ ID NO: 122496 - protein, 226 aa, Heterodera glycines
MMSSNEEEESGGSNDDQFSSPISPVSPIQPMSTDWSNAIDAQEMGAGGVGGGISSGSLHESLHELSPIWADSDLIGDTLSAVPDSPSDEDPYASTIYRPVSMVTPVAALPNPNPPSCSFGGPMESIEAKGPLELPTKTRLKVRIKRLDIVGSWRWVDGKEDACGICRTPFETCCMDCKFPGDECPLVLGQCKHPFHMHCIVKWTNTQSGQKPACPLCRQEWKFATS

SEQ ID NO: 122497 - protein, 208 aa, Heterodera glycines
  unsure (1)..(208): unsure at all Xaa locations
MGQNQPQGGGRKPGDDKGQDXKKKRKYHGPPVPTRIGKRKKGSRGPDTANKMPTVTPITRCKLKLLKYDRIKDYLLMEEEFIKNMERLKPQDERQEEERVKVDDLRGTPMSVGSLEEVIDDQHAIVSTNVGSEHYVNILSFVDKEQLEPGCAVLLNHKTHSIVGVLAEDADPMVSVMKLEKAPTETYADVGGLEQQIQEIKEAVELPL

SEQ ID NO: 122498 - protein, 251 aa, Heterodera glycines
MFLTRSEYDRGVNTFSPEGRLFQVEYAIETVKLGSTSIGIHTKEGVLLAAERRSMSKLVVDDSMSKISEVEKHIAVASAGLIADSRTWVEHARVEAQHFWFTYGGKIRVEDITQKVSRLALHFGDDDSTISLGRPFGVSMLFAGIDHTGAHLFHLDPSGTYIKCLAKAIGAGSDAAEQTLQEHCKNCDKKMEMAEAKQVALNTLKQLMEEKINSKNVEIVMIKPQTDKEGKTLGKIVWLEESELQEIISRL

SEQ ID NO: 122499 - protein, 227 aa, Heterodera glycines
  unsure (1)..(227): unsure at all Xaa locations
MEFKGEEWSDNPISECRMAELVRHFFALGWMCDNGSGMAVRVKDERTGEHLILNSXNSLEKEIFSENDLFVMKMNGEILKSPSKSDRSPTAPFYLLRDNPDLACVIHTHSKWANLITQLIRGDEFKISNQEMIQGCENRLTKSRLDNIDVLVVPIVQTEINEHLLYPILLRTLKQNAGASGILVRGHGFFCFGSNSWQSTKMMLECYEYLFELACEMLNYDLPLVKS

SEQ ID NO: 122500 - protein, 177 aa, Heterodera glycines
MSTWIHCNHCFIVPTNDCNKTRFWFTSCGHLMCAKCLKAKRSNNNNGQHFECLLCHQQNVQLVELNRHLRPELLALFRPAKDLIDEFNAKLKQVLTFQQSHQKRLVDHLTDKAQRATKWAQSVQKDMQKVSAERDKLKLDLEQSNEKSRKTEEMLANTRHELQRLANKFHQQHHRGN

SEQ ID NO: 122501 - protein, 383 aa, Heterodera glycines
MCPSNCFSLLFLLFCLFFVPSSVFSSFCGKSGVPYSFEVLSNGAPVLGCAQPSCVISATDSEGDFHEDSQFFTNADGQPDGFFRDGDRALKRYRHSTAPKLIANCSGQFGELSCPRKNQWVGGIEYIDHPRQPLILQCCTFEGLRFSQEVGSTTVGPGEAITGGEVVRGGRQISFDVIANVRKVSKSAEGETAGKVRYEVTVRRMNCLPDPPEVEVEFDGEVPMEVSKLLGNAKNKEVTDKVNRAGGTQQQQQNGSRKKVPMRQKSRKDGQPNAKQQQQQTASMGQRKQLQSLQQQQQVELQEVTGGEGERQPFGRNNEVAIQPNNGQMPRKNNHRPQKQQQQQNEAVQGDQQQIFNGGEGQHAIKFIEQNQHNLGTHFAEQQ

SEQ ID NO: 122502 - protein, 213 aa, Heterodera glycines
LGRDEQPDADSGQTMEFNYVVMSLVGRPMDKLLHESGDRFSPGTAIGTSIQLLKALKALHSVGYLHRDIKPANSAIGTPETNEQRLLYLLDFGMARKYVREDGTHRRQRDTARFRGTPIYAPISAHIKRDYSRRDDIESWFYMLIKFYKGSVPWNSLRDKNEIGLYKCRRMEDQPPEVRRQAIDELTAGCPPEFTEILSYIDRLQPESRPDYE

SEQ ID NO: 122503 - protein, 152 aa, Heterodera glycines
MDVATVVDEYIDSSDLERFRKTYEEQSRRGFPSAMAVFNYAHALIKSTKDDVSTGIFLLESLLKRSEEDIPKRDYVYYLAIAHTRIKEYDRALEYINLLLSAESDNHQALDLKELIEKRMKRDGLLGLALTVGFGGAAVVGVLGAALLARKK

SEQ ID NO: 122504 - protein, 297 aa, Heterodera glycines
MSEKDVPLAFSGPVKFVSNALAGGTAAVVTKTVIAPIERVKLLLQAQDASAHITADKRYKGIVDVLVRVPKEQGFLAFWRGNFPSIVRYFPAQALNFAFNDLYKGILSKNSSSKNGQFLGSFASGAAAGATSSLFTYWLDFARTRLALDIGRSRESREFTGLADLFAKIWRSDGLFGLYRGFSVSIWASIIYRACYFGFFDKAKAYASSDGKRPLSFLERWLIAQGVTMASGMLAYPLDTVRRRLMMQSGHKEHILYKNGRDCARKIFASEHGIAGFYKGGLSNILRSTGGRFWCSS

SEQ ID NO: 122505 - protein, 183 aa, Heterodera glycines
IRPIVSLLSRSISPHPSLPSVSFSSALLFTSFRDFSSEFQRHTEACPNNPKMTASRRLTRAEVAEHNNSSDAWIIIGNKVYDVTKFLDEHPGGMEVLMEKAGEDRTEAFEDIGHSTDARQMKEDFLVGEIVESEHWKYSYDKRETGADKTMDQSEKRNSPVEMLVYALLFAVIVAIIYYLLLA

SEQ ID NO: 122506 - protein, 144 aa, Heterodera glycines
MEIDSHPSAAVQPEPAPIEHQQQNNTRILPKSKKWWKKALNIRPMANSSTKPRSSWERKMQKKGEREQCRAVEAEIRQRLADERNARAQALKEREQRRKSNERKAEVVQVIRNSAKLKRMKRKQLRTTVQMRDTTATTSDGKQK

SEQ ID NO: 122507 - protein, 321 aa, Heterodera glycines
MPMLAHFGSFQGQDVFECQLRSESGVVVKVISFGAIIRDWLVPTPQDQLRSVVLGFDSFENYVEHSPFFGAIVGRVANRIGRARFTVDGKEFLLTPNEGKNQLHGGTETFGRKVWKMEPLCDNAAAKWPSGVRLSLESADGEGTFPGNLRVSVTYRLTTNKLRMDIEATSDLPCPVNIVQHNYFNLSGHGDIREHSLKLAADWFTPTSSDQIPTGEILTVSGTELDFREEKKLQTKDGKPIELDHNFVLTKGKGTDAQIAAVLRAPDNSLALTLRSNQPGLQVYTSKSLSVPVPGLYGQRYAKFGGICLEDQNFPDAVNHE

SEQ ID NO: 122508 - protein, 210 aa, Heterodera glycines
MGISQDRWHKRRKTGGKRNPIHKKRKFEMGRPAANTKIGPKRIHLVRCRGGNIKHRGLRLDTGNFAWASEGCTRKTRIIDTMYNASNNELVRTKTLVKGMIVSIDAIPFRQWYEAHYALPLARKKGQKLTEDEEARIGGAQKRSKSTLKKYTERQKTAGVEPHLLEQFQAGRLLACISSRPGQSGRCDGYILEGKELEFYNKKLKAKKAK

SEQ ID NO: 122509 - protein, 299 aa, Heterodera glycines
MRPLALKGHERAITRVRLNREGDILFSASKGSAVCAWYTENGERIGTYEGHSGVVWDIDVSWDTQTMVSASGDQKVMVWDIETGVSKGFSEPGSVVRSIGLSYSGNLVVFTLNKPTTGGLPGIVVADLRDKMTQPILRDTFDDQCNACLFSHLDDHIVAGDHTGQLAMWDLRQPGAASNFTHPHKYQINDLQITADQTFIITASKDKTAQLHSAHDLQHLKTYKSNRPVNTASVSPSRDHIVLGGGEEHMEVTQTATTAEQFVARLYHLIFEEEFARFRGHFGPINSIIFDPTGDIVVS

SEQ ID NO: 122510 - protein, 225 aa, Heterodera glycines
MLPAIKPANSDGIVLDALPYIDDQQYTDEHRQLALQLIQAECKKFPMTKNYLRNLPEPDYDKFTTPRIMEHQAKMANKQEIEKIDLLRYEVPSPANTSRSGNKKAWLGAIDNCRAQLSNQSLRKMNLELLDEFGPEAFLRSNQHLKKQVEKEEAELFKLRSQLYELNARRKRSQLDAGERLAALGQTWVELVTKNAAMVVPNDKLENQIRTLAKLCKMDSGICKK

SEQ ID NO: 122511 - protein, 295 aa, Heterodera glycines
DGAIMCGRFSQLAGIKGNGHAKAHFESTGFPLVVKLGTIENGDGDIYSYNEDAPVCDPWLGQHLARFGLDIKKFRKTEKTTLEIELDANLKHEFSAIQEEGLELVNVSGPGYTGLINLGSSCYINSALQVLLIVPDFVRAFTEELLLRKQPPEINEDFAAQLAKIFVAMKSGDYSREDNKHGAEKEKGIRPTTFRRIVGRNHPEFSTAKQQDVEEYVRFLFEKVDACSDLSSENPVAAFRFRLVTRFLDELSDCVRYSFRTDNILSVAIPMDLCKESDTVVNGVRRKSVTLEQCL

SEQ ID NO: 122512 - protein, 199 aa, Heterodera glycines
MSSSSKAFIGKPAPNFMADAVVNGDFKTISLEQFKGQYVVLFFYPLDFTFVCPTEIIAFSDKAGEFKKIGVQLIACSTDSKFCHLEWINKPRKQGGLGEMNIPVLADTSHKISRDYGVLMEEAGIAYRGLFIIDDKGVLRQITINDLPVGRSVDETLRLVQAFQYTDKHGEVCPANWQPGTDTIKPDPKGSQAYFDKKG

SEQ ID NO: 122513 - protein, 86 aa, Heterodera glycines
MTLAVDLLNPSLESEKRKHKLKRLVQSPNSYFMDVKCGASGCSAINTVFSHAQTVVLCSSCSSVLATPTGGKARLTEGSSFRPKAQ

SEQ ID NO: 122514 - protein, 191 aa, Heterodera glycines
MNFLQSDSFSFIQGPFKERNDERNTTFDHNQLSKEAEGFKENIRSQISTREARKQAKDTTLALAAANLESNGRIQLRNRRILRGHMAKIYAMHWASDSRNLVSASQDGKLIVWDSYTTNKVHAIPLLSSWVMTCAYAPSGSFVACGGLDNICSIYSLKTREGNVRVSRELPGHTGYLSCCRFLDDNQIVTS

SEQ ID NO: 122515 - protein, 147 aa, Heterodera glycines
MSLTTKLRRLRKKPPEGWDLIEPTLEEFEAKMREAETEPHEGKRRTETVWPLFRIHHQRSRYIYDLFYKEEKISRELYQFCIDARLIDAQLVAKWKKPGFENLCCLRCIQTRDTNFGTNCICRVPKSKLEAGRVIECVHCGCRGCSG

SEQ ID NO: 122516 - protein, 130 aa, Heterodera glycines
MKFSKDVSSSRRKSRKAHFTAPSHVRRVIMSAPLAKELREKHNVRSMPIRKDDEVLVVRGNFKSQTGKVVQVYRKKYVIHIERITRDKVNGTSVPVGIHPSNVVITKLHLDKDRKALLERKAAGKAVQAE

SEQ ID NO: 122517 - protein, 221 aa, Heterodera glycines
MSNSFRILSLFCPLFLLLFVPETSRALYFHIAETEKKCFIEEIPDETMVMGRYKVQLYDPNTKAYGDYPTIGMHVEAKDPEEKVILSKLYTSEGMFTFTSHSPGEHLICLYSNSSAWFSGAQLRVHLDIQVGEHAQDYEQVAAKDKLNELQLRVRQLLDQVEQITKEQNYQRYREERFRQTSESTNSRVLWWSVGQTIVLLLTGAWQMRHLKGFFEAKKLV

SEQ ID NO: 122518 - protein, 370 aa, Heterodera glycines
  unsure (1)..(370): unsure at all Xaa locations
MGVHNELQLEGCNFXRQHIVFSLLTGRTITITKIRSYDDNPGLKEFERIFLSMIKRLTNGTELKLSKNGTELSFRPGLIHGGELEFDCGVQRCISYFLEPLILMAPFCKKPLNVNLTGVTNSVDELSIDAIRATWLPVFSRFVLADQCTEIKIKARGFKPSGGGSVTFSSPIKRNLRAVQCIKPGKVCKIRGLAYVCKVTPSIASRMIDGAKKMLHGNISDIYITIDQRKGPQGGLSPGFGIFLTAETTEGVFFHGEAMSRPKGQNEDQTVPEEIGEQAARRLLDEIHMGGCADSSCQSLAATFMTLCDRDVSKFLLGPLTINSVHTLRNLQMFFEQMFKLEEWWKVMKEIVGKGGNAMKNGSEDKCLMT

SEQ ID NO: 122519 - protein, 165 aa, Heterodera glycines
MAGIAAGRLTEERKAWRKDHPFGFIARQCKKEDGTLDLYNWICAIPGPKSTIWEGGLYKLRMIFKDDFPSTPPKCRFEPPLFHPNVYPSGTVCLSLLDENKDWKPSITVKQLLLGIQELLVSPNPEDPAQAEAYQIYVQNRPEYERRVRKQAQQFSEDQVLKQLL

SEQ ID NO: 122520 - protein, 51 aa, Heterodera glycines
MAAHKTFIIKRKLAKAAKQNRPLPHWARMKTGNRIRYNAKRRHWRRTKLKL

SEQ ID NO: 122521 - protein, 209 aa, Heterodera glycines
  unsure (1)..(209): unsure at all Xaa locations
RHNDVAAHKNHYQTLGVSRDASAKDIKXAFFELTKKHHPDMNPTDKTKAAEAFQNITDAYEVLGSEEKRQIYDTLTAPKPQAHFGRTPNFRRTRSNHINMGPAGGHKDWTDLDIDFRDFEHFQRENRRRQTFKDWARANTKSEFYWSSHQSSKSYKSPLALERENLEKKMHDEVMERRRRSATIPMFDELQRDKQKREQEERKKRMKNY

SEQ ID NO: 122522 - protein, 178 aa, Heterodera glycines
MEEIVQSAANGGISSTAPDQSSESRFNQLERNLELFQENARHMGVIASDFTSKSQEPLNQKIHTLISGLQVLDQLKSQFTDVRVPIELLDYLDRGQNPQLYTKELLERTRQRNKELNGKTEMYRKFQACLLQELHREMPSDVEEYVRIRKPSGMNGAAAGNAMANSAMAAEETQHAME

SEQ ID NO: 122523 - protein, 262 aa, Heterodera glycines
  unsure (1)..(262): unsure at all Xaa locations
MSLLSFEGRVALVTGAGGGIGRTYALEFARRGAKVIVNDLGGDRHGKSASTSAADKVVAXILAAGGKAVPNYDSVENGDKIVRTAIDNFGRIDIVINNAGILRDVSFGKMSEFDWDSVMKVHVKGAFSVTKAAWEHMRAQKYGRLVFTSSNSGIYGSFGQANYAAAKMALIGLSNTLALEGAKYNIASNVLVPTAGSRMTQTVMPEELLTAMKPEFVTPLTVFLAHESCNATGRVFEAGAGWYGTVEHVHSRGRRIAEPTVE

SEQ ID NO: 122524 - protein, 194 aa, Heterodera glycines
MVATFEKLVKTDGKAPDDLEKQVATALSELAHNSEIKAQLSELYFVGAQEYEFGNKKCILVWIPVPQLRDYQKIHPKLVRELEKKMSGCHVIFIAKRRILPKPQRGKNRKPLGQKRPRSRTLTAVHDSILADVVFPAEVVGKRTRVKLDGKQIIKVHLDKAQQTTVEHKVDTFSHLYKRLTGKDVVFEFPEPLF

SEQ ID NO: 122525 - protein, 202 aa, Heterodera glycines
  unsure (1)..(202): unsure at all Xaa locations
MIKPVNTLKSLMRTMTDCRWMASVPMAFEQKVSMAQPQQSMAYLPDIETLTKGKVSPTILKPYIDPTLCSSHPNSFEREVTVRRMLDARVHLGHKVGTLNDNMKWALYGERLGICVFDLEITRHYLLKALEFVRSVALXGGRFLFVSTNKSSMLMVETMADEMGQYAHTRHWQPGTFTNSKSVFRGPIRLPNTVILLNTLTS

SEQ ID NO: 122526 - protein, 660 aa, Heterodera glycines
MAPSYPLASLYVGDLHPDVTEAMLFERFSNAGPVLSIRVCRDAITRRSLGYAYVNFQQPADAERALDTMNFDMILNKPIRIMWSQRDPSIRRSGAGNIFIKNLGKEIDTKAIYDTFSMFGSILSCKIATDIEGGSKGYGFIHFETEEAANSAIAKVNGMLLDGKKVFVGKFVPRTAREKQIGDPSSRFTNVYVKNFGEAMDSEKLSEVFSQYGEIISAKVMEDDSGKSKGFGFVAYKDHESAARAVEKMNEVSVPGSEKVEQKFTVCRAQKKSERQAELKRRYEQYKAERIQRYQGVNLYVKNLHDTINDETLRSNFESYGNITSAKVMCDEHGRSKGFGFVCFEKADEATKAVVEMNNKIIENKPLYVALAQRKEDRKAQLASQYMQRLAAMRMQNPAGLMGTMYAPASGGFFLPQAIQNQRAAPFMQTPNLSGAQMRGAVPRWNNMGGFNHPMQGYMMGPAVGGQFGGANQIARGGPRSGGMGGGGGMRQYGGQPRQQQNRMPGMGGGHQQQGMRYQGQPKGMQQQQHQQAQQPQIAYSSYPQQQSRGMAPQMGGGGGGGVKAGHAITATHQEPLNTQMLTEADMTGQKQMLGERLYAMVARCFRDGDVEKVGKITGMLLEMENAEILLLLGDEEMLRLRVDEAATVLYQATCHKEAQ

SEQ ID NO: 122527 - protein, 175 aa, Heterodera glycines
MSSLIRGEIQQFASFANVFHWFDELHGCFRPLHSFNQLRIPWLSAHLATSSLNAVHLPLSGKQILDVGCGAGILSTSLCRRGALVTGLDADKSVLEIANGYKETMAPSLRKKIEFIPGTIERLAQEKDRIGTFDAVVSSEVVEHVSDLPLFIRSWCKLARPNSPIFFTTINRTIW

SEQ ID NO: 122528 - protein, 218 aa, Heterodera glycines
MTQFLPDNLLALFAPRPPIQFKPPPDDLFIHRKHMQMGGMAECVHGFEDPKDTPPKPKIETREEKRARKRKEKEELMAYKIEQGIATWTPADNPKATVDPYKTLFIGRINYETSESKLRREFEKYGKITKIIMVHDKNSKPRGYAFIEYAHKSEMSAAYKKADGTKIDGRRVVVDYKRGRTQKKWLPRPLGGGKGGPRPMRESKAKMLARELARKGGG

SEQ ID NO: 122529 - protein, 172 aa, Heterodera glycines
MFSIVGKKVFNTTSCNFLSKAFYAHMSKDEIMWHWPAQKFDQHFIDYLNKPDIDGWEIRKALTELGNFDVVPDPKVVEAALRAIRRVNDFALAIRFLEQIKYKCGGPKSRSIVYPYIIQEVKPVMDELGIPTLEELGYDEPEFFTPDPEWYWEKSWYKLYGFDKLPGYKHLA

SEQ ID NO: 122530 - protein, 216 aa, Heterodera glycines
MTSKMVAVITGASSGLGKATAVLFARNGYHLSLCGRNEKALEGVASNCLAEGGLTREQVLTIIGDVCEEKTLQNIVKRTDESFGRIDVLVNCAGVIASGGAENTPTSVLDGLMNVNVKSMIRLSQLVVPYLEKTKGSIVNVSSIAGICAFPAVTYYCISKAAVDKFTECLSMELAPKGIRVNAVNPALIVTELHLRSGMPEEQYSDFVRRGAQTHA

SEQ ID NO: 122531 - protein, 294 aa, Heterodera glycines
MTNERDFSHDDHINNAIGTNGDSKDAAKRKDICRDFLNNICSRGNRCKFYHPEDSVEKNQNSADEPYQFCIDFQNQGCYRENCRYVHAFREDVDRYKRSGDVTLGLARALAALLKGDTINGIPLCKEFQNGHCARGPQCRYWHINRDEERRKRFGGGRNCGGSPSSLAFGAYPAVPPAGAQLSRRRGDEFVSEDFAPPSKRSFAHNQPFATIPGQMAPTSAPTAPSHPSPQLVIELERRNAELTTEVESLKRELNREKERYDDLMSLFRAAQGQPTVQRSVISTPSLVPANLQP

SEQ ID NO: 122532 - protein, 360 aa, Heterodera glycines
VHLSEKCTRENKQGEKQAETRAQLKDDAFLREIHSRLKPGIENSERRFDVHKFTCAALELPDFSDFARLRPLIDALIAELDLNDFLGCTAALEMLAETAATAPKCVPFFGQIGLLDKVYALFIRTKEEPDMGIIHIACIRFFAYLCTTDDNALTKFPKFTADVFDAVFRFDAFDVTRRQLAFETLAVISSTSGAKQIFSQNETLYNMQRAMSNLAVAVATAAEPSLKARHLEAVRMFFDRIADESGCQPEQKCTTASAEAEEQLLHRWFRWLGEPFPRLLLQCVRDPISEVQLAALRVLMALTRHQWAYAHFCAITDFVNLLVDRSVNFDADAMQLKYALICRLVEAAPSALNDGQMEML

SEQ ID NO: 122533 - protein, 191 aa, Heterodera glycines
MKYAQLVVGPAGSGKSTYCAAVQLHCKTVGRTAFVVNLDPAAEQFNYDCAVDMRELISVEDVLEDEDMAMGPNGALVYCMEYLADNLDWLHSHLNEGEDDYFLFDCPGQIELYSHLPVMCQIVQALREWNFNVCSTFVMDTTFCLDSTKFMSATLTALSTTVSLQTPAVNVLSKMDLLRPEDRRTVEEIVD

SEQ ID NO: 122534 - protein, 154 aa, Heterodera glycines
HLGNTTQTQRGEGGGDLSADKLREINSLIAAFPSSIGQTPPDSALGTALNNMMVQWNSLLSQVVTEVDHPQPILEHIKETAEFSVKQFRDACLGMISELTRTSVDWQLNFPNEMAEQEISEYENSIRRQEQLLGKIRQKLDDEILSGENSNFVP

SEQ ID NO: 122535 - protein, 154 aa, Heterodera glycines
  unsure (1)..(154): unsure at all Xaa locations
MNFRPFAFLSLRFSSSSSASSSSLLPSYRKAIVHPIVRVDHAGELAADRIYAGQLAVLPKTHRLVPIIEQMRREERHHLDEMERLIVKYGVRSTALAPICSVAGFMLGVGTALLGEKAAMACTIAVXEEVIGQHYNDQIKELMADDANANRELM

SEQ ID NO: 122536 - protein, 350 aa, Heterodera glycines
ETQIVVGVASVCSLLAIVATLVVVPSLYSQINEISLKVHDGVQAFRVNTDSAWNELMEVQITVTPPAKPRENPFVSIFRSKRQLPGHCQCAGVQQPQCPPGPPGPAGAPGQPGYPGQAGEPGQPGMPGQPGAPCPDVPHVCQHCPAGPPGKPGDQGPAGQAGQPGRPGQPGQSGGVGPPGPPGPQGQAGSPGRPGGSGQPGQPGQNGVVYKTVPGPKGQPGQPGAPGQPGAPGRPGKPGDQGQPGAPGHPGQPGQPGAPGQPGHPGAAGAPGKDASYCACPPRSGGGYGVSGGGGGGAKVEHAPLPAEQAPVPEQPAESVGVAPAPAEVASNAAGGQGEAEAAKGYRKKM

SEQ ID NO: 122537 - protein, 249 aa, Heterodera glycines
  unsure (1)..(249): unsure at all Xaa locations
MESSNEEQQLQEIEALESMYSNELRVLCRDFPNISVELDVRPDLDEFTELFGKSVISLRATFPSDYPNCFPVIDLPDFDGDDDENTLQKTQFWDECERRVRSELDKVMEDCVGMPMLFTLLGALQEFFVQMADDYLKNRDELERIKADKIEREERAKFEGTRVTVESFKKWNDAFLKSVRVPQEKTKDNQTTKRMTGKQLFLSDNXLNISDLQFIGNAKDENAVEIDQSLFEGDIDFDDDDEDYXPEAD

SEQ ID NO: 122538 - protein, 274 aa, Heterodera glycines
MPEKKPTKCLSKGKELPCGREIIQDFVMMMPGSMDKYHQLCSILSSFELWSEESRTSFLSQFLDSYDILDVNCSDLVLKLCKIRWHTVPPQMLSQFADFLCALAINHVHHINSVFNCFVDHFLPIGNAKDPSNFEAHRPPAVVDDHFQESLYALANLSIQNVVSCNPLTTPLLLKCFVKRFPHIKQPSPKLLAFMRNVLRFADWIRDEEISAEIWSLIVEKLLHIDALCFEREEEEQRPTHSNRLKQKKLDNETASEETTNPMREKLNTLVEFI

SEQ ID NO: 122539 - protein, 243 aa, Heterodera glycines
MERLFNTPISSLSTNTSNCTRNTICLGFLDGSIQCFSFDTQRGITPSMESSVKLGGMWRKRMKRSVRAMQISEDGTSLYATSSNRAVCLYDVETGKRVRCIREGHKSRPSAMALLPGERRHFATGAENGEIKAWDFGQPKPNVHTFGEQADIINALHIWRNNLLAASGDGTLAVYDTHKGKVRIQSETMHSELLSLAVTERFTYVGAADGHIEVFRHGQFGNIRERMETPFLMGVEQMVVLRN

SEQ ID NO: 122540 - protein, 228 aa, Heterodera glycines
MAAQLASALSSPDYYNCQMQPGLTRRQRDICVRHPSAMRSISDGLRAAIDECHAQFERERWNCSATFNVGVPSEEDSTPETAYVFAISSAGASAAVARACARGEIPECGCGGGEQTVINSPDVEGLSGADPQQFIWAGCSDNIRFGNQFTRKFIDTAEKKRSDARSLMNLHNNRVGRLLLATNMRKKCKCHGVSGSCVTKTCWKTVPTMEEFAALLKQKYTNAKQMAL

SEQ ID NO: 122541 - protein, 224 aa, Heterodera glycines
MGGEGSGRSGGVSPECLYAVLGVQKGADEAEIKKAYRRLALKWHPDKNPERKEKAEKMFKRVAQAYEVLSDEKRRTDYNRHGMCRPAEAAFASAHRRRTAPADSHYAHHQSHPFHAHFRSPFDIFREFFGDPLSSSDFHRSPFFAFPANGGMKQRRRHTTNLFGDGAFGAHFAGKDENNCEFSTVIRFSTSSKDPGKKIKKTITQTRLVNGKKIVTKKVEDNGQ

SEQ ID NO: 122542 - protein, 110 aa, Heterodera glycines
MAKHHPDLIFCRKQPGVAIGRLCDKCDGRCVVCDSYVRPCTLVRICDECNYGSYQGRCVICGGPGTSDAYYCKECTIMEKDRDGCPKIVNLGSAKTDLFYERKKYAFKKT

SEQ ID NO: 122543 - protein, 95 aa, Heterodera glycines; identical to SEQ ID NO: 121066

SEQ ID NO: 122544 - protein, 172 aa, Heterodera glycines
MSEKKVKKVKKKSRTGSEASSFDQKTIQEFKEAFGIMDQDKDGVISKQDLKDLYATLGVVASDSQMDNMLKEAPGPINFTVFLTLFGERLTGTDPEATIIGAFQMFDKTDCGEITEETLMKILKNKRGEPLTEDEVQGMYKGNPPISGGKVDYKAFAHLITTGAAEELAKVG

SEQ ID NO: 122545 - protein, 65 aa, Heterodera glycines
MDKPIKLAKVTRILGRTGSQGQCTQVRVEFLDDTNRSIIRNVKGPVREGDILTLLEAEREARRLR

SEQ ID NO: 122546 - protein, 238 aa, Heterodera glycines
  unsure (1)..(238): unsure at all Xaa locations
MSDDYRSSIGPRPAFNRNSTAYSSTGGPVSGGNRVLKIVTETMSSSTSGGGGGMSPFGANAAQIRDSRDREKKELSDLNNRLANYIQKVRFLEAHNRKLKADLDMLQGRRGKDTITIKTMYESEIQTAKKLIEDTGRSKHELEQDVAKLQRDLDXQRRKYEEAVRSRAGDREKLDDLLVQLSNLEAEISLLKRRIALLEEELSKLRKENSRLQADLQRVRAELDQETLNRIDYQNQVQ

SEQ ID NO: 122547 - protein, 310 aa, Heterodera glycines
MALNNCFTENRYPNECILSYGSIAVSDPLDAFVCCRFSIHEHQENICAFGTEYGRVVICDVTAPIKGEDFIKHRFATGKNAVFDLCFIPDRPNLLLSLCGASNLELLDIERSSSIFLLGHRDTVRCASVWPENPFCVLTGSRDGDILLWDLREKPLKREIGRKSVSNSVSSLRRYQTAHEATIAITGLLHMSENYFISSSSSSSSGIRIWDLRYQIASSPIRSLFVPQKMSKESGVASMCWDRFRSSFFALCTDNAIYEYVPSLNSSFPVRSLRTNFVNSFFVQCAASPFSDHLLCGSSFSKAFIWDLQF

SEQ ID NO: 122548 - protein, 156 aa, Heterodera glycines
MSYGDYQQRPRGCFNCGSADHQARDCDQGVKCYNCGGTGHTSRDCSEPRKAKTCNNCNQEGHIARDCPDAPAQSARSCYKCGEVGHISRDCTQGRFAGGDRMAGRNCYKCGEAGHISRECPQNAGGDSSWGGNSGGSARACYKCGQEGHISRDCPP

SEQ ID NO: 122549 - protein, 164 aa, Heterodera glycines
MVFDPKSKDKARELGSYRDMRFEGSLPEQERRLAQSTTLYIGNLSYFTSEEQVWELFRRAGDVRRVIMGLDRFNKTPCGFCFVEYYTREDAENALRYISGTRLDDRVVRCDWDAGFKEGRQFGRGKHGGQVRDEYRQNFDSGRGGWNKTIQKRNDQFTQRNIKA

SEQ ID NO: 122550 - protein, 307 aa, Heterodera glycines
  unsure (1)..(307): unsure at all Xaa locations
DGRTLADYNIQKESTLHLVLRLRGGMQIFVKTLTGKTITLEVEASDTIENVKAKIQDKEGIPPDQQRLIFAGKQLEDGRTLADYNIQKESTLHLVLRLRGGMQIFVKTLTGKTITLEVEASDTIENVKAKIQDKEGIPPDQQRLIFAGKQLEDGRTLADYNIQKESTLHLVLRLRGGKNIFVKTLTGKTITLEVEASDTIENVKAKIHDKEGIPPDQQRPIFAGKQLEDGRTLADYNIQKESTLHLVLRLPGGMHIFVKSLTGKTITLEVEASDTIXNVKAKIQDKEGIPPDQQRLIFSGEQLEDGR

SEQ ID NO: 122551 - protein, 232 aa, Heterodera glycines
MISRMASSSCSSPSSSSKFGPQMKCSTPKPVPMDDDGTEEGDHGEQLLLDRHELRILCDEHLQSGDCQTAAFWAEKLLALSIGRTLNERLPDIAHYLSVLTAAQFWQTIITLIERHDLFPKHLVFAFFHINALFHRELYSEIIALPVGYLCHWDDVPFIQPDSATYICAENDAVREPGIRQQLDTLLREKKYESRMLLLLAKTYLMVQNRPAAAGCLKHCLTANPFCSEAIH

SEQ ID NO: 122552 - protein, 360 aa, Heterodera glycines
AIVAILSYGGYNQEDSVIMNQAGIDRGLFRSVFYRSYRDSEQEIDNVNEQLIEKPTRDKCKGMRNAIYEKLDDDGITSPGTRVSGDDVIIGKTIALPEVEDELEASTARYSKKDASTTLRSSETGIVDQVMVSVNAEGNKFVKIRVRSIRTPQIGDKFASRHGQKGTMGMMYRQEDMPFTCEGITPDIIINPHAVPSRMTIGHLIECLQGKLSANKGEIGDATPFNDTVNVQKISALLEGYGYQLRGNEIMYNGFTGQKLSTQVFLGPTYYQRLKHMVEDKIHSRARGPVQGMNRQPMEGRARDGGLRFGEMERDCQISHGAAQFLRERLFEVSDPYTVYVCNQCGLVVIFNQRTNTFEC

SEQ ID NO: 122553 - protein, 354 aa, Heterodera glycines
  unsure (1)..(354): unsure at all Xaa locations
MDKNIGNKNNNEFLLLGMGNPLLDLQVATLDTQIHAKYGLAEDGADLINSENSASLLPIFDDISTLGNKIEFVPGGSAQNTVRVCQWMVKAFGVNLKSCYFFGAVGKDKYGQILHEKAQAANIEVRYQEVPTEKTGTCAVLVFGNKRSLVAHLGAAEHFTPVHLNIEANQSLIEKISNFYVEGYFLTVSLESILFLATHVISSTRPKHFALNLSAEYICQFFXDRLEKVLPYVDILFGNKQEALAYAKTREXEKRDVGDIALYLSEKEKVNGEXKRIVVITQGPLPVLVAHDCELTQFPVEPISEDKIVDTNGAGDAFCGGFLAAFSTGRSLDLCVRAGNFAARTIIQQIGCTF

SEQ ID NO: 122554 - protein, 162 aa, Heterodera glycines
MAESGEHDHDFTSGESGAAATYPKQCSALRKNEFVMIKGRPCKVVEMSTSKTGKHGHAKVHLVALDIFTNKKLEDICPSTHNMEVPVVKRKEYQLLSTNEDGFISLMDLETCDTKDDLRLPEGEIGDQIKQAYEKDDNGILVSVVTACGEEAILGWKFMPNK

SEQ ID NO: 122555 - protein, 200 aa, Heterodera glycines
MAFLSRLSILPNSPISLLAVSLAVLAFVALASANPPTARETAPNAQQNNANSVATGEIAKNIAEKMERMNEFIKAKKFIDAHNLAFEKGEVSFKVAPNHLMHFTPAQYNRIRGLQMRSNRQRHNMATLAGNSSTLPEKLDWREKGAVTEVKDQGDCGSCWAFSATGAIEGALAQKKASKIISLSEQNLIDCSSKYGNEGC

SEQ ID NO: 122556 - protein, 145 aa, Heterodera glycines
LFELDSVHFAVSSSEILLHLCKTEICKSANVENEDRMRRLISHLFRARSLYPLCPCDQNLPFAPSASANAKLRLPRKPHVMVLPSLLQPVTKVVDDCVVLNPGRFDRGKGTGTFSVLDLDLSSAIGATSVSPFCEVSLFSTQQQQ

SEQ ID NO: 122557 - protein, 164 aa, Heterodera glycines
MSGDNSALIAAEQAAYGPFFGSLGVTAAMIFTAAGSAYGTAKSGTGIACMAVARPDLVMKAIIPVVMAGIVAIYGLVVAVIISGRLEAAGPGYTIDRGFSQFAAGLVCGLCGLGAGYAIGVVGDAGVRGLSQQPRLFVGMILMLIFSEVLGLYGMIVSLLLSSS

SEQ ID NO: 122558 - protein, 440 aa, Heterodera glycines
MFPFRPIRKVPWYRRKVPDRISLVAEETISPADEKLVGWRLHDYYEIQELVNILPTIKEKIDFVNPYERPWKQSELRWHRPWMAPLSKPRSAWVVPPTPAYFDVLDFSKYITKTRLATDEEAEWEFDAYYKGINLPTAKFEERVAESLALHLEREEMSKRENHPEKEREENRAKFLRSLIDDAHLILAHGNPKIIDHRISHSDRCESFWIRAGFLPLYESLPVWEMEKVPSIRKVKFTGDDRRRLGELSFTMRDKHTMQVRTKSPMKRLFDWDEPDKLEAPVFPPSFDVADELIMSPMVYNLLADTEPLWQCPGYEYDSGETHKYGRLAIKDITPLITRLDTHWRCDTEHERKEVLRECLAATAVVSLFNWLNGQAHCLGHTQYTEIVAPLSSQLILSDGLQLFYFALGQLNTLAINIDVEGFNNQRSNFCCVNGPFKLY

SEQ ID NO: 122559 - protein, 181 aa, Heterodera glycines
MTAPCIDVGNLLLIDVETDAEDLASSNSERINELTSKNAQLLFNEIWKLPRKIVQDATCSQLPEYTYGLPREKPIPKPKEPTKWEKFARAKGITKKKDRKVWDKTTQEWKPKYGYRRAENQSKEWLIEIPDQKDPYKDYFAEKTEEKREKNNKQELQRLKNISRASNKYKVPTGNRKVFKD

SEQ ID NO: 122560 - protein, 180 aa, Heterodera glycines
  unsure (1)..(180): unsure at all Xaa locations
MGLAISGLFSRLFGKKEVRILMVGLDAAGKTTILYKLKLGEIVTTIPTIGFNVETVEYKNISFTVWDVGGQDKIRPLWRYYFQNTQGLIFVVDSNDRERVGEAREELMRMLAEDELRDAVLLIFANKQDLPNAMNAAEMTDKLGLHNLRNRNWYIQATCATXGDGLYEXLDWLSNQLKNR

SEQ ID NO: 122561 - protein, 205 aa, Heterodera glycines
MNGGGSNNSFLCVIFDCNAYNWGCVVAERGVSTLNETVSALIALCNAHNFSSLGNRLLLLAKGAKQQEKKLFTNERITAKELTNFGPAIEGIIHQILAKNVSAEESPFNLSSALSLSICAFQRFKKQFPSSFGHVVFINLSEQFTSEQNALLNLFFASRQYSLHFHVASFHKTVPILQQASDITGGSYMYIDNTKLLAHKLLCHC

SEQ ID NO: 122562 - protein, 266 aa, Heterodera glycines
QMSRFVCAISGNEPEVAVASPVSGEVFEKRLLIKYIEENGTDPITGHKLDTSNLVELKQDPGIRSMQKSLATASLPSLLKQLQDEWDATMLNNFTLRQELKAAREELTHALYQNDAACRVINRLSSELQSARQIIATLPHGRRAAAESETEATDVEMRPEEAEEGAGADGLPGISEELVNFFTDKCQDFSTARKQRGRNLPEGLASVEQIQKYEEVACHDALHSASVPGITALDLQKNFIATGGMDKTIVLFDSETENIKNTFKGH

SEQ ID NO: 122563 - protein, 165 aa, Heterodera glycines; identical to SEQ ID NO: 119918

SEQ ID NO: 122564 - protein, 283 aa, Heterodera glycines
MIFLTSFSKHPLSAAFRFFSSVNEVTLQTRPYKLFKLDSGPSTEVRLTRDEALDYYRKMQLVRRMETSANNLYKEKRIRGFCHLYSGQEACAIGMVAATDPKDAVITAYRCHGWTYLMGATVQDILAELTGRIAGNVYGKGGSMHMYAKNFFGGNGIVGAQVPIGAGIAFAMKYRRQKNVCLTLYGDGAANQGQLFEATNMAKLWGLPCIFVCENNGFGMGTPVDRASASTDYYTRGDYVPGIWVDGMDVLTVREATRWAKEYCDAGNGPLMMELAPYRYYGQ

SEQ ID NO: 122565 - protein, 185 aa, Heterodera glycines
KRWGTEKNATAALEAAKGRRAASKVKRVVIFKRAEQYVKEYRKAEREEIRLKRVARQANNFHVPAEPKLAFVIRIKGINKIAPKPRKVLQLLRLYQINNGVFLHLNKATLEMLKLVEPYVAYGTPNLKTVRELIYKRGYRKGHGQRIALSDNAVVEKSRRQGGPYLRWKILFDEIYTVGPNLQKG

SEQ ID NO: 122566 - protein, 164 aa, Heterodera glycines
MSKTSKKNFVTKQLVKEIVIPADNEFVGKILASRGNNLHEVETDEGENFLVSMPTRFRKKLWVRRGTYVILQSIEEGDKVRAEIVHVLDPENIAFLMEKEVWPERFIVEAAQLTKRGQRTEENDDSDLFPATSESENSAEESSSLVSEDVALNGQTNAIDETTI

SEQ ID NO: 122567 - protein, 97 aa, Heterodera glycines; identical to SEQ ID NO: 121214

SEQ ID NO: 122568 - protein, 214 aa, Heterodera glycines
VHLDNERVLKALYHLLQGFSASPPNIFVFCGPFLGIQRAHSYMEQAANAFRHFANILSEFSHAYHATEFIFVPSADDAPPLQIFPRPTLLQLIQKCFKEAKNMHFATNPCKLVFKDRHIVIFRDDVVEKVCRSAVFMPKNAMASRIPKLFCDTIWAQRHFSPLPLFINPIQPHFDPLFQLFPSPDALVIADRFKAFFEPADERRRLTMNPGPFS

SEQ ID NO: 122569 - protein, 217 aa, Heterodera glycines
DCQAVVFAGGRGSRMPSLTNQMPKALLPMANMPLYWFSLNLLRLNRVRDCLLIVPLGQKLQIENALKTDGGGRWPTLKGMDIEVVAIDSLEEDVDDWGTADVLKRLLGKLKSDHILLISGDLVSDVRLRDMFKQYMENNAVLSCLLTDSALGGPIPGPKDRVKKYRDFVILGPNGQLLFLVDEDDFAEEEGIPISLFDRCPKAKATAKYKDVHLYLV

SEQ ID NO: 122570 - protein, 179 aa, Heterodera glycines
MSAERKKSVLFLFDVDGTLTASRQSITPSMLAFMHSVKSRVPVAVVGGSDLAKIFEQLGGTQQRDQCLALFDFVFAENGLTGFKGTEPMPSESISKQLGEAKCQELTNFCLRYMSNIELPLKRGNFVEHRNGMINVSPIGRSCSQSERDQFVQFERTTPIRAQFVEALRQRFPIEQYGL

SEQ ID NO: 122571 - protein, 179 aa, Heterodera glycines
MIIYKDAFTDDELASDSFPMKLVDDLIYEFKGRHVVRKEGEITMSGANPSAEEIDEGTEEAVERGIDFVLNHRLQEMNCYENQATFKGYVKDFMKKIIEYMEKEQKSADEIAAFKKKIQAWVVSLLAKDRFKNLAFFIGENMAEGKGEGQVAIVEYRQENGEEVPTLMLIKEALIVEKC

SEQ ID NO: 122572 - protein, 221 aa, Heterodera glycines
AHIGTMTVSKELNELNNCLSTRAYLHGFLPSQEDQYVFKSIKSVPSEKEYAHVARWYKHIQSFDDVERLNWSKKAGQTTQTVASKETPAKKVEAEEDFDLFGDEESDDEEKKRITKERLKAYAEKKAKKPGPVAKSNVIYDVKPWDDTIDIKEIEAKVRSVQCDGLVWGASKILPVAFGVQKLQICCCVEDDKVSTDWLEEQITDFEDLVQSVDVVAFNKV

SEQ ID NO: 122573 - protein, 118 aa, Heterodera glycines
YDYKNFFGSVLVITLDDFKKVNGMSNEFWGWGLEDDDFYLRLKAAGMANKIRRPSNLSTNRSNTFLHLHTRNRRRDFSVEESRKKAFVAVPSRCRTAKLCHCQSRHSFGAEQLLACDF

SEQ ID NO: 122574 - protein, 376 aa, Heterodera glycines
RKDNRAVQKLRREVEKAKRALSVQHQVKLEVESLIDGEDFSETLTRAKFEELNMDLFRGTLKPVQKVLEDADLKKEDIHEVVLVGGSTRIPKVQQLLKEFFNGKEPSRGINPDEAVAYGAAVQAGVISGEENSEIVLLDVNPLTMGIETVGGVMTKLITRNTVIPTKKSQIFSTAADNQPTVTIQVFEGERPMTKDNHLLGKFDLTGIPPAPRGVPQIEVTFEIDVNGILHVTAEDKGTGNKNKITITNDHNRLSPEEIERMINDAEKFAEEDKKTKEVVEARNEFESYAYSLKNQLGDSEKLGGKLSAEDKTTIEGAVDEAISWLDSNKDAPPEELKERKKDLEAKVQPIISKLYAGQSPPPGSEPPPTEEKDEL

SEQ ID NO: 122575 - protein, 194 aa, Heterodera glycines
MSWILDWFSGVLNYLGLTKKSGKLVFLGLDNAGKTTLLHMLKDDRIAQHVPTLHPTSEELSLGGIRFTTFDLGGHVQARRVWKSYFPALDAIVFLVDAADLERIQEAREELWSLLQDEQVANAPLLILGNKIDKPNALGEDQLKYYLGVQQYCTGKGQVSRADLTTRPLEMFMCSVLRRQGYGEGFRWLSQYLD

SEQ ID NO: 122576 - protein, 213 aa, Heterodera glycines
MGRRIRAQRKGRGGIFKSHSKHRKGPAKLRPVDYSERHGFIRGIVKDIIHDPGRGAPLAIVQFRDPYKYRVKKETMIAAEGLHTGQFIYCGKKAQVQIGNVMPIGELPEGTTVCNLEEKAGDRGRLARTSGNYAIIVAHNPDTKRTRIRLPSGAKKVVPSANRAMIGIVAGGGRTDKPLLKAGRAYHKYKVKRNCWPKVRGVAMNPVEHPHGG

SEQ ID NO: 122577 - protein, 201 aa, Heterodera glycines
MTASLQQIRAQPGWTADKCKEQIEVAKSENRTFQRQTLQAHLVHLLNKEHKFNEAIQLAAQLVRELKKVDDKDLLVDVQLEESIGFYHLSNYTKARAELVSARTIANTKYTPPAMQARLDLQSGILHAADDRDFKTAYSYFFEAFQAFDSVNESALAQQALKYMLLSKVMLDQSDEVHSIMTGKTAQKYAKTETEAMHAIA

SEQ ID NO: 122578 - protein, 180 aa, Heterodera glycines
MSSMSAAGGAIAASVEQQPAVEPDRSTFYHKDLSIVRATAGQMQPKPLGTVDQIKFGHHFSDHMMEVDWSDTAGWNQPEISPLHSVQLHPGAKVLHYAIELFEGMKAYRGIDDRIRLFRPEMNIARMKRTAARAALPDFDAEEMLKVIAELVRLDPEWAPYFAPSSLYIHAKLHRTDPRL

SEQ ID NO: 122579 - protein, 181 aa, Heterodera glycines
MGNMFANLFKGLFGKKEMRILMVGLDAAGKTTILYKLKLGEIVTTIPTIGFNVETVEYRNISFTVWDVGGQDKIRPLWRHYFQNTQGLIFVVDSNDRERVGEAREELMRMLAEDELRDAVLLVFANKQDLPNAMNAAEVTDRLGLHTLRNRNWYIQATCATSGDGLYEGLDWLSNQLKNRG

SEQ ID NO: 122580 - protein, 205 aa, Heterodera glycines
ASESGSDKIVFQKNVTGRGSQVLDDAEFVKMYDRSTSKTLNTSSANDNAQSNQQKEQVQKWKVGDQCMALYEVDGKWYPAKIEQISPVKNTCTVSYIGYDQKAILKLEDILGESDVEAADDHGDEREAEGTSGTTKIADNDVKKDAFPIPDLCPPPPPSMFGKIAVAGNEKEALTNMLMSWYMSGYHTGFYQGVMHEKTTRQKPK

SEQ ID NO: 122581 - protein, 184 aa, Heterodera glycines
  unsure (1)..(184): unsure at all Xaa locations
KINNPQFCGLTYVGRISPANPVYLSFQCTQRRXGIAIHETMHALGLHHEQLRLDRDLFININWANINPQNYDTFARSESXKYTSYGVRYDYGSIMHYASNIASKSAGLKTMTAKTNPGANDAQMGQRRGLSATDVEELRRMYCMPGCADANVYCGVWATNNLCQLASTRPWMMQNCRKSCSLCG

SEQ ID NO: 122582 - protein, 131 aa, Heterodera glycines
KPEKLLRRRRLAERAAKRRRTEKRRRAEKGRRRRAERVVFVKIAASGTYSTRSARAGVAFPVGRIHRLLRHGRHAQRIGAGAPVYMASVLEYLAAEVLELAGNAATENKKLRINPRHLQLAVRNHEEVNKL

SEQ ID NO: 122583 - protein, 188 aa, Heterodera glycines; identical to SEQ ID NO: 120932

SEQ ID NO: 122584 - protein, 158 aa, Heterodera glycines
MRFTIQLLQKSQRCYKLLFANYTKQVASVSPLLIHRQNLISFSAFRNFCSSIETKKEEIGRIKSQLAIIFTCKVCSTRQGPKQFSRSAYENGVVLIRCDHCRNHHIIADNLGWFSDLDGKKNIEEILASKGEAIKKGTAVLEMEVPAEEEGDNAKYSK

SEQ ID NO: 122585 - protein, 366 aa, Heterodera glycines
MAEVGNSYRPPLSEEKQNELRAIAQKILQPGKGILAADESTGSIGKRFDTIGLENTENNRRRYRQLLFTTPSFGQNLSGVILFDETFRQSTDNGVRFVDVIKKAGAVAGIKVDTGVVPLAGTLDEGTTQGLDKLSDRCAEYKKGGCDFAKWRCVLNIGAHKPSHLALMENANVLARYASICQQNGLVPIVEPEVLCDGEHSLERCQKVTELTLAYTYKALANHHIYLEGTLLKPNMVTPGQSHSPKATPDQIGLATVTALRRSVPIAVPGIVFLSGGQSEIEATHNLNAINSVPGPKPWTLSFSYGRALQSSVIKKWNGKDENLGDAQKVLLHRAKANGDAQQGKYTGEEAAASAAESLFVAKHAY

SEQ ID NO: 122586 - protein, 212 aa, Heterodera glycines
ISLAFGQKRTDLRLAPTDHDRTTLSLKMQRDKLRQAYQRYERNIAKDAERARALLRDGRKDRALLLLKRKRFQETMINRIGFFLEQVERTITDMEMAQINREVFDNLRLGTEALKALNETISLDEVERLMEESKEAQEFQEELSTMLGQQMSEEDNDMVEEEFERMLSEQMPAVPTEQPTDTKEGRKTADKERTKEEKEPKRRREAVAQEAT

SEQ ID NO: 122587 - protein, 205 aa, Heterodera glycines
SHSVFNRYTFQFVFTMPLHWTSVDTRNALLCAAVPSIGAFVGSTMAIKDQELVQFLKKQNFPSFARCCKYNYLLANTAVTIPFGYASYLVYKIGGGVSCTDSKIALGLYGATLLSGCFLVPTLKKHDTKALTANAVVLAGLSVATSVAFYNIDKISAYWTMPFTLWAILCAGLTVKANFDAPPAQPLDAPPAQPLEAPPAQPLEA

SEQ ID NO: 122588 - protein, 202 aa, Heterodera glycines
  unsure (1)..(202): unsure at all Xaa locations
MFSTDAQDILGGGGSGSQLAKKSGLPTMKLTNLDKKKKITTNGQPKRPVGMHRELYNLXFTRARTITKKRSNSLMPTQTKKGFSLAKAQLGKRPVRKWLWCPFENEARKDGLALKHWEREDKHSTPYSFVQFNKQLDVPSFTDEEYEEHLVDPRWTREQTQHLLELCKQFDLRWPIIEDRFDQNXCRNRKSMEDMKERYYGL

SEQ ID NO: 122589 - protein, 194 aa, Heterodera glycines
MPSARVSSADSSAVSVSNKGISLGLSSSGTSPSNVIVSSVPVNSGTFRGLSPIGNVSSLVRDVFGPLAAVRRQSPTVQVAAGAGGGIIAGYVFGKTSKMVAILLGSTVLFLQFAQCKGYLQIQNGKLREDFEAARDKLGEMIDGMGAIGGEAVVGMIDGTGGRSSGNELFKIVSDSAHFLCGIVGGILVRFGMS

SEQ ID NO: 122590 - protein, 165 aa, Heterodera glycines
MAPAAPLQFVAGTALKVVIVLLTIVVLVLLDPSYVTAYISINYEIVLIYIICALTLLYCIVSIIMYAIMQKSVREGEELHLTNCALSEIVFAGAGMICWMLVCGIGGTVAQRTIIETGQYFGWLGACAGIIVCLFMGVLAVFALDILTNKILSPTRKYRYSTPQM

SEQ ID NO: 122591 - protein, 92 aa, Heterodera glycines
MTKGTSSFGKRHNKTHTLCRRCGRSSYHIQKHTCSSCGYPAKRKRTFQWSVKSIRRRTTGTGRMRHLKLVHRRFRNGFREGVTAPRKGGVKA

SEQ ID NO: 122592 - protein, 161 aa, Heterodera glycines
MTYDLETAERAAYAPFFGYIGAASAQIFTVFGAAYGTAKSAVGICSMGVMRPELIMKSVIPVIMAGIIGIYGLVVAMVLKGKVTSASNGYTLNNGFAHLAAGLTCGLCGLGAGYAIGIVGDAGVRGTAQQPRLFVGMILILIFSEVLGLYGMIVALILGTS

SEQ ID NO: 122593 - protein, 374 aa, Heterodera glycines
MFLLFLLSMLLLQTNGWRARERAIELADSDESIELQNIGQRKTDIRTPTERMSALRQMIERGFSDWNAYKQKHGKAYADQEVENERMLTYLSAKQFIDKHNEAYKEGKVSFRVGETHIADLPFSEYQKLNGFRRLMGDSLRRNASTFLAPMNVGDLPESVDWRDKGWVTEVKNQGMCGSCWAFSATGALEGQHVRDKGHLVSLSEQNLIDCSKKYGNMGCNGGIMDNAFQYIKDNKGIDKETAYPYKAKTGKKCLFKRNDVGATDSGYNDIAEGDEEDLRMAVATQGPVSVAIDAGHRSFQLYTNGVYFEKECDPQNLDHGVLVVGYGTDPTQGDYWIVKNSWGTRWGEQGYIRMARNRNNNCGIASHASFPLV

SEQ ID NO: 122594 - protein, 240 aa, Heterodera glycines
  unsure (1)..(240): unsure at all Xaa locations
MVGITELAEATKKAFGAGPLIAANCATAENAKSGNEVEFGSMKFYGLCGIGGILSCGITHTAIVPLDLVKCRIQVDPAKYKGIIGGFKVTLQEEGVRGLAKGWAPTAIGYSMQGLGKFGLYEMFKNVYAGMIGEELAYSCRTYLYLAASASAEFFADMMLAPMEATKVRIQTSPGAPPTLRGCAPFIYRTEGLMGFYKGLPPLWMRQIPYTMMKFACFERTVELLYKHVVPKPXAECTQA

SEQ ID NO: 122595 - protein, 262 aa, Heterodera glycines
  unsure (1)..(262): unsure at all Xaa locations
MDEKKGSIYYRIWDHLFFGFAGRSKFKRVAETGWRFTYYSIIWFVGVSVLYKEPQFSSVIECFREWPKHHLPNDVWQYYIIQSGFYLSLLFSLFAFDVRRSDHYEMATHHLATILLLFMSFSINFVRAGTLILLLHDSADVFLELGKLFRYAGWDRAVTIDFSVFMLVWISTRLVYFPLKLVRYMLFDAPKLIMETYRWTDILQKPIIPRVFLAVLCILLLLHIFWTYLLIKIAIKSVKSGVDDIXEDEDDDSEEEAEKRKN

SEQ ID NO: 122596 - protein, 264 aa, Heterodera glycines
MVSVGLANAQRLVAIVTGGASGLGCATVRRLVAKGFNVSLLDLPMSEGAKVVEELGTTDNVLFSPVDISSDDQVYFAMDATTEKFGGLIVLANCAGIAFAHRLYNPSSRAQMDLDKIRRLIDVNIFGTINVIRHALPLLIDNVPDENDQRGVIINTSSIAAFEGQMGQTLYSASKGAVASLTVPLARDYSNNGIRVMAIAPGLMDTPLLSSLPPKVKKFLSGTVPFPNRLGKPEEFAALVEHIIDNHYLNGEIIRLDGGIRMNA

SEQ ID NO: 122597 - protein, 130 aa, Heterodera glycines
MFTPGDDFCAACGSIMQTPNELTAGSGVTNFIKCSVCDAKWPYKIVHGQLLSRHERNFEQRNAVGEERQKQQRKETAREEEEEDVTVEHVCPKCEWTTATYTTQQTRSADEGQTVFYQCVRCKHRSIEYS

SEQ ID NO: 122598 - protein, 164 aa, Heterodera glycines
MSVGLSSIVDDSHQRQSHFWAEILPPGVGHTNDISGDAIWTLSSCKEGLGVHQLLNDREDTYWQSDGLQPHSITIEFQRKTEVDFLLMFLDYKLDESYTPSKIQVQTGASVLDLDEPKSLSFTEPSGWQMIDLRHAGTKRPANVFVIVVQIIQNHQNGRDTHIR

SEQ ID NO: 122599 - protein, 134 aa, Heterodera glycines
MTKFEETKSKLEAEFEKLRNLEKDRSKCMTNRRQLESQLTENSMVKEEFDRLKSDAGVFKLIGPVLVKQNLEEAKQNVAKRIDYIRTEIERIESLLGDLEKNIEVQKESVERMRDTFRQTLAVATAPTANSINA

SEQ ID NO: 122600 - protein, 207 aa, Heterodera glycines
  unsure (1)..(207): unsure at all Xaa locations
MHQYNLLANRSLLFTKRFFAVGPPGTKATYKRTKPHMNVGTIGHVDHGKTTLSSAITKLLAAKKXAKFLKYDEIDNAPEERSRGVTINAAHLEYETDNRHYAHVDCPGHADYIKNMITGAAQMEGTILVVAITDGPMPQTREHLLLARQCGIPQENICVFLNKVDEVSDAETRELVEMEVRELLNEFGYPGDTAPIIAGSALCALEG

SEQ ID NO: 122601 - protein, 359 aa, Heterodera glycines
MSQTEKELLAEKVDRQPNEEAKPTASLNLFDLSVMPDSETSIELNQMRVDAVPDLARFTQLQFLGLRQNLLTSLNANLGRLTTLTELELYDNQLTEIAGLDQLVNLVMLDMSYNRITKIQGLSTMTKLRRLFLVHNKIKRIEGLEGLDALELLELGDNRIKVIENLCHLVNLNELFVGHNDIQRIEGIQTLIKLRVLSLPANRLTKLEGLDTLTELEQLHLSDQGIESLDGLGNQSKLIILDAANNRIVNLDGLGHLQKLEDLWLNNNKIVVWSEVDKLAQLRALDTVYLEHNPLYTTDTNQYRRKAMLALPHIRQLDSTVCRQQKNVVEEDTKQNSEDNNNAKPNSQRSAVATTAQKT

SEQ ID NO: 122602 - protein, 158 aa, Heterodera glycines
MTEQTERAYQRQPTVFLNDKFRTQGIGKKAANKDRYWKNVGLGFKTPREAIEGIYIDKKCPFTGNVSIRGRILTGVVIKNKMQRTIVIRRDYLHFVPKYRRYEKRHKNMSVHCSPCFRDVSIGDIVTIGECRPLSKTVRFNVLKVIKASGAKKAFDKF

SEQ ID NO: 122603 - protein, 220 aa, Heterodera glycines
MDMSELCAKVNAIYKKETDHKVQSEGLQKLLEGVLTSVPSDNLKQITEAVSNLVETVVNNESTSMVVSRQFIADIASYLSQPSLNTALIKGIGEAVLTQLHARALAYEEQSTQIRMILANALERDRQFEQSARTLMGIPIETGQRGYRHEFKMELYLRITELFLEADNVEEADRHVKRASLLQQDVKEEALVIKYKALYARVLDRQGNFTEAAHRYPSYR

SEQ ID NO: 122604 - protein, 165 aa, Heterodera glycines
IITCRLHRYTSFTARRPRISLQRNINLTWADTVEVAAAEVHVASTMTVEEALQDVLKRSLIHDGLARGIRESVKALDRREAHLCVLAQSCDEKEYVRLIEALCAEHNIRLIKVEDNKKLGEWAGLCKIDRDGNPRKVVGASVVVVKDWGEESEALNIILEYFKSQ

SEQ ID NO: 122605 - protein, 274 aa, Heterodera glycines
  unsure (1)..(274): unsure at all Xaa locations
MDDDDAIGGAEAFKWEQAYTEGLNIRSVLQEDEHGSVEESIRRLVMDEKRQRRMDRLPAKIRLGMMRYVHLAVDCSSAILSADFFPSRLSVALECLRKFVDKFFLLNPLSQMGLIAVRDKRAERISGFTSSVQFLLESLQDISSTNCGGEFSLQSVLQCALHSFQAFPLPFPFLNSFAFXGLPAHSSKECILLIASLSSVDASPLRHTFEQLKMRSVRCSIVSFGAEVFSFKRLCATTEGKYSVALDEQHLELLLDEHVQPPPVQRRPGQQDSI

SEQ ID NO: 122606 - protein, 100 aa, Heterodera glycines
MFAHLTRAERSGCIFNRILGLIIAGHLKWEQRPLWFDAYVAHSPHYEPKWDIKMPKRDEPLPQIFYQEDLIRAKKLLEMRNEEPKYELDQQQQQQPDQLN

SEQ ID NO: 122607 - protein, 556 aa, Heterodera glycines
MSASIPRRSSQDSLAEKVKSKELIYEARMKIQERLKELGFPVQNTTVKGPSGSERFRETVLKPEEASAFTQLHMEKIKRLNEARSRAAKGLSTLNLKTPSLVFDTISAEKQMVAKREPSGPIRQSLEKADSSTIELKKSAASPHGQQIEPDSSTSAAQQEFLDPRIYIKPAARQKRHFEFKLPGEYEKLAKIQRSKAKLERLQSEIEKAAKQTGISSAVKLAIVTPSGLPETSTGEYIPLVEWWDEVVLGNNCKDYNEMPSQELAPVERYADSVTDLVEHPIQLKPPDEPLQPQYIKASLTKKERKKLRRQNRREALKERAEKIRLGLEKPPDPKLKISNLMRVLGTDAIQDPTKMEAKVRKQMAERAQKHVEDNRSRKLTREEKAAKAIRKIGEDTTLAVHVTVFKIKSLANPAKKFKVMMNAKQLQMTGVVIVLEDINVVVMEGGPKQQKFFKNLMLNRIRWSAEIAGQKHDRRATHNRANEMGEGTEDGPAEEKRNECVLIWEGVVQKRAFTGEPRFTPVTNHKQARELLEKYGVPHYWDLCYSTTVLLNDET

SEQ ID NO: 122608 - protein, 154 aa, Heterodera glycines
MLMPQGDRKKIYEHLFEDGVCIAKKDYCLKSHPEIKGVKNLYVIKALKSLASRGLVKEQYAWHHYYFYLQPEGIVHLRAYLGLPDDVLPNTHKQRTDAIQKAFADKGGRGPIRADTDRGGYRAAADKQAEAGPGAAPISHRQGFGRGGGAPAPQ

SEQ ID NO: 122609 - protein, 262 aa, Heterodera glycines
MGIKFLEFVKPFCGFVPEVSKPERKIQFREKMLWTAITLFVFLVCCQIPLFGIMSTDSADPLYWLRVIMASNRGTLMELGISPIVTSGLIMQLLAGAKIIEVGDTPKERALFNGAQKLFGMVITIGQAIVYVASGMYGNPHEIGAGICLLIVIQLVVAGLIVLLLDELLQKGYGLGSGISLFIATNICETIVWKAFSPATMNTGRGTEFEGAIIALFHLLATRNDKVRALREAFYRQNLPNLMNLLATVLVFAVVIYFQGFR

SEQ ID NO: 122610 - protein, 123 aa, Heterodera glycines
MTKVKTFELRTKSKAELSKQLDDLRRELLSLRIKQQSGQSNQKPLEIRNVRRSIARVLTIINQSTKAEVLKEYAGKKYIPIDLRAKKTRAIRRALTPAERKIKTTRALKKAKHFPQRQFAVLA

SEQ ID NO: 122611 - protein, 118 aa, Heterodera glycines
MPPKTSKKTDPKGGKAAPAKKKEGGGGGKAKKKKWSKGKVRDKLANMVLFDQATYDKLYKEIISVKLITPSVVSERLKVRASLAKAGLEELHQKGLIKCVVKHGSQLVYTRATKAEEA

SEQ ID NO: 122612 - protein, 165 aa, Heterodera glycines
MPPKFDPTEIKIVYLRCVGGEIGATSALAPKVGPLGLSPKKIGEDIAKATQDWKGLKVTCKLTIQNRVAKIDVVPSAASLIIKELREPPRDRKKVKNVKHSGNLTIEQVINIARQMRPRSIARKLQGTVKEILGTAQSVGCTVDGQHPHDIVDMIRAGEIEVPEE

SEQ ID NO: 122613 - protein, 218 aa, Heterodera glycines
MSNLRLQKRLAASVLKCGKGKIWLDPNEVNEISNANSRQNVRRLVKDGLIIRKPGKVHSRYRARERLEARRKGRHMGFGKRHGTRNARMPEKVIWMRRMRVLRHLLKRYRDAKKIDKHLYHELYLKAKGNAFKNKRNLMEYIFKKKTENQRSKQLAEQAEARRNKNKETRKRREERLVQKRKELLHKISESEKEKTPQPLVTKPAEKEQPKPQPVAAR

SEQ ID NO: 122614 - protein, 111 aa, Heterodera glycines
MDSPAGAQPSNPNAQQQGGARPSNKRLQQTQAQVDEVVGIMKVNVEKVLERDQKLSQLDDRADALQEGASQFEKSAATLKRKYWWKNIKMIVIMCAIVILLIIIIVIWAGK

SEQ ID NO: 122615 - protein, 190 aa, Heterodera glycines; identical to SEQ ID NO: 121702

SEQ ID NO: 122616 - protein, 177 aa, Heterodera glycines
MLSQIEDHLFLSFWIEYAQKYLIDAKIGRVLTVALDHIPQIRHLQNVEYRHIRMADVESEELLASQKLQNALDYVEDSVNRGINIVVHCQCGISRSATVVMAYLMRKYKWNVNDSFSFVKARRSCVQPNPSFLRQLEVFQKLDYRCDLLTLRNSKLFKEFECISENPSEGQLVTFTH

SEQ ID NO: 122617 - protein, 196 aa, Heterodera glycines
MDIVDDPLSEPCHVCGDKSTGTHYGTVSCNGCKGFFRRTILRSQKFTCRFNKQCVIDKNYRCACRFCRFQKCLSAGMKKEAIQFERDAIGSPLPLKRRRVADDGRADHSPSPTGGRTATDGIGTAVGRPVMAQGDGKGQMESPPEIYVDIIGTLVEMEQRVNYEMSLRYRSLCGAVFPSSVGTDNASFAGDASSVF

SEQ ID NO: 122618 - protein, 218 aa, Heterodera glycines
MRPPVDEDYRPIRVLGQGAYGEVWLVTSKENEREQFAMKKIPVKATEEGIPQSVVREVASLVALKQMKHPNILRLHDAFIRRKGGTISLNIVCEKCDWDLCDFLRKIPKNMCDAQCKYFARQIMTGIDFLHANSIIHRDLKPQNILVNKDHTLRIADFGLSRNYGLHATFTTEVVTLWYRSPELLLQCKYGTAVDLWSAGCILAELYTRDALFRGDTE

SEQ ID NO: 122619 - protein, 228 aa, Heterodera glycines
RFNIFTVTRNFNLVCFQMSYSYLFKYIIIGDTGVGKSCLLLQFTDKRFQPVHDLTIGVEFGARMITIDGKQIKLQIWDTAGQESFRSITRSYYRGAAGALLVYDITRRDTFNHLTSWLEDARQHSNSNMVIMLIGNKSDLEARREVKKEEGEQFARENGLVFMETSAKTAANVEEAFIDTAKEIYRKIQEGVFDINNEANGIKLGPQHPPSSPSSPGGAPLGRASNCC

SEQ ID NO: 122620 - protein, 152 aa, Heterodera glycines
MASGVKVDGECKQAYDELHNKHQFSFLIFRISDDDTTIIVENKGEKNAPYSDFVEEMKKVVGDGKQCRYAAVDVHVEIQRQGTEGSSNLSKVVFVQYCPDEAPVRRRMLYASSVRALKATLGLESLLQIQAAELSDIDEKVVKHEVMGRQRT

SEQ ID NO: 122621 - protein, 202 aa, Heterodera glycines
  unsure (1)..(202): unsure at all Xaa locations
LGFLHWILVFCLVGTLYGMMVWQDQRMPXAVSSSEKGNFSEERARVVLNALTDLGPRPSGSDNCEIRAFRILTSKIEQLITAIERFGVNRLELDVQRPSGCFDLQFLSVFTLCYHKVTNLVVRIGPPGQRATDHSILINCHYDTLPDTPGATDDAVSCAIMVHILEVFVHSEKPLENDILFLFNAAEKNFLQASHGFITDHP

SEQ ID NO: 122622 - protein, 179 aa, Heterodera glycines
MGILTASKVCTLPRLSSARSMTWWWGPEKNNGREVVGPTFHGDEFYQDRLDRWYPSIRFRKNDEVITPIRHKELGDWKKLSIEEKKLIYRYSFRQTLAEFEALTPYGYLTVTLFFSMLGLTILYASFVRTYVTKFNDRLPDTFDDEYKESQAERRVVLERGNPYGPAYYYDYEKNRWKD

SEQ ID NO: 122623 - protein, 184 aa, Heterodera glycines; identical to SEQ ID NO: 120098

SEQ ID NO: 122624 - protein, 204 aa, Heterodera glycines
VFLAVGRVGSTSENIGQKVVWVEEHNKRHFLMDLLDASEPEALTLIFVETKRGCGDLSYMLQQEGYHCVAIHGDLKQMERERHLENFRNGTAPILVATAVAARGLDIPNVKHVINYDLPNDIDEYVHRIGRTGRVGNIGMATSFFNDKNRNISHELTSLIVEANQELPDWLEEMARDSGRHGGGGGRSHLGAGSKRGGGGNRFG

SEQ ID NO: 122625 - protein, 155 aa, Heterodera glycines
MPRGTTKTAAQRRGGRRPREAEDHQLTDEDKDRRAKRRERNKQAAARCRRRREEKMQSLQEQVDELRKQNERRENEIRKMREKEQRLLEMLRLRNGGIVQQQLHHHLQAVHVQQQHQSVADHPTVSRPTSLLQPFLVGLNNKRDSVKPRQCHPRP

SEQ ID NO: 122626 - protein, 223 aa, Heterodera glycines
VFIVTFFRAPQLLMFEYIDQLDSENKHEEANCLLAKQSLNTGLNQQEILWRLARSCVQMAYPLDMKNPKKKKLLDEGHKYACSAYELCSDDFNVLKWTAAAVGSRTDFLGTKERIEQGNFFRDVLDKALAINPEEYTLLHMRGRLVLSVASLSWIERKAATVLFGPPPEVSLNEAIRDFTAVLELAPDWLENTLFLAKAYLANSDRESAVHHLKQLIDSYQQN

SEQ ID NO: 122627 - protein, 131 aa, Heterodera glycines
AVSPSFNFLRRPLPLLVFRRSLFKPPLDSPFCGIYRTNGEICRTDDILVCQRKMNYHPGANVRHQRDRNQHLLKAVCDGTVVITREHCEVNPKNEWMYAQYAYRDFENIYKLTFNVIPRRMSNTFKLISEE

SEQ ID NO: 122628 - protein, 225 aa, Heterodera glycines
MDAETKNYKLTYFSSRGIAEPIRLILHYKGIPFEDVTFSSTLADESSREKWLKQKQNYLYGQLPNLEWDEGTEHKVLAQSQTICRYLGNKYGLAGSDFWEAAKTDEIAEWFKDIWAAFLPFLKVAVGAEAGDKEAMKKEIFVPLIYDRLVTTLVEMLNKSGSGFLLPSGLTWADFVFANALTTFNNMDKGLLFESHKVLADYEKRVYSANESIKKYVEGREAKEF

SEQ ID NO: 122629 - protein, 153 aa, Heterodera glycines
MADIQTEKAFQKQAIFLNAKQVGAKKRGQRWYKDVGLGFKTPKEAIEGHYVDKKCPFTGDVSIRGRILTGTIVSNKMKRTVILRREYLHYVKKYNRYEKRHRNLAAHLSPAFVGVESGDVATVGQCRPLSKTVRFNVLKVQKAIAGSKQFKKF

SEQ ID NO: 122630 - protein, 164 aa, Heterodera glycines
EAFYDFKKYGASYILPGDASTHTPVLFRYVVFQPMINEILEGNILRSNQEGITISMQFFSDITVAPDKLPAVSKFDESVQVWRWEYQNENGDITPFYMDPGKRVRFKVISVKYQNVEPGAPPEATKAMTIEASMFDMGLGCVAWREPQCASELKQEANDPSEDE

SEQ ID NO: 122631 - protein, 114 aa, Heterodera glycines
MPERLTYRRRLCYNTKSNKTKVVKTPGGRNVFHYRNKLGSIPKCGDTGVPLKGIKAARPRQLAKMTKRKKTVTRAYGGCLSAAAVRQRIIRAFLVEEQQLANKILKAKSGGGKK

SEQ ID NO: 122632 - protein, 196 aa, Heterodera glycines
MRFSPRIFPSFLQQLINRNFLALHCPLPATSAAKFSTDGKSDVFCASLLHNELCEKLDKRKEEWRKQRPGTKEYTATKEQLNQLQEEIIKIENSKYEFLHTERDKMSIANLVLAPTQVTLEVISNGTTHLRPSVVLRTPLNAYLFNCPEGICRFLPTFRLRTNAINDMFFTKANWDNTGGIASVLLNKENTDETLR

SEQ ID NO: 122633 - protein, 244 aa, Heterodera glycines
STLHKETETDISVGNYGSYGLVQSSEKREDVVFVEIEKINADFDGKEIWLRGRLHDSRGKGKNCFAKIRQRIHSVQAVLFVGADISKQFVKFVQNIPKESIVDVYGLVARTPQPVTACTQSDVEIKVHKFFIVSQAEPRLPLQLEDAVRPDNDQEELAVVKLDTRLDNRVLDLRTPTSQAIFRLQGGVCDAFRKILSSRGFMEIHTPKIISAASEGGANVFEVSYFKGHAFLAQSPQLYKQMAI

SEQ ID NO: 122634 - protein, 346 aa, Heterodera glycines
MCGIFAYLNFFSPKKRSEIIDILLQGLRRMEYRGYDSAGIAIDCSNDVNLPHADVAVYRKTGKVDNLDDTIKNSEGVDMDFTYNVHCGIGHTRWATHGKPKDENAHPQRSNFDNDFAVVHNGIITNYKEIKDYLLTKGYKFESETDTEVIAKLTQHIHQRHPHYGLRQLVEIVVQQLEGAFALAFKSRRFPGQLVATRRGSPLLVGIKSQSKLTTDHFPVFYSRPRRGPVSLVFDESCTTAMETPNKLNASDMFASFSAPFNDTINSTARKIECSDSTRSVRPCDLANFEVEYFVASDASAVIEHTRQVIFLEDDDVAFVEDGALSIHRIKRSDDTAALTEQTREV

SEQ ID NO: 122635 - protein, 89 aa, Heterodera glycines
MGDRKAVIKNADMTEEMQQEAIECATQALEKYNIEKDIAAYIKKEFDKKFNPTWHCIVGRNFGSYVTHETKHFIYFYLGQVAILLFKSG

SEQ ID NO: 122636 - protein, 72 aa, Heterodera glycines
MATPKLYKFHVEMTCEGCSNAVKRVLGKLEDKVKLLSVDLNAKEVQVESSSMGQDEILEVLKKTGKAVSPIE

SEQ ID NO: 122637 - protein, 202 aa, Heterodera glycines
MLSRFSKIIVRGYAKDLNLKEVLANKIPEHNKKVVEFRKAHGSTVVQNITVDMIYGGMRSMKGMVTETSVLDPEEGIRFRGYSIPECQQKLPKAEGGEEPLPEGIWWLLCTGEIPDQKQVNAISKEWASRADLPAHVAQLLENFPPNLHPMSQFVAAIAALQSESKFAEAYSKGVPKSTYWEYAYEDSMNLLAKLPTIAAMI

SEQ ID NO: 122638 - protein, 207 aa, Heterodera glycines
RTADEAIVATVSKVGENIQLARASVISSSPANKLFGQTHPKEEFNGVQLGRFISLVSLGHKSDESVSDFPTAQLGQVICQHIIGMAPESLGEPRKKGAKRATQMEIVDNGEGTEKERSANAENESDTGEEEDLNASQVDQSELTRMDGEETQLLHQPFMLNPEQTVNEYLEAHGANIADFLRIEMGQEHTKTNDLVTRSKGFSFLGY

SEQ ID NO: 122639 - protein, 167 aa, Heterodera glycines
  unsure (1)..(167): unsure at all Xaa locations
YRDEGPFKLYIPLITFGPFSSVHRQIGPNLAIIFLRHFVPMFAVFAFVLLWHGLSPNYFWWDTLRATALIAERIGHSLPKWHTSRPNLXEATFVRLKAASMLFTVIPGIFGIFFFLGLNGVGAFVFRSLLLDGLSQILSLRIFSSNSAGFVLLHFFLLGFCFNNVCL

SEQ ID NO: 122640 - protein, 181 aa, Heterodera glycines
MVALRAQFEASNDVGVFCKLTNAYCLVGIASSENFYSIVEAELADVIPVIHCTVAGCRIVGRVTAGNRHGLLVPNATTDQELQHIRNSLPDSVQIRRVDERLSALGNVIACNDHIAVVHADISKETEAALAEVLKVEVFRLSLGENALVGSYATMTSNGALVAAKTPPEVQREFTSLAQVP

SEQ ID NO: 122641 - protein, 149 aa, Heterodera glycines
MADQLTEEQIAEFKEAFSLFDKDGDGTITTKELGTVMRSLGQNPTEAELQEMINEVDADGNGTIDFPEFLTMMARKMKDSDSEEEIKEAFKVFDKDGNGYISAAELRHVMTNLGEKLSEDEVDEMIREADVDGDGQINYEEFVKMMMSK

SEQ ID NO: 122642 - protein, 208 aa, Heterodera glycines
MVQQYKLYYFDLRGLGEPIRLLLHYVGQPFEDIRFKDMEEWEKTYKPKFFYGKAPVLEVDGKPLAQSSAILRYLAEKFDLAGKDEWEKAKANEIIDFLKDATTDLLPYLMVKMGRQEGDLDKLRGEVFEPGVKRIFPLFEKLLKESGSGYMLKSGLSMVDFQVANFLYSFTMLEPDTINAYPELIKYVDRVHALPQLQQYLKQRPQDR

SEQ ID NO: 122643 - protein, 146 aa, Heterodera glycines
GQDTFFDQGCVRATCLSCSPSGQFIACGSNTGIVNVYDLTKLSPSLAKSNAPRPVRMFDQLTTLVSFVRFNNDSQMLAFGSAVKRMSGRVANCSSGSVFQNFPAKQEHFASDKFTTCDFSPNSAFFSFGTKQGKMRLYQLHHSDVY

SEQ ID NO: 122644 - protein, 197 aa, Heterodera glycines
MSVSPPIAFPSPSHCHFSSIERNFSPFSVNSQPGLRYLRHASGVVVLTLDKSHVLMRDQCKNIAQVLWDMSLAKTSSAKSNESKGRKRGVDRSKLEPTGKGKKGGLPMSPQTRICIIRDSDGVDYVIRAGIRATLLEVNDEWLTKEPNLLRTAADNQGFIAILMPPISGNGLRNMKIPKEFDGTEGGERRDRETVWG

SEQ ID NO: 122645 - protein, 341 aa, Heterodera glycines
DKDDRTAINRMTSEEKKALDSSYEEIYNDFRRAAESHRQTRKYVKSWIKPGMKLIDICERLEAHSRRMINESGLEAGLAFPTGCSINHCAAHYTPNAGDETVLGPSDVVKIDYGTHVNGRIIDCAFTLTFDPKFDTLLNAVREATETGIREAGIDVRLCDIGEAIEEVMTSYELELDGKTFPIKPIRNLNGHSIGPYRIHAGKTVPIVKNGEQVKMEENEFFAIETFGSTGKGHVHDDMETSHYMKNYDLHEEHIPLRLTRSKKLLATINKNFGTLAFCRRWLDRLGETKYLMSLRDLCEKDIVAPYPPLCDQKGCYTAQWEHTILLRPTCKEVVSRGEDY

SEQ ID NO: 122646 - protein, 179 aa, Heterodera glycines
MSSASRFNEYQVVGRHQPSETNPQPTLYRMRIFAPNAVVAKSRFWYFLKKFRKVKKATGQIVAVNQVLEKNPTQVKTFGIWLHYNSRSGTHNMYKEYRELTRVNAVQACYQDMAARHRARFRSVQIIRVAEVATKDVRRPYIQQILEKNLKFPLPHRVYRAASKRHNSLFIASRPSTHA

SEQ ID NO: 122647 - protein, 79 aa, Heterodera glycines
FIPMLIKVKTLTGKEIELDIEPTDKVDRIKEKVEEKEGIPPPQQRLIFAGKQMLDEKTAQDYKIQGGSVLHLVLALRGG

SEQ ID NO: 122648 - protein, 142 aa, Heterodera glycines; identical to SEQ ID NO: 120682

SEQ ID NO: 122649 - protein, 94 aa, Heterodera glycines
MKICPLFGPKMSAFCMIISVWGIVFLGLLGVFFYMHAVTLFPDLHLEEEAKLERQMVEEKYEEKAKQCWIAAGMYVVTLIAVFWQNRFNTTQIL

SEQ ID NO: 122650 - protein, 237 aa, Heterodera glycines
MRSPSPTDNDKARSLNVYRRKLAEYKEIENRLKELRTKERESHKLFDKSENEIKSLQSVGQIVGEVLKQLTEEKFIVKATNGPRYVVGCRRTIDKEKLKQGTRVALDMTTLTIMRQLPREVDPLVYKMSHEDPGNVSYAEIGGLSEQIRELREVVELPLINPELFKRVGITPPKGCLLYGPPGPPGAPGQPGQPGNSGQPGQPGAPGQPGKDSGYCPCPPRSSVLAVKKKMAAAKKA

SEQ ID NO: 122651 - protein, 399 aa, Heterodera glycines
MTISAPADVDKLQDAANRMRISSIEQTCAANSGHPTSSCSAAEIVATLFFAEMRYDVKDPRSASADRFILSKGHACPILYAAWEEAGLLSRDQVLSLRKIDSDIEGHPTPRLNFIDVATGSLGQGLSCAAGMAYTGKYVDHSSYRVYCLMGDGESAEGSVWEAAAFASFYKLDNLVAIVDVNRLGQSQETQLQHDIEAYVQRFAAFGWNAIGLEDGHDITALLNAYANAKNVTGKPTAIIAKTLKGKGIDGVADLNNQHGKPVSKDKAEPIRALLKSDKPANWTIPAPIRDAPAVDLGIGAIAMSAPPQYKMGEKVATRQAYGNALLKLAEANKRVIALDGDISNSTFSNLVQKKLPEQFVQCYIAEQNMVGVGVGMACRGRVLPHVSTFAAFFTRAGE

SEQ ID NO: 122652 - protein, 169 aa, Heterodera glycines
MLKAKPHVLFVQCRFLRMMKSIPKDSKFTAKFGDTSMFDFGEVRTSLLRKGQAPEEKCKQLFPTDPDAPIQLGFNPFQRADRKCLLCELGIQLDYKNGRLLQQFVSNFSGRVYDQHVTGLCKKQYQTLLATIATSRKAGYMPVLVKDAKYLRDPRLFDPLKPIRTHSYD

SEQ ID NO: 122653 - protein, 201 aa, Heterodera glycines
  unsure (1)..(201): unsure at all Xaa locations
MTLRLGSKLKFSILLQNVGIRKNPFRNSYNYPITFEHVVFPPNNQFKLPTMPPEPIYDESLGETKHKLTKQFIEARGFEPIHTELIHKQYGLVAMSGGFIKAEDFAWIQQEVNEKLVDKQFAIWRVNAPWLPRVRRPPSTKKGGGKGPIHHYETPVRTGRVIVELGGXSTEQEARSMVMHRYEHMPFPVECVSQELMDKRR

SEQ ID NO: 122654 - protein, 122 aa, Heterodera glycines
MKLVRFLMKLSHESVTIELKNGTQVSGAIQGVDVAMNIHLRSVKMTVRGREQISLDTLSIRGNNIRYIVLPDSLPLDTLLIDDEPRKKPTQRRFGGRGGRGGPRGRGRGRGGPPRGGGGGRR

SEQ ID NO: 122655 - protein, 237 aa, Heterodera glycines
RTPFIVINYCWLVNMTTTGWPAVVNSTAHNALLSQKNYSNLNRTINLYPLTNYTFGTKEPQSERDHSVQARFQRLRDEYEKTGMRRSVDGVLLVHEHSLPHVLLLQIGTTFFKLPGGELNHGEDEVDGLKRILTETLGRDDTPKTQWIVEDAIAQWWRPNFDPPRFPYVPAHVTKPKEQTKLFLVQLPDKAFFAVPKNFKLVAAPLFELYDNSAGYGPLIASLPQILSRFNFLYNYA

SEQ ID NO: 122656 - protein, 229 aa, Heterodera glycines
  unsure (1)..(229): unsure at all Xaa locations
VSASLDKPMLLKRKEAKTYGKKQLIEGRFEAGQSALIIEDVVTSGASVLETVAALRAVGLRCVHVFCVLDRQQGGEQRLGREADIVLRSLLSMGSLLDFLVAXGTIDAGKKTQIVHQLQNPIFDDSATHLQEQKTEKNEAECVPLVVSSSVVPTTTSVGWAQQFADGTLNRRLAQIMVAKRTNVCLAVHCTHWDQILEIVSAVKEHVCAVKLHHDIVVDFGAEFVAKLH

SEQ ID NO: 122657 - protein, 318 aa, Heterodera glycines
QRSVFSLSRRFYVSYAQPQQKVQTHKREKPHLNVGTIGHVDHGKTTLSAAITKVLSRQKKARFVSYEDIDKGAEERARGVTINIAHIEYESDNRHYAHTDCPGHIDFIKNMITGTAQMDSAVLVIAADDGVMPQTREHLLLAKQIGLREIIVFVNKTDLVDTDVMELVEIEARELLTAYGFDGENAKIVFGSALRALADDDDKCILELINALDGLEEPVRTENGPFLMPISSKCKITGRGSVLIGTIESGTVKKGDTLELLGQEYAQKTLIADIHVFGKSTAQSSAGEHVGLLCKNLYYDPISRGFWLTKPGTVTPTN

SEQ ID NO: 122658 - protein, 256 aa, Heterodera glycines
MTIHSRKVVAYYYDGDVGNYYYGQGHPMKPHRIRMTHNLLLNYGLYRKMEVFRPKAASLEEMTKYHSDDYMCFLKSIKPDNIADFGRQMQRFNVGEDCPVFDGLFEFCQISSGGSIAAATKINKKHVDVAINWMGGLHHAKKSEASGFCYTNDIVLAILELLKYHQRVLYVDIDIHHGDGVEEAFYTTDRVMTVSFHKYGEYFPGTGDLKDVGAGIGRYYAVNFPLRDGIDDETYERIFAPVMEKIIGAYQPSVIV

SEQ ID NO: 122659 - protein, 236 aa, Heterodera glycines
IAHTQMKLMKHRNKKAHIMEIQINGGTVAEKVDWAREHFEKQVPVEQVFEQDEMIDCIGVTRGKGFKGVTSRWHCKKLPRKTHKGLRKVACIGAWHPSRVSFTVARAGQKGYHHRTEINKKIYRIGKSCLTADGKKNGMTDFDITEKNINPMGGFPHYGLVNQDFLMIRGCCIGCKKRPITLRKTLIKQTKRFAFEKINLKFIDTSSKFGHGRFQTSAEKKTFMGKLKKDFLAESA

SEQ ID NO: 122660 - protein, 577 aa, Heterodera glycines
MPPTTREHIKESQYGFVYGVSGPVVTAEKMSGAAMYELVRVGHSELVGEIIRLEGDYATIQVYEETSSVTICDPVLRTGQPLSVELGPGIMGSIFDGIQRPLHDISEMTKSIYIPKGVNVKALNRAKRWEFMPRKDLRVGDHVTGGDIIGMVHESALVKHKIMVEPKACGTVKFIAPQGQYTVEDTILEVEFAGHTQKLTMMHIWPVRNPRPSAEKLAANFPLLCGQRVLDALFPCVQGGTTAIPGAFGCGKTVISQSLSKYSNSDAIIYVGCGERGNEMSEVLRDFPELTMEVDGVTTSIMERTALVANTSNMPVAAREASIYTGITLAEYFRDMGLNVAMMADSTSRWAEALREISGRLGEMPADSGYPAYLAARLASFYERAGKVKCFGSPEREGSVTIVGAVSPPGGDFADPVTSATLGIVQVFWGLDKKLAQRKHFPSINWLISYSKYMRALDDYYEKNFAEFVPLRTKCKEILQEEEDLSEIVQLVGKASLAEADKITLEVAKLIKDDFLQQNGYSSYDRFCPFYKTVGMLKNMIGFYDFARHSVETTAQSDNKITWNQIRDHLGDIIHEL

SEQ ID NO: 122661 - protein, 165 aa, Heterodera glycines
  unsure (1)..(165): unsure at all Xaa locations
MEGIFGTQRGGGDILPNNDNNGNHNDRQPLLLEENEKASYGALGPTEDSFRQDKHWWKRSGKLKASKRQLGIFAYSSSVDYALIAFGTVASVLHGAGFPLLSIVLGGMTXRAENSDFVHGQTPRQNATNSSAISPISKEEFQSEVAAFSVYYLVLGFVMVVTSYI

SEQ ID NO: 122662 - protein, 263 aa, Heterodera glycines
MPKRNASEAANATKFEKGPSAKNARIQTKKVSEELLNGKNRLNEAKEDDVPVWCLKKAQEEKPSRQCPYLDTIDRGVLDFDFEKLCSVSLSHINVYACMVCGKYFQGRGTNTHAYTHSLDSDHRIYLNLGTLKFYCLPENYEVIDPSLDDIKYVLKPTYTPEQIKLIGRNVKMARAWNDTLYYPGIIGLNNIKANDYTNVVFHALSHVPPLRDYFLREQNYMHIKRPPGDKLTLMPQRFGELLRKLWNPKAFKAHVSPHEMLQ

SEQ ID NO: 122663 - protein, 327 aa, Heterodera glycines
INSAINNGENAHYDESCSSTLASTFSNGGRNPESGVATTDLYGRCTRSHSGTSAAAPEAAGVFALTLEANPKLTWRDLQHLTVLTSSRNSLFDGRCRELPPLELEDIKRQLVSRQASCSHFEWQTNGVGLEYNHLFGFGVLDAAEMVLMAKVYKTAPPRFHCEAGTIEMPREIPASGEMVLTLRTDACTGSTTEVNFLEHVQAIVSLNSSRRGDTTLYLISPAGTPSMILSRRPKDDDAKDGFTNWPFMTTHTWGENPRGRWRLVVRFQPGKSTPKGHKYRGTLKKFTLMLHGTKEPPYRGIEPLQGHANSKLSVVESAHKRMANRR

SEQ ID NO: 122664 - protein, 181 aa, Heterodera glycines
MPIKASGETLRKYIVVGRKLPTANDPNPTLHEMVIFASNHVVAKSRFWYFTSMLRRVKKTHGEIISCQEVFEKKPGSVKNFGIWLRYDSRTGHHNMYREYRDVCEAGAVTQCYRDMGARHRAQADRIQIIKVQTISVADCKRAGVKQFQNSKIKFPLPHRVNSKRRNMTPFTTQRPRTHFV

SEQ ID NO: 122665 - protein, 172 aa, Heterodera glycines
  unsure (1)..(172): unsure at all Xaa locations
MAAQNPMRELKLEXLVLNICVGESGDKLTRAAKVLEQLTGQTPVYSKAKYTVRSFGIRRNEKIAVHVTVRGAKAEEILERGLKVKEYELRAANFSQTGHFGFGITEHIDLDIKYDPTIGIYGMDFYCVMGRAGFRVSRRRRAVAKVGAPHRINKDETIEWFKKNYDGVILNK

SEQ ID NO: 122666 - protein, 225 aa, Heterodera glycines
NYRRKILKTKIQGPDLNRTKLLHTFTCTFRFDVASHLKRTVNKGQSIRIKIDRFSEWTEQDQTDFCKHLLQRMCHHQHGQIDQFLGPMLQRDFIALLPTGLAENVLHLLDAKSLCASEFVSRRWSRVIVNGLLWRKHIERQVRNDALWAGLAIRRGWKKYFFCSKDQATRAISQSWRQPKNGEDALEFQHKFYRELYPKITADIRQIEQNWREGRHRLERINCQS

SEQ ID NO: 122667 - protein, 256 aa, Heterodera glycines
MSFGKECVDLFGTKDLYQILKLDRSKSNLSSAQIKKAYYRQSILWHPDRFASAQHDETTRELAKQKFQVIGRAYVILGDSEKRKAYDETGSLDDENEFYEGKDWSAVWRGVFKKVTPEEIEAYLAKFRGSQEEIDEVKEAYQKHKGNMDKIMQSVVGAEHPDEDRIREIVRHGIERGELRAYARFVNEPASAPTRRAARAQREEGETQHALEELRQREDVSKGTDGDDSLGALKRAKQRKRAQKMDDFLDKLAQKY

SEQ ID NO: 122668 - protein, 244 aa, Heterodera glycines
MNSIGCPSSSNGPSSAMPSSSADCSADRSLPSSSSVIFQQFTIDQRHFVDEDYFSLESIFATNTNICCTFESKTPPALFPLLGRKAPEVISEKGYRANVPAWLVPAVDHICSFAVPTVYNSVNRDVIHAGAQSVNLEQLQRHYYTLGTFICRLVPGEQAQHIALALLSAFTQRIGRIVRDCTNTGAKPTRLDETEKRIFWTMQRTEHRKGLWMGNRREDEGRHRRAAKRKHCGGISTLLSVKNC

SEQ ID NO: 122669 - protein, 142 aa, Heterodera glycines
MATRKLSFPEKIANILGVIYRYHEPRLPRYKDILKKVCVRELAPPTPKDWPQIKADYAKLDTVMRTQAYRQFKLKEFLVYSAVFVEVLCWFFVGEIIGRGSLTGYIVRSSFVDPKAAKKMAHFKWDDHHELKVENDEEQSGH

SEQ ID NO: 122670 - protein, 236 aa, Heterodera glycines
MNRIRKAVTVLSGNESNIPEKIAKAEPQHHDIEKPVSSLKFGGGATLFPAEYADDVDLYLRQLERRTPLDFDFLSVHKTVDGRMRQILVDWLVHVQVRFKLTIETLSLSVHILDRVLLALPGINKTNLQLLGVTSIFIAAKFEEVVMPNVDDFVYVAANMFKREDIMRMEPRVLSGLKFNLSVPYAVQFLRSYRFYASPSKSVWEFAKFVSEVAMVCYALAHFPPSVVAAVSLHLA

SEQ ID NO: 122671 - protein, 204 aa, Heterodera glycines
MAKKQYDLLFKLLLIGDSGVGKTCILYRFSDDAFNTSFISTIGIDFKIKTIELRGKKIKLQIWDTAGQERFHTITTSYYRGAMGIMMVYDITNAKSFDNIAKWLRYIDEHASEDVVKMLLGNKCDMSDRRVVPKERGEKIAIDHGIRFLETSAKANINIEKAFYDLAEAILDKVPDRNSMGPGPNIKPLTDGADRSTKSNCCYP

SEQ ID NO: 122672 - protein, 131 aa, Heterodera glycines
MSSSDLLAHNSSTSGSSSGATDKLAVFGGCEGPDACYVMLVSSDGHEFVIRKEHALISKTIRAMLSGPGQYAESETNEVHFREIPSHVLQKVCHYFAYKARYTNSATEIPEFFVAPEVALELLMAANFLDC

SEQ ID NO: 122673 - protein, 122 aa, Heterodera glycines
MAFPYKDDKPQEAAPVEDRIRITLTSQNVKSLEKVCEQLIRGAKDENLVVKGPVRMPTKILRITTRKTPCGEGSKTWDRFQMRIHKRIINLNSSSDVLKKITGISIEPGVDVEVTIAESPSN

SEQ ID NO: 122674 - protein, 180 aa, Heterodera glycines
MAKLESFCAINGSRPLEAKAEFRPINSMDFHSDVGRMLYTIAILLMFSFVIFALMVRSISRSRSSAELETLLDAMRFREELDIQLRQKHRLRKAKRKVTAWLCRGNGAKLWQSSPHILIPNNAVSVRNHSLQSTGSYIPEIVISTENTNPATVEGILRNIERQNSFTPSLSLIYDFSYDS

SEQ ID NO: 122675 - protein, 271 aa, Heterodera glycines
MENPSDFTLGGALPTSSTDDYLKLKRLENKLANLDVMEEYLKMDMRNLEKELVHAQEEVKRIQSVPLIIGQFLEAVDYDHAIVGSTTGSNYYVRVLSILDRELLKAGCSVSLHKYSNALVDVLPPESDSSIQMLRADEKPDVVYSDIGGLDTQKQEVREAVELPLTNGELYEQIGIEPPRGVLLYGPPGCGKTMLAKAVAKHTKASFIRVVGSEFVQKYLGEGPRMVRDVFRLAKENSPCIIFIDEIDAIATKRFDAQTGADREVQRILLE

SEQ ID NO: 122676 - protein, 284 aa, Heterodera glycines
MAPSYPLASLYVGDLHPDVTEAMLFERISNAGPVLSIRVCRDAITRRSLGYAYVNFPQPADAERALDTLNFDMILNKPIRIMRTQRDPSIRRSGAGNIFIKNLGKEIDTKAIYDTFSMFGSILSCKISTDIDGGSKGYGFIHFETEEAVNSAIAKVNGMLLDGKKVFVGKFLPRSARDKQIGDPSSRFTNVYVKNFGDAMNSEKLSEVFSQFGEIISAKVMEDDSGKSKGFGFVAYKDHESAARAVEKMNDVSVPGSEKVEQKFTVCRAQKKSERQAELKRRYE

SEQ ID NO: 122677 - protein, 238 aa, Heterodera glycines
LTLSCKHSVYIQIRFFLLDEADSLLGGQSDSAQIVHELHSRIPKYSEFGERLQMIVSSATLHNMAVQRLATQDMYFPQWIDLKGQDSDTETVHQVVCMVDPCEDKSWIRLRSKTGQSVHTDSVHARDQLQTGSDNPETLSEAVKVLKGEYLVKAIEEHKMDQAIIFCRTKLDCDNMEKFLAPRGYKCVCLHGDRSADERTRNLLSIKENIVRFLICTDVAARRLDILGVPYVDNVTLP

SEQ ID NO: 122678 - protein, 237 aa, Heterodera glycines
MCDEEVPALVVDNGSGMCKAGFAGDDAPRAVFPSIVGRPRHQGVMVGMGQKDSYVGDEAQSKRGILTLKYPIEHGIVTNWDDMEKIWHHTFYNELRVAPEEHPVLLTEAPLNPKANREKMTQIMFETFNTPAMYVAIQAVLSLYASGRTTGLVLDSGDGVTHTVPIYEGYALPHAILRLDLAGRDLTDYLMKILTERGYSFVTTAEREIVRDIKEKLCYVALDFEQEMATAASSSSL

SEQ ID NO: 122679 - protein, 354 aa, Heterodera glycines
MLREKCKEVKAQARFALKALKEHSERISRKALFLEEDSALFISVKYKKVPLARGNSMRKLIGLPCTDQNASNTSICLILPDFDRSNAAARDPDVDGQARRWAELLREKYGLTGEHIAKIFTITQLKREYGKQADRAKLANTYDIFMVDKKLMKIAVNFLGGTFRKATKMPLPIDSSVDISKKLKEAFSLVQLHFAPLKDSVAVRIGNLSQSLAELDSNFDVIIEAVFAHLPGGPSNIRSCYLQTSATKTSLPIFVDFGPSDEVLVEQPKNEQFAVELGECSTLPEGLMVKVRADGKVTVVKGNAGEEVLYPTAQDEWEQGDDIRPLNDDTVQKVLRKKAIGMSKGQRKRKDKAK

SEQ ID NO: 122680 - protein, 259 aa, Heterodera glycines
MAEEPVKLILVTGGVMSGVGKGIVSSSIGVLLKGCGYRVTVIKIDPYINVDAGTFSPFEHGEVFVLDDGGEVDLDLGNYERFLDIRLTRDNNITTGKIFHQVIQRERNGDYLGKTVKTVPHITDAIIEWVERVSKISVDGSGKTPQICIVELGGTIGDIEGMPYTMAFSMAFRRKTYRNRFLTVHVTKLLHESGEIKTKPAQNALRSLRETGLYPDLLLCRSQKPLTQALRSKIASFAQLDINEIIDVYDCHDIHSVPL

SEQ ID NO: 122681 - protein, 255 aa, Heterodera glycines
MPQQQHQLCVTIPYRDRWTELQQMLPLLHNFLVTIQAIAPPPRYIVVNQSEEDALRFNRAALINIGALEAERVGCDYMAIHDVDIVPLNPNLSYHYPEDGHIMHVAAGQYHPIRRYDYKNFIGSVLVITLADFKKVDGMSNEFWGWGLEDDDFYLRLKAAGMANKIRRPSNLTTDRSNTFLHLHTRSRRRDFSVDEYRKKRKRRRNTLSGLRTLNYKLNGRHTIELTEDIQIWVLDVRLYCTPTIFGTECHQNVA

SEQ ID NO: 122682 - protein, 268 aa, Heterodera glycines
MEIQRDSHLRSMKELLSTMDPQVDPNSHIEFKQKTHILCARFLGGAWKTVSLEDMKIHRIKGGMSNMLFFCRLTENHPPLKGEPDKVLLRVYFNPETESHLVAESVIFTLLSERHLGPKLYGIFSGGRLEEYIPSRPLTCHEIALPTMANKIAKRLARVHQLEVPIWKEPEYICDALERWLIQLKQMPSGSRDFDLPAESHEWAPPSINCEDLQKEIEHLRRLIVKSRSLVTFCHNDLQEGNILLPKAHSGNIRIGSESDEILSGIDG

SEQ ID NO: 122683 - protein, 297 aa, Heterodera glycines
  unsure (1)..(297): unsure at all Xaa locations
MDLVYHEKQVGRMCAQHALNMLLQGDYFTPDSLASIAQELDQRERAMLRDESEFQSQNYDDSGYFSIQVXTEALRRQANLSLEPIISPNAMKVLQNPSLAHAYICHLEDHWFTIRKIGTTWFILNSLFKAPRIVSETFLELYVHQLNTEGWSLYVVEGELPACAAETVPREFWNETRRTKKFENDMERAIALSLNEARPFLVTKTADEELFGAATPVISQAEELDIQRALEDSLREANRATSVSTAESFLVGEAIRNSVLDLDASSSHTSTNSQTSSRNEEEDDPHNRQSCSSGYQR

SEQ ID NO: 122684 - protein, 262 aa, Heterodera glycines
MDLLKSYDGSSSSDNEQELADIPSSSNHNKLLALKIPSINLTPNVIEQRAIQQVAVVDPKTKELYHNPRFDELFKPESGPQNPFKSEHQRAEKNTLTGYVEPAHFNAFHFERSLRSYDTLGYADNPTADTTSAKFVGDVGQAQEKAGESLFESVKTGGQKRKRVINYDASNVDGYTGPWARFEDEKTIARPDPELQKEMDEIVRKRKLKSRAGRKAAIAELHLAEESTKLHIKDDTDYLGRSFMEPPKYTGTNLREDFVPDR

SEQ ID NO: 122685 - protein, 265 aa, Heterodera glycines
IITLPQFDLPECVSNPNGWGPGSVSDSQVLSEFVGLPYQHFNKCDRIGRIVDWLGVDRFFKKGETRDRYNERVYGSSATAGVQFDYIHDNEESNFQLVDSSRPQKPQRPFRRQIPFRKLAQREQERREYEKYNVSTKMKRSILKEQQKAYKVFLRRGGGTRGTAQRPTGRRFNDRQAGKGRQPSVQVRPDWAVLKELDFVQLNKLYLPNIEPGKDIPGETYGTLHFYDKALMDKLSVKNPLHLEKFHASFYSLTTTEDPVFRKLS

SEQ ID NO: 122686 - protein, 134 aa, Heterodera glycines
MCDRLTQTLDLVNDLANHMCNSVGVLHASAGPCEFGTAPEELKNEPNCRLFAQQIARTAKDIEILIDSLPADEQSLSVEEHEKALLELDDERARAAKELEQAVEKAEKLTDQLGELLSRIARLQMESRPMAFST

SEQ ID NO: 122687 - protein, 226 aa, Heterodera glycines
  unsure (1)..(226): unsure at all Xaa locations
MPYTDAVTMGNSSASGTVSVPKNPARLGTFLWGVSAATGRRVLLAELGPASASTVVAKKRAKIVAHLSMSHESLLLFCDPFVHAERTFLRCSFRADLGHCAHLLSAFYSEGLPESALRIILRATLNALEHLHSRGVIHRSVCAENIWLDSDGQIRLALTRHATRISDCPKWIGVEDRVHEFTSDLSEMVAWLAPEVLMQXGICLCELANGVVPFQEMEPLRILYEK

SEQ ID NO: 122688 - protein, 127 aa, Heterodera glycines
MSGRGKGGKAKTGGKAKSRSSRAGLQFPVGRLHRLLRKGHYAERVGAGAPVYLAAVLEYLAAEVLELAGNASRDNKKTRINPRHLQLAVRNDEELNKLLSGVTIAQGGVLPNIQAVLLPKKTHGESQ

SEQ ID NO: 122689 - protein, 205 aa, Heterodera glycines
MVTAEDTVKTKEEDPKKTTTDDGSSSEEEVPELEEGDVTEEQKKVAEAAGLSEQVAEKGSKQSRSEKKARKLFSKLGLKQVHGVSRVCIRKSKSILFVINKPDVYKSPGSDTYVVFGEAKIEDLAQHAQITDVENLKPPSIIRDVRNRITPAEEESDGEEADATGIEEKDIELVMSQANVSRNKAIKALKKADNDLVNAIMALTM

SEQ ID NO: 122690 - protein, 228 aa, Heterodera glycines
MKFAVKGDDNKYCILLDSPQITGAIRYEEKNGSFNTTTFSLSNSSASVDKNASSCDASIQRISIQFAPLIEGIATEMSKKWNITLEFTKKDGKNYALSDYSLGVVFFPAQKASQKSHVYEKNGTAEWVAQLESDQSKHPNGFTCSENKLALSDASTINFEFLKLVAFDDNEKDEFRDGQIFENCPLDARTSDLVPIVVGALLAGLVVIVLIAYLIGRARAKRQGYTSV

SEQ ID NO: 122691 - protein, 238 aa, Heterodera glycines
LPAPACALPKFVISFLFDLCFVISVVSLLPKVQERMPNSGLIQASMMSLYVCYLTWSALINNPDKECNPSLIPRHNSTGDAGGNVQVITTSLPVNSLVSLVIWFCCLLYASIRTSSYTALGKIGGAISEGNAEGQDIPLSEASMSVEEGDRGTTGRNVYDNEKGSVAYSYSFFHFIFALASLYVMMTLTSWYTPSDDLRYLNDNMASLWVRVISSWLCAALYLWTLLAPVLFPDRDFN

SEQ ID NO: 122692 - protein, 210 aa, Heterodera glycines
IPHESKPHYTPEPDILHELLGHCPLFADPDFAQFSQEFGLASLGASDEMVEKLATLYWFTVEFGICIQNGAKKAYGAGLLSSFGELEYALSGQPELAAFNPPETCQTKYPITSYQPKYFVAESFADAKNKLAYCICRARVLSIFNPPRSRSTWSTSIPRQFQVNYNPYTQRIEMLDNESAANKLVRDVKSQVSKLEEALRKLDKEKAKAK

SEQ ID NO: 122693 - protein, 297 aa, Heterodera glycines
MAAIDPKDFFNKFAKPSKGAGVGAGLMTAAAVAGYALYKSMYTIEAGHRAIMFNRIGGLGDEVYREGLHFRIPWFQYPIVYDIRARPNQIRSPTGSKDLQMVNIGLRVLSRPDPGQLQTICRMLGTNWEERVLPSICNEVLKGVVAKFNASQLITQRQQVSLLVRKGLIERALDFNIILDDVAITELAFSPQYSAAVEAKQVAAQEAQRASFMVEKAIQQRQEKIVQAEGEAQAAKLLGESMKNDPGFLKLRKIRAAQKIARFIANSSNRVYLPSDGLFLNLADEDYLSLATNKGRR

SEQ ID NO: 122694 - protein, 274 aa, Heterodera glycines
VHSPAVHCLVLQWRLELHHSLFGPTEDGTDCASSTKSYALRSDGASCSTTTDAKPDFASTYEHCIDLTSTVGTSQSANLLDLVTESTSPLEVPMCKKCANAVTAELNKQLGHLEKECIQYKKSLDHLLQRRADCPFDMEASRIKLDALKSEERDLLEQLTLLEDEERTLLHELDTKQEERKKIGERDEQLYRQLRNNHSILIEQSDEQRSFKLQINQANEQIRRLSRMNVLDREFHIWGDAEYGTKRGFRVGRLEHEPREWSEIHAALGKTALL

SEQ ID NO: 122695 - protein, 118 aa, Heterodera glycines; identical to SEQ ID NO: 122611

SEQ ID NO: 122696 - protein, 106 aa, Heterodera glycines
MFFTRILPLEKAKYRTSKPRVLFRRFNRPFYQYTMRPLVQCPRCSASHEPWVLCMDCYRVLRDATEPIKRRMVSHNAYIGQRQQPMPRWTDENGINANPVIIVFSI

SEQ ID NO: 122697 - protein, 202 aa, Heterodera glycines
SLISGLLKRLEEDCIGSAPAAMDKDDAKQFEEYRARKVAMITGISGQDGSYLAEFLLAKGYQVHGVIRRSSSFNTGRIEHLYSNPMTHAVGSSFNLHYGDMTDSSCLIKLISTIRPTELYHLAAQSHVKVSFDLPEYTAEVDAVGTLRLLDAIHACGLTRLVRFYQASTSELYGKVQEVPQRETTPFYPRSPYAVAKLYSYW

SEQ ID NO: 122698 - protein, 212 aa, Heterodera glycines
MLALKSLLGRSPLVNPLVLSLRNRSIKKVKKKLAAGETLGGPEDYAYNYVEKKRGFIKPIHTLEEQIEYMNSEVFAETYKGRPICFMWKRNMKGQWKLQPPPRLFCIDRNGRFNVGNACTVCRDEYLFFDYRNPKLLEHFLYPGTDQPLPIIQTGLCQEQYVNLQAQLLKAKEHGTFIFNVPFRHFNYGQWYPKDANALISSDLEEDQPSRD

SEQ ID NO: 122699 - protein, 205 aa, Heterodera glycines
MASIDLSQEVRLYDNNAERDRIDNMAELYAMVNALECLEKVFSRDYIHTKEYTAECSKLLVQIKVALRLVPGMTIDEFFRSYYIQCPAALERIREDRPITVRDDKGNALKCIADIVELFITFLDQLKLNIRAVDELFPNLNDLYASINTMSTLPDDFDAKLRVKSWHDKLQGMAAHEEITDEVARQMIFELETAYNAFQRFLRSG

SEQ ID NO: 122700 - protein, 222 aa, Heterodera glycines
MKTSPKIKSRKTASTNEVKKECPEGTENRENVGTSSRLIVKNLPCGKKTRWDEAKVRAHFSKFGTLTDVRLKLSEKTGACKFAFVGFSSAEHCQNAIKALDGAYIGGSKLTVEECKCEVDEEEDKEEAAEEADVDSLIEKQILDTGRLFLRNLPFVCSEEQIRQLFEPFGPLAELECVVDNAGKCKGYALCTFIFPEHAVAAWKALDGTVFMGRMLHIIAGE

SEQ ID NO: 122701 - protein, 139 aa, Heterodera glycines
MIYHRFVEIGRVVYIAKGKDQGKLAVIVNVIDGNKVLLDGPSSGVPRGVWNFKDLQLTKFTLPLRIGQRTKGVREAYETAKINELWQGTEWAKRIDRKQKRAGLNDFERFKVFKAKQHRNRLVRVEMAKLKKISKPTAK

SEQ ID NO: 122702 - protein, 197 aa, Heterodera glycines
SIHISILLPHCKVQLGIRNWHDRSQVPRIFDDRRKATNKIKDVGYYFRYHRPGIDALPRIPDCKEQLYRPKYKIREPWRESQARFGENDYIDLLGDGSLHPAQLQYHVPRWLRGFPGQNRAIEPVKLIHYRNLYKSKLEQNSPHKWHQLNKRIKYLLQYHNYDKSDELRAERSLGLWEEEPDYFYKDKSRRSYQDLV

SEQ ID NO: 122703 - protein, 196 aa, Heterodera glycines
MASGFWAFVGRAWEWLKTLILPQSINGTCLNQTFINDTPSAGEFLADLEPFQIVLLSVGSVLTFTVFLLAFLQWRYIFNYVSSEQRRNKLYLLISLVPVCTFCCLLRMVWPRTALLVSSFGLLHFRLGLFVLVSLMRHLSGGRATLALSLTDKGKLIDFRGPPFCCLLYCLPRANPTEVNLTRLEWIVLQAPIIRV

SEQ ID NO: 122704 - protein, 260 aa, Heterodera glycines
MGNEHSRGRFGGNGTNKEKGDDDGGQTSPSTSTGIPASFSFLAKKRNSTKSALMGSIVVVNEGASCSSSADPGKDVDLRRIKEIPRFLPLLRGVLPGHRDIPEAQQKIDSKSILSFMHRLQQHFKSCAQTVATEQGRMFARIVEIDQLISSLFKKTSTATKRLDALNNELRKVGTFSSQLEEIQASLLDLSSSANSLNQLLSFDDRLPPLQFAFTPILTRKKLSESAGTMLPQNSDNINSGDRTAIERDLRKVSELRVVD

SEQ ID NO: 122705 - protein, 263 aa, Heterodera glycines
LAKLPTIAAMIYRNLYRDGSSVGVLDPNKDWSANFCHMLGYTEREFVELMRLYLVIHSDHEGGNVSAHTCHLVGSALSDPYLSFAASMAGLAGPLHGLANQEVLVFLTKMVADIGHEYSEQQLKEWVWNHLKSGQVVPGYGHAVLRKTDPRYTCQREFALKHLPDDPMFKLVSTLYKVTPDILLEQGKAKNPWPNVDAHSGVLLQHYGMHEMSYYTVLFGVSRALGCLSQLIWARGMGPPLERPKSHSTDGLIKLAAAATAAK

SEQ ID NO: 122706 - protein, 125 aa, Heterodera glycines
MASHTAGIQQLLAAEKRAAEKINDARKRKAQRLKQAKQEAQAEIDQYRHEREQRFREFEQNYLGTRDDIEAQIKQETEANLKAMDSNVAKNKQQVIVRLLQLVCDINPELHTNLQLQVKLFGKAA

SEQ ID NO: 122707 - protein, 182 aa, Heterodera glycines
MRPLTDEETEMLNNKLSNYIGRDNIRLLLEREDGAYAFRVHKDRVYYCSEQLARQAACVTRKKLFSVGTCLGKFTHSGKRFFLHITALDYLAPYAGGRVWLKPQAEQQFLYGNNVVKSGVSRMSDGVEANKGVIVYNMSDIPLGFGIVAKNTSDCRRADPTALVLLHQSDLGEYIRNEAMLT

SEQ ID NO: 122708 - protein, 360 aa, Heterodera glycines
SFQGECHLLPSQVAPQTSSLRLTYSAFHGVGSKFVRRMFAEFGFPSENISYVKEQDKPDPDFGTVPFPNPEEGHRVLKLCIETANANDSTLLLVNDPDADRLQLAEKEANGEWRVFSGNEMGILLTWWAWTNWRAANPTADSSRVFVLHSAVSSQMVATMAKKEGFKAAHSLTGFKYIGNLAHKLRSEGNTVIAAWEESIGFTPGTTLDKDGVSSAAVFAEMANWLRTQKGVSLREQLFRLFSIYGFHLQRNSYWGVKSTEVTKKLFADLRSDYPETIGQNFDVKFVRDLTTGYDNAQPDDRAILPLSTSSEMVTFTLVDGRAGTLRASGTEPKVKYYIELRTEPGKEEKDLSSVLEQLD

SEQ ID NO: 122709 - protein, 312 aa, Heterodera glycines
MVALFFSKFVVVPSSSSLGVSSSSAILSLVSLLSPVALPHRRSFAVVNNVKIVDPMDVRKDNVSTKKKDDGVAAEVRRKKKVYALAEFLDRPENWGKFGALDPSDRPGRSWTVEELRLKSNSDLHKLWYVLLKERNMLLSMDHAYKVRLRNMPNPERIDRVAESMERLEAVVHERNDAFLHLETGDSASPPKRTVTSFMGFTYDEYATEHYLPAEATGEKQYEQPMLDDQAHLMQVLWREKEQLKKEVALMDEYLYMDPERDGRNDMILTRPKRRYYDRVEDLPQNVVARWRKEREQFQPPTDPYAGKEDEE

SEQ ID NO: 122710 - protein, 143 aa, Heterodera glycines
MKLNPFVSSSARKSRKRHFNAPSHIRRRIMSAPLSKDLRNKHGVRSTPIRIDDEVTVTRGHYKGNAGRIMRVYRKKYVVHVDKITREKANGTTVHVGIHPSNVQITKLKMDKDRRSLLERKAAGRARVTGILKGKHTEETIEE

SEQ ID NO: 122711 - protein, 227 aa, Heterodera glycines
VLLSSFCFLTSLTIFSSFCAVFIMSDDNCCGSVGARSPTGSISSSGSADYDVALSPTQLLAMAIKKRRHLLEDKQRDYQRELLHSHLIQNLCKFLGEGRARVRRHRRSSSRRKLVRHRRWDDDTSGNGDERGQQVVPDDSRSPSSSPNPSGIVFESTVQSDANFGGDGGGRGPRWLNKRSSHSDDDGPPMKRNRADSSEDGLTFIDLNQPCEVGKFDGEFADGGRIF

SEQ ID NO: 122712 - protein, 246 aa, Heterodera glycines
MARSPLFLLSIFICTEFVLCAVKSKNLLNLNEENWRNILSGEWMMEFHAPWCPACKDLQKSWNSFADWSRDLNINVAEIDVTTNPGLSGRFLVTALPTIYHVKDGVFRLYAGPRDKNDFISFIEDKRWTSIDPLPSYKHPDSSQMGVVAVFFKLSMAVRDLHGHFVENVGVPAWASYAFFATVTLALGCVLGFIIVCIIDYVFPTGALKKKEAERRKEQTSAKKNAKESAEKANGQKEVLSDEKKS

SEQ ID NO: 122713 - protein, 133 aa, Heterodera glycines
MADDEDYDGGEMDGDEFMEEEPIEDLDAEHQAGEEEEGAENVQVINVSDKVASSNRVTTPFMTKYERARVLGTRALQIAMGAPVMVEIEGESDPLEIARKELKDQKIPIIIRRYLPDGSFEDWGIDELHITDW

SEQ ID NO: 122714 - protein, 262 aa, Heterodera glycines
GFGPVHIPNQGFRFYVECVRGTDGQCQQSAARRKTLHCAVQANPAANSFRWLKNGGPISGGNGPEFMIGTDMIGHSLQCAANNGLYGEELQSPAVYIDSYTAARLIQDNFQQVQSSAPFQQGNRVEMGQRVQMSCVVEGNPRPAVFWKLRRSNGQVVDAPCPQGLNGQYREVPPTQLPTGAAAVANSLAAQQSNSLIRLQAICDLQVANYSFSGQYWCSACSYVSQGLPECSPGQDAPGDRLLNIQVQGPPQQSETEPSVEQ

SEQ ID NO: 122715 - protein, 242 aa, Heterodera glycines
MHNQFLPLATALSSIRQYHSPSVYGKSDELLQLRIELNMTTEKATKFVSDSRQLVVLPHPFQHSEKRTILAFAGTKEAQQEVMLNGADIAIGPEMVKKILKGQFNMDDYDFCIAHTDMAKHILPLRGVIKTRFPTKINGGIGDDLNEILESFLSGINLTVRRDPTNKEWGLSEPLIGRLSMSDEQIEENVAVIVDTLCKMRKAVLGPFINRASLITASTGPQQSFFPVDVSPWEALPTEEEI

SEQ ID NO: 122716 - protein, 237 aa, Heterodera glycines
MKVINEFGYRQDARTPSQIRNIVYQMGVYSHADGSAYIEQGETKVLCAVYGPHECRFRSRAKEDEAIVICQYSQATFSVPDRRNRPRGDRRGNSFSHLLERAFESVIFTNLYPRSQIDIFFELLEADGANLAACVNVASLALADAGIPLRGLLSAVECGSADGLPCADLSSREHSELVPRLTMATVGGKDEIVLMDMKNLLHKNHLPSLLQMGVNACAQVHICLETAVFKHVEASHP

SEQ ID NO: 122717 - protein, 233 aa, Heterodera glycines
MEKEEEGEKSMNDLVTASSPTEVRPASPPASSSVSVPPSAAGVPPSLYVRLPQPDDPFYFCALAVGLAAVPPITFGISGPPLHVFVQADGVTDAPKVELEDKQLWEEFHKFGNEMIITTSGRRIFPSMSVKLSGLDEKANYYVVMDIVPRDPNVWEFSDSRWAVARPINPPSAEELLTPLHIHPNSPASGEHWMRVGASFHRVKIATSNETNRAEFVRWLAQATGGGGENGCH

SEQ ID NO: 122718 - protein, 237 aa, Heterodera glycines
STLFERRPRNFSIGQDIQPKRDLTRFVRWPKYILLQRQRAVLEKRLKIPPPINQFKFALDKPNTNQLFKLLNKYRPETRQAKKERLRQRAQDRADGKQEKLTKRPPVVHFGIKDVVKAVENKKASLVVIAHDVDPIEIVICLPAICRKFGVPYAIVKGKAFLGQVVYRKTTSAVCLCDVNPEDRNALKNLADVAVTNFNERGDELRKNWGGAIMSQRSQARQAKIEKARQRDVGQKV

SEQ ID NO: 122719 - protein, 225 aa, Heterodera glycines
MLSSQPTLIMDNGAYSIKAGYATDQSARIFPNTVFKSKGERKRIFVADELDQCTDRSALFFVLPFERGYLVNWDTQLQIWNRVFGTEGAGLGVDCQQCRLVLTDPNEVAFAFADNTDEIVFENYRFNAFLRTSASACTAQAHCSANNPCCVVVDSGHSFTHIVPFVGGQIVREGIVRIDIGGKALTNQLKDWISYRQLHMMDETYLVNCCKEDCCFVSTDFQRDM

SEQ ID NO: 122720 - protein, 119 aa, Heterodera glycines
MATAVKPRSEMSAEELAAKEQEEFNLGPLSVLTHSVRNHAQVLINCRNNKKLLGRVKAFDRHCNMVLEDVKEMWTELPKKGKGKKKSKPVARDRFIPKLFLRGDSVILVLKNPLANPDA

SEQ ID NO: 122721 - protein, 113 aa, Heterodera glycines
QPFEIHLNSPFNIRTIYNFRLINTGSKRIGFAFKTTKPKRIFLNPPCGTVGVGDTVNVIITVAPFDPNNEDIKNDRVIVEWCNAPGPSDAVFNLDWFTENAVRNVRLNVVYNL

SEQ ID NO: 122722 - protein, 399 aa, Heterodera glycines
MVKDKKYYYILEVNTSATDHDLKKAYRKLALKYHPDKNPNEGERFKLISQAYEVLSNPEKRKVYDEYGEEGLKGGGEGGGMHNPMDIFEMFFGGGGFRGGGEKPTKVRDTVHQLTVSLDKLYNGCTKHLRITRHILCPKCNGVGGAKEGVKQCENCRGRGLEIHNMQIGPGMIQRIQRACSECGGEGEINRNPCKHCGGKKRIKSEETIEVHIEKGMRDGQRLMFYGKGDQQPGLEPGNVIIVLDEEEHPVFTRRGTNLTLNMKLTLTEALCGCTKHVVTLDKRILSFTQLPGEVINHRDFYVIQGEGMPTHRHPDQKGDLIIQFFVDFPDKLPLQMKNMDLLRELLKDHEIEPEPETIGANAQNAIKLVPISEEMLRRRAHDEEASNGEPQAVRCATQ

SEQ ID NO: 122723 - protein, 272 aa, Heterodera glycines
MANKMKKKKKNAVATTTAGPQKDGGKFKQKGIKFNTEKGQHILKNPGVVHAIVEKSAVKGTDTVLEVGPGTGNLSMKLLDRAGRLIAYELDPKMVAELQKRVVGTPVQYKLRIIAGDVIKAAEWPPFDVCVSNLPYQISSPFIFRLLLQRPLPRYAVLMLQKEFADRLLAKPGSKVYCRLSVSVQLLATVEHLMRVKRSEFVPPPKVDSAVIRIQPRNPPPAINYKEWDGMLRIAFMRKNKTLSALFKQKQVVDVLRKNYAVVCGTKGKEVP

SEQ ID NO: 122724 - protein, 280 aa, Heterodera glycines
  unsure (1)..(280): unsure at all Xaa locations
MIQSGLCRLTPYELWAVCQPEVGLGREKITLRKGDGLNLYMNRDLASIYARHRLYNADKYYYLVDYGQTNHFNQLRLLLRIRGDDDLADRMEHVSFGRIIGLSTRNGKNDSVDFLIDQGAREADAYVHASPTMRAEPAELGTICRRLAESTLLFEIVFRHRNSHFTFSFRNSFRPGGTNALLLHEKFSRLRSLEHAQHEHMERIRALNADGEWKLNMEMREPGQKLARRIQEFDTVVLTAMKKMDPNPVAIYLLXLCNEIGTAMAALRVQDETIAVALPR

SEQ ID NO: 122725 - protein, 293 aa, Heterodera glycines
  unsure (1)..(293): unsure at all Xaa locations
FSPNEVREKASQMIGYHLVTKQTTAEGRLCQAVLVSKRLFTRKEYYFSITLDRSTAGPILIGSSKGGVNIEEVAATDPDAIITIPININTGVTLQIAEDMATRMGFHDECRAQAADTIQRLYDLFIKSDGNLVEINPMVEDAEGNVVCMDCKFVVDPNAEFRQKELFKLKDSSQEDELEVRAQKANLNYIRLDGNIGCMVNGAGLAMATMDIIKLHGGEPANFLDVGGGATVEQVYEAFKIITADEKKVNAILVNIFGGIMRCDVIAQGIIKAAXSELDLKIPIVCRLQGTRV

SEQ ID NO: 122726 - protein, 154 aa, Heterodera glycines
EKMFVKTFSNKTVVFNVDPTELSVEQLKALIAEEEEIAVPDQRLVFAGCQLVDGTLLRTYGVDADSTIHLDLRLLGGGKKRKKKQYTGPKKQKHVRKKVKLAVLKLYKIDDNGKIHRQRLECNSASCGAGIFMAKHKDGRFYCGKCHQTLKEKK

SEQ ID NO: 122727 - protein, 158 aa, Heterodera glycines
CIGVTRGKGFKGVTSRWHCKKLPRKTHKGLRKVACIGAWHPSRVSFTVARAGQKGYHHRTEINKKIYRIGKSCLTADGKKNGMTDFDITEKNINPMGGFPHYGLVNQDFLMIRGCCIGCKKRPITLRKTLIKQTKRFAFEKINLKFIDTSSKFGHGRF

SEQ ID NO: 122728 - protein, 184 aa, Heterodera glycines
AEDKFIVDEVKSNEWVKVNSNFSSFFRVQYSPNMLQSLLDGVKNRELGVLDRYQLASDLYALVKSSRVSVSHFLALLTVCQEEEDYFVWSAIDSGIGSIAHSLKHLDDERKLLDRFERFVCKMIESVAAKLGWEPKEGETIHVGRLRALLLSRLSHFRHQPTIQMALSKFNALIEKGVDVVPDL

SEQ ID NO: 122729 - protein, 112 aa, Heterodera glycines
VASDSKNDPAKETKSFTAQVIIMNHPGQIAAGYTPVLDCHTAHIACKFAELKEKVDRRSGKKVEDNPKNPLHPFVLSLFFAIPSTSVSIHIVVTLDNVHFFVVVLVGKINLA

SEQ ID NO: 122730 - protein, 167 aa, Heterodera glycines
MFYQTVCLLLLLSASNDVAVFGQEETTTTSTSSTSTSTTSSTSTSTTPTTTSSTSTSTTPSTTTSSTSTSTSTTPTTTSSTSTSTTPTTTSSTSTSTTPTTTSSTSTSTTPSTTTSSTSTSTSTTPTTTSSTSTSTTPTTTSSTSTSTTPTTTSSTSTSTTPTTTSS

SEQ ID NO: 122731 - protein, 49 aa, Heterodera glycines
  unsure (1)..(49): unsure at all Xaa locations
IRDHLGDIIHELSSMKFEDPXKKTEDQIKKDYEELYERMQNKFRALEDE

SEQ ID NO: 122732 - protein, 398 aa, Heterodera glycines
YSAHFGLLKHIQFQTEVLNVQRVEEFAQNGKWTVTYRKTEDEEQKVMDDTFDGVMLCTGHHCSERWPNPPFPGQSVFRGQVIHSRAFHTAKPFEDQTVVVVGIGNSGGDIAVELSKVAKKVYLSTRTGSWVINRVWEKGHPTDAVLLNRFAFALRAITPRSVQNRLIERKLNLRLDHERYGLRPSHRFLEAHVTVNDELPNRIASGTVVIKPNIQKLAEKDVTFDDGTTVYGVDTVIFATGYNFFFPQLENGRLISVQDNKTLLYKLMFPHDLSPKNTLAIIGLIQPTGSIMPISEMQARLFCAQLVGDISLPQKAQMEADALAQARRISKEFVNRPRHTIQVQYVDYMDELAKLVGCKPKLVGRIFTDPCLAKVLLFNGLVPYQFRLDGPHRWEGAR

SEQ ID NO: 122733 - protein, 179 aa, Heterodera glycines
EVENVKLFNRWSYETIEVKDVSLQDYISVTQHPVYLPHTAGRYQVKRFRKSQCPIVERLACSLMMHGRNNGKKLMAVRIVKHAFEIINLLTDLNPIQVLVDAVQNTGPREDSTRIGSQGTVRRQAVDVSPLPRVNQAGHLLTTGAKEAAFPNVKTIAKCLADELINAAKGSSHSYAIKK

SEQ ID NO: 122734 - protein, 237 aa, Heterodera glycines
LLAPYSKGGKIGLFGGAGVGKTVLIMELINNVAKAHGGFSVFAGVGERTREGNDLYHEMIEGGVIDLKGKNSKVSLVYGQMNEPPGARARVCLTGLSVAEYFRDKEGQDVLLFIDNIFRFTQAGSEVSALLGRIPSAVGYQPTLATDMGSMQERITTTKKGSITSVQAIYVPADDLTDPAPATTFAHLDATTVLSRGIAELGIYPAVDPLDSTSRIMDPNIVGNRHYDIARGVQKIL

SEQ ID NO: 122735 - protein, 214 aa, Heterodera glycines
MANPSINAKAAVLVDNPRVEFVQLDSLVVMKIVKHGDIEFYAGMSKIAGETCQGILTGLISVEDKRLEVTNCFSITRPDALHESEESAAGPETSLSDENKQGEILDMLKRFRMMNIDYESVGFYQAHPFGACFSHELLGSLVDYQSDISDAVVIVYDPVKTRQGCLTLRAYRLSKKALDLAITCDDSWSPEQTKLAGVNFANFFEELPIVVKTA

SEQ ID NO: 122736 - protein, 178 aa, Heterodera glycines
FRCLQFIEIDAGFYRGTSSEQDIRFTDKERKLLRQMKFENVLETKVDLAKINLDVIKPWITLKLNEILGMEDDVVVEYVFTQLEEKELNPKKMQINLTGFLNARRAREFMAEMWQMFVEAQDSPEGIPTSLVEKKVQELKASNSNKQPMQTYHKATEVDWNQRYQTLTGGRYGKMDPK

SEQ ID NO: 122737 - protein, 152 aa, Heterodera glycines
MAPKEKEVGKGWSFAHFFWHLIKKETRNEKERHILANGRLALSFLAVAFAGFALLYDYFFPFPKSKIILAVCSISYFVMIMVLQAYQWYVEKLTFFQAEEKTTDNGEPRHWKWSSDMKRYDDKYVLIAEYSQGTRTGSMKGANRWLLYHGGW

SEQ ID NO: 122738 - protein, 442 aa, Heterodera glycines
KPIWTRNPDDISNEEYAEFYKSLSNDWEDHLAVKHFSVEGQLEFRALLFVPQRAPFDLFENKKSKNAIKLYVRRVFIMENCEELMPEYLNFIKGVVDSEDLPLNISRETLQQSKILKVIRKNLVKKCMDLFEEISEDKDNFKKFYEQFAKNIKLGIHEDSVNRKKLSDFLRYYTSASGEEPCSFKDYVSRMKENQTCIYYITGESKDVVQNSSFVERVKKRGFEVIYMVDPIDEYCVQQLKEYDGKKLVSVTKEGLELPESEEEKKKFEEDKVKFEKLCKVIKDILDKKVQKVSVSNRLVSSPCCIVTGEYGWSANMERIMKAQALRDSSTMGYMASKKNLEINPDHSIIKSLRDRVEKEQDDKTAKDLVVLLYETSLLTSGFSLEDPQQHASRIYRMVKLGLDIPDEEEPAEQQPSTSGEPTIAEKIAGAEEEASRMEEVD

SEQ ID NO: 122739 - protein, 142 aa, Heterodera glycines
MIYHLLDLVRMGILTASKVCTLPRLSSARSMTWWWGPEKNNGRELVGPTFHGDEFYQDRLDRWYPSIRFRKNEEVITPIRHKELGDWKKLSIEEKKLIYRYSFRQTLAEFEALTPYGYLTVTLFFSMLGLTILYASFVRTYV

SEQ ID NO: 122740 - protein, 327 aa, Heterodera glycines
MTLPSIFEYLAQESLSGSMKQGIRSVLNLFSHFSGRRLSFVDSHFDELFLLLHLFLENRFLKRFSASFSENFYGMKRVPWRMNASSFSRLGHRFRSLFLIVVLPYIHDKFERLSEQIESERDAIRQKGWRRLFLRFYPSLKALLFLVTLLLQLAFVFSFSSVPSLSLLLAKCRLEKLTLSDVAQFDAEGQLPFHLRRTNVFARLWRSLVSLPSTLGRLFTYALFLVQFLEYFYSDELGRRFGQFVEGRRNIRIPTHPFNNLPTEQQTLCMEVDKCPICRRIRKNDTVLTVSGYVFCHSCIFNFVRIEHCCPITSLPATSSELVKIYN

SEQ ID NO: 122741 - protein, 158 aa, Heterodera glycines
KGIFISRLVEGGLAESTGLLSVGDEVVEVNGIEVNGKKLDQVADMMVANAHNLIVTIKPANQRNSLQRKGKADQFAVQSQYHQYFTGDGSSSSAVGKIGTFGSGGGGKVYPTGHGSSLYHLGTDRHHHHQMDEFFDDYAEDEDEDEIVDHTKTALKIH

SEQ ID NO: 122742 - protein, 178 aa, Heterodera glycines
ISINFFTKSDIESVNFINHLPEKLYFLESDGQVFHNLNDIDDGKLIQLHFRACGGKGGFGSLLRSFRIHKSSNQLMCRNLQGRRLADVREEERLKKYIAKKAEREKEKQKKKDEKIERLKAGRETKHQFEDQKHLRKRDTLLDESEDAVEAGMDALEVKAASSEHEVSETIADTEPVA

SEQ ID NO: 122743 - protein, 186 aa, Heterodera glycines
LVVLRFGNRFISRSWSRDDIASVTISFKENFGTQGRGGYFDKSGIIRDVMQNHLMQILTLVVMEKPATLSAEDIRNEKVKVLKVIKPVELDQTVLGQYIGNPLGKDDDSRKGYLDDPTVPRGSTTPTFATAVLFVHNERWEGVPFFLRCGKALNERKAEVRIQYKDVSGDIFPEDSLKRNELVIRV

SEQ ID NO: 122744 - protein, 103 aa, Heterodera glycines; identical to SEQ ID NO: 119330

SEQ ID NO: 122745 - protein, 158 aa, Heterodera glycines
MSYQTVCLLLLLSASNDVAVFGQEETTTTSTSSTSTSTTSSTSTSTTPTTTSSTSTSTTPSTTTSSTSTSTSTTPTTTSSTSTSTTPTTTSSTSTSTTPTTTSSTSTSTTPTTTSSTSTSTTPTTTSSTSTSTIPTTTSSTSTSTTPTTTTSTSTSTT

SEQ ID NO: 122746 - protein, 236 aa, Heterodera glycines
WSEHLWKIPTDWIKYQPLGASIEGSRIFAFKTPLLPELQTSIPKECRFSTLTLLQQLAFSNRSLGLVINCNNTKRYFCRRDIEGLGICYKEIPCPGRGFLYRTDAVKTFIKTIDDFLELNSDNDLLIAVCCSNGINRSGYLICNYLINRLGWSSHDALNAFESARGYSIERGSYVQALHKVDRERRSKTMPFGLDRSEHEMGNDEALPAKTDQLLPGISDFNPQLTAQMMQQFFNM

SEQ ID NO: 122747 - protein, 215 aa, Heterodera glycines
GHIDCCCKLSGMPDLSMTLSNSRILDDVPFHPCIRFRRWENDRILSFVPPDGNFRLLSYHISHQSVVAIPLYVRHNILLKNGTAGRFELMVSPKQSMGKMLEDVALECQMPKGVQNCNLMASHGKVAFDPTTRLLQWTVGKIEIGKPPTLKGTVSTSGNSAKEQLESPQITAKFKISQLAASGLKVICLDIYGEAYKPFKGVKYVTKAGKFQIRT

SEQ ID NO: 122748 - protein, 95 aa, Heterodera glycines
HHYETPVRTGRIILELGGYITEQEARSILMHLYLHMPFPVEFVSQELMDKRKGLEMKVRANNRNKFDWDTLIKYNMQNCKAWLSPYDVYWKCRYE

SEQ ID NO: 122749 - protein, 175 aa, Heterodera glycines
  unsure (1)..(175): unsure at all Xaa locations
MDAGFYRGTSSEQDIRLTDKERKLLRQMKFENVLETKVDLAKINLDVIKPWITLKLNEILGMEDDVVVEYVFTQLEEKELNPKKMQINLTGFLNARRAREFMVFFHLLDHLLSFXAEMWQMFVEAQDSPEGIPTSLVEKKVQELKASNSNKQPMQTYHKATEVDWNQRYQTLTGG

SEQ ID NO: 122750 - protein, 184 aa, Heterodera glycines
MTVTSTKNNSFPSSFKDITLHDVWASNLEAEFAKLRDLIDDYPFVAMDTEYPGVIATPVGQFRSKEDFNYQQLRLNVDCLKLIQVGFTLMNEKGQLPPARDIFQFNLHFDPSTDSFAHNSLELLKTAGFDFNKHQNGGHQIGRTLGELLTTSGLVVEPRITWLTFHSCFDFGYLIRAIMLVKLP

SEQ ID NO: 122751 - protein, 140 aa, Heterodera glycines
MTSIRGLLFTLASPLKAFYANVAVKQIDVTGMSSSVGILPTHVPTIAVLKPGVVKVHELDGNVSKFFASSGTLSMNIDGSCQVLAEELCSLSELNEQAIKNLIDVSQKKASDLNATDVQKAEAGISIEVAEAALRAISEK

SEQ ID NO: 122752 - protein, 205 aa, Heterodera glycines
  unsure (1)..(205): unsure at all Xaa locations
MALLEEGKTEQNGDEPSTKVKMAENGGGGGAEVAQNKFGSSSIRPASSVLSFFRSSKPEDPYASKLFTFLQVLTACFSGFAHGGNDVSNAIAPLVSLYTIYDEGSVHQKGETSVYLLLYGAAGMCVGLWLLGHRVIYTVGENLTRITPPSGFSIEFGAALTVLFASKLGLPISSTQCKVGSVVAVGLVQAHPVVHWTVFRNISLX

SEQ ID NO: 122753 - protein, 112 aa, Heterodera glycines
  unsure (1)..(112): unsure at all Xaa locations
MLEVVLEYLPSWIRTLNSFIDYEGQRKSERXFQVILIVHGVLGFFAGYLTQQLSVTMYSVGVGFLISCLIVLPPWPFYRQNPLNWQPNSPVEEDKAANPSSSSGNKNSKKTR

SEQ ID NO: 122754 - protein, 216 aa, Heterodera glycines
MGISDNDVQKQLRHMMAFIEQEANEKAEEIDAKAEEEFNIEKGKLVQQQRQKIMEYYEKKEKQVELQRKIQRSNMQNQSRLKCLKARDDHLKNVLEEARANLSKISADRERYPAILKGLLLQGLFQLLESKVVLRCRKKDEEMVARILPECLEEFQRTWGNRSEVKIDNEYFLSPESAGGVELLAKDGKIRVSSTLEARLDLIADKITPQVRTALF

SEQ ID NO: 122755 - protein, 115 aa, Heterodera glycines
MNTPAAYEPFLLADGEKKVVIEKDTKVPNAAVFTFNKEDHTLGNLLKHQLLKDPKVLFAGYRNPHPLEHKILLRVQTNPETTPMEALNNAIEDLVAEFSLLEERFRDAIREKREE

SEQ ID NO: 122756 - protein, 181 aa, Heterodera glycines
FGGYLASSYALEHPSRVRHLVLVDPWGFPERPQIEQLHIPIWMRVFGRLLSLFNPLATLRAAGPFGARLVKKLRSDLGIRYAHQDPDAIYEYIYQCNAMEPTGEIAFGTMSKNFGWAKRPMINRFRGISPSVPVTFIWGGKSRMDPGPAYEIQYRRQDAYADVHIVTRAGHHVYADAPADF

SEQ ID NO: 122757 - protein, 145 aa, Heterodera glycines
MAGIAAGRLTEERKAWRKDHPFGFIARQCKKEDGTLDLYNWICAIPGPKSTIWEGGLYKLRMIFKDDFPSTPPKCRFEPPLFHPNVYPSGTVCLSLLDENKDWKPSITVKQLLLGIQELLVSPNPEDPAQAEAYQIYVQNRPEYE

SEQ ID NO: 122758 - protein, 354 aa, Heterodera glycines
  unsure (1)..(354): unsure at all Xaa locations
LGIGLEDFELLTVIGRGSYAKVVQAEHKKTGQIYAIKIIKKSLVVTDEEDIGWIQTEKSVFETASNHPFLVGLHSCFQTDSRLFFXVIEFIPGGDLMFHMQRQQKLPEEHARFYSAEIILALHFLHSRGIIYRDLKLDNVLLDAEGHIKLTDFGMCKENIGPGDGTSTFCGTPNYIAPEILMGEEYGFSVDFWALGVLMFEMMAGRSPFHLPTTEEDEQTAEDLLFKMIMEHQIRIPRHLSVRAANVLKGFLNKSPSERLGCKTDLEEGLADIKMNSFFKSNIDWELLEQRQIAPPYNPNVSGDRDLQRFDTSFTNGNPXLTPDSPSFFARIDQSEFEGFEYVNPLIFNKEDAV

SEQ ID NO: 122759 - protein, 182 aa, Heterodera glycines
NAKLWEQSGHWHHYAENMFRFEIEKEQFGLKPMNCPGHCLMFDYKPHAYNELPIRYADFGVLHRNEMSGALSGLTRVRRFQQDDAHIFCRKDQILSEISGCLDFLNFVYVEVFGFSFRLHLSTRPEEGYLGDLATWEAAETQLKQALDNSGLKWELNPGDGAFYGPKIDIQIKDALGRHWQC

SEQ ID NO: 122760 - protein, 180 aa, Heterodera glycines
  unsure (1)..(180): unsure at all Xaa locations
MSAGRANIGKPAPNFSAEAVVDFDFKTVSLDDYKGKYVVLFFYPEDFSFVCPTEIIAFSDRSNEFANINTQLLACSTDSKFCHFEWVSKPRKQGGLGEMQIPILADRTQRISRDYGVLKEDTGNAYRGLFIIDTKGILRQITINDTPVGRAIDETLRLVQAFQFTDEHGEVCPXNWKPGE

SEQ ID NO: 122761 - protein, 174 aa, Heterodera glycines
NPSIFQKIILLNKEIIIMEENFCCFVFGWINIYLFFHTAFRYKFEKYVYKVTRERFGKMKAYIDNELKEAIEFRKTSKEQADSLKAVHENFPTIFQENLALQLEATYRKNVDYAWQEMKRRLDYLQEVQAIKDRFSKEMMVKLITDGVRKQIEMNEGGIRDKYLDQCIEQLRVL

SEQ ID NO: 122762 - protein, 177 aa, Heterodera glycines
MAQYVPWYYKRSPPIFCGVCVPVYLGVWSVRKFIVVLGFLLFLIGVLLLLGLLLICVAIECSAAAGALLPFALVLIIAGLLLLHCGWAAHLLDVGEGMPYGEYSTTKTVSTSTRTKRTAPKGEEEPVFEEIEGKQPPPEIKQGFWQFDEREAWQTVANPYPINYTLKPVIERQPYVP

SEQ ID NO: 122763 - protein, 67 aa, Heterodera glycines
FAYSQNYHPNCLLHLIHCQSEAMKRVCVGIWNCSKCHKKVAGGAYVYATTTAATVRSTIRRLRETKE

SEQ ID NO: 122764 - protein, 212 aa, Heterodera glycines
  unsure (1)..(212): unsure at all Xaa locations
LANAPKGGLFDAFTSNPLFTGGAGLMCVGVLFNYGRKLSTVGASVLRRKYVSTLELSNEDQCVHSRTITIQWGLDFINKQSQRKTNQLSVSSTELISESGKASTQFFFMPGQGHHYMSXGGRLVRVERERTEQMLQRADKRRTPLETVRLTTIGVKPEFWRQMLEKAAKDALSEVETGLAVYTPFGPEWHHFGKPLKKQPLDTIVLDNGIRE

SEQ ID NO: 122765 - protein, 80 aa, Heterodera glycines
NGESSKTWRFSGMKKWHVNWEIRHLKIQFDNEDVEFKPLSADCKVVHEFIGGYIFLSMRSKDQNQTLDEEGFHRLTGGWG

SEQ ID NO: 122766 - protein, 123 aa, Heterodera glycines; identical to SEQ ID NO: 121314

SEQ ID NO: 122767 - protein, 195 aa, Heterodera glycines
MEHFPSKFVLCLLIAFIAVPCSVLALSAGSRVSMLACHNNYRSQLAKGTADNKSGKMPAGSNLIQQKYDSNIESVAQKWANGCSMSHSGSSGMGENLYMTSSSTISEADALKQACDMWWAELKQFGFQSSLVLDMAQFNKGIGHWSQQAWASTAQIGCAMARCPSSTCKTCVVWHFQAAGNLMNAAVYLKSAACS

SEQ ID NO: 122768 - protein, 146 aa, Heterodera glycines
  unsure (1)..(146): unsure at all Xaa locations
MQIFVKTLTGKTIXTLEVEASDTIENVKAKIQDKEGIPPDQQRLIFAGTSTFKPLQHHFYTXPLFSGKQLEDGRTLADYNIQKESTLHLVLRLRGGMQIFVKTLTGKTITLEVEASDTIENVKAKIQDKEGIPPDQQRLISAGTST

SEQ ID NO: 122769 - protein, 161 aa, Heterodera glycines
MAENIEEILAEIDGSQIEEYQRFFDMFDRGKNGYIMATQIGQIMNAMEQDFDEKTLRKLIRKFDADGSGKLEFDEFCALVYTVANTVDKDTLRKELREAFRLFDKEGNGYISRPTLKGLLHEIAPDLSDKDLEAAVDEIDEDGSGKIEFEEFWELMAGETD

SEQ ID NO: 122770 - protein, 181 aa, Heterodera glycines
MHLINLIALFFMLFGPSVQQHTKKPTKEDKEAAVNCHNKFRSQLALGNADNKSGGKKMPKAGNMRKFEWDENLAKLADEWANKCTLSHSWNGWAGENLAMKGGTFSNKDGFEYACGRWWDELNRYGFNPNLIMTGENFSGIGHWTQMAWADTDRIGCAMAQNCPNTNWKTYVVCWYYTGGN

SEQ ID NO: 122771 - protein, 103 aa, Heterodera glycines; identical to SEQ ID NO: 119330

SEQ ID NO: 122772 - protein, 396 aa, Heterodera glycines
  unsure (1)..(396): unsure at all Xaa locations
MSSPPSSVLPQDVFILSAVRTPIASFRSSFASLNAVDLGTFVATEAIQRAGLRPDQVEETVTGCVLSAGSGQNVSRQIAIKSGIPEARQAYTVNKVCSSSLKALILGTQSVQLGQRSMVLVVGVESMSQAPFYLARGDNNYGDIKLLDSIQRDGISDAMLGQPMGVCAEKTVAEFGFTREQQDAYALASYARATRAWAGGAFGAEIVPVKVKQRKGTELMVAEDEEYRRLMPDKVTSLQPAFVKDGTGTITXANASSLNDGAASLVIASGQVEGAKPLAKVIAYAEAGRAPVDFTVAPVDAVKTLLQSVNISIDQIARWEVNEAFSVTALAFIRQLDLDPARVNALGGAVALGHPIGCSGARIVVTLVHQLESREFGIAAICNGGGEATAILVQRI

SEQ ID NO: 122773 - protein, 161 aa, Heterodera glycines
MDFCLNSFSFSPQMASSTASSSSATNEQQKIVNGFQKLRELQQATINELNKIQTEQREHTTVLKTVQSLEPNRKCFRQVGDTLFEFTASELIVLLEETIKRFKQRVDELENQVVKVGEDINAYKEKHNIRFLSNKDVIELQKKQALSKISQLDLGPGGKSQ

SEQ ID NO: 122774 - protein, 114 aa, Heterodera glycines
LRKKQHLLVQARENWTAKDLKRVVEGILKVPPEKQSLYKPTNEQRTEWEAMDEKQTLHELGFTMKNARADGPAVLALVLPEDGKSPDIVPMTVAPPVPEAMAQNKQSEAEMVEE

SEQ ID NO: 122775 - protein, 206 aa, Heterodera glycines
EETEGKLLQIREIFHDLLMSLELQEHVQWADMVQKFCSLAGMFASLQQLMRKPGHNNFDDNVKLMKMTQFVPKNVSLELDPNLTHLTEGRLSNFGHNIVPILLRTKLKPDVEEDELNIERDRSKGDIPKQIKTLNSHIDMLCGKLADFTKLHVVDRREAPSYSQEETVKLVKAICLGRGIYPKAPSSAHPGSADAGRSTSSSQKAK

SEQ ID NO: 122776 - protein, 124 aa, Heterodera glycines
VIVFLFHSRTKAESDEEGAADQNIWAVLVAGSNGWWNYRHQADVCHAWHVLVDHGVSPDRITQTECHNKVMHTFNKICFNFSKSPYVMKYAKTLANLCERRADTAQIVAILKEQCAQMEKMEVH

SEQ ID NO: 122777 - protein, 128 aa, Heterodera glycines
VEACYNARPAVVLTYFHPETAPRIDRPPTFDPLYGFPKGRKPREMQASWEELEKMKMPISERDYCAHKMVALRKCVWDRAPFASHYCHGRRHDLGLCLYDDHLMRMKEFEREKRLLMRKARKERAKAA

SEQ ID NO: 122778 - protein, 185 aa, Heterodera glycines
MIPLNLQIAESALKVLQTKTPGGEIEQSATAGAHCTNNTCKKVFTGPESDAEECVFHPGNAVFHEGLKYWSCCGRKTTDFTTFLDQLGCTRGKHCWKKKEIVTNAREDWFQRGGQVHITIYCKGALPSETSAKSDGLTLEVTINGSTKRYELFGEIAPSESVVIISERKVEIVLKQVAKIGWTNF

SEQ ID NO: 122779 - protein, 138 aa, Heterodera glycines
IKNKATFTMVRMNVLADALKSINNAEKRGKRQVIIRPSSKVIIRFLTVMMKHGYIGEFEIVDDHRAGKIVVNLTGRINKCQVISPRFDIRMADLEKWTSNLLPSRQFGFLVLTTSAGIMDHEEARRKHVGGKILGFFF

SEQ ID NO: 122780 - protein, 190 aa, Heterodera glycines
MSLTGGTVIALAYKGGVAMATDRTVFASGVHRFQNNTRQYRLNNYCLISFSGDFAEFQWLQNLLERRQMELQIDAGMDHMKPKMVHAFLTSLFYQRRSKMNPFLNTMVVCGMQPVEFHAGEIKPFIGVIDMRGNAYEVDHVATEIGKYLLRQMLETRQTQANGAEQMSKEEALRMVAAALEVSVSRNSRT

SEQ ID NO: 122781 - protein, 129 aa, Heterodera glycines; identical to SEQ ID NO: 120387

SEQ ID NO: 122782 - protein, 152 aa, Heterodera glycines
  unsure (1)..(152): unsure at all Xaa locations
LIMPEKFXHIHRVMNTNIDGNRKVPYALTAIKGVGRRYAFLVCRKADIDIHKRAGELSEEDMEKLTTVMLNPQQYKIPSWFLNRQKDIRDGKNQQVLSTNLESKYRDDFERMKKIRLHRGLRHYWGLRVRGQHTKTTGRKGRTVGVSKKKGG

SEQ ID NO: 122783 - protein, 195 aa, Heterodera glycines
MGNSSTSLMLQEEEVVGIAKETGFSRNQIVRLYSRFLSLDRQGRGYLDRDDFQRIPELAINPLGDRIVDAFFSEFGDSGAKVELINFRQFVKVLAHFRPLSKSKPNTVNSREEKLKFAFSMYDLNKNGYITRDEFKIILNMMVGTNITADQLDSIADRTITEADADKDGKISFEEFCKAMERTDVDQKMSIRFLN

SEQ ID NO: 122784 - protein, 73 aa, Heterodera glycines; identical to SEQ ID NO: 119375

SEQ ID NO: 122785 - protein, 158 aa, Heterodera glycines
MAMNTNSIHCSSASSSPSVPMTLSMFCFIFAIFLHPASSSDLLSSSDDAKLQQMLCARFPGLAECQPNDEASRGIMTKRKSAYMRFGRAAAAADPSEEHEMEKRKSAYMRFGKRSPAEEGETYQIWAANEPDAQMEKRKSAYMRFGKRKSAYMRFGRK

SEQ ID NO: 122786 - protein, 112 aa, Heterodera glycines
MASPTKVMGPHAFHYKFERYYAAAIVPLFPLAYFVHAPLVDYALTAAIVLHSHWGVMAVVQDYARPLVIGKTLAKMAPAVPYIASVVLLVGLLMFNYNDVGLTKAFEMVFSL

SEQ ID NO: 122787 - protein, 179 aa, Heterodera glycines
  unsure (1)..(179): unsure at all Xaa locations
TESNGPKVLRILEIVKNAQQKHGLRHENYRRYRGYCSRRIERIRKSLKFMHSYKCAPKRTAKFIARNVSAELIGDLRFLQIAVFEVERNWAYAMQMKFEMIDLPLSRKKFHXVQKLRRAVKSAHFLHSLINDNPLVHEVTRVETVSYVSFIFGSLELELKNWXTTIETXTEXESVLPTA

SEQ ID NO: 122788 - protein, 142 aa, Heterodera glycines
MSSRATPGGIGFQVVAKQASKFNDQEGKLILDWVKKLSGENFSTDGSRENFYKLLKDGTLLCKLANGIQPGSVKKIQQPTGNFACMENINAFVSFAKAQGVPTEETFQSVDLFEARDLYSVCVTVLSLGRILEKKGKPNPFS

SEQ ID NO: 122789 - protein, 143 aa, Heterodera glycines
QDLFTVKNIDPDGKKFDRVSRLFCDSESFKMGLILDVNTQLYAMGINDKFRLMLCTSIRDDGLTEEGEYDKSIENIPRVRMFEYVMYGKIYRIENDEGTAETSRLTAYASFGGLLMRIQGEANNLTGFEQDKNIYLLLKKVPN

SEQ ID NO: 122790 - protein, 186 aa, Heterodera glycines
MKGFFALFVFAFTLSVFSAAHLPPLDINQIPAEYRELIPEEVTKFYHELTEDDKKALKEVAERHEEFQTEEQAMEALKEKSEKLYNKAVELRTLVKGKIDQLVPDAKAFVIGMIEKAKGMRPKAGEKPKLEELRTAANELIEKYKALNDEAKESLKSNFPKITSVIQNEKFQTLAKSLLKQEAPAA

SEQ ID NO: 122791 - protein, 136 aa, Heterodera glycines; identical to SEQ ID NO: 120882

SEQ ID NO: 122792 - protein, 465 aa, Heterodera glycines
MGKEKIHINIVVIGHVDSGKSTTTGHLIYKCGGIDKRTIEKFEKEAQEMGKGSFKYAWVLDKLKAERERGITIDIALWKFETSKYYVTIIDAPGHRDFIKNMITGTSQADCAVLVVACGTGEFEAGISKNGQTREHALLAQTLGVKQLIVACNKMDTTEPPFAEARYTEVMTEVSNFIKKIGYNPATVPFVPISGFNGDNMLEPSDRMPWFKGWAIERKDGNASGKTLLEALDSILPPQRPTDKPLRLPLQDVYKIGGIGTVPVGRVETGVLKPGMVVTFAPQGISTEVKSVEMHHESLPEALPGDNVGFNVKNISVKDIRRGSVASDSKNDPAKETKSFTAQVIIMNHPGQIAAGYTPVLDCHTAHIACKFAELKEKVDRRSGKKVEDNPKALKTGDAGIVDLIPTKPMCVEAFTDYAPLGRFAVRDMRQTVAVGVIKAVEKTEGGGKVTKSAQKAAAPGGKKK

SEQ ID NO: 122793 - protein, 138 aa, Heterodera glycines
VDFCPTKNAIAARVVHYEDGIVIEASTREKTVQSQLYSQTDVSAANNIGRLLAHRCKMAGIEHCMSSLTENELEGSKKREAFLRALNESGLLLEEPEAIPHTHLNDPNLVWETFPIQHNRADKLDELDLSLEPGKGVC

SEQ ID NO: 122794 - protein, 139 aa, Heterodera glycines
  unsure (1)..(139): unsure at all Xaa locations
MGKPTSVKDVDQHEIVQSVATFLKKSGKIKLPDWVDLVKSGKNKELAPINPDWYYERVASVHRXGVGSFRNVYGGKNRRGVALSHFTNASGAVIRKALQSLEEIKWVEKDGGTGGRKLTKQGQKDLDRIASQLRYRTEE

SEQ ID NO: 122795 - protein, 215 aa, Heterodera glycines
MEMSTSFLDSLPGFSVVDFNGSHEKRTCAPGEQLFSVSSGYHAGNGCYEFHGSICASLAGFLHVYSLRDSQNTETNIVEVRRNIDERSNVLPSQGKIVTARVERITTTFAKCAIICVEDTPLANEFNSTLRKEDIRDKERDKVELHKFVQPGDIILARVLGYGEAHTSYLLTIAEAELGVVIGRSQNGERLLPENSEIMKVPGSEYRETRKVAQL

SEQ ID NO: 122796 - protein, 244 aa, Heterodera glycines
SLRAQTVMKTRLKGAQKGHSLLKKKADALNMRFREILKKITENKKRMADVLKEAAFSLAEAKFTAGDFSHMVVQNVSSQAQYTVRMKRENVVGVFLPVFEAHRKEGSDGDAYNLTGLGKGGANIGKLKRNYNKAVELLVELATLQTCFITLDEAIKVTNRRVNAIEHVIIPKIENTLTYIVTELDEMEREEFFRMKKIQAKKKRQRDEEKARETENVLTERQPDDGRAPKSLLEDEEEVPVLFA

SEQ ID NO: 122797 - protein, 74 aa, Heterodera glycines
MSDNKEELVQRAKLAEQAERYDDMAQSMKKVTELGAELSNEERNLLRDNLTLWTSDTAGDEQEAGGEAGEAGGN

SEQ ID NO: 122798 - protein, 170 aa, Heterodera glycines
AQIKAQMASAAPPLGPSLGQRGVNVANFCKEFNNLTSTIRFGTNLPMSIHVKPDRTYEIDISTPTTEWLLQQAAGIRRNRQEEGEIVGMISVKHVYEIAKVKSQDKSLIGVPLKEICQLVIERADSIGIKVQNEDLDPEEYRKFLEHRQEVVQRQLEEIAKQEEAKLART

SEQ ID NO: 122799 - protein, 51 aa, Heterodera glycines
MAAHKTFIIKRKLAKAAKQNRPLPHWVRMKTGNRIRYNAKRRHWRRTKLKL

SEQ ID NO: 122800 - protein, 198 aa, Heterodera glycines
MGRHKKTQKFRNKLQKLIKPTDDRIKDEIRVKKPPKEDENALKIKEAPKISAAMFLKYNTQLGPPFHVIIDTNFVNFSIKNRIDIMTGFMDCLYAKVVPYISDCVLGELEKMGRRFKLALKIIKDNRFQRLQCTHKGIYADDCIVQRVTQHKCYIVATCDKDLRQRIRKIPGVPIMYVRDHRYTIERMPDAYGAPKLG

SEQ ID NO: 122801 - protein, 151 aa, Heterodera glycines
AVLAPGKLRLQKWYVAYPDKAKKKITRELVTTILSRKPKMCAFLEYKDTKVVYKRYASLYFCCAIEQTDNELLCLEVIHRYVELLDRYFGSVCELDIIFNFEKAYFILDEFLLAGEIQETSKKQVLKAISAQDLLQDEETTQGLFEDNRLG

SEQ ID NO: 122802 - protein, 173 aa, Heterodera glycines
  unsure (1)..(173): unsure at all Xaa locations
AAPKTVARRARPXRATSNVFAMFDQPQIQEFKEAFNMIDQNHDGFIDEHDLKDMFASLGKEVSEKFIENMVNDASGSINFTMFLTLFGEKXLTGTDPEEVIKNAFQCFDEDNSGTIAEDRLRELLTTMGDRYTEEQVDELFRDAPIKNGRFDYVEFTRMLKHGTKEKDEEEKS

SEQ ID NO: 122803 - protein, 203 aa, Heterodera glycines
MAHFMLGIRTDNWVILAADATHFLSGAIKISESHQKEYKLGPLTSMVCFGEAGDVDSFANWAKANCELYSRRNGYELRPKEVHHWLRKNMADNLRSEDMWRVNAIIGGFDSTDKKAYLTMIDYLATNIPPQNFIFYGFPGAFAYSIMDSFYRTDLTEQEGLELVQRMIDQVKRRAMMDLAEYRVVVINSKSSRTIAGLKPKAA

SEQ ID NO: 122804 - protein, 116 aa, Heterodera glycines
MTDQQNSIVGGWTEQNVNDEKIKSLASRSVAKINSESNDRFSLFPLEVLSAKSQVVAGIQYQLRIKVGRSNCSKNPNLADHANCATEDDQTARKTFLVTIWEKPWEQFEQITYKLE

SEQ ID NO: 122805 - protein, 209 aa, Heterodera glycines
  unsure (1)..(209): unsure at all Xaa locations
MASPALHTFNALLATGASLLTLMAFYYMLTGQGDRFDIAWFLTETSPYMWAGIAIAASLSLSVIGVGWGIFTTGSSILGGGVKAPRIRTKXNLVSIIFCEAVAIFGIIMAFVFAGKLGKFTRETATQEVIVKNLAAGYAIFGGGLTVGFSDLICGLAVGIVGSGAALADAANPVLFVKILIIEIFASAIGLFGMIIGIVQTNKFNIGTT

SEQ ID NO: 122806 - protein, 155 aa, Heterodera glycines
MTVQLSALLLPLLIITLLCNFAMANLIFHNIEFDSDCMKAMCMADSGCEQQGCAEDVFGRLGCGFFRMNIWQYKQCYEPGREIGELSETAWIRCSEDYECASKCIVQVASRFRLKCYGKSDCETIARIHDGGANGCRTGETLPYWFNVKSFCPDC

SEQ ID NO: 122807 - protein, 132 aa, Heterodera glycines
VEGGVITLHTRKVLNNRLLFRKQMVVDILHPNRASVPKSEVRERLAKLYKTTQDVVVAYGFRCQFGGGRSTGFANVYDSLDYAKRFEAKYRLLRQGVGQKAEKGGRKQRKERKNRQKKVRGVKKVKVQAGKK

SEQ ID NO: 122808 - protein, 82 aa, Heterodera glycines
RASEKHFGNLSKAYGWYYVRIAPVEQKVWKGFFFDAFVKPVKEQLPHWWMFFFPVVTYFLVTDWAKKEYRRLGRIKEFTDEE

SEQ ID NO: 122809 - protein, 149 aa, Heterodera glycines
  unsure (1)..(149): unsure at all Xaa locations
ARKIPHIHRVMNTNIDGNRKVPCALTAIKGVGRRYAFLVCRKADIDIHKRAGELSEEDMEKLTTVMLNPQQYKIPSWFLNRQKDIRDGKNQQGLSTNLESKXRDEFERMKKIRLHRGLRHYWGLRVRGQHTKTTGRKGRTVGVSKKKGG

SEQ ID NO: 122810 - protein, 82 aa, Heterodera glycines
MSALIPFIIVTLFWAVIGAGGPFLVPSGMNRGIIQTMIVLTAVCCYMFWLIVYLHQLNPLIGPQLPVKTIWWIHNTWGNVKN

SEQ ID NO: 122811 - protein, 204 aa, Heterodera glycines
MFVSNSVFLPVSRFFHCRALSPVNLVVHPFVARKCAFLSTPSLSFPFRRQYSSLASATTTGASNDKLNVDKLFEKINFEVRGHDFTVLKSYSLFVMNVCRVLDIDFTSRHRAMINTDHSKSNRPKYQRWFQWLLSAKFAKKKYKLHYETRTYLMEFDVHHLTGSTASAFLEYIERNIPEGVAMKVTYTEMCFLPETIVKTVMDN

SEQ ID NO: 122812 - protein, 174 aa, Heterodera glycines; identical to SEQ ID NO: 119666

SEQ ID NO: 122813 - protein, 60 aa, Heterodera glycines
FIQIRLHFFHQTDEANAYAERNQMAFIETSALDGTNVGAAFTNILTTICRSQSTTAGSTP

SEQ ID NO: 122814 - protein, 83 aa, Heterodera glycines
  unsure (1)..(83): unsure at all Xaa locations
ALIPITKKRLGRDPTVDTSFLPDRQRDEQLLRARERIAXXWQEMQESEKNEDITLAFCYWDGSSHRKDSQTNKGTTIAQFLQK

SEQ ID NO: 122815 - protein, 101 aa, Heterodera glycines
  unsure (1)..(101): unsure at all Xaa locations
IDQCDVNERICLVDAEXVFRLDKLADRHIRDILPQRFPKRVRGEGYDHLXQCTKYVDYYENVELNFFIKYVELCSELTVVACYMKYTHPLMWERRHIDIMD

SEQ ID NO: 122816 - protein, 205 aa, Heterodera glycines
LIAKVRPSSYGQRRNYSSIDISAEKWLMHYDADSLAKLENPPSLADGINRELERDIRYLGCELIQSGAILLRLSQTSAATAQILFQRYYYLKSFVRYNFEHMVQACLLLASKIEEEPRKPRDVLNVYNRLKQIHHRRNAVASQHPEDLQKLSKKFEHLELCSKRYQELKNIVIKAERRLLNVLGFVVHVHHPHKLIYIYLHILDQ

SEQ ID NO: 122817 - protein, 207 aa, Heterodera glycines
SFLQRPPSSVKDHRRTWDRTEYEVKAQERLTTEREALEIKKGNIRPPPKGPKIKREMLKPREFKVDLESKVGRQVVINKTTPSSETGGYYCNICDCVVKDSINFLDHINGKNHQRNLGFSMKVKKSTVEEVRERFSMKKAQKETLRNEDVEEKQRDLKEEEAKMADLKRMQRERQKETSRKRTAAAVTAPPTDEEADAELMKVMGIG

SEQ ID NO: 122818 - protein, 72 aa, Heterodera glycines
  unsure (1)..(72): unsure at all Xaa locations
RLHNPGKGISRSAWPYRPSVPTWQKLTNPQVEDYIAKAAPXGLRPTRNGVNLGDTHGAAQFRRLTCNPIGRI

SEQ ID NO: 122819 - protein, 198 aa, Heterodera glycines
MSFLRLITFVLLITLCSLPSLVESGLIGIVGTPVEAAWCGVLGKESSHCPTAGGGQHGGGGGRCDRTIALGLSMGELSKVLKCSKSEDTLMIRFEDSEQDMVTFTFEDTKGRKQDITLKLMDIDNEHLGIPDQKYAAVVEMPSTEFQKVCRDIASFSDSMNITATKSGVVFSGSGDSVTNTIRYSKDKTADDDDDKDR

SEQ ID NO: 122820 - protein, 200 aa, Heterodera glycines
VSRLTFPSFWYQLREFVYDPRVIVVQGVLHLRTRNSLRTRIAENATWIRIDGNTNTFNNPQLFELEQAAALGVSRAKDVAKIFSLMLSGELISRKSLIRLSKPQIINQIDYVMKGKWLFGHPGFGGSSVMMDPEEELVIAYVSNGMKSGMGELTRTFRRLKLAAFDSLKAISDGRTDGKNQTQYNKFNSSKAEGDSPKIR

SEQ ID NO: 122821 - protein, 77 aa, Heterodera glycines
FPTALGLPSSSARFAALALGLGKILRLTDPDVVRMTRMGSGSSCPIIQGGFVHWTEGAHQHNDSDCLCQKLATTDHW

SEQ ID NO: 122822 - protein, 73 aa, Heterodera glycines
ILERDNERGYKIFPLRCLHCRVIDSTATATGPTLDDLGKTKSVSDRTCYYAAANKIMAVVWDIDTLSEYIVNP

SEQ ID NO: 122823 - protein, 82 aa, Heterodera glycines
  unsure (1)..(82): unsure at all Xaa locations
MADESGTNAGGTGAAGGAQPAEYIKLKVVGXXXSNEVHFRVKYGTSMGKLKKAYAERTGVQVTSLRFLFDGRRVNDDDTPKS

SEQ ID NO: 122824 - protein, 190 aa, Heterodera glycines
KVQSVAISQNGDLYMTKQPTHGTEESAIWRSHIDHPIAWEEFCSTFDECFQSLCVYDNETLAVAVVSSPVNLYSKQCIKWVATKDCRIIGSFSAAGKDNGQIFFPRCLQKHGDSLLILDKTGRIQKFTREGHFVEISAKIDDYIGNGFTIREDEAVIACSGIVKDEEGKTMCDDWVENIRLDGSRWTEEA

SEQ ID NO: 122825 - protein, 192 aa, Heterodera glycines
ENVVQLVHGTANANNSLEKEISIQILHVLIEPILKNAYSLAQNEFANYLVQFIIKSPYLRRQRCYIIKTHIIRNVYHLSLLKYSSHVVEQAFKHAEDRCNCLAMLFREVLEGYKPSTDGKQRTALYEMLFNQYGNYVVQRMIPIARDVYQSRRPGDPNWLRHIAHCVQTNIEALSRYSSGKKIINSLHPVIF

SEQ ID NO: 122826 - protein, 187 aa, Heterodera glycines
RKYGTADESVADAGDQPTNDYGTMRPAFNACFGPFHRICLHLPVANYPAQLADEAARLTQLLAKLMAQNGRVMQMKRISKRGTTTTTNSAIKMLEPRFDERFDPERRNNKNNDSNGMKAREKSWAKRAKNERRGALKELRKGAKGMANAYAERQRKVRRERDEKTKRIMQCLEVQESEHKKLKALKK

SEQ ID NO: 122827 - protein, 200 aa, Heterodera glycines
MVEAAEQSQQQPIRRRAGPKSARRLYVKAVFTGYKRGHRSQHEDTSLLKLDGVNDKSDASFYLGKRAACMYKGRKTIARGGGPKTSDFLLALFMCLLFVQSACAEESFSMKDLALEYKIKYDFFFAPVTLILAVLSLAMAFSAGFMVVLNRMFSLHMDVQENKNQVKELRKELDENVKNFNTLYSEFVNLKGEVNLLKGK

SEQ ID NO: 122828 - protein, 170 aa, Heterodera glycines
MNKMLPNGRTMTPIPIQVNKAARKSIDRHTHFGLHRRPSEVPPPVRETVWARDDWFEQFGFVHLSIYGRGALADGTHAESDGLTLNVTVVHAYGAKQSVKQYKLYAEIVPSHSVMLITEKKVELVLKQLNREKWNKLCYDGGEDGAICDGGDDDGAFLLDPADEAAEDDE

SEQ ID NO: 122829 - protein, 207 aa, Heterodera glycines
FEAKFTNAALLKKIVEAIKELVSEAPFDCTENSMCLQAMDGSHVALISLKLDIGLFEVFRCDRTIALGLSMGELSKALFVRFEMIQPNAIAVATHLQCNRPDCTRTFGLDKLGTLRPHICKAHREDHHQGNRKPSLVIGLTIVPPGRTFLFTIYESRAQAVPALIVRFAVSPVSRASYDTALARAQQLLGYEIIPPLAVRRWPKRHT

SEQ ID NO: 122830 - protein, 197 aa, Heterodera glycines
MARNAEKAMTALARWRRMKEQEEKGPIAKRPNDVRECKKLGDAERFRRELIHDISKRITGIQNPGLGEFKIRDLNDEINRLLRIKLAWEGRIKELGGVDHRRIAPRELDRDGREVSSNRGYKYFGAAKDLPGVRELFQQAAEEEGAVPRRSRADLMQFVDADYYGYMDDDDGLLIPLEKTEEQVAIAKINEEWVKRG

SEQ ID NO: 122831 - protein, 194 aa, Heterodera glycines
MAQLAVAAPLPPTTNATAATATPAAPSYPMASLYVGDLHPEVTESLLFEKFSVVGPVLSIRVCRDAISRRSLGYAYVNFQQTSDAEKALNSMNFDCVLGKQIRIMWSQRDPSIRRSGSGNIFIKNLDKDIDTKNFFSTFSAFGRILSCKVATDSDGKSKGYGFIHYASEDDANKAIEKINGIHVDGKTVFAGKF

SEQ ID NO: 122832 - protein, 54 aa, Heterodera glycines
ATKMPSNKTFKIKRVLGKKQRQNRPIPQWIRLRTDNTIRYNAKRRNWRRTKLNI

SEQ ID NO: 122833 - protein, 206 aa, Heterodera glycines
AFFAPEPLRDFRCDQCRETNCVTRSSRFTQLPELLIVQLNRYVLASNGNLRKLQNAVHYPRLLTELGGEGIPDYELCAVMIHEGKSTNSGHYYDVIRDPVIDRWFTYNDETVNQKRTAPGYLGRLTQKPRASADTTGCYALIYRRVGSGLRGPVQLPPENIVTEAKKRMEAEFAQQDKEDDLAFKKWKKHINERNHLLQQLWKELE

SEQ ID NO: 122834 - protein, 96 aa, Heterodera glycines
MTFGNSPTQGRKLGEQETQFDETITRTGIACDRIRQQLKKCIKESDCIQIKRKKARECHEELDLPQHCIHLMYSLAECKRNNIDPRARFRGRKGDL

SEQ ID NO: 122835 - protein, 51 aa, Heterodera glycines; identical to SEQ ID NO: 122520

SEQ ID NO: 122836 - protein, 210 aa, Heterodera glycines
  unsure (1)..(210): unsure at all Xaa locations
GNHKSSGFMAELPNRRWGAPNIFYMGYASVGRFAGLPIGGFSGIFKPGDFNXCHFKRPPFREAXLRSSPPYHLRSVDIFRXRHLTDGPPLDIFFSHEWTGGITXFSYWETLSRIKAHFTEDVRNIRMGXPITMDLLHQLTPTHXLDPHLHVHFTVVVPHSSASPTASVTRFLALDIPGENPRRRCIQFLHIPIAEDAPLDHCYDPQWLAI

SEQ ID NO: 122837 - protein, 198 aa, Heterodera glycines
  unsure (1)..(198): unsure at all Xaa locations
SLDCLITVHAKFFLHEEFSDDSWHXHLWVTTKSKYDYWKYXLSAWKFFGHLVPDQGLKTIHDARIYTISGEYSNNFIHNGKPLVVRFTVEREHNIDCRGGYLQLMASDCCRDNFRVQTPFHLMYSQDICGPRTNXVHVILGYEGKNSLLNSDLSCQDDDLSHLFTLMLFPDNTYKVLIDGHQVESGQLKADWDPVPAR

SEQ ID NO: 122838 - protein, 186 aa, Heterodera glycines
  unsure (1)..(186): unsure at all Xaa locations
KRFRPVHDLTTWSXFGARHDAXIDGKQIILQIWDSAGQESFRSITRSYYRGAAGALXLVYDITRRHTFNHLTSWLGNAXQHSYSNKVIMLXIGNKSDLETRRAVKKEEGEQFARSSGLVFMETSAKTAAYVEEAFIDTAKEIYRKIQDGVFDIYNEANGFKLGPLHPTSSPSSPGGAPLGRASNCC

SEQ ID NO: 122839 - protein, 144 aa, Heterodera glycines
MSTRPKVFFDVMVGGKSTGRIVMELFSDIVPKTAENFRALCTGEKGMGKSGKPLHYKGSKFHRVIPSFMLQGGDFTRGNGTGGESIYGKCEKFPDENFKEKHTVPGLLSMANAGPNTNGSQFFITTVKTEVGRKAYLAIFEIHF

SEQ ID NO: 122840 - protein, 99 aa, Heterodera glycines
GKIHYCKRPDNSTKSCKARGSDLRVHFKNTHETARAIKHMPLKRAIRFLENVREEEENVPFRHFQRRVGSKAQAQAWGTTQGPWAKKSAQFPLQTSKNA

SEQ ID NO: 122841 - protein, 47 aa, Heterodera glycines
  unsure (1)..(47): unsure at all Xaa locations
RGGPDPKILLYDGGTTRTTVDEFPCXVHMLSNGKEHLSSEALQAARI

SEQ ID NO: 122842 - protein, 126 aa, Heterodera glycines
  unsure (1)..(126): unsure at all Xaa locations
PNKSISLQGIGRYYKTKAEDNSGSGTRQSQSLPFTRHNQWTTNSLPLATALSYISQYHSPSVYGKSDELLLLHIEMNMTSEKTTKFKTDSPQLVDLPHPFQHSEXRTILAFAGTKEAQQEVMLNGA

SEQ ID NO: 122843 - protein, 145 aa, Heterodera glycines
KPPQLPPQFNIPPPSVPSHQFQMQPPPLVPGQFHHGFPSMGMAPPSLLQQQQQQTPFTQQKPTPIAPLAVPPAATAPQQQQAVSPPPLSQQTQQSNSDNLDEEQQAQMLIRVLQLTDEQIRMLPPTERAQVIELRNQLRSADANA

SEQ ID NO: 122844 - protein, 186 aa, Heterodera glycines
MADSMFKYDQEEQRMIRNVKPWEQDPHYFKEVKISALALVKMVMHARSGGNIEIMGLMQGRVDANTIIVLDAFALPVEGTETRVNAQAQAYEFMTNFSESCEAVGRLEKVVGWYHSHPGYGCWLSGIDVNTQSINQQFQEPFVAIVIDPIRTVSAGKVDIGAFRTYPKGYKPPDEPPSEYQTIPLN

SEQ ID NO: 122845 - protein, 208 aa, Heterodera glycines
YGSETKSSLPLPAVFKAPIRSDVVKAVYKNVAKNKRQAYAVSVKAGHQTSAESWGTGRAVARIPRVGGSGTHRAGQAAFGNMCRGGRMFAPTKVWRRWHVRTNVNEKRFAVVSALAASAIPALVMARGHRINRIAEVPLVIDDSAESFTKTKEAVTLLRKLKAYDDVKKVIHSRKLRAGKGKLRNRRHTQRRGPLVVYANDNGIVRAF

SEQ ID NO: 122846 - protein, 210 aa, Heterodera glycines
IKEPFKSEMSKGKEGVVFVSMGTIIRSSDLPAKFRRNLLETFAKFSDYHFIMRIEKGDNYSAEIAAKFGNIFLTPWAPQPAILADPRLKLFITHGGYNSLLEATRGGVPVLAMGFFADQHRNARAAERNGWARSFDKLKLVEGTAQFEALLGEMLNNEKYAVGAKRIQNLMSTKPFPAEERLTKSIRFLEQNGGKLPELLSESRNMGTIS

SEQ ID NO: 122847 - protein, 153 aa, Heterodera glycines
MSSSETKLDEKSNEISNNELVGENNAKDGNVKEANNSTDKSAEAEVHTDEAQLGIAAVDPKPTDFSEKPTDIQKGGKPEEQQQQQQEDKGQSTLKSLPTRQYLDMTIVPILLQALSALAKERPSDPIEFVANYLLKEKPRFNGAANASSTNEH

SEQ ID NO: 122848 - protein, 192 aa, Heterodera glycines
MDASFDQFGGGGWGDQGEQEFAASQFQKNIYDKVPVPVAIDVLISMTGDEEKYVLGNFSFNTVQLMGKVANVSEVDQCTTYELCDAMATDIRVAKRFTVIRYITADLQPVKDEVFTIGQLVQVIGKLRLYNTRLSAVCFNIREVEIDEIAIHKLECKLAKIYFEKNLTEFSLGIVENDTIFHGKMSNPRAWL

SEQ ID NO: 122849 - protein, 209 aa, Heterodera glycines
LLSDIRRDLNELLSICHGDQKQNNHSRELIAALVKRKRVPDNWLQFSVPKDVTALEWMRDFVQRMEQLKRLSLSENLRYEEVWLGGMFFPEAYITATRQLIAQTNGWSLEQMYMHITKTEEGQLKSTAFTLTDLRAIGVLCEADEMKLTDEVHVGVPRLQFTWTLEGHSPASVVVPVYLYSNRAKFLFGLNLLPIGFDHSMLSQRGVAF

SEQ ID NO: 122850 - protein, 201 aa, Heterodera glycines
MSQADAGRIIHIGKRRERAKEDIESQRQRLEEERRNLAASIKAKFTTNIDEQEEKFKERTVGLVTLDEVKERQNEIFYSGPSLKFSNEDRPKFEKAIQKRVLSFGAFDDDDDEEDEALIPITKKRHGMDPTVDTSFLPDRERDEQLQRERERIAKEWQEMQEREKNEEITVAFCYWDGSSHRKDSKTKKGTTIAQFLQKAL

SEQ ID NO: 122851 - protein, 104 aa, Heterodera glycines
MCSKPTNVFLFKRLVSPVQICCRSIKGGGLVHPVTGKEPPTLEEFDPLNPGEWQLGAYGKILPRLPEGTRCGGLVMGKYGLYNPKVRALQEECYPKMNGRRADG

SEQ ID NO: 122852 - protein, 127 aa, Heterodera glycines
  unsure (1)..(127): unsure at all Xaa locations
MEIAPLRNYNLGPDADHLKQAQKDIDEIQKRINTLCGVKESDTGLAPPILWDIAADKMAMSNEPPLQMARRTLIVKEQGKDTRYLIDVKHFAKFVEGLHENVAPTDIEEGMRAGVDRHIYXLHLPLP

SEQ ID NO: 122853 - protein, 79 aa, Heterodera glycines
LQTKAQVDEVLGIMNGNVKKVLERDHKLSPLDDRADALQESASWFQKSAATLNRKYCWKNINMIVIMCAIVFLLIIIIV

SEQ ID NO: 122854 - protein, 211 aa, Heterodera glycines
KKLLSKERINYRDLTDKWVDKEGKVRYVPLPSYENIFQSFSEHAKGHKTSGDLFNSSSQNINEMSDPKLISESEFAYFEGSLINIKQSIERQYALEKERQETVDQNEKLTLQLNNINEQREHLEKKKRRLEDDVDRYKKKLYDSEKLLKKEQEDNSSMKTSLLDCKRYGERMVAVVEKVLPPPSKKEEKEKSSGSDKNGTSGKERTTKLRI

SEQ ID NO: 122855 - protein, 199 aa, Heterodera glycines
CSRELIVEKEAMLSAKETKEMCCALMDHSFITVRQLARTNDFAPARTFFLYTVSMVQVLNAMISFCTQALNNVIRRRMLEREKHEALLDRQLKMEVILSNIANDPTFDDESRTQQMADVEQSYMTEADRRALERFRRAERRLFSTEIELDKVLFTFQQYDMLRRRWAMEQARQMPHGRRKRQQAAAAAVAATTAQSPNV

SEQ ID NO: 122856 - protein, 196 aa, Heterodera glycines
TVTASLAYAIANLQEGAKPFKVAVLDVDICGPSQARMFGCEENSVQNSDQGWTPIFVQNNLFVMSIAFLLDTRDEAIIWRWPRKNALIKQFLRDVDWGELDFLIIDTPPGTSDEHISIVQMLLQASCLDGAVIVTTPQEISLLDVRKEVNFCVKTKVPVLGVVENMCQFVCPCCSTASQLFPNTTGGAKKMCADLS

SEQ ID NO: 122857 - protein, 126 aa, Heterodera glycines
  unsure (1)..(126): unsure at all Xaa locations
IWQITPQKLCKMLTCVFFFPNTLMRSPREKPFPXRKEPTNWENFARAKGITNKKDSKVWDKTTHECKPKYGYXRGENQSKERIIEIPDPEDPXLDHFAEKAEEKXERIXKHELPRLTNISRDSNTS

SEQ ID NO: 122858 - protein, 103 aa, Heterodera glycines
  unsure (1)..(103): unsure at all Xaa locations
FEKKPVSANIFGVWLRINSGIVYLNMDRXYGDDWAAFGATQCYGDLHPLRSRLTDRMRIIQVQPVHVGVWIRSRVNHCHNSQIXFPLPHFVDCKRRIMTALTT

SEQ ID NO: 122859 - protein, 112 aa, Heterodera glycines
HLFHALKKKRQALEEKDQLELYASALDEDLERLSTDSEDEQETRKARPNIVSRRRSRSRSRGRSRSKSRERRRRSLSTDDRRGGRSAAKDTEREIEENNALRKKLGLAPLER

SEQ ID NO: 122860 - protein, 45 aa, Heterodera glycines
NLARFEMKLSHESVTIELKNSTRMSGAIQGVHVSMNIHLRSVKMT

SEQ ID NO: 122861 - protein, 89 aa, Heterodera glycines
  unsure (1)..(89): unsure at all Xaa locations
TKERIQSGNFFMDVLDKVLAINPDEYTLLHMRSRLVLSVASLSWIDRKEATALFGPPPEVSLFXAIIDFSAVLEFASHWVENSLLLAKA

SEQ ID NO: 122862 - protein, 208 aa, Heterodera glycines
MESNRELILYRAKLADQAVRYYDMGQLMKKVVELDNVLNEEERNMLSIAYKAVIRPLRFALREISPIEWTQDGTEKQLLMLKRYREKLVKELHDTCNELVELLDKLISRADDPEVKVFYLKMKADVYRYMAAEAIGGVVDKSRQAYQEAFDIAKDKLRPANATRLGLGLNFCIFYYDNLDMEETAIDFAKKVLEDANSDQHGGACNES

SEQ ID NO: 122863 - protein, 154 aa, Heterodera glycines
MKAESVDDKPKQQFTFSNFRFVLHEDKCETRRDKRNKFTGRDFRRLLEKAEKRGQRMERIRTQNPQKAQCVEKNVAWERAFRRAAGQKVKDNVDLLKKGVVRKAKNKQRKKRKWEERKQTVETVKERRAEKKRENVEKRKRQQTEKNRGKRKRK

SEQ ID NO: 122864 - protein, 175 aa, Heterodera glycines
  unsure (1)..(175): unsure at all Xaa locations
SKDEQDYCVKFSNNLRSTVATGNQQNKGGGKLPSATNMLELAYNETIGQTAQAWADFCXFSHSNTAGLGENIYWSTKEGISNTEALNKAFVFWWNEAVTIGIPENLVVDANNFEPIGHFTQMAWHSTTDIGCGVAKCQHAQWKLFVVCNYWPPGNVLGQMTYGPGDSCSACESGW

SEQ ID NO: 122865 - protein, 77 aa, Heterodera glycines
  unsure (1)..(77): unsure at all Xaa locations
IRLLATEWTNLENNIDPQWLIVYIHLPIKVSKNVLFPSFRPPKFNFVGKVLGPXRTTLQNIPTSFKCLVIILGLGST

SEQ ID NO: 122866 - protein, 192 aa, Heterodera glycines
MPKKKNGTTDEKGCLLITNYFPIRRSKRITTKELEDIKLKELKELIDTGFNEDHLEVFRCSVKGRSVRASKCFQRGEFVVEYKGDLISVKTAQLREQRYAKDENVGSFMYYFRHRDNVFCIDATDETPYKGRLINHSYLKPNLKTRVADFGCDGFHLVLVAMRDIDNGEELLYDYGERRPSVLAGNPWILGS

SEQ ID NO: 122867 - protein, 89 aa, Heterodera glycines
SNRCFCNYSPTVCDMEDTWITYTSAASFQAIVLEFNSGTSAIERRHFFGCAPLERGTDASHLTCDAWRYSHSNGRTVACCYQGNFCSPN

SEQ ID NO: 122868 - protein, 140 aa, Heterodera glycines
SVMMKSTSIKVTLICTSGDIGQPLGLLLKKNPSIAHLALYYLVGTPGVADDLSHINTQAKVTGHLGPEQLAAALDGADVDIIPAGVPRKPGMTRDDFFNTNAGIGRDMAEATAKTCHKAFMDIITNPVNSTLPIDCEITK

SEQ ID NO: 122869 - protein, 189 aa, Heterodera glycines
MVSLKLQKRLAASVLNCGKRKIWLDPNESSDIGNANSRANIRKLIKDGYIVRKPENAPSRFRVRERLAAKRKGRHTGTGKRRGTSEARMPTAVLWMRRQRVLRRLLRKYREAGKIDRHMYAELYLKSKGNVFKNKRVLMEYIFKVKAEKARTKALEDQAAAHRLKNKAARERKAQRAAEKKAALLGDKQ

SEQ ID NO: 122870 - protein, 162 aa, Heterodera glycines
MADRQTQYKNIGKDVEALRKNRTEQVVSIRKEKRDDILFKRRNIPTEDATEDASTSNVTGVAVPYDRTNLQEIVVQAQSADPEVQMLAVTQARKLLSSDRNPPIDDLISSGILPILVNCLESPNATLQFEAAWALTNIASGTSDQTRAVVQAGAVPHFLKLL

SEQ ID NO: 122871 - protein, 164 aa, Heterodera glycines
  unsure (1)..(164): unsure at all Xaa locations
KSRQQEAECMRRLAFFGVALSTVATLITVLSVPMVYNYVQHVNSQMVSELDFCKSRSGNIWREVTRTQALHSNKQRVARQADYGYGGGACCGCGVSARGPQGPPGQPGVPGDDGAQGNNGAPGIPAFVXPATNGNPGEQGPAGSPGEPGKPGAPGYPGQNGPRG

SEQ ID NO: 122872 - protein, 183 aa, Heterodera glycines
MTEYKLVVVGDGGVGKSALTIQLIQGQFIEEYDPTIEDSYRKQVLIDGETCLLDILDTAGQEEYSAMRDQYMRTGEGFLLVFALNEYKSFENIHAYREQIRRVKDSDEVPMVLVGNKCDLAQRAMDQRSIQELARSFGIPFIETSAKTRRHVDEAFHALVREIRKHKDKHREKPKRRKRCAVL

SEQ ID NO: 122873 - protein, 175 aa, Heterodera glycines
MQHDPKLKEKVERVQKEYEVYDYFSEFIPKSFDDKEWVRTMECSSVVERVNYWAFLALSQHRKDLDEMKHNQSVEHTDSFFKEQLRLYNAGGMGYSEDAYCLYLNSYQGRNYASRKYRTIEESKKLAQQLTLGESPRILFDCQFLPQMTQRIYGKVAKSAVHAYFKNLHLPSPFP

SEQ ID NO: 122874 - protein, 179 aa, Heterodera glycines
EIMLNSKGYTKSIDVWSVGCILAEMLNNRPLFPGKHYLDQLNLILAVVGSPSQEDLQCIVNDKARAYLLSLQQKIKQPWVRLYPNADPRALDLLDKMLTFNPNKRIGIEEALAHPYLEQYYDPSDEPICERPFTFEMEFDDLPREKLKELIFQETEEFHRRATEAAAASRSETTMNEGT

SEQ ID NO: 122875 - protein, 186 aa, Heterodera glycines
MSKESTKTGKQQLSGGTDFKMMSSELFILSYGALVVDLVNDLESPEEVNKHLDKIGFNMGLRMADDFLAKNPRIGRCSDMQQIMEIIAKSALKAYLGITAQFVAIGTEGNEFSLTLDSNPLVEFVEVPEEMKGLCYSQVICGCIRGALEALHMEVQAVLVSDVPEPPELRIKVHRVLQESIPGGEE

SEQ ID NO: 122876 - protein, 207 aa, Heterodera glycines
MRTPKREKVERKEKQQREEKKDHIKKPMNAFMLFMKANRHKYLEESVDKRKQSAELNKELGQIWQQMNREAQQPYYEMAQKAKEEHARMHPQWSARENYAIHKRAKKKRVREKSVDNNEQKKCRARFGVDNLTKWCKHCRRKKRCLNVLRDSDSPVQVSSSTNPSTTPLSIGVPSSAHFGSLLNSAHHQRLCSPHSRKDREGHGAPT

SEQ ID NO: 122877 - protein, 67 aa, Heterodera glycines
THGLADVMKSFPENEKGIIGLAGNVSPIGGDSHIPAICEEKGLPYDFSPSREHLGICAGYKRPAFVL

SEQ ID NO: 122878 - protein, 156 aa, Heterodera glycines
MSDSQQSDQRTERVTRRSLFGSGRPNDTDEWLKSLENNAMEEKVRKWSFDFRIGCPLKKAGAESPSSSHVYEAIDEREVPEFYRTKTLRSVPKRRPSSIRSPLKSPLKASESLKSESNLASATKEAANVLETPRKSKRLRKANSTESTPQKKKRNE

SEQ ID NO: 122879 - protein, 185 aa, Heterodera glycines
MRSLLSVLLCPLLLSLLRPSSTCLLCPLHIPARPKPLDQFRLPSIQKIVHTADTFEWLCQNGSKLATVSAQCRADVSHLFCSLTRLVQSLKTECPGADEGMAQCAECRRKTDILYRENKWVLTWIDSLGKMPSGISDGNYHWLGDYEQCLRLRDDGLFNGQYCLLEFRVPDGVLLNSEHCEDGSE

SEQ ID NO: 122880 - protein, 165 aa, Heterodera glycines
MENGNGIEKRGLVVEDGDGHPLSLFAVPNCYCADLDSVLIPNGMIHDRIRRMADEIQSAIGDRVSFKPNLNFAPFWRFVQPLTLVCLLKGAYRFFTALADCLAQLRLCCASPMQIEFIRAQSYLDQSSTGQLRSDGPSSIDGPLRGAEVLLVDDILDTGLTMTRI

SEQ ID NO: 122881 - protein, 157 aa, Heterodera glycines
  unsure (1)..(157): unsure at all Xaa locations
MDSVKKAAVSGSLTASGSAAARDDGSSVGRPARTLLSDLELSESILTENKNRFVLFPIKYQDIWQMYKKAEASFWTAEEVDLSKDFHDWENRLNDDERHFISHVLAFFAASDGIVNENLVERFSQEVQVPEARCFYGFQXMIENIHSEMYSLLIDTY

SEQ ID NO: 122882 - protein, 161 aa, Heterodera glycines
SVDFLKRYKIDFIAHDALPYSAKDEEDLYEKFRRADMFVETQRTEGVSTSDVITRIVRDYHDYVRRNLQRGYTPEELNIGLLQASKYQLQNKFAAIRQKGAKMLKEWTDRSDEFIRNFTSTFNSDGPIGRFLSSRSPTPALEEQEEAAASDDDEDEEHNEA

SEQ ID NO: 122883 - protein, 173 aa, Heterodera glycines
  unsure (1)..(173): unsure at all Xaa locations
VSLGDSTRTGEQRASGLQWPIMLLTGHEGEIYAAQFSPDGTCRASAGYDQRIFFWNDYGECENFSTLSGHQGAIMDVHFSTDGSFRFSCSTDXTVRVWDMESGKCXRRFRTHTDFVNGXHPARRGPSLVVSGCEGGKIIVHDVRRRCPESTFDSVSDYQRTSVTFNEPARTII

SEQ ID NO: 122884 - protein, 123 aa, Heterodera glycines
  unsure (1)..(123): unsure at all Xaa locations
RTKQTVRKSTGGKGPRKPLATKAVPKYAPPMGGVKMPQLYRPVTIALLEISRYSLSNXLLIRELPFQRLVRKIGHDYKTDLGLQSAAIGAVPEASEAYVVDLFEDTNHCVIHAKRVSIMPKDI

SEQ ID NO: 122885 - protein, 84 aa, Heterodera glycines
  unsure (1)..(84): unsure at all Xaa locations
GIALTCSHILTHFLHATGKTGSSCFRCFEKIDPSKEYIRAMILVPTRELALLPSLICVXLTKRLYINIMVTTGSPDLRDNILRL

SEQ ID NO: 122886 - protein, 197 aa, Heterodera glycines
MSSDLVEKKETKPNETDDKTKEIKSLDEDEIAALSNYNMGPYADQLKQAEKDIDEIQKRINTLCGVKESDTGLAPPILWDIAADKMAKSNEPPLRVARCTKIVKEEGKETRYMINVKHFAKFVVGLHENVAPTDIEEGMRVGVDRHNYKIHLPLPDKIDASVTMMQVEDKPDVTYADMGGCEEEIKKVREVVEFPLL

SEQ ID NO: 122887 - protein, 198 aa, Heterodera glycines
RNDGRSPTDYRPMALETGVLLGSNGSARLQLGATDVLVAVKADLQLVEPSTEAGDIQRVHFFVDISANASPRFAGRGGNDHAEEWAKSLAGAFANTAPSAMPDMAKLMLAPTQLWCLYVDVVVLQFDGNAMDAISLAVKAALADTEICNVVVRPADEGKVHIDLPEVISTWRMDMAGAPLVVGVNKIGDQCVLDADLM

SEQ ID NO: 122888 - protein, 184 aa, Heterodera glycines
  unsure (1)..(184): unsure at all Xaa locations
MPRYDATDDLSGAEYLASIYGTEKDKVNCSFFFKIGACRHGDNCLRAHHRPTFSXTVLLKNFYQSPIVNPAQANAFDKVGKKDELEQRHFDEFYEEVFTELQRTYGPVEELNVCENIGEHMIGNVYVKFVYEEDAEKTAQGLENRWFNGQPIYAELSPVSDFREARCRQHEISTCSKGGFCNFM

SEQ ID NO: 122889 - protein, 101 aa, Heterodera glycines
MNAEKTVFGKCSPKFANVEKAFRRHFADGWEREGASLAIYWKGQLVVDLCDGYADKASHERWGEETLTACVLRDERHSLHIIAYMLICTGHVGYSKSIRVF

SEQ ID NO: 122890 - protein, 142 aa, Heterodera glycines
  unsure (1)..(142): unsure at all Xaa locations
MGVCADKTVAEFGFTREQQDAYALTSYALATRAWAGGSLGAQIVPVKHKNRKGTELMVAXDDEERRLVPDKVPSLQPASVKDGTGTMTGANASSLDDGTTSLVIASGRFAGAETMAIVIAYSEAGGTADNFSVAADDPAKSL

SEQ ID NO: 122891 - protein, 130 aa, Heterodera glycines
  unsure (1)..(130): unsure at all Xaa locations
GKEHCANGTKWILNVCEDCAETPMKMCGFWVGXVPLFLRLIPVFPELNDDFLNXRCEGLSIFFLMLWVIGDSCNMIGADVTHRQPLQQIIGVYYILPDLALLGQVIYYTRLYSATLRREMVNGTTVIVPV

SEQ ID NO: 122892 - protein, 197 aa, Heterodera glycines
VQKEHTRRGAQNGAFGRSLGARLMGAGIANVSIGKGIHTTLDHTKHEALDRGLKQITAQVDGQLKRKKISATEHSICLSELNPVGDYYDQLHDSDVVIEAVFDDIGLMHLIVLILEKVVPDHCVITANTSALPIRDIASDAQRPERVIGMHYFSPVDKMQLLEIIVSEKTSKEALAVDAKLGLDHKKLIVVVKDGPG

SEQ ID NO: 122893 - protein, 106 aa, Heterodera glycines
TTGWSANGNRTALNALLSQNNYFHLKRTINLHPLTNYTFGSNEPLSKRDHSVQARFQRLRNEYKKTAMRRIADGLLLAHEDSLAHELLLHVGTTFLRLPGGELNHG

SEQ ID NO: 122894 - protein, 93 aa, Heterodera glycines
KWGEEIDKHPAFARDLKPTEDGQYSMEMQAIQAMKYDEDDPTECANAYKEEGNRHFEKRNYRWAIDAYTKGIKLRWSDVRLNSVLFANRSAAH

SEQ ID NO: 122895 - protein, 185 aa, Heterodera glycines
IKKLTDNQTSTMIKATARSAPEREKEISELVRRAEFINDPFAHEFGISITPVMTEFKGRVLTAPKLLYGGRNRATALPNQGVWDMRAKQFHTGIEVKTWAIACFAPQQSVKENDLRNFTVQLQRISADAGMPIQGQPCFCKYALGADQVEPMLKYLKQNFPGLQLVCVILPGKTPVYAEVKRVGD

SEQ ID NO: 122896 - protein, 205 aa, Heterodera glycines
  unsure (1)..(205): unsure at all Xaa locations
RIAKAPAERARLYFIICWFHAIVQERLRYQPLGWANSYEFTDADFRVACDTLDSTVDMVAQNRANVKPDKLPWLALRTLLSLCIYGGKIDNDFDQVLLDTLLDKLFTSNSFDADFILIDNIGVNALNMPDETNSKDGLINWVINIKALQKPNWIGLPNNAEKVLIAERGQEFIRKMIKMXDDELAYEADDLERNKQAPTWMGQFS

SEQ ID NO: 122897 - protein, 129 aa, Heterodera glycines
  unsure (1)..(129): unsure at all Xaa locations
PAALMADNGSGMFKAVFMYDDSPLSAFPSIVGRPRHLDVMVGMGHNDSHLRYXVHSPRGILTLKNTIVFDIVTHWDYMDNIWFLTFYNELRVTPEDHPVLLTEAPLIPEGTREKMTPIMIETLNTPAMY

SEQ ID NO: 122898 - protein, 208 aa, Heterodera glycines
MASTHNHCYIESLRTRQTASLKQLLNLNQPLNVSLAVEPVWKLLIFDRYCQDIISPLLSVKQLRELGVTLHLSVDSPREILPDVPAVYFVSPTEQNVQTICADLKRAMYDSFYLNMVRPIPRPLLEQLAESAVAGGATQQVQKLTDQFLSFISLEDDLFMLSRYTKSSPFSFYAINDPSITTRSIDAVVADIANGLVAVCVTLGGVPV

SEQ ID NO: 122899 - protein, 184 aa, Heterodera glycines
TTVVECLKDADISIKKRALELCFALMNQTNIASMSKEIIIFLETADSDFKAECSSKMYVATERFSPSLVWHLDTMINVLQLAANHVPDEVVSAMIQLISSQQELQHYATVQLFHASKREHIVNAQPLMQIAFWSIGEFGDLLVAPGNTEEANIKVSEDEVVELFQLLMPHPRLTVPTRGVWTNC

SEQ ID NO: 122900 - protein, 64 aa, Heterodera glycines
  unsure (1)..(64): unsure at all Xaa locations
AGFAGYDTIRALFPSIAGRTPHQGFMDSMGLKDSHVXIXAQSKRGILTLKYSTEHRIVTNWDDM

SEQ ID NO: 122901 - protein, 135 aa, Heterodera glycines
CDEEVAALVVDNGSGMCKAGFAGDDAPRAVFPSIVGRPRHQGVMVGMGQKDSHVGDEALFKRGILTLKYPTVHGIDTNWDDMETIWHHTFYNELPVPPQGAHQSCSKRTRRNRMATTKNVTQISYRDVQSRRAMY

SEQ ID NO: 122902 - protein, 152 aa, Heterodera glycines
MNRLRRDQKEKVQQFVSLTQANEQTAITCLTASNWDLEMACDMFYQNPSYTNQQVGATGGADSRKIEHLFNKYACDPKDKSQKIGPDRIGPNGMVRFLRDLNIEPTSRAVMVLAWKMGAQKQCEFTLQEFRDGISTLIPTGTVEINGLRKAL

SEQ ID NO: 122903 - protein, 97 aa, Heterodera glycines
LFQVDSKTVKAQIWDTAGQERYRAITSAYYRGAVGALLVYDIAKHVTYENVERWLKGVCVCRTEKNGEIYGGNFWFTRNFLCAKIRHFEKLGHGFSG

SEQ ID NO: 122904 - protein, 107 aa, Heterodera glycines
  unsure (1)..(107): unsure at all Xaa locations
AGLDLEVYADDVPTRPEPSLYYTVCLTTLQVPGPEAAVSAYGALVPTGSNDXSLNTLDGDPILSRIDVTLNESGRDAHLPVIQTLYDHLDVTTKTLYHQSLVFLLSS

SEQ ID NO: 122905 - protein, 123 aa, Heterodera glycines
  unsure (1)..(123): unsure at all Xaa locations
HWKYERDYSYDLRYSNPIYNYSRFTRFITLTATGHQQLWALFPLLMLSSSLATGIAFHRLDKIEGWVDRSTSPPPXDCARVRDTYWLFPTDLYDPTGVTHVPLRPMYILHDDLLEAAKERGTR

SEQ ID NO: 122906 - protein, 188 aa, Heterodera glycines
  unsure (1)..(188): unsure at all Xaa locations
MQRLAKRANTGGLLIPLSGTVQTISTRGVLRIPHWENHIRFDPRFGRKRPCQDVLDRFARLNNGLWVRSRQGRNKQVYQKDXIFRKVNMQWDTCTKRECAMLDKLMTPFWLRPKHYVGDPMEPYHTRYGITSPRVDDQKRLVRERPKLLLDDLTSDRFFDRISPAQSKSELLLQGQSSILPKLLQKAM

SEQ ID NO: 122907 - protein, 192 aa, Heterodera glycines
MNAEKTVFGKCSPKFANVEKAFRRHFADGWEREGASLAIYWKGQLVVDLCGGYADKASLKRWGDYTRTVLFSVTKAVAALAVQMLIDRGHIAYSDKISVFWPEFARNGKENITLEDVLLHRAGLAALDETVTMKAARDHVRMAQILEAQTPNWPLGTTRSGYHAVTFGWLIDQIIRRVDPQKRGISQFVREE

SEQ ID NO: 122908 - protein, 64 aa, Heterodera glycines
TKADISPQKKEKKLGSPMRDLKRPKLCLKICIGESGDPITRAANGLKRLTGQSPGLSQAEYTVK

SEQ ID NO: 122909 - protein, 201 aa, Heterodera glycines
MDDKSPAAIFAREFEHRQARDVDELRRIFHRHIEEESRSDEQQRHEKTAAPMLTTAPAMAAALPSARIVRTPHIGTNVRENGTASLSAITPIAAAFRWCTPLANTPTISVHVNPGHFFVQLPSHPTFSSLALLNQYMLPVYTHNQPGVGAPGLAKPYDVGVLCAAPAYNGWVRAHTLGFHQDQEEMLVRFPQYGGFPPLAR

SEQ ID NO: 122910 - protein, 106 aa, Heterodera glycines
QCNSCNTTSVLFKVISQLSLGLSTNTDDLTLKDCLDAHFSSPTLEDKWDCPKRRSKHPATRITQIWEIPKVLIVHLKRFSLNDGHYVKNNVEVTFDVGEIDLAPFL

SEQ ID NO: 122911 - protein, 186 aa, Heterodera glycines
SLYSEMSQMNSKVRDGVEAFRVNTDSAWTDLMDVQVVVTPPSKPRDNPFNSIFRAKRQLPGHCQCAGLQQPSCPPGPPGPSGPPGQPGQPGGAGQPGQPGQPGQPAPPCPPQNGNPGSQGQPGQPGGQGPPGPPGAPGQPGQPGNSGQPGQPGAPGQPGKDSGYCPCPPRSSVLAVKKKMAAAKKA

SEQ ID NO: 122912 - protein, 202 aa, Heterodera glycines
  unsure (1)..(202): unsure at all Xaa locations
MVSMVAGRVHLLPRAASFGKSFLSSDATKKPDKTSFGNLNDSDRIFTNLYGRHDYRLKGALARGDWFKTKDIILKGPKWILGEISTSGLRGRGGAGFPSGMKWGFMGKPFDGRPKYLVXNADEGEPGTCKDREIMRHDPHKLIEGCLIAGVAMGARAAYIYIRGEFYNEACILQESIHEAYKAGYIGKDCLGTGYNFDIFVH

SEQ ID NO: 122913 - protein, 201 aa, Heterodera glycines
MSLLNGKNATGHCQSDGDSSIAMKRGAEEFDFGGSEADGAIGQGGNAPPAAKFQRVQQFSCYAVYSISAQPKSNAIRGQIQDFKHELHYVLTTIFDEKAAENLKSLSLVQLIKKAIIPQFRNFLRTKSVQLEKLFGVLTELSSNSSVFSLSSSCLLYLLARDQKSIPPSENCFRLISELLRQDSQRAKMDEEHKKHTETIW

SEQ ID NO: 122914 - protein, 155 aa, Heterodera glycines
  unsure (1)..(155): unsure at all Xaa locations
RPLTITQPKPLVEFANKPMVVHQIEALAAVGVDTVVLAVTARIEDLLAGEMRKEEQRIGIRIVFSVEDEPMGTAGPLALASDLLGDXSPFFVLNSDVICTFPFAEMMHYHRKHGRQGTIAVTKVDEPSKYGVVVFEETNGRIDRFVEKPQEYVGN

SEQ ID NO: 122915 - protein, 212 aa, Heterodera glycines
RKRHLMMAGGFGGFVAADAEGAGKNFVVPEKSEKGAQQGMPGQTSKPRGLSKEQQEEAKRNYMSIVNRPVDVSNMLPNDIKANIKQLHARIVKLEGEKYDLEKRKDRQEYDLKELSERQKQHARAKALETGADPTEVESSGNFPPKVRVASRFDRQTDLRGYGQRRDLFEHPAETPEPKIVHGSGRPPPEWGRKEFEELENIRKNLEPPKYV

SEQ ID NO: 122916 - protein, 122 aa, Heterodera glycines
CDEEVDALVGGNGSGMSKAGFAGDDAPRAERPTIGGRPRNKGVMVGMGQKDSYVGVEAEWKRGSLRLKKSNEHGSETNRDDREKIWQHTGNNEGGVAPEEQPEQLKEGRGKPKAKREKRTQM

SEQ ID NO: 122917 - protein, 142 aa, Heterodera glycines
LSNCFGGFRALIEQELSSDSFVHSRKLSLSPYETFHLIPGVSNPPDCTQNQYSFEASKRIGLIGRKIGMTLQWSFRLKDGTRCLCTLIHVPVNHVLSANNPETWYRHSLTGKQKAFRGILTIDQCAPPMWSVSLIKSNCVLP

SEQ ID NO: 122918 - protein, 191 aa, Heterodera glycines
MASLTNMITNSYIVNTPSGQYTIQQQPGMTLQHQPQQIIHHVIPQHRQQSSMHGIQQHHSERPLVRGKTSPYGFFVKMCYEEHKKKYPNECVQVTEISKKCSQKWKTMTDDEKKRFFELAQKDAERYQAEVAAYGGEDVLKRKKRAKKDPNAPKRALSAFFFFSNEKRQEVSGEHPEWKVGQIAQELGVRW

SEQ ID NO: 122919 - protein, 188 aa, Heterodera glycines
GTHRSPVFATIHQQTAKFISKFSEAKRRFFNERIDTEPWQPNRIPYVYQRIVDKFRLSGALSDVEENVEDEHEDDDDEREGNRDYLVLGGSKRFIVVGSATSLLRVLAQYSDLLFLFPQCSMELTMDIVQILKAFNSRTCQLILGAGARQLVGLKMISVKHLALALRSLQFIAQFIPALRQTFLNQLP

SEQ ID NO: 122920 - protein, 128 aa, Heterodera glycines
KTIIRMYKTYVRPQLEYAVEIWNPNLKKDIERIEKVQKFFTRKAFKKCGLLHRSYSERLEICQLIELTKRRNIADLTTAFKIMKGFTSLDASKLFTFSDRPTRRPLLLRMRRTTTKSKNNFFNRIAKN

SEQ ID NO: 122921 - protein, 201 aa, Heterodera glycines
MCDEEVAALVVDNGSGMCKAGFAGDDAPRAVFPSIVGRPRHQGVMVGMGQKDSYVGDEAQSKRGILTLKYPIEHGIVTNWDDMEKIWHHTFYNELRVAPEEHPVLLTEAPLNPKANREKMTQIMFETFNTPAMYVAIQAVLSLYASGDGVTHTVPIYEGYALPHAILRLDLAGRDLTDYLMKILTERGYSFVTTAEREIVR

SEQ ID NO: 122922 - protein, 193 aa, Heterodera glycines
CDEKVAALEVDNGSGMCKAGFSGDDTPRAVFPSIVGRPRHHGVMVGMGQNDSYVGDEAHSKYVILTLKYPIEHGIFTDWDDMEKIWHHTFYNELHVAPQEHPVLLTEAPLNPKANREKMTLIMFETFNTPAMYMAIQAVLSLYTSGHTTRLMLDSGDGVTHTVTIYEGYALTHAILRLDLNSRDLTEYLMKIL

SEQ ID NO: 122923 - protein, 102 aa, Heterodera glycines
TDDARLKFLVCESNIGTKNMDYQMEHYVWKHLSDGIHIIHIHKTSYKLMLAARAIAAIENPSDVFVVSTHPNSQRDVLQFAAHISATPIVGRFTPGSLTDHI

SEQ ID NO: 122924 - protein, 215 aa, Heterodera glycines
MFFGEEITKIPREVGKEDVCKAISHQIEAIDIDQCNLNMYLKPDTGVISLDQFQAMGSKRLTMLRKLEMLKEKFGNANSQDEYKKAFREDIGALMPLVTNLCVNAGLNEARREDRISHFILRLAFCHIPEQSDWFVRLETELFRMRFQNETKKNMALFVASIGIQLNQVDTSEREQLVDELCQALSLSAEEMEGADLYKVDFVDVLELLSSHRIL

SEQ ID NO: 122925 - protein, 175 aa, Heterodera glycines
LRELWKLDKRNPFQEIPEAWVTSLDDIETKNCGLIQLHPDIFRVKPGLDLLHRNITWQSNYRNLTLLKMLSHDEMPGGGRKPWSQKKMGRHHAGSIPSPHFIRGGFAHGVRGPCTQFYMLPNTVRIHGLRTALTLIHAQDDLVIVDSYDTLNSAEPQFLNDLADARNWGLFRAGC

SEQ ID NO: 122926 - protein, 109 aa, Heterodera glycines
  unsure (1)..(109): unsure at all Xaa locations
PSFISMESVGIHESTYNSIMKCDIDIRNDLYDNNVLSGGTTMYPGIADRMQNEMTALGPSTMENPIIAPSERKYYLWIRGSILTSLXTFQQMWISKQEYYXSGPSIAHR

SEQ ID NO: 122927 - protein, 169 aa, Heterodera glycines
MFLLIALLLVVFPLFCGAIPALPNSAAALTQQQQRMMQIDAFSAADDAQRKDSDAAGGAAPFAFEPSEQKAFVLKGLRRVKNPSPPAVVPKLTADAKIISLNADDDEWREMGQQQKQQHFQQIGAQMQNEVDFCKMRSGNMWREVNRTQAYSKVSHDSRHKRQAGGCCG

SEQ ID NO: 122928 - protein, 156 aa, Heterodera glycines
TFFFRPLTKPSLVEAIKRQATLLMDKGAVITKLESLGYRDLPYSRLDRFAKKNVHYANSILMNSSMSVKTMNDARTLFSNDKELLWFGIVNTNSLPDTPDKCDLEQFLQPPAYRQSVEELRKNQKLPFFTSFKIYKRTETEYHNIPKSYFVAPHKR

SEQ ID NO: 122929 - protein, 72 aa, Heterodera glycines
  unsure (1)..(72): unsure at all Xaa locations
GRRPSRGYRYIMNKPYPKCSXFCPGVPDPKIRMFDSGKKHXTVDEAPCCVHMISNEREHLTTEALEADRNLC

SEQ ID NO: 122930 - protein, 143 aa, Heterodera glycines
LIVQSEGASHNYDTTFVQKLFSEEGKGEFSTRINILGHPQQGGKPTPFDRNMGTKLGARALNHLITQINANFDKTTERCNADKPDTATLLGLIGREVVFSPLEELAAETDFEHRLPLKQWWLKFRPLLRILAKHRASYVQEAT

SEQ ID NO: 122931 - protein, 176 aa, Heterodera glycines
MTTGSPQQSPQAQQTEATAQQQTAAAAANAGSAGGTPKSQTKKAATKAPKAPKAKAPKAAKKAHAPANHPPYIHMIKKALGELKEKKGASKGAILKYIMSNFDVGGNQLRANMQLKQALKRGVSSGDLKQVRGIGASGSFKLGDGTQPTLAKASPAKKKSPIKKAKKAAPPAPAAV

SEQ ID NO: 122932 - protein, 64 aa, Heterodera glycines
VAALGVDNGTGMRNDGCAGDDAPRAEVPSIGGRPRHHGVMGGMGQKDSHAGYYAEPKGDILTLQ

SEQ ID NO: 122933 - protein, 113 aa, Heterodera glycines
VAALVGDNGSGMCKGGFTGYEAPQVGYPPVEGHPRHEGAMGRMGQKVFFLGHYDQTQGGSQTLKCPIEHRFHACWDYVEKNWHCTCYDELRVCPHEYPRVAERGPAEPEGRQR

SEQ ID NO: 122934 - protein, 170 aa, Heterodera glycines
MRIKKKFASGTARVFVSRKKALKKLQLNLRDFRRLCILKGIYPREPSSAKRANKGGSSEHKIFYHLKDINFLAQEPLLEKFREYKAFLKKVTRARAKREHLKLEGLLRAKPTFSYDHLVRERYPTFASALRDLDDALCLCFAFSALTQSKIARPRTIGQCRRAVTEFMHF

SEQ ID NO: 122935 - protein, 204 aa, Heterodera glycines
  unsure (1)..(204): unsure at all Xaa locations
MHIWPVRNPRPTAEKLTANFPLLCGQRVLDALFPRVQGGTTAIPGAFGCGKTVISQTVSKYSNSDAIIYWGXGKRGNKMSEMLRDFPELTMEMDGVTTSIMERTALVDNTSNMPVAAREASIYTAITLDEYFRNMDLNVAMMADSTSRWDEALLENSERVSEMPDDSXYPAYLAEQLAYYYKRALKMRXCVSPERKGSDIMSAQ

SEQ ID NO: 122936 - protein, 134 aa, Heterodera glycines
  unsure (1)..(134): unsure at all Xaa locations
MPESENDFDEEAPYATMETLVAGGGAAPNRVRRWTLAQLRQTDGIIPSHVGWNQGDSQKLMTNFGTPRNTTAXVNVENRAEIPEDILLISHGEVRLLSGTNRLASHKGCVSIGTVRDVRRXGVNVNFVPXDLKP

SEQ ID NO: 122937 - protein, 213 aa, Heterodera glycines
PDVAKRIFDLGLKSHGSDPDYALAYVEFLSHLNEDNNTRVVFERLLNSENALPPEKSLEIWDKYLEFESQVGDLTSVLKVDQRMKTACLEGEDRQALWLIDRYKFLNLAPCTTDQLKLMGYSPQKFARPSASVPFQNGAFPVSSASVQPNVLQSGRSQQFLTSAAALNIELGGYARADTSQMLPFKPKLPPASYHPVPRGCFSSHRLLSPHCF

SEQ ID NO: 122938 - protein, 172 aa, Heterodera glycines
  unsure (1)..(172): unsure at all Xaa locations
RALDTLNFDLTLNKPIRIMWPQRDPSIPGSGVGNLFINNLDKEIHTTAIYDTFTMVGSILSCKSATDMEGGSKGDGIIRXDTEETANRAIAKVNGMLMDGKKLIDGKYVPRTAREKQHGDPTSHYNKAYEKNFDEAMESNKLIELYSQHGEIISAKVMKDDSGKSKGLSCVA

SEQ ID NO: 122939 - protein, 137 aa, Heterodera glycines
  unsure (1)..(137): unsure at all Xaa locations
MCAIYGSGAIVKGHHNNATGQKGRRNACRRGGGGRWSRGTPRDYPTLLTFTPKMWWAFCGRRDSLGGFXXXYLXFLXNXXXXXIHIFQVMSGTIFHNILLTYSVEDAKKHAADSFDQLKEAEKKQKEAYAKEERNKF

SEQ ID NO: 122940 - protein, 184 aa, Heterodera glycines
  unsure (1)..(184): unsure at all Xaa locations
CDEEVAALVVDNGSGMCKAGFAGDDAPRAEFPSIVGRPRHHGVMVGMGQKDSHVRYEAHCQSGILTLKYPIEHGILTNWDYMENIWHHTFYDELRVAPEEHPVLLTEAPLNPKANREKMTQIMFXTFNTPDMYVAIHGVLSLYSSGRTTGLVLDSGDGVTHTVAIYDGYALPHTILRVDLSGRD

SEQ ID NO: 122941 - protein, 107 aa, Heterodera glycines
  unsure (1)..(107): unsure at all Xaa locations
MSDSQDDFNDEAPHASMETKVGGGVSDPSRGPRWTSFPLFPTDWIFPVKAGWSYGDSLKFMTDFVTARSTTTXCEVANLAEITEDNLLRTAWHVRLQSGSDRIARGL

SEQ ID NO: 122942 - protein, 79 aa, Heterodera glycines
NSYEVRKLGDKVQGYVMNFTETEQKVREATNEDPWGPLCLQMQEIASFTFHYELYTEVMGMLWKRMFQENKLAWRRVYK

SEQ ID NO: 122943 - protein, 107 aa, Heterodera glycines
MNYYAGSRLVGVWAPLLVASVLCIAIGTTISMIYGIRHEQPQMLWPQIYFLKVEICLLMAGAVFSISCMCMGIEATNLIFSHFISVPQMELNFGPIWPFKLAIACLF

SEQ ID NO: 122944 - protein, 83 aa, Heterodera glycines
KELRELRKLDQRNPFREIPEAWVTSLDDVEHKNCGLIQLHPDIFRVTPRLELFLFNSTWQSQYRNLRLLKMLFRAEMPGGGRK

SEQ ID NO: 122945 - protein, 189 aa, Heterodera glycines
NWVFILTSVVRHRGELSIHEKYRYDLSRAQLKASSRTSALLAGFAMIALVELQYQESTPKPLLIMLGVVTSLLVSVHLLALMMSTCLLPYIEANGCTQDSPHIKLRFYIELSWLFSTCIGLLLFLLEIGVIFFVKFNSIGYTFAAYITTGMLVPVVIVFIIISYLIHRNRFTHSLDRVNEKVADLQKYL

SEQ ID NO: 122946 - protein, 219 aa, Heterodera glycines
  unsure (1)..(219): unsure at all Xaa locations
LGEQKSKWHDEGEKIEAGSIVYECRGAKMVPIGCLDEFGQQIRLNETTVAKGLLMRCSLSRWATDLQLKIIGCVPKGKANETILVGEXWTEKESQTWWECAAEGTTVRARLGGCVDEPSRSRLRIGESVDRGHTTFECQSKGADAAEMVAVGCVTNGGEHRRIGHQWQDGDFLFYCKRKAAGLCEKSCLGCLLQGRRLYDGDRFATGAPFSMRNRPKRH

SEQ ID NO: 122947 - protein, 137 aa, Heterodera glycines
DASDKLSKLMFRIGCFSLVYVLPMAVGIFCAFYQTENIGHWLTNWYSTRCLHVLRSAFGFTHPRAQCPVGDGVQLSRQPDPVLFFLKYLSHFSIGIACVVWTLNGKTVASYGDFLARLFSSRGHRRGRPIRVPTRPH

SEQ ID NO: 122948 - protein, 199 aa, Heterodera glycines
  unsure (1)..(199): unsure at all Xaa locations
GPTTNPVGIPFMVDNXGKFNAVYDIYSRLLKDRIFCIMXTPLMDFVAVSAITHLLNLQNESGKSSIYMYINCTSGNVTTGLSIYHTLRQMSVPVATXCIDQTSSMPTLLLTKXAKGMSAYLLNARIMVHHWSGGAYSTXSGIVIGAHDINLDGKRLKEIYAMHAGQTEETILPALDMDRFLSALQAQQVRLFDRYGTRS

SEQ ID NO: 122949 - protein, 175 aa, Heterodera glycines
KKANHAQQVKKIVVHKIGRQKNGCQRKVLKKKEPKLLLLVPSVQIKNKNKPKKVQLPESISPGTVLIILAGRHRGKLVIFIKQLPKSGLLLDTGPLKLNATPLRRIAQALVLPTKTKLDISTINVPEHLDDTYFKGQSGKVADTSNGEIFAEGANQQYAVTDQRKGDQKTVDIQV

SEQ ID NO: 122950 - protein, 188 aa, Heterodera glycines
  unsure (1)..(188): unsure at all Xaa locations
DAAMQSKQMGNRVNKFFSMDGRIIFYVLQLVLREYKLHSYTLSNDCYFFLGEHKEDVSYTFIPLLQNGSNMDRRRLTLDCMKDAFLPLRLLDILMLVINYIEMARVTGCALNFLFSRGQQCKILYMLMRNTLXHFLVLPDSKMGDGSDCDDVRYDGATVIDPLRVFYXRPCATLDFTSLYPDIMIAHN

SEQ ID NO: 122951 - protein, 165 aa, Heterodera glycines
YPYKQEISLAVTLAMAICLISFVYHSTWVTSEAYSSPSIVLSARSGDGGRIIFDDFREAYYWLRKNTPDDAKVMSWWDYGYRISGMANRTTIVDNNTWNNTHLSRVGQAMASNESHAYEIMHELDVDYVLVLFGGITRYSSDDIQQFLWMVRIGGSTPEGGPFSK

SEQ ID NO: 122952 - protein, 189 aa, Heterodera glycines
MVNLKLFVDSYEVEYPTLVREILADAQKKAVISATVTPFGKCALICGNSIYVWSYSSKESAIPHATRMNLPASGLKYSTQLISIFSRGQSHKSGVCLLAVSPEGNVRFWSELGKPYRDESCLLNNEVAHSVQLISINGTPFCSFFHRTIDAHKDYKKVRISGEVELTGMEVSLCWESVGGVSNCCKYPE

SEQ ID NO: 122953 - protein, 209 aa, Heterodera glycines
RNFNCSSSRHFSLASVLFQQQKFSAVASSPNKNLNAVLIDAVRTPFLQSNTTFRELLAVDLQRHALKALVERTKIPFDEIGHIICGQVVQECKTSNIAREAAITAGFPDSIPCNTVTLACISSGVSIQNISLMISTGYLKAGIAGGVELLSDFPIRYNRKVRLSLIDLQKAKSFGERFKHLKTVASNWFSPELPAVSEFTTGEVMGNSG

SEQ ID NO: 122954 - protein, 162 aa, Heterodera glycines
TLPSLYSEMSQLNNKVRDGVQAFRVNTDSAWTDLMDVQVVVSPASKDRGNPFSSIFRAKRQLPGHCYCGPPQRPNCPPGPPGPAGPPGQPGQPGGAGLQGQSVAPGQPAPPCSPQNIPVPRCPAGPPGSPGGQGPPGQQVATGQPGAPAPGGGHGPPAASGP

SEQ ID NO: 122955 - protein, 188 aa, Heterodera glycines; identical to SEQ ID NO: 120813

SEQ ID NO: 122956 - protein, 135 aa, Heterodera glycines
  unsure (1)..(135): unsure at all Xaa locations
DRNVAHRDIKLENILCSSNAEEKCTFKLADFGFAKRTEKGRLMESPCCTPAYVCPEILNRNHYDXGCDIWALGVANYILLCGYPPIYSMQGLPFSPGMRKRIMEGMFAFPXDEWGTIYHSSRNIIAAMLKTDPTE

SEQ ID NO: 122957 - protein, 207 aa, Heterodera glycines
MTSQGVENYLKDQTISDIPTIAEGFQNLMNLYINKLWNQLSAEASQLVRNKLFVSTANLFQFYEEFVRDFERRIEPLQLIELITPIAEDIFERDRQSAYTFLDNFDKVIKQDKRAIVRLEDSKIQLRLRDKPTAEAKCCNDPALVRKMLEEAKTMVDQLVEVGSVHAAYYGCSAEYQFQMGDHDRYYEEALHYLGCEDINVKLSTEQ

SEQ ID NO: 122958 - protein, 185 aa, Heterodera glycines
CTGFTLRPVAGLLRSRDFLDGLAFSVFHSTLYILDSSKTQYTPEAEICHELMGRCPLLADPDFAQFSQEFGLASLGASDEMVEKLATLYWFTVEFGICIQNGAKKADGAGLMSSFGELEYALSGQPELAAFNPPETCQNKYPITSYQPTYVVAESFADGQNKLPTGSTSIPRQVPVNYNPFPQRI

SEQ ID NO: 122959 - protein, 182 aa, Heterodera glycines
MLYNGKFLNKKNYTITFELAGSFVENHRGTVYSVSFNPFTHSEAPIYFATVGKNRVSVYLCPPEKGFQLVRQFEDQDADEFYYTVTWAYNLEKAQHVLVVGGFRGIIRVISPLNGRLHCALIGHGDSINELCTSPVSPMIVASASKDLTVRIWNVTYSQCLAILGGTNGHRDQVISLDFNSP

SEQ ID NO: 122960 - protein, 208 aa, Heterodera glycines
GWSRADSSNLLGEQQNSFAFSSMGNKATNNIFTDFVDPFFVDEVITSVLDVGRAEIRYYKNGQPLGAAFTDIRYQTGDIYFPHVATKNCKVMVNFGTEIPESIEAAKDESGLCLWSMPADEVPEETEWVGNVDRKQMAPSRRPMIDKAHCTIIAMVGLPGVGKTTWVRQYLKEHPNENWILLNTDTILEAMTVDGMPRHRVHQGRWDM

SEQ ID NO: 122961 - protein, 201 aa, Heterodera glycines
MASYHVAIAADERQKYRSFWDQFSGRADNSAMMLNANADQIESLDRENILALLPSVKGKFVVDIGAGIGRFTTVFAQSEASKVVATDFVASFVDKNRQRNGAYANVVEWRVGDATGLQFDEGSVDLVFTNWLLMYLADQEAVQFVANALQWLRPDGYLHLRESCSEPSTKKSADHSTTTTTTSTSSSSSSSLHNNSKPNPT

SEQ ID NO: 122962 - protein, 153 aa, Heterodera glycines
RPPSPSRASARRAAVGWVTRGPAPGTSPVRGGVAPPTRCPCSLFQALILKVCPLRPRDPPPREARMDRASEERDERPVFILQLARQTRPRDLEEFFSSVGHVRDVRVITDTKTRRSKGIDYVEFWEREAVPLVTFFLLKWANPHKEFACIPPT

SEQ ID NO: 122963 - protein, 106 aa, Heterodera glycines
MEKRQSARRSRAHEREEENEDEEVFTRRTFNVLQSIATKLRAANTNKIVFEDLFTKGSTRRTAAQKFYALLELKKWQAIEVEQRDAFDTIEISAGALMNETIKLAI

SEQ ID NO: 122964 - protein, 165 aa, Heterodera glycines
MYRVGDFVYFETFSAAPYQIRRIEELNKTANGAVETKVTCFFRRRDLPNSLLKIADQAGRQSKIASKPRKTLLGKAEPTSSTSNANGEEGPSENGADAMESGGGSSTDAENSRRENDETADDGRAESVGFAGLPAGAERLDAAELSRLRQHELFLSRIVETLPAT

SEQ ID NO: 122965 - protein, 174 aa, Heterodera glycines
HKKSGGFNTKKFLLDLAYGGTAAAVSKTAVAPIERVKLLLHVQDASIHITANDRYKSIIDVLVRVPIEQGFLSLWRGNLANVIRYFPTRALNFAFKDTYNRVFTQGVDKDKHFLKLFTMNLASGGAAGATSLCYVYPLHFARTPLVSHVAKDDDPEFRGWADCIMKIPKSDRPI

SEQ ID NO: 122966 - protein, 164 aa, Heterodera glycines
  unsure (1)..(164): unsure at all Xaa locations
ILFKLKRQIFIYQNQKDADFERILARRKRIELYKETNEQVKREKLQKELAQANKQEEQRRREELKKLQEENKENERRRKLNEQEEIQRKLQSEKLKKYQAHPFFQQLVKEHGEAIFDKVDPDKLIREKRIRFDAERPEQQTKLQNLEKKYDHXVRAFHLEEMAL

SEQ ID NO: 122967 - protein, 207 aa, Heterodera glycines
DDRLDLDRPTNWRVFNILAVFHNLSFEEANTALMGESHALVRFLLLCSKCRWHLLRKIAYDTLSNIARNIKLVDKLSTVLLNTVQKGLHSDDKCKVMRSMEIVAGLCATPTNESIVCEFFEESQIIPRIFALLSLKDILMCMCAMESVLAISELGRVACEAVARCDRAVEMLVGFLTTDAFSFGTVGLAGMHVVEVHGHPTRPYVAP

SEQ ID NO: 122968 - protein, 152 aa, Heterodera glycines
  unsure (1)..(152): unsure at all Xaa locations
STHSRKALLLIAFAFKTKHQSQPEKMCDXXVAALVVDNGSGMCKAGFXGDDAPPAVFPSLWAPPLFKPSCSHGNKGLYLVTRANQPGFPTLNSPFNPVSPPWDTLEKIWPPSFKKIFFPPKKNPGFFKNPLFPXGAKKKKPPLFFKNKHPPP

SEQ ID NO: 122969 - protein, 216 aa, Heterodera glycines
GTTCDDFLRENLDWISKATNWNKFNAVASLGLIHKGHERDAKKLLEPYLPKGEQDQFCFKEGGSLFAYGLIHANHGSSAIDYLSDQLSRASTSAVRHGACLGLGLAALGTRNERVYEHLRDVLYQNEAVSGEAAGTAMGLIMAGSMNQMAFDEMYQYILDTHHDKIQRGLRTGISMLAYGVAERAEDWIRLLYNSPYAIIRQTGVCMIALAYAGTG

SEQ ID NO: 122970 - protein, 115 aa, Heterodera glycines
  unsure (1)..(115): unsure at all Xaa locations
CDEEVAALVVDNGSGMCKAGFAGDDAPRAVFPSIVGRPRHPDGMVGMGHKDTKVVFFFQTNRGILTLKXLIARGIVTKWRNMENIWHNTFYNELRVAPQKNSLLHTYARLTPNAK

SEQ ID NO: 122971 - protein, 193 aa, Heterodera glycines
MATNSAFERLDDYIWGRADEGEFLRGVVADERLDTEKLLSRVQNIQREMNSRLRQGVEENYPSLLEQVSTIEQLDSAHFHVQREMDAVVRRADALAKTMEEQVGKIRKDVRAIASLTQLSRMQGDAIRCEELVDAWRAETDLIRRTEHITEVNAIVKANDKLRHLKWLQYRCLFSLSEMNSRTRQDLVVQLRS

SEQ ID NO: 122972 - protein, 212 aa, Heterodera glycines
  unsure (1)..(212): unsure at all Xaa locations
YHFGIDHLPTTRTTELFKCLTMHEKKFGERLQIEGVIFSKRRHQYEEQVKENPFNYDAWFNYVRLLMAEDADRAXVEECFDRTISNVPPYVEKRFWRHYIXLWEYYAIYEXLDVDDLRKCPEEWRACLDILPHKHFTFAFTWLMFAQFELRQLNLSSARKILCTAIGKCPKKKLFREYIEMXLHLMELDRCRXTLXKFREFSPDNSVSWMKY

SEQ ID NO: 122973 - protein, 217 aa, Heterodera glycines
FLRAVLAVHNNDFDKAYSCINKVRDMFDSELTAMAAESYERAYGAMVLLQELTELEEAIEYKMIPEREMRIALLWSRRLQGCLLNVEHWRRILMVRSIVFSQTELRPLWIKFAALCRYEGRQVTVSRNVIRSLLEVPPDTPLEKVPIPLPLEKTQLALALCKQLWVDSHRRTALVQLEQLTQTLHRCIERNRTMLTREQLETHARLTAKCYLKLGEW

SEQ ID NO: 122974 - protein, 182 aa, Heterodera glycines
CDEEVAALVVDNGTGMCKAGFSGDGAPRAEFPSIVGRPLHQGVMVGMGQKDSYGGDEAHSHRGILTLKYPIEHGIPSNWDDMENIWHHTFYNELRVAPDEHPVLLTEAPLNPKVNREKMTLIMFETFNTPAMYLAIQAVLSLYASGRTTGLVLDSGDGVSHTAAIYEGYSRAHAIMQFGLGR

SEQ ID NO: 122975 - protein, 215 aa, Heterodera glycines
NRKSFSCPKTKSDLLTGTSTANLSPEDIGIIASMGDSLATGAGLWPRTDIEFRGAAFPIGGDATIDGLVTVPNILREFIDSNLLFGVSHGMGQRDQLPENQLNVAVSGASSSSMPGQAVELVRRMKRLRELDVFNTWALIIVTIGTEEVCKNCTGPNTKALVQALDILNRGIHKALVILLGPIHVTSLYQQKFNLLKTRCLCSQNKDDKFMSALS

SEQ ID NO: 122976 - protein, 180 aa, Heterodera glycines
MPSQGELKEIFNLYDEELEGKIDATQIGDVARACGLKPTNAMVWKAAGEEYKRKGEKKLAFEEWLPIFEQLQKEKEVGTYADFVEGLKVFDKDESGKIMAAELRHVLLALGERLSAEEADELLLGAQDGEGMINYDRKRLLMKLTVSRVPTNDRSPLVFQSSSKRCWPGPTPRIERRNAN

SEQ ID NO: 122977 - protein, 195 aa, Heterodera glycines
GHQKIAALLVDHGSRMGKGRFPGDDPPPAVVPSIGGRPPPPGVMVRMGQKDSYLGNQAQSQRGILTLKYPIEHRILTHWDHLEKIWHHPLYHQLRVPPQEHPVLLPKAPLNPKGHRKKMTPILFQNFHTPAIYLALPALLSLYAFGPTTGLLLDFRDGGTHTGPLYQGYPLAHALLRLDLGGPDLTDYPEKIPPE

SEQ ID NO: 122978 - protein, 215 aa, Heterodera glycines
RYGAECDWWSLGICMYEMIFGETPFYAESLVDTYGKIMNHEEMFEFPEDIDISDEAKDLISRLICARETRLGKNGLADFRDYPFFADIDWENIRSAEAPYKPEVSSPTDTSNFDSSVVANDFTPCETQPPKVTAPFTGLHLPFIGFTFTSGSAFSDATSLLQTIQANSGGGAVGVVPLSSPAVDSAGAKSAILQQQQQAQAASVPAQAQDDEERE

SEQ ID NO: 122979 - protein, 98 aa, Heterodera glycines
GVYSNGYDGSLNSCHRFPLFHTVIIANHFTRKDPNQSDSLTDEDIKPSPNWQNFRNSSTIFLRGPPTFLGPAKWKQAIVFFFFGGEKKNPPESPPSRG

SEQ ID NO: 122980 - protein, 156 aa, Heterodera glycines
  unsure (1)..(156): unsure at all Xaa locations
KPPPPLFCIDRHGRFNAGNACTVRLDDYLIFHYTNPRLLEHFLYPGTDXQPLPIIQTGLCQEQYCNLQAQLHRXKEHGTFIFNVPFRHFNYGQWYPKDANALISSDLEDDQPSRDLTNVEYIYPNPQIAFETHNRDKHNAWDEWWMRQERFIKRLK

SEQ ID NO: 122981 - protein, 184 aa, Heterodera glycines
MEPIESMHHSTATLAESNATIVAGGGGGMNGTTNDLDSSPLLLPPEKGILEENCGVILIAAINKSDMHSDLSAEQLDRLQYHVRKFCLQHGAALIYTSANDDLNTQLLHKYIAHRIFSLPFTAPAYIVERDRIFVPTGWDSEQKLSIIKEALVGSDLLDVPMLAQQSSDASPFSNYRATGEMEV

SEQ ID NO: 122982 - protein, 61 aa, Heterodera glycines
IQAPDLITDVQAVMLLYTSRHTNDLVLDSRDVVTHTVPIYHAYHTTRAILQKDLPRRDLTD

SEQ ID NO: 122983 - protein, 192 aa, Heterodera glycines
NNHHPTVNGNGFGLTNGTHFADEFSESIKDVGIIGIELYFPKSYVNQEDLEKFDNVTSNKYVLGLGQQEMCFCHDNEDVCSLSLTVAAALMDNYKVNPKDIGFLAVGTETWFDKTKGESRGYGIVCRFRQLDLEGPRRKNPGFGGTQALVIAPQWVGPELPNKKNPCPPVAGANWANFTRWGPPQLTGGSAG

SEQ ID NO: 122984 - protein, 72 aa, Heterodera glycines
DEEVAALVVDNGSGMCKAGFAGDDAPRAVFPSVGGRPHHRGGMHGMGQKDSYTEYFFLSKRGILTLKYPIKH

SEQ ID NO: 122985 - protein, 147 aa, Heterodera glycines
  unsure (1)..(147): unsure at all Xaa locations
KHQSQPEKMCDEEVAALVVDNGSGMCKAGFAGDDAPRAVFPSIVGRPRHQGVMVGMGQKDSYVXIXAQSKRGILTLKYSIEHGIVTNWDDLEKIWHHTFYNDLRVAPEEHPVLLTEASLIPQANRENMTPILLQTFHTPATHVGLPG

SEQ ID NO: 122986 - protein, 217 aa, Heterodera glycines
  unsure (1)..(217): unsure at all Xaa locations
MFSGATEFIANQAFTSALWNIAESGVQRAEYLVHNYLLSPTAENGMDTQKQSPSSKKIYYVSFNQDCTILVVGHDDGYSFYNLRSLERLEKISDSRVPERACIVEKLYSSSLTCVVSMKSTRKLQVFHSKNENEICSHTYASSIIAVRMNRKRVVVCLEDTIHIHNIRDMKIMHMLKDTPPNPNGIVDLSIAESNXFLAFSVFVRTGPGHIFDAENL

SEQ ID NO: 122987 - protein, 74 aa, Heterodera glycines
RWTLSQVRQTDGIISAQAGWNKGNSNKMMTISGMPSHTTIKFHVENPVHIPDDILLKNTAEVLMLASPTWFSNQ

SEQ ID NO: 122988 - protein, 227 aa, Heterodera glycines
MIGGLFVYNHKGEVLISRIYRDDVNRNAVDAFRVSVIHARQQIRSPVTNIARTSFFHIKRGNVWMCAVSRRNINASMVFEFLNRFADTMQSYFGKLNEENVKNNFVLIYEILDEILDFGYPQNTDPGVLKTFITQQGVRTASKEEQAQITSQVTGQIGWRREGIKYRRNELFLDVIEYVNLLMSQQGQVLSSHVAGKVAMKSYLSGMPECKFGNNDKLTIESQGRTG

SEQ ID NO: 122989 - protein, 218 aa, Heterodera glycines
VTFLHTLLEADHLKPQLLRVQLSTAGSQEPQSLLSHLSRMLCNCGPRKLQIRCGLLMLLSVWTNNCTPAIELFLSPFCTNSASDDHNVVHYLVSQLVDQNTEITEAENHLVKGLVAFLVGICLHSWEVPEGKADKKNQLTHLIERRVGRERMAEYIEGISKSEFYIRAAQRPQPLAKGPSDLLLDYQFTKFFKLMEGHLLKFFRPNGELSSSVIHSLK

SEQ ID NO: 122990 - protein, 140 aa, Heterodera glycines
  unsure (1)..(140): unsure at all Xaa locations
TDNHRFSDPEDFVDDVEDDELIRDLLYEEPRESQYQECCIMVFNIPIISSDRLPKLRNVSSCVFSVRNTYKYNDNSPLDGEGHTKGFCFLEXQTKEAANAVLAICDGHRLDKYHTFAAYPFTAIPSMNEPEKDWQKPERH

SEQ ID NO: 122991 - protein, 103 aa, Heterodera glycines
  unsure (1)..(103): unsure at all Xaa locations
LTNGRPGLQRRTHARVFFFLAEKRQCYLPYWMMVQLDRKEGDIISEQXLXIPIAAYPKDQPMLTDYYHIXNPRAMHEVELRKFSRLTTGDIIAVHHDEQCIDF

SEQ ID NO: 122992 - protein, 164 aa, Heterodera glycines
CNKKFAVLWGDKGSGMGKAVFPGNNPPPRVFPSLGGGPRHQAVWAGLEQKNSYFENKAHSNVGILTLKTPMEHGIATNGNTLKKIWPPTFYNKLLVPPKKNRGLLTKAPLTLKATEKKRTQIMLETFTRPAMTVPIQAGLTWNPSGRTTGLLLNSREGAPPPGP

SEQ ID NO: 122993 - protein, 202 aa, Heterodera glycines
  unsure (1)..(202): unsure at all Xaa locations
KKKSGGFNTKKILLDLXSGGTAAAVSKTAAAPIKRVKVLLQVQYASILITADKRYKGIIDFLILVLHDQGFLLEWRGKLANVIRYFPTQALNFAFKDTYKPVFTPGVDKEKHFLKIIAMNLASGGAAGATSLCSVQPLDFARTRLSTHVGQGHARQCKGLPECIINILKSDGSIGLYRGFFVSDQGIVIYRTSYFGCFYTTK

SEQ ID NO: 122994 - protein, 210 aa, Heterodera glycines
MAEEMALAPSSSSSTAPPSTTAGGIASSSSSVSSSSVVGTCSSSSGGIVPSIKMIFPGEVWCQSGGTAMIIGEQFHEGMQVMVGGTLTWPEMVTAHAIKVNVPARASPGAVDVVVCSPKGQPKVRSNAIRFSYVSLTEPSIDYGFQRLQKLLPKYPNDPERLPKEVILRRAAELAEALYNRYSSPAEQLSHYAYSFDSDLVADYARVHTS

SEQ ID NO: 122995 - protein, 163 aa, Heterodera glycines
RLDVFKLTDYDAMKFLVSQSDIATRKRDYQMEHYARNRPSDGIHIINIRKTWEKLLFAARAIAVIENPADVAAGSAHPYAQRAELQLAAPIGATPICGRFTTGSLTNHLLKNCLEPRLLAGSDPEVHQQEGRDASYENTPGIAPTNTDSTLRFVDIAVPANNK

SEQ ID NO: 122996 - protein, 166 aa, Heterodera glycines
  unsure (1)..(166): unsure at all Xaa locations
EVTCVAFHPRESVLLSGSNDFTLKMFDYSKTAVKRAMKTITEVEPITAVSFHPSGEFFLCATRHPTLRLYSAETQQCFVSTIPKDQHSDSITDVCYSENARMFVTGSRDGNVKVWDGVSNRCIETFTRAHDGAPICSAQFTRNGKYVLTVGMXVCPNYGNCPPIAV

SEQ ID NO: 122997 - protein, 161 aa, Heterodera glycines
MHISFVSRQATAFLGVASRNALPRVAAEAPPAPLTYLSEDEVALKQSVKQFSESVIRPLVKEMDLKSEMDRRVIEGVFANGLMGIEIAEKFGGSESSFFNVALTVEELAKVDPSVAVLVDVQNTLVAPLIIENGTEEQKQKYLTLIVKDWIGAFCLSEAGS

SEQ ID NO: 122998 - protein, 67 aa, Heterodera glycines
CDEEVAALGVDNGPGMCKAGFAGDDAPRAVFPIIAGRPRHLGVMDGMGQNDSFLRDYARSNSGILIL

SEQ ID NO: 122999 - protein, 114 aa, Heterodera glycines
STQKFIVGRPRHQGVMVGMGQKDSYVGDEAQSKRGILTLKYPIEHGIVTNWDDMEKIWHHTFYNELRVAPEEHPVLLTEAPLNPKANREKMTQIMFETFNTPAMYVGIQAGVPL

SEQ ID NO: 123000 - protein, 76 aa, Heterodera glycines
  unsure (1)..(76): unsure at all Xaa locations
SIYNSNKCYRQPSDAERVQKRTSMPLYDFDNYLFDHLPETXHWRDDDAINYASTDRNQHIPQYCASCWPMRVTSSL

SEQ ID NO: 123001 - protein, 152 aa, Heterodera glycines
MKDVLILHNINQIVQVVDDDRTFCLLGDQMGKIKIMESDGHELAILCIEGRIEQIGIFEEISSRFISKELTDVTRVDCGGGSVLPGMADAHSHPVFSGDRVHEFAMKLAGATYMEVQAAGGGIPFTAEKTRESTEEQLLEDFLDIAREMLPS

SEQ ID NO: 123002 - protein, 179 aa, Heterodera glycines
RVSVTHYHPMWPPTDPAVQCPKHWLENVLFINSLTDNRCLPWTWYIGTEFIFYLLSPVFLLALRHSALYGLSLVGLVSAASALANLIIMLQYNFPPTQMLWKQPSNFSPDFIKHHLVIYIKPWYRIGPYLVGLVLGYVLAVHSVSPQRKRSDGTHSARFVWVGWATAGCAGFWSVFGLY

SEQ ID NO: 123003 - protein, 121 aa, Heterodera glycines
  unsure (1)..(121): unsure at all Xaa locations
PKPSGMRATKAGKTPKEARTGDRKRSKARKESYSEYIYRMLKWVHPDTGISSEAMAVMYSFVNDAVERVVAGASRLVHYNKRSTISXCEIQTAVRLILPGELDRDSASDGTIAATKYRPSK

SEQ ID NO: 123004 - protein, 74 aa, Heterodera glycines
  unsure (1)..(74): unsure at all Xaa locations
PSYPLASLYVGDLHPDVTEAMLFERVSNAGPVLSIRVXVMQLLSSVRLGYAYVEFSTXPADAERAFWTTNELLT

SEQ ID NO: 123005 - protein, 83 aa, Heterodera glycines
MPESEHHFHEEAPNASMETKVAGGGAVPKRVGCWTLSWLRQMVSIITSQDGWNKGDSQKLMTNFGTPRNTTTKVKVENLAEIP

SEQ ID NO: 123006 - protein, 137 aa, Heterodera glycines
TTDKTVFVVSLRIDNNLCHFRLKREGRLFMVAQRTFETLCHLEDFYASTPFVRGVSLKFPVNEQTISQYTDQNDGQLHLDCFYIDLNNLDKELLVETIESFDGIIDDCQMSKNDQLKVFPPLSFPIGTQITLLSMDQ

SEQ ID NO: 123007 - protein, 213 aa, Heterodera glycines
MDFEVCSTSSGDEFVDLDLEFSSADESIHDFGDSSMDKKPLERLLREIESESQKEVEDADKVAYRRVGLPNVGPTAQPKTLFPVWVTESKRFSAQIGGDTDNEQKGIGLRLDNLRPEFLHVLQKSISFWFPVQRFVLPTLLQMANSVLPPRDLVICSPTGSGKTLCYVLPILNALRICPFSTSSVFALVVAPVRNLAEQIFKEFEKLNLFGAA

SEQ ID NO: 123008 - protein, 216 aa, Heterodera glycines
MSRQQRDSSSSRSSDSWSRKSRSRSRASSPSRSSSSPHDRDWRFRSRSGERNKRRCRHSRQSPPPRKRERSRTPFSRRRFSNETKPSNKVILTSLPNYADKDALNILLAKQGFHPIDIRVVRRNTDSGSVRIFGFVEFSDVETAEDWIRHNQGFLKMDDGFQVRLEYSREELNRERPIYNPLTSDWTCSKCTINNFNRRTNCFKCGTSRKDSEALD

SEQ ID NO: 123009 - protein, 93 aa, Heterodera glycines
  unsure (1)..(93): unsure at all Xaa locations
MSSHNTSVIDENRRWSDLRCLTDRASTFANSGFVPGIKNLKEVHKMPVLVVGAGGLGCEILKDLALSGFHDIHIIDMDXIDLSNLNRQFLFRF

SEQ ID NO: 123010 - protein, 191 aa, Heterodera glycines
GNSSAHHQATVNSVGTVASGQMKPSVKDLLDRVLDEYNHLQQQLHNVRVELEKSQQERDTLHRYSLMYSETFFTLNFEMLKHGEIVKRLSGILSHVIPLLPQEHQAPAVQAIERAKTINQQDVTSIVNGQVQQQQQFASILPGLGSMMNPTAFGNPMGAMMGIKPEDAIQAAAMFNNLLKNPMLGATAAGL

SEQ ID NO: 123011 - protein, 192 aa, Heterodera glycines
AKLYGNQDNFRVKKVLIAAKLSGKDIKAIPQLPPTNLFPLGQAPAFDDGKVCLFGAEAISKYLLGTGSIYLPQNPELDQWIGWTASSLQPNVLSYVLPCVSAAKIDQNALETAKNELLAQLSLFDQILLPKTFLVGERLSLADISVAIDLLPAYQYVLGEEARKGLVNVNRWFQTVVSQPGIREVLGEFSFI

SEQ ID NO: 123012 - protein, 219 aa, Heterodera glycines
GSNVFNIGNALAAFSGAVQGPVSRGRVQQVKVPKKMSFKPLSRALAEPDFMIWDFAKFDEPAQLHALWQALYSFEEMKNYSPLPRSDADAKLLKEMLPKDAPEMPDSLLLNFSYQACGNLQPIASLISGLVAQEAMKAVTHHTTPLKQFLYTDSLEALPGADSTFDAAKLEKNDCAPRNNRYDGQAAVFGWAFQEALQQQKWFIVGAGAIGCELLKNMA

SEQ ID NO: 123013 - protein, 144 aa, Heterodera glycines
MREIVHIQAGQCGNQVGSKFWEVISDEHGIQPDGTYKGDTDLQLERINVYYNEAYGGKYVPRAVLVDLEPGTMDSIRAGPYGQLFRPDNFVFGQSGAGNNWAKGHYTEGAELVDNVLDVVRKEAEGCDCLQGFQLTHSLGGGTG

SEQ ID NO: 123014 - protein, 176 aa, Heterodera glycines
VYKTAPPRFHCEAGTIEMPREIPASGEMVLTLRTDACTGSTTEVNFLEHVQAIVSLNSSRRVDTTLYLISPAGTPSMILSRRPKDDDAKDGFTNWPFMTTHTWGENPRGRWRLVVRFQPGKSTPKGHKYRGTLKKFTLMLHGTKEPPYRGIEPLQGHANSKLSVVQSAHKRMANRR

SEQ ID NO: 123015 - protein, 69 aa, Heterodera glycines
  unsure (1)..(69): unsure at all Xaa locations
NKKSGGFNTKNFLLDLISFGTAAAISKTAVAPIXCVQLLMHVQDACIHISDDWPYKSILHILIRVSQEH

SEQ ID NO: 123016 - protein, 78 aa, Heterodera glycines
MARRYDTRTTIFSPEGRLYQVEYAMEAIGQAGTCLGIRAPDGIFIAAQKLTANKLLDDRVLNTSHLKQIIATVALKFY

SEQ ID NO: 123017 - protein, 201 aa, Heterodera glycines
LLSCTHPEFPYKQQDITAYSSTLPNVLYAGVDPTADSLHLGNLLVLNSLIRASFFGCSPILLIGKATASVGDPSGHKRDRILLLHEFIYANSKALQIQVEKIKANVSSLYGEDISLEIRNNAEWYKEMRILDFFESTKRFRMSDMLKSGPIKSRLDDCETLSYAEFSYQTLQAIDWLKLYEERGCLCQIGGTDQFGNMRAG

SEQ ID NO: 123018 - protein, 128 aa, Heterodera glycines
  unsure (1)..(128): unsure at all Xaa locations
IPSAIPLRSISTTCTARNSISQSHSGTGGTATFSICILPRLHNNAPDVPGLLIAPTHYLGAHIRLDIDALGEXPPIKYHARILATSEPDYQRTLERTDPVINGTPGLDDELILLGALLNYYIVMFVLD

SEQ ID NO: 123019 - protein, 168 aa, Heterodera glycines
  unsure (1)..(168): unsure at all Xaa locations
FEATLQYKTLTFDWLHLGVDELKMASCDKENIRTESFDLVLTNAHSKRECAVGELEPRYSAVVVPPIPRLDAQKLPKVRDTFTNGIGXRHLSTYQLNSAHCYINPEDFAGMSEEHLLVRITRVSPDNYSSTNYXRRTGCIMTGXPPPVTYXCYRCGQSGRWYKGCTLL

SEQ ID NO: 123020 - protein, 164 aa, Heterodera glycines
  unsure (1)..(164): unsure at all Xaa locations
MMELATYRYYGHSMSDPGTSYRTRDEIQEVRKSRDPITSFKDRIVTAGLVTXEELKDIDKKVRQEVDEAVKVALSDEVLPPEALFSDLYANTPPLAVRGTTADATVTQPFVSTAEVLRKMGREPKNYXRTNSQRRIDSXEKHRIINCFIIFIRSKLSEEERDSF

SEQ ID NO: 123021 - protein, 196 aa, Heterodera glycines
LINVIRTLTTTVSNDQRQLEKQRIEHGYKQSEQNIDKLLKEHRSDALHCLNTFQSVSKELTSCREQIRNIKSSLSLCKSFLQCRRDDLNKFWLENAQQKKVCDILQQIQQIKETEKNIDVQLASGEYKEVIRVLKDADVLLKGPFEKMDGISQLKFVVSENLQKVFGQIVTDLLQCTFDEPFEIQTLEAVKSGKLI

SEQ ID NO: 123022 - protein, 221 aa, Heterodera glycines
LRSNEVNTSTTLQELGFGPDEDDDLHNASHFSQPTPANAMAASASAGYDIPQRLKTLHNLVIQYAAQGRYEVAVPLCKQALEDLEKNNGHDHPDVATMLNILALVYRDQRKYKEAAALLNEALAIRERCLGEDHPAVAATLNNLAVLYGKRGKYKEAEPLCKRALEIREKVLGNDHPDVAKQLNNLALICQNQGMYDEVEKYYRRALEIYESKLGPDDSNV

SEQ ID NO: 123023 - protein, 192 aa, Heterodera glycines
LAFCAERKPERAGSTSKCLKSPFLGYYQKHCQVLNACDTEAAGAECVETLRTSKASVCECIDEARDDLKRRIAGIAEAIQEAVQGGSRAAPSIGSNSKVDQCVANIKKQLITPTNDWASTIDNALNNCIKNKPSSQNLGIDSLLNVGCRKIIADSSGAAQAQIKTGFEFVNNLIDAMVERSRRFCGGAHCGN

SEQ ID NO: 123024 - protein, 99 aa, Heterodera glycines
  unsure (1)..(99): unsure at all Xaa locations
VFGVAHIFASFNDTFVHVTDLSGRETIVKITGGMRVKADRDEASPYAAMLPAQDVAXRCSRVXINALHVQLRATGGNKXTKTRGPGGQAAPACPSFVRV

SEQ ID NO: 123025 - protein, 212 aa, Heterodera glycines
MLKRPLINLNLEKWKTYVQSSPRNYSMIVMFTVLSASMNCPICKPAYEEYLILANSYRYTFLNSKSLYFALVDYEEAPQVFNLLNLNTAPAIYHFPAKGARRNQDTMDFQRMGIDADAMAKFVQDRTDIQIRVLRPPNYAAPVVVLLLVMLVLGLLYMRRNNLEFLFNRTFWALVCVGIVFAFMSGQMWNHIRGPPFVMTHPQTRETSLVHG

SEQ ID NO: 123026 - protein, 218 aa, Heterodera glycines
KVPRLHDKAVLVKSGTKFVDGRKQEFVVGKEIGQGGFGRIYEGVQSGSRHAVAIKMEPPSNGPLFTEMHVYMRVLKPEHLDKWKKDKGLKFLGLPHFISNGSFTYEGQQIRYLVIPKFALSLESVRAARTPSAVLSWTEVSAVAKTVVHALAYLHDQNYVHGDVKAANLMMESKSDFSRVVLIDFGLARRLPDALVEKENKKQAHNGTPLFTSCDAHR

SEQ ID NO: 123027 - protein, 110 aa, Heterodera glycines
MTGGKRIPASGVPMFEMGPPVTHTNIGPNHIHLVRRLDGDITCTELLLDTGDFTSPSKRCAHTTRFIFPIYNASNRHLVRTGTSNQGMILSIDGTPFRPWYQAQYALPLS

SEQ ID NO: 123028 - protein, 216 aa, Heterodera glycines
INSISTSSPWYPQGGKSGAVFSRTDDERFVLKTLNRFELDAFKQSALKYIDYISMALMEGKLTALCKIFGAFSVNCTNKQTGHSVKSDLIVMEFLFYRKDIKQIWDLKGSLRNRLASTKNDNNGASSVLLDENYIQNMWRNQIYITTHSKTALSQAIINDSHFLADQGIMDYSLLAGICRGEEDEVIVGIVDYMRTFTFDKKVESAIKNAIPLTNS

SEQ ID NO: 123029 - protein, 195 aa, Heterodera glycines
  unsure (1)..(195): unsure at all Xaa locations
ADFDKHAAQREAESLRTLAFFGVCLSTVATAINVISVTFAYQHFQQLGTQMQNEVDFCKMCSGNMWCEVTLTQTYSKVWPDSSHKRQARGCCGCRVSPPGPPGPPGPSGQPGXTDNPEAHXQPGSPGQESPLPYPPSGRRVPHCEAAQPGLPGPPGPPGPYGDNGQPGQFGPDRSPERQRAQGAPGHDGQTAHPG

SEQ ID NO: 123030 - protein, 167 aa, Heterodera glycines
  unsure (1)..(167): unsure at all Xaa locations
KPLQIEEYDTSDEQDLRNTNGNIPVQWYNDYDHDGYTSSGDKNEKQASIFYESDASLPKEEDSYYRRKVLDRQSGQQMALTDQQVEKLNAIAHNRFPEIRYNTYPPILDIFPSEREIRPISNTXPPRNTXSVPRGDERRNDGRMVPGIKMGLGKKRKKPPQTVKEPG

SEQ ID NO: 123031 - protein, 110 aa, Heterodera glycines
  unsure (1)..(110): unsure at all Xaa locations
PPPPMAKPGRIRMFRSLKQFVPTKAGELKLYGEDIVYVKEAPDGTTSCESKSATGYTEXILPKQFVEQHMELIEFPLHGAAMAGDLSFLRECMDYKMCVYGLDRSSSTAL

SEQ ID NO: 123032 - protein, 169 aa, Heterodera glycines
MSTTLQPYLDAVRRSLEAALCLQQFGSQVVERHNKPEVEVRTSKELLLTPVMVCRNKQEAVLIEPSINSVRMSIRVKQADEIEKILCNKFTRFMCQRADNFIILRRKPMPGFDISFLITATHTQVMYKHKLIDFLIHFMQEIDKEISEMKLALNARARTSAEEFLKRFN

SEQ ID NO: 123033 - protein, 162 aa, Heterodera glycines
HLPCIYLCEFCLTYLKSQSALARHVKKCNLYYPPGNEIYRKDSISFYEIDGRKNKIYAQNLCLLAKLFLDHKTLYYDTDPFLFYVLTEYDQKGFHIVGYFSKEKESAEEYNVACILVLPPYQKRGYGRLLIEFSYELSKIEGRTGSPEKPLSDLGLLSYRSY

SEQ ID NO: 123034 - protein, 69 aa, Heterodera glycines
  unsure (1)..(69): unsure at all Xaa locations
TQLSRQQLSSSEGLGEYSARQLLEQREKLERAEQNMDTVHHTTQHTQRILNSXKSWLGGLVTNKLSPSP

SEQ ID NO: 123035 - protein, 55 aa, Heterodera glycines
AYYLLYKLLLIGHCGMGKTWVLYRFLDDAFNTSFISTIGIDFKIGTIDLRWNKMK

SEQ ID NO: 123036 - protein, 177 aa, Heterodera glycines
GLASVTLRRMDTVRSRLAAAGSLVQFRKHLRQALRQRLDRLYSDKMARADVAFDTDAAAREGIDEVLRNYMDAQYYGDISIGSPPQNFTVIFDTGSSNLWVPSKKCSFFDLACRYHSKYDHKKSSTYQPDGREVAIEYGTGSMKGFVSKDTVCIMDGMCVEGQEFAEATSEPGDTFV

SEQ ID NO: 123037 - protein, 121 aa, Heterodera glycines
LKVPIDNPNELEEIYDSITYAKSNSIIRMLFNHLGEATFQKAIRDYLKKHQYANAETNDLWKSLSDASGIDVKALMSRRFAHDGGGRETFLRQLRLLLAAFQLRDGMLNNDGATAGHQRTH

SEQ ID NO: 123038 - protein, 147 aa, Heterodera glycines
SDPALDPVLRELDSLPAFQYRHQLTKFYKPEKALRNTLRSLGSSGKVEQIEHVVARLYFAMKSDEVHWALSTLSALYWRVKGDPVNAIKCLRHSLHKSPNIFKDVPLISLANIYHQAGFLHSALIVGRKALEAGVDVVALHFTLANI

SEQ ID NO: 123039 - protein, 74 aa, Heterodera glycines
IHSIPNGDCASRNQPLIGPLVITLAKIWRPARFCCAPCGAFLENRNFFERLRKAYCDSYYNAFFSPRSSNCNGP

SEQ ID NO: 123040 - protein, 216 aa, Heterodera glycines
RRMADAAVASGNYKEAQRVLGESLKILQRPLPSGGSVDEWMSLTFSVIRHFLNGLWIGRWFARRRRPSVTHQSVCRSHAETALVYHQLHQLHLLDVDGIRLSSRGALNLALLATNLAESAGSPAIPHSFRAEIYLCAALRSVLCMPKCLRRVVAAYFFRRAKRHLRKSAALEGCRVPNSVQWVFHPLARHFLSCPVRVGTILSQSGVQKTPNFPFS

SEQ ID NO: 123041 - protein, 72 aa, Heterodera glycines
  unsure (1)..(72): unsure at all Xaa locations
AGIPPGRLTEERIAWRTDHPFGFVARQCKKEDSTLDLNNWICAIPGTXSTIWEGGLVKLRMIFEDDFPSTPP

SEQ ID NO: 123042 - protein, 199 aa, Heterodera glycines
MLRKNQFAELNIRHRGNSERTLATVRRAVRMGYESVAINVDIGKFGKESDIIWSDEEDEVVSKKRKRKKQKKLHDRKSGDGNERTSESEIVPDPFLVDESKLDLSAFAVNGKRFRQFSRLTVSIDADSIHHLQHNKKVKLYDIIAVRVPDEQILMTLQRKGDFVDLVSLDATAMEKGRLSWLFKQKIVQSCIAAGLTFE

SEQ ID NO: 123043 - protein, 192 aa, Heterodera glycines
MSLRFFGFHDSVSEGKFLWEILTQLRGLGVGRCVTKSEWMRRWPDQPSYMRIVKARPTMDRWLQEGSLWADWTFRGKHLGVYEFGTDLNRSDWVLIHKHEEKKFTENRQQMGTLNIPSTFPVPPLQQLLSKKWAEKCGGSEAAVHHKKRAPLDVCLDPNFEMYRKFIKRVEPKKMSVSIYDEIDPGVFLDLY

SEQ ID NO: 123044 - protein, 215 aa, Heterodera glycines
RRHVQDKTRLFCGYGSKVFPGSQPVSLEGPQGNNNIEFLAQEPYMVSWKADGVRYLVLIDGKYQVYAFDRDNNPFLIRSMAFIRRPRQKPLEDDDFVHDTLVDAEMVIDQNEGQQIPRLLIYDLVRFQGEDLRQKPFNVRFEMIENELIRPRTEAFKAGLLKREEEPIGVRRKGFWNIESTRRLLEPGFLSCHEVDGLVFQPVNGGYVSGRCDKL

SEQ ID NO: 123045 - protein, 211 aa, Heterodera glycines
SAEGFALAWSPIRLGTLASGDLHNRIFLWRMSEGGQWLVDQRPLAEHQSSVEDLAWSPTEEALLMSCSADHTLRLWDVRASHKDSCVCTVKEAHNGDVNVISWNSGGEPLIVSGGDDAKLNIWSLKTIQYNQPVAQFQHHQKPISSVEWNPHDGTVFMASGEDDQITLWDLALEDDELHGEVEGGEEKTAPNVPSQLLFIHMGQKEVKEVH

SEQ ID NO: 123046 - protein, 147 aa, Heterodera glycines
PTSKKTRKAVEKAVDAKKKLAKGQHIVRKTNMRTYVHFFRPRTLKLARSPKSPRISLPKQNKLHSFSIIKHSLTTYFFMKKIEDTNSLVFIVDVRANEHQIKSAVNKLYNIEDQKVNTLVTPDHTKQAYVRLAADYDALDVAKHIGI

SEQ ID NO: 123047 - protein, 110 aa, Heterodera glycines
KLNEAEDNMNCQMSDVTVTLRDGRTQTLDNVFIRGSQIRFLVLPDMLKNAPMFKNIGRAQRGAQGMGQGGAPRGRGSAFRGGGRGGGRGRGGFGRGGRGGGGGGGMQFQG

SEQ ID NO: 123048 - protein, 141 aa, Heterodera glycines
MGGQSEQQHFGELEVKTAEKTSRDGEEGKRRTEDRQQKVQREHRENREQREYREHALPFKGMVGNDPSFEQMRQIVCVQKLRPPMETQWNDGANPIMHSLYVLMTECWSEHSLSRHTALKVKKELGALSEQGGDGRGKETN

SEQ ID NO: 123049 - protein, 216 aa, Heterodera glycines
MNEEQISADDAIVSATSDDKLESFSKEMAGLIISPHDGVKIQPKHKYAIVCGKYAYYHYGQQNVDDIGWGCAYRSFQTVCSWLKFQSYIDATKAIPSHQQIQKCLVDIGDKPSNFVGSKKWIGSLELSFCLETMFGINAKILSSKSGADLAEHARALIYHFENGGAPVMIGGGQLAHTILGVDYNVRLGDCQFLVLDPHYTGTENLSEILNGGWCA

SEQ ID NO: 123050 - protein, 203 aa, Heterodera glycines
MSYYYQQQLKRQALAKNDRNPSISPENHQQQQFINGDVSANTPNSYVTMTYKPYLLREDGEQKIPLFLIKLWNIVEDPSHWEVIRWDESGLSFHIMKPYVFCSDILPYYFKHKNMNSLVRQLNMYGFRKNTPIERSGLARAESDQDHLEFFHPFFRRDHPELLANIHRKVPNSARQQGHHPLPTPQQQQQQLQFVANVSDVIG

SEQ ID NO: 123051 - protein, 177 aa, Heterodera glycines
EWLGFVEKYANVPSVCTLNVSSLTDNSYNNWLQRILVSATLSMDVHSLHKWNLRCPILFQAEKEIKVNQQTENSAEPAVLLPNSLTHKLIVCKQNFKPLLLFREIDLNFDKWNRIIVFVNKKQTSRRLSSLMETLSKKKLTVAEFSADLFKSRRKKLLREFQSGAVRVLIACDVLSR

SEQ ID NO: 123052 - protein, 163 aa, Heterodera glycines
  unsure (1)..(163): unsure at all Xaa locations
IRGGQIRFNXWDTPGQEKFGGLRDGYYIQGQCAIVMFDVTARVTYKNVPNWHRDLVRVCENIPIVLVGNKVDVKDRKVKAKSITFHRKKNLQYYDISAKSNYNFEKPFLYLARKLIGDPNLEFVGMPALAPPEVQMDPALAAKYEQEVAEAASAELPDDDEDI

SEQ ID NO: 123053 - protein, 68 aa, Heterodera glycines
RPQASVSATGGGSSTGFCRVVMELFNDFVPKTADIFPAVCPVNLGMDNSGNPFLYEGSNFHHVIPSLL

SEQ ID NO: 123054 - protein, 163 aa, Heterodera glycines
  unsure (1)..(163): unsure at all Xaa locations
ALALRNVWAHILDDEFPPLSDLLNYYPFLVMDTEYPCVILSPAGHFCILEDFTSQRLWLDVDCLNLILDSFTLMNEKGQLPPARDFFHFSLHLNTDPDSFAHYSLELILTAGFDFCMHLXDGFLLEDFGELLTTSGLVVEPRITWVTFHSCFDFGYLIRAIML

SEQ ID NO: 123055 - protein, 206 aa, Heterodera glycines
MVFNRINPIFLAAGTSSAVAFFIGSQCSTKEWLNLVGIKSAHADSSVVVAPPIPSSAAGPKTPYPLRVNEDDALGADVWLKPSRASEIMRFGYPGFDNIRAYEDFVVSYDQRNRTAHWVMEHLSPARMAYNAEVNRGNSIFKEDESIHPYFRSKNEDYKRSGYDRGHLAAAANHRTTQLAMDQTFLLTNMSPQVGKGFNRDKWNDL

SEQ ID NO: 123056 - protein, 193 aa, Heterodera glycines
MNVHEEDIVEISRKLTKMTDGSKSMDDAVELVTALENMRVNIDLLSKTRIGAVLNEFRKKIKDEKLAKRCKALIKRWKSLLDEKLSQRSKSPDDRQRSSQEKSATPPPTANAGTKQSTMNNGQGQQSNRMATTTTAIPSQHHQQTMTMSNNRATAGAGGNDVRGKSVQMLANALTSGGMPQGALDATEVAGRV

SEQ ID NO: 123057 - protein, 203 aa, Heterodera glycines
MLDATDVDSQKLRIIEWQHLDLLKFYPMALATSCAVRGFLYPLNVVKARLQLQKQNNVYSGMRHAFVDIVRNEGMVALFRGFWVTMPQLGVSFIYSTIYEKFRNVLHVNANIQSAPVVSALAGGFSSIFTQIIFVPTDIISQHMMIYNNPAKFLGSAKNVAVLDFLRMDGKSGRLTFGLRIVRAVYHIDGIRGFYRGFFSSQM

SEQ ID NO: 123058 - protein, 75 aa, Heterodera glycines
VHGHHAVYYGPPITYDYPPIPSQPYKRVYKELKYNFIMHLPMSFVFIMFCCYDGYSTDVLGHSAWKLPGSYRNRK

SEQ ID NO: 123059 - protein, 139 aa, Heterodera glycines
FFAVSLPPHPLRIILFELGAFFWLCSLLLSAGVITMYRQHLLLVALFFSILFQKVARALFYLLLYNTHSNLARLMAADTYPTGSVSTMRLLYSARLILAIVGGLGMGTAAALYHLANLLAAYRNNGIVGLPGAVTANRI

SEQ ID NO: 123060 - protein, 123 aa, Heterodera glycines
LERFINDTTPRSVQDLCSEFTKLNAAPRPEPSPEFTRNLECNRYRDVICTEINRVRLHRGRYIHANWITTFDENRFICTQGPLETTCDDFWTMIVQENIEGIVMLCDTIEQNRIKCHQYWPTV

SEQ ID NO: 123061 - protein, 121 aa, Heterodera glycines
RASCPLANSQYATVREENGVCFLFMKVAERSHFPGKLWEKVKLHRNLAKAVEQISTHLLHWSEYVRKKCKARLMRHHQCVNRMRKMELRGRTAKVIPLHRKVEGGERRMEEEAVAAAKLEQ

SEQ ID NO: 123062 - protein, 153 aa, Heterodera glycines
  unsure (1)..(153): unsure at all Xaa locations
HEAKYLEMCPPPMLQTQDECGSTHFSQNYYGXTNFLSRASQLKLQTSMDSLGHXYCISHPYRNDQTCIRGPLAKYSHLDADYQSLPFSDMKGHCGETTCDRDNKSWPHPTNQHLIHEQRFSESQYDVLPPERPSLRMTDAKAIEWLQNNEVIN

SEQ ID NO: 123063 - protein, 126 aa, Heterodera glycines
MMKKTLPINDEMISERIEAERERLQQDKLRKRYAYEAICALTDTVNESELQRHLSVLDPTSWCEVVEERFLGRLCGFPLCAKTITVDFRKKHTIVRRLNESTRKEHKMIVPTESEPVKFCSDRCMG

SEQ ID NO: 123064 - protein, 79 aa, Heterodera glycines
  unsure (1)..(79): unsure at all Xaa locations
LKPNVGINGFGRIGRLALCATIEKDPVPMVDVDYPFFXLDYMEYLINYNSTHGXFYGKISSNAGHLVMEKEGKNALTFY

SEQ ID NO: 123065 - protein, 140 aa, Heterodera glycines
GKPTSVKDVDQHDIVQSVATFLKKSGKIKLPDWVDLVKLGKNIELAPINPDWYYVRVASLARRLDIRSPAGVSSFRNGYGGKSRRGVAPRHFSKASGAAIPNVLQSLEEIRWADKDRSTGGRKLTKQGRKDLDRIASQLR

SEQ ID NO: 123066 - protein, 113 aa, Heterodera glycines
SPDEFVAPVGDVHASVVKCMQKVSTYGEHAAQLPEILLDADIGPHYSHGTNRLCIYIEDVPTGGKGYGEQNAFKKNEATPWVDGCYLLDTDVRNFSTEMAMKSVLRAHNTAGW

SEQ ID NO: 123067 - protein, 210 aa, Heterodera glycines
SCRENLEDWTSESPNKLHFIRQPQKWALFRHPQHFLIADRNRNNEFPPVESIGEWDTEQKQRLLNAFLREDGGTRVPELEGWLMLKADGKKSWRRHFFVLRSSGLYYVPKAGKPRGPARDLNCLMSVFNNQVYMCTDWRKKYKAPTEFGFAIKHPRIQLKTSKYIKYICCDDEFTFRQWLTALRITKNGCPALYKDFRAAQSRERPLVGP

SEQ ID NO: 123068 - protein, 205 aa, Heterodera glycines
IAKKLEANENTNNLNTSTSCPTSPASKLEQQTKKQMMRVKSDNAVNSLADFDQVCAFRKGLAPLAKFGHKQQVNVLFSCVQPTSSCVKRSRRYVAKDPERMLDAPDLLDDFYSNLIDWSKTNCVAVGLGSKIFQWNAGTGAVDEIKDFSETHSHPTLVKWSCEGQYLAVGFNDGQLKLLDSATKKVLRTIHTTANMRLACATWTH

SEQ ID NO: 123069 - protein, 140 aa, Heterodera glycines
GQPFFAGFGNRETDVKSYLAVQIPPERIMIIDPQGSLRRADNKAGGYVSDYPTLAMDSVDYVFPPRVDMDGIDIRTKEDGILSEFVAWRTDAEQFDALVDAELEQYEERSKRAKAIVAGTTDGRGADGKKKMYRNGRRAK

SEQ ID NO: 123070 - protein, 175 aa, Heterodera glycines
MADDVAPPAPSVAVDDFAQRTGQFFDFIRQGNIDRLRALIDSLSVDELNTLLQMRYNEQQFALLVAVMEGHPEIAALLLDKGADVHQTTVGRVNNVTMAVMPLWIAVNMRHLEMCRVLIAHGADVDLGSDSSFTPLLLACAKGSTAIVTLLVESGANVNLGDSEGVTPIMITSRF

SEQ ID NO: 123071 - protein, 213 aa, Heterodera glycines
DEALNLNDLDEKEVLGDDEEDQHQNQHTTKEEVEDLYDEAMAPSGALSEKRESAEVISSLPSSIQHKSSFAMPMMIKSEPGIAGGSQSGKRYCCYIGNMTWWTTDDQLQKLIQTLGVDDMIDVKFYENRNNGQSKGFALAVFASEPSVKAVMEKLPSKKLHEQSLAVLPYTKQSLAKLEEATKRYDQKSQKDDKVVNIGTVRIGTNGAPVPQL

SEQ ID NO: 123072 - protein, 106 aa, Heterodera glycines
  unsure (1)..(106): unsure at all Xaa locations
CDEEVAALLADNGSXMCNAGFPVDDAPRAVFPSIVGRPRHQGVMVRMGHKDSYVGHEAQSNRGILTLNYPIDHCILTHWDDMENIWHHTFYHELRVAPEEQPVLLT

SEQ ID NO: 123073 - protein, 208 aa, Heterodera glycines
RSVIDADERERVVGAVARTFVEMLDLREIQNRPHPYASSLARFNPIRLMNGHLVCSLYLFTKVCYSVNIMLQFALLNAALTSKDHFLFGFQVLSDLYEGKPWTKSGHFPRVTLCDFEVRYLANLNRYTVQCALIINIINEKVFAFFWLWYCLLLCATTCSALFWLSNILLHIARVDYVLKFMQIAEHSEQQRSSGRTPKLSQQKWAMV

SEQ ID NO: 123074 - protein, 217 aa, Heterodera glycines
LPENTHKIVILDEADSMTEGAQQALRRIMEVFSSTTRFAFACNQSDKIIEPLQSRCAFIKYGKLTDQQILERLVCVCKKESVQYNAEGLNAILYTAQGDMRQALNNLQCTAAGYGTITKDYVYRVCDEPHPEKMCNIFDCCINGRTQEAFDLIDELCCLGYSVDDLVGVMFKTAKIADIPEILRLEFITEIGKCHALVVQGVATRLQLAGLLARLSQ

SEQ ID NO: 123075 - protein, 208 aa, Heterodera glycines
LVVTSVAEEGVNIAACNLIIKYNNVGSERQMIQRRGRARQKHSLSILLALDTGIEQQEFSNMRKEAMMMRCIEDMQEQDEQTLRKSIEEKAFELAELRNDEKMKVESKRAQLMGKRFDLKCACGTVICCSDRVRSVMGTLFVCCDPKVWRRSKHTLTRAPTKEKFYTNCARWECANCGEHWGQIVKFSNVFLPEIRVRAFILERVDEQ

SEQ ID NO: 123076 - protein, 210 aa, Heterodera glycines
LVLAGSADFKNELAQSDMFDQRLQAKIIKTVDISYGGENGFNQAIDLAADALADVKFIKEKKLISAFFDEISQDTNKAIYGVKETLTALEMGAIETLICWENLDLIRYAFRTTNGEKVVNLKPDEKDRSNFVDPETGTDYEIESSTPLLEWLANNYKRFGAALEIVTDKSQEGAQFVRGFGGLGGVLRYSVDIPQLDELENGVDEIDLSE

SEQ ID NO: 123077 - protein, 89 aa, Heterodera glycines
  unsure (1)..(89): unsure at all Xaa locations
TNRDDLARADLKASSRTSTLLAGFSMIDLMELRYHESTPQSPLIMLVEVTYLILCVHLLAQMMTTWQLPYIXGEGWTQDSPQLQLPFYI

SEQ ID NO: 123078 - protein, 137 aa, Heterodera glycines
ILQLLYSQSVKFLKKFFFLTGRRGANYISGGNGGMSPFGAQVRDSRDREKKELSDLNDRLANYIEKVRFLEAQNRKLKADLDMPQGRRGKDTITIKTMYESEIQTAKKLIEDTGRSKHELEQDVAKLQRDLDEQRRK

SEQ ID NO: 123079 - protein, 187 aa, Heterodera glycines
  unsure (1)..(187): unsure at all Xaa locations
AKPKVGINSIGRIVRLPLLAAIEKDTVQVVAANDPFIELDYVVYMFNYDSTHGRFXGKISTNTGNLVAEKDGNIAHTIQEPNLXDPGEIRWRESSTEYVIXSTRVFTTIEKASAHLKCRVKKVVISTPSADAPMYVMCLYEDKYDPAHDNVISYASCTTNCLAPLAKVINYELGIIQRLMTTVHGLT

SEQ ID NO: 123080 - protein, 114 aa, Heterodera glycines
MPSPPPLLQLHHHHQHHHHLQHQQHQQEQHQRALSSESALRLGIMPPGNDPSMAMHQPMRPGSEMRAQIEVIPCKVCGDQSFGGHYRVITCQRLKGFFPRSQNAPGELQCPPQK

SEQ ID NO: 123081 - protein, 196 aa, Heterodera glycines
RVISPTQVHIHQNIHILQEIVGISSLSWSQDSRYLAVTSTEQANGVGCFIYFVPRGRLVKEYVHYTGDAFTTVAFFKDGSHKLACAGEKGHFHVYDIHRPEDSAKMFEGFRIRCLYACMDGKTVLAADTHNRIRAYDFETMHEQTLIQEASQIITFCVDRKEKYCLVTTKTEGIRLWDLRTNDLVRSFFGSNTTNL

SEQ ID NO: 123082 - protein, 60 aa, Heterodera glycines
NKMKKLQQNAEHAPTGGNGTARRNNKVMHITTAMDDEQLLTNLTKLSQTNIPGIDDVDMI

SEQ ID NO: 123083 - protein, 205 aa, Heterodera glycines
KVVELLADALLNQNFDASKIEEQRAEALDRLHKAEKGDIRGSVLDNLHATAFQGTPLRLSPLGTTKALNSLTKESVSEFADDILKASGMVLTAVGGVDHEKMSDLAEKHFGHLGNSYNREVPPHVASVNNIGHEQIRPKGYRFTAGEFLYRDDHYPLMHGAIAEEGIGRNHLDYIAMLVGNAYVGTWDRSFAASLNAPKSTVQKM

SEQ ID NO: 123084 - protein, 52 aa, Heterodera glycines
  unsure (1)..(52): unsure at all Xaa locations
AHDKSRNQAXTDPAQRERGKERSNKSAPNKADKTLTNNDTGTGKTKADPANN

SEQ ID NO: 123085 - protein, 195 aa, Heterodera glycines
QKATSAGDTVENHVIPTPQVSTISDDDYNGIYQDRQLPKGKRLITFDDHVSFFLLQGSYNADSEDEEWMSINRNVNIDDFEHIIERLENASRTDIIHLRNARALLQRFDPGLVDDVYDYWLQKRKLAASRKSKCTALIPILCTEQRRDEKTLVNPYIAFRRRLDKVQTRKKLKTDVLTYEKMLQLNLALKRSIVL

SEQ ID NO: 123086 - protein, 162 aa, Heterodera glycines
GNFYESLINSGLLDNFLSEGKKHVFLSNIDNLGATVDPNILNYMVARKAEFIMEVTDKTRADVKGGTLIEYEGKLMLLEIAQVPPDYVDEFKSISKFRIFNTNNLWAELEAIKRVVLNKELNMEVIVNPKHLDRGANVIQLETAAGAACKCFRGACGKIHSY

SEQ ID NO: 123087 - protein, 202 aa, Heterodera glycines
  unsure (1)..(202): unsure at all Xaa locations
FFGVCLSTVATVIAVLSVPFAYQHFQQIGAQMQNEVDFCKMRSGNMWREVTRTQAYSKVSHDSRHKRQAGGCCGCGVSPPGPPGPPGPSGQPGQPGQSAPPASPGRPGPQGPPGPDGQPGNPGXSGQPGPARETHPGTAPSVDQRGPIENPWGSLGRTWEKGHIPARSGEKPRAAREYSERNDREDPQHKEQVDFEQETIVK

SEQ ID NO: 123088 - protein, 175 aa, Heterodera glycines
ANLILAKVSILRIKFIGTFHHMTDDLNVNNSVAIRNTHLMWYYSSFDWRVRPLVMEVKERAKRHGINDSGCSSFTSHSLELMGIHYLQCGAQAPVLPNLQEMYPKRFNVRADVRTLNESLPLKPIPSEMGWDVKDDATLNELLLGFLRYYAFQFDFDADAISIPMGKKGNRAHVA

SEQ ID NO: 123089 - protein, 180 aa, Heterodera glycines
MGMTPVGSEGTNPTGNNGTQPFRFHRRDLRVFRIERLFCSPNGHRFIFGYYYARPHETFCDSSRTFYRNELFWTPLFDTLPLDSVDERCLVLEPQIWAMGRPKSPRYLEDDVFVCEYQIDRNQRSFEKIPPKNRYYINTEPFVFNFFEKKLTMKRDFTPFKITASSTRKQTSSSSTASRD

SEQ ID NO: 123090 - protein, 206 aa, Heterodera glycines
PRAEFGTRDIFTMGMTRPMLVSAAMDATIRIWDVASQKQLEALPYKESQVNNICITPDGAQLLVGAWQNIRFYDLQCPTAQGLHTFSVHEKNVTSVGFQVDGAWMYTGGEDCMAKIWDMRNNQLNCQRIFQVNTPVHSVVLHPNQVELIVADSTGAIYLWDLRSDRDDSLITEVDMSEFVVHVDIDQVGRQCAAVTNRGNLFLWDV

SEQ ID NO: 123091 - protein, 127 aa, Heterodera glycines
MPNFDMKPNCASPQTTQQNEEDDWEAMMEISNTDEQEKIRELAGENALPTTDPNQCIICRRVLSCKSALQMHYRTHTGERPFKCRICQRAFTTKGNLKTHMGVHRSKAPLRHQMHHLLNNGMPKAEN

SEQ ID NO: 123092 - protein, 166 aa, Heterodera glycines
  unsure (1)..(166): unsure at all Xaa locations
CREEEIAALVVDDGFGMCNAGLAGDDAPRAGLPPIVGRPRLQGDVSGMGHKDSYVGDNAQPKRAIVTLNYPIGHGIDTIWDHMXNIWHHAFYNELPVVPEEDPVLLTDAPLNTTANIEETTQIMVKTVNTPAMXWLNHAGLSLGVPGHTDGRVVDSGDGVNDTVLI

SEQ ID NO: 123093 - protein, 204 aa, Heterodera glycines
VSLMDGLALDIARKLEVKPVRYAVRKTMMKSMFISQGRYEFTANMFMDQIPRRVTMGLVANTDYVGTILRSPFNFQPFNVREISILANGRSYPQAPYDLDYRNGKYVRPFNDMNEAVGFANSSESNGITFAQYGKTHCIYVFNLTNSGDDQAALFDLIKNGTTAVSIKFNQPVPVGGIMLVVMGECDSLVMLDKNRSISSDTTI

SEQ ID NO: 123094 - protein, 218 aa, Heterodera glycines
FNIPIISSDRLPKLRNVLAGVFSIQNTYKYNDNYPLDGEGNTKGFCFLEYQTKEAANAVLAICDGHRLDKNHTFSAYPFTAIRSMKEPEKDWKKPERQPYVDLGDPWSWLQNPKCLDQFGLLYESGQGGTLRLDVFWNVRNGEPTPVDNASRENWSNDLFKWSPHGTYLATMNNDKRNQRLGAVIWGGEKFDRFQRFSHEGVNYLDFSPNEKFLVTYA

SEQ ID NO: 123095 - protein, 162 aa, Heterodera glycines
  unsure (1)..(162): unsure at all Xaa locations
IGLVSNQNYIGHNQKNPFYFNHHNVSGKWQLLVNQIIQVRDIELTASGRTYPQYPYNLDYKNNRYARAYHDAQEHLXHGVQTESNGISYSMFKTAYCLYVFQMTNAQEDSPGFELIKEGCTAVNIRFTEAVPNEGVTLIAYGEADGLILIDRNRSITSDLTV

SEQ ID NO: 123096 - protein, 153 aa, Heterodera glycines
ISCSTICAFAPESRRAHQMLLCMQSMLPHLVRHMEEETNQRQQQAANALAALKLELSAYATLSVELRALVNSCDVLARGPTRSFDLAASGGGGGTAGGASLAPSSANRPHATDPRRGRSLGGGGADSPQFFDPPTIVEDEMSRQQQSTASAKT

SEQ ID NO: 123097 - protein, 192 aa, Heterodera glycines
  unsure (1)..(192): unsure at all Xaa locations
SNLAARYCGTVAPNVQISLHNLMVLVFHSRVGRSTDRDFRSRRXFEFISEAPFLPGSPLPGGPKGCAFLIEPNGANDGTGVILSPTYPGVYPINLQCLFLLRGLDHQRIRLFFRNFDVYFGGKHCPYDSXTIYDGASTSDPIIRKLCGLQQRLELFSFGHELLLEFNTTEVEGKVGDRGFHIEYQFSDKFVD

SEQ ID NO: 123098 - protein, 147 aa, Heterodera glycines
  unsure (1)..(147): unsure at all Xaa locations
MPSTLHVQRSLPERDCRVNFLEQHFCKQIASIAATSDSDRDGIHRAKSVPFVPYAYQTRMPRSMVRRHPILDEYHELLVNDTELENLTIHDTSILDAPLLXDDRPHRQVLDACAVPGGKTMQIIELMHEHCRYPKCLALGNDSHYKQ

SEQ ID NO: 123099 - protein, 84 aa, Heterodera glycines
  unsure (1)..(84): unsure at all Xaa locations
IXPGKRRTXEXEASDTXEKAKAKREDKEGRQPEQKXRXGAGKEREEGRNXADNNRQKEXXKQPGQGKGGFLKIFERTLSGKMIT

SEQ ID NO: 123100 - protein, 128 aa, Heterodera glycines
MDLDEHSEIRNQDLKGLNATLANVAMDSPVDNLLEEDPGTLDDADFHTLLAQQLCGPDPDATYIEAYTVPDKSDCERIAEKMFEVVLHTRRRDPLTVDELKRMFKRDPLINAGNADYDGFARFISTGA

SEQ ID NO: 123101 - protein, 166 aa, Heterodera glycines
MNTTSSIPMGPVLPCIGQNNKKYEVMKKKKEKNDEKMTLETNKMAGEKRKRPPSLSEKSFPYNAGLERNKLFVKKLDWSCTGEELKKFFEKFGTVVDARIVTKWDGRSKGCAYVDFADEQSASAALMGADGTEIRGRKISIFLSNPPTKRMKKNSDESDKLKLGAQ

SEQ ID NO: 123102 - protein, 122 aa, Heterodera glycines
  unsure (1)..(122): unsure at all Xaa locations
CAQEDAALWVDNGAGMXIDLFSCDEAPHSALPTNAGRPLYQGLMGGMGQKDSGMRDKAHPKHGILTLNHPIEDGLVTTCHYLENIWYPTVYDQLRVTLEEHRLLFANVPLIPNAHRDKRMRI

SEQ ID NO: 123103 - protein, 45 aa, Heterodera glycines
GKKRGEMEKIWHGTMYNELRGTPEKNPVVITQVPLNPKANIEKMT

SEQ ID NO: 123104 - protein, 122 aa, Heterodera glycines
SDATKKAEKISFGNLNDSDRIFTNLYGRYDYRLKGALARGDWFKTKEIILIFFKWILGEISTSGLRGRGGAGFPSGKKWGFMGKPFDGRPKYLGVNGNEGESGTCKDREMMRREPHKMIEGC

SEQ ID NO: 123105 - protein, 159 aa, Heterodera glycines
  unsure (1)..(159): unsure at all Xaa locations
GHIGRDCPNSGGGGRGGGGDSVCYNCNEPGHFSRECPQGRGGGGGGSRGGGGDIVCYNCXESGHFSRDCTQPRGGGGGGSRGGGGDSVCFNCNKPGHFSRECPNGRSGGGGGRGSRGGGGGSVCYNCNKPGHFSRECPEELVSGEGEEEKAMALVELFC

SEQ ID NO: 123106 - protein, 178 aa, Heterodera glycines
MTCGLAVKRPLDLGQDGSLVDVKRPRHGGASPQCSPFRPQLGILATSLMQSVPPKVPSPPAFTGTASAGVGPIGNPSSPFADVSGRCRLSSTQLDSYLRAEIQALKRRRLIPRRQGNFPEEGFPLSTTNVVVNANKGTATAVAAPTGGIVGTPVSSTSGNAFRKATSPSSSNSSDSEG

SEQ ID NO: 123107 - protein, 208 aa, Heterodera glycines
MMNGDFLGKNFALAYPEERECCLDSNGAAATCCKFNRFGTLIAVGSTDGRLFIYDFITKSAVKTWNAHVKPVVSLCWSRNGKRLLSSGVDGSVKVWTVLDTAQPVHHFQFGIGCTAQQALFNPRNDNQLLVYLVLVSANSCSSPIVKSLEDGTEARLQLNHGNIPEESVSAAAYDRRGEYIITGSNRGLIVVYCARTLKPVSYCRQNT

SEQ ID NO: 123108 - protein, 59 aa, Heterodera glycines
SNGYRPGTRYMFLRPFGKDRVYPLSTFYRVNNRCDIVTMDGNGTFTIGMPFKVYHGKTG

SEQ ID NO: 123109 - protein, 99 aa, Heterodera glycines
  unsure (1)..(99): unsure at all Xaa locations
GANKDSSIDSASELLGLMHITSTAAYGILARSSLDQQSNTDPLDDSKAPMLSRVGELREHYCTWIHQHYYXLLPLFQTHLLEQMTPTEWRLIPLICLPI

SEQ ID NO: 123110 - protein, 172 aa, Heterodera glycines
SALVIHSRTHTGDRPFKCEECGRAFTTRGNLKVHMGTHSAPQNPSRRGRRIFDMEEVLLPAFRSISSSAHHLRDSPSDPSPHLSPESPDASCAPAFLATDPSALAAQIAMFGPQLFLQQLLLQWGAQLAPGASTAEEAAQFSAENAGGVTEDAAESPAEDARETVARMTTAA

SEQ ID NO: 123111 - protein, 86 aa, Heterodera glycines
  unsure (1)..(86): unsure at all Xaa locations
MPERLTYXRPLCYNTKSNKTKVVKTPGGRNVFHYRNKLGSIPKCGDTGVPLKGIKAVRSRQLAKMTXRKKTVSCAYGGCLSGARCP

SEQ ID NO: 123112 - protein, 180 aa, Heterodera glycines
QFSLKSRAQCIVDGRNVDTFDGFAFTAPLSSNCFSVLAKHCSSPMEEQHQQQPQFVVMLKKVPGKQNANKSAQKADKVLKVITAEQQIECQPKTAQGKKGQMICKVNGQPISGDEQCQDELQHQQCVQFNDPRQTDVTIRTGPIAVRFNGRKAWLKVSQAYKNAQCGLCGHYDDADEQEQ

SEQ ID NO: 123113 - protein, 136 aa, Heterodera glycines
  unsure (1)..(136): unsure at all Xaa locations
NGANPSAEELVDGTEQAVEPAIDFVLNPLLHEMNCFQNLPTFLGYLQDFCDNIIAHVDKEXHQLTNVLPSLIRSPGWRCLIXLSTHRFLNLAFFIGDNLADVEGERHACIVEXRPVNGEERTTMMLMEDELFVDKC

SEQ ID NO: 123114 - protein, 135 aa, Heterodera glycines
SGKTLRKHLDVGRKLPTDNDPNPTLHEKMICASNHLDAKARFWYFTTVLHPVKKTHGEIISCQEAFHKKPGSVKNFGIWLHYNARTGHHNMYRQYRDDCEAGADTQCYHDMGARHRALADRIPIVIVQTIDAADC

SEQ ID NO: 123115 - protein, 108 aa, Heterodera glycines
RIRDHPFHVTFVLQMLSCAGADRLQTGMRGAFGKPQGLVARVGIGDMLMSVRVRDQHQAHALEAFRQAKFKFPGRQYIVISRKWGFTPFDREVYEKHRKEGRVIPDGV

SEQ ID NO: 123116 - protein, 191 aa, Heterodera glycines
  unsure (1)..(191): unsure at all Xaa locations
KCPXGKNDAPEKGSGKPDKSKNIMRIVRIRKLCLNICVGESGDRLTRAAKVLEQLTGQPPVFSKARYTVRSFGIRRNEKIAVHCTVRGPKAEEILERGLKVREYELRKDNFSDTGNFGFGIQEHIDLGIKYDPSIGIYGLDFFTVLGRPGFNVSQRKRKKAKVGAPHRLTKEDAMKWFQQKYDGIILPSKK

SEQ ID NO: 123117 - protein, 51 aa, Heterodera glycines
NCGMWLRYDSRTGHHDMYREYHDVCEAGAVTQRYRDMGAHHRAQADRILIV

SEQ ID NO: 123118 - protein, 181 aa, Heterodera glycines
KNRPPIRPDGREVAIEYGTGSMKGFVSKDTVCIMDGMCVEGQEFAEATSEPGDTFVNTKADGILGMAYPGISVQKLSTVFNNLVEQKEVEEPVFAFWLNRDPSYEFGGQMTVGGMDKRRFVEPINYVPVTRQTYWQFKMDSVTGGQNGKSKIACRNGCQAIADTGTSLITGPQKDVEAIHK

SEQ ID NO: 123119 - protein, 166 aa, Heterodera glycines
MSVDIHESDCLDDIKEVVDFYDTKGDGRIRVDQLGTCLRCLDLCPTEAQIVQLSQQWTDPSNRLTVENIAPIVKDLRKEGVRDRSEAELCGFLENFDWDNSGFVSTADLRHLLTRCGEPLSGEQYEQLIREERAEEGRVNIAELVRTICGKAEERAHKEQRREGGE

SEQ ID NO: 123120 - protein, 170 aa, Heterodera glycines
ARQHIPEPAIFTYASKDAILYALGIGANTAEDLHYVYEGHPDFQVFPTFAVVPGMVAVSLSDWPGIQFDLSRVLHGEQYIELYAPFPADGARLRSEIRVADLLDKGANAVIISEVTTFDDQSGEKLCIQQFAIFQGGAGGFGGIRTSPSERKVPPVPQGREPDAVLEQRT

SEQ ID NO: 123121 - protein, 62 aa, Heterodera glycines
MFREAGAGTQCYLDLGARHRAQTDLILIILVQTISVADCKPAGVKQFQNSKIKFPLPQRVNS

SEQ ID NO: 123122 - protein, 204 aa, Heterodera glycines
MLPFEVQHFSTGTADTAPSFHADTIHHVEFDFYGQRVATVSSDKTVCIWDKDTQNGAWRKSASWKKHGGAVWKVRFAHPEYGQVLATCSFDNTIQIFDKDAADLSEIRPITGADSSNGWACRTVLRQSNASASITDIQFAPHYLGLQLAACTSSGRLIIYEAEDIMALDNWNVLHDYEVTKNRLSSLSWSTNRFDPPHIVVASD

SEQ ID NO: 123123 - protein, 188 aa, Heterodera glycines
QNTNGQKFKLERFMPSQGAFCATLFAPVTYPPTNVTVFLAHNSQPAELVAYGILLNVNPDRIVLKRTVLSGHPYKVNKRTAVVRYMFYNREDIEWFKPVELYTHEGRRGRIKQPLGTHGLVKCVFDQPLSVQDSVLMNLYKRVFPKWDYDDRLEGTNATNSDGRNSNFEEEEEKGGKRGGKTVTFLEK

SEQ ID NO: 123124 - protein, 83 aa, Heterodera glycines
  unsure (1)..(83): unsure at all Xaa locations
RELQNNMIGCPVIFIAXRRILPNPRLGKNRKPLGQKRPRSRALTAVHDSLLADVVFPAEVVGKRTRVKLDGKQIIKVHLDKAQ

SEQ ID NO: 123125 - protein, 198 aa, Heterodera glycines
MIGEELTDVDKARIASDILLQSPPGEFNEVFNDVRTLLQNDALLEKGVCLEAVRRYNKAQFVPVNPEPGAEHPTLITEHNELPDGRFVDPKTGRVFKYDHLRKEAADAQPSGPKEIDEKLEPWRKALQKELDEYIYEHFHLTGVATVFTPLQHQKEPKLILCIESHQFQPKNYWNGRWRSEWHFPNFDGSSKTAGTLQ

SEQ ID NO: 123126 - protein, 76 aa, Heterodera glycines
SITCSTPKADLDPYASALEIILGRAKRLSDVINTQLRPIGTLKMLGSCSGYLDLTDDGHALLPEMKIQRPTASLIP

SEQ ID NO: 123127 - protein, 91 aa, Heterodera glycines
VLVVSAQLYAQSCMLYFAAHISATPIWGRFTPGSLTYQILKNFLEPHLLMIANPQLDHTGVRQASYMNTPVIAVANSDSPTKIVDLAIPVN

SEQ ID NO: 123128 - protein, 152 aa, Heterodera glycines
  unsure (1)..(152): unsure at all Xaa locations
MPSKANAIGIYLGSTYSCVVFFHHSKVYIITNHQGQXTTPSYVPFTXTQRLIGDATNNQXAMNPSNTVFDAKRLIGRKFNNPAVQSDMKHWPFKVVQGEGARPKVMVEVKGEDKAFFPEEVSSMVLIKMKETAEAFLGQTVTDAVVTVPAYF

SEQ ID NO: 123129 - protein, 164 aa, Heterodera glycines
MASLFRPFALAQRLAVLGRRSLHISASFNALDEAARARISECVNSAPVVVFMKGSQLEPKCGFSRNVKLVLDLHHVPFRDFDVLEDEALRHDVKEFSDWPTIPQVYVNGKFVGGSDIVVQMHKDGEIDKFFDEEGISSRFSQKFKQQTEGGEEGGGGQPEKSNK

SEQ ID NO: 123130 - protein, 114 aa, Heterodera glycines
TAQTNGTGDGTTTTVQLIGELLTQAENYDSEGDHPHLVTEGIQLAHDHWPQRWAASKKTVPIDRPLLIEVGRTTWRTKWNQKWADHGTECRGDAVMGIPRGENDAEADLHMREN

SEQ ID NO: 123131 - protein, 95 aa, Heterodera glycines
DGRTADEAIVATVSKVGENIQLARASVISSSPATKLLGQTHPKEEFNGVQLRRFISLVSLGHKSDDSVSDFTTAQLGQVTCHHIIGMAPERLGEP

SEQ ID NO: 123132 - protein, 124 aa, Heterodera glycines
  unsure (1)..(124): unsure at all Xaa locations
NLFVGFFLKKEMPFLLVGVDPDAHTTVVHKVKTVXTVTTMATIGIEMDTDVQXKHVQRRVCYLCGQDKIXRYTTPRSINTLGLIVVVHSNVRYPAHYARDEMMQMFVENHLRNSVLLGFAYTPR

SEQ ID NO: 123133 - protein, 80 aa, Heterodera glycines
RTQVDEVAGVMNANVGKLIDRDQKLSQKEDPADALKQRAFFFKKTTTTIKRKCWGKNITMITVMRAKSIPVMRSRAMRAG

SEQ ID NO: 123134 - protein, 161 aa, Heterodera glycines
AQLIRHFYALGWMRDNGAGMAARFRCPKTGESLIYNSSNSLAKEIFAENEHFVMKASGTVVKRPSDPDRTPTAPFYLLRDNPDLVCIIHTHTKWANLITQLISGDEFMISGQEMIQGCENRQTKRRMENIDTVVVPIIETEISEFVLCPQLMKVLQKYPES

SEQ ID NO: 123135 - protein, 104 aa, Heterodera glycines
  unsure (1)..(104): unsure at all Xaa locations
KISPKVVSAKKKSGGFNTKKXMLDLASGGTAAAVSKTAVAPIERVKLLLQVQDASIHITADKRYKGIIDVLVRXXFFFGFLSLWRGNLINFIRSFPTQALNFPX

SEQ ID NO: 123136 - protein, 63 aa, Heterodera glycines
ADDDAETIDLRRVRNTVLQMWPNRGCLDTRDEGDQTLDRFKDQFGHRPGKRWPGMGELTFLVG

SEQ ID NO: 123137 - protein, 74 aa, Heterodera glycines
MQMCHDRRHLVTQDHLDRWLAQLKGQFRYRRSGQRPFRCELSILARLNDYPTDQMLLCLPDEPKRCCKTIKQMC

SEQ ID NO: 123138 - protein, 77 aa, Heterodera glycines
MSQAPCYWARADNNYGDTKLLDSIQRDGISTAMLGQPMGVCAEKTGAEFGFTREQQDAYALASYARATRAWAGGAFG

SEQ ID NO: 123139 - protein, 94 aa, Heterodera glycines
ETSTDGGNFDDGGPCVSKEMRRKINYEIRKNKGIRKDKGRRKAKQRHSRVMKRTQYEKALIKRKSQVPNMRREMERYDGEKRGIRISTIRSTKF

SEQ ID NO: 123140 - protein, 114 aa, Heterodera glycines
  unsure (1)..(114): unsure at all Xaa locations
ITRRXKAVQDGIFKAELNNFLMKELAEDGYSGVEVRRAPSRTEVIIMATRTQSVLVFFFXRIRELTALVQKSVSCSAGQIELYAEKVSCRGLGAVGQCECFEFYFGRWGALVRR

SEQ ID NO: 123141 - protein, 210 aa, Heterodera glycines
MSNKKIETVDFDQAFDLLEDARDQQQSVEEEPFPSTSTDPSTIDLTIQKHVHSIVEEQSEQIYLSKTNFETDKMVSAYESEEIEVKRRKIVVEEDESEESIPTLPPKLDEESELSRLKLQLLLSNFSQEQLDRYEAMRRASLPKSIIRRLIHQFTGVTVNQNVVIAIAGMAKVFTGELIEEALDIQKAEREANTDKNNGSRERQNGAAED

SEQ ID NO: 123142 - protein, 174 aa, Heterodera glycines
MSSLADFVNEQRSKANSSSGRQAYFNVATLGSKVSNSFTDFFKPRNSNGIDDVQRLTEDADAAQNGQLPSNKNRKYSWMSFSSVSASVSPDSNPCGLTRFQRIAAFFLCIFAAGFCFTTAMMLIPVLVLQTRKFAALNTLGSVFFIVSFGFLWGPLAYCQFLFSEPRRVVTAVY

SEQ ID NO: 123143 - protein, 188 aa, Heterodera glycines
SPIYYLNPCGSFHVGGPKSDAGLTGRKIIVDTYGGWGAHGGGAFSGKDPTKVDRSGAYGARWVAKSLVKAGVCRRCLVQVSYAIAISKPLSITVISYGTSPLTEQELLQIVNDNFDLRPGVIIEELGLKRAIYSRTAANGHFGHADFPWEKAKPLEIRPELMEKLIAYRKSEHIPNGCFKGTHIHAHH

SEQ ID NO: 123144 - protein, 53 aa, Heterodera glycines
  unsure (1)..(53): unsure at all Xaa locations
KVFEHQPAVALGPQVQEGXNVFGVAHIFSSFNDTLLHVTDLSGRETIIKIRGG

SEQ ID NO: 123145 - protein, 202 aa, Heterodera glycines
IHGGAYEIGSSARYTKYEVIGQRFVTDANSRGIVFVSIQYRLGVMGFATTGDEELPGNLGIWDQISALQFVKDNIAEFGGDPSRVTVFGYSAGSGSTALLSISPKSRDLFQQAIRMSGTPFSVSGSGTFVAEETKKLAKAMGCAANRTKQCLSEKSVEQIFDGIDKIGPAPLSVYIAKFSPHRLDRELFPQDYPEMIATAPP

SEQ ID NO: 123146 - protein, 196 aa, Heterodera glycines
QVAAFAVDSTRVLFYNAVPVCGFILCCFTMDSSVQLTYAKIASVIYAFIMLAVLIATTNQIVLETVFSPTSMFVLGMVLIFFFASCIHPKEFTSIIYGSIFFLMIPSTYVFLSLYSLINLNVINWGTREAVSKATGQATFRENIANRVLRRVANLNDDDSFLTRFLTRVRSGEEPSEEIRTLERKFERTERLLMSM

SEQ ID NO: 123147 - protein, 80 aa, Heterodera glycines
WGKDGYSRDILRRAPSLTEVIVMRTRTHSVLGELFVHSRKLIALRQNYFGYSAGQIGHNADKESNRGLCAMAHCEYKRIK

SEQ ID NO: 123148 - protein, 64 aa, Heterodera glycines
  unsure (1)..(64): unsure at all Xaa locations
AGLLFDIGKYEAASAELEELRVLSPDEAHVFFLLGRVNRKLGNMHMALLNFSWAAXIDPRGEQN

SEQ ID NO: 123149 - protein, 157 aa, Heterodera glycines
MSEKFRQDMPPQGGYPSFHVHRTLPKSFLSPGRIMLFGVVLPTFYGYFKNFYHDQAAIGNDAFEEQDLINALEPFLMAERDRSVLRIMKRNRELENEVMKDVPGWKTGTWYGEPVYFTLGDKWIEPNAMEVSPHLSFRDSAFNHYYRLNTLRPQRKC

SEQ ID NO: 123150 - protein, 115 aa, Heterodera glycines
TLLLNYDTEDGLMEFRQYSIKSVPAGVSRSAKKLMQSKVPYLSKYKDISDFMLKPEQLSDSEFEGEQTELELTHDFGGRGKKRGQQTKLRLMEIGPRMTLRLMKIEEGVDAGTAL

SEQ ID NO: 123151 - protein, 207 aa, Heterodera glycines
MQNYLHKMFYAITHQQVSSDNNCPTKLLNNNSRTTAISPGTASAMVATERGNAATSSSLLPPPSAIFAPPNSANNGHLPPLPANGLFPGGIPFPVFGINIDQILKTCEQLEDSKNYDQLAHFLNKMPLAVQMNVAMHETVLRARALISFHTGNFKEMYAILESHKFSQDSHSMLQKIWWDAHYQEAERMRGRTLGPVDKYRVRKKYP

SEQ ID NO: 123152 - protein, 212 aa, Heterodera glycines
YDLSSLKLIMTGAAPVGTDLLDKVRRRIPSLKQICQGYGMTEQSMCSHLSVFGSDDSKTVGRLISNFEMKVVDIESRKPLGVLQKGEICTRSPTTMLGYLNRAEATAETIDEDGWLRTGDIGFFDENGRTFVVDRLKELIKVKGFQVAPAELEDLLLSHAGIKDCAVVGVADKLAGEVPKAFVVRADQTLTESELKRFVREKVASYKQLGSV

SEQ ID NO: 123153 - protein, 138 aa, Heterodera glycines
LLPHLLLYFCWFFWDFATPSRGCHFWPFFYKSPVWRHLASYFPISVIQTADLSADRNYLFSAHPHGIVGSSSFIFFATNGANFASLFPGLRMHSVTLDLNFWFPLRTEMIMASGMIPSDSKSIEWVLSRPGGGFAVGI

SEQ ID NO: 123154 - protein, 155 aa, Heterodera glycines
EDLAWLQLANERRQKIGVPPIDDDTLEKAIDMLEKESHFQFTQDEHGTGLAYLTMIDNDAPCCICNDGEDSNANQIIFCDICNIAVHQECYGVPYIPEGQWLCRKCQMSPSIPVNCALCPCSSGAFKQTSDGRWAHVLCAIWLNEVFFCAIFSFP

SEQ ID NO: 123155 - protein, 110 aa, Heterodera glycines
MIETLETSEVLKRVLKSALIVDGVARGLNEAAQTLDKREAHFCVLAKSCDEASFEKLDKAELGQMVGQCKYDKDGKARKIVGCSVAVVKDYGRDEEAKNDLQEVLKKISD

SEQ ID NO: 123156 - protein, 193 aa, Heterodera glycines
MKLNVAFPATGAQKLFEVVDEHKLRIFYEKRMGAEVEADLLGDEWKGYVVRITGGNDKQGFPMKQGILSNVRVRLLLSKGHSCYRPRRDGERKRKSVRGCIVDSNLSVLSLVVVRKGEQEIPGLTDKSIPRRLGPKRASKIRKLFNLTKLDDVRQYVIKRPLPQKEGKKQRFKAPKIQRLITPLALQRKRHML

SEQ ID NO: 123157 - protein, 210 aa, Heterodera glycines
FNGFVTEKAIMANPFDDDSDEFIRKIRAGRGIEPTKSFTTPAASQNIEDQIAADEKAIERYLQASLDSTQRSRQQLSSSEGLAESTARELLEQREKLERAEQNLDTIHHTTQHTQRSLNSLKSWFGGLVRNKLSRAPKGLGTANVNANNQQQQQEQTVQQQHQQRPLHAHLVQSSADEFAGAIGGGGGGVQPPQQHSLNSSSRAYIQGTR

SEQ ID NO: 123158 - protein, 174 aa, Heterodera glycines
MLHNSERNPLYKYSYQIPGQERSYTYSVPAEEFQQKEHDKVTNGYFPTNGSAEAVLPHHFEHSVKLDDLICVRCNEGFTLNEQIVNSGGQVWHAECFVCVQCFQPFSDGIYFEFEGRKYCEHDFHVLYAPCCNKCNEFIIGRVIKAMNANWHPECFTCELCNKQLADIGFLRNA

SEQ ID NO: 123159 - protein, 88 aa, Heterodera glycines
SRPSINRLHVTLVHVDEICCIVIVSGEMVSDLDHELSPFDDLADAHLDSSSQFKKSAFTLTTQCCWNNFTIVVFLCAIVILLILSLSL

SEQ ID NO: 123160 - protein, 203 aa, Heterodera glycines
  unsure (1)..(203): unsure at all Xaa locations
MRDKQKAKAAVITEQHRIPTKVTATEEETENGSDNDETTALIKEPQTSKKTERIPLLGNSVNAHSDRESSTSARVTTDCQPSDEEMHRIFNEQYGSTSGEDFAACLVEAIRAINRGINPERIPQGSSGSYFVKNLQGEVIGVFKPKNEEPYGSLNPKWVKWAHKLLCPCCFGRSCLVPNQGYLSEAGASLVDQKLGLDIVXRT

SEQ ID NO: 123161 - protein, 131 aa, Heterodera glycines
VNQLDGFDSRGAIKVLMATNRPDTLDPALVRPGRIDRRIEFSLPDVKARKNILQIHTKRMSIERNIRYELIARLCPNTTGADLRSVCTEAGMFALRARRKVITEQDFLKAVQKVVKGYAKFSSTPSYLTHN

SEQ ID NO: 123162 - protein, 94 aa, Heterodera glycines
  unsure (1)..(94): unsure at all Xaa locations
VSLDPPVRQGEDGFGAPHMYLHSFNDTFDSGDPCGRHCKPLSESPRGMLVLVHRYDASPYSAMLAAHDVAERCXHVGINARLVKLRATRGTNSK

SEQ ID NO: 123163 - protein, 209 aa, Heterodera glycines
QKFFLCKENKKDVATIFLELLKSITDNEMAPFYEYAAPQLGVPIDKAKLQTLKALNEQKLDEFDRKIKDAEENLGESEVRQSHLAKAEYLCKIGDKERALAAFQLTFDKTVGIGYRIDLVFNVIRLGFFFMDHQIITENIEKAKSLMEKGGDWDRKNRLRSYEALYKMAIREMRGAALLFLEAVPTFDAYELMSYEDLTFYTVICCVYA

SEQ ID NO: 123164 - protein, 175 aa, Heterodera glycines
  unsure (1)..(175): unsure at all Xaa locations
YCKRPDNSSKSCKTRGSDLRVHFKNTHETARAIKHMPLNRAIRFLENVRENKEIVPFRHFNCGVGRKVQAQAWGTTHGRWPKKSAEFLLQLLKNADSNAEVKGLDVHHLVIDHILVQAPAEMRRRTYRAHGRINPHMSSPCHIQVSLTQKKDLIAKPAGXIPXVKKESNKKLRRQ

SEQ ID NO: 123165 - protein, 76 aa, Heterodera glycines
  unsure (1)..(76): unsure at all Xaa locations
ELFIHAGPVTNLDLPNDHITDAPGASALWSFLTEEDADYALTILNLIKLVIKPISLNIASANEKNMDVXPDLFVGN

SEQ ID NO: 123166 - protein, 209 aa, Heterodera glycines
LDYPNLPLIAMNSRFANEKRVNYYPIEVLDIIDNQRVTTQQQTPTMIQQSIKKCAIPPLVFKRQVHNTAKSIHLWDSEYLDEAGIKLTTEPIALRAHQLNHPEVKAGDGNMQRPMVEGSAAWRINSVLVPQSVFADGTYSWMLACFVQLGGRGLSEPDLHKFIQLLEDQAKRRSLKLPALPRDHLRLVNFRSKEDISALFQEASQSGIA

SEQ ID NO: 123167 - protein, 202 aa, Heterodera glycines
CCSLRCEHIKLHDDMDDLKYVVEFDFLGKDSIRYYNRVPVEKQVFKNLKLFMEEKDPGDDLFDRLDTSSLNQYLKELMDGLTAKVFRTYNASITLQEQLDKLTNPSDSVHEKMLSYNRANRQVAILCNHQRAVPKTHEKSMENLENKIKEKKQEYKELKDQLKKSKSVDEKMAKKYERLKEQIAKLNTQRTDKDENKQIALG

SEQ ID NO: 123168 - protein, 169 aa, Heterodera glycines
  unsure (1)..(169): unsure at all Xaa locations
MLFRSLPFGRSFPPCLLRGNASSFTGLTSENFMNSPTNESVLKYRKGSAESDALEKELQKLWAEPMEVPLAIGGEKTFRKEKAIIQPMASAFEXPFDHNRPIALINHATTEDIQNAIQIGLAARHQWERLPLIKRADIFLHASDLMAGKYRMLINAATMLGQAKNIQQA

SEQ ID NO: 123169 - protein, 68 aa, Heterodera glycines
VNTFSPEGHSFQDEYAIDTVKVGYTRIRIHTKEGILLAAERPSMSKLVVDNSLIACSDVEKHIGVDLA

SEQ ID NO: 123170 - protein, 156 aa, Heterodera glycines
MHLHVWPGEFGLPSVDIECLQFMAAAKFCAAPIAFHASTQPWKSPKGELPFFNNNGEEQITDFGEFVEFLRNSRQDVVLDNDLVPSQLCEFEAYNCLLKQKLLPALNHLFWVDKCNYGTIVHPLYAQQVTFPYNIYYMERRRRRMDTTVRAIRKNQ

SEQ ID NO: 123171 - protein, 99 aa, Heterodera glycines
MEMPTPPTNASHRKSAEGIGTTLQAGMGYGTQQAEAGELPYEDMKKSEAIIPSQAGWNKGDSQKLMTNFGTPRDVKGKHLKRIWELEYPEEAEVSLDRL

SEQ ID NO: 123172 - protein, 196 aa, Heterodera glycines
MGDFGEWYRSIPLITRYWFTGSTVIPLLGRLGIFHPYLMLLSWELFFYKLQLWRPLSALFYYPVTPQTGFHWMLMCYFLYNYSKDLETSQFDGRPADFLFMLIFNWICCTIVCFVAEIYFLLEPMVLSVLYVWCQFNKDRTVQFWFGMQFKAIYLPWILVAFSMVLRGGGINELVGILVGHTYYFLAFQYALDYGG

SEQ ID NO: 123173 - protein, 162 aa, Heterodera glycines
  unsure (1)..(162): unsure at all Xaa locations
INLKASMLIKRAFSFSSRALQQHSVVRPPVQVTGIEGKYASALYSSGIKEEKLENIEKEVRQVKELYDPTKXLSPFMTPQSEISKKKGGLXDVLKKQASHHRFKNSFGLLAENGRNHKMNXVVSPLEXIKARHRGEILLKNSSGEXLDKKNKKTLKHPLVKI

SEQ ID NO: 123174 - protein, 134 aa, Heterodera glycines
  unsure (1)..(134): unsure at all Xaa locations
RSVRAMQISDDGTSFYATMSNRAACLYDVETAKRVRCILEGHIKSGPSVMALLPGERPHFATGAENGEIKAXTLDSPSRTXHTFGKQADIINAMHIWRKNMLAASGNSTLDGYDTHKGKVRIQSETMHRELLSL

SEQ ID NO: 123175 - protein, 143 aa, Heterodera glycines
MIDRNSPLHMFVFANRLATFEGRWNYKEGCTAEKMARAGFFCTEKRKKPSDAAKCYICLHEMYWDPEDEPWLFQEEHKKHRPDCPLVTIGKQNEEEFTVREVLLLLAYEHSTKMYPVADASMKELDVLMKQLLADTQKAVEGI

SEQ ID NO: 123176 - protein, 151 aa, Heterodera glycines
  unsure (1)..(151): unsure at all Xaa locations
MQQTHIILGIASVCSLXAIIATAVTLPSQPSDMSQMDSKVHHGVEAFRVNTDSTCTDLMDVQVVVTPPSKPLDNPFNSIFRAKPQLPGHCHCAGLQQPSCPPGPPGPSGPPGTXGQPEGAGQPGHAEQAGQPAPPCPPQNIPWPPCPAGPP

SEQ ID NO: 123177 - protein, 146 aa, Heterodera glycines
QTLHNLRKVFVQDLAQRMKKTPTGPEGDEEFLSSPIQKQKIIFLENNLEQLTSVHKQLVRDNAELRCELPKLEKRYRASSERIKSLEVALRETKENAMKDRKKYQYEMERIKEAVRQRNLARRGLQIAKPIRPGQHYGTARPVNAS

SEQ ID NO: 123178 - protein, 81 aa, Heterodera glycines
TDDDSMKFLVCKSRIMTKKMYYHMQHYVWKRRSDSVHIINIPNTSNKLMFAARAIAAIENPSDDWDVSAQTDAQMAVLKFA

SEQ ID NO: 123179 - protein, 196 aa, Heterodera glycines
  unsure (1)..(196): unsure at all Xaa locations
AQQQAITNKRKAVQDGIFXAELNNFLMKELAEDGYSGVKWRRAPSRTEVIIMATHTQSVLSERGKRIRELTALVQKRFGYSAGQIELYAEKVSSRGLCAVAQCETLHYKXVGGLAVRTASYXALRFVIESNARGCXIVVSGKMRGQRGSAMKLVDGGLIHSGNPVTEYIREGGRHLQMRHGVLDIKAKIMLSHDPK

SEQ ID NO: 123180 - protein, 101 aa, Heterodera glycines
  unsure (1)..(101): unsure at all Xaa locations
DADPDDYGYFPDPFEHSCGLERKMLIARVNGDDRYEPNVSFCSEHTTQDYPNLLPVALQDEHLPWLCGADSHYANYCAFKXSLMKRSYCGHWLKGVQADPD

SEQ ID NO: 123181 - protein, 209 aa, Heterodera glycines
MESYVQVEDQDSRDSGISLAQSTTSQQSCFAKIYFPTLFDFGFKVRELYSLDTVERPQVPHKAFRSINADTMANLLGFLTEEQFQRRFILIDCRYPYEYDAGHIWYSLNLWETTSIEKLFYPEEEERFGEIIVRTPIFYCEYSQKRGPKMALALREFDRVRNESRYPYVDYKEIYLLDRGYRYFFKERKFGKYCTPQAYVQMWDSAYTE

SEQ ID NO: 123182 - protein, 201 aa, Heterodera glycines
  unsure (1)..(201): unsure at all Xaa locations
KIALPEVEDEWEASTTRYSKKDASTTLRSNETGVGDHVMANVNAKGNRFYKILVRXIQRPQIGDKFASRLGXKGTMVMMYTQKDMPFTCEGITSDIIINTHAVPSXMTIGHLIECLQGKLSDNKGENGDATPFNDPVNVQKISALLEGYGYPLRGYEIMYHEFTGAKVEHPGGFWGPTLLPTGLRHHGRRTKILLRRRPEG

SEQ ID NO: 123183 - protein, 178 aa, Heterodera glycines
  unsure (1)..(178): unsure at all Xaa locations
DKKLGNPMSGVKIRKLCLNICVRESGDRLTPAAKVLPTIDLAXTSALLSKARYTVRSPGIXRNELFSVYCTVRAPEPEEIIDRGLKAKEYELYRENFSDTGNFGFGIQEHINLGIKYDPSIGIYSMDFYVVLGRAGLRVAKRPRIQGRIAASPPVQNEEAVKWIQQKYDCVILPPKPN

SEQ ID NO: 123184 - protein, 123 aa, Heterodera glycines
VNFVLAERQRLLEQVELLREAVDETGDVSYSCETAGYFFRYTVCKTWEYFMEQVQTMQKQHQQNALPKEFVAEHFPFSKFFENRRHQSNLLPLKFELRDFEEDLTIALDGWERIKDIFKKLEE

SEQ ID NO: 123185 - protein, 92 aa, Heterodera glycines
CASRNQAVIGPVVIAHAKMWHPEHFCCTHCGDSIDNRNFFQRQRKAYCANDYRDLLSTHCSYCTQPLKEHCATPLGGKEFSRGSILDCTECD

SEQ ID NO: 123186 - protein, 124 aa, Heterodera glycines
NTSGGFSTNKFLLDLESRGTAAALSKTADAPIECVKMLLQAPDASIHITADKRYKGIIDVLNRDPKEHGFLSSWRGNLANVIRYFPTHALNFAFQDTYKRVFSQGLDKEKQFLKFFPLNLASGG

SEQ ID NO: 123187 - protein, 98 aa, Heterodera glycines
  unsure (1)..(98): unsure at all Xaa locations
LLSDSAMGMGCARFASHDTTRPALPFLAVRPPPHVVVAWMGWNDSNLTYETQSKPGILTLNYPIEFSIVSYWDDMKKIXYRTFYYKMSCAPHEKTALL

SEQ ID NO: 123188 - protein, 188 aa, Heterodera glycines
  unsure (1)..(188): unsure at all Xaa locations
RPTTTMETKVAGCGAVPKLVRCWTVSLLRQTDGIIPSHAGWNXGDSQKLMTNFGTPRFFFTKGKVENLAEIPEDILLKSHGEVRLQSGTNRFASQKGFVSFCTKRDVCPEGVNVNILPVDLXPLPEDNIRASDRIVRLQAGTTQFDSQNGMTLFGTRRPETTTMSDNQNREVSHELQFDKTEIPLQIG

SEQ ID NO: 123189 - protein, 105 aa, Heterodera glycines
  unsure (1)..(105): unsure at all Xaa locations
GKTCLLISYTINKFPNQYVPTVIHNYAVTVMIRGEPYTLGLFDTEGHEDYDRLRPISYPQTDVFLIXISLVTPASFENIKKKWVPXITQHCSKTPFLLGETPMDL

SEQ ID NO: 123190 - protein, 97 aa, Heterodera glycines
  unsure (1)..(97): unsure at all Xaa locations
MTGCSTNVSGQNESHQIAIKSGIPXARQAYTVNXECSSSLKALILCNQSWQLGQRYMVLVVGVESMNQAPFYLARGDDNYRDIKLLDSVRLNGISEP

SEQ ID NO: 123191 - protein, 157 aa, Heterodera glycines
MGSEQNDAATKDERAVSLAASHNQFLNCPHCSFQTRRGPLHLKRHEAVVHSRNVLYVCNVCQFECRWNREFYEHMRRLHFPGPPYSCDSCTYDVDRLTVLLTHRLTHTDEKPFKCSECTFRTRNRANLVVHHRLHTGEKPFQCEICGKRFVLKRTLE

SEQ ID NO: 123192 - protein, 210 aa, Heterodera glycines
  unsure (1)..(210): unsure at all Xaa locations
MTQQFIYDEEHDEFGDEIDDNDDEAATALSSSSSFRPQQIVHVDMDVLRTNFAHRCEQQRRQRREHNNLLRQSCGGNDDGGTRLHVVTTSAGIMSSGSQEEEREEDNASVEQRLSMMLNKADFARMRLIGQFNNAFLIVRLRSDVFIIDQHAADEKYNFERLLAHNVIKSQTLIRPKXLRLGNVNAALMRDNLHVFPAHGFDFQSYNGSD

SEQ ID NO: 123193 - protein, 102 aa, Heterodera glycines
YELCCDMIDVTIDISSIYGHRNEQKNFRPIGFDQDSSAVITLRTRQVIFLRQINVYLALVCVIKEDNFEKQGLIDFNFNVFKQGVEDVFELGKRRLPSLAVG

SEQ ID NO: 123194 - protein, 182 aa, Heterodera glycines
LLHHESKLKAGFDLFRLLVATALWYTFTNCFVKFELHTGKCHGSVESARVNCYENGGKWIPGFDISGHAFLLIYSILIICEESTSFQNWPSKPRVTIHHVPSRKEFELFQRNTKIIQWLFVSLMLLHLLWDLQLLITSLYYHEFWQKLIGASIGVFSWFVTYRFWFVVGFPFLPIRRHIKSF

SEQ ID NO: 123195 - protein, 113 aa, Heterodera glycines
NITKYAEMARSCGDQMPKNLAIMEHQRRFHPNDKTAPHGGITAFPGEGGKVLGLRNKRLLREYRPKKHWYEFEDVVFDYDVNCSKGMPWDPEVAKRMDSYTEVKFVKDHLKKY

SEQ ID NO: 123196 - protein, 148 aa, Heterodera glycines
  unsure (1)..(148): unsure at all Xaa locations
NTPDDAKVMSWXWDYGYQISAMANRTTIVDNNTWNNTHISRVGQAMASNESHAYEXMHELDVDYVLVIFGGVTGYSSDDINKFLWMXVRIGGSTPEGRHIHENDYYTKNGXEFALTXRGSSTMLNCLMYKLCYHRFGTVYTEHGRATG

SEQ ID NO: 123197 - protein, 150 aa, Heterodera glycines
MAYSRSPSPNRERSHRSTRKRSRDRSNERRHKAPRSSHKERHRDRDRRGDRDRDRDRERERHSSGGDKNREHRSKKKDNVAHATKSNPINEIVDVDEDMMRMMGFSNFDTTKNKHVEGNASGESKINRARKYRQYMNRRGGFNRPLDYVA

SEQ ID NO: 123198 - protein, 206 aa, Heterodera glycines
EEPLARLERHEDRVPRVAFHPSGHFLATACFDSSWRLFDLETLQELLYQEGHSKSVFDLDFHADGSLMLTGGLDCYGRVWDLRTGRCIMFLEGHQKGIHTVCWHQNGFLMVTGSADNTCKVWDVRMRRQLYTMPAHQNLVSRVRMDPSGEFLVTGSYDNTMKLWTCQGWQPLRVFDAHNMKVTCVDVSPDENWIVSACYDRTFKLW

SEQ ID NO: 123199 - protein, 213 aa, Heterodera glycines
MNRGGGFHITIQAPVNIALIKYWGKRNEELVLPLNDSIAITIDELSATTHITIGPDVSTDSVTLNGVGIDIAGSSRFRNVFQQIREYSNRKRKLKGEHASKGWHTKIESSTNFPTSAGLASSAAGFAAIAFGLGKIFRLPERDIVRMARMGSGSACRSIQGGFVHWKAGTHQQNDSDCLCEKLAPTAHWPQLRALVIVVSSGHKKVGSSVGMR

SEQ ID NO: 123200 - protein, 128 aa, Heterodera glycines
  unsure (1)..(128): unsure at all Xaa locations
MFPQDGDRPHLQSLRPCPEYTGATPIHGVGSMCRTEGYWQTVHGVQGLAVGSMPAHDLYFPDXMEFMSSLTGKPHGHTNALSYSSAGMAATVDHDIAMTSAEEAQXRKQMLYESVGGSLDRVRSICQK

SEQ ID NO: 123201 - protein, 116 aa, Heterodera glycines
  unsure (1)..(116): unsure at all Xaa locations
VKPDLVHRGLGAKIIRRFKHRGYKLAALRVAQATVPHXEVLFRDLKDKPFFAGLVXFMASGPIVTMDWECLYVVKQGRGLLGATNPMVFVLGSIRGNFCIEMGRNICHGSDLVASG

SEQ ID NO: 123202 - protein, 98 aa, Heterodera glycines
SFNLGKLCSIVKKWHTLVEGNVAQNTTDGFLLQLFGIGFTKPNADKIKKTTYAKTSQELMIPANVVVIMKKEVSSRDLKDAVNKLIADSIGKDIEKEC

SEQ ID NO: 123203 - protein, 194 aa, Heterodera glycines
ARLWKCTAASASGSTKTEERWLFVFNDLLLLASDRSAFIRGTTGAGKCKLRAIFAAKHTQICEGDSLEREHSFYLRGSDSPQGPQRCVELCCASQAEKDALFDIVWKVIHQETNSKNSAETLAKNTNNNSSNTEQQQQNKSCAHCDTDFGWYTRPLVCQRCQQRFCKRCFGQRRKEQKMCLDCLRTAEGYRSFS

SEQ ID NO: 123204 - protein, 91 aa, Heterodera glycines
  unsure (1)..(91): unsure at all Xaa locations
TYVNMITSDNEKTRHALAHLDFLDIFPLQTMHTICPGTPHLXLPLFDRDEYQLLSTHQDCFIYLMDLHTCDTKDDLHLPEGEIGDQIIQAY

SEQ ID NO: 123205 - protein, 100 aa, Heterodera glycines
VRFLQRFVNNNPRNLERVRLQGKPSGWEFEKNRAQHNFIYRVDFCPTKNAIAARVVHYQDGIVIEASTREKTGQSQLYSQTDVSAAYNIGRTVGSSMQNG

SEQ ID NO: 123206 - protein, 92 aa, Heterodera glycines
MFSSSKSAAVLRMRGATGAMARRWKGGDEQKNVPVPSPKEMAQRPAEFDELTHTGQAWDIFYWRRSRFEYMPKQVNPSIAAHLIAELAPVPS

SEQ ID NO: 123207 - protein, 126 aa, Heterodera glycines
MPELLFKTITQQSFTIEVEETATIGEVKRKIQQVKGAEYPAENQKLIFFVRMLEDAMLVSELNFAAPKFIVIMVMRKPAQASSTVRSATSSASPQKNTSTADGQAPKSAENKATGATSNTSVAQPG

SEQ ID NO: 123208 - protein, 137 aa, Heterodera glycines
  unsure (1)..(137): unsure at all Xaa locations
MARTATEYGHRAFSTSGAAQELSSALDEEIKAEKELLQDKLGGTSAPSVPGFXITTKGAEVRLSKTHGNQKIGVILNENHSIDIEEDEEYEDQPQXEMETESVSVSLPRFALNITKNNQSMLFDLEMAKTEDGGFNF

SEQ ID NO: 123209 - protein, 195 aa, Heterodera glycines
MSSSNTILLDCSDDSGVVVGFEQCATSEGGGAAEPQQKLTKNQQKKRARMERFNAGKAEWRRKQRERHKERKRARKADGQTAKMNESKCRVRVAVDMAYDDLMDERSVRKTVSQLRHCYASNRRAADPLQFYVVNLDEKAKKVLDGITGWQQWDVHLLAQPLAKLWDDREIVYLTADSENVLSALDEQKVYVIGG

SEQ ID NO: 123210 - protein, 177 aa, Heterodera glycines
MFKFRAVLSNLSLCCSSSLLQIQRHFVTASILRKCPSSTKQFANAHRCISRTRSLFMFIQVQETPNPLSLKFLPGQKVLSEPGRTYEFTSARDAAKSSPLARQLLRIEGVRSVFFGEDFISIQKQSVEEEWALLKPHIFAAIMDHLQSGKPVVVVTGADAEAAEANAQPTDTTILPE

SEQ ID NO: 123211 - protein, 187 aa, Heterodera glycines
TRIDFGNLTCYMAVARNKGIEIVENDYSLHATPSCVSFGQFARMMGLGAKQQLNINYGNSVVNFKHILGRTFNDKVVQTFRQHIPCGLMGKFTDDQIEIKVTHLGTTRVLSPEQVVACLLTHLRVQLSCSLGTDVTECVINVPFFYEENQRRALLNAGRIAGLSLRLITDPAALAYCYGMYNGANLP

SEQ ID NO: 123212 - protein, 193 aa, Heterodera glycines
EVKIRLQTAGEIINGPKVNVFTVLRELGFGGLYRGAQACFLRDIPFSAIYFPVYAHMKMKTADEQGYNRPWSLFVSAFIAGAPAAALVTPADVIKTRLQVAARTGQTTYNGLIDCSRKILREEGPSAFWKGAAARVCRSSPQFAVTLLTYELLQRIFYVDFGGTRPSGSEVSTHTTILDQASENPHHIGGYKL

SEQ ID NO: 123213 - protein, 123 aa, Heterodera glycines
  unsure (1)..(123): unsure at all Xaa locations
MFAYILYTDKLDWLSLNEAKSVGTVGITNHAQKSLGHDVYVKMPXIVKKLYSDNTTCAIHSVIAASDLIAPVAGXVFGTEHHELEDQPALTHNDCYRKEWLYKMKVINLKESDQLMSEPRYNN

SEQ ID NO: 123214 - protein, 203 aa, Heterodera glycines
  unsure (1)..(203): unsure at all Xaa locations
MPPLSPPQLFFPAFLLLGHFLPPFAHGQLPSAMLPAPSTSQLQVKISNLPVHVATAQHLPQLVWRVVGRQATERVFCVSEAPVSQLRFVCVDCVQKNITDLVDYLNTAQDSTRIATSPAVELPPVDANPSWTGATIICQAAVNGGTKDSPPSVVDVQYLRGVHVVDSNGQGPVHIXNQGFRFYVECVRGNDGQCQQSAARRKT

SEQ ID NO: 123215 - protein, 191 aa, Heterodera glycines
  unsure (1)..(191): unsure at all Xaa locations
IILEQNNRVIAELLEMKFTNARTNSKFDTVYVVFADFDGILYHASNPDGGDKSKLMLSISLKFYKELQEHGADELIRSIYGKFLWESPHAGYSVSLVYDVADIPENFTALVEHASYLKRNCFASVFEKYFQFLESGQEGENRAVIHYREDETXFIEAKSDRVTVIFSTLIEDPDDVVICKVFLQEFREVTR

SEQ ID NO: 123216 - protein, 93 aa, Heterodera glycines
RRRAMSHNVKRLPRALRPIAARHTQRTAQRKKAPSRKWRRRPTRMLKRWVREQRKNVWLETHIWHVKRFHMTELWGYKLPMKSCQRGFRPNYR

SEQ ID NO: 123217 - protein, 117 aa, Heterodera glycines
RTIGGKRTPLLKTRNFIVGPPLMKTKSCPKQIHFARLHDATILRHGLHNDTGNFALSSERFPHPSAIIAIINNASNDELLHTLTLVMGVLDALDLIPVPPWGEAHYSMPLAPPMGQK

SEQ ID NO: 123218 - protein, 169 aa, Heterodera glycines
MTQQPYFATYIQDLEQDPFDVIDFVERLAWRMSTGKDCVDAAYLKNKFEEEIGSLQLLSDQFQSKLNTLEQQQNKDKTDYLDSLQRLHDKNGDSLDQLKQLDLTMQTVAARVVHLGDQLESVHEPRARAFEALQLMRHFDEFLADQPLNSALFTDPDRVIKRNKTKITI

SEQ ID NO: 123219 - protein, 131 aa, Heterodera glycines
LFGFYIVMKGHSDEVTGEATRAVLHAWKHLAMGITDEEVDAAKNALKARLFLGLENNSQIATHIASEVLSSGKITPFDQLERRIHFINANAVREAVSRHVYDREIAVAAIGRIEAFTSYFELRYGMSWWRL

SEQ ID NO: 123220 - protein, 85 aa, Heterodera glycines
TQVQLLRWKEGGRRTSLLEQFGLGFTTPLEAIEGIYIDKKCPLTENVSIPRLILIGVSIDDNMQRTIVIRRDYLHFLPKHPRYEN

SEQ ID NO: 123221 - protein, 159 aa, Heterodera glycines
  unsure (1)..(159): unsure at all Xaa locations
QFYAGMTKIAGETCQGILTGLISVXDKRLEVTNCFSISRPDALHKSEXSAAGPETSRSDDNKQGXILDMLKRFRMMNIHYESVGFNQAHPFCTWITHXLLGSLMHYQSDMSHSVVIGYDAVNTRQGCLTLRAYRLSKNALDLVITCDDSWSPEQTTLAG

SEQ ID NO: 123222 - protein, 132 aa, Heterodera glycines
  unsure (1)..(132): unsure at all Xaa locations
SDKFVGKWNLESSEKFYYFVKEVGVNFLTRKGAGCVKPVLEFEVFNAGDHWKMTSTSTITTCNCEFYLNKEFEGKTDDGRTVKTIFAYEDGGXPHKQSKLKDDDQDSYYQRYIDESGKLFITMEVGSVNARR

SEQ ID NO: 123223 - protein, 142 aa, Heterodera glycines
  unsure (1)..(142): unsure at all Xaa locations
IASGCSLLGIITTPLTLPSLYSEMTHMNSQVHYGDEAFRVYTDSXWTDLMDVQVVLTPSSNPRDNPFHSIFRSPRXLRGLCHCAGLQQPSCPPGXPRPTGPPGQTGHPAGARHPGQAGLPGQPTPDCSAEMLHCPRLPVSPA

SEQ ID NO: 123224 - protein, 219 aa, Heterodera glycines
VGLKEQLLDVTAALESLTKQILQNLFSDGKAKAQDKSFDEQLKALVESFNDKQSEFVVLIRKVPSHQQRQRHIHILEENVKKRDEIIGRLADQIKNIKGAVVEGTFQAEKKLKSVKQSEMNRVFSEEVIRFAHQISKNHSVASSVYWQQGDPSRPYPTEANFAVSNLLLSRTQPNVPLSFAAQATPGGMLKSVFNVPGMPQKAFSPSPRSAMFVSNLGA

SEQ ID NO: 123225 - protein, 145 aa, Heterodera glycines
RFSETSAFHGRGSGGRTTGGESDEDAFSNPFYIASYYDSKRFEAIRGVSIFASISLLLIYVAWFREPNEVDELWDYDMRLVYFVAKKRVLKDQIEQAKKSGQSTVNLETDLIDIEVQEEKIREEEEKKAKKVAAKKKAEQKRTTA

SEQ ID NO: 123226 - protein, 98 aa, Heterodera glycines
  unsure (1)..(98): unsure at all Xaa locations
GDRQRGGRKTHRRKGAEEKEXEKGPKXRRXKERESHKAGXKGEKEMKPRQXDGQREGEGGKQGREEIFFFKATNGPRYVVVCGRSIEKEKLKEGTGVG

SEQ ID NO: 123227 - protein, 152 aa, Heterodera glycines
MSAVEINQRVVLNGSKGVVRYLGPVEGTAGQWVGVDWDDPTRGKHDGKTRDGRRYFTATAASSASFVREQCLHTGDELFSAICAKYATEGDDDDKCQNETIEAGDKKRWQLVNMDKVRRAQRDVFRLRCIVLSWSLVSHLDVSKLGDRTFAN

SEQ ID NO: 123228 - protein, 183 aa, Heterodera glycines
MEAVAEHDFNAGEPDELSFKRGQILKVLNKDEDPHWYKAEINGVEGLIPSNYILMMEHSWYLGSISRSDSELLLLKNGNPDGAFLVRRSESTPGEFSISVRFENAVQHFKVLRDTKVGQYYLWAKRFNSLNELINYHRANSISKTHNILLRSMDSGFSNKHGLVQALFHFTPQEPGELRFSRG

SEQ ID NO: 123229 - protein, 109 aa, Heterodera glycines
NIACGLVGGPGLVSGMNIGEEYAVFETGTRNTGTSLAGKDIANPTAFIRASIDMLRYLELHDYADKLSDALYKALTEQRTHTPDIGGTNHSTEVVQAVINNYSETISNA

SEQ ID NO: 123230 - protein, 178 aa, Heterodera glycines
  unsure (1)..(178): unsure at all Xaa locations
PQFTVIKGMELVGPSKRKIASLFTGVFFAVGQVLLGLLAFFIRNYQYLHASIAAFATIFLFYXGASFNPSLLSIVYSPNLPFLLRVVPESPRWLVSQKRYVEADQILRNAARINKRELPDKWWDDIEEEANGGGEKRADECTAQKRTTRKHNYTDLLRTPKIRRISFTAFFCWSAFNF

SEQ ID NO: 123231 - protein, 69 aa, Heterodera glycines
GVREFIQKDYVDLKQNNRDFPILVRECSGITPRIWARYEHGVETSVSVENQPRQKIMEVIKEMATKKID

SEQ ID NO: 123232 - protein, 162 aa, Heterodera glycines
SCRIRHEDKGDDAVNDTDLELEFSNKLDDLENDNKAEGIIGHEKNTAESRGLENAPHSQQQINGFLQISQEQRLFHYIFREFEAVAKNPIEGIYVTPGAESLLVWFGLLIDRTGIFYGGIFRFILTVPDNFPNSESLPVVQFEEPLFHPLVNSKTNCVDLSR

SEQ ID NO: 123233 - protein, 142 aa, Heterodera glycines
  unsure (1)..(142): unsure at all Xaa locations
KLNPFVSSSARKSRKRYFNAPSYIHHLIMSAPLSKDLRSKHRVCSTPIPIDDEVTVARSHYXGNAGSIMRVYQKKYVLHDDNTCTQDKANGTTVHGGIHPSNVQITQLKMDKDRRSLLERKAVGTARVTGILKGKHTEDTIE

SEQ ID NO: 123234 - protein, 170 aa, Heterodera glycines
  unsure (1)..(170): unsure at all Xaa locations
KLIESSERGDFPDCDTFSLNKRVVTVKGPRGTLXRDFLHLNIEIMRENPKLLRVLKWFGIRKYLAAIRTVCSHIENLIKRVTVGFLHKMRSDYAHFPINITLQENNTVDQILKFLGEKFVRHVXLPQRVNAVMSTKQKDDLIIDGTNIQEVSHDAARIQQSTTVKNNDIR

SEQ ID NO: 123235 - protein, 128 aa, Heterodera glycines
  unsure (1)..(128): unsure at all Xaa locations
VRILKKPRQEQRWNDKRFKXPVLLTRWKDDPFCGGCMDKGIGLEKIGVEPQQPHSAIRKCVRVXLIENTNKITAFGPNXGCLNFIDEHHQVLVSGLGQSGHAAGQIPGDRFRVLKGAKTIVVRTYCGK

SEQ ID NO: 123236 - protein, 113 aa, Heterodera glycines
LLGATATIARALLLHNDEIKKYKWQCGRARLPSLSRIVNLPMERIFWQITFLFHIPLRALKIAVGFFRYGRLPSVHWKWPRLYSLCPHFYLWLGSLELIFLDALSEVREREFI

SEQ ID NO: 123237 - protein, 90 aa, Heterodera glycines
  unsure (1)..(90): unsure at all Xaa locations
LVNLMVHVLNASIHVTCDQRYKGFXTFLVRAPQRTGLSADWAXNLPFVVPYSPTHALNFAFMDTYTPDFTPXLDMDKTVLKLFSMNLASG

SEQ ID NO: 123238 - protein, 44 aa, Heterodera glycines
YKKKPGSAKNFGIWLRYYSRTGHHNMYRKHRNVCEEGAETQCYH

SEQ ID NO: 123239 - protein, 175 aa, Heterodera glycines
MSFSPVLTISEENLASEFAKGNVTIADRRPSNAMDFELFEEKAKEKRSLRLSRDQLDLLNLNYGSNDARFSITTKYQGTAWCSCHIYLLKWYDKLVISDIDGTITKSDVLGHVIPAIGGTWAHSGVAELYTGIKKNGYQMVYLSSRAIGQSHYTKTYLQNFAQGSRTLPDGPVLL

SEQ ID NO: 123240 - protein, 158 aa, Heterodera glycines
  unsure (1)..(158): unsure at all Xaa locations
RLCSIREIPSCGVTPTAIGPQDLGKCSIQDDPAXYNGIIAGFKFTLRDDGVHGLDKGWAHSAVGYTMHGLGKFRVYNMFXNVYAGMIGEELAYSCRTYLYFGGWDRAEFFTNMMLVPMEATKVRIQTSPGAPPTLHGCAPFIYRTEGVMGLYNGLPPM

SEQ ID NO: 123241 - protein, 191 aa, Heterodera glycines
MMQTIKCVVVGDGAVGKTCLLISYTTNKFPNEYVPTVFDNYAVTVMIGGEPYTLGLFDTAGQEDYDRLRPLSYPQTDVFLVCFSVVTPASFENIKEKWVPEITHHCSKTPFLLVGTQVDLREDAGTCEKLAKNKMRPISAETGEKLAKELKAVKYVECSALTQKGLKNVFDEAILAALEPPQLERKRKCSI

SEQ ID NO: 123242 - protein, 191 aa, Heterodera glycines
MDNPGPSNGIDLIELGDSDDERMEKFAFGGNDTLSLISLKTDFERPPKEEAMLNLVDASFELIDPNPNVHELFVTFDHQFFSGTLNSNACVVEWSKTMTSCAGICRFSVGNRLCSIRLSEPLLKLRPRRDLVETLLHEMIHAYQFVTDGIQDRDGHGPDFRLHMHRINKLAGTSISVYHSFHAEVAHYKRH

SEQ ID NO: 123243 - protein, 214 aa, Heterodera glycines
LIYNYPEQLFADRKVMAIEHADFEGIERLALVLGGEIASTFDSPSEVKLGSCKLIEEVTVGEDTLLRFSGVPLGNACSVVLRGSTQQIIDEAERSLHDALCVLSTHVKDQRVVPGAGASEMLMAMAVMGESQKVAGKESIAMEAFARALAKLPTIICDNAGLDSAEIISHVRAEHSKGNRQFGIDVENGRMADVYELGVLESYNVKLGVLCSGA

SEQ ID NO: 123244 - protein, 101 aa, Heterodera glycines
  unsure (1)..(101): unsure at all Xaa locations
SSKINALILRTPSAQVGQRCMVSVVGDQTMTHAPTYLARGDNNYRDIKLLDSIQRDGISDPVLGQPTGVCAEKTVAEFGFPRXQQDADALASLASANPSWP

SEQ ID NO: 123245 - protein, 185 aa, Heterodera glycines
MLFRYFPLLNEYSAHKLFLTLFPSTGSEMVRGNPHLPIIVGKEHCSNGTKWILNVFGDCVDTPMKMCGFWVGLMSLFLWLIPLFPQLYENFRNKRCEGLSIFFLMFWFIGDSCNMIGAVLTHQQPLQQIIGVYYILQDLALLGQFIYYTRLYSATRRREMLNGPSVIVPVFLFGFVGLFTLFSSS

SEQ ID NO: 123246 - protein, 78 aa, Heterodera glycines
HFDKQVPVQQVFEQDDMIDCLRVAKRNGFQGVTPLWHCNKLPRNTHEGLRKVACIGAWHPSRVSFTVARAGHKGYHHQ

SEQ ID NO: 123247 - protein, 161 aa, Heterodera glycines
MLRKSAHKAKTVTNGNANDPFRFQGSGVDFKAKFIGERDVAEARGDVLCAEAMRLAKMSVKASGSHKPRVVLNISLDGLMLLDEKSGAVLYNFPVAKISFIARDTTDARAFGFIFGTADGKHKFYGVKTAQTADHAVLSIRDMFQVVFEMKKKQLEEEKKK

SEQ ID NO: 123248 - protein, 182 aa, Heterodera glycines
MSSNSATTTTSTDNGISLVEADERGAEGGEGDDQLTINSLSSSLSSSTATTDTEGESGAGDGGRKRKKRRGDGSSSRGSSAKEIEQFDEDEAAEDALLDDEAPPYAAKTRDRAIGRLIVFSCILFTVPLTLMYITYRFFFIGHYHLAHDRAVLYAGIVAAATGYLLLALVAWIAYRSRDETE

SEQ ID NO: 123249 - protein, 194 aa, Heterodera glycines
MNRLRRDQKEKVQQFVSFTQANEQTAITCLTASNWNLEMAGDMFYQNPSYTNQQVGGGTGGGADSRKIDHLFNKYASDAKDKAQKIGPDRIGPNGMVRFLRDLNIEPTSRAVMVLAWKMGAQKQCEFTVQEFRDGISTLIPTGTVDINGLRNALLKAEKDTVAERKAFRELYQFIFKYVKSAGQSSLELDTAVA

SEQ ID NO: 123250 - protein, 177 aa, Heterodera glycines
MGRARRKKGKTARRARQGLLGFTRIAREGKKPKQFEKRVNQRLDRKDDVRTEEILRENIAGQKTQEEPRTPHAFVIHSAGVGRYVRQLEMDLRRVMSPNTSKALRVLKRNKLKDFVVHSQFLGVSHLIILSRTELSTHLRIIRNPQGPTLHFRVEKYSLGRDVLSVQKRPVIYEELF

SEQ ID NO: 123251 - protein, 122 aa, Heterodera glycines
FEVAEARSLDSVCVSLKNLAQNAEDESETAAELFYKGAMEIDDFIKKFTEKRVIGHTRRLKAEKLAELLRQQCQYQPQHPSPSALGMTTQTQYSSQGVAASMYPVLGQAYTSPANFRHSYMS

SEQ ID NO: 123252 - protein, 46 aa, Heterodera glycines
NEMHQEAIEGATHALEKDNVDKDLAAFFLNEFDKKFNRTWHCITGR

SEQ ID NO: 123253 - protein, 116 aa, Heterodera glycines
  unsure (1)..(116): unsure at all Xaa locations
GLPDRPFNGCDRIGRIVYWSGDKRFFLKGXTRDRYNERVYGSSATAGAQFDYIHYNEESNFQLVDSSRPQKPQRPFRRQIPFRQLAHREQERREYEKYNVSTKMKRTILNEQQNAY

SEQ ID NO: 123254 - protein, 85 aa, Heterodera glycines
  unsure (1)..(85): unsure at all Xaa locations
MSGELRLDSSLDLMRRLPPQNCEKHLTDLVALAPDLCESLLTAVDQPLICAXDETTGREYLLCDYHPHGESYRAPGTSAYNPPLE

SEQ ID NO: 123255 - protein, 158 aa, Heterodera glycines
MSTHRLLPSLPRLKVPIGHRPQRLKLPYIPNPRGHLELVRKLVNRVIREERCELKYNRAEECRQYVERLIQLGIYRGPNCAYTAEMFQWWFIEQDLVDKMWSILVPRFSHYPIDQSYTEIYRLPTIRLKSKVNKETEFWNRYSIAVLELKENPFPPMD

SEQ ID NO: 123256 - protein, 105 aa, Heterodera glycines
  unsure (1)..(105): unsure at all Xaa locations
KLIKPTEDGIQDEIRGKKPPKEDENALKIKEAPKISAAMFLKYNTQLGPPFHVIIDTFFVNFSIRNRIDIMTGFMDWLEAKVVAXISDCVLGRLEKMGRRVEVAV

SEQ ID NO: 123257 - protein, 126 aa, Heterodera glycines
  unsure (1)..(126): unsure at all Xaa locations
ALGSELLVHLDNTHETVXAIKYMTVEASHPLLWRVQRDKKDIVPFRQFTSGTRRRLQGPAWGPTQGLWTIKSPEILLQLLPNEXINGQVNGEDFDHLVIDHIHMQSVANMHLIIHHAHGFINPYKN

SEQ ID NO: 123258 - protein, 187 aa, Heterodera glycines
  unsure (1)..(187): unsure at all Xaa locations
SSSSKCFFGMTAPNFMVDAVVNGNFTTISLEQFKWQYVVLFFYPLDFTFVCPTKIIAFSYKAGKFKKIGVPLLGCSTDSKLCHLEWIPTPRKQGGLGEMNIPVLADTRHKISRDYSVLMEEAGIAYRGLFIIDDKGVLRQITVNDLPVGRSVDETLRLLQAFRYTDKHGEACPVNXQPGTDTIKPDP

SEQ ID NO: 123259 - protein, 215 aa, Heterodera glycines
LLEKAYMKVMGGYDFPGSNSSIDLNALTGWIPERIPIRPKESSFEADKTFERLFSHFHQGHCLITLATGKIDEAEQERTGLVDAHAYAVLDLRKVDGKRVFLLKNPWTHLRWKGRFSEKDVVSWSPELCAKLDYNPKDAQQFDDGIFWIDYASICAFFDVFYVNWSPALFPFRYALHSSWDAGKGPVKDLYTVGDNPQYVLEVNNRDGVASVGIL

SEQ ID NO: 123260 - protein, 126 aa, Heterodera glycines
TLARAKSNDLIMDLLQGTLTPEPKVLEDANLKKDDIHEAVLVGWSSRVPPLHDLRDDFFNEKEPARCITPDDTASYGAAVLAGVVSGEESSQIVLVDVIPLSMGIETVGGVMTQLITHHTVIPTNK

SEQ ID NO: 123261 - protein, 86 aa, Heterodera glycines
QRYPSMRELRRAIDEQRLFQIFGSGTACAVSPVGRILYREPGTGQMEELLIPTITSSAHVMQRLYKTITDIQYGRVIRSDWTRTVA

SEQ ID NO: 123262 - protein, 89 aa, Heterodera glycines
KVHGQRIALSDNAVVEKSLGKAGLICVEDLIHEIYTVGPNFKKANNFLWPFKLSSPNGAFNKRKFKHFIEGGDFGNREEFINELVRKMN

SEQ ID NO: 123263 - protein, 177 aa, Heterodera glycines
  unsure (1)..(177): unsure at all Xaa locations
TLQTRPYELFKLDSGPSTEVRLTLDDALDYYKKMLLVRLMDTSANNLYYEKRIRGFCHLYSRQNAXGVGMVAATDANDDVITAYRCHGWTYLMGATAPYILDELTGRIAGNVYRTSGSMHMYAXNFFCGQGIICEQLPIVAGIGFALKYRRQRNICLTLYGDGADNHRPLFTATNMT

SEQ ID NO: 123264 - protein, 192 aa, Heterodera glycines
NSYYNKIIDWKTRIDESENIFVRTVRGTFERVQLAFESKDNVSEVLTQISKIDPEFDKSEWLRFCEKEMIPNILESTYQMNFEVLRDWCYEKAFNLIANSIKEYEKIGFNTRDSRIIDVSKVELVTGNMTDQGPTLVIQFQVFMTNVVKNSEGKIVQGDPEKAVRVRHIWVICRDMEEFNPATAWKLLELHM

SEQ ID NO: 123265 - protein, 49 aa, Heterodera glycines
GASGAKFRVSLALPVGARINCADNTGANNLSAIAVYVIRGRLTRMPTAA

SEQ ID NO: 123266 - protein, 60 aa, Heterodera glycines
GGARPSNKRLQQTQAQVDEVVGIMKVNVEKVMERDQKLSQLDDHADALQYCATQYQKSAA

SEQ ID NO: 123267 - protein, 152 aa, Heterodera glycines
MPTQSTVIPKFGIWSASPPSTTESGRSSSLPTSLLSVNNDSFGEVPLSNRCFCNYGPSVCDMEDTCIKHTSAVCFHAIVLEFNSGTGAIERRHFFGCAPLEKGSDASHLTCNAWRSSHSNGRTVACCYEGNFCNQNLTLPDSPALQVSTGLK

SEQ ID NO: 123268 - protein, 116 aa, Heterodera glycines
PNGYRRGSRYVFARPFHEHGVEPLSTFYRAYKRGDIVAVQGNSAFQKGMSFKAHLGDTGRVLNVTKHATGRLFQRECSPSHDPKRVYGRGRQEKPTGSHLEFLRRCETNKWQKKRK

SEQ ID NO: 123269 - protein, 183 aa, Heterodera glycines
MESYVQVEDQYSRDSGISLAQSTTSQQSCFAKIYFPTLYRLRGQGSIRLTPIKRAQVPHKGFRRINADTMANLLGSLTEELFQRRFILIDCRYPYEYDAGHIWYSLNLWETTSIEKLFYPEEEERFGEIIVRTPIFYCEYSQKRGPKMALALQEFDRVRNESRYPYVDYHDIYLMDRGYRYFF

SEQ ID NO: 123270 - protein, 77 aa, Heterodera glycines
FQTQRPGARTSNMDKTVFIHLCPEGASIKKKMLYASSASAIKASLGTAKILQFHASDQSDIAHKKSLTKLNDKYRDN

SEQ ID NO: 123271 - protein, 158 aa, Heterodera glycines
GVIEVIHSKIEDIEQLPGGIEHVDVIVSEWMGYCLFYESMLNTVIYARDKWLASDGILFPDKATLFLCAIEDRQYKDDYINWWDNVYGFNMSCIRQLAITEPLVDVVDRGQVVTDNVVLKEVDLYTVQVAELACETTFSLRGIPNDYVAALGAVFAGE

SEQ ID NO: 123272 - protein, 193 aa, Heterodera glycines
MGVKVAITGGSGFLAAHLIKRLRADANVDEIRTIDRKPFRQLGTIDDCPPSSVGFPSLIHFQCDLLDIAKLEKALDGVDVLFHLARKAFEYIFFADQKALNDRYSRDNLEATHSLLNTIFKCSVPRLVHVGDAFANIPPGDNFGSAEHIHRGLPSKFLLGHYGETRIKAELAGREKCGKILPNGQPFHALFLR

SEQ ID NO: 123273 - protein, 115 aa, Heterodera glycines
  unsure (1)..(115): unsure at all Xaa locations
VTSAPNTAENFRALCTAQNGMGNSGKPLHYFSRRNLLXAIIPIFLVQGGDFSQCNGIARDSLSGQIISPQDFXKKHCLPRLLSMDDDDLLPNHSPIFFSTGKTNWLEGKLIWFNR

SEQ ID NO: 123274 - protein, 154 aa, Heterodera glycines
MVHYKLYYFDLTARGEPIRYLLHYAGQPFEDIRIKAEDWQTEKPKFIYGQVPVLEVDGKQLAQQAAIMQYLAEKFELAGLFSWETAKALEITCYVNDIITELVPYLGATIGFLPGDEAALRSDVFLRCVKRAFPLLIAQLDQSKAGFMLPSGLA

SEQ ID NO: 123275 - protein, 163 aa, Heterodera glycines
VRSCLEIGPLGGVFHLAMVLRDCLFENQNQQNFKDAAEAKYFGTISLDEATRKGCEQLRWFVVFSSITSGRGNAGQTNYGWFFSTMERIIEQRRADGFPGIAIQWGAIGDVGVILENMGDNNTVVGGTLPQRMPSCLGSLDLFLSWNHPIVSSLLKRTPSGKK

SEQ ID NO: 123276 - protein, 194 aa, Heterodera glycines
  unsure (1)..(194): unsure at all Xaa locations
FTALLVIVCSKQEEGGAKEKKYCTIIGIDLGTTYSCVGVYKNGRVEIIANDQGNRITPSYVAFTPDSGERLIGDAAKYQLTLNPENTIFDAKRLIGREFTDKTVQDDMKLWPFKIYNKANKPHVQVKVGNEDKQFAAEEVSAMVLXKMKEIAESYLGHELKNAVLTVPAYFNDAQRTATKESATIPGPKLATIL

SEQ ID NO: 123277 - protein, 217 aa, Heterodera glycines
MTNHLDRKGIEYVSKRMPKIGLGTYQIHGNDIFEVIDAALEVGYRFIDTAQIYRNEKHIGDALTELLPKYGLKREDIFITTKLSPANQGTAKCANSLAESLRLLRTDYVDLALIHWPGTSRLKRENPRNAQLRAESWKAMEQMHGEGQLRAIGVSNFNVPHLEQLIGGGWAKVMPAVNQCECHPHWAQPQLIAFCARNGIHFQAYSSFGGESNRGEL

SEQ ID NO: 123278 - protein, 131 aa, Heterodera glycines
  unsure (1)..(131): unsure at all Xaa locations
KLNIAYPATGAQKHLRRLKMRKKLRIFFDKRMEQEVEADSMGDEWKGYVLRISGGNDKRRFPMKPGVITISRVRLLLSRGHCCYRPRXKGERKPKSGPGCIGHSNMSGLALVVGNRGEQEVEGLTDRVEPR

SEQ ID NO: 123279 - protein, 98 aa, Heterodera glycines
  unsure (1)..(98): unsure at all Xaa locations
KMIPWYPLTNHTVGTTETHSERETSLIARIQRLRDXIXNTGMRPMADGVLLAHQHSLTHGMLLQIQTTFFKLAGRELSHAEKWVGRTKRMLEQDTRRD

SEQ ID NO: 123280 - protein, 163 aa, Heterodera glycines
  unsure (1)..(163): unsure at all Xaa locations
GKGFPNFMTNKDFPPSAWGNLQMKCRSCRQKNDLKRTPQDDLHAHYDKDQEILNNKALLGDXQARMGLSFMDDAPAGINNNSDERSEPKYEWLRKYNAPREEWAKGNELIQDQPFRIQVRYVRCVKCLAWGHLNTDRECPLYGMSGNADYHGYANNPSDIIRD

SEQ ID NO: 123281 - protein, 101 aa, Heterodera glycines
  unsure (1)..(101): unsure at all Xaa locations
KERKKGTILQKGQRALKAFSKRKRLGGEKFEPFEEPFVSVGELPANLSQLSPQGNVLEEXLKSFESRSFFRLAGERQPTTLKARLKFKMVERTHRVNERGG

SEQ ID NO: 123282 - protein, 155 aa, Heterodera glycines
  unsure (1)..(155): unsure at all Xaa locations
SEQSLATFAFQAEIAQMMSLIINTFYSNKEIFLRELISNSSDALDKIRYQALTDPSQMESGKELFIQIVPIKSFKTLTIIDTGIGMTTADLVNNLGTIAKSGTKAFMEALQAGADISMIGQFRVGLYSAFLGADRVNVTSXHHDDDRYQWDNSAG

SEQ ID NO: 123283 - protein, 196 aa, Heterodera glycines
MIKNFLQRMLSPILRSETVIKLNQKSALKRIDAIEKGKIKALAPKHTTTAKLQRDIDKDNKIKEVLNSKENSFIDRINKITINSSDPPITANRQGIRKEQYGQQNFSEHEYGFFELPLEKMKNNKVMFREAIEILRARMELLSNKSPHDQSFFEQQSDYIQNHPAVKRVDKDKLERVWQYFRPFAIIRDQMLLSKR

SEQ ID NO: 123284 - protein, 210 aa, Heterodera glycines
  unsure (1)..(210): unsure at all Xaa locations
MSENKSEGGAEKKKSGGFNTKKFLLDLASGGTAAAVSKTAVAPIERVKLLLQVQDASIHITADXRYKGIIDVLVRVPKEQGFLSLWRGNLANVIRYFPTQALNFAFXDTYKRVFTQGVDKEKQFLKFFTMNLASGGAAGATSLCYVYPMDFARTRLATDVVKADARSVRSLAYWIMQIRKSDGPIGLYRGFFGSVRGIIILRASYFGWFD

SEQ ID NO: 123285 - protein, 71 aa, Heterodera glycines
TRVKTHELQVKKKEELMRMLEELKTELGSLHVSKVTNGAVSKLSNIHEARQEIVRILTGIRQRPKNDLLQF

SEQ ID NO: 123286 - protein, 154 aa, Heterodera glycines
MNKAFVKAALCSKSTNVCLFKRLVRPVVQIGSRPITGAGFGHPMTRQKMQMYSPEMRAVNYQQKRTHMHAILTKKTVEDCVMLNLHLFDKVDNDKLTFDSDFFKDLGIDSLDFVEFIIAIEDEFEFEIPDGDSDRMRTPRDVYNYICDKCDVYD

SEQ ID NO: 123287 - protein, 122 aa, Heterodera glycines
GCSSVRVVDEGPGLDGRSSVYEYMIARAPCVIGCLWMVTDGEIDRFFMALTEYCFAELHKKEGGAVPDTFRLLLEGVLEARRRCKLPFLTGAAVVAYGLPVAAALTAALSSPAVSGTLSSSN

SEQ ID NO: 123288 - protein, 125 aa, Heterodera glycines
MLCLSMLYVLPFSNRIQLSVSCWLLIFKDTLLKECKTSNIAREAAITAGFPDSIPCNTVTLACISSGVSIQNISLMISTGYLKAGIAGGVELLSDFPIRYNRKVRLSLIDLQKGKSFGERFKHLK

SEQ ID NO: 123289 - protein, 204 aa, Heterodera glycines
PKPTLRFAAVRTLNRISIDYPQAVISCNVDLEQLITDSNRSIATLAITTLLKTGAEASVERLMKQIGTFVSEISDEFKIVVIEAIRSLCHRYPRKHATLMNFLASMLRDEGGFDYKKAIVDTIITIVEDNPGAKDLGLSHLCEFIEDCEHAALATRVLHLLGREGPTTANPSRYIRFIESRVSVESSQVRAAAVTARAEIGAEC

SEQ ID NO: 123290 - protein, 113 aa, Heterodera glycines
  unsure (1)..(113): unsure at all Xaa locations
RGLNCLRKLNNNPTTFSDERRPIVEFSIENLNALRVKERRQQKETKSEENEEEKQQTKNRVGNAEALEKTKREMMAGGKKWLPFFXGTKIRHKKPQNGLSTTPGKRRGQTKNK

SEQ ID NO: 123291 - protein, 85 aa, Heterodera glycines
VSHTDGIQQLLAAEKRAAEKINDARKLKAQRLKQAKQEAQAEIDQYRHEREQRFREFVFFYLGTRDDIEAHIYYDTQANLKAMEQ

SEQ ID NO: 123292 - protein, 96 aa, Heterodera glycines
  unsure (1)..(96): unsure at all Xaa locations
AVENKKASLDVVAHDVDPIXIVICLPAICRKFGVPYAIVKGKVFLGQVVYRKTTFVECLCDVNPEDRNSLTNLAEGAVTHINEPSDELPKNSGGAI

SEQ ID NO: 123293 - protein, 118 aa, Heterodera glycines
  unsure (1)..(118): unsure at all Xaa locations
GHGAFQKDVPFXAEHRKTGRVFNATXHALGVLRNKRVLHRIIPKRINVRVEHVKPSGSRLKFLQRCKANDLQKKQHKEGNAPFVALKRKPKEPRVAHLVKVKSTKVERLAPVKFKIVA

SEQ ID NO: 123294 - protein, 142 aa, Heterodera glycines
SQQNITEQSVSAPTTDRNEYEELSKLVNPIAKPLANRKLAKKVYKLVKKAAKEKGFLRHGLADVMKAFRKNEKGIIVLAGNVSPIDVYSHIPAICEKKGLPYVFTPSREQLGLCAGYKRPAGGLLGKRRESYAELLQRTPEA

SEQ ID NO: 123295 - protein, 86 aa, Heterodera glycines
  unsure (1)..(86): unsure at all Xaa locations
MAESGEHDHDFTSGESGAAATYPKQCSALRKNEFVMIKGRPCKVVEMSTSNIFXHGHAKVHLDALYIFPTKKEEDDRPFTHRLKVP

SEQ ID NO: 123296 - protein, 142 aa, Heterodera glycines
  unsure (1)..(142): unsure at all Xaa locations
MLKMLLKFPSIHRFCSIRSLTQLPNSYEVLRDRGDTAELSQLKNGFRVASYANGRPTVTVGVWLNAGSRIETNDXNGIASLFEGLLHKGSGKRNSVQLQTELAKLGARLRSFTTREHSAFFVECLKSDTDKVVELLADALLN

SEQ ID NO: 123297 - protein, 108 aa, Heterodera glycines
GGGKDRIAVFPSRMAQTVMKTRLKGAQKRHSLLNKKADALNMRFREILKKITENKKRMADVLKDFFFSLAEAKFTAGDFSHMLDQNAASQAQYTVRMNRHNVVGVSQP

SEQ ID NO: 123298 - protein, 114 aa, Heterodera glycines
ARTKFRRSFRKHSGEALTTCYRECKRGDIVTVKGNGAFQKGMPIKACHGNTGRVFTVSQHALFFVLNKRVRHRIIPIRISVRVEHVKPSGSRLEFLPRSKANDLHKKPHNEGRP

SEQ ID NO: 123299 - protein, 200 aa, Heterodera glycines
MGAYKYIQELYRKKQSDVLRFLLRIRVWQYRQLTKMHRAPKPSRPDKARRMGYKAKHGYAVFRIRVRRGGRKKPVPKGATYGKPKSQGVNQLKPTRNLQSVAEERVGRRCGGLRVLNSYWVAEDSTYKYFEVICVDPAHKAIRRDPKANWICKPVMKHRELPGLTSAGRKSRRTWKGHRYSQTKGGISRAVWLRKNSLFL

SEQ ID NO: 123300 - protein, 157 aa, Heterodera glycines
  unsure (1)..(157): unsure at all Xaa locations
MSSSSKAFIGKPAPNFMADAVVNGDFKTISLEQFKGQYVVLFFYPLDFTFVCPTEIIAFSDKAGEFKKIGVQLIACSTDSKFAXLEWINKPRKQERLGEMNNPVAGEPSHQIXRGYRVLMEEXGIVYSGMFIIHEKGGLRSETHHQLPLGXSGEKNL

SEQ ID NO: 123301 - protein, 177 aa, Heterodera glycines
MVPGESVYGEKRISSQQTENAPIAAITPKTEETTNGSNGVSAPTAAAAGPAPPVEYRVWNPFRSKLAAAVMAGIEDTHIYPGARVLYLGAASGTSVSHVSDIVGPEGMVYAVEFSHRSGRDLLGMAKKRSNVVPIVDDARHPHKYSMMIGIVDTIFSDVAQPDQARIVAHNAHKFLK

SEQ ID NO: 123302 - protein, 213 aa, Heterodera glycines
PRNYFKMGRRPSRCYRYCKNKPYPKSRFCRGVPDPKIRIYDMGRKRAGVEEFPLCVHLLSDELQQISSEALEAARVTANRFIFKQAGKDSFHLRVRVHPFHVLRINKMLSCAGADRLQTGMRGAYGKPYGTAARVNIGQILFSIRCKDSNKAVVIEALRRAKYKFPGRQKILVSKKWGFTKLSREDFQEGIQNGSVVPDGNGIKIYNNHGTLQ

SEQ ID NO: 123303 - protein, 148 aa, Heterodera glycines
  unsure (1)..(148): unsure at all Xaa locations
HRLLIPKHCQSPFTLSRSRTLRRICKWPGHGDPNSSCDSPCPYATTLGFPIRPMRARRPLLNGYPDATTFSKHLYHELYLKLTXNAFQNKRKLMDYIFKKETQNKLSKPLAEQDEERLNKNKDTRKRREDRLASKRKELLHPVSDSDK

SEQ ID NO: 123304 - protein, 134 aa, Heterodera glycines
  unsure (1)..(134): unsure at all Xaa locations
GTCISRSDVPYRRFEHPWQKLTLQEVXDQLLKLARSRLRPPSNCRXYLPDSLGGRQVPHVTGKLIMRILPSKGRAAEIWEDLCDVICKDGTILNVVERRRHDIDAADTVFWVESTINHFCRDFICKQMLKPTWK

SEQ ID NO: 123305 - protein, 219 aa, Heterodera glycines
QQLESIADMKKFVEQYPQFKKISGTVAKHVQLVGELSRMVTDENLLEISELEQNIAVANGDYSACLDSLRRLIQHPKTTDLNALRLAMLFSLRFEGNSGALSFVHELLRKRGMANKQLQLISTLLEFAGQRRRQNDLFGDRSAMEMTKRFIKGLKGVENIYTQHEPFILQLIDLASRGKLPESVYPSTDLANLNSRFENVILFVIGGTTFEESAAVANL

SEQ ID NO: 123306 - protein, 213 aa, Heterodera glycines
VEYAQLLFQDDQLWEIAPEYLIASGLGSVGQRILDQLVSQFNWRGNTSVAQRLLTICDRYELGTAREDILRSLVLMLCRQGEWTSALGWALQMSSNELTVNVSRRILEGAISPDRIGQMRIFEALDDQFVNCSELVLLYKFYTFKRLLLEGELRQAVHILHELFIDNSSPVEFHAVLFEEMIRILCSFQQPLVGLDVLNPEEMITPGLDRELV

SEQ ID NO: 123307 - protein, 203 aa, Heterodera glycines
MAVPFSLQVDGLIYRVRNSTYGQFPLDVTEHDLRQLCDATMDVFRQQQTLVRIQPPVNVCGDIHGQFTDLLRIFSTLGPPPEKKYLFLGDYVDRGPQSLETVVLLFCYKVKYPESVTLLRGNHECSNINRVYGFYSEIEQRYHQADTRRLFDMFNQTFAWMPYVGLIGDRILCMHGGISDRITSLQQLNELRRPLLTLPSPSL

SEQ ID NO: 123308 - protein, 117 aa, Heterodera glycines
AQHRLSQHVPITSVAVLPPCSSARNHFHYNYSEPRLLLVSEAHVELQAVRHELYANTPRIATANTDSPLQLVDIAFPANDNQKLSFEQYSWMLLREILLDALGIHCTLCLWWITCDL

SEQ ID NO: 123309 - protein, 212 aa, Heterodera glycines
NRHFSHWSVPDDRRAEFTLEKVWHHLRYFEHSAAKEALREASELSGIEKVEFGGALGRRTRFQQKEVPQLFLQVTLSSSQNGDGSLAPSPSELPKNCESGDDTLLERIVFSEGTEQKVLNPVQCACVLNMALVERHGKATADEIRTEETTAFLEEIINQKSCWAVQFRALYERSLLERQNRRRMERACAQLESLGKVLDNATPSSVTLLHRL

SEQ ID NO: 123310 - protein, 124 aa, Heterodera glycines
  unsure (1)..(124): unsure at all Xaa locations
QLPPEDVATMPTQKVVFNAPFDNEATYYMRVINPGTKRIGYAFKTTKPKRIYMNPPNGVLGPKESVDVAVSCDAFYPGSEDTKGDRVTVEWTNTPDPAATALQLXWFQGYWMVRRKNLPIEYNV

SEQ ID NO: 123311 - protein, 205 aa, Heterodera glycines
MEAMEVDSKASGGGEPMNNNNNANSSSNPRTVLDESGGPKKMSHELSREFIKDIDEWIAQLYECKQLSETQVRLLCDKAREILKTESNVQEVKCPVTVCGDVHGQFHDLMELFKMGGKSPDTNYLFMGDYVDRGYYSVETVSLLVCLKVRYPERVTILRGNHESRQITQVYGFYDECLRKYGNSKVWNYFTDLFDYFPLTALVDG

SEQ ID NO: 123312 - protein, 200 aa, Heterodera glycines
  unsure (1)..(200): unsure at all Xaa locations
LLPLDHSLLDQLASVYARAGTEIKRMTFKSIEIAIKSIGMHSEELLNMINTCPSEAETLVARIVHLLTERTAPSVAXVDSVRKLHHSRNTDVRSLIPILTGLNKEELLQLVPKFVLSAKNSNSVPAFFKKLLFGRHIENGEPLITAQELLLELHRIRPNRKELGFLMQNLDILLVDANREFTIGKDVLANTVETLLNDEP

SEQ ID NO: 123313 - protein, 159 aa, Heterodera glycines
MALEKVPKIDWNQFEVQYLDLVSALHYLLTVEVPRNPVLGNTELTALKRFVHLLRLHGPGSTSVRRLFYRLDEWLSSQHQPVVMTDKYLSTLDEIQSDLGHPIPSNTSFVACRGSKPFLRGYTCGLWTLFHLLTVQAYKERHRSPSFDPVAEVLEPIHS

SEQ ID NO: 123314 - protein, 106 aa, Heterodera glycines
  unsure (1)..(106): unsure at all Xaa locations
DGSKVEAEVFLKDKVVAVYFSAGWCPPCRAFTPELKKFYEELKKAGKNFEVLFISLFRAAKDLVEYYRDFHXSLGLAQXGNPKIQELLQNNEKKTMPTGRRIKPIG

SEQ ID NO: 123315 - protein, 171 aa, Heterodera glycines
MATEKAELVAKRAKMISSKCQTFYADEPILVTRASMQFLFDENGRRFLDCISNVQHVGHCHPRVVEAVHCQMRLSTCNIRFLSPLLTECAESLLQTLPAQLDTVLFCNSGSEANDLALQLARDWTGTRDVAVLEHAYHGHQTTAMQMSPYKFDRGAKIKRPKWGHVCPTPD

SEQ ID NO: 123316 - protein, 79 aa, Heterodera glycines
MEIFCLFFPLFFTILFRFAHRIILKQNIMFQIFVKTLTGKTITLEVEASDPIENVKAKIQGKEGIPPDQQRLIFAGTSA

SEQ ID NO: 123317 - protein, 114 aa, Heterodera glycines
AKKAVKSTKAVRTGDKKRRKARKESYSVYIYRVLKQVHPDTGISSKAMSIMNSFVNDVFERIAAEASRLAHYNKRSTISSREIQTAVRLILPGELAKHAVSEGTKAVTKYPSSK

SEQ ID NO: 123318 - protein, 198 aa, Heterodera glycines
VINVWNTRFKTASPEMTFTSSSRVMSMTWDMFNANIIFGACYSGQICIWDTRVNKRMPVCKTPLTAKAHTQPLLCMRMVGTANAHDLVTISTDGRMCSWSIDNLQSPIEATELTCNRTKKPICALSMAFLHNSINNYVLGTEEGELYIGDRHAASGESSRNIAAHQLPITALDTHRALGAIDFSSLWLTCSMEFGIKL

SEQ ID NO: 123319 - protein, 52 aa, Heterodera glycines
KKMQITPRHLQLAVRNDEELNKLLSEVTISRGGVLPNIHTELLSKMQQNKQQ

SEQ ID NO: 123320 - protein, 169 aa, Heterodera glycines
  unsure (1)..(169): unsure at all Xaa locations
GHLYFVFMDVVPVERRHRFRYRYDKSQWQSAGKADKQPFGRLFLHNESPFSGEQLPLQLVTFDXAKLTNNEKSSPDPDQLLLNSMHKYRPRVHVLCVAPSADRSVQTPTFPRQFRRAADFDKLSRFPYRTFEFPETKFVAVTAYQNQLVTRKKIELNPFAKGFRDQKGD

SEQ ID NO: 123321 - protein, 183 aa, Heterodera glycines
LDLGKKKKKKKAKTTELKLSEDEHEEEKEVTALAEGVGRTNLLDTKNPDAWTDYNYDEMLDMVFNIMREKNPEMVSGKKKTFVMKPPEVQRAGSKKTAFTNFTEICRLLKRDPKHVLQFLMAELGTTGSIDGNQCLIVKGKFQQKHFENVLRGYINEYVRCHTWRSSDTQLTKDVSPLFFIQC

SEQ ID NO: 123322 - protein, 56 aa, Heterodera glycines
TFGIWLRYHSRTGHHYMYREYLDVCEAEADTHCYHDMGARQRPQADLIQIVTAQTI

SEQ ID NO: 123323 - protein, 108 aa, Heterodera glycines
ANCTGAQFFSFALLLNNWSRPNCFGYLWHFGLDWQCHLIAPFLLHLLFRRQSVGLIVVAVLIIGSMCLRAFKCVSNGICNKSDVDIPVGSLLWTLAYSLSDSIRLNVM

SEQ ID NO: 123324 - protein, 145 aa, Heterodera glycines
MPPLFPEKVESIRHLSTKSWEATFTKDYLSNEGQLRFLSRMCYLAMAHYLLYRGVLPKGVFKRRKLEDLAIYCFDGNTRWGRKLSEMMKGIREAIDQKYIKQAFVMINEDKEDPDVATEVFSVGFCYNEQHTMTVLDDKGNRIVS

SEQ ID NO: 123325 - protein, 169 aa, Heterodera glycines
FIPPTIEGEQLENDENVSPSRVSPTNAFGVQKSGHLLHNFAEPGPLTTKIYYYVDDQQIPFSTFFAIPPSKITLADFKKCITRRNYRYYCKVMDPALNAEVKTDIRDENAVLKPNSKNGRFELFLLSETQQTHSSASTLPIQKLQHVDAIRASLMEKRTTANNYILDGR

SEQ ID NO: 123326 - protein, 172 aa, Heterodera glycines
  unsure (1)..(172): unsure at all Xaa locations
ISFVLRLESLLHSNKEFEYLFFVEQAEGTDEFPENVDIEDTGMLKKCNARDIGLFHDRDILSKLNLDCNHCXLVEDLMETRKGTMAYXFITTRGSLRGWRGPTTALTSADXLADSFPTVNAYVRDSARSHKPTTIMTMMIXSCSIVYRTKLPAFDNMHRXDVGEPAFTRKWM

SEQ ID NO: 123327 - protein, 73 aa, Heterodera glycines
RGESGGTASYPEQCSVLRCIELLMIKGRPCKLVEMSASYTGKRGPAEVLLVALDIFTFKNWDYICPSTHIMDV

SEQ ID NO: 123328 - protein, 116 aa, Heterodera glycines
  unsure (1)..(116): unsure at all Xaa locations
EDEKKLRIFFDXRMAQEAEADSLGDEWKGYVLRISGGNNKQGFPMKHGVITNSRVRLLLSQGHSCYRLRXKGQRMRXSFLGCIGDSNMSGLALDAVKKGXXQIEGLADLVLPRRRG

SEQ ID NO: 123329 - protein, 175 aa, Heterodera glycines
NHRGTVYSVSFNPFTHSEAPIYFATVRKNRVSVHLCPPEKGFLLVRQFQHQHANDEFYYSVTWAYNLEKAQHVLVVRGFRGIIRVVIPLNGRLRCALIGDGDSINELCTSPVSPMIVASASNDLTVRIWNVTYSQCLAILGGTNGHRDQDFDSSGAFLGTASMDHAVDLWHIGKA

SEQ ID NO: 123330 - protein, 168 aa, Heterodera glycines
ALALLKQDVFIQARKYPLASQLNDIPNYIFSTIGLDGTHVELYDERKPIASSADLKLPFPGMDKSGRGVCLKNEVKACMFGALCPLRHIIKDKQVVCKHWLRGLCKKGDQCEFLHEYDLSRMPECFFFSKYLACSNRECPFRHIDPESKIKDCPWYDRGFCRHGPFCK

SEQ ID NO: 123331 - protein, 159 aa, Heterodera glycines
VFSRKVFIGGLPIDITETELKQAFHKFGSLLVDWPNRSSDSHFVKKEHYSGAASRVTGYAFLIFLEEASVQRLIAKCYSEGDRFYMLMSSQTVREKPVQVRPWRLADMDYMPRPSAHLDPRRTIFIGGVPRPTKANELAFVLEAAFGPVCYASIDVDPE

SEQ ID NO: 123332 - protein, 66 aa, Heterodera glycines
  unsure (1)..(66): unsure at all Xaa locations
MVQRLQYRRRLSYNTKSNKVRVVKTPGGKLVYHYELKKGXASPKCGDCGSALTGIPALRPRKYATL

SEQ ID NO: 123333 - protein, 136 aa, Heterodera glycines
SFHQCVHPEDDFERLLPNGVTNSFTPVIPGRGRRKMNRGLNRKHKSLLVRLRKATLHCPKLMKPECVKTHLRDMIVLPEMVRCVVGIHSGKAYNQVEILADMIGYYLGEFSITHTPVQHRRPGICATHSSRVIPLK

SEQ ID NO: 123334 - protein, 152 aa, Heterodera glycines
  unsure (1)..(152): unsure at all Xaa locations
LDSILPPLLPTDKPLRLPLQDVYNIGGIGTVPAGRGQTGALKPGMVDTFAPQRISCEPKKVEMPRQPLPEALPXDFFGFNAKNISVKDILPRSGATDAKTYPAKEAFIFPAQVIIINHPGLITAGYTPVGDWHTAHIACEFAQLKEKVRPTA

SEQ ID NO: 123335 - protein, 121 aa, Heterodera glycines
  unsure (1)..(121): unsure at all Xaa locations
RHPDVLWAQRANVGLLSIEVHDCKNPKFKLDKNKVIFEAQGQGIATGTDSKLYRAELDLYAPIDPEKSSYHIGARLVTLTLAKADTDAPWWPRLLSDKRKPSWLKVDFAPWKDXDEDDEEE

SEQ ID NO: 123336 - protein, 210 aa, Heterodera glycines
MEHYDRAITIFSPDGRLFQVDYAQEAVKKGSTAVAVKGKNCVVIGVEKKSIPTLQDERTIRKIHALDSHVMVAFAGLSADARVLIDRARVECENYKLTLEDRVSVMHISRIIADIKQRYTQTTGRRPFGISMLVGGFDSDGTPHLFKTEPSGVYYELLAGSIGRNEKIVKEYLEKEYGNDNTADEESTLKLMLKSLAPVVQSGAQNIEIA

SEQ ID NO: 123337 - protein, 87 aa, Heterodera glycines
YTIHLHKRFHGIRFQHRAPQAIQEVKKLAEQHMGTPYVRVDAPLNIFLWALGAHNVPFSRSGLTFALTHVTDDDSRGKLYPLATHVP

SEQ ID NO: 123338 - protein, 156 aa, Heterodera glycines
MPLPCTAADTPNSLPGPAGASIGAFTGATSNGTSLDRELVQSVYNQNSPSFDRCCSYDYLLGNTDDTLPGGYASYLVYKIGGGFDYTDTTVALGLYGATVLSGCFLVPMLKKQDTKALTANAVVLAGLSVATSVAFYNIDKISAYWTMPFTLWAIF

SEQ ID NO: 123339 - protein, 74 aa, Heterodera glycines
  unsure (1)..(74): unsure at all Xaa locations
MPNVTTEGNNIGSYEELRRKCRDLFPVCFXGAKAMVQKGLSSHFQVSHNISISPALNGYRFGATYVGYMEGDPS

SEQ ID NO: 123340 - protein, 48 aa, Heterodera glycines
IYHRFDEIGRVVYIAKGKDQGKLPALVNVIDSINVLLDGPSSGVTRRV

SEQ ID NO: 123341 - protein, 202 aa, Heterodera glycines
  unsure (1)..(202): unsure at all Xaa locations
KLNIADPSSGSRKTFEIDDEKRYHVLIDKRISQEIPGDQVGYEFKGYVFRITGGNDKQGFPMKHGVLVNHRVRLLLSEGHSCXRPRRTGERKRNAIRGCIINHDSAGVSLVDFKKGEDDIGGVTDVTVPKLLGSQRASEIRKTFELTKEDDVLKYEIRREVPKKAGKADFKVSRIQRLVTPLTLQRKRAHHAEKRIRAVAAP

SEQ ID NO: 123342 - protein, 203 aa, Heterodera glycines
NITEEFRQTVNFIENCYKDGFKQPLILFCQRADYMTHESKENNEKKLELKQVEINTGPIGGLGTSSRVTMLHQHVLSMANADISPRALPPNHTDTMVAKALHMAWNEFGNSEAVILFLHSSPSDTRLIESRQVQNEVARISNGQTKCVFLILREAINRLKLHPKDFSLILDDKYLVAVAVHRYSSTTPQELTFTREIIRRSTA

SEQ ID NO: 123343 - protein, 166 aa, Heterodera glycines
  unsure (1)..(166): unsure at all Xaa locations
PRFYWFYEGKLYMWLQAFIAYWGYTADYDVYEYGEDIRKYGEKDRVLVIVNHQSTADVPTLFTVLQTKGVATRKVIGSAFGIIGRMHGDYFIQQGKATRDKELIRLKGHLQKVFWDRDRRWVILFPEGGFYFCFQXYAKENNFPHLEHCTLPRMGEQQINYKIILK

SEQ ID NO: 123344 - protein, 75 aa, Heterodera glycines
  unsure (1)..(75): unsure at all Xaa locations
NVDLSVFQHXNLFLYPQEHFPHATYSPLISXEKAYHNPLSVSXIPNTSFEPAKQKIKSDPHFGNYVHMCLLYRGD

SEQ ID NO: 123345 - protein, 216 aa, Heterodera glycines
  unsure (1)..(216): unsure at all Xaa locations
VPFDPISGFMATXMLEPSDRMPRFNGWAIQRKDGNASGKTLLEALDSILPPQRPTDNPLRLPLQDVYNIVGIGTVPGGCVETGVLKPGMEVTFAPPSISTEVKSLEMHQEYLPKALPXDNVGFNVKNISVKDIRRGSVASDSKNNPAKETKSFTAQVIIMNHPGQIAAGYTPVLDCHTAHITWKFAELKEKVDRQSGKIRDDNPKALKTGDAGIVH

SEQ ID NO: 123346 - protein, 145 aa, Heterodera glycines
PRCHITSTGAILLADIIPSLIIKLFSPFIIDRVPFGFRHLLVCIMQALSFVIVAFSQSFTLSLIGIIFASLGSGLGENCLLALSSHYKRSTISAWSSGTGGAGIVGSVAYAALTEPKLFGLSPRNALLSMLIVPIIFAIASVIEF

SEQ ID NO: 123347 - protein, 183 aa, Heterodera glycines
  unsure (1)..(183): unsure at all Xaa locations
KLAALVVNYGSGMCKAGFTDDDAPRAGFPSIVGRPRHQGGMALHGYRTTTYSVEDYVAAPSRDILTLNYPIEHCILTNWDHMEKIWHHTFYNKMRVTPKDHPVLLTXVPLKPIANTQKMTQIMFDTFDTPAMYVAIHAVLTLYISGRTTCLTLDSGYGDTHTVPIYEGYTLTHTILTMDLGGR

SEQ ID NO: 123348 - protein, 201 aa, Heterodera glycines
  unsure (1)..(201): unsure at all Xaa locations
LEKKKSGGFNTKKFLLDLTSSGTAAAVSKTAVAPIQRVKVLLQEKDASIHITADKRYKGVIYVLVRVPMEQGFLSMWRGNLDNVIRXFPTQALNFAFKDTYKRGFTLGVDEEKQLLKIFAMNLASGGAAGATSMGFEYPLDSARTRLAADAGKADAREFKGSADCIMKILKSDGPIGLYRGFFVDGQGIIIYRAAYFCCFD

SEQ ID NO: 123349 - protein, 198 aa, Heterodera glycines
  unsure (1)..(198): unsure at all Xaa locations
MAWLSRATFCPHQLHQKAVKTPLQKAVTSAAERALDIVGNASRVRLQDLRDNPGARTVGRQVRXEGHYQAGHTIGELQHASKPPLGWVWGDYYKPWQRSFDGDRRFNGDINLRREYIPISLVELQRLIDLGWLDTSRLVDIAAICATKLLEQKFKPELRQFGIHLTDEREEIFSTPINLEVQWALGTAIAAIERAGGR

SEQ ID NO: 123350 - protein, 171 aa, Heterodera glycines
  unsure (1)..(171): unsure at all Xaa locations
DSTDQYGSVFVESGCRRSPLLRLFSPQNKALLWRQLWIWLAESERELGLEAQISAEMVAELKAQKHNINWDKIRANERTMKHEVVAHIHAYSEVCPLAKGIIHLGATSSFVQDNTCLILQREAIDHLLERLAIXLGRAADFAQNTPIFDPWAHHFQAGVVTTVGKGPQLWP

SEQ ID NO: 123351 - protein, 69 aa, Heterodera glycines
LISILDLLEAWINEFPPEDMGLQRFGNKSFKKWFERLMSDGQSLLSDLFPENLKSAVLEIWPYLMDSFG

SEQ ID NO: 123352 - protein, 104 aa, Heterodera glycines
  unsure (1)..(104): unsure at all Xaa locations
SAALLQNYPRCLERERLQRNPSGWEFGKNRAQHNFIYRVIFCPTINAIAARVTHYXDGIEIEASAPVKTVHSQLYSLTDVSAAYNIGRMMAHRCHMAAIEHCMS

SEQ ID NO: 123353 - protein, 87 aa, Heterodera glycines
  unsure (1)..(87): unsure at all Xaa locations
SSVVSGQRIIIYRAAYFGCCDPSNMLFSREGKQMNFFINWAIAPVFTVASIVIHYPRDTXPKRMMIXLGREDLMAQNFGDCAVKIFK

SEQ ID NO: 123354 - protein, 148 aa, Heterodera glycines
  unsure (1)..(148): unsure at all Xaa locations
GRRPALYYRCLRNKPYPKSRFCCGAPDPKSRIFDLSGKRGSVDEFPCGVLLISNVWEHFSSEALDAARICANKYMVNNCGMDVLHMSLRIQPFRVIPINKMMTCSGADRLHTGWRXSCGKPLGLLARVCIGDILTTDRVRDWHRALAL

SEQ ID NO: 123355 - protein, 279 aa, Heterodera glycines
KMDLLEIIALKRKQIEDIAIEHGSGAKMIRHSDLFKKEKDAYLERQKQLGKEQHLSVKGLNTEELLDAKFSLTGSDSMPRPEVVRRLRARGQPIRLFGESDAMALKRLRRLEIEKTEQNEGWKNDFQAALSQVENEELMEQVIRGKRGKDEMGRHDVQIEQSEDDASWDQIVMMAPLLGSGNDQADCDLIRAFLSYILKRWGKELNAREESIKRSATGKMQAGMHKQTVEHLSPLMKSLEKYTVNNDIRLYLTNITKLCVVERKYIVASTAYMEMSIGN

SEQ ID NO: 123356 - protein, 276 aa, Heterodera glycines
MPTLNLSSFAPRRLFSTTAANFCCHSTIGLVASPMPTATGFAAYARFSTSDGPPSGSSAPHNNQLASPKPSADKMAEMGNADEEFDENGRETRERIGTIPNIICMLRMASTPLLGYLVVHEQYLPGCILFVLIAFTDILDGSVARHFPSQRSLLGTFLDPIADKFLISTLFITLTYMQLIPVPVTAIVFGRDLLLVLCSIVLRFKMVDAPLTVRRFFDPTVSPMRIQPTSLSKYNTFLQLSLVSLSLAAPVFNFPGHYALQGLQFLTVLTTVFSGL

SEQ ID NO: 123357 - protein, 232 aa, Heterodera glycines
  unsure (1)..(232): unsure at all Xaa locations
MVKPKVGINGFGRIGRLALRAAIEKDTVQVVAVNDPFIELDYMVYMFNYDSTHGRFKGKISTNAGNLVVEKEGKSAHTIKVFNLKDPAEIKWGEAGAEYVIESXGVLPPLRRALLIFKRCKKVVISAPSADAPMYVKGFNRNSTTRLRDEXNNHASWPTTCLASVGKVINDKFGFIQRLITTVVAVTAHPKTGDGATGKHWPNRTCAGQKFFPPTTGXAKGVGQSFPEFNEN

SEQ ID NO: 123358 - protein, 214 aa, Heterodera glycines
MSNPLSSSFLCRKCFLRPVHFHSQQKHGISSLLKGNADNFVVVMSNSYLAEGFTETFKFLSSVSLLGPSSSVLLLAVGLRLATVPVRILTEKLTSQRLMMVHLVRKQVYEKIGSHYGIATTFDAVNGKWTLNTRDSLIRKSADELSEENVKRQVNDQKLTMSRLVMLRYCLVPIWIPCNFGILRYVEGLFGQQIPGFFGLDSFTLPDPFMVFRF

SEQ ID NO: 123359 - protein, 197 aa, Heterodera glycines
MLSKITVVLAFLCLLLALLVGIDAQQSQWEQKQNRAAPRGLASVTLRRMDTVRSRLAAAGSLVQFRKHLRQALRQRLDRLYSDKMARADVAFDTDAAAREGIDEVLRNYMDAQYYGDISIGSPPQNFTVIFDTGSSNLWVPSKKCSFFDLACRYHSKYDHKKSSTYQPDGREVAIEYGTGSMKGFVSKDTVCIMDGM

SEQ ID NO: 123360 - protein, 104 aa, Heterodera glycines
  unsure (1)..(104): unsure at all Xaa locations
LDIGPLGGVFLLAMVLRDCLFXNLNQQNFXYAGEAKYFGTITLDEATRKRCEHLPWFVMFSSITYGRRNAGQTIYXGWSHSTMESIIGQRRADGFPAIXIRWGA

SEQ ID NO: 123361 - protein, 101 aa, Heterodera glycines
PNGMRTALKLTKHRQEHRWNDERYEKTNRGTRWKADPCGGACMAKGIVLDNIGDEAKQPGSAIQRCVRVQLIKDRRKITAFVPNDSCLYCIQDNDEVLVSG

SEQ ID NO: 123362 - protein, 211 aa, Heterodera glycines
  unsure (1)..(211): unsure at all Xaa locations
FLNGTTTLYFVYKPKTPQDKGGVIVAVDSRATGGTYISSKTVEKIIPINDQLVATMAGGASDCHYWTRVESEYCNLFELREGTQISVAAANKYFANVMYHYRGQELGVHSMVCGVDKFGPSIYVVXAEGTHLNIDTICSRLSGMLHSMHILDTKYNEAMTDAEALELGREGIEYTTFRDAASGGHCNLXHITSEGQTIYAPFDVGDKYYEF

SEQ ID NO: 123363 - protein, 131 aa, Heterodera glycines
  unsure (1)..(131): unsure at all Xaa locations
ANESFQKWSKRLMADGQRLLSDELPENLQCALXLEIWPYLMHSLGNXTLTEXGSSRETSFLIFLFCLDQIGVLRSPDNDRASILWIFHPYLKLARRLQSEYRMEPCGSKGDPAIDDFHLWALLTGRARLID

SEQ ID NO: 123364 - protein, 59 aa, Heterodera glycines
SKGNSLDLLIGHHNIDIVSRCHGLNHACHTVLANGREYHFHLMPSRLASQKVLNIVGNG

SEQ ID NO: 123365 - protein, 163 aa, Heterodera glycines
  unsure (1)..(163): unsure at all Xaa locations
EAFVLEACRTPLGSFRSQLGSWTWTALVSECITKLLKRSNGPAKETHHVYLSQVCQASGANAPTRPAALGSALDVAAAVCTVSSVCRTGLISSMLAAAIIVLNHQXLDIGGEMESMSHVNFYLERGKLPYGGAKLIDGIARDRLTDAYYSEHMSDCAERTAKE

SEQ ID NO: 123366 - protein, 209 aa, Heterodera glycines
  unsure (1)..(209): unsure at all Xaa locations
KYRMAGSPPPMARTVTTTKLSRAQKGHXLTEEKRGCIQYAYSQEILKKITENQKRLADGQKXQLFLMRKAKFTAGDSSHMVELNEASPAQNTLRMNRQNVVGDCLPVIQPHREDGSDGDTYYLTGLDQGGANSEKLKRYYNDAGELLVEMPTLATGFITLHEAIKMTNRPENTLELIIFPKTDNTPTHLVTEFDXTDRDEFFLMTNIRA

SEQ ID NO: 123367 - protein, 223 aa, Heterodera glycines
  unsure (1)..(223): unsure at all Xaa locations
IQVELTRLRELDNDYPILDVDTEYPRDIATAAGRFRRKEDVNYLPVKLQVDCLKLIQVGFTLMIEGGQLPPSRVFXHFILHFDPSIDSFAHNSLELLPTEAFDFNXHHTEGILLEDCGELLTTSGLVADRRITXLTFHSCFDYGHLIRAIMLVKLPEDDQDFFRYHRKLIPNRFHFEILLRLTGSRDTMLNGRLQELADQLHVPRIATCHQVGSDSLLTAMTF

SEQ ID NO: 123368 - protein, 134 aa, Heterodera glycines
  unsure (1)..(134): unsure at all Xaa locations
SQQAITKKRKAVQYGIFRAELYNFLMKEMXRKRIPVSXVPNAPSRTELMLMGTRTQCVLGXRGQCIHQLXARVQKWLGYSSEQIELYDEKVSSHDLCAEANCDHLRINLVGGLHXGHAGYCVLLFIVESNDSGC

SEQ ID NO: 123369 - protein, 235 aa, Heterodera glycines
  unsure (1)..(235): unsure at all Xaa locations
NIRGSKADADAVLTTLGPRAMDIMILSGDRKVTITHDGATILNHMSVVHPTAKMLVKLSMAQDIVAGDGTTTVVVLAGSLLDAAXKLLAKGIHPTTISDSFQRAATFSETVLEEMATPIDINDDDELVKLTMTSLNSNVDSQYSHLLTPMAVPAVKKLMSSPEDSSDHLKXIKGDNQLGHTVDESQLIDGALIDHKSMGHXGPAQVENAKIGLIQFLFSPXKPNMENQVVISDYA

SEQ ID NO: 123370 - protein, 245 aa, Heterodera glycines
  unsure (1)..(245): unsure at all Xaa locations
MAPSYPLASLYVGDLHPDVTEAMLFERFSNAGPVLSIRVCRDAITRRSLGYAYVNFQQPADAERALDTMNFDMILNKPIRIMWSQRDPSIRRSGAGNIFIKNLGKEIDTKAIYDTFSMFGSILSCKISTDIDGGSKGYGFIHFETEEAANSAIAKVNGMLLDGKKVFVGKFLPRSARDKQIGDPSSRFTNGYVKNFGDAMNSEKLSEVFSQFGEIISAKVMEGXQRQSKGVGFVAYKDPESAARA

SEQ ID NO: 123371 - protein, 139 aa, Heterodera glycines
PHAKVESDEEGGAESGDEETAKERAAIEAAEDAAGELHQRLNIGAEKQHTGSTLTQPAPAAPTAGRVIIRDYDPKKSRGGPVSKTAAASTEKYIISPLTNERIPADKLHEHVRYNTVDPQFKEKRDRCVLAKGGLSLEV

SEQ ID NO: 123372 - protein, 132 aa, Heterodera glycines
DESVSASAAAIQERERRERLLTISDAMKFYLERKHDHMAILDKENLLYTQGKRHLANIMGFNPDSIIGDQISHSIRYLFPSGLFHNEALPVMKPPEEVFPKIVKIDVDSSGSPNHSLFFTAEPKFYSLLSDI

SEQ ID NO: 123373 - protein, 88 aa, Heterodera glycines
  unsure (1)..(88): unsure at all Xaa locations
GRASITDIEFGPYYLGXXLGACTSSGRLIIYEAEDIMALDNWNVLHDYEVRKNRLSSLWWRKNGFDAPHIVVSFDDVDAAPAEKVFVF

SEQ ID NO: 123374 - protein, 183 aa, Heterodera glycines
  unsure (1)..(183): unsure at all Xaa locations
MCDEEVAALVVDNGSGMCKAGFAGDDAPRAVFPSIVGRPRHQGVMVGMGQKDSYVGDEAQSKRGILTLKYPIEHGIVTNWDDMEKIWHHTFYNELRVALYEHPVLLTEAPLDPKAXREKMTPILFETFHXPAMYVGLQARLVLXASGRTTGLRVELRGWGHPNPGPSTRGIALPQAFFRLDLA

SEQ ID NO: 123375 - protein, 274 aa, Heterodera glycines
MKAVFLGLMIRRLIEAEKGVCEADDRDFYGNKRIELAGSLLSLLFEDLFKRFNSELKRIADSHLNRNMAAPLDIVRHMRQDLITNGLVNALATGNWTIRRFKMERHGVTQVLSRLSYISVLGMMTRINSTFEKTRKVSGPRSLQSSQWGMICPADTPEGESCGLVKNLSLLSHITTDSDEAPILQLLYNFGVQDVRPLKFSVVHERRYHIVFLNGSIGGITDDVEKIIGTVRLMRRRGNLGCLCLGRFQHRHKCAVFGHRGGRLWPPYGIVENG

SEQ ID NO: 123376 - protein, 182 aa, Heterodera glycines
  unsure (1)..(182): unsure at all Xaa locations
EEAAALGADNGSGTSKAAFPGDDAPRTALPSSAGRPRHHGLMAGMGQNDSYTGNHAPPKRGTPTLKNPIEHRSASNCDDVEKSWDHTFYYELRDAPDERPELLTNAPLNPKVYXETTTQVMDETYNTPDMDAAIQAVLALNASGRTTGLAXDSGDGVGLSEHICXGYDLPHAIHGMDLARRD

SEQ ID NO: 123377 - protein, 192 aa, Heterodera glycines
MVLLFLQLALILLCSVFAFIVMMRKHRKYWSNRGIPSPTPQLISGNFGSLYGDYPSMFQLRDWTRQYGKQYGVQYGWRNALVISDPALVHELLVTKFEYFHARNLTPIFGNTDTNKWISMFLARGGRWKRLRMIANPAFSVANLKKCMCLIDDSVKNAINFLEKARNKGESFNIHRHFVEMSFDVIARVALG

SEQ ID NO: 123378 - protein, 211 aa, Heterodera glycines
  unsure (1)..(211): unsure at all Xaa locations
CYEQVAALVADTGTGMSKARFTGDDAPRAVIPSIVSRPRHQGVMVDMGQNDSCVGDNAQSQRGILTLKYPIEHGIITNWDDVEKIWYLTLYNELRVGPHEHPELLTEATLNPMAKIETMTQIVFKTFNAPAMYVAIHAVLSLYASSRTTRLVLDSGDGVSHTVTIXEGYALRQGILRWDLDGHDLTEXLMTILTERGYSFVTTAEREIARE

SEQ ID NO: 123379 - protein, 285 aa, Heterodera glycines
  unsure (1)..(285): unsure at all Xaa locations
VRRWRCIEESVGFNTKKFLLDLASGGTAAAVSKTAVAPIERVKLLLQVQDASIHITADKRYKGIIDVLVRVPKEQGFLSLLRGNLANVIRYFPTQALNFAFKDTYDFFFTQGVDXEKQFLKFFAMRLASGGAAGATSLWMGXPLDFAGTGVGGDGEKADGRGVGGWSGGGGRGWGGRGAVGAGGGWGGGGPGGGVERGGGSVGRGGGGRGGGRAEGGRGGGVGGAVGRVGGAPGVGWGGGVSARRGGGAARAARADCNGGPRPGGACGGRGLGMAPGRKGGRGGG

SEQ ID NO: 123380 - protein, 74 aa, Heterodera glycines
  unsure (1)..(74): unsure at all Xaa locations
LTTHGSLEHSDCLLMVDNEVIYHICPRNLEVERSSYTTLKRLISXAVSSMTAXLRCDGALNVHLTEFHNCLVPY

SEQ ID NO: 123381 - protein, 172 aa, Heterodera glycines
  unsure (1)..(172): unsure at all Xaa locations
XAGEDAPRAEXPTXXGRPXXQGXRXGRGQKDAXXGDEAQXKRGXXTXKXPREHGTXTNGDDXEKSXHHTXHFFFAXPPPRSTRVLVTEAPLNPKANREKMTQIMFETFNTPAMYVGIQAVLVLYASGRTTGLVLDFGDGGTHTVPIYEGYXALPHAIPRLGLGRGGTSLDYG

SEQ ID NO: 123382 - protein, 141 aa, Heterodera glycines
TDDDTLKYWVCDSHVGPHNMDYQMDHYAWIPLSNGIHILNIPQTRERLLLAIRAISAIENPSDAVDGSAPPNTPRPMLPLACHICATPIGGRFWPGSLTNRSLMNFLEPRMLAMGHDSLYHKENREVPYINHPILTLVDTD

SEQ ID NO: 123383 - protein, 187 aa, Heterodera glycines
  unsure (1)..(187): unsure at all Xaa locations
VEIKXXGKWXXNXVXVXEIXXVDYVXVKEKGXKYLXXXXGXXXXKXXXKGXCXVVEXLXXXMMMXGLNXXKKXMXVXIVKXXXEXIXLXXGEXXXXVLVNGVXXSGPXEDXKXIXXXXXVXXKEXDVXXLXXXNXGIWLXCXGFREXGFRXIKKXGEWFGDELMNXXKGXKNXXXIKKKEELEGVXK

SEQ ID NO: 123384 - protein, 225 aa, Heterodera glycines
MSSDDQSDKECPLCMEAFDIDDINFYPCNCQYQICRFCWHRIRTNENGLCPACRQSYPEDPVNFQPLSSADVRKIKSEKKQKVQQQKNKVVESRKHLAEFRVLQKNLVYAVGLSHRMADPELLKKPEFFGKFGKIIKIAVGAAPAINSAQPAVHTAYITYTRSEDALRAIHAVTNMMVEGRFLKASLGTTKYCSNFLKGQACHKPECMYLHEGAEDQISFTKEDM

SEQ ID NO: 123385 - protein, 42 aa, Heterodera glycines
SNQEIAALKEDNGSRMCNAGFTGHDTPHAVYPSIEGRPHHQG

SEQ ID NO: 123386 - protein, 268 aa, Heterodera glycines
  unsure (1)..(268): unsure at all Xaa locations
GRSVAELKQRIDELTXEXENTQRELRGALAELQKMKHLYEKAVEQKEALARENKKLQDDLHEAKEALADANRKLHELDLENARLAGEIRELQTALKEADAARRDAENRAHRALAELQALRIEMERRLQEKEEEIENLRKNMQFEIDRLTAALADAEARMKAEISRLKKKYQAEIAELEMTVDNLNRANIEAQKTIKKQSEQLKVLQASLEDTQRQLQQTLDQYALAQRKVSALAAELEECKTALDNAVRARKQAELDLEEAHGRINDL

SEQ ID NO: 123387 - protein, 121 aa, Heterodera glycines
  unsure (1)..(121): unsure at all Xaa locations
AALVGGHGSGMCKAGFAGDDAPRAGVSVICGRPRHQXVMVGMGQKDSYXGKEGQSKRGILDLXYRMENGSVTNWDNLKKILDPPLLKQIWCRPPRNTRGFFPKAPPLPRRAHKKKITPILF

SEQ ID NO: 123388 - protein, 247 aa, Heterodera glycines
  unsure (1)..(247): unsure at all Xaa locations
CDEEVAALEVDDGSGMCKAGFAGDDAPRAEFPPIVGRPRHHGALVGMGQNDSYVRDXAQSKRGILTLKYPIEHGIIAHWDDMEKIWLHTIYNELRVAPEEHPALLTEAPLNPNAIREKMTQIMIKTFITPTMYVAIQDVLSLYASGRTTGLVMDSGDGDTHNVAIYKGYVLHRDILRLDLVGRDLTDYLMNILTERGHSFLTTADRDIVRDINDKVCYETLYFEQEMVNADSSSAVEKSYELTDCQV

SEQ ID NO: 123389 - protein, 234 aa, Heterodera glycines
MSSISTLRRQVKNVACNYTDAQVKVREATSNDPWGPTTVLMSEIADLTHNPVSFTEIMSMVWKRLNDHGKNWRHVYKSLVLLDYLIKCGSEKVSAQCRENLFSIETLKDFQHIEDNRDQGLNVRAKAKQMVALLQDDEKLKNERARFLLTRKRFIQNGSSGISSDGSRRSVGRRNIETGATDPEFEEARPSSLGEEEMQLQIALALSKEECEKERELRRGDDIRLQIAIEESKR

SEQ ID NO: 123390 - protein, 172 aa, Heterodera glycines
MNSSSPVGYIPLLYRDRPEWRDVTPIYNSAEENAVVRIATSEEFDDAFAYLRAVMNANELSERTLELTQTCIAQNPANYSVWLYRRAILRALNKDVSEELRYCEEIIIENPKNYQVWHNRKTLVDESGIYAAELPFIAQQLHDEPKNYHAWQHRQWVVQRFDLFNEQEMDFA

SEQ ID NO: 123391 - protein, 74 aa, Heterodera glycines
EEERWIHTKKFLLDLASGGTAAAVSKTAVAPIERVKLLLQVQDASNHITADKRYKSIIDVLRRGSQEQGFLALW

SEQ ID NO: 123392 - protein, 190 aa, Heterodera glycines
MSKPDLDYLSQLLKDKKQLSAFPNIFAHVERLVDEEINRVRVSIFQCEFSHEPLQLPEPIGEVTVRQEKVFVPVKQYPEYNFVGRILGPRGMTAKQLETETGCRIMVRGKGSMRDKKKEEMNRGKPNWEHLSEELHVIIQCEDAPNRAEVKMARAVEEVNKLLVPAPEGEDDLKKKQLMELAIINGTFRS

SEQ ID NO: 123393 - protein, 211 aa, Heterodera glycines
  unsure (1)..(211): unsure at all Xaa locations
RYSLFDGRVRELPLLEXEYIKRHLVSRQSSFSHFKCQLNGVLFEYIHSFAFVVXLTPAEIVLKAKVYKSAPPXFHCEAGTIVMPREIPASGEMVLTLRPSACTGSSTEVYFLEHLQSIVSLNSSRRGDSTLYLISPTGTPLMILSRRPKDGDAKKKFSFWPFVALLSWGAPPRGRWRLVVRFLSGCFAPLGLAFRGPLTXFSLLLLGSXEP

SEQ ID NO: 123394 - protein, 239 aa, Heterodera glycines
  unsure (1)..(239): unsure at all Xaa locations
CHKKCSALVGDCGPRMRSACLARYHAPRAVFPSIVARPPHRGLVLGMTQRDSHVRHDAHSKRDILTLKHHSEHRLLPLXDHVENMWHHIFYHDLRVPPEEHPALLTDAPLNPRAHRKDMTHIVLDTLHTPDVYVDIQGALSVYLSGHNTGLVLHSGYGVPHSVPIYEVYAVPHDILRLHLRGRDLSDYQKKILSERGHSLETTRERDIARHLRENVRYVALHFERDMDSGVFFSSGEKI

SEQ ID NO: 123395 - protein, 95 aa, Heterodera glycines
MDNFASVYRHMLAGQLVIRLVSFLLNFALLRLVDPSLLGFFNVKMTLLYTTICFLSREPIRRLCLSSDFPLHKVPSYASLSPVRCSPWPPFPSAV

SEQ ID NO: 123396 - protein, 175 aa, Heterodera glycines
  unsure (1)..(175): unsure at all Xaa locations
MNDVSAPDNENVEQKSTVCRAHKNSERQAELKRHYXTTKDERIQRYQGLXLYVHNLHHTLNDETLRSNYESYRHLPSAKGMRDEHGRSERFGSVCFERADKATDAVVEMNNKIIENEPLYLALAXQPEEDRTAQLASQXLQRLAAMRMHNPAGLMLTMYAPASDGFFLPQAIYNQ

SEQ ID NO: 123397 - protein, 236 aa, Heterodera glycines
  unsure (1)..(236): unsure at all Xaa locations
EIAALVEDNGSGMCKAGFAGDDAPRGGCPTIVGRPRDHGVMVGMGQKDSYVGYKAQSKRGILTLKYPIEHSIVTNWDDMEKIWHHTFYHELRVSPEEHPVLLTNGPLNPKDNREKMTQIMFETINTPAMYVAIQAELSLYASGRNTGLVLESGDGVTHTVPIYEGYALPHTILRWDLAGRDLTDYLMKILTERGYSFMTTVERDIVRDIKEKXCYVALDFEQEMDTAACSSSEENS

SEQ ID NO: 123398 - protein, 116 aa, Heterodera glycines
MWHGRISRGDDAPPRGCFRSIVGRPGHQGVMVGMGKKNPTWKTRPIQPGILNLNNPIETGSYTMGNKLKKIGPNLLKKKWVPPPRKPGLFKKAPVNPKGKKKKITPNLVRKFKNPG

SEQ ID NO: 123399 - protein, 78 aa, Heterodera glycines
  unsure (1)..(78): unsure at all Xaa locations
DAALVADNGSGMCNAGFTGKDAPRAVFPTIVGRPRHQGVMVRLGQKDSYLGDXAHCKRGILTLKHPIEHGIIPXWDDM

SEQ ID NO: 123400 - protein, 222 aa, Heterodera glycines
EAPSATMETKVAGGGAAPKRVWRWTLSQLRQTDGIIPSQGGWNKGDSQKLMTNFGTPRDTTTKVKVENLAEIREDILLKSHGEVRLQSGTNRFASHKGFDSIGTGRDVCREGVNVNILPADLDPLPEETIRASDWIVRLHAGATRFYSQKGVTLFGTGRPETTRMKESTHPEYSHERDIDNTEIPLLMGTNKFASHNGMTGFGSKRRETTKMLDTSPPEYSH

SEQ ID NO: 123401 - protein, 137 aa, Heterodera glycines
  unsure (1)..(137): unsure at all Xaa locations
PSVQSPTDPLYPFPXYLKNDGQSNGKPRLDLNVEKAWALGYTGKNITTAIMDDGVDYMHADLRFNFNAEASYDFSSNDPYPYPRYTDDWFNSHGTRCAGEISAARDNGICGVGVAYDSKVAGIRMLDQPYMTDLIEA

SEQ ID NO: 123402 - protein, 242 aa, Heterodera glycines
  unsure (1)..(242): unsure at all Xaa locations
CNGRFASDDGPRTACPYTAGRPRNKGAMRRMGQKDTGPGQXAHPTRAIPTRKKPNEHRIYTDWDHVEKMWHHLFYNQLRGTPEDHPELLTKDPHKAEGSTKKRTTVQYETTRTPAMNGDIPAMLAMDHYGRNTGNQLDWGQGVAQTETRNQGEAPHQDIHREDSASRDNTEYKKTNRHGARDSFVTTARLRDRTRPPDKMCYXGVHFEQELGKVRAAPSLENSSQPPDCELITDSKDRLRGP

SEQ ID NO: 123403 - protein, 242 aa, Heterodera glycines
  unsure (1)..(242): unsure at all Xaa locations
QRFCILANSPLSLIAASLATKDLFALASNHSTTYAKRPMQAKHANSATSGKIAKNIAXIWREGLTSVRXNNVVNSHILGFENDXVSINVAPNQLMHETPAQYIPIRWLKWLCMRPRHTMVTLVGNSSTLSEKLNWPEKRAMTRAKDQGDCGSWWTFTDNGTIEGALGXKTASKSISXSERNLVDSASKYGNKGCDGGLMDSAFEYVRYNEGLDTDEAYPXEAETGKCRCQNETEGGTAVRFK

SEQ ID NO: 123404 - protein, 153 aa, Heterodera glycines
MLPTPTFISDCHTVGAYRQKIDHLFNKYACDGDDEAHKAGPDRICPYGMVLFLHDLYITPTIPAVMVLAWKLRAHKRCKFTLDEFHHRIATLIPTGAEDINRLRTILLKAEQDFCAERTLFRELYQFIFISVKAAEQTSIKLDAAPACYQMLL

SEQ ID NO: 123405 - protein, 106 aa, Heterodera glycines
TLNTYVACEAIQQVTAPCVWNDQQCELSIQLDRGIKLSTTGDGQMLWQYPFEAIRATGDDGQQFLWMDFGEPIGEQVSERTEQHETLTKTKKLKIVFYGMIILKNY

SEQ ID NO: 123406 - protein, 73 aa, Heterodera glycines
AGDRGTFGTSGGDRATIAPHNPDIKRTRAHLPSGGKRENPAATHVMIVVVAARGPTGRKLKKARPDYHPIRAN

SEQ ID NO: 123407 - protein, 159 aa, Heterodera glycines
  unsure (1)..(159): unsure at all Xaa locations
IRTCWVWRKNNRWXRYLPRRNDSHNLIDMDELGEQCATFSDPMPADPPKLWVAWLYTDSYGSGRXIRDQVTKLFGKDAKTGEMQVFKNTLSTNKQLWKNKHLLEXRAVTFPNGEPGAGNATHLEIMADGRCVIHPQNLANVDQFPLIGRSKPVSPRYLA

SEQ ID NO: 123408 - protein, 193 aa, Heterodera glycines
VLEGCDPADVDVCMASYTKSFGAAGGYLAGKSSLIAHLRRHSPTSFYSLAMSAPVAQQVFTSMSIIMGRDNTDQGWRRIERLARNTRYFRLRLKQMGFIVYGSNDSPVIPIMIYHPTKCGLWGRLLLERKISAVVVSFPATAMTESRCRICISAAHDKEMLDRVLDAIDEVGDISATKHSHRTHRYRQLDVKW

SEQ ID NO: 123409 - protein, 218 aa, Heterodera glycines
ESVVDICVSTLMSKLQNYTEDQLQNLLHDESRLNAMVDSMPQVSSLPNDKEIKLAHSKSLAEYNLSIEPQLNKALNHLRETHANAVRTKGEVNEMKAKLDSVAEARSLDSVCVSLKNLAQNAEDESETAAELFYKGAMEIDDFIKKFTEKRVIGHTTRLKAEKLAELLRQQCQYQPQHPSPSALGMTTQTQYSSPGVAASMYPVLGQAYTSPANFRHS

SEQ ID NO: 123410 - protein, 152 aa, Heterodera glycines
MGRMHAPGKGISSSALPYRRTPPSWCKVTPQKVVETICKLAKKGMTPSQIGVTLRDSHGVPQVKNITGNKILRVLKSNGLAPEIPEDLYHLIKKAVSVRKHLERNRKDKDSKFRLILIESRIHRLARYYKTVGQLPPTWKYESSNAGALVGM

SEQ ID NO: 123411 - protein, 181 aa, Heterodera glycines
CSEGQFKMILKFEVPLIQCALRSAGCDNVGLTLIVSNKLQNVRFFSKQIQPNAKPPEQNIKPGTVIDTAVVHPSNCEFFLNSHRTLQGTARTPKYTVVYDDNKFSLMDLEEMSYHLCFGHQIINSIVSLPAPVYIANEYAKRGRNLFNYYDAPRDMETFADLNQKLCLEHAGWIAPHRVNA

SEQ ID NO: 123412 - protein, 260 aa, Heterodera glycines
MQPFVHWSKCIFKRPFSNSSKLFSSSFSMGFNFEFTEEQKQLQAAVKKFTQDEIIPKASHYDKTMEFPWEVIKKAHANGFMNVDIPSDCGGLDLELVSNVLISEVIGYGCTGIGTAILGNDLAATPLVIGAKEEVKKKFLSRLIDEPIMASYCVTEPGAGSDVAALKTKAEKKGDEWVINGSKMWITNGGVASWYFVLARTDPDPKASTGKAFTAFVVDGNTPGIVRGKKEINMGQRCSDTRAISFEDVVVPNAQVIGAP

SEQ ID NO: 123413 - protein, 221 aa, Heterodera glycines
MITADFHASHPSLGPSQIVYRIDQLPNTLRLSLNNFSLPLFRQFTQLDIDQGTVALEHTPSSEMAKCDVIGLRIGMEGHEDGHGQQQKASPQFVHSRVLAIRIDPMALLSSAHLGAESNGERSAIIYNVTKRPENGTFFWVDREKEAGSFSQRSIDRGEVLYAQMNMEAFQDIFEYVLSNDEMELLPKKGIVRVQPVFQPPPTHAPLLSLVWPISTPLRLK

SEQ ID NO: 123414 - protein, 84 aa, Heterodera glycines
  unsure (1)..(84): unsure at all Xaa locations
VSQYVNKRISNHYKATIGADFLTKDVMIDDRLVTMQIWDTAGQXRMHSLRDSFYRDADWCALAYDGTHAPSFXSLKSWRDDFLV

SEQ ID NO: 123415 - protein, 276 aa, Heterodera glycines
AVDKTREQETRQRYNLPRVSGLMRPFPDTSTGSIYSTLTLNEVNSEAIRQQIINYYRIPGSGERFTDYQQQALNQFQIPTDNMFTTSKEEDKKFEAFPEASIKSEPIYKTAAIYETPQYRFVPRTGAVLMQMLQQCNDLANRETIGLQPYQGQMYWDWASQCPDNPGKILQECGDNVPCLYDYTLLNAEVLGNEVKDTWNAFFHDRWSAIQNYNSCGPINIEYPEYLIKTPALSSGYLQGDIARFECFQTHWIKGDAEFKCTQVVDYNFPQMWRFE

SEQ ID NO: 123416 - protein, 52 aa, Heterodera glycines
MHDANGRELKCWAYSKTNNEVIVASRETVYFYDINHCLETGGENRRCCAMGK

SEQ ID NO: 123417 - protein, 73 aa, Heterodera glycines
  unsure (1)..(73): unsure at all Xaa locations
XXGGGGKGKKNTRRKGKVRDKLANMGVFDQATDDKLDKEIISVKRISPRGGAEGLKGRASLGKAGRGGVDQKG

SEQ ID NO: 123418 - protein, 86 aa, Heterodera glycines
KYLERVRSLAHWYIDAVSYTDNDDHGYYNYFLFAVRQSYYGDGSSVHRFDRYGNMYRFYHHPDKERVRIAQILVPPTYQRIALGPP

SEQ ID NO: 123419 - protein, 201 aa, Heterodera glycines
MFYHDPYEDDYSHDKELKQLVQMDDLAIPKFVMPPLGIKPKKFVRKHFGPNSRLPMAQFLKGTTTLSFVYKPKTPQDKGGVIVAVDSRATGGTYISSKTVEKIIPINDQLVATMAGGAADCQYCTRAASKYCNLFQLKEGTQISVAAASKYFANVMYDYRGQELGVHSMVCGVDKFGPSIYMGETEGTRVKIDNICSLRSG

SEQ ID NO: 123420 - protein, 179 aa, Heterodera glycines
RQAISLTPAAVARVRQLIEQRPSARALRVGVQQRGCNGFTYTLDYAEQKNRFDEEVKQDGVNIWIDAKAQLTLLGSEMDFGESKLASEFVFHNPNIKGTCGCGESFNMDDNTTMGAAAVTNSSTAPTEMASSPERQMPSSTNAQSYWTEGSSSHSSYSGGGSSDYSSGGSSGSDSSSST

SEQ ID NO: 123421 - protein, 222 aa, Heterodera glycines
VHKDSSQKFYCLSPTFKRALFKVNLSPPSQQPPQSSSATHQGGHHRHTSSGHHHSSGMTASSSRAPNRTRTGDDLHIGKYKLLKTIGKGNFAKVKLAKHVPTGVEVAIKIIDKTVLNQSSLQKLFREVRIMKQCIVSDETARANPESLETDRITEMHSIRGCVFSTRALVFVGNGNKVGGFALARASGFKVNLAIARAVKKAARDLFHIELHEDRTVFQDFF

SEQ ID NO: 123422 - protein, 211 aa, Heterodera glycines
MTSRDDEYDYLFKVVLIGDSGVGKSNLLSRFTRNEFNLESKSTIGVEFATRSIQVDSKTVKAQIWDTAGQERYRAITSAYYRGAVGALLVYDIAKHVTYENVERWLKELRDHSDQNIVIMLVGNKSDLRHLRAVPTDEAKAYAERNQLSFIETSALDATNVEDAFTNILTEIYRSVSTRQVPPDRMVPIHSQHNITLSSSTSANKEKKACC

SEQ ID NO: 123423 - protein, 225 aa, Heterodera glycines
  unsure (1)..(225): unsure at all Xaa locations
MQETHIVLGIASVXSQLAIIATVVTLPSLYSEMSQMNSKVRDGVEAFRVNTDSAWTDLMDVQVVVTPPSKPRDNPFNSIFRAKRQLPGHCQCAGLQQPSCPPGPPGPSGPPGQPGQPGRPGAAGQPGQPGANGVVSRPIPGPKGPPGAPGQNGNPGGQGQPGQPGGQGPPGPPGAPGQPGQPGNSGQPGQPGAPGQPGKDSGYCPCPPRSSVLAVKKKMAAAKKA

SEQ ID NO: 123424 - protein, 168 aa, Heterodera glycines
QHTVFIRGLPGNMSTDEIREFFEKDFGACTFDFVKVSPDRTKLYIAVRFDSKAAARKVMFNFSTDGELLGFKVEMTWFRDIRRYLAHCAKQGIRSSRFRGRSDYRRDDEQYKGRGRSRSPTRSPEREEGARSRSASAASRQFNANRRRSQSRSHSAHSHSHSRSLSSG

SEQ ID NO: 123425 - protein, 196 aa, Heterodera glycines
  unsure (1)..(196): unsure at all Xaa locations
AFDQPGRVSFAPCPTGELHLGSVRTAXFNFLWARKYNGKFVLRIEDTDRERLVEGSEQRIEQTLYHFGLTPDXSPLRGGQLGSYYQSERMPLYRELADQSVDIGHSYKGFCIQKRLDYLHRKANSERIPFRKDGICRQVSTEETRAREQNEEEFVVRLKWDGRTTGFTDIEFWYYEHYSEGGDFLDLKRDGFPTYP

SEQ ID NO: 123426 - protein, 87 aa, Heterodera glycines
  unsure (1)..(87): unsure at all Xaa locations
PFDLWLTQIRQNTKPLMDLCLRPMAFRPPFFGGXFILNGAFANHLPELPLNVDTILGSDSPMENFVTTAPFDVLNPLNFTAIWASTA

SEQ ID NO: 123427 - protein, 168 aa, Heterodera glycines
  unsure (1)..(168): unsure at all Xaa locations
IPSGNEKQGFRMNQGVLFNHRVSLRLSEGHSWYRLRRTRERKGETIRGCIVNLDISVVSLVVGKKGEADIAGVTDVTAPKRLGPKRAWKIAQMLTLSNEDYVLEYVLRREVPEKSGXPESNAPKIQRLVTPLTLQRKRAHHAEKRIRVVAAREAAAFYNNLLADRAHE

SEQ ID NO: 123428 - protein, 89 aa, Heterodera glycines
  unsure (1)..(89): unsure at all Xaa locations
SRKLKPHRQERRWNDKRCKKTPLGTRWKDDPFRGAWMAKGIGLDXIGVESRQPTSAIPKCVREQLVKNSNKITAYVPNNGRLNLIDEND

SEQ ID NO: 123429 - protein, 172 aa, Heterodera glycines
  unsure (1)..(172): unsure at all Xaa locations
HPFPWTRTFKTGQTHYQYICSPDNPVLKQASRRSPATKTQPAELTAADHSVWTRHSAMYANDIAKERGSIGDAVPPFPAXKSPLHLVLEVLPRLQDHYYSISTTDRLDTPLLPLTADELHYNTSHERLDKRECTNSLEDLAPAESTEPVYFSQSQLLLPQHRLQPLIITETP

SEQ ID NO: 123430 - protein, 115 aa, Heterodera glycines
  unsure (1)..(115): unsure at all Xaa locations
XEKXXXXEXXXEEFHETFVHVTDLSGRETIVKITGGMRVKDDRDEASSYAVMLAAQDVAERCKQVGINALHVKLSETGGTKTKKAGFFFQAEMRAHERSGMKIGRIEDGRPIPLD

SEQ ID NO: 123431 - protein, 270 aa, Heterodera glycines
VLSRYCRMREYQSLSFCGTDEYGTATEMKALSEGLTPRQLCDKFYELHKKTYDWFSIDFDFFGRTSNPNQTEIAQDIFNKLFANGFTSIDAQMQLHCANCNKFLADRFVNGICPHCQFADARGDQCDGCGHLLDGVDLVEPKCRICGGKPTLEQSRHIFLDLDRLKPHLQAFLDRTMATSDSRWSANAISITKQWLNHGLGRRGITRDLKWGTPVPLAEVASKVFYVWFDAPIGYLSITKSHLGNDWHRWWKNPDDRELFNFIGKDTAPF

SEQ ID NO: 123432 - protein, 135 aa, Heterodera glycines
  unsure (1)..(135): unsure at all Xaa locations
RHALEIAIGTQILDLSVETHLFTGTLLSERRNVFSQETLNQFMGLSRXCWLEERLHLPSLLVHANPMLIDDSELRERALAAETEAKMHFPDQIGDYTDFYSSIYHATDDGTKVRVKNNDLMKNGNGLPLVYLGRA

SEQ ID NO: 123433 - protein, 73 aa, Heterodera glycines
  unsure (1)..(73): unsure at all Xaa locations
GNKIVRILRSKGMAPEIPEDLYHLIKKAGSIRKAFERFRQDIESKYPSNFXVESRIHRLGXYFQTKRLLPAPW

SEQ ID NO: 123434 - protein, 139 aa, Heterodera glycines
KPTGIRTARQLKKRRQEQRWNDKRYKIAGLGTPWKADPFGGACMAKRIVLEKSGGKPRQPNSAIRKCARVQLIKNSKKITAFVPNDGCLNFIEENDEKLVSGFGRRGHAVGDIPGVRFKVVRRANTALLALFRVNKERP

SEQ ID NO: 123435 - protein, 104 aa, Heterodera glycines
SVRLYSKARILGYKRSQRNQQTNQVLLRVEGVNTKEDTEFYLGKRVAYVYKAERAINGSKVRVMWGRIARPHGNSGVVKVLFKNTVPPKSFGARARVMLYPSRV

SEQ ID NO: 123436 - protein, 253 aa, Heterodera glycines
SFDFLKEHDDCVKFPEKLKSGSCESNGLKPIMITDWDGTMKDYCSRYATNLQPIYTAISLAKFSQAYTRLSAVLTAGPLRGPGILDLIALPKDGPIVFGGSYGREWWFDGKRIVHDEGISDAGLTALDSLSEKMATLLQDNEYAHFALIGSGVQRKVDRLTLGVQTVSKHVDVALSQKYQNEVIQLVQRVDPNSQFLHFAPSNGCEVEVMVHEQGKVWTKAKGMAKIVGTLGESLEKGTVLICGDTHSDLPMV

SEQ ID NO: 123437 - protein, 224 aa, Heterodera glycines
MDFEYIVANPSEGGTDSAFLDEDFEGCNCTDGQCCTSAAGGCSCLPGKRDNYNPITGKWIDQGGTDQRQGVPHLECHQNCVCAWEPDKCANRQVQFGVRQPIRVAPCTSGKGFGVFASALIEIGTFVIEYVGEVLGEEEARRRINIVGRHEHNYLFTIREFFGGECRSTFIDARHKGNISRFINHSCEPNLSLQIVRLGRQCPSLAMFASRDIQSGEELSYSYG

SEQ ID NO: 123438 - protein, 89 aa, Heterodera glycines
SITPWGGPAYLHRGSSRKDLLADMEPNGVDIFRVAKKISPNIVYFLPKNTRTDQLIALAGPGGRVELEQTVLNEKIKALHAYFGLLAAN

SEQ ID NO: 123439 - protein, 149 aa, Heterodera glycines
  unsure (1)..(149): unsure at all Xaa locations
RRSWLHVDNTIGLCLQVIVSLGTPNFRKPCPGMCHXLKAKITVKCESSDKXSFYDGYAAARLKSSIRPTNDHSCADRLFALNLSLPLQTPELIVSMVSAEEPIRLHDFDPSQYLREHSAQSVPNDYHMPGPSLPKLMLLVVSPASSKST

SEQ ID NO: 123440 - protein, 141 aa, Heterodera glycines
  unsure (1)..(141): unsure at all Xaa locations
IGYFSDALIVLAPYCDAPLIVNLTGVAIPTMKSTSTPFRLLRLPGFSRLVLVDKCPEINMTTRRLKTTGGGTVTFSNPIKRNXLAVPRIKPRKECMITGHAXLYKESAYIASRMIDGTQQMLLGSLSDVYITIDQRIVPQD

SEQ ID NO: 123441 - protein, 236 aa, Heterodera glycines
PGEFALARILGNNLCGILMAVLYILIIVLVGANAALAATVYFGLALFTVVLCIFSFHFLQKLNFYNYYVQKAAKARANNGTNILHEEETGEAKANIKVTHPPLKTYIAIFSEVRRQLLDVWLVFFVTLALFPTVLLKVSLISPFNDQKTSESLYKQLTVFLNFNVWAAVGCWLSGFSPRPSPDYLSLPICLRLLFLPLFWVCDYQYDHLTPRRFVFIHNPWVFTVLITLMALSHGY

SEQ ID NO: 123442 - protein, 109 aa, Heterodera glycines
NTTGKKLVSPSAEGLELPESEEDNKKFEQDKVTFDKLCKVIKDILDNRVRKVSVSDRLVSSPCCIVTGEYGWSANMERIMKAHTLPDSSTLGYMASKKNLEIVPDHSIV

SEQ ID NO: 123443 - protein, 204 aa, Heterodera glycines
  unsure (1)..(204): unsure at all Xaa locations
MPSVSFVDVPVNSPFTFENLPFGVFSTNENSKKRIGVAIGXPIRDLSVVKHLFHGRCFXERQNVFKSETLNXILGLNPQCLLQGRLTLPFRAVPMPPQCFPXQQISQKGFXSQFEGQIHLPPPIGIKLTFNPLLIRPPMFDQCFLGKHTPFGEIEIGAPCYHGRGSNFLFPDRKHFPRGQIKGEIIPPHLLTNRYGLLLEMGFF

SEQ ID NO: 123444 - protein, 253 aa, Heterodera glycines
MNLSPVDSVTHCTTTSTMTQITKPVDPWNECLNTSLEVEDPEMFRLVELEKYRQYSCLELIASENFTSQAVMEANGSALTNKYSEGLPNARYYGGNEFIDQVEVLCQQRALKAFNLDSSTWGINVQSYSGSTANFSALTALLAPHDRIMGLDLPSGGHLTHGYQTAKKKISSSAIYFESMPYQVDMTTGLLDYDRLEQNAALFRPKLIICGASAYARDWDYARLRKIADTHGAYLMADIAHISGLVAAQEQNN

SEQ ID NO: 123445 - protein, 81 aa, Heterodera glycines
  unsure (1)..(81): unsure at all Xaa locations
AVCAHDGHGVHFXVQACRACAGLFQRSTIAERVYRCRYHGNCDICQREVRCVCHACPLDKCLGLGMDPDAVPRHRDQIGPR

SEQ ID NO: 123446 - protein, 229 aa, Heterodera glycines
  unsure (1)..(229): unsure at all Xaa locations
RDQGRCGSCWALAAVTAMSDRVCVASNGKTQVSLSAEDLVSCCRICGMGCNGGYPAMVWQYFKHWGLISGGYLPDKSEGCLDYSVLPCEHHTAGPRGTCDEGPTPKCTKKSSAASGLTYKKSLYYAKSAYSVSSDPXAIQKEIMTNGPVEVAFSVYDDFPNYKDGVYHQTTDNFLSGHALRAIGWGEENGEPYWLIAHSXDTDWGKDGLFKIKRGTNECGIEGQVVAGI

SEQ ID NO: 123447 - protein, 125 aa, Heterodera glycines
ALITIDSYRLSDRAHRANIYSECMEHGDIILIYMFTSFDRLLNVVRKTADLHKVEDAFLRLIPLRYYGIELDILFSRLALIQIKEYQKLSDDNLLNILDDNTFPSLNGCHVADEILPLVPNRLNF

SEQ ID NO: 123448 - protein, 272 aa, Heterodera glycines
QQNDAQNAVDPCAHVVHVLMCYQMGGEDEEFVRKAIESLVKKLKDRREQLESLISAVTSGGKQSTSCVTIPRSLDGRLQVAGRKGLPHVVYARIWRWPNVSKTELLKLRSCATPADHVDLICVNPFHYDRVVSSGLSAFDLASFRLDPLSSSSPSAAFRPPPPSDQMPIPLPIGHSFAHFSGAFDSHPSFSASSSHHLPSVPIDHQSANSNAFDAPFPPIPSFVPHPQQNQQRCPLIVHCLGEGQQQQIGPFQQQMCHQNTTDQSQTHRFTH

SEQ ID NO: 123449 - protein, 96 aa, Heterodera glycines
MCDRLTQIQDLVNDLANHMCNSVGVLQASAGPCEFGTAPETLYKIANKVKNFAVIYLVDISEVPDFNKMYELYDPVTAMFFFSLSSNFFASTHCCV

SEQ ID NO: 123450 - protein, 108 aa, Heterodera glycines
PPAKRQSMNRGLNLTPKSLLPRLRKGKLNCPEVMKPECVNTHLHDMIVLPETVGCEAGTLSGQVDDAEGVRAEMMGYYLGELSITQQPVEHGTTGTGAKHTAPGIPLR

SEQ ID NO: 123451 - protein, 102 aa, Heterodera glycines
  unsure (1)..(102): unsure at all Xaa locations
RTFIAIKHDSVQRGLDAKITKQFXQRGYKMVCMKLAKGTVPHLEVHYHNLKNKLFFAGLPKYMASGPIVXRFWKGLDGVPXAPVAPALKPLGQWPGTIPGDF

SEQ ID NO: 123452 - protein, 82 aa, Heterodera glycines
  unsure (1)..(82): unsure at all Xaa locations
GVQRGLVAKIIKQIYHXGYELIAMKLAKAPVPHLEVHYHQLKDKPYFAGLIEXVTSGPIVAMVWEGLDEGTQGHVLLGATIP

SEQ ID NO: 123453 - protein, 234 aa, Heterodera glycines
PFIIRRSFVLGQRFCNKKTEESFRDKEKVLPLDGLQKDLRTTATSSFSLYCSHAHQILTDVTELRDLVLDKRKEYILCSNAFSLYGVQKFMSDEDRRKFDQETDLAFRHCTKLIKSLEAQIESDRTLRPSDQLKHLLAVTNLLNVYLKEVLSIVTQLRAIHVRKSRQIRRICRLANLVEMYGARIEQTQKEEEEKALKLVRMLEELKENEKCQWRKEETREEDKENVMLKKGPR

SEQ ID NO: 123454 - protein, 73 aa, Heterodera glycines
AKEEADEEMDAADEAIAALPQFSDPLAALPPGSFVMDMFKRVYSNEYTASQSIPYSWDDFNPTRYSLWFSEYN

SEQ ID NO: 123455 - protein, 102 aa, Heterodera glycines
  unsure (1)..(102): unsure at all Xaa locations
YAHNMNDMLGMETWSGKYCLCYKKYLITLLSDKAQLVILFSNTPSLRLSEIDYYAMLTETGVLDYYGNIVELGTECGXLLHWYMLNITDPGESDFIHYMPTE

SEQ ID NO: 123456 - protein, 263 aa, Heterodera glycines
MGKNKKPFIDRKSAVNYTLNNRELEETQRISDYKSFSFRSLDKRFEGIYEDYANEEEEGAEEMDDEEGQTGADSAIFRSLLADGQSQRSCEERFHRELPDSELKGAVLRYAKAMEIGKGRAEPTEDILVDSAKRSRWDCESILSMHSTLYNHPTEIREPMKVIGRRRGRTTKEKEMANLEETEVDGDQRDGPPAPSVRTRTSMVSVIRPKGETTEERRMRKIAVKEERRERRKEKKANKETFRAERLKLEAQRKTNQPKTRQI

SEQ ID NO: 123457 - protein, 124 aa, Heterodera glycines
  unsure (1)..(124): unsure at all Xaa locations
MXKIGINGFGRIGRLVFRASLQNPDVQCVAINDPFIDLEYMTYLLRYDSTHGLFKGTIEVKDGKLVVDGHTISVYKSMKPEEIQWGAAGAHYFVEASGVFLSGEKAGLHCNGGAKKGGGNGPSG

SEQ ID NO: 123458 - protein, 285 aa, Heterodera glycines
RTFMLSDLTMGEMKILPKDVQLCAEVATGVERMGQYQYQDLVMLDKETVGVIVRLERENVEVLSMHGKILRVNPQTIECKKNSRFVKALDSQKNTIQAGDTVKVVEGFLARKKETEEERQGEIKHLFRNWAFVFSRKYPQNGGMFVCKARNLALIGGSKASESQINTTILDNSQLMSPRPNPLESPRTIHGGMTPHSGSSVVGAQSVRGDHGFKAPSVVGSIATSATGVGRQHVRRNMEIMGKTVRVLAGPMKGYIGIVKDATESTVKVELHTMPKTVNFDINKV

SEQ ID NO: 123459 - protein, 241 aa, Heterodera glycines
MKPTKRPMKHPSAPFSRDSPRSKRLKQSTDGAGGKRLFVVIEDCSLEVAKVGAEHVVLCSDKHANWLRKQNRDPAQFRPDILHQCLLMLQDSPLNSAGLLRVFFRTKQNVLVSVSPQCRLPRTFDRFCGLMVQLLHKLQIRAADSSQKLLNVVKNPVTNHLPVGCRKFLSTLNCPNLVSNMAEKVQPEAEEPVVIVVGGIAHGKISTDYTEEDIKISNYPLSAALCCAKLTSAFEQLWGVL

SEQ ID NO: 123460 - protein, 284 aa, Heterodera glycines
FHEYKFGHNVGTFLRLLTFSQFHFLFYASRPLPNTFAMVLVLLVFQKLLDFRFLHAAAFATVATFLFRFELLLLFGPAFLFAFVVYWRHISVLKTLLVGFCSLIIVLILSVLLDSLMWRRWVWPEGEVIHFNVWHNRSSEYGVLPFWWYFFSALPRAMFLSVFLVPFGLLIHQRVQFALVSLCLPAFLFVLLFSFLPHKELRFILYAVPLFNTSVAVFCAWIWKKARDSWFFRFCAFLVALHLLVNAIFSVSFVYASAQNYPGGVALLKLQHKHRFLRDKPIAV

SEQ ID NO: 123461 - protein, 86 aa, Heterodera glycines
MPRQVLELSDYFAPLAALIMFALAILVFSFFVINFFYITDRDDLTVFEKFGAHLHLCLGPHSMSDIYRGGPRDYPQPQGTDKEMNS

SEQ ID NO: 123462 - protein, 71 aa, Heterodera glycines
NVKTKIQDKEGVPPDQQRLIFAGKQLEDGRTLADYNIQKESTLHLVLRLRGGNGKRNTGKNKKSNKKLDQN

SEQ ID NO: 123463 - protein, 128 aa, Heterodera glycines
MSGRGKGGKAKTGGKQKTRSSRAGLQFPVGRLHRLLRKGHYAERVGAGAPVYLAAVLEYLAAEVLELAGNASRDNKKTRINPRHLQLAVRNDEELNKLLSGVTISQGGVLPNIQAVLLPKKTQHGESQ

SEQ ID NO: 123464 - protein, 115 aa, Heterodera glycines
STNIGIHPKESVLLAAERHSMTKLVADHSLIKISQVDNHIAVDSAALIANSRTWVERSRVDAHLFCVTYGVKILAKHVTLYGSRSPLHFRDDDSTIELYHPDCSSMLFAVIDCQE

SEQ ID NO: 123465 - protein, 152 aa, Heterodera glycines
MLPSNPDDKIDEVDKILSKLDGKIERKMGPLMCRHNPRQKCTNCLPLDPYDERFLHEKDIKHLSFHAHVHKLTDLHGRGTRSNNVLENVCCKLRPNCAGGHLPYPKGICTRCRPSTLTLNRQPFRHVDNIEFANSHIVNNFLNFWRRSSFQR

SEQ ID NO: 123466 - protein, 134 aa, Heterodera glycines
  unsure (1)..(134): unsure at all Xaa locations
MPPKPSGKGAKKAVKSTKAVRTGDKKRRKARKESYSVYIYRVLKQVHPDTGISSKAMSIMNSXGPIWRFSVPRFSIFPFLRFVNDVFERIAAEXSRLAHYNKRSTISSREIQTAVRLILPGELAKRAVSEGTKA

SEQ ID NO: 123467 - protein, 92 aa, Heterodera glycines
GKQSNTLSYALRYIQPTWIFSGTLAPTELHLCYYHKQSEHLQFGVEFEANFKLQEVNTTFAYQIELPFSLAISGVLDHVKAQGKFGIGLLIG

SEQ ID NO: 123468 - protein, 169 aa, Heterodera glycines
MDFNGAERHCQTYYDERNASTRNIFFDLFHYYIKGEMPQKEVIQAESDYEIRRKPNISEALKLFKRHPTKIDTVGAFALIPPTTAFNRICEAVKALFGSLNNQLASTNLIVSFTNLVIRRTKNRLDELKRQRISITENVECSICRKRIMNSASVRNRGHSFAHFFCYKN

SEQ ID NO: 123469 - protein, 175 aa, Heterodera glycines
  unsure (1)..(175): unsure at all Xaa locations
EGSRKETKSLKEVLQKFRHAKETRKRKKNLDQAKKVIVTAQRKKEEKRLPKDMKQCNMEAINAIYDPQSFVDRLFTTLEGRQRNEKYAIRLLQIALCARVIGVHQLQTLGFYSYLHRYIRPKQKEVTRILLYAAQACHPLVPSDVIEQLIRVVAQNFVSDRNTPEAITVXLNTIR

SEQ ID NO: 123470 - protein, 178 aa, Heterodera glycines
  unsure (1)..(178): unsure at all Xaa locations
VIGPRCDKCEPKYFXDPKNGGTCTYELAIDFIFTFKLDSNDIRDKYVNQINFFSVPYKRDTDVQFSITCECDTGAKVTINLTTQLLEGRPPHTKHLMAGQLCTASGIKRTYSSTDPGFAFGTETNTTFHVRVNDFETPIKIQISFAQSLPINWILFFVIFVAXFIVLLDAAGLIWISK

SEQ ID NO: 123471 - protein, 177 aa, Heterodera glycines
MVEPKIPTTSDFNEENPVKSTPESHSLIKNGFFMSEEYGMTTKSVYTSQISQSVIKAGLYSKKNLGVHVSAAGSLENAIWNAIEMGCRSFALFVRNQRRWNAKPMDESVVERWNCAIKKTKFPLHQIVPHGSYLLNAGSPDQKKLEMTRKAMLDECQRCERLGIQFYNFHPGFTTGK

SEQ ID NO: 123472 - protein, 178 aa, Heterodera glycines
KANYFTRIISLYEEYPKCLLVGVDNVGSKQMQEIRGAMRGHGEILMGKNTMIRKAIRGNLQKFPLLEKLLPYIVGNVGFVFTNEDLGDVRKKLLENKRGAPAKAGAIAPCDVRLPPQNSGMGPEKTSFFQALQIPTKISRGTIEILNEVHLIKTGEKVGASESALLNMLGIQPFSYGL

SEQ ID NO: 123473 - protein, 102 aa, Heterodera glycines
KSSAKSRKKTRKETFNTYIYKVLKQVHPDTGVSNKAMSIMNSFVADIFERVAEEASKLATYNKRSTISSREIQTAVRLILPGELAKHAVSEGTKAVTKYQSS

SEQ ID NO: 123474 - protein, 172 aa, Heterodera glycines
INELYKCSTSVAERFFSTYGLFSTNLSHCQALTKFLPESNCCIGNEKSGTTSDNLKTPDFVSENSTTVRLYLEGIRDKLRPNIESDVEAADDHGDEREAEGTSGTTKIADNDVKKDAFPIPDLCPPPPPSMFGKIAVAGNEKEALTNMLMSWYMSGYHTGFYQGVMHEKTTR

SEQ ID NO: 123475 - protein, 130 aa, Heterodera glycines
LELSCEKMPAPERLPQFWVDNKLALLEFIRLAHIGIKGMVSDARNGEPIANAVVWVRNVTDGDGQTAIKHPVTTWITGDYFRPLVSGCYQIAVEADGYEIGIKTLNISQKDVKEVPTLMLIKEALIVEKC

SEQ ID NO: 123476 - protein, 101 aa, Heterodera glycines
TGDSLVTIRGRKEFVEGAKARIEAIVEDLEAQTQIQIDVDPKHHRHFIIRGAEVLKNIQKEFDCQISFPKQETGDSLVTIRGRKELVEGAKARIEADSKGI

SEQ ID NO: 123477 - protein, 161 aa, Heterodera glycines
MADIEAAPAPKSDEEAKRQALAAKKAEVRKRLEEAGKKGKKKKGFLTPERKKKLRKLLMIKAAENLRNQQKQLDSERQNVLSKRIPQCPNIDAIEDKGQLEKMYNDLFQQMLKLEEEKYDINFVVSQKDAEISEITISVNDLRGKFVKPTLKEVSQYDNKF

SEQ ID NO: 123478 - protein, 183 aa, Heterodera glycines
SLHEQYVNLKEVTRVDYISYLSKFDHLHELSREKTKKTGAYKTYVLSLEEYLRDFISRAKPLIDIVMELDRVDKDFEEKLKEGKVIGWSNEKPSGAMKKFAQPSAEIDVSNFNSPEELEELGADRLKAALIALGLKCGGTVKERAFRLFSTRSSDGSNAVNGNGKLTAEDTKEENRKYTLAKA

SEQ ID NO: 123479 - protein, 131 aa, Heterodera glycines
EQQANRILRCIKRGALIRQAKGRALQLAVSSDEAIVCCVGSDSMLDIYRHFTVEESKKRYQKKLRKLRLRADSQPTESEKETNEAMESEVSRDVTTLITRIGDFRADAKLKWVDLCEEFDDASLHFCAGPF

SEQ ID NO: 123480 - protein, 106 aa, Heterodera glycines
FTKLLYVANVFLQFVILNALLGPQYTFWGIGILSDIWNGREWSESGHFPRVTMCDFNVRVLGNIHRWTVQCVLMINMFNEKIFLFFWFWFIFVGLLSLLSLFYWAF

SEQ ID NO: 123481 - protein, 149 aa, Heterodera glycines
QPANPIYLSFMCGNPAGVAVHETMHALGFQHEQLRFDRDQFITIQWENVNPQQLDFFTMSDVTKFSSYGIKYDYGSIMQYASTIASSAPGKKTMVAKLKPTENERLMGQREGLSLSDVEAVKKMYCQPSCDDKIIFCGIWATMNLCEFS

SEQ ID NO: 123482 - protein, 150 aa, Heterodera glycines
SFERCDPSVRLFDVTDNATNSRIGFLYVDIFSRETKKIGRGQWLSMLGRPPNQLRDLDALVYFLGAHPHSENEHESFLHHEELSEMLSAFGRALQLLLSRAPCHFLSLPLAPYYASDFDANDFMPAFMKFCIYKPRFLGLLSSPNSQNGQ

SEQ ID NO: 123483 - protein, 185 aa, Heterodera glycines
WGVNLLIGTDTGLMLLDRSGQGKVYHLITRRRFDQMSVMEGQNILVTISGKKRRVRVYYLSWLKQKILRTEGLQQTEKRNGWTNVGEFQCATHFKIVRYERIKFLVIGIEDSISIYAWAPKPYNRFMAFKSFGQLSHAPVIVDLTIEENARLKVLYGSLAGFHAIDLDSASIYDIYSPHRAQCGQ

SEQ ID NO: 123484 - protein, 89 aa, Heterodera glycines
KGYHHTTEIDSTIHPLGNPRSTSNCNRYPMTNFDISEKNINPTTNFPHYGLYKHDIPMIRAWCTLSKRPSITLRKTLIKHTARLPLHKK

SEQ ID NO: 123485 - protein, 101 aa, Heterodera glycines
MLRPTDTQYNSFVSFFLSSPIICVFYDEEYGDDDEEEEPDDKTAKKETTADAKAEQDPYFKDDPQGNEHERFRDAEERLEKRHRKKVTKVITEWSELFERY

SEQ ID NO: 123486 - protein, 85 aa, Heterodera glycines
DNHLWGKFNLTGIPPAPRGVPQIQVTFEIDVSGILHVTAEDKRTGNRNKITITNDHYRLAPEEIERRIYFAENPAEEDKKTKELV

SEQ ID NO: 123487 - protein, 63 aa, Heterodera glycines
VASVFGLGFPPFWGGPFRFVDLYGAQKLIKHMERYGNIYSAVQFKPCQLLSDYAKAGRKFYPK

SEQ ID NO: 123488 - protein, 67 aa, Heterodera glycines
KIQDKEGVPPDQQRLIFAGKQLEDGRTLADYNIQKESTLHLVLRLRGGNGKRSTGKNKTSNKKLDQN

SEQ ID NO: 123489 - protein, 159 aa, Heterodera glycines
  unsure (1)..(159): unsure at all Xaa locations
AQLNSQNCPYLMGKPKIFFIQACRGEIKDFGVLRALPIGTDCADGAVSSKAAASNNSKRGPLSMFSRNSSPRNSLAASIQIPLHLRNEGECSANLTSKEIFQKDPTNADXLVVHSTTPHYVSWRNSANGAWFVQSLCKVFSEMAPKHCEILEMLTTVNY

SEQ ID NO: 123490 - protein, 161 aa, Heterodera glycines
KEEMESAQRELEVAQGRIRRLEDQIYELNEAKRLLEEKEHELQTLNTELASERAMSEEERSRLLTEIAMQESRVSEMRFEVKNKTDEMNKLKAEVESGKTTAHIYNPGNGHLPTEFNDPDDLTNAHIELSTFHEGDVNNVMPQRELDRTNFTDQDMSLKTN

SEQ ID NO: 123491 - protein, 152 aa, Heterodera glycines
  unsure (1)..(152): unsure at all Xaa locations
MDIKTKKNRRYEKIKHLGEXFANVYQAKDIETGTIVAVKKIKLGSRHEARDGVNRTAIREIKLLMEIRHDNIITLLDVIGHRTSIQLVFDFMETDLENVIKDSETILQHSHIKNMLLQVFLGLEHLHLLFILHRDLKPNNLLMNTSGRIKIA

SEQ ID NO: 123492 - protein, 84 aa, Heterodera glycines
KVVIRFSLGEQLFSVSSGYHAGNGCYEFHGSICASLAGFLHVYSLRDSQNTETNIVEVRRNIDERSNVLPSQGKIVTARVNLKF

SEQ ID NO: 123493 - protein, 47 aa, Heterodera glycines
  unsure (1)..(47): unsure at all Xaa locations
LKKLVSTQVGTKWDKLLLKKWNTIYRDHITLPDYXIHDGFNFELYYQ

SEQ ID NO: 123494 - protein, 90 aa, Heterodera glycines
DFISEVQNVRELFSVHDNPYEAAIGCYAVVILTEWDEFKDLDYNRIYGDMKKPVCPFDGRRIVNEENLRNIGFRVFKVGSASNQTLNFFP

SEQ ID NO: 123495 - protein, 172 aa, Heterodera glycines
VAGNLLMVGTAHIHWDPEFCDVKLIQAMMLVHELQKILDRIALKYHLRTQQIPVLVTGDFNSLPELGVLEFLSKGAISKDHPDLKSFREDSCLSCLSADHEDQQNFTHSLRLDSSVDASQIPFTNYTLDFKGMIDYIFATPQSLARLGILGPLDSSWVQQNKFVGFPQPHVP

SEQ ID NO: 123496 - protein, 100 aa, Heterodera glycines
LLPLATHVTEQCHSLTLIGLMTIGSISQSLGSGDENADFALLRKLRDALQTELRLSTELELSMGMSADYQLAIKYGSTNVRVGSTIFGVPNYTKKIGHRR

SEQ ID NO: 123497 - protein, 216 aa, Heterodera glycines
RGCVAIVKYLTFNKDGSAINKYRVHPFVTESYRKIMESGDFEQLIMEQGWLDSAVQWNSTILAHWADQSLAELLDKSFSRLQTPKLRWESMKLRFDDATPINARGIKLPPTPSDEARPFFISLVMTFAYPQLHAQVTAGLNHLLKSPFSVHPENGNVTIPLSTKEIHTCDPNVVPQINELLTHLSSLQSYRENKENHRSIIYAQTLLASHITRFEQ

SEQ ID NO: 123498 - protein, 109 aa, Heterodera glycines
QFRYRRQCADTRLLGKSLCDGIVAFQMGQFERTFDLVYPIRTQLYKISGSNAQRDIFTQMLLHAALRCADNERRSKATVLIEERNKMKPNSAVIERLLQKHKQTAHNNC

SEQ ID NO: 123499 - protein, 142 aa, Heterodera glycines
  unsure (1)..(142): unsure at all Xaa locations
MYSHATPGGIGFQVVAQQATKFNDQXGKLILHWVKKLTGENFSTDGSRENSYKSVNDGTLLCKLTNGIHPGSVKKIQQPTGNFACMENINAFVSFAKAQGVPTEETFQSVDLFEARDLYSVSGTVLSLGRILETKGKPKPFS

SEQ ID NO: 123500 - protein, 120 aa, Heterodera glycines
  unsure (1)..(120): unsure at all Xaa locations
MNHFGLTFLFVAVSLLLXXAPGFDGMQIFVKTLTGKTITLEVESSDTVDNVKTKIQDKEGVPPDQQRLIFAGKQLEDGRTLADYNIQKESTLHLVLRLRGGNGKRNTGKNKKSNKKLDQN

SEQ ID NO: 123501 - protein, 177 aa, Heterodera glycines
MEYFPSKFVCCLLIALIAVPCSVLALSDSSRVAVLALHNNYRSQLAKGTAANLTGTMPAGSNLIQQKYNTSIESVAQNWANGCSMSHSSSSGMGENLYMTSSSTISEADALKQACDMWWAELKQYGFQSSLVLDMDQFNKGIGHWSQQAWANTAQIGCAMARCPSSTWKTWVVCHYK

SEQ ID NO: 123502 - protein, 103 aa, Heterodera glycines
  unsure (1)..(103): unsure at all Xaa locations
GDITEEQKKVAEAAVLSEQVAEKGSKQSRSEKKARKLFSKLGLKQVHGVSRVCMRNLKSITFVINMPDVYKIPGSNTYVVFGEAXIEDLAQHAQITDVENMKP

SEQ ID NO: 123503 - protein, 187 aa, Heterodera glycines
  unsure (1)..(187): unsure at all Xaa locations
MTTEKESSSGSDDVINASEFASEETFYSPPAQKSVKEIIEADHNDESLKKYKEQLLGENASGPVLVEPDNPKNVLVRRISLVSDDQVKHSMDLPAKGDFVFCVKESCTYRIRFEFVVQREIICGLKYAHKXTKELYMLGSYGPRHEPYTYETSPEEAPXGRGKYRVHSLITDDDKNIWLDWSWHIEI

SEQ ID NO: 123504 - protein, 133 aa, Heterodera glycines
  unsure (1)..(133): unsure at all Xaa locations
DVDQQYIVPSVTSFTKTIGTIPSPYWVAMDSSGTYTKVPPTNPYWYHARPSSLPPPMNIRSPSSDCSXPNEYGGKNRRRFAPMHYTKAYGAVIHKALHSLEEIKWVEKDGGTGGRKLTKQGQKDLDRIASQLR

SEQ ID NO: 123505 - protein, 123 aa, Heterodera glycines
SIGQAFVQHFYTKFDVPDGPTRTVGLHDLYDAEHSFMTFEGNQVKGRQAILDKYGALPFRTIQHGITKTDSQPLPDGSILVTVIGQLKTDDDPVNSFNHCFILRPNSCGGFFISNEVFRLVLH

SEQ ID NO: 123506 - protein, 233 aa, Heterodera glycines
  unsure (1)..(233): unsure at all Xaa locations
ANRTARDAHTIKGTNPQYLIEKIIRTRIYDSLYWKEQCFGLSAETVVDRATELRYIGGIYAGNIKPAQFLCLTLKLLQLQPDKDIIIEFIRQDDFKYVRALGAMYIRLVFNSVEVFKYLEPLYNDYRKLRYMNRMGKFELLYMDEFVDNLLREDHYCNIQLPRLQKLQALEEXDQLELYAFALDEDLERLSTDSEDEQETRNSTPNIGSLRRSLLRIRGRILSKSRERIRRSL

SEQ ID NO: 123507 - protein, 64 aa, Heterodera glycines
LRGGKVHGSLARAGKVRAQTPREEKQENKTKKRGRALRDIHYKRSDVNVAATGPGRRRGPNSNA

SEQ ID NO: 123508 - protein, 88 aa, Heterodera glycines
CKIKAFDVSYSMGVLTAHISPRIGTYVINKQTPNKQIWLSSPVSGPKRYDLSDKGRWVYKHDGVTLRELLEKEFRHIFKNDQISLHQS

SEQ ID NO: 123509 - protein, 69 aa, Heterodera glycines
  unsure (1)..(69): unsure at all Xaa locations
VTVTRGHYRGNAGRLMLVCRKKDVXHVDKITRDKAITNNRALGIHTXSVQITDVKMDKDRRSLLERQAA

SEQ ID NO: 123510 - protein, 117 aa, Heterodera glycines
MVTSFPVSFFLFFSTALIHGTMGGLFWSKKPADSADDSLWSRYHDQNAMEELLEKVHSKCPNVARLYSVGRSVQGRDLAVIEFSLHPGRHQILKPEMKYIGNMHGNEAIGRKLASKR

SEQ ID NO: 123511 - protein, 94 aa, Heterodera glycines
LSAIKKRFEVKKWNAVALWAWDIVVDTCAICRNHIMDLCIECQANQASSTNEECTVAWGVCNHAFHFHCISRWLRTRQVCPLDNRDWEFQRYGH

SEQ ID NO: 123512 - protein, 72 aa, Heterodera glycines
  unsure (1)..(72): unsure at all Xaa locations
IDCPEKCSSSSRXFGSDHAFIRLEVVYVDQATGRMIPGKTTKYSICGKLRFMGETDDCILSLAERDGIIPPD

SEQ ID NO: 123513 - protein, 169 aa, Heterodera glycines
MQQLSKKSAWVSKVSGELLLAKVKQITTIGLQRDTCVKVKISKNNFYEYNRMFFMSSAYEWSLDPESKCRVGDVVLIRRLSEIHRPSKTVQYAVEKVVFQHGNFIDPVTKRRVFGAKEFEKEVELRKDLVDKIYSEPLGEEDEGIKNDDQLKRNKIRRRMEERERRAND

SEQ ID NO: 123514 - protein, 182 aa, Heterodera glycines
  unsure (1)..(182): unsure at all Xaa locations
ELVQRFKLAEQAERWDDMAQSMKKVTELGAELSNEERILLSVAYKNVVGARRSSWRVISCIEQETDGSEKKHXMCQEYREKVEQELRDICYDLLDLLDIYLIPNAGYPESKVFYLMMKGDYYRYLVEVVIGDDAIAVVETXSRHSSXACDIANDRLQPTHAITFYIALYLCVFYLEDVISAD

SEQ ID NO: 123515 - protein, 101 aa, Heterodera glycines
  unsure (1)..(101): unsure at all Xaa locations
VKTKEEDSKKTTTDDGSSSEEEVPELEEGDVTEEQKKVAEAAGLSEHVAEKGSKQSRSEKKARXLFCELGAPRVHSVSRVCIRQSKSVVVVINQPDVYESS

SEQ ID NO: 123516 - protein, 62 aa, Heterodera glycines
DHLTYVREQCDHTVAHLKSILEECNERVRTTPKTTVISHMEMIDYMEGLDHCAKRKAFKALK

SEQ ID NO: 123517 - protein, 94 aa, Heterodera glycines
  unsure (1)..(94): unsure at all Xaa locations
IHKLCPNIRVGDSGDRLTHAAKDXEQLTGQTPALSKARHTARSLGIHGSEKIAGHCTDRGPKADEIIDRGLKVCEYELYRENFSDTATFGSPIQ

SEQ ID NO: 123518 - protein, 100 aa, Heterodera glycines
MSDNKEELVQRAKLAEQAERYDDMAQSMKKVTELGAELSNEERNLLSVAYKNVVGARRSSWRVISSIEQKTEGSEKKQLIGRTDVEDQENAPRNFFHRII

SEQ ID NO: 123519 - protein, 97 aa, Heterodera glycines
PLYGFPKGRKPREMQASWEELEKMKMPISERDYCAHKMVALRKCVWDRAPFASHYCHGRRHDLGLCLYDDHLMRMKEFEREKRLLMRKARKERAKAA

SEQ ID NO: 123520 - protein, 128 aa, Heterodera glycines
MHTGSNNRVGIRTGSAASSASAGAVSDEQFRSSFEAVPNVRVESFRDLIAELQKQAALLENVNNDWTKRIKALQMLRALLVTDIGCYGALVEQSYALLGNAFLLSVKDLRSQLCREACITIALFFANL

SEQ ID NO: 123521 - protein, 150 aa, Heterodera glycines
SIKREQFYVRYYVGHKGKFGHEFLEFEFRPDGKLRYANNSNYKNDTLIRKECYVGKSVMDELKRIIEDSEIMNEDDANWPEPDRVGRQELEILSGNDHVSFTTSKIGCLVEVNDSKDPVGLRSFYYLAQDLKCLVFSLIGLHFKIRPIAQ

SEQ ID NO: 123522 - protein, 113 aa, Heterodera glycines
MSGDNSALIAAEQAAYGPFFGSLGVTAAMIFTAAGSAYGTAKSGTGIACMAVARPDLVMKAIIPGARSLRNDCLTAAKFLLNNGRKKEGKNGTSAEHCADRRVLMIKMTSHRI

SEQ ID NO: 123523 - protein, 156 aa, Heterodera glycines
PKNKGKGGKNRRRGRNENDIMKRELVEKDGDDQAYAQVVKMLGNGRLTAFCFDGKNRLCHIRGKLRKKVWINTGDIILIGLRGYQDDKADVNLKYTPDEARILKNSGQLPESTKLNEVGEEQNEGEVEFIDNGNRSDEDEVAAQDRNFSLSESSSE

SEQ ID NO: 123524 - protein, 44 aa, Heterodera glycines
KIHYCKRPDNSTKSCKARGSDLRVHFKNTRETARAINWHVANSE

SEQ ID NO: 123525 - protein, 111 aa, Heterodera glycines
MTRQKMQMYSPEMRAVNYQQKRTHMHAILTKKTVEDRVMLNLHLFDKVDNDKLTFDSDFFKDLGIDSLDFVEFIIAIEDEFEFEIPDGDSDRMRTPRDVYNYICDKCDVYD

SEQ ID NO: 123526 - protein, 112 aa, Heterodera glycines
MPKMDFDLFDMFAPIVVALIFAAILLILSFTCINWYCITQKDDLTIFEKLGARANLRLGPHTMIQIKRGGYASTYAREEDDERRKLTMTSQQQQRMELLLEEDNPKGTVAQI

SEQ ID NO: 123527 - protein, 181 aa, Heterodera glycines
SQSREERPRKLPKQNNGEPNENIVRINRTEMPEEFQAVLLSDNVVQQVMKSGQNTTNDLRTRELDKELTMQRERNKQLTEQLRTLEEKRAVESASAAVSAAVSAVKTIETSARNSKEEEIEEKRRIFEETAKRLEETFLSRHWPDACADEQKEIVGCLAKFPGQVLSCHSLLDIYRKCINN

SEQ ID NO: 123528 - protein, 159 aa, Heterodera glycines
  unsure (1)..(159): unsure at all Xaa locations
ICLQMCHDRGYLVTQDELDQTLDQFKDQFGDRPSERRPGRGELTILVAHNDDPTGESYREGALLKCRFLDQXICQQMQEQNITRAIIVVQSGMTPSAKQAIVDMAPKYILEHFLEAELMINITEHELVPEHVVMSSEEKAELLARYKLRDNQLPRIQVS

SEQ ID NO: 123529 - protein, 109 aa, Heterodera glycines
MVCPPSFERAPSIINKPNGSVLFECIWNANPEPTVKWFLKDKELAGDRFVSKVKKQVGKYLCTLTIKSPNQQDQGIYKVVATNPQGTHSVSQNYMLMCTANEVFKTQMD

SEQ ID NO: 123530 - protein, 133 aa, Heterodera glycines
MSSSALVKIKLDQEVCADAEKLVRLYTELADVHRTRISKLYSAHDPQIVWNGNPYKGMPEIETFWRNLPETSHDVACLDAHRIDPTSDDMSLVVLAMGTVIIGGLSHAYNQSLLLVLEGSTYKIKSDNYRVID

SEQ ID NO: 123531 - protein, 170 aa, Heterodera glycines
  unsure (1)..(170): unsure at all Xaa locations
MLILQELDPPTEAVIETEGQVVAHWENHCLGQGTLYLIESALVWISHGTKNGFRLPIPSIVVHAASGANEDFSEPCLFLMVDYSKTGXEYVPAEVDDIDEETEEDPEVKTVAVRLVPTNAMRISELFSTLSKCHELNPEIDEQMSDNDSLLGDDECDDDGEWAQNGNSDH

SEQ ID NO: 123532 - protein, 176 aa, Heterodera glycines
SCSFCPNEKLDLYKCPQCSSFYCSLRCFRCKKHIKCSEDFYRKECEKHNELLSNDPFELNPTDDKQKKTKVMTFEQYMAQQNQNSGGKKDKSTANPQIAVRADEEILFDSDDEPEYLSKMIASTLEQFNSLDDQELDRRILNAGLPIGLGEEQTAKGETSQEEMEILYQQLMGEEK

SEQ ID NO: 123533 - protein, 171 aa, Heterodera glycines
  unsure (1)..(171): unsure at all Xaa locations
VFTDAHLTTLDINLIPAEYRXLIPEEVTKFYHQLTEDDKKALKEVAERHQEFQTEDHAMEALKEKSEKLYNKAVELRTLVKGKIDQLVPDSKAFVIRMIEKAKGMRPKAVEKPKLEELRTVANELIDKYKALNDDTKESLKSNCPQITSVIHNEKLQTLAKSLLEHEAPAA

SEQ ID NO: 123534 - protein, 109 aa, Heterodera glycines
RPKTVPKEQHPFYILHPEPIRISPLLRFARWSALGLGIVYGFVRLRMVSKYHADIREWEVQKTIHKKDADKKESLRVLREQNEWIMKITDMNLEEGKSQLGVEHLYDLK

SEQ ID NO: 123535 - protein, 137 aa, Heterodera glycines
  unsure (1)..(137): unsure at all Xaa locations
MERLLRLGGLSGLGAGSLNATPHDSNQVDTSETVYISSLALLKMLKHGRAGVPMEVMGLMLGEFVDDYTVNVIDVFAMPQSGTGVSVEAVDPVFXGVDINTQQSFEALSDRAVAFVVDPIQSVKGKVVIDAVRTINP

SEQ ID NO: 123536 - protein, 344 aa, Heterodera glycines
  unsure (1)..(344): unsure at all Xaa locations
MASRPLVSIYNEKNEPTGKQIKLPAVFRAPIRPDIVSFIHDQIRKNKRQAYAVSTAAGHQTSAESWGTGRAVARIPRVRGGGTHRSGQGAFGNMCRGGRMFAPTKVYRRWHRRVNVAQRRYAIVSAIAASAVPALVQARGHVIDQLNEIPLVISDKIESFTKTKEAVGFLQRAHLWDDVEKVYKSKRFRAXGKGKRRNRXYKQKLGPLVIYNNDGGIVRAFRNVPGVTLLSVSHLNLLKIAPGGHLGRLVVWTESAFRQLDPLFGTWTRQSNVKKGFTLPRAKMTNSDFARIIRSEEITKVLRPTMARKVRRVAKIHGNPLKKPSLMAKLNPYAAVLRRAAVLA

SEQ ID NO: 123537 - protein, 409 aa, Heterodera glycines
  unsure (1)..(409): unsure at all Xaa locations
MSEEESQYSDEEVEEESIAADEVSVQEPAPPKEEEPAPEAEAEAPPAEEKEEEEEEEPGSPGGAGDAPKEEFRRTSVTESVAPTAQLRRAPPPQPKPAEESMTEAEAAMLAVKKRHEEEEEAKMRDNDERRRQELAAVEDELRVLKERQAERRAEREKEEAEFAERRRXQDEDRRRKDEEERKARLEAEKAKRDEEKRKRHLMMAGGFGGFVAADAEGAGKNFVVPEKSEKGAQQGMPGQTSKPRGLSKEQQEEAKRNYMSIVNRPVDVSNMLPNDIKANIKQLHARIVKLEGEKYDLEKRKDRQEYDLKELSERQKQHARAKALETGADPTEVESSGNFPPKVRVASRFDRQTDLRGYGQRRDLFEHPAETPEPKIVHGSGRPPPEWGRKEFEELENIRKNLEPPKYV

SEQ ID NO: 123538 - protein, 169 aa, Heterodera glycines
SCRIRHEATSLPPLLLERLKKRGIVASKNEDEEVFAESYDQDDDSKLEISREKYRGGAPGCPNKHNPFHVCTDFCFDHWQEGYPESRLSDKYLEQRNKMLRNYPLPKDWVEIYDPGMHRHYYWNQMTDEVSWLSPKHPKAVISEAAAKSAKEAWNMSKIERSEGERGGR

SEQ ID NO: 123539 - protein, 232 aa, Heterodera glycines
MKRSIMQKDCTSKGENVSQLDKSTSKMEGSKPLQIEEYDTSDEEDLRNTIGNIPVQWYNDYDHVGYTLSGDKIKKDAIKTDEIDAFLQKEEDSDYWRKVFDRQSGQQMALTDQQVEKLNAIADNRFPEIGYNPYPPFLDIFSSVREIHPISNRPPDKRSFVPSADERRIVGRMVHAIKMGWLKRKEPPKGSEEEEEPRLYDLWDDEGDEQRKSKSQMARVRMHLPAPKVKPP

SEQ ID NO: 123540 - protein, 114 aa, Heterodera glycines
EEEPAPEAEAEAPPAEEKEEEEEEEPGSPGGAGDAPKEEFRRTSVTESVAPTAQLRRAPPPQPKPAEESMTEAEAAMLAVKKRHEEEEEANMRDNDERRRQELAAVEDELRVLK

SEQ ID NO: 123541 - protein, 195 aa, Heterodera glycines
  unsure (1)..(195): unsure at all Xaa locations
CDEEVAALLADNGSXMCNAGFPVDDAPRAVFPSIVGRPRHQGVMVRMGHKDSYVGHEAQSNRGILTLNYPIDHCILTHWDDMENIWHHTFYHELRVPPQEHPVLLPKAPLNPKGHRKKMTPILFQNFHTPAIYLALPALLSLYAFGPTTGLLLDFRDGGTHTGPLYQGYPLAHALLRLDLGGPDLTDYPEKIPPE

SEQ ID NO: 123542 - protein, 381 aa, Heterodera glycines
  unsure (1)..(381): unsure at all Xaa locations
MCDEEVAALVVDNGSGMCKAGFAGDDAPRAVFPSIVGRPRHQGVMVGMGQKDSYVGDEAQSKRGILTLKYPIEHGIVTNWDDMEKIWHHTFYNELRVAXPEEHPVLLTEAPLNPKANREKMTQIMFETFNTPAMYVGPSRPCCPLYASGRTTGLVLDSGDGVTHTVPIYEGYGXAPRPILPFGLGPGGDLTDYLMKILTERGYSFXTTAEREIVRDIKEKLCYVALDFEQEMATAASSSSLEKSYELPDGQVITVGNERFRCPEALFQPSFIGMESAGIHESTYNSIMKCDIDIRKDLYANNVLSGGTTMYPGIADRMQKEMTALAPXSTMKIKIIAPPERKYSVWIGGSILASLSTFQQMWISKQEYDESGPSIVHRKCF

SEQ ID NO: 123543 - protein, 150 aa, Heterodera glycines
MSNNDIIFGNEEGVNYLAPWTYSCLIKTSIDRLKTALSENREAIHALNHLQEVFRQIDRASPSFLYDFSKLLLIESGVAGTNVQESYLRMHANAATEELELPQFAHIAEFQYLSMRAVSLCKVLARIPDEMTDRRPFLETIKEIASSIKQ

SEQ ID NO: 123544 - protein, 324 aa, Heterodera glycines
MLKHCTQIRSFATHQSIFYDVVIVGGGLVGSAMACSIGTNSALGPSTRVLLLESGRLHSVKQSKEAETKHTYNNRVSAVSPSSPFLFYSQFGVWDEICSKRVHPISALYVEDGCAKSKIHFKQLDKRSPIAHIVQNELIVAALQQCIRDRCANVEVRQGAVVDQNLSVPDNLGQNVTIQFEDGTIEASLMIAADGSKSTARKRVFIDFEETAYEQRAVVGTLALQHNSESDESFAWQRFVPSGPVALLPLGHELCSLVWTVSTADAARLLQLSPEHFVEELNGTLVSSAFYGSPNNGQFDNSSANSLVNNSLDCLGKALNFLPS

SEQ ID NO: 123545 - protein, 371 aa, Heterodera glycines
MREVISIHVGQAGVQIGNACWELYCLEHGIQPDGKMPSDQNNQDDSFSTFFSETGNGRHVPRAVMVDLEPTVIDEIRTGTYKHLFHPEQLITGKEDAANNYARGHYTVGKEIIDPVLDRIRRIADNCTGLQGFLIFHSFGGGTGSGFTSLLMERLSVDYGKKSKLEFSIYPAPQVSTAVVEPYNSVLTTHTTLEHSDCAFMVDNEAIYDICRRNLDVERPSYTNLNRLISQVVSSITASLRFDGALNVDLTEFQTNLVPYPRIHFPLATYSPVISAEKAYHESLSVSRITNMCFEPSNQMVKCDPRHGKYMAVCLLYRGDVVPKDVNAAIASIKTNRSIQFVDWCPTGFKVGINYQPPTVVPGGDVAKVPR

SEQ ID NO: 123546 - protein, 479 aa, Heterodera glycines
  unsure (1)..(479): unsure at all Xaa locations
ATLKLQDFLRQRLFSISQPKVVSVQARQFPVTIYFERRTPTNYLEATFKKVCKIHEEYPAGGILAFVTGQREVTHLVKLLENKYTKISASKLLRKEKMKKCRKKETKEEEEEGLLLDNDEFGTSDMDLEDEAWQNTFFGSDDESLNASQSFKKYPPLLAIPLYSLLPVNLQKKIFNEPPDDGSRVCVVSTNVAETSLTIPNVRYVIDSGREKKREYDPITGVSRFVVGWCSKASADQRSGRAGRVQSGYAFRLYSSAVYEDMRDHSTPEILNKPIDQLILMLKAMNFTKIDNFPFPTPPRLDQIKSSELRLSHIGALRVQEGLYTITQLGQSLAQLPLTPSFAKVVISSIRGGLLPFAVTLXKEDGTEERRKRVSEVIKQRFLWCAVGEALLFGDLTVILNTVGAADYEEENARAIEALGLRPKALKGINKQRHQLTLLLNKSDSVEKLPEKFRMDAPSQEQLRRLRHIMVKCHPDKLA

SEQ ID NO: 123547 - protein, 198 aa, Heterodera glycines
LKPNKLRQKKEKKLGNPMRDLKIQKLCLNICVGESGDRLTRAAKVLEQLTGQTPVLSKARYTVRSFGIRRNEKIAVHCTVRGPKAEEIIDRGLKVKEYELYRENFSDTGNFGFGIQEHIDLGIKYDPSIGIYGMDFYVVLGRAGLRVAKRRRIQGRIGASHRVQKEEAVKWFQQKYDGVILPPKPKESRKGGHRGRKR

SEQ ID NO: 123548 - protein, 139 aa, Heterodera glycines; identical to SEQ ID NO: 122701

SEQ ID NO: 123549 - protein, 95 aa, Heterodera glycines
MPQDEGKVHGQRIALSDNAVVEKSLGKAGLICVEDLIHEIYTVGPNFKKANNFLWPFKLSSPNGAFNKRKFKHFIEGGDFGNREEFINELVRKMN

SEQ ID NO: 123550 - protein, 170 aa, Heterodera glycines
MIFLTSFSKHPLSAAFRFFSSVNEVTLQTRPYKLFKLDSGPSTEVRLTRDEALDYYRKMQLVRRMETSAFFLYKEKRIRGFCHLYSGQEACAVGMVAATDPNDAVITAYRCHGWTYLMGATVQDILGELTGRIAGNVYGRRGCMGSGPKEPFSAGDGNPLGVRTDSMGGG

SEQ ID NO: 123551 - protein, 154 aa, Heterodera glycines; identical to SEQ ID NO: 122608

SEQ ID NO: 123552 - protein, 85 aa, Heterodera glycines; identical to SEQ ID NO: 122112

SEQ ID NO: 123553 - protein, 148 aa, Heterodera glycines
MGRHKKTQKFRNKLQKLIKPTDDRIKDEIRVKKPPKEDENALKIKEAPKISAAMFLKYNTQLGPPFHVIIDTNFVNFSIKNRIDIMTGFMDCLYAKVVPYISDCVLGELEKMGRRFKLALKIIKDNRFQRLQCTHKGIYADDCIVQRV

SEQ ID NO: 123554 - protein, 129 aa, Heterodera glycines; identical to SEQ ID NO: 120387

SEQ ID NO: 123555 - protein, 190 aa, Heterodera glycines; identical to SEQ ID NO: 122095

SEQ ID NO: 123556 - protein, 215 aa, Heterodera glycines
MLPAIKPANSDGIVLDALPYIDDQQYTDEHRQLALQLIQAECKKFPMTKNYLRNLPEPDYDKFTTPRIMEHQAKMANKQEIEKIDLLRYEVPSPANTSRSGNKKAWLGAIDNCRAQLSNQSLRKMNLELLDEFGPEAFLRSNQHLKKQVEKEEAELFKLRSQLYELNARRKRSQLDAGERLAALGQTWVELVTKNAAMVVRHDKLGNRIRTLAKL

SEQ ID NO: 123557 - protein, 425 aa, Heterodera glycines; identical to SEQ ID NO: 122057

SEQ ID NO: 123558 - protein, 251 aa, Heterodera glycines
MSSLIRGEIQQFASFANVFHWFDELHGCFRPLHSFNQLRIPWLSAHLATSSLNAVHLPLSGKQILDVGCGAGILSTSLCRRGALVTGLDADKSVLEIANGYKETMAPSLRKKIEFIPGTIERLAQEKDRIGTFDAVVSSEVVEHVSDLPLFIRSCCKLARPNSPIFFTTINRTIWSQLLAKTIAEDLLRILPQGLHQFEQFVAPRDLRKLLLDEQCSVGPVLGMAYNPFFNIWNWTRFTGVNYALVAHTKN

SEQ ID NO: 123559 - protein, 155 aa, Heterodera glycines; identical to SEQ ID NO: 122294

SEQ ID NO: 123560 - protein, 265 aa, Heterodera glycines
IITLPQFDLPECVSTLNGWGPGSVSDSQVLSEFVGLPYQHFNKCDRIGRIVDWLGVDRFFKKGETRDRYNERVYGSSATAGVQFDYIHDNEESNFQLVDSSRPQKPQRPFRRQIPFRKLAQREQERREYEKYNVSTKMKRSILKEQQKAYKVFLRRGGGTRGTAQRPTGRRFNDRQAGKGRQPSVQVRPDWAVLKELDFVQLNKLYLPNIEPGKDIPGETYGTLHFYDKALMDKLSVKNPLHLEKFHASFYSLTTTEDPVFRKLS

SEQ ID NO: 123561 - protein, 205 aa, Heterodera glycines
MLKNNLLIRGKSVLFSLPLRAFSLSAQCANGEPIRRVVLIPGDGIGPEISSAVQKIFEAAKTPIDWDPVDVTPVQGRDGIFRIPNKCIELMHKNKVGLKGPLETPIGKGHRSLNLAVRKEFNLYANVRPCRSLEGHKTLYDNVDVVTIRENTEGEYSGIEHEIVSGVVQSIKLITEQASRRVARFAFEYARQNGRKEVTAVHKAN

SEQ ID NO: 123562 - protein, 195 aa, Heterodera glycines; identical to SEQ ID NO: 122783

SEQ ID NO: 123563 - protein, 367 aa, Heterodera glycines
MSRFVCAISGNEPEVAVASPVSGEVFEKRLLIKYIEENGTDPITGHKLDTSNLVELKQDPGIRSMQKSLATASLPSLLKQLQDEWDATMLNNFTLRQELKAAREELTHALYQNDAACRVINRLSSELQSARQIIATLPHGRRAAAESETEATDVEMRPEEAEEGAGADGLPGISEELVNFFTDKCQDFSTARKQRGRNLPEGLASVEQIQKYEEVACHDALHSASVPGITALDLQKNFIATGGMDKTIVLFDSETENIKNTFKGHQKRISAVRLHPNLQTIVSGSFDSQIRIWNADDQSARNVIGIHDRLFFDVSLHPTGDYVLCSSEDSHWSLIDLNAGRPLIKVKSDDDDVPGIRCGHFHPEGLI

SEQ ID NO: 123564 - protein, 89 aa, Heterodera glycines; identical to SEQ ID NO: 122635

SEQ ID NO: 123565 - protein, 205 aa, Heterodera glycines; identical to SEQ ID NO: 122561

SEQ ID NO: 123566 - protein, 221 aa, Heterodera glycines
ESVVDICVSTLMSKLRNYTEDQLQNLLQDESRLNAMVDSMPQVSSLPNDKEIKLAHSKSLAEYNLSIEPQLNKALNHLRETHANAVRTKGEVNEMKAKLDSVAEARSLDSVCVSLKNLAQNAEDESETAAELFYKGAMEIDDFIKKFTEKRVIGHTRRLKAEKLAELLRQQCQYQPQHPSPSALGMTTQTQYSSQGVAASMYPVLGQAYTSPANFRHSYMS

SEQ ID NO: 123567 - protein, 375 aa, Heterodera glycines
  unsure (1)..(375): unsure at all Xaa locations
MLLLFLLSMLLLQTNGWRARERAIELADSDESIELQNIGQRKTDIRTPTERMSALRQMIERGFSDWNAYKQKHGKAYADQEVENERMLTYLSAKQFIDKHNEAYKEGKVSFRVGETHIADLPFSEYQKLNGFRRLMGDSLRRNASTFLAPMNVGDLPESVDWRDKGWVTEVKNQGMCGSCWAFSATGALEGQHVRDKGHLVSLSEQNLIDCSKKYGNMGCNGGIMDNAFQYIKDNKGIDKETAYPYKAKTGKKCLFKRNDVGATDSGYNDIAEGDEEDLKMAVATQGPVSVAIDAGHRSFQLYTNGVYFEKECDPENLDHGVLVVGYGTDPTQGDYWIVKNSWGTRWGXEQGYIRMARNRNNNCGIASHASFPLV

SEQ ID NO: 123568 - protein, 132 aa, Heterodera glycines
MGLAISGLFSRLFGKKEVRILMVGLDAAGKTTILYKLKLGEIVTTIPTIGFNVETVEYKNISFTVWDVGGQDKIRPLWRYYFQNTQGLIFVVDSNDRERVGEAREELMRMLAEDELRDAVLLIFANKQDLPN

SEQ ID NO: 123569 - protein, 181 aa, Heterodera glycines; identical to SEQ ID NO: 122559

SEQ ID NO: 123570 - protein, 84 aa, Heterodera glycines; identical to SEQ ID NO: 119578

SEQ ID NO: 123571 - protein, 238 aa, Heterodera glycines; identical to SEQ ID NO: 122108

SEQ ID NO: 123572 - protein, 139 aa, Heterodera glycines; identical to SEQ ID NO: 119931

SEQ ID NO: 123573 - protein, 149 aa, Heterodera glycines
MNRLRRDQKEKVQQFVSFTQANEQTAITCLTASNWNLEMAGDMFYQNPSYTNQQVGGGTGGGADSRKIDHLFNKYASDAKDKAQKIGPDRIGPNGMVRFLRDLNIEPTSRAVMVLAWKMGAQKQCEFTVQEFRDGISTLIPTGTVDING

SEQ ID NO: 123574 - protein, 147 aa, Heterodera glycines
MNRLRRDQKEKVQQFVSLTQANEQTAITCLTASNWDLEMACDMFYQNPSYTNQQVGATGGADSRKIEHLFNKYACDPKDKSQKIGPDRIGPNGMVRFLRDLNIEPTSRAVMVLAWKMGAQKQCEFTLQEFRDGISTLIPTGTVEING

SEQ ID NO: 123575 - protein, 440 aa, Heterodera glycines; identical to SEQ ID NO: 122558

SEQ ID NO: 123576 - protein, 205 aa, Heterodera glycines
  unsure (1)..(205): unsure at all Xaa locations
MRVLSFAGLQLKLDTIGDGEKIAAKIRECAGLEVLEMRGNTLGVGATAPIAEALECQSNLKRALWSDMFTGRLKEEIPRTLKTLCDAMILSGARLTELDLSDNAIGPMAVPGIKEFLAGEAAFALKTLKLNNCGLGIAGKTIAHCLIECHRRSVSHGTPLCLKIFVARRNRLEYTXTAALAEAFQIIGTLEEISMPQNGISAEGI

SEQ ID NO: 123577 - protein, 145 aa, Heterodera glycines; identical to SEQ ID NO: 122556

SEQ ID NO: 123578 - protein, 203 aa, Heterodera glycines
MAFLSRLSILPNSPISLLAVSLAVLAFVALASANPPTARETAPNAQQNNANSVATGEIAKNIAEKMERMNEFINYFRAKKFIDAHNLAFEKGEVSFKVAPNHLMHFTPAQYNRIRGLQMRSNRQRHNMATLAGNSSTLPEKLDWREKGAVTEVKDQGDCGSCWAFSATGAIEGALAQKKASKIISLSEQNLVDCSSKYGNEGC

SEQ ID NO: 123579 - protein, 411 aa, Heterodera glycines
  unsure (1)..(411): unsure at all Xaa locations
QLEDEVLLRTELENRLHTAKDDLDFARRSHSNQIEEIRRKRQVEMTSFSDEVEHRYQAKLQEQLQAMRXYFDNRIAQNRAEVDELYRNKLGEAAENANRNRDLAAKAREEAAMWRVRVQDLENSSKDHQGIVESLNRRVKDLEAALRRAHEDADIRIQQRDEQIEQLQKEIALMISDYQDLLDVKVQLDTELQAYQKMLEQEETRLHITPSTSPNTSVVGQNISTPNMVISTPRPVSPRLATPVTQSESLTTVRRGVKRRRLNQDDIVSFDKTSSSWKSNGHSNGNLVIGEVDKEGQYVSVINKGKEDVAVGNWTLKSSAGGREVQYKFHSRQTVKAGKTLMVWSTNSGQEHQPPNNLVFKNQQWPHDDAIRTELLNADREVEAWNEAFLQHSFSSRVEEGTDIDKNCRIM

SEQ ID NO: 123580 - protein, 651 aa, Heterodera glycines
  unsure (1)..(651): unsure at all Xaa locations
MPAKANAIGIDLGTTYSCVGVFQHGKVEIIANDQGNRTTPSYVAFTXTERLIGDAAKNQVAMNPSNTVFDAKRLIGRKFDDPAVQSDMKHWPFKVVQGEGARPKVMVEVKGEDKAFFPEEVSSMVLIKMKETAEAFLGQTVTDAVVTVPAYFNDSQRQATKDAGTIAGLNVLRIINEPTAAAIAYGLDKKGQGERHVLIFDLGGGTFDVSILTIEDGIFEVKSTAGDTHLGGEDFDNRMVNHFVAEFKRKHKKDLSSNPRALRRLRTACERAKRTLSGSTQASIEIDSLFDGIDFYTNITRARFEELCADLFRNTMDPVEKALRDAKMDKSQIHDIVLVGGSTRIPKVQKLLSDFFSGKELNKSINPDEAVAYGAAVQAAILSGDKSETVQDLLLLDVAPLSLGIETAGGVMTSLIKRNTTIXPTKTSQTFTTYSDNQPGVLIQVYEGERAMTKDNNLLGKFELSGIPPAPRGVPQIEVTFDIDANGILNVSAQDKSTGKQNKITITNDKGRLSKEEIERMVQEAEKFSKEDEVQRDRVSAKNALESYCFNIKQTMEDSNLKDKISEDDKKKVLEKCGEVLAWLDANQAAEKEEFEHQQKELEGICNPIITKLYQAGGAMPGGPMPGGGMPGGGGAAGAGGAGGPTIEEVD

SEQ ID NO: 123581 - protein, 337 aa, Heterodera glycines
MRCSHSLPLFLCFVLFAGLASLISARLAHESFAKHRHHSRGGAAARPEAAAGDQPQKRKSIYNSNKCYRQPSDAERVQKRTSMRLYEFDDYLFDELPETWDWRNVNGVNYASTDRNQHIPQYCGSCWAMGATSSLADRINIKRKNAWPPAYLSVQEVIDCSEAGSCEGGTPDKVFEYAHKNGIPHETCNNYQARDGKCDPYNRCGSCWPDKCFTVQNYTLYKVGDFGSANGIQKMKAEIYHHGPIACGVAATPRFDNYSGGIYKERTNEDINHVISVVGWGKDAASGVPYWIGRNSWGTAWGEQGWFRVVTSEYRDAGNKYNLKIEEDCTWGEPIII

SEQ ID NO: 123582 - protein, 162 aa, Heterodera glycines; identical to SEQ ID NO: 122554

SEQ ID NO: 123583 - protein, 335 aa, Heterodera glycines
  unsure (1)..(335): unsure at all Xaa locations
MDKNIGNKNNNEFLLLGMGNPLLDLQVATLDTQIHAKYGLAEDGADLINSENSASLLPIFDDISTLGNKIEFVPGGSAQNTVRVCQWMVKAFGVNLKSCYFFGAVGKDKYGQILHEKAQAANIEVRYQEVPTEKTGTCAVLVFGNKRSLVAHLGAAEHFTPVHLNIEANQSLIEKISNFYVEGYFLTVSLESILFLATHVISSTRPKHFALNLSAEYICQFFXDRLEKVLPYVDILFGNKQEALAYAKTREIGKTDVGDIALYLSEKEKVNGXRKRIVVITQGPLPVLVAHDCELTQFPVEPISEDKIVDTNGAGDAFCGGFLAAFSTGRSLDLC

SEQ ID NO: 123584 - protein, 142 aa, Heterodera glycines
MSVGLSSIVDDSHQRQSHFWAEILPPGVGHTNDISGDAIWTLSSCKEGLGVHQLLNDREDTYWQSDGLQPHSITIEFQRKTEVDFLLMFLDYKLDESYTPSKIQVQTGASVLDLDEPKSLSFTEPSGWQMIDLRHAGTKRPA

SEQ ID NO: 123585 - protein, 236 aa, Heterodera glycines
  unsure (1)..(236): unsure at all Xaa locations
IAHTQMKLMKHRNKKAHIMEIQINGGTVAEKVDWAREHFEKQVPVEQVFEQDEMIDCIGVTRGKGFKGVTSRWHCKKLPRKTHKGLRKVACIGAWHPSRVSFTVARAGQKGYHHRTEINKKIYRIGKSCLTADGKKNGMTDFDIXEKNINPMGGFPHYGLVNQDFLMIRGCCIGCKKRPITLRKTLIKQTKRFAFEKINLKFIDTSSKFGHGRFQTSAEKKTFMGKLKKDFLAESA

SEQ ID NO: 123586 - protein, 170 aa, Heterodera glycines
SLPSSSSVIFQQFTIDQRHFVDEDYFSLESIFATNTNICCTFESKTPPALFPLLGRKVFEVISEKGYRANVPAWLVPAVDHICSFAVPTVYNSVNRDVIHAGAQSVNLEQLQRHYYTLGTFICRLVPGEQAQHIALALLSAFTQRIGRIVRDCTNTGAKPTRLDETEKRI

SEQ ID NO: 123587 - protein, 157 aa, Heterodera glycines
AIVAILSYGGYNQEDSVIMNQAGIDRGLFRSVFYRSYRDSEQEIDNVNEQLIEKPTRDKCKGMRNAIYEKLDDDGITSPGTRVSGDDVIIGKTIALPEVEDELEASTARYSKKDASTTLRSSETGIVDQVMVSVNAEGNKFVKIRVRSIRTPQIGDK

SEQ ID NO: 123588 - protein, 215 aa, Heterodera glycines; identical to SEQ ID NO: 122795

SEQ ID NO: 123589 - protein, 155 aa, Heterodera glycines
VGLNRKDSSESQEPGLHPFQYVQAGFFTGVATRAIIQPFDVLKIRLQLQEEPLRGKSRGKYSGIFQSAKLIYHEEGIAAFWRGHIPAQGLSIVYGLVQFCTFELLTKQAGDFGFHNFSKSVDFVCGASAGCLATTCAMPFDVVRTRMVAQGAHRT

SEQ ID NO: 123590 - protein, 157 aa, Heterodera glycines; identical to SEQ ID NO: 122476

SEQ ID NO: 123591 - protein, 145 aa, Heterodera glycines
MLFRYFPLLNEYSAHKLFLTLFPSTGSEMVRGNPHLPIIVGKEHCSNGTKWILNVFGDCVDTPMKMCGFWVGLMSLFLWLIPLFPQLYENFRNKRCEGLSIFFLMFWFIGDSCNMIGAVLTHQQPLQQIIGVYYILQDLALLGQF

SEQ ID NO: 123592 - protein, 1024 aa, Heterodera glycines
  unsure (1)..(1024): unsure at all Xaa locations
MAILQNLNEKEAKIPTSVGVQLRILNSMPILANIEGQMKIKAESASLMSPLGIQFDVNTLASARLSQIQKMELWTPFASSXVESVRSAQVNLPLQAELNANSDQGISLKANLPKQKTQLASVHSLPITFTAKVDQNTKLVARAAPNRHHPRXKLERQQYELNSVQGQKNLAMPLHFRGHYHWPAEPTSYQQFAQLLLATENAVNIHYQPSRESPREAIFRVTGQHFEQLAQSEQPDAQLRNFFSEKFANAYSCDDEQCQQRGDCEQCEQIEQQQREDAQELEDQQMRQQSLHSFISAYKPRQQYKHSLKMVAQTNGGAKDAKAQGDIQAICDEQTAYCKVLVKVERPPIGNENQKWMLNAQAHVLMPETAASVEQLQTQPKQLKQFIAQAKAQWGQQGQQTQQVNIRVHGAQAHTQQVRAVLQQQQGSQLISAQHLRNMQRRSAFLNKFQIEAIYSLKANAQNAINRVLELFKSAYFWNTKSQLMSGQSAQKDGKIAATILIDPVTQKSANITIRTPAQQLRMEQIEVPYKVRPFALIRQRSAQQTHSLAQLFHQFSIKYRPQCTVDGRKVNTFDELIYTAPLSSNCYSVVAKDCGSDQPQFVVLMKKVAQQQQQQQTNKRAQNAAKVLKVITPEQQIECHPKTNAAGIPTQLICKVNGQQVTGDEQCQDSSSCVQFNNKQQDDVTIQTEAIAVRFNGRKAWLKVSQAYKNTQCGLCGHYDDSDDQGEELRMANGQRASDLAEFHRSYALEDAEECPQQVMNNFYSEQQQQNSEQDTFYGQFNQFEDEDEADDEQQQQSEKDEWQNEQFNGQFEEQNDGQVTDGGNPFEGIFNDQQQQQKCCCCCDDDEDEEGTNEQSQCRQNCQNGGECPEKCNKNDQKQCRKSSPPQPQQQQNCKGSDDEQCKGICNDGDEACAEQQQQWKAVWPILRTKTHEQNHAVCFSTRPVKHCPPDAYPYNPMNGYEQQQQPKTKKVSFVCMERAEPETRRLLRSLRRGQRVVDVNARGASFTENVSEPHQCWRRRY

SEQ ID NO: 123593 - protein, 245 aa, Heterodera glycines
MSSPPSSVLPQDVFILSAVRTPIASFRSSFASLNAVDLGTFVATEAIQRAGLRPDQVEETVTGCVLSAGSGQNVSRQIAIKSGIPEARQAYTVNKVCSSSLKALILGTQSVQLGQRSMVLVVGVESMSQAPFYLARGDNNYGDIKLLDSIQRDGISDAMLGQPMGVCAEKTVAEFGFTREQQDAYALASYARATRAWAGGAFGAEIVPVKVKQRKGTELLVAEDEEYRRLMPDKVPSLQPAFVKD

SEQ ID NO: 123594 - protein, 172 aa, Heterodera glycines; identical to SEQ ID NO: 122544

SEQ ID NO: 123595 - protein, 115 aa, Heterodera glycines; identical to SEQ ID NO: 122755

SEQ ID NO: 123596 - protein, 114 aa, Heterodera glycines
LRKKQHLLVQARENWTAKDLKRVVEGILKVPPEKQSLYKPTNEQRTEWEAMDEKQTLHELGFTMKNARADGPAVLALVLPEDGKSPDIVPMTVAPPVPEAMAQNKQSEVEMVEE

SEQ ID NO: 123597 - protein, 118 aa, Heterodera glycines
MPPKASKKTDPKGGKAAPAKKKEGGGGGKAKKKKWSKGKVRDKLANMVLFDQATYDKLYKEIISVKLITPSVVSERLKVRASLAKAGLEELHQKGLIKCVVKHGSQLVYTRATKAEEA

SEQ ID NO: 123598 - protein, 136 aa, Heterodera glycines; identical to SEQ ID NO: 122101

SEQ ID NO: 123599 - protein, 249 aa, Heterodera glycines
MISRMASSSCSSPSSSSKFGPQMKCSTPKPVPMDDDGTEEGDHGEQLLLDRHELRILCDEHLQSGDCQTAAFWAEKLLALSIGRTLNERLPDIAHYLSVLTAAQFWQTIITLIERHDLFPKHLVFAFFHINALFHRELYSEIIALPVGYLCHWDDVPFIQPDSATYICAENDAVREPGIRQQLDTLLREKKYESRMLLLLAKTYLMVQNRPAAAGCLKPPEFSKATSSRCCTLRWSTVLPTISSWPPTF

SEQ ID NO: 123600 - protein, 360 aa, Heterodera glycines
VHLSEKCTWENKQGEKQAETRAQLKDDAFLREIHSRLKPGIENSERRFDVHKFTCAALELPDFSDFARLRPLIDALIAELDLNDFLGCTAALEMLAETAATAPKCVPFFGQIGLLDKVYALFIRTKEEPDMGIIHIACIRFFAYLCTTDDNALTKFPKFTADVFDAVFRFDAFDVTRRQLAFETLAVISSTSGAKQIFSQNETLYNMQRAMSNLAVAVATAAEPSLKARHLEAVRMFFDRIADESGCQPEQKCTTASAEAEEQLLHRWFRWLGEPFPRLLLQCVRDPISEVQLAALRVLMALTRHQWAYAHFCAITDFVNLLVDRSVNFDADAMQLKYALICRLVEAAPSALNDGQMEML

SEQ ID NO: 123601 - protein, 164 aa, Heterodera glycines
MVLDPKSKDKARELGSYRDMRFEGSLPEQERRLAQSTTLYIGNLSYFTSEEQVWELFRRAGDVRRVIMGLDRFNKTPCGFCFVEYYTREDAENALRYISGTRLDDRVVRCDWDAGFKEGRQFGRGKHGGQVRDEYRQNFDSGRGGWNKTIQKRNDQFTQRNIKA

SEQ ID NO: 123602 - protein, 315 aa, Heterodera glycines
  unsure (1)..(315): unsure at all Xaa locations
MNREETNKHPLIVTYAGRHYDISGFVSXHPGGERVLRMVAGANVDSFIDGTSELLGXRHEHSAAAYGILARYSLDQEFKRDPLVDSKAPMLWRVGELRERYWTWIHHPYDGVLRLFESDLLEQLTRTKWWLIPLIWLPIVSYFFFTGLSLLREDFGFSGGPLLAFGLFAFGCLAWTLLEYSLHRGLFHWHPNAHSYRQITLHFLLHGLHHKTPMDSDRLVFPPAAAVLIVGFFYTIYRSLLPFPIFCCFASGKLFGYIVYDITHYYLHHGRPETNSGWHYRKIYHHNHHFKDSDSSFGISTTFWDYVFGTVGTFN

SEQ ID NO: 123603 - protein, 321 aa, Heterodera glycines
MPMLAHFGSFQGQDVFECQLRSESGVVVKVISFGAIIRDWLVPTPQDQLRSVVLGFDSFENYVEHSPFFGAIVGRVANRIGRARFTVDGKEFLLAPNEGKNQLHGGTETFGRKVWKMEPLCDNAAAKWPSGVRLSLESADGEGTFPGNLRVSVTYRLTTNKLRMDIEATSDLPCPVNIVQHNYFNLSGHGDIREHSLKLAADWFTPTSSDQIPTGEILTVSGTELDFREEKKLQTKDGKPIELDHNFVLTKGKGTDAQIAAVLRAPDNSLALTLRSNQPGLQVYTSKSLSVPVPGLYGQRYAKFGGICLEDQNFPDAVNHE

SEQ ID NO: 123604 - protein, 269 aa, Heterodera glycines
MFYHDLHDNENSHDKELKQLVQMDDLAIPKFVMPPLGIKPKKFVRKHFGPNSRLPMAQFLKGTTTLSFVYKPKTPQDKGGVIVAVDSRATGGTYISSKTVEKIIPINDQLVATMAGGAADCQYWTRVVSKYCNLFELREGTQISVAAASKYFANVMYDYRGQELGVHSMVCGVDKFGPSIYMVEAEGTRVKIDTICSLGSGMLHAMSILDTKYKEAMTDAEALELGREAIVYATFRDAASGGHCNLCHITSEGKTIYPPFDVNDKYYEF

SEQ ID NO: 123605 - protein, 143 aa, Heterodera glycines
MMQTIKCVVVGDGAVGKTCLLISYTTNKFPNEYVPTVFDNYAVTVMIGGEPYTLGLFDTAGQEDYDRLRPLSYPQTDVFLVCFSVVTPASFENIKEKWVPEITHHCSKTPFLLVGTQVDLREDAGTCEKLAKNKMRPISAETG

SEQ ID NO: 123606 - protein, 224 aa, Heterodera glycines; identical to SEQ ID NO: 122152

SEQ ID NO: 123607 - protein, 342 aa, Heterodera glycines
  unsure (1)..(342): unsure at all Xaa locations
MVKPKVGINGFGRIGRLALRAAIEKDTVQVVAVNDPFIELDYMVYMFNYDSTHGRFKGKISTNAGNLVVEKEGKSAHTIKVFNLKDPAEIKWGEAGAEYVIESTGVFTTIEKASAHLKGGAKKVVISAPSADAPMYVMGVNEDKYDPAKXDDVISNASCTTNCLAPLAKVINDEFGIIEGLMTTVHAVTATQKTVDGPSGKQWRDGRGAAQNIIPASTGAAKAVGKVIPELNGKLTGMAFRVPTPNVSVVDLTARLEKPAPLDAIKEAVKKAANGKLKGILAYTEDQVVSTDFLGDSHSSIFDAGACISLNPHFVKLVSWYDNEFGYSCRLVDLITHCASKA

SEQ ID NO: 123608 - protein, 241 aa, Heterodera glycines
  unsure (1)..(241): unsure at all Xaa locations
MVGITELAEATKKAFGAGPLIAANCATAENAKSGNEVEFGSMKFYGLCGIGGILSCGITHTAIVPLDLVKCRIQVDPAKYKGIIGGFKVTLQEEGVRGLAKGWAPTAIGYSMQGLGKFGLYEMFKNVYAGMIGEELAYSCRTYLYLAASASAEFFADMMLXAPMEATKVRIQTSAGAPPTLRGCAPFIYRTEGLMGFYKGLPPLWMRQIPYTMMKFACFERTVELLYKHVVPKPXAECTQA

SEQ ID NO: 123609 - protein, 144 aa, Heterodera glycines; identical to SEQ ID NO: 122506

SEQ ID NO: 123610 - protein, 430 aa, Heterodera glycines
MPPLSPPQLFFPAFLLLGHFLPPFAHGQLPSAMLPAPSTSQLQVKISNLPVHVATAQHLPQLVWRVVGRQATERVFCVSEAPVSQLRFVCVDCVQKNITDLVDYLNTAQDSTRIATSPAVELPPVDANPSWTGATIICQAAVNGGTKDSPPSVVDVQYLRGVHVVDSNGQGPVHIPNQGFRFYVECVRGTDGQCQQSAARRKTLHCAVQANPAANSFRWLKNGGPISGGNGPEFMIGTDMIGHSLQCAANNGLYGEELQSPAVYIDSYTAARLIQDNFQQVQSSAPFQQGNRVEMGQRVQMSCVVEGNPRPAVFWKLRRSNGQVVDAPCPQGLNGQYREVPPTQLPTGAAAVANSLAAQQSNSLIRLQAICDLQVANYSFSGQYWCSACSYVSQGLPECSPGQDAPGDRLLNIQVQGPPQQSETEPSVEQ

SEQ ID NO: 123611 - protein, 251 aa, Heterodera glycines; identical to SEQ ID NO: 122498

SEQ ID NO: 123612 - protein, 321 aa, Heterodera glycines; identical to SEQ ID NO: 122434

SEQ ID NO: 123613 - protein, 209 aa, Heterodera glycines
KTYGPRPESFTLDDGERYYVGADVGQYLKYHRGTLYKRYPQLWKRMASVEEKKKIQELGCATSYINSNIMLVKANEVEDIFDGQEEKYRASVSGGSAYGRAEGAQTLRSRGSAPWLNQQVTSGSHHLESVPCSTPSAHGRGHFKNRDYAYVADDLESYRRVMENAQAGECLVPIRLDMELDNIKLRDCFCYNKNDKLITPEMVAEVLCE

SEQ ID NO: 123614 - protein, 211 aa, Heterodera glycines
  unsure (1)..(211): unsure at all Xaa locations
MFKTYGPRPESFTLDDGERYYVGADVGQYLKYHRGTLYKRYPQLWKRMASVEEKKKIQELGCATSYINSNIMLVKANEVEDIFDGQEEKYRASVSGGSAYGRAEGAQTLRSRGSAPWLNQQVAQKTNVTSGSHHLESVPCSTPSAHGRGHFKNRDYAYVADDLESYRRVMENAQAGECLVPIRLDMELDNIXLRDCFCYNKNDKLITPEMV

SEQ ID NO: 123615 - protein, 385 aa, Heterodera glycines
  unsure (1)..(385): unsure at all Xaa locations
MSPSLSVANSNVSRQLGQPKVAGFKDKDKPESVRTSNIVAAKAVADALVELSKAQDIEAGDGTTTVVVLAGSLLDAAEKLLAKGIHPTTISDSFQRAATFSEKVLEEMATPIDINDDDELVKLAMTSLNSKVVSQHSHLLAPMAVQAVKKLMSSPEDSSVNLKLIKVVKKLGETVEESQLIEGALIDQKSMGHGGPARVEKAKIGLIQFQISPPKPNMENQVVISDYAQMDRALKEERNYILELCKQIKKAGCNVLLIQKSILRDAINEMALHFFAKMKIMVIKDIERDDIEFYAKILGCRPVASVDHFVPESLGTADLVEEIETADGKVLKVTGLKQSGCAVSILVRGSSKLVLDEAERSLHDALCVIRCLVKNXALLTGRGAP

SEQ ID NO: 123616 - protein, 159 aa, Heterodera glycines; identical to SEQ ID NO: 122132

SEQ ID NO: 123617 - protein, 161 aa, Heterodera glycines
  unsure (1)..(161): unsure at all Xaa locations
MKTETCVYSGYKIHPGHGKRVVRADGKIQIYLSKKAQRGAALKRNPRDVPWTVLYRRKHKKGVHAEEGTQRKRVKRTVQIASRPIADLTVEALXLAQRNQKPEFRKQQRDAGXIKAAKESARVKKDETKKKQQKIDKKAAPTKTKAAKQVKAPKQFVGGKR

SEQ ID NO: 123618 - protein, 238 aa, Heterodera glycines
  unsure (1)..(238): unsure at all Xaa locations
MSDDYRSSIGPRPAFNRNSTAYSSTGGPVSGGNRVLKIVTETMSSSTSGGGGGMSPFGANAAQIRDSRDREKKELSDLNDRLANYIEKVRFLEAQNRKLKADLDMLQGRRGKDTITIKTMYESEIQTAKKLIEDTGRSKHELEQDVAKLQRDLFXQRRKYEEAVRSRAGDREKLDDLLVQLSNLEAEISLLKRRIALLEEELSKLRKENSRLQADLQRVRAELDQETLNRIDYQNQVQ

SEQ ID NO: 123619 - protein, 210 aa, Heterodera glycines
  unsure (1)..(210): unsure at all Xaa locations
MHAIRTISRTFSRSTTAPVGIPFVVDNDGKTERVYDIYSRLLKDRIVCVMXPIDDFFAASVIAQLLFLQSESGKTAINMYINCPGGSVTAGLGIYDTMQHISAPVATWCIGQASSMGSLLLTAGAKGMRTSLPNARIMVHQPSGGAYGTAADIVIRAEEINRMRKRLNEIYAMHTGQTVETIDQALDRDRFMSALQAQQVRLFDRYGTRS

SEQ ID NO: 123620 - protein, 65 aa, Heterodera glycines; identical to SEQ ID NO: 122545

SEQ ID NO: 123621 - protein, 362 aa, Heterodera glycines; identical to SEQ ID NO: 122156

SEQ ID NO: 123622 - protein, 211 aa, Heterodera glycines
MASKFVFSLRFSYPRLLTSSALNNKKSGPNFLQSRSIVTKFDLELPDDYPEPWPYKQWGFNQFMQHFDKTLKRWHINSKLIVFESNIGVGRSSIAKELADALGFYYMPAFKMDDILVDRYNNDMRDYYHLFPKRFRFPDINMFYKDPADDQTAVMQDLMYDCRWEQYLNAQAHLFNTGQGVVLERCVHADFVFANAMRAKDWISREYLNFY

SEQ ID NO: 123623 - protein, 216 aa, Heterodera glycines
  unsure (1)..(216): unsure at all Xaa locations
MASKFVFSLRFSYPRLLTSSALNNKKLVPNLIQSRSIVTKFDLELPDDYPEPWXLKQWGFNQFMQHLDKTLKRWHINSKLIVFESNIGVGRSSIAKELADALGFYYMPAFKMDDILVDRYNNDMRDYYHLFPKRFRFPDINMFYKDPADDQTAVMQDLMYDCRWEQYLNAQAHLFNTGQGVVLERGRHXDFVFANAMRAKDWISREYFNFYMYKRK

SEQ ID NO: 123624 - protein, 181 aa, Heterodera glycines
  unsure (1)..(181): unsure at all Xaa locations
MPIKASGETLRKYIVVGRKLPTANDPNPTLHEMVIFASNHVVAKSRFWYFTSMLRRVKKTHGEIISCQEVFEKKPGSVKNFGIWLRYDSRTGHHNMYREYRDVCEAGAVTQCYRDMGARHRAQADRIQIIKVQTISVXDCKRAGVKQFQNSKIKFPLPHRVNSKRRNMTPFTTQRPRTHFV

SEQ ID NO: 123625 - protein, 225 aa, Heterodera glycines
MDAETKNYKLTYFSSRGIAEPIRLILHYKGIPFEDVTFSSTLADESSREKWLKQKQNYLYGQLPNLEWDEGTEHKVLAQSQTICRYLGNKYGLAGSDFWEAAKTDEIAEWFKDIWAAFLPFLKVAVGAEAGDKEAMKKEIFVPLIYDRLVTTLVEMLNKSGSGFLLPSGLTWTDFVFANALTTFNNMDKGLLFESHKVLADYEKRVYSANESIKKYVEGREAKEF

SEQ ID NO: 123626 - protein, 207 aa, Heterodera glycines
  unsure (1)..(207): unsure at all Xaa locations
MFENKSEGGAEKKKSGGFNTKKFLLDLASGGTAAAVSKTAVAPIERVKLLLQVQDASIHITADKRYKGIIDVLVRVPKEQGFLSLWRGNLANVIRYFPTQALNFAFKDTYKRVFTQGVDKEKQFLKFFAMNLASGGAAGATSLCFVYPLDFARTRLAADVGKADARXFKGLADCILKNPQSGRSPSALPPGFIPPHQGHSSFYRGPF

SEQ ID NO: 123627 - protein, 154 aa, Heterodera glycines
  unsure (1)..(154): unsure at all Xaa locations
MNFRPFAFLSLRFSSSSSASSSSLLPSYRKAIVHPIVRVDHAGELAADRIYAGQLAVLPKTHRLVPIIEQMRREERHHLDEMERLIVKYGVRSTALAPICSVAGFMLGVGTALLGEKAAMACTIAVXEEVIGPHYDDQIKELMADDANANRELM

SEQ ID NO: 123628 - protein, 317 aa, Heterodera glycines; identical to SEQ ID NO: 122087

SEQ ID NO: 123629 - protein, 143 aa, Heterodera glycines; identical to SEQ ID NO: 122060

SEQ ID NO: 123630 - protein, 56 aa, Heterodera glycines
  unsure (1)..(56): unsure at all Xaa locations
MVHENIHWSRPRKFGXGSRSCRVXFNHHGLIRKYSLNVCRRCFREYASDIGFKKLD

SEQ ID NO: 123631 - protein, 188 aa, Heterodera glycines; identical to SEQ ID NO: 120932

SEQ ID NO: 123632 - protein, 265 aa, Heterodera glycines
MADRAGFQSGFGGAAPPSARGRGGPRGRGRGAARGRGRGKDAEKEWVPVTKLGRLVKDRKVLTIEEIYLHSLPIKEFEIIDLLLSGLKDEVLKIMPVQKQTRAGQRTRFKAFVAIGDHNGHVGLGVKCSKEVATAIRGAIIAAKLAIIPVRRGYWGNKIGKPHTVPCKVTGKCASVLVRLIPAPRGTGIVGAPVPKKLLQMAGIDDCYTSAVGQTATLGNFAKATYYAIQRTYSYLTPDLWKENELPRNPLDHIGRWRGAISAAR

SEQ ID NO: 123633 - protein, 126 aa, Heterodera glycines; identical to SEQ ID NO: 122134

SEQ ID NO: 123634 - protein, 143 aa, Heterodera glycines; identical to SEQ ID NO: 122710

SEQ ID NO: 123635 - protein, 259 aa, Heterodera glycines
MMVKSALSNSLSILNGFTSRAFTTSNIRSLRFRSQRPQNELRTVGKMVAQSDSPYEKGQCFVHRLFAYRGVIIRSKNCSVFTKRISDTQTVQQEVLPFYQVLIDKDDWSEMNFETDMTTFLKSTGNREETAISGMDIVSHDEILPFEPSVSELKSLSDGSGEAAPIKHYLYDQLFKKKTGEETKRDAGVNRQRPEEEMCWIFPIAVTKQTTDCFEVQVSTFNLGSNNLNRSHSPHNWRIVLRVENSQNNTMYLRNTVLK

SEQ ID NO: 123636 - protein, 98 aa, Heterodera glycines; identical to SEQ ID NO: 122380

SEQ ID NO: 123637 - protein, 190 aa, Heterodera glycines; identical to SEQ ID NO: 122053

SEQ ID NO: 123638 - protein, 123 aa, Heterodera glycines; identical to SEQ ID NO: 122312

SEQ ID NO: 123639 - protein, 110 aa, Heterodera glycines; identical to SEQ ID NO: 122542

SEQ ID NO: 123640 - protein, 172 aa, Heterodera glycines
MGGEGSGRSGGVSPECLYAVLGVQKGADEAEIKKAYRRLALKWHPDKNPERKEKAEKMFKRVAQAYEVLSDEKRRTDYNRHGMCRPAEAAFASAHRRRTAPADSHYAHHQSHPFHAHFRSPFDIFREFFGDPLSSSDFHRSPFFAFPANGGMKQRRRHTTNLFGDGAFGAHF

SEQ ID NO: 123641 - protein, 89 aa, Heterodera glycines
MAAQLASALSSPDYYNCQMQPGLTRRQRDICVRHPSAMRSISDGLRAAIDECHAQFERERWNCSATFNVGVPSEEDSTPETAYVFAISS

SEQ ID NO: 123642 - protein, 131 aa, Heterodera glycines; identical to SEQ ID NO: 122672

SEQ ID NO: 123643 - protein, 243 aa, Heterodera glycines
  unsure (1)..(243): unsure at all Xaa locations
MERLFNTPISSLSTNTSNCTRNTICLGFLDGSIQCFSFDTQRGITPSMESSVKLGGMWRKRMKRSVRAMQISEDGTSLYATSSNRAVCLYDVETGKRVRCIREGHKSXPSAMALLPGERRHFATGAENGEIKAWDFGQPKPNVHTFGEQADIINALHIWRNNLLAASGDGTLAVYDTHKGKVRIQSETMHSELLSLAVTERFTYVGAADGHIEVFRHGQFGNIRERMETPFLMGVEQMVVLRN

SEQ ID NO: 123644 - protein, 213 aa, Heterodera glycines
TSKWAFPQDRWHKRRKTGGKRNPIHKKRKFEMGRPAANTKIGPKRIHLVRCRGGNIKHRGLRLDTGNFAWASEGCTRKTRIIDTMYNASNNELVRTKTLVKGMIVSIDAIPFRQWYEAHYALPLARKKGQKLTEDEEARIGGAQKRSKSTLKKYTERQKTAGVEPHLLEQFQAGRLLACISSRPGQSGRCDGYILEGKELEFYNKKLKAKKAK

SEQ ID NO: 123645 - protein, 101 aa, Heterodera glycines
MASSIRLAGGALRELRIHLCQTTAASNGVREFIQKDYVDLKQNNRDFPILVRECSGITPRIWARYEHGVETSVSVENQPRQKIMEVIKEMATKKMETKKID

SEQ ID NO: 123646 - protein, 206 aa, Heterodera glycines
  unsure (1)..(206): unsure at all Xaa locations
MPNIMGLHGGSMIAMRSKDSVVIACDLRLGEQAMKNIATNATKIHPISDNVFIGLTGFNADATTVLNKLRTHQAIYEMREQRPMSPKALTSYLAWMLYKRRFGPFLIEPIIVGLNQQNEPFISHMDVVGSVSEPEDYTVGGTGGDLAMSLCEALWRPDMTSEEMTVAVGQAMLAVVERDASTGWGXVIHTITAEGVTTKMIKSRMD

SEQ ID NO: 123647 - protein, 178 aa, Heterodera glycines; identical to SEQ ID NO: 123230
  unsure (1)..(178): unsure at all Xaa locations

SEQ ID NO: 123648 - protein, 222 aa, Heterodera glycines
MPEKKPTKCLSKGKELPCGREIIQDFVMMMPGSMDKYHQLCSILSSFELWSEESRTSFLSQFLDSYDILDVNCSDLVLKLCKIRWHTVPPQMLSQFADFLCALAINHVHHINSVFNCFVDHFLPIGNAKDPSNFEAHRPPAVVDDHFQESLYALANLSIQNVVSCNPLTTPLLLECFVKRFPHIKQPSPKLLAFMRNVLRFADWIRDEEISAEIWSLIVEKL

SEQ ID NO: 123649 - protein, 132 aa, Heterodera glycines; identical to SEQ ID NO: 122109

SEQ ID NO: 123650 - protein, 198 aa, Heterodera glycines
MLCDASRLAPPSSTFSLRMGQDSHGYGHRAFSTSGAAQELSSALDEEINAEKELVQDKLGGTSAPSVPGFKITTKGAEVRLSKTHGNEKIEVILNVNHSVDIEEDEEYEDEPQAEMEPESVPVSLPHFTISITKNNQSMFFALEMVKTDDGGFDFTVEEFFIAPSVNGEPVNEVGDDVYSSSGKYIDPKLHDLLFVRY

SEQ ID NO: 123651 - protein, 113 aa, Heterodera glycines; identical to SEQ ID NO: 122036

SEQ ID NO: 123652 - protein, 209 aa, Heterodera glycines
MFDFHQFMGLGGGAVATYSVQLRAFSAPFFQRHDERRINELNYGGKILLPNSCLDNLMRRNIQYPMLFKLTNVGPALQRGTHAGVLEFLAEEGRCYLPSWMMAQLALREGDLITVEYKALPNATYAKFKPMSTDFYNISNPRAMLEVELRKFSCLTKGDVIAVQYNEQVYEFQVKALKPENAVTIVECDINIEFDAAEGYVEPNRTHQQ

SEQ ID NO: 123653 - protein, 109 aa, Heterodera glycines; identical to SEQ ID NO: 123229

SEQ ID NO: 123654 - protein, 176 aa, Heterodera glycines; identical to SEQ ID NO: 122433

SEQ ID NO: 123655 - protein, 191 aa, Heterodera glycines; identical to SEQ ID NO: 122533

SEQ ID NO: 123656 - protein, 336 aa, Heterodera glycines
LLAPYSKGGKIGLFGGAGVGKTVLIMELINNVAKAHGGFSVFAGVGERTREGNDLYHEMIEGGVIDLKGKNSKVSLVYGQMNEPPGARARVCLTGLSVAEYFRDKEGQDVLLFIDNIFRFTQAGSEVSALLGRIPSAVGYQPTLATDMGSMQERITTTKKGSITSVQAIYVPADDLTDPAPATTFAHLDATTVLSRGIAELGIYPAVDPLDSTSRIMDPNIVGNRHYDIARGVQKILQDYKSLQDIIAILGMDELSEDDKLTVSRARKIQRYLSQPFQVAEVFTGHKGKFVTLEQTIDGFESILKGEMDHIPEVAFYMQGAIDDVHKKADELAKQS

SEQ ID NO: 123657 - protein, 288 aa, Heterodera glycines
MTTGSDRTQLQLQLHFNANNSSEASQSQNSSEQMQNCSTNERVSGEDSVPFIDRETFGDAESDRGRGPPPDRFRLVYLIVLLHGMGMLLPWNTFITIAGDYYLQFKFANVSNEDNYKVYFFNYLTVCAQIPNLLLSFLNLFVVIRGGFYRRIYFTLAVIFGICLVTIAMVYVPTDNWTFGFFLFTMLSVVLLNSASGVYQNSIWGLVADFPGEFAGAIILGNNLCGILMAVLDILIIVLGLRFVHFAFVRFAFSRCQCRTRRNSLLRSRSVYRRPLHFFFPFSSKIGS

SEQ ID NO: 123658 - protein, 84 aa, Heterodera glycines; identical to SEQ ID NO: 122135

SEQ ID NO: 123659 - protein, 154 aa, Heterodera glycines; identical to SEQ ID NO: 122726

SEQ ID NO: 123660 - protein, 111 aa, Heterodera glycines; identical to SEQ ID NO: 122404

SEQ ID NO: 123661 - protein, 142 aa, Heterodera glycines
MTSRILSCNLRRYFSKMNQHIEFGTTKSASSDKQSPPSPTNNQTQHEGMSQECREQIEQMEKLKSDNEMLTDKYKRTLADMENLRKRTQRQIEEAKLFAIQPFCKDLLEVADVLDLALNSLEKMKTEDGAASLDSGVNKGIK

SEQ ID NO: 123662 - protein, 271 aa, Heterodera glycines; identical to SEQ ID NO: 122387

SEQ ID NO: 123663 - protein, 148 aa, Heterodera glycines
  unsure (1)..(148): unsure at all Xaa locations
DSLRRLAFFGVALSTVSTLICVLSVPMVYSYVQHINSQMMAEVDFCKMRSGNIWREVTRTQGMHAXTRHRVARNADACCGCGESPRGPPGPPGPDGNPGGDGQPGGPGQPGAPAQAPPRPKPSGTGCQTCAPAENGHPGPQGPPGQPG

SEQ ID NO: 123664 - protein, 350 aa, Heterodera glycines
ETQIVVGVASVCSLLAIVATLVVVPSLYSQINEISLKVHDGVQAFRVNTDSAWNELMEVQITVTPPAKPRENPFVSIFRSKRQLPGHCQCAGVQQPQCPPGPPGPAGAPGQPGYPGQAGEPGQPGVPGQPGAPCPDVPHVCQHCPAGPPGKPGDQGPAGQAGQPGRPGQPGQSGGVGPPGPPGPQGQAGSPGRPGGSGQPGQPGQNGVVYKTVPGPKGQPGQPGAPGQPGAPGRPGKPGDQGQPGAPGHPGQPGQPGAPGQPGHPGAAGAPGKDASYCACPPRSGGGYGVSGGGGGGAKVEHAPLPAEQAPVPEQPAESVGVAPAPAEVASNAAGGQGEAEAAKGYRKKM

SEQ ID NO: 123665 - protein, 139 aa, Heterodera glycines
  unsure (1)..(139): unsure at all Xaa locations
EVLKQLTEEKFIVKATNGPRYVVGCRRTIDKEKLKQGTRVALDMTTLTIMRQLPREVDPLVYKMSHEDPGNVSYAEIGGLSDXIRELREVVELPLINPELFKRVGITPPKGCLLYGPPGPPGAPGQPGQPGNSGQPGQP

SEQ ID NO: 123666 - protein, 158 aa, Heterodera glycines
MSNITPGNTTQTQRGEGGGDLSADKLREINSLIAAFPSSIGQTPPDSALGTALNNMMVQWNSLLSQVVTEVDHPQPILEHIKETAEFSVKQFRDACLGMISELTRTSVDWQLNFPNEMAEQEISEYENSIRRQEQLLGKIRQKLDDEILSGENSNFVP

SEQ ID NO: 123667 - protein, 182 aa, Heterodera glycines
MASFLRFLACRHFSMSSVLRKEAEQLTNEHIDKIRQRTRFSETSAFHGRGSGGRTNGESGEDAFTNPFYIASYYDSKRFEAIRGVSIFASISLLLIYVAWFREPNEVDELWDYDMRLVYFVAKKRVLKDQIEQAKKGGHGTVDLETDLINIEVQEQKIREEEEKKAKKVAAKKKAEQKRTTA

SEQ ID NO: 123668 - protein, 259 aa, Heterodera glycines
  unsure (1)..(259): unsure at all Xaa locations
DYTTYFLPPTCQARLDVFKLTDDDAMKFLVCESHIGTKKMDYQMEHYVWKRRSDGIHIINIRKTWEKLLFAARAIAAIEXSSDVVVVSAQPYAQRAVLKFAAHIGATPIVGRFTPGSLTNQIQKNFKEPRLLVVSDPQLDHQAVREASYVNTPVIAVANTDSPLKFVDIAIPANNKQKHSVGLIWWLLAREVLLLRGKISRQTGFMVDDKLIMPDLYFFRDPQEQEKEGTEGEAEADITVKEGGWGATGGMDTMGGDFP

SEQ ID NO: 123669 - protein, 294 aa, Heterodera glycines
MTNERDFSHDDHINNAVGTNGDSKDAAKRKDICRDFLNNICSRGNRCKFYHPEDSVEKNQNSADEPYQFCIDFQNQGCYRENCRYVHAFREDVDRYKRSGDVTLGLARALAALLKGDTINGIPLCKEFQNGHCARGPQCRYWHINRDEERRKRFGGGRNCGGSPSSLAFGAYPAVPPAGAQLSRRRGDEFVSEDFAPPSKRSFAHNQPFATIPGQMAPTSAPTAPSHPSPQLVIELERRNAELTTEVESLKRELNREKERYDDLMSLFRAAQGQPTVQRSVISTPSLVPANLQP

SEQ ID NO: 123670 - protein, 172 aa, Heterodera glycines; identical to SEQ ID NO: 122529

SEQ ID NO: 123671 - protein, 184 aa, Heterodera glycines
MTQFLPDNLLALFAPRPPIQFKPPPDDLFIHRKHMQMGGMAECVHGFEDPKDTPPKPKIETREEKRARKRKEKEELMAYKIEQGIATWTPADNPKATVDPYKTLFIGRINYETSESKLRREFEKYGKITKIIMVHDKNSKPRGYAFIEYAHKSEMSASAGLRQICACIGTHFLLCSPKNYSKSP

SEQ ID NO: 123672 - protein, 218 aa, Heterodera glycines; identical to SEQ ID NO: 122618

SEQ ID NO: 123673 - protein, 232 aa, Heterodera glycines
WIPRAAGIRHEAKVEEIRRTVYVGNLPKGCDGEEVLNFFNACIGEVMYLRMAAGNDYLPCDYAYVEFSQQSSVPLALQNSDSLEFQGRPLRIQHSKVAIIKPQRKTADQALEEVEEAIKSGSDGRTTTDTGRGYSPFRPGVSAPRVVPTSPRPSVKRSTRSRSTSSSHSRRSRSRSRRRRSRSRSTRSPSRSRRRRSRSRDRKRSRSRRRSRSRDKDRKKASKRSRSRDRST

SEQ ID NO: 123674 - protein, 186 aa, Heterodera glycines; identical to SEQ ID NO: 122261

SEQ ID NO: 123675 - protein, 116 aa, Heterodera glycines
MFSSSKSAAVLRMRGATGAMARRWKGGDEQKNVPVPSPKEMAQRPAEFDELTHTGQAWDIADWRRSRFEYMPKQVNPSIAAHLIAELAPVPSEERVVRCDGGHRELGHPRVYINLD

SEQ ID NO: 123676 - protein, 147 aa, Heterodera glycines
  unsure (1)..(147): unsure at all Xaa locations
HIVLWIASVCSLVNIIATVGTLPSLYSEMRQMNNKVRDGVEAFRVNTDSXWTDLMDVQVVVTPPSKPRDNPFNSIFRSPRXLRGLCHCAGLQQPSCPPGXPRPTGPPGQTGHPAGARHPGQAGLPGQPTPDCSAEMLHCPRLPVSPA

SEQ ID NO: 123677 - protein, 322 aa, Heterodera glycines
QETHIVLGIASLCSLLAIIATVVTLPSLYSEMSQLNNKVRDGVQAFRVNTDSAWTDLMDVQVVVAPPSKARDNPFSSIFRAKRQLPGHCNCGPPQRPNCPPGPPGPAGPPGQPGQPGGAGLQGQPGAPGQPAPPCPPQNIPCPRCPAGPPGSPGGQGPPGQQGAPGQPGAPAPGGGQGPPGPSGPQGQPGQPGRSGTPGQPGQPGNNAVIFNTIPGPRGAPGAPGQPGSPGSQGQPGQPGGQGPPGPSGAPGLPGLSGNSGQPGQPGAPGQPGKDSGYCPCPPRSSAMALKKKMAAVKIFLAKRAASNCDAKDNPIIGCWRN

SEQ ID NO: 123678 - protein, 169 aa, Heterodera glycines
  unsure (1)..(169): unsure at all Xaa locations
MVRHVTASCFRAPWXFEKKGSTGWRKNGPVVIESHKWPGQQKEFPELSPKFLGANFKQLWRYTGVAPTGFNDPKTDDFVHVPEMVPELVVPDLANFELKPYVSYKTDAKIEERLRNFDKKLTKFGGNEKAAIANSKETELWPPPPIDAKILFDFFYAEKIRQAFEKGKK

SEQ ID NO: 123679 - protein, 211 aa, Heterodera glycines
  unsure (1)..(211): unsure at all Xaa locations
MEIKEKSKNTSTSAVLPLTAEERMKRRQIMRTEVLENVEPFLKMKKKSLEDAQEDERENFRRFKMFETSALQQKAKIEENIRDYRKSLXLSKCSQDKIEKGVDSVEITYKLDENLYSRALVEEMDKVCIRLGANVMVEYELDEARQLLREHLENVERSSKETEEDIAFLQDQITTTEINLANLYHYAVQNRKQMSMNSELSVGQIGLDAVE

SEQ ID NO: 123680 - protein, 162 aa, Heterodera glycines; identical to SEQ ID NO: 122448

SEQ ID NO: 123681 - protein, 218 aa, Heterodera glycines
  unsure (1)..(218): unsure at all Xaa locations
MTRGSSAGYDRHITIFSPEGRIYQVEYAFKAANTATLSAVGIALDETAVIAVQRRVPDKLVDPSSVKSIYKLSSTVSCGVIGIVLXADAMFQVRRAQSEAARWKYENGYEMPISELARKMAEINQYYTQVAELRSLGTLMLMISYDDEKGASVFSIDPAGHYISVRGYGIGVKQQQINGFLEKKLKSKDRKFGDTEVIQLALEALQTGLGIDLNADQV

SEQ ID NO: 123682 - protein, 214 aa, Heterodera glycines; identical to SEQ ID NO: 122735

SEQ ID NO: 123683 - protein, 222 aa, Heterodera glycines; identical to SEQ ID NO: 122489

SEQ ID NO: 123684 - protein, 79 aa, Heterodera glycines; identical to SEQ ID NO: 122647

SEQ ID NO: 123685 - protein, 148 aa, Heterodera glycines; identical to SEQ ID NO: 122056

SEQ ID NO: 123686 - protein, 151 aa, Heterodera glycines
MAQLLAGEKVVLSDGSKVEAEVFLKDKVVAVYFSAGWCPPCRAFTPKLKKFYEELKKAGKNFEVLFVSRDRAAKDLVEYYRDHHGAWAYLEFGNPKIQELLEKYEVKTIPTCKVIKPDGTIVVNDARTEVHEKGVENALGLWEEWLGFYEA

SEQ ID NO: 123687 - protein, 123 aa, Heterodera glycines
MTKVKTFELRTKSKAELSKQLDDLRRELLSLRIKQQSGQSNQKPLEIRNVRRSIARVLTVINQSTKAEVLKEYAGKKYIPIDLRAKKTRAIRRALTPAERKIKTTRALKKAKHFPQRQFAVLA

SEQ ID NO: 123688 - protein, 226 aa, Heterodera glycines
  unsure (1)..(226): unsure at all Xaa locations
MATEVDENTAVADPWSTVEDVSGGESMHQLVTLDVPEIKLFGKWSLNDVDVSDISLVDYVAVKEKAAKYLPHSVGRYQQKRFRKATCPVVERLVSSMMMHGRNNXGKKLMAVRIVKHAFEIIHLLTGENPVQVLVNAVINSGPREDSTRIGRAGTVRRQAVDVSPLRRVNQAIWLLCTGSREAAFRNIKTIAECLADELMNAAKGSSNSYAIKKKDELERVAKSNR

SEQ ID NO: 123689 - protein, 86 aa, Heterodera glycines
LRQVNKVGIFCEIGPLSCFISRHCIPPDMEFEPNNIPPCYKTADESIVIKQDDEIRLKLIGIRVDANDIFAIGTLMDDYLGLCSTE

SEQ ID NO: 123690 - protein, 174 aa, Heterodera glycines; identical to SEQ ID NO: 122067

SEQ ID NO: 123691 - protein, 181 aa, Heterodera glycines
MFNLQDRCKGVDQDRDYHATRISIRDKLLSQETKELEQNLRDLPTCKLIFPSTSALHEMELTVKPNVGLYKGGAFKFSITVPPEYNNVPPIVKCLTRFWHPNINEDGSICLSLLRQNSLDGYGWMPTRRIRDVILGLDQLFTDLIDFDDPLNAQAAQQWQTNKDGFAQKVKEYMTKYCPRN

SEQ ID NO: 123692 - protein, 226 aa, Heterodera glycines
MMSSNEQEESGGSNDDQFSSPISPVSPIQPMSTDWSNAIDAQEIGAGGVGGGISSGSLHESLHELSPIWADSDLIGDTLSAVPDSPSDEDPYASTIYRPVSMVTPVAALPNPNPPSCSFGGPMESIEAKGPLELPTKTRLKVRIKRLDIVGSWRWVDGKEDACGICRTPFETCCMDCKFPGDECPLVLGQCKHPFHMHCIVKWTNTQSGQKPACPLCRQEWKFATS

SEQ ID NO: 123693 - protein, 171 aa, Heterodera glycines
MAVFVKDQNFVPEKRVDEAGHILNDPSKSLADRFRALFLLRSVKSDRAVHWICKCFSDPSALLKHELAYCLGQMQNPAAIQKLIFVLQDTEQEPMVRHEAAEALGAIGDPSNEHGLSKLFEQYSGDAVREVAETCLLALRRTQWVKEKGKDDTESRSIYDSIDPAPAADGG

SEQ ID NO: 123694 - protein, 150 aa, Heterodera glycines; identical to SEQ ID NO: 122038

SEQ ID NO: 123695 - protein, 163 aa, Heterodera glycines; identical to SEQ ID NO: 122104

SEQ ID NO: 123696 - protein, 151 aa, Heterodera glycines
LILGKQKRTLAGFSSSVILPNTGFIYHHPIVQTLPPDLRRKAARLVAAKCTLASRVDSIHSSLDGRIGERLSVEIKGKLEKMQEPPPVKNAKPLPKPLDKASKKRGGKRVRKQKELLKATELRRKANRMNFGELQEDVMQDHLGFTLGQAN

SEQ ID NO: 123697 - protein, 152 aa, Heterodera glycines
  unsure (1)..(152): unsure at all Xaa locations
MASRKGKVKEEQPAVSLGPQVQEGENVFGVAHIFASFNDTFVHVTDLSGRETIVKITGGMRVKADRDEASPYAAMLAAQDVAERCKQVGINALHVKLRATGGTKTKTPGPGAQAAXLRALARSGMKIGRIEDVTPIPSDSTRQKGGRRGRRL

SEQ ID NO: 123698 - protein, 237 aa, Heterodera glycines
STLFERRPRNFSLGQDIQPKRDLTRFVRWPKYILLQRQRAVLEKRLKIPPPINQFKFALDKPNTNQLFKLLNKYRPETRQAKKERLRQRAQDRADGKQEKLTKRPPVVHFGIKDVVKAVENKKASLVVIAHDVDPIEIVICLPAICRKFGVPYAIVKGKAFLGQVVYRKTTSAVCLCDVNPEDRNALKNLADVAVTNFNERGDELRKNWGGAIMSQRSQARQAKIEKARQRDVGQKV

SEQ ID NO: 123699 - protein, 264 aa, Heterodera glycines
  unsure (1)..(264): unsure at all Xaa locations
MAQQQAITKKRKAVQDGIFKAELNNFLMKELAEDGYSGVEVRRAPSRTEVIIMATRTQSVLGERGKRIRELTALVQKRFGYSAGQIELYAEKVSSRGLCAVAQCESXRYKLVGGLAVRRACYGVLRFIMESNARGCEIVVSGKLRGQRAKAMKFVDGVMIHSGNPVTEYIQEAVRHVXQMRQGVXGIKVKIMLPHXPKGQMGPRNPLPDHIQVKEPPIDVAPTTPYSEHREPMTTGMPPQTQMPPAHQQQQLPMVGQVPPPAQF

SEQ ID NO: 123700 - protein, 167 aa, Heterodera glycines
IQTVPPFFTVKRLRETMSRFDGLGRVYLQSEKRGAQRKKRYTEGWVEFKNKKVAKEVVRLMNGRVVGGRRRSAAYDSVWTMKYLHGFKWEHLMEQLNYEQRIEQQRLRTEIVQEKRKADFFAQQVEKGESLKKLEEKILKKCGLWEQYQRQHKQLKNCGRGGAIGGG

SEQ ID NO: 123701 - protein, 155 aa, Heterodera glycines
  unsure (1)..(155): unsure at all Xaa locations
MIKPVNTLKSLMRTMTDCRWMASVPMAFEQKVSMAQPQQSMAYLPDIETLRKGKVSPTILKPYIDPALCSSDPNSFESEVTVGRMLDARVHLGHKVGTLNDNMKWALYGERLGICVFDLEITRHYLLKALEFVRSVAFXGGRFLFVSTNKSSMLM

SEQ ID NO: 123702 - protein, 216 aa, Heterodera glycines
  unsure (1)..(216): unsure at all Xaa locations
MGRRPARCYRYIKNKPYPKSRFCRGVPDPKIRIFDLGRKRATVDEFPCCVHMISNEREHLSSEALEAARXICANKYMVKNCGKDGFHMRVRIHPFHVIRINKMLSCAGADRLQTGMRGAFGKPQGLVARVGIGDMLMSVRVRDQHQAHALEAFRRAKFKFPGRQYIVISRKWGXFTPFDREVYEKHRXEGRVIPDGVNCRFLKQHGPLTEWLKNPI

SEQ ID NO: 123703 - protein, 122 aa, Heterodera glycines; identical to SEQ ID NO: 122673

SEQ ID NO: 123704 - protein, 247 aa, Heterodera glycines
MSEQSGETFAFQAEIAQLMSLIINTFYSNKEIFLRELISNSSDALDKIRYQALTDPSQMESGKELFIKIVPNKADKTLTIIDTGIGMTKADLVNNLGTIAKSGTKAFMEALQAGADISMIGQFGVGFYSAFLVADRVTVTSKHNDDDCYQWESSAGGSFIIRNCADPEVTRGTKIVLHLKEDQTDYLEERRVREVVKKHSQFIGYPIKLLVEKERDKEISDDEAEEEKKEDEAKEEEKKPEDDVSDD

SEQ ID NO: 123705 - protein, 165 aa, Heterodera glycines; identical to SEQ ID NO: 122519

SEQ ID NO: 123706 - protein, 229 aa, Heterodera glycines
  unsure (1)..(229): unsure at all Xaa locations
MSLLSFEGRVALVTGAGGGIGRTYALEFARRGAKVIVNDLGGDRHGKSASTSAADKVVAXILAAGGKAVPNYDSVENGDKIVRTAIDNFGRIDIVINNAGILRDVSFGKMSEFDWDSVMKVHVKGAFSVTKAAWEHMRAQKYGRLVFTSSNSGIYGSFGQANYAAAKMALIGLSNTLALEGAKYNIASNVLVPTAGSRMTQTVMPEELLTAMKPEFVTPLTGCLAHESC

SEQ ID NO: 123707 - protein, 139 aa, Heterodera glycines
LKMQIFVKTLTGKTVTLEVEASDTIENVKAKIQDKEGIPPDQQRLIFAGKQLEDGRTLADYNIQKESTLHLVLRLRGGKVHGSLARAGKVRAQTPKVEKQEKKKKKRGRAFRRIQYKRRYVNVAAAGPGRRRGPNSNAA

SEQ ID NO: 123708 - protein, 208 aa, Heterodera glycines; identical to SEQ ID NO: 122642

SEQ ID NO: 123709 - protein, 207 aa, Heterodera glycines; identical to SEQ ID NO: 122407

SEQ ID NO: 123710 - protein, 178 aa, Heterodera glycines
MEEIVQSAANGGISSTAPDQSSESRFNQLERNLELFQENARHMGVIASDFTSKSQEPLNQKIHTLISGLQVLDQLKSQFTDVRVPIELLDYLDRGQNPQLYTKELLERTRQRNKELNGKTEMYRKFQACLLQELHREMPSDVEEYVCIRKPSGMNGAAAGNAMANSAMAAEETQHAME

SEQ ID NO: 123711 - protein, 335 aa, Heterodera glycines
MINNHVNGANDVDMERTENESFGELNQRLIALKAEKNNKESATLAVKVLAFFVNCDNLSAAQDFVEALKNLPESASNSDWARWFYYLGRIEALKGTDAETYKAAEKHFEVALRKAPQNGAVGFKQEVNKWVVLVKLLIGEIPERSLFRTAELRHVLAPYLLLTQTVRLGDVAGFDQTKREHGPIFVKDRTAALVERIHQSVIRTAIRKISTTYSRIYVSDVATKLNFTEQEAHRELVKAIKEGIVRAQLVAGDPLAGGRHYVKFGTTDDQYRGIEPRREFDARVNELLELYHQAVKALRYPDMRNPEVETIDEQRRREQLALEMAAAEEEDDDDF

SEQ ID NO: 123712 - protein, 89 aa, Heterodera glycines; identical to SEQ ID NO: 122103

SEQ ID NO: 123713 - protein, 153 aa, Heterodera glycines
MGIDIKNHHVKKTQRREAASRNPYLLLLVKLYKFLARRTDAGFNKVVLQRLVKSKIYKPPVSLSKLSVSMKGREDKIAVVVGPITDDNRFHEVPKLTVAALRFTESARARIVKAGGECLTLDQLALRAPTGANTVLLRGSRQRVALKHFGKAP

SEQ ID NO: 123714 - protein, 130 aa, Heterodera glycines; identical to SEQ ID NO: 122597

SEQ ID NO: 123715 - protein, 161 aa, Heterodera glycines
  unsure (1)..(161): unsure at all Xaa locations
RHNDVAAHKNHYQTLGVSRDASAKDIKXAFFELTKKHHPDMNPTDKTKAAEAFQNITDAYEVLGSEEKRQIYDTLTAPKPQAHFGRTPNFRRTRSNHINMGPAGGHKDWTDLDIDFRDFEHFQRENRRRQTFKDWARANTKSEFYWSSHQSSKSYKSPLAL

SEQ ID NO: 123716 - protein, 162 aa, Heterodera glycines; identical to SEQ ID NO: 122477

SEQ ID NO: 123717 - protein, 152 aa, Heterodera glycines; identical to SEQ ID NO: 122503

SEQ ID NO: 123718 - protein, 153 aa, Heterodera glycines
  unsure (1)..(153): unsure at all Xaa locations
MGRMHNPGKGISRSALPYRRSVPTWQKLTNQEVEEQIVKLARKGLRPSQIGVILRDSHGVAQVRRITGNKIVRILRSKGMAPEIPEDLYHLIKKAVSIRKXHLERFRKDIDSKYRLILVESRIHRLXARYFKTKRMLPPTWKYESATASALVS

SEQ ID NO: 123719 - protein, 431 aa, Heterodera glycines; identical to SEQ ID NO: 122183

SEQ ID NO: 123720 - protein, 142 aa, Heterodera glycines; identical to SEQ ID NO: 120682

SEQ ID NO: 123721 - protein, 128 aa, Heterodera glycines; identical to SEQ ID NO: 122033

SEQ ID NO: 123722 - protein, 154 aa, Heterodera glycines; identical to SEQ ID NO: 122078

SEQ ID NO: 123723 - protein, 111 aa, Heterodera glycines; identical to SEQ ID NO: 122614

SEQ ID NO: 123724 - protein, 51 aa, Heterodera glycines; identical to SEQ ID NO: 122520

SEQ ID NO: 123725 - protein, 122 aa, Heterodera glycines; identical to SEQ ID NO: 122654

SEQ ID NO: 123726 - protein, 193 aa, Heterodera glycines
RFNIFTVTRNFNLVCFQMSYSYLFKYIIIGDTGVGKSCLLLQFTDKRFQPVHDLTIGVEFGARMITIDGKQIKLQIWDTAGQESFRSITRSYYRGAAGALLVYDITRRDTFNHLTSWLEDARQHSNSNMVIMLIGNKSDLEARREVKKEEGEQFARENGLVFMETSAKTAANVEEAFIDTAKEIYRKIPGGRV

SEQ ID NO: 123727 - protein, 206 aa, Heterodera glycines
  unsure (1)..(206): unsure at all Xaa locations
MMSAKFFTHLINSASVRPISTSCCRKELRELWKLDKRNPFQEIPEAWVTSLDDIEQKNCGLIQLHPDIFRVKPRLDLLHRNITWQSNYRNLTLLKMLSRAEMPGGGRKPWPQKKMGRHHAGSIRSPHFIRGGFAHGVRGPCTQFYMLPNTVRIHGLRTALTLKHAQDDLVIVDSYDTLNSAEPQFLNDLADARNXGYSVLFVDLTV

SEQ ID NO: 123728 - protein, 556 aa, Heterodera glycines; identical to SEQ ID NO: 122607

SEQ ID NO: 123729 - protein, 174 aa, Heterodera glycines
MGVHNELQLEGCNFLRQHIVFSLLTGRTITITKIRSYDDNPGLKEFERIFLSMIKRLTNGTELKLSKNGTELSFRPGLIHGGELEFDCGVQRCISYFLEPLILMAPFCKKPLNVNLTGVTNSVDELSIDAIRATWLPVFSRFVLADQCTEIKIKARGFKPSGGGSVTFSSPIKK

SEQ ID NO: 123730 - protein, 367 aa, Heterodera glycines
  unsure (1)..(367): unsure at all Xaa locations
MAEVGNSYRPPLSEEKQNELRAIAQKILQPGKGILAADESTGSIGKRFDTIGLENTENNRRRYRQLLFTTPSFGQNLSGVILFDETFRQSTDNGVRFVDVIKKAGAVAGIKVDTGVVPLAGTLDEGTTQGLDKLSDRCAEYKKGGCDFAKWRCVLNIGAHKPSHLALMENANVLARYASICQQNGLVPIVXEPEVLCDGEHSLERCQKVTELTLAYTYKALADHHIYLEGTLLKPNMVTPGQSHSPKATPDQIGLATVTALRRSVPIAVPGIVFLSGGQSEIEATHNLNAINSVPGPKPWTLSFSYGRALQSSVIKKWNGKDENLGDAQKVLLHRAKANGDAQQGKYTGEEAAASAAESLFVAKHAY

SEQ ID NO: 123731 - protein, 184 aa, Heterodera glycines
MLYVFLFYAGAANYWAKKGMPKSKIIIGIPTYGRGWTLSNPQQFRDIEAPAQVAKATKFVKLAGIGSYFEFCEMLANGAQRYVDRETLVPFLVADNDQWFSYDDVESIRNKLSWIRQNSFGGAFVWTLDFDDFNGQCPGSQLGRYPLIRTIAQELGGIQLSQTPVSALSNSPSPSTGAALPAVT

SEQ ID NO: 123732 - protein, 200 aa, Heterodera glycines; identical to SEQ ID NO: 122051

SEQ ID NO: 123733 - protein, 221 aa, Heterodera glycines; identical to SEQ ID NO: 122517

SEQ ID NO: 123734 - protein, 130 aa, Heterodera glycines; identical to SEQ ID NO: 122516

SEQ ID NO: 123735 - protein, 276 aa, Heterodera glycines
MSPSLSVANSNVSRPLGQPKVAGFKDKDKPESVRTSNIVAAKAVADAVRTSLGPRGMDKMIQSGNGEVTITNDGATILNQMSVVHPTAKMLVELSKAQDIEAGDGTTTVVVLAGSLLDAAEKLLAKGIHPTTISDSFQRAATFSEKVLEEMATPIDINDDDELVKLAMTSLNSKVVSQYSHLLAPMAVQAVKKLMSSPEDSSVNLKLIKVVKKLGETVEESQLIEGALIDQKSMGHGGPARVENANIGLIQFQISPPKPYMENQVVISDYAQMDRA

SEQ ID NO: 123736 - protein, 212 aa, Heterodera glycines
MTEAKKLPEVPETLLKRRKIRAAQRAAKAKNSLNTIKKVKAKKTEIFKRAEHYLVEYRQKQRQLVALKREAKKVGYYYVPDEPKLAFVVRIKGINKIHPRPRKVLQLLRLRQINNGVFVKLNKATIQMLRIADPYIAWGYPSQKIIRQLVYKRGYAKESGQRIPITDNAIVERNMGKSDVICVEDMIHQIWTVGPHFKQVTNFLWPFKLSNP

SEQ ID NO: 123737 - protein, 244 aa, Heterodera glycines
  unsure (1)..(244): unsure at all Xaa locations
MTEAKKLPEVPETLLKRRKIRAAQRAARAKNSLNTIKKAKAKKTEIFKRAEHYLVEYRQKQRQLVALKREAKKVGNYYVPDEPKLAFVVRIKGINKIHPRPRKVLQLLRLRQINNGVFVKLNKATIQMLRIADPYIAWGYPSQKIIRQLVYKRGYAKESGQRIPITDNAIVERNMGKSDVICVEDMIHQIWTVGPHFKQVTNFLWPFKLSNPVGGFKKKSNHFVEGGDXGNREDQINKLLEKMI

SEQ ID NO: 123738 - protein, 86 aa, Heterodera glycines; identical to SEQ ID NO: 122513

SEQ ID NO: 123739 - protein, 201 aa, Heterodera glycines
  unsure (1)..(201): unsure at all Xaa locations
MSSSSKAFIGKPAPNFMADAVVNGDFKTISLEQFKGQYVVLFFYPLDFTFVCPTEIIAFSDKAGEFKKIGVQLIACSTDSKFCHLEWINKPRKQGGLGEMNIPVLADTSHKISRDYGVLMEEAGIAYRGLFIIDDKGVLRQITINDLPVGRSVDETLRLVQAFQYTDKHGXEVCPANWQPGTDTIKPXDPKGSQAYFDKKG

SEQ ID NO: 123740 - protein, 181 aa, Heterodera glycines; identical to SEQ ID NO: 122579

SEQ ID NO: 123741 - protein, 100 aa, Heterodera glycines; identical to SEQ ID NO: 122606

SEQ ID NO: 123742 - protein, 206 aa, Heterodera glycines
  unsure (1)..(206): unsure at all Xaa locations
MVTAEDTVKTKEEDPKKTTTDDGSSSEEEVPELEEGDVTEEQKKVAEAAGLSEQVAEKGSKQSRSEKKARKLFSKLGXLSKCTGVSRVCIRKSKSILFVINKPDVYKSPGSDTYVVFGEAKIEDLAQHAQITDVENLKPPSIIRDVRNRITPAEEESDGEEADATGIEEKDIELVMSQANVSRNKAIKALKKADNDLVNAIMALTM

SEQ ID NO: 123743 - protein, 133 aa, Heterodera glycines; identical to SEQ ID NO: 121281

SEQ ID NO: 123744 - protein, 133 aa, Heterodera glycines
MASSSSDHSAYSKQVLEEFWPGQNVKIGHMTMNSFREVNRHSELPIARIKKIMKIEEGVKTQMISAEAPVLLAKAAELFIEELTLRAWLNTNDNRRKTIQKSDIAAGAAKSEMFDFLIDILPRDELQKEQSVD

SEQ ID NO: 123745 - protein, 154 aa, Heterodera glycines; identical to SEQ ID NO: 122171

SEQ ID NO: 123746 - protein, 261 aa, Heterodera glycines
FANLSVLTKRHEMALCMWQHGEEALAKALVACRIYKSLANEAAEDYLEVEVCEELKTYAEEFRQLSLELLDHCYKEDDAQTLQLLTYELSYWGHQTCLSLAVIVNNKQFLAHPCCQILLADLWHGGLRIRSNSNIKVLMGILFPPSIFLLEFKSREELLLQPQTAAEHQKDINESSSSSSDSSSSSSSSDSESDGDESDAGERGGATAEERRRTSHSHGSMQSLNFTSIFKSKRKRRRPSHSRSSTTAKEDIEMGKQRNRV

SEQ ID NO: 123747 - protein, 143 aa, Heterodera glycines
QDLFTVKNIDPDGKKFDRVSRLFCDSESFKMGLILDVNTQLYAMGINDKFRLMLCSSIRDDGLTEEGEYDKSIENIPRVRMFEYVMYGKIYRIENDEGTAETSRLTAYASFGGLLMRIQGEANNLTGFEQDKNIYLLLKKVPN

SEQ ID NO: 123748 - protein, 141 aa, Heterodera glycines
TRIDFGNLTCYMAVARNKGIEIVENDYSLHATPSCVSFGQFARMMGLGAKQQLNINYGNSVVNFKHILGRTFNDKVVQTFRQHIPCGLMGKFTDDQIEIKVTHLGTTRVLSPEQVVACLLTHLRVQLSCSLGTDVTECVIN

SEQ ID NO: 123749 - protein, 139 aa, Heterodera glycines
MAGIDFGNLTCYMAVARNKGIEIVENDYSLHATPSCVSFGQFARMMGFGAKQQLNVNYGNSVVNFKHILGRTFNDKVVQTFRQHIPCGLMGKFTDDQIEIKVTHLGTTRVLSPEQVVACLLTHLRVQLSRSLGTDATEC

SEQ ID NO: 123750 - protein, 173 aa, Heterodera glycines; identical to SEQ ID NO: 122368

SEQ ID NO: 123751 - protein, 161 aa, Heterodera glycines; identical to SEQ ID NO: 122144

SEQ ID NO: 123752 - protein, 140 aa, Heterodera glycines; identical to SEQ ID NO: 122751

SEQ ID NO: 123753 - protein, 190 aa, Heterodera glycines; identical to SEQ ID NO: 122342

SEQ ID NO: 123754 - protein, 465 aa, Heterodera glycines; identical to SEQ ID NO: 122792

SEQ ID NO: 123755 - protein, 299 aa, Heterodera glycines
MLFCPMASQRTHCALFQQRHLATKYVRFPLVPPDNKNSVQTLQQLIASQKDPNAFVFGTNMAGRVGQWLTKRSFEKTVDTELRILLLKSANQMYLCCANKYPFIPLLNEFGLPDHYSSWYRLTLLHIWMALCRVQQSLEAMAYIYFMHQVLEVFNTDWYTRLDKAAKEMGMSVNKRKEGMALHAIYISTLHDYDEGFFGDDRVLAAAVWRSFFLQLPDVCPAQINRVGRYMRATMASLARMDDTRLLTDGIERWDVAEELARLVSAEQFGTIPAAPPSSSMDGDGRNSAQPAPKVAASN

SEQ ID NO: 123756 - protein, 165 aa, Heterodera glycines
GNKAGFPAVAAALELVDPPGCRNSARGSKSPQLLVLYCDQLLRKSARNMEDEKMDENLEQVMTVFKYIDDKDMFQAFFHKFLCKRLVYDTSASEEQERCMIAKLKHMCGFEYTSKLERLLTDVALSRDHSEQFKQQPRTSNVDFSVIVVMSNVWPLQQPVKFEIP

SEQ ID NO: 123757 - protein, 291 aa, Heterodera glycines
MLSKCLRSSIFGCFNCALQNVSSAGVLMNSVRHAGTAEHWRRAYLKDLYNRRQMVGPEPLRGRASEDNWNYPSEISALSHRLHIPDMDNALIVQALTDKSYFTRNDLDDEAMGDDGPLTTEVARDKSNDQLVEKGMPLFRHIVLTYLRAHWPLAPEEFIIAVATRIAPTSALAELATQLGLHHVVRTAEFPPTQQTLQSTLLALVGAMDVAKARDFVRRFVLPRLYEVPLEDVLPFRHPFAVLGDYLRTWQGATDIQPRTIGSGAVMKATPFYQGADYVDKQQIVGPSGGE

SEQ ID NO: 123758 - protein, 180 aa, Heterodera glycines
  unsure (1)..(180): unsure at all Xaa locations
MSAGRANIGKPAPNFSAEAVVDFDFKTVSLDDYKGKYVVLFFYPEDFSFVCPTEIIAFSDRSNEFANINTQLLACSTDSKFCHFEWVSKPRKQGGLGEMQIPILADRTQRISRDYGVLKEDTGNAYRGLFIIDTKGILRQITINDTPVGRSIDETLRLVQAFQFTDEHGEVCPXNWKPGE

SEQ ID NO: 123759 - protein, 140 aa, Heterodera glycines
MNRGGGFHITIQAPVNIALIKYWGKRNEELVLPLNDSIAITIDELSATTHITIGPDVSTDSVTLNGVGIDIAGSSRFRNVFQQIREYSNRKRKLKGEHASKGWHTKIESSTNFPTSAGLASSAAGFAAIAFGLGKIFRLP

SEQ ID NO: 123760 - protein, 345 aa, Heterodera glycines
  unsure (1)..(345): unsure at all Xaa locations
MILKLKVPILLYCFVQCLSAVKVDNAEQSDQPTGDSSSGQFPISYPPIKYENDLAYVEKPSGNERCLFYAEGLSVVVFATKKSQSAWADYRSDTKESPKYTASIECQGNMNVGSSFDVYLKIDGKAEGVVRADIGKKDAKSVFTVEGAEFILNFNVTQVGFWQLVGATVERIEVKGSSDFLNKNLNVDKKWTLEPSVVPSTNINGFKDYSFACGQTNPIVWALKDSNDYAVGITLNNVQFQPFNATYTAGGKEADRLKFGWKVNDCQGAXSIGTWMGLVVATLLICVRFFVFLICNSVTYNAQHSIIPNQKQIIISLENSISSFSFITFPSKFFILCSFININLF

SEQ ID NO: 123761 - protein, 179 aa, Heterodera glycines
VRFLQRFVNNNPRNLERVRLQGKPSGWEFEKNRAQHNFIYRVDFCPTKNAIAARVVHYEDGIVIEASTREKTVQSQLYSQTDVSAAYNIGRLLAHRCKMAGIEHCMSSLTENELEGSKKREAFLRALNESGLLLEEPEAIPHTHLNDPNLVWETFPIQHNRADKLDELDLSLEPGKGVC

SEQ ID NO: 123762 - protein, 158 aa, Heterodera glycines
LGRDEQPDADSGQTMEFNYVVMSLVGRPMDKLLHESGDRFSPGTAIGTSIQLLKALKALHSVGYLHRDIKPANSAIGTPETNEQRLLYLLDFGMARKYVREDGTHRRQRDTARFRGTPIYAPISAHIKRDYSRRDDIESWFYMLIKFYKGSVPWNSLR

SEQ ID NO: 123763 - protein, 204 aa, Heterodera glycines
MGAYKYMQELWRKKQSEVMRYLLRIRCWQYRQMEAIHRCTRPTRPEKARRLGYKAKQGFLIYRVRIRRGGRKRQVTKGQTYGKPKTHGVNQLKNTRSLQAVAEARAGRRLGELRVLNSYWVGQDSTYKFFEVILVDPSHKTIRRNPDTQWITKPVQKHREQRGLTSAGRKSRGLGKGIKHTKTIGGSRRKCWKRQNTVEFHRKR

SEQ ID NO: 123764 - protein, 205 aa, Heterodera glycines
  unsure (1)..(205): unsure at all Xaa locations
MGAYKYMQELWRKKQSEVMRYLLRIRCWQYRQMEAIHRCTRPTRPEKARRLGYKAKQGFLIYRVRIRRGGRKRQVTKGQTYGKPKTHGVNQLKNTRSLQAVAEARAGRRLGELRVLNSYWVGQDSTYKFFEVILVDPSHKTIRRNPDTQWITKPVQKHREQRGLTSAXGRKSRGLGKGMKHTKTIGGSRKKCWKRQNTVEFHRRR

SEQ ID NO: 123765 - protein, 127 aa, Heterodera glycines
MSTWIHCNHCFIVPTNDCNKTRFWFTSCGHLMCAECLKAKRSNNNNGQHFECLLCHQQNVQLVELNRHLRPELLALFRPAKDLIDEFNAKLKQVLTFQQSHQKRLVDHLTDKAQRATKWAQSVQKDM

SEQ ID NO: 123766 - protein, 213 aa, Heterodera glycines
  unsure (1)..(213): unsure at all Xaa locations
MASSSAASDDSSAVSSPPPPLLSSPIRSEMVAAAKQFLANPRVRNTPISEQTEFLRGKGLTETEIQKAMKLTTDGGGEQVPSTSLSSLPPASAPSPSARAVVDLARSALLFGTAGYMVYRFVRSWLLPQLLNVPDPAEERMQRLEQQVERLSDSTRCIAESVTQTLVAVTEQNEQLSRTMMMVQGGTXGTVCTADIDRVHTEIGIVKSLLLNQ

SEQ ID NO: 123767 - protein, 197 aa, Heterodera glycines
MEFKGEEWSDNPISECRMAELVRHFFALGWMCDNGSGMAVRVKDERTGEHLILNSSNSLEKEIFSENDLFVMKMNGEILKSPSKSDRSPTAPFYLLRDNPDLACVIHTHSKWANLITQLIRGDEFKISNQEMIQGCENRLTKGRLDNIDVLVVPIVQTEINEHLLYPILLRTLKQNAGASGILVRGHGFFCFGSNSW

SEQ ID NO: 123768 - protein, 236 aa, Heterodera glycines
MNRIRKALTVLSGNESNIPEKIAKAEPQHHDIEKPVSSLKFGGGATLFPAEYADDVDLYLRQLERRTPLDFDFLSVHKTVDGRMRQILVDWLVHVQVRFKLTIETLSLSVHILDRVLLALPGINKTNLQLLGVTSIFIAAKFEEVVMPNVDDFVYVAANMFKREDIMRMEPRVLSGLKFNLSVPYAVQFLRSYRFYASPSKSVWEFAKFVSEVAMVCYALAHFPPSVVAAVSLHLA

SEQ ID NO: 123769 - protein, 287 aa, Heterodera glycines
MADFDKHAAQREAESLRTLAFFGVCLSTVATVIAVLSVPFAYQHFQQLGTQMQNEVDFCKMRSGNMWREVTRTQAYSKVSHDSRHKRQAGGCCGCGVSPPGPPGPPGPSGQPGGDGQPGGSGQPGAPGQAAPRPYPPSGGCVPQCEAAQPGLPGPPGPPGPEGQNGQPGQSAPPASPGRPGPQGPPGPDGQPGNPGESGQPGQPGKLTQGPPVVGPPGPAGPPGQPGQPGENGQPGQPGNPGPQGYPGDGGSPGQPGNPGGSGEPGQPGAQGSSGQCYHCPPPRTAP

SEQ ID NO: 123770 - protein, 151 aa, Heterodera glycines
  unsure (1)..(151): unsure at all Xaa locations
MGQNQPQGGGRKPGDDKGQDXKKKRKYHGPPVPTRIGKRKKGSRGPDTANKMPTVTPITRCKLKLLKYDRIKDYLLMEEEFIKNMERLKPQDERQEEERVKVDDLRGTPMSVGSLEEVIDDQHAIVSTNVGSEHYVNILSFVDKEQLEPGC

SEQ ID NO: 123771 - protein, 347 aa, Heterodera glycines
VEDGCAKSKIHFKQLDKRSPIAHIVENELIVAALQQCIRDRCANVEVRQGAVVDQNLSVPDNLGQNVTIQFEDGTIEASLMIAADGSKSTARKRAGIDFEETAYEQRAVVGTLALQHNSESDESFAWQRFVPSGPVALLPLGRELCSLVWTVSTADAARLLQLSPEHFVEELNGTLQFDNSSANSLVNNSLDCLGKALNFLPSKESPAKCTIPRVLSLPYDDRAVFPLSLGYAYDYIRPRVALIGDAAHRVHPLAGQGVNLGWSDVRFLTAALQRAFYEGGDLGSLTYLRDFDSASQRRNGPIIFAIDCLNRLYSTDHPFCTLFRSVGLNILDRILPAKDLIVHLAS

SEQ ID NO: 123772 - protein, 264 aa, Heterodera glycines; identical to SEQ ID NO: 122596

SEQ ID NO: 123773 - protein, 253 aa, Heterodera glycines
MLALKSLLGRSPLVNPLVLSLRNRSIKKVKKKLAAGETLGGPEDYAYNYVEKKRGFIKPIHTLEEQIEYMNSEVFAETYKGRPICFMWKRNMKGQWKLQPPPRLFCIDRNGRFNVGNACTVCRDEYLFFDYRNPKLLEHFLYPGTDQPLPIIQTGLCQEQYVNLQAQLLKAKEHGTFIFNVPFRHFNYGQWYPKDANALISSDLEEDQPSRDLTNVEYIYPNPQIAFETHNRDKHNAWDEWWMRQERFIKRLK

SEQ ID NO: 123774 - protein, 258 aa, Heterodera glycines
MDLVYHEKQVGRMCAQHALNMLLQGDYFTPDSLASIAQELDQRERAMLRDESEFQSQNYDDSGYFSIQVITEALRRQANLSLEPIISPNAMKVLQNPSLAHAYICHLEDHWFTIRKIGTTWFILNSLFKAPRIVSETFLELYVHQLNTEGWSLYVVEGELPACAAETVPREFWNETRRTKKFENDMERAIALSLNEARPFLVTKTADEELFGAATPVISQAEELDIQRALEDSLREANRATSVSTAESFLVGEAIRNS

SEQ ID NO: 123775 - protein, 104 aa, Heterodera glycines; identical to SEQ ID NO: 122461

SEQ ID NO: 123776 - protein, 143 aa, Heterodera glycines; identical to SEQ ID NO: 122495

SEQ ID NO: 123777 - protein, 152 aa, Heterodera glycines
  unsure (1)..(152): unsure at all Xaa locations
MDTLFDVRNNFYLGAFQQCINEAQKVKCKSEEEKELKDAFMYRAYIGLNKCSVPLGEIDATDGNGSAALLAIRRFATFMSGAPEKRSEIVDQVAKEFETKKYADNEICLLISTLIFMHGEKTEEALRVLNRTASDSLECAALRVQCLLKLNX

SEQ ID NO: 123778 - protein, 161 aa, Heterodera glycines
MLLALTSVDTRNALLCAAVPSIGAFVGSTMAIKDQELVQFLKKQNFPSFARCCKYNYLLANTAVTIPFGYASYLVYKIGGGVSCTDSKIALGLYGATLLSGCFLVPTLKKHDIKALTANAVVLAGLSVATSVAFYNIDKISAYWTMPFTLWAILYAGLTVK

SEQ ID NO: 123779 - protein, 187 aa, Heterodera glycines
NKKFKKCNHIITFIISANTNSLCLTMPLHWTSVDTRNALLCAAVPSIGAFVGSTMAIKDQELVQFLKNQNFPSFARCCKYNYLLANTAVTIPFGYASYLVYKIGGGFDYTDTTVALGLYGATVLSGCFLVPVLKKQDTKALTANAVVLAGLSVATSVAFYNIDKISAYWTMPFTLWAIFCAGLTVKA

SEQ ID NO: 123780 - protein, 133 aa, Heterodera glycines; identical to SEQ ID NO: 122484

SEQ ID NO: 123781 - protein, 91 aa, Heterodera glycines
MAKRTKKVGIVGKYGTRYGASLRKTVKKMEVSQHAKYTCAFCGKEAMKRVCVGIWNCSKCHKKVAGGAYVYATTTAATVRSTIRRLRETKE

SEQ ID NO: 123782 - protein, 329 aa, Heterodera glycines
  unsure (1)..(329): unsure at all Xaa locations
MQQCSRLMSVRMKSSSIKVTLIGASGGIGQPLGLLLKKNPSIAHLALYDLVGTPGVAADLSHINTPAKVTGHLGPDQLVAALEGADVVIIPAGVPRKPGMTRDDLFTTNAGIVRDMAEAAAKTCPKAFMGIITNPVNSTLPIACEVYKNNDCFDPRRIFGVTLLDIVRAQAFVSELKGMDXSQTKVSVVGGHSGVTIVPLLSRCTPKVSLSDSETKALTERIQEAGTEVVKAKAGAGSATLSMALAAEYFVSALINALKGQKSVQCAYVKSDVVEGLDYFAGPLELGPNGVEKILPLGDLTAYEKELISKAVPELKKEIAKGVNFIKQG

SEQ ID NO: 123783 - protein, 231 aa, Heterodera glycines
  unsure (1)..(231): unsure at all Xaa locations
MQETHIVLGIASVCSLLAIIATVVTLPSLYSEMSQMNSKVRDGVEAFRVNTDSAWTDLMDVQVVVTPPSKPRDNPFNSIFRAKRQLPGHCQCAGLQQPSCPPGPPGPXGPPGQPGQPGGAGQPGQPGQPGQPGQPGANGVVSRPIPGPKGPPGAPGQNGNPGSQGQPGQPGGQGPPGPPGAPGQPGQPGNSGQPGQPGAPGQPGKDSGYCPCPPRSSVLAVKKKMAAAKKA

SEQ ID NO: 123784 - protein, 112 aa, Heterodera glycines; identical to SEQ ID NO: 122490

SEQ ID NO: 123785 - protein, 191 aa, Heterodera glycines
  unsure (1)..(191): unsure at all Xaa locations
MSVLITERNQDATIYVGGLDEKVTEAILWELFVNAGPVTNVNMPKDRITGTHQGFGFVEFMSEEDADYAIKIMNMIKLFGKPIKVNKASANEKNMDVGANLFVGNLDPEVDEKLLFDTFSAFGVILQPPKIMRDVETGSSKGYAFINFASFEASDAALEAMNGQFLCNRPITCSYAFKKDXRGERHGTTAE

SEQ ID NO: 123786 - protein, 175 aa, Heterodera glycines; identical to SEQ ID NO: 122068

SEQ ID NO: 123787 - protein, 156 aa, Heterodera glycines
MPPKFDPNETKIITLRVTGGEVAGGSALAPKIGPLGLSPKKVGDDIAKATQAYKGLRVTVQLTVQNRQAAISVVPTASSLVIGALKEPPRDRKKEKNIKHSGNLTLDAIIDVARQMRPKSMARTLTGSVKEILGTAFSVGCTVDGMSPKEVQEKID

SEQ ID NO: 123788 - protein, 249 aa, Heterodera glycines
  unsure (1)..(249): unsure at all Xaa locations
WIPRAAVYKHEAAEKGGKAGGGGKSFGRGAARYHRGDENYPYKQEISLAVTLAMAICLISFVYHSTWVTSEAYSSPSIVLSARSGDGGRIIFDDFRXAYYWLRKNTPDDAKVMSWWDYGYQISAMANRTTIVDNNTWNNTHISRVGQAMASNESHAYEXMHELDVDYVLVIFGGVTGYSSDDINKFLWMVRIGGSTPEGRHIHENDYYTXMGEFRIDKXGSSXMLNCLMYKLCYHRFGTVYTEHGRATG

SEQ ID NO: 123789 - protein, 188 aa, Heterodera glycines
MTISKNNKMMAHLNYKMKVIVQDSRVFIGYFKAFDKHMNIILADCEEMRRIKPKQGAKKSNVEEEKRILGLVLLRGDKIISISVEGPPQKEDSGVQLPKAGGLGGPGQGRGAGRGMPMGVVPPMGAVPPGLQGAVRGIGGPGMGGPMQPGYMQGMPAGNAATSILMLDFVFFVRPLFVFLLLHNDLFV

SEQ ID NO: 123790 - protein, 154 aa, Heterodera glycines
MVDFDTSSLYSVKAILILDQDGKRIMAKYYDKQLFPLEKEQNVFEKNVFQKTHKANADIILLDGLVCLYRYNVDLFFYVVGSANENELILQSVLNCLYEAFSTILRKNVEKKALFEHIDTSFLIMDEICDDGIILETDPQAVVARCAVKADELA

SEQ ID NO: 123791 - protein, 173 aa, Heterodera glycines
GFGGYRGGGAGGMGMNRTQSSRYGPPIQTRYRMLVTNLSTRCSWQDLKDLMRNAGEVTYADAHKKVRNEAVVCFATHEDLRRAVERYQGKDINGRRIKLVDDSEGYAGRKSRSRSPRSRSRSPRSRTRSPPSRSRSPRSRSASPAENGRSRSRSRSRSPTPSRSRSRSPNDEK

SEQ ID NO: 123792 - protein, 163 aa, Heterodera glycines
MNLRDQFSTNKYVAHRFMQLPTHNKVQVEYVWIDGSGENVRSKTRTVDFVPSKVDDLPVWNFDGSSTGQASGADSDVFIKPVAMYNDPFRMGNHKIVMCEAFDNKMQPHVTNNRARCKQTMDAAAKEHAWFGMEQEYTLLDVDQHPFGWPKAPFGFPGPQGPY

SEQ ID NO: 123793 - protein, 148 aa, Heterodera glycines
MSSSNTILLDCSDDSAVVVGFEQCATSEGGGAVEPQQKLTKNQQKKRARMERFNAGKAEWRRKQRERHKERKRARKADGQTATVVHNDRPNKLNTMNESKCRVRVAVDMAYDDLMDERSVCKTVSQLRHCYASNRRAADPLQFYVVNL

SEQ ID NO: 123794 - protein, 179 aa, Heterodera glycines
MSLNTANTPDGRGVIIYSGEMILLFVREVNLSFDKFTNAAFKGTKKGNLYLTTHRIIFNNTETSSRGNFKSLSMPFGCIRNVKLEQPIFGANYLAGELVAQPDGNWEGEVNWKLTFNRGGCIEFGQALLKTSEMANNFCPRPANAPPPYAPPPGAYYSPPPAYYWSGGQFNGYQAPVHA

SEQ ID NO: 123795 - protein, 190 aa, Heterodera glycines
MSSESNMENFPVKLDMDYIKRLARIERTGPNTFNANFLVAGYRKAVNRDVFGGQMFAQAIAAAEATVDGDEFAPNAAHSMFIRKAFIDHPIEYIVTRTRDGRSFCTRTVEARQNGETVFCAQISLCVKERSSIEHQTEMPAEVPEPEELVPFFETVRRVVTEHDEGRTERNGRTIANLRAVLEDEQQPSV

SEQ ID NO: 123796 - protein, 247 aa, Heterodera glycines
  unsure (1)..(247): unsure at all Xaa locations
MARSPLFLLSIFICTEFVLCAVKSKNLLNLNEENWRNILSGEWMMEFHAPWCPACKDLQKSWNSFADWSRDLNINVAEIDVTTNPGLSGRFLVTALPTIYHVKDGVFRLYAGPRDKNDFISFIEDKRWTSIDPLPSYKHPDSSQMGVVAVFFKLSMAVRDLHGHFVENVGVPAWXASYAFFATVTLALGCVLGFIIVCIIDYVFPTGALKKKEAERRKEQPSAKKNAKESAEKANGQKEVLSDEKKS

SEQ ID NO: 123797 - protein, 270 aa, Heterodera glycines
MVCFPPSLMPSFQCFCASSSRLFCSSAFVRPVRVRFAPSPTGELHLGSVRTALFNFLWARKYNGKFVLRIEDTDRERLVEGSEQRIEQTLSHFGLTPDESPLRGGQFGSYYQSERLPLYRELADQLVDIGHSYKCFCSQERLDFLRRKANSERIPFRYDGICRQLSTEETRARERNEEQFVVRFKFDGRRAGFTDIVFGDYEHYSEEGDFVILKRDGFPTYHFANVVDDRRMKISHVIRGAEWICSTTKHLQIYSAFGWSPPHFAHLPLI

SEQ ID NO: 123798 - protein, 186 aa, Heterodera glycines
VLRVSDLTKANERVPFRLLNLSLASLDVNMRPFCDSEGHSAVRLPGFLLILSGQIVLSRPLPPLNASSLRLSLTLEQNSVWVGRICDKGRSQSAFLSDDFCSFSLCSLLPDACNSLEALASKYAESDFPLLLPLSDLFPTDQPIALVPMANFPLLEGYWKAPAQIQADDGNAMEEEEDEQNEQHIL

SEQ ID NO: 123799 - protein, 157 aa, Heterodera glycines
MLKQGDSNCHSKKASGSRYSELFECIRDNLLTFIKANMRQMLFDKISAVLVLDTLEVPSPSDPFLREIGDSDLDDCFRAIAEIATDEFVPHSPDGPSHIVQGGCARFVFRKLLQADLGRCDGHRLSDFLADLPADNLSSWTSMDCGCYTLVEVFKSG

SEQ ID NO: 123800 - protein, 160 aa, Heterodera glycines
DTLEVPSPSDPFLREIGDSDLDDCFRAIAEIATDEFVPHSPDGPSHIVQGGCARFVFRKLLQADPGRCDGHRLSDFLADLPADNLSSWTSMDCGCYTLVEVFKSGSDKARKVLRRALSVAMLQNSHLSGAKSLLDLLLGKGKEQPTREHSVANGGGAGRK

SEQ ID NO: 123801 - protein, 422 aa, Heterodera glycines
MSEIGNFEIRNVSKVERIGAHSHITGLGLKANFEPIFISDGMVGQCAARKAAGLIVRMIKDGQIAGRALLIVGEPGTGKTAVAMGISKSIGGDTPFISISASEVFSMDLSKPEALTQSFRKAIGVRIKEETEVLCGEVVQLEIDRPQSGAGPRVGKLTLKTTDMEAIYDIGNKMTESVIKERITAGDVIQIDKATGKISKIGRSLARSKDFDALGPQDKLVACPSGEIQSRVETVNTISLHDIDVINSRSSGYLAVFSGDTGEIKSEVREQIDKKVMGWREENKAQIIPGVLFVDEVHMFDLECFSFINRYIESDLSPILVMATNRGIVNIRGTSVESPHGVPLFLLDRSLIIRTSSYKENEIGEILKIRASDELVEMEDASIAVLVQIALETSMRYCMQLISTADILRQRRKGEKTKCLRH

SEQ ID NO: 123802 - protein, 195 aa, Heterodera glycines
TVSRFFHCRALSPVNLVVHPFVARKCAFLSTPSLSFPFRRQYSSLASATTTGASNDKLNVDKLFEKINFEVRGHDFTVLKSYSLFVMNVCRVLDIDFTSRHRAMINTDHSKSNRPKYQRWFQWLLSAKFAKKKYKLHYETRTYLMEFDVHHLTGSTASAFLEYIERNIPEGVAMKVTYTEMCFLPETIVKTVMDN

SEQ ID NO: 123803 - protein, 225 aa, Heterodera glycines
MEQHENAGRKRHTKDRFRYGNYNRYYGVRNQGFDHDPRVDLFPVQWFHGRRVLDIGCNVGHLTLEIAKKLGPAHIVGIDIDDHLVGVARKNIRHYCGSAQKLIGKFPASLLPPAEEAEASSTNAVNDDGKSATKMESENGKEEGPSSTTAKPAVLPYGQFPKNVWFLRENYVLDCDEFLEMVREEYDVILALSITKWVHLNWGDDGLKRFLRRTFLNLRPGGRLL

SEQ ID NO: 123804 - protein, 338 aa, Heterodera glycines
  unsure (1)..(338): unsure at all Xaa locations
MPESENDFDEEAPNATMETKVAGGGAAPKRVGRWTLSQLRQTDGIIPSQAGWNKGDSQKLMTNFGTPRNTTTKVKVENLAEIPEDILLKSHGEVRLQSGTNRFASQKGFVSFGTGRDVCREGVNVNILAGRLGAACREEKIRASDGXIVRLQAGTNKFDSQKGMTLFGTGRRETTRMKDSXKHPEYSHERDIDNTEIPLQMGTNKFASQKGMTGFGTNRRETTKMLDTSHPEYSHEQSIDQTSIPYQMGSNKYASQKGMTGFGQPRWEVLDPSISYQNRKSQGMVRLQSGTNRFASQAGMTGFGTPRNNTYEAEAGELPYEDMKKSEAIIPSQAGWDR

SEQ ID NO: 123805 - protein, 277 aa, Heterodera glycines
  unsure (1)..(277): unsure at all Xaa locations
LPSFGCGKTVISQSFSXKYSNSDAIIYVGCGERGNEMSEVLRDFPELTMEVDGVTTSIMERTALVANTSNMPVAAREASIYTGITLAEYFRDMGLNVAMMADSTSRWAEALREISGRLGEMPADSGYPAYLAARLASFYERAGKVKCFGSPEREGSVTIVGAVSPPGGDFADPVTSATLGIVQVFWGLDKKLAQRKHFPSINWLISYSKYMRALDDYYEKNFAEFVPLRTKCKEILQEEEDLSEIVQLVGKASLAEADKITLEXYDRFCPFYKTVGM

SEQ ID NO: 123806 - protein, 614 aa, Heterodera glycines
  unsure (1)..(614): unsure at all Xaa locations
MPPTTREHIKESQYGFVYGVSGPVVTAEKMSGAAMYELVRVGHSELVGEIIRLEGDYATIQVYEETSSVTICDPVLRTGQPLSVELGPGIMGSIFDGIQRPLHDISEMTKSIYIPKGVNVKALNRAKRWEFMPRKDLRVGDHVTGGDIIGMVHESALVKHKIMVEPKACGTVKFIAPXGQYTVEDTILEVEFAGHTQKLTMMHIWPVRNPRPSAEKLAANFPLLCGQRVLDALFPCVQGGTTAIPGAFGCGKTVISQSLSKYSNSDAIIYVGCGERGNEMSEVLRDFPELTMEVDGVTTSIMERTALVANTSNMPVAAREASIYTGITLAEYFRDMGLNVAMMADSTSRWAEALREISGRLGEMPADSGYPAYLAARLASFYERAGKVKCFGSPEREGSVTIVGAVSPPGGDFADPVTSATLGIVQVFWGLDKKLAQRKHFPSINWLISYSKYMRALDDYYEKNFAEFVPLRTKCKEILQEEEDLSEIVQLVGKASLAEADKITLEVAKLIKDDFLQQNGYSSYDRFCPFYKTVGMLKNMIGFYDFARHSVETTAQSDNKITWNQIRDHLGDIIHELSSMKFEDPSEKXEDQIKKDYEELYERMQNKFRALEDE

SEQ ID NO: 123807 - protein, 521 aa, Heterodera glycines
MKFMASMVASFPVSFFLFFSTALIHGTMGGLFWSKKPADSADDSLWSRYHDQNAMEELLEKVHSKCPNVTRLYSVGRSVQGRDLAVIEFSLHPGRHQILKPEMKYIGNMHGNEAIGRELLLRLAQFLCDGWRQGQRSVVEMLNSTNIHIMPSMNPDGFELTLKTKPEQRGWVTGRTNAHGVDLNRNFPDLDAIFYKANAQRLPFFDHLLEVFHDSDNGQQFEPEVTAVANWVLSWPFVISANLHEGDLVANYPFDESLNPNELRAYSKSPDDVTFRYIAETYARAHAHMAKNDHAPCDGTAGDNFARQGGITNGAKWYSVAGGMQDFNYLSTNAFEITLELSCEKMPAPERLPQFWVDNKLALLEFIRLAHIGIKGMVSDARNGEPIANAVVWVRNVTDGDGQTAIKHPVTTWITGDYFRPLVSGCYQIAVEADGYEIGIKTLNISQKDVKERRPHIVNFQLRPIEVEVPEARIGREMGEEERGEEENGPLTPEQAAEFLQLIRMQQPVGVRTANAPSFSQ

SEQ ID NO: 123808 - protein, 238 aa, Heterodera glycines
MARNRPNANIITSDLGEAQIKKHKPKDTRLLQQRLVAWQPILTAKTVIPLVFSISILFIPIGIVLLRISQSVQEYVVQYVNDANECKDYHANGQCAVNFTLNEDFKGDVYFYYALENFFQNHRRYMKSRNDQQLSGIDFLNTKDCTPFEKAPDGRPIAPCGAIANSLFNDSFQLNYLGRNGNGYANISWSHEGLVWPVDLESKFRNPTCDGQPCKTIAELCHKFSLTVRPPNWEKDLC

SEQ ID NO: 123809 - protein, 143 aa, Heterodera glycines
MSNDNDKRDASSIPTNALVNKEESPDGNEEKKIFCGGISYETSNEDLAVYFGQYGKVKEVQVKYDRVTGRSRGFAFVEFDTVAACQASLVQREQVIKGKQCEIKPAKSREVGYMNKKVFVGGLPGDFPEEELRKHFNQYGKVE

SEQ ID NO: 123810 - protein, 321 aa, Heterodera glycines; identical to SEQ ID NO: 122343
  unsure (1)..(321): unsure at all Xaa locations

SEQ ID NO: 123811 - protein, 252 aa, Heterodera glycines; identical to SEQ ID NO: 122110
  unsure (1)..(252): unsure at all Xaa locations

SEQ ID NO: 123812 - protein, 259 aa, Heterodera glycines
MAEEPVKLILVTGGVMSGVGKGIVSSSIGVLLKGCGYRVTVIKIDPYINVDAGTFSPFEHGEVFVLDDGGEVDLDLGNYERFLDIRLTRDNNITTGKIFHQVIQRERNGDYLGKTVKTVPHITDAIIEWVERVSKISVDGSGKTPQICIVELGGTIGDIEGMPYTMAFSMAFRRKTYRNRFLTVHVTKLLHESGEIKTKPAQNGLRSLRETGLYPDLLLCRSQKPLTQALRSKIASFAQLDINEIIDVYDCHDIHSVPL

SEQ ID NO: 123813 - protein, 443 aa, Heterodera glycines
  unsure (1)..(443): unsure at all Xaa locations
KPIWTRNPDDISNEEYAEFYKSLSNDWEDHLAVKHFSVEGQLEFRALLFVPQRAPFDLFENKKSKNAIKLYVRRVFIMENCEELMPEYLNFIKGVVDSEDLPLNISRETLQQSKILKVIRKNLVKKCMDLFEEISEDKDNFKKFYEQFAKNIKLGIHEDSVNRKKLSDFLRYYTSASGEEPCSFKDYVSRMKENQTCIYYITGESKDVVQNSSFVERVKKRGFEVIYMVDPIDEYCVQQLKEYDGXKKLVSVTKEGLELPESEEEKKKFEEDKVKFEKLCKVIKDILDKKVQKVSVSNRLVSSPCCIVTGEYGWSANMERIMKAQALRDSSTMGYMASKKNLEINPDHSIIKSLRDRVEKEQDDKTAKDLVVLLYETSLLTSGFSLEDPQQHASRIYRMVKLGLDIPDEEEPAEQQPSTSGEPTIAEKIAGAEEEASRMEEVD

SEQ ID NO: 123814 - protein, 316 aa, Heterodera glycines
  unsure (1)..(316): unsure at all Xaa locations
MSENKSEGGAEKKKSGGFNTKKFLLDLASGGTAAAVSKTAVAPIERVKLLLQVQDASIHITADKRYKGIIDVLVRVPKEQGFLSLWRGNLANVIRYFPTQALNFAFKDTYKRVFTQGVDKEKQFLKFFAMNLASGGAAGATSLCFVYPLDFARTRLAADVGKADAREFKGLAXDCIMKILKSDGPIGXLYRGFFVSXVQGIIIYRAAYFGCFDTAKMLFSPEGKQMNFFVNWAIAQVVTVSSGVLSYPWDTVRRRMMMQSGRKDIMYKNTLDCAIKIIKNEGLLKGMFKGALSNVFRGTGGALVLAFYDEIQKYIH

SEQ ID NO: 123815 - protein, 170 aa, Heterodera glycines
GPPTTTTVFIGNISDKCPDRIIQEVLKKCGSVCNWKRLQDSGGKFKAFGFCDFMYPDGAKKALSVLKDFPIGDKRLNVKVSLVLKVSEIVAIFRRTNKRRNCWMNSPRISSSPPTRRATTPSELRSESFWRTRRPTWWTCRRTKVFGEGRRIVTKQFRRIQRKKPGRRKH

SEQ ID NO: 123816 - protein, 278 aa, Heterodera glycines
  unsure (1)..(278): unsure at all Xaa locations
MPSGGDDEQQFEEAVKPALESLLADLQKTTEVLRQGKHGKGRRQQKEDESAALLDLKKLRNSPRQRNQSPAAVANLRNGRSEELQPRRDPMLEGDKLGIHTIPKGDCASCNQAVIGPVVIALGKMWHPEHFCCAHCGAXIENRNFFERQGKAYCESDYHDLFSPRCSYCNGPIKERCVTALGGKNFHVEHFVCAECGKSFGDGGFHEKSNSAYCRDCFYRTYAPQGQSWQQPITPQILTALNTHWHPECFCCREGGQTLPWGPPVPPFWAPLLWKKGP

SEQ ID NO: 123817 - protein, 184 aa, Heterodera glycines
  unsure (1)..(184): unsure at all Xaa locations
KHQSQPEKMCDEEVAALVVDNGSGMCKAGFAGDDAPRAVFPSIVGRPRHQGVMVGMGQKDSYVGDEAQSKRGILTLKYPIEHGIVTNWDDMEKIWHHTFYNELRVAPEEHPVLLQEARLNPKAXRRKMTQFXFKSFTRPALYVAIPARLVLXTLGPTTGFWLNPGNGVXHPGPFHKGYPFPQGI

SEQ ID NO: 123818 - protein, 65 aa, Heterodera glycines
DIVAILHLLITLALHYRAPIRFPNNVNVQVLIYTRHGKQISKSIVTEQLTTKQTELAPKVRFWKD

SEQ ID NO: 123819 - protein, 362 aa, Heterodera glycines
MAPSYPLASLYVGDLHPDVTEAMLFERFSNAGPVLSIRVCRDAITRRSLGYAYVNFQQPADAERALDTMNFDMILNKPIRIMWSQRDPSIRRSGAGNIFIKNLGKEIDTKAIYDTFSMFGSILSCKIATDIEGGSKGYGFIHFETEEAANSAIAKVNGMLLDGKKVFVGKFVPRTAREKQIGDPSSRFTNVYVKNFGEAMDSEKLSEVFSQYGEIISAKVMEDDSGKSKGFGFVAYKDHESAARAVEKMNEVSVPGSEKVEQKFTVCRAQKKSERQAELKRRYEQYKAERIQRYQGVNLYVKNLHDTINDETLRSNFESYGNITSAKVMCDEHGRSKGFGFVCFEKADEATKAVVEMNNKII

SEQ ID NO: 123820 - protein, 681 aa, Heterodera glycines
MAQAVAAVAPAPNANAASAQATQPQVMAPSYPLASLYVGDLHPDVTEAMLFERISNAGPVLSIRVCRDAITRRSLGYAYVNFPQPADAERALDTLNFDMILNKPIRIMWSQRDPSIRRSGAGNIFIKNLGKEIDTKAIYDTFSMFGSILSCKISTDIDGGSKGYGFIHFETEEAANSAIAKVNGMLLDGKKVFVGKFLPRSARDKQIGDPSSRFTNVYVKNFGDAMNSEKLSEVFSQFGEIISAKVMEDDSGKSKGFGFVAYKDHESAARAVEKMNEVSVPGSEKVEQKFTVCRAQKKSERQAELKRRYEQYKAERIQRYQGVNLYVKNLHDTINDETLRSNFESYGNITSAKVMCDEHGRSKGFGFVCFEKADEATKAVVEMNNKIIENKPLYVALAQRKEDRKAQLASQYMQRLAAMRMQNPAGLMGTMYAPASGGFFLPQAIQNQRAAPFMQTPNLSGAQMRGAVPRWNNMGGFNHPMQGYMMGPAVGGQFGGANQIARGGPRSGGMGGGGGMRQYGGQPRQQQNRMPGMGGGHQQQGMRYQGQPKGMQQQQHQQAQQPQIAYSSYPQQQSRGMAPQMGGGGGGGVKAGHAITATHQEPLNTQMLTEADMTGQKQMLGERLYAMVARCFRDGDVEKVGKITGMLLEMENAEILLLLGDEEMLRLRVDEAATVLYQATG

SEQ ID NO: 123821 - protein, 398 aa, Heterodera glycines
  unsure (1)..(398): unsure at all Xaa locations
MIFLTSFSKHPLSAAFRFFSSVNEVTLQTRPYKLFKLDSGPSTEVRLTRDEALDYYRKMQLVRRMETSANNLYKEKRIRGFCHLYSGQEACAIGMVAATDPKDAVITAYRCHGWTYLMGATVQDILAELTGRIAGNVYGKGGSMHMYAKNFFGGNGIVGAQVPIGAGIAFAMKYRRQKNVCLTLYGDGAANQGQLFEATNMAKLWGLPCIFVCENNGFGMGTPVDRASASTDYYTRGDYVPGIWVDGMDVLTVREATRWAKEYCDAGNGPLMMELAPYRYYGHSMSDPGTSYRTRDEIQEVRKSRDPITSFKDRIVTAGLVTXEELKDIDKKVRQEVDEAVKVALSDEVLPPEALFSDLYANTPPLAVRGTTADATVTQPFVSTAEVLRKMGREPKNY

SEQ ID NO: 123822 - protein, 124 aa, Heterodera glycines
MLLRWLQKCLLIHRHGFLRGKEYKGRTEWWASLGYKDLDLKRGLTTGFYPFFEERDIRYVDSKVPDGTSMVGPQGKDSRYHQSKMVKWGIPGKFEDFQKQIRENCSQYKQIAEKWDLSDEHPGI

SEQ ID NO: 123823 - protein, 417 aa, Heterodera glycines
HIFTGEFGRIGAYEKQRPPFEPKNPFLATLTLNRELHSVASDRSCRHIELAVDKALIRYETGDHIAIFPTNDTEKVDKLGNLLVVELDTVFKLVNTDEESTKKHPFPCPCTFRTALTHYVDICSPVKSHVLKALVEVSADEETKAKLTLLSTASEEGLREYAQFIVKERRSIVDVLQHFPACKPPLDLLLELLPRLQARYYSISSSPRVDASLVAVTAVVLRYNTSDGRLVKGVCTNFLADRAPGVSTAPVFVRKSTLRLPHRVQQPVIMVGPGTGFAPFRGFLHDRLWHKQQGKEVGEMHLFFGCRHPDHDHIYKEEMEEFVRVGLLTQLHVAYSRLGSEKVYVQHKLWEARQQIWELIQAGASVYICGDARNMARDVQNMFYKIFAEVGGLSDQESQKMMKDMERQRRYQADVWS

SEQ ID NO: 123824 - protein, 161 aa, Heterodera glycines
VRCIKDQNGNHVVQKIIERVQPHQLQFIIDTMVNGFTDSVTSLSVHPYGCRVIQRVLEHCTEGQKRPVLEQLHENVLTLVTDQYGNYVIQHVIEHGLFDDRERIVRALHGDILKYAQHKFASNVIEKCLICGTTDQKNALIDEVCADNGSSNPPLLEMMKD

SEQ ID NO: 123825 - protein, 249 aa, Heterodera glycines; identical to SEQ ID NO: 122413

SEQ ID NO: 123826 - protein, 202 aa, Heterodera glycines
MRRFDNRSSGGRFAKISANKRGCALNRVDISKLNINFESPKWQERKEALDALQQLLLQSPRLADLPNYRELIGRLTKIMANDANIFVAASATKCVMLFAKGLRAEFTPHVSLVVPVIFDKFKVEKRLLRDALVECIDVIAAYTSFDHLSKALLEAMTSKQNPSQKSQTDLFIYRLFRSLPAEDVPKGLLKDLVAILSKHGFD

SEQ ID NO: 123827 - protein, 141 aa, Heterodera glycines
MHEAKIIGGIASLCSLAAILATLVVIPQLYTQINEMNNRVMDGVQAFRVNTDSAWTELMEVQISVTPPTRPRENPFNSIFLRQKRQGLPPQCVCQLQQPSCPPGPPGPPGPPGTPGEPGGAGQPGSPGQPGQQAPPCPPPV

SEQ ID NO: 123828 - protein, 139 aa, Heterodera glycines
MSAQRIASNSEWKKTPLGQTGLFNMGNTCFMNATLQPLFHTPGFSQLFQEKSAQRFVNGNNSFGTNGMISGSFSALIDLIWSGKFNALRPTTFLEFFARRVNTEMADRRQHDAQEFQLYLLDALHEDTNRVNKRQSFEQ

SEQ ID NO: 123829 - protein, 297 aa, Heterodera glycines
MAAIDPKDFFNKFAKPSKGAGVGAGLMTAAAVAGYALYKSMYTIEAGHRAIMFNRIGGLGDEVYREGLHFRIPWFQYPIVYDIRARPNQIRSPTGSKDLQMVNIGLRVLSRPDPGQLQTICRMLGTNWEERVLPSICNEVLKGVVAKFNASQLITQRQQVSLLVRKGLIERALDFNIILDDVAITELAFSPQYSAAVDAKQVAAQEAQRASFMVEKAIQQRQEKIVQAEGEAQAAKLLGESMKNDPGFLKLRKIRAAQKIARFIANSSNRVYLPSDGLFLNLADEDYLSLATNKGRR

SEQ ID NO: 123830 - protein, 218 aa, Heterodera glycines
ATINHISASNGNDQKRRHLASGNEPLQRFGEAKKWMTDIYGQLDGHVGELLEFYLGLVKNGQKFVPPAQIDEIGHFRDSVRAIREVIGRDKMKVVFFGRTSNGKSSVINAMLSCRVLPQGMGHTTCCFLQVEGGSEQDKYFMMEDGAKHFPIAELDSVGHALGSEGMGSLGRDSLIHIFYPKSASKLLQNDVLIVDSPGVDLSPEFDSWIDKHCLDAD

SEQ ID NO: 123831 - protein, 215 aa, Heterodera glycines
  unsure (1)..(215): unsure at all Xaa locations
IRVSGDDVIIGKTIALPEVEDELEASTARYSKKDASTTLRSSETGIVDQVMVSVNAEGNKFVKIRVRSIRTPQIGDKFASRHGQKGTMGMMYRQEDMPFTCEGITPDIIINPHAVPSRMTIGHLIECLQGKLSANKGEIGDATPFNDTVNVQKISALLEGYGYQLRGNEIMYNGFTGXKLSTQVFLGPTYYQRXLRHMVEDKIHSRARGPVQGMN

SEQ ID NO: 123832 - protein, 210 aa, Heterodera glycines
CTGFTLRPVAGLLSSRDFLAGLAFRVFHSTQYIRHSSKPHYTPEPDICHELLGHCPLFADPDFAQFSQEFGLASLGASDEMVEKLATLYWFTVEFGICIQNGAKKAYGAGLLSSFGELEYALSGQPELAAFNPPETCQTKYPITSYQPKYFVAESFADAKNKLATWSTSIPRQFQVNYNPYTQRIEMLDNESAANKLVRDVKSQVSKLEE

SEQ ID NO: 123833 - protein, 160 aa, Heterodera glycines
LNPWEKQQPNNNNRQNKGKENGTRQPQAMPVGWVLGVRSKTTSINEDAGPSHPSTSDALSTTVKPPASSSSIASVLPPHPSFSLIQENGFEQRVYTDWRSQCKKQREALGYDIPEMHTLYRFWSLFLRDNFNRSMYNEFRKFALEDADHGLRYGIESLFR

SEQ ID NO: 123834 - protein, 70 aa, Heterodera glycines; identical to SEQ ID NO: 122040

SEQ ID NO: 123835 - protein, 211 aa, Heterodera glycines
FERMTEIQAKSIPPLLEGKDVLGSAKTGSGKTLAFLIPSIELLLRNGWKQQQGTGVLIVSPTRELSMQTYGVLYELMEKHPNISHGLVMGGANRQNEEKRLAGGVAILVATPGRLLDHLQNTSNFVVRNLKCLIVDEADRIFDIGFEQEMHQIVKLLPKKRQSMLFSATCSPKVDELVKTALKTDPLKIGVMEQQRDPNDMATVEGLEQGY

SEQ ID NO: 123836 - protein, 236 aa, Heterodera glycines; identical to SEQ ID NO: 122746

SEQ ID NO: 123837 - protein, 156 aa, Heterodera glycines
MESYVQVEDQDSRDSGISLAQSTTSQQSCFAKIYFPTLFDFGFKVRELYSLDTVERPQVPHKAFRSINADTMANLLGSLTEEQFQRRFILIDCRYPYEYDAGHIWYSLNLWETTSIEKLFYPEEEERFGEIIVRTPIFYCEYSQKRGPKMALALRE

SEQ ID NO: 123838 - protein, 163 aa, Heterodera glycines
TEEISGTERVYALSVNVGGFLNHVIFRRHKGMFSVDLNSDKGFRTIERFVDNYLRTGVSVTTQQYVALIRAVPRAHWELSHTSIILGNELGRGTFGVVKSGVYVDQQGTRAAVAIIEVSQTSTKEQIKEFMNEARVMRQLRHPNVIQFYGVAVGQEPLMIVME

SEQ ID NO: 123839 - protein, 231 aa, Heterodera glycines
YSLILYIFLHKMGREHRSDRKRDYEKEHSPLADESSSGSRKRTKREKNRSVSPARSRSHTYSPSPRREISPKRRARSRSRSRDLPSSRGGGGGGGGYYGSRRFHDGRDNPNPNPCLGVFGMSLHTTERDLKHLFGRYGEVDSVQIVYDRLSGRSRGFGFVYFTHTKDAARAKENLVDAVIDGMKVRVDYSVTRGGGPHSRHVRKSFSRSPVRNNRSRTRSRSRSESRSVSR

SEQ ID NO: 123840 - protein, 163 aa, Heterodera glycines
  unsure (1)..(163): unsure at all Xaa locations
FRPSLFSCLKKLQRWSKPKVGINGFGRIGRLALRAAIEKDTVQVVAVNDPFIELDYMVYMFNYDSTHGRFKGKISTNAGNLVVEKEGKSAHTIKVFNLKDPVEIXWGEAGAGYVIESTGVFTTIEKASAPLKSGAKKVXSSAPSADAPDVLEWASTKDKSDPG

SEQ ID NO: 123841 - protein, 267 aa, Heterodera glycines
QKVGGFESAGLDLEFDADVVPTSPEPSLYETVYLTTHKAPCRAAAFSPDGALVATASNDCSIKILDVDKIISRIDVTLSESGPDAHHPVIRTLYDHLDEVTCVAFHPRESVLLSGSNDFTLKMFDYSKTAVKRAMKTITEVEPITAVSFHPSGEFFLCATRHPTLRLYSAETQQCFVSTIPKDQHSDSITDVCYSENARMFVTGSRDGNVKVWDGVSNRCIETFTRAHDGAPICSAQFTRNGKYVLTVGMDSVPKLWELSTNRCLIA

SEQ ID NO: 123842 - protein, 248 aa, Heterodera glycines
  unsure (1)..(248): unsure at all Xaa locations
MKDSKHPEYSHERDIDNTEIPLQMGTNKFASQKGMTLFGTGRRETTRMKDSKHPEYSHERDIDNREIPLQMGTNKFASQKGMTGFGTNRRETTKMLDTSHPEYSHEQSIDXTSIPYQMGSNKYASQKGMTGFGQPRWEVLDPSISYQNRKSQGMVRLQSGTNRFASQAGMTGFGTPRNNTYEAEAGELPYEDMKKSEAIIPSQAGWNKGDSQKLMTNFGTPRDVKGKHLKRIWELEYPEEAEVSLDRL

SEQ ID NO: 123843 - protein, 193 aa, Heterodera glycines
  unsure (1)..(193): unsure at all Xaa locations
KHQSQPEKMCDEEVAALVVDNGSGMCKAGFAGDDAPRAVFPSIVGRPRHQGVMVGMGQKDSYVGDEAQSKRGILTLKYPIEHGIVTNWDDMEKIWHHTFYNELRVAPEEHPVLLTEAPLNPKANREKMTQIMFETFNTPXAMYVAIQGLLSLVPFGAEPPGFGLNSGDGGTPTRAPXTRGIALPQAFFRLDLA

SEQ ID NO: 123844 - protein, 155 aa, Heterodera glycines
DTSPTSGAGFLQQLLDFLSAENYGELATIVGRYYAMDRDNRWERIKVAYEALVAGEGEKCEPANAVQLVNERYANQQTDEFLTPIVFSDEARVKDNDTLVFFNYRADRMREINKCMGDLQNLQDLGTNVALPNGLHIKTMTQYNAEFPFPILFPP

SEQ ID NO: 123845 - protein, 146 aa, Heterodera glycines
MALKRIQKELQDLGRDPPAQCSAGPVGDDLFHWQATIMGPPESPYQGGVFFLTIHFPTDYPFKPPKVAFTTRIYHPNINSNGSICLDILRSQWSPALTISKVLLSICSLLCDPNPDDPLVPEIARIYKTDRERYNTLAREWTQKYA

SEQ ID NO: 123846 - protein, 399 aa, Heterodera glycines; identical to SEQ ID NO: 122651

SEQ ID NO: 123847 - protein, 346 aa, Heterodera glycines
MCGIFAYLNFFSPKKRSEIIDILLQGLRRMEYRGYDSAGIAIDCSNDVNLPHADVAVYRKTGKVDNLDDSIKNSEGVDMDFTYNVHCGIGHTRWATHGKPKDENAHPQRSNFDNDFAVVHNGIITNYKEIKDYLLTKGYKFESETDTEVIAKLTQHIHQRHPHYGLRQLVEIVVQQLEGAFALAFKSRRFPGQLVATRRGSPLLVGIKSQSKLTTDHFPVFYSRPRRGPVSLVFDESCTTAMETPNKLNASDMFASFSAPFNDTINSTARKIECSDSTRSVRPCDLANFEVEYFVASDASAVIEHTRQVIFLEDDDVAFVEDGALSIHRIKRSDDTAALTEQTREV

SEQ ID NO: 123848 - protein, 211 aa, Heterodera glycines
MFQKVFLVLLFLLAFTVSNLRSDEGIGEMDANQKPLNSARILASKFTLSQYAVESMDLVMEYNLFNVGDRTAFRVVLDDRNSFPTHSFDIVRGMLHIRWEKISPGENVSHSVVVRPRSYGIFNYTSAMVTYYVTEDAKQATVGYSTAPGEGNIYRLKDYERRFSSKIGIWLVFLLLALPTTLLPFFLWYKFQQKYATKSGTSGQQNSKKAQ

SEQ ID NO: 123849 - protein, 216 aa, Heterodera glycines
MDDKSPAAIFAREFEHRQARDVDELRRIFHRHIEEESRSDEQQRHEKTAAPMLTTAPAMAAALPSARIVRTPHIGTNARENGTASLSAITPIAAAFRWCTPLANTPTVSRLTLPFRTPCFVHISVHVNPGHFFVQLPSHPTFSSLALLNQYMLTVYTHNQPGVGAPGLAKPYDVGVLCAGPACDGWCRAITVAYDQDQDGMVGRFVDYGGFARLAR

SEQ ID NO: 123850 - protein, 285 aa, Heterodera glycines
  unsure (1)..(285): unsure at all Xaa locations
MSAYQTIEKGSLHTLNYRVFFKNSDGKLISPWHDIPLYASESNKLFNMVVEIPRWTNAKMEIATKEVMSPIRQDEKKGLPRFVNNIFPHRGYIWNYGALPQTWEDPGHKDENTGENGDNDPIDVIEIGSKVQKRGAVIRVKVLGVLALLDEGETDWKLVAIDENDELAPKLNGIEDIEKHLPGLLSATHEWFRIYKIPTGKPANQFPFNGQFXDRNFAHQVIERTHQFWKKLVTSASPHPLNTDCHKEXAVFKANLSDWESFISKQPKFGHAQQVPEHVDKWHFI

SEQ ID NO: 123851 - protein, 405 aa, Heterodera glycines
GIVPFMGDTPEALFANIINEDVEYPEGDEALDSDAESLIHLLLEKNPLDRLGTVGGAPQVSAHPFFAPLDFDTILRQKAEFVPQLENDEDTSYFDSRSDRYNHDANESAEDDDAAAVPMFWSFSTASPRHSIVGLELPAGGMAMLQAAHAAAIERSGQPLQQQDRIVDDDRVESRRRLLSSATTASSGIGSGPNSAFGPLSSTLLTRGGNCSDSQDSSHESAVGRRATAAASEFACDVMPSAVILRRRFSNQRHHTNDSSTSSSAGTTIGTTAGGGVGSSTDDSSSLDIATTMHLEQPRRSQGQLPRLAISPCGTTFDSSTGGAIVTHQRESACGTGGEFLSPVNERHITAGGGSGGMKRMEKRPSAVVHELITDVVRVSSSYGQSLARQSRSSSCRVSNMSPGA

SEQ ID NO: 123852 - protein, 211 aa, Heterodera glycines; identical to SEQ ID NO: 122390

SEQ ID NO: 123853 - protein, 99 aa, Heterodera glycines; identical to SEQ ID NO: 123171

SEQ ID NO: 123854 - protein, 257 aa, Heterodera glycines
MSGGGKDRIAVFPSRMAQTVMKTRLKGAQKGHSLPKKKADALNMRFREILKKITENKKRMADVLKEAAFSLAEAKFTAGDFSHMVVQNVSSQAQYTVRMKRENVVGVFLPVFEAHRKEGSDGDAYNLTGLGKGGANIGKLKRNYNKAVELLVELATLQTCFITLDEAIQVTNRRVNAIEHVIIPKIENTLTYIVTELDEMEREEFFRMKKIQAKKKRQRDEEKARETENVLTERQPDDGRAPKSLLEDEEEVPVLFA

SEQ ID NO: 123855 - protein, 194 aa, Heterodera glycines
TAEMIHAKDIVAILHLLITLALHYRAPIRFPNNVNVQVLIYTRHGKQISKSIVTEQLTTKQTELAPKGERDAFDTLFDYGPDKLQHVKNSLVAFCNKHLNKINLEVTDLETQFQDGVFLILLMGLLEGYFVPLYKFHLQVNNNDEKLKNVQFAYFLMEEAGMAKPKCRPADIVNGDLKSTLRVLHALFTKYKHV

SEQ ID NO: 123856 - protein, 160 aa, Heterodera glycines
MTEPSASIVRPTFFDSVERWADRDFGEDLRNFLEEISYSDLASYAQLIHHKDIIIQCLLRHLADRSLSLPAFCDFCSAIATDLRDDFHTHFWQIFDAISNLVLASKGKEQCSDNELECTFRAMEQIVRINFRFVSARLKQLFSRLLPLFAFPSDGRLRFI

SEQ ID NO: 123857 - protein, 99 aa, Heterodera glycines
RGTTPLHKAASQGHQRIVNLLLGCRKNLQIDLPNREGDTALHLACEDQQMDVALLLARSGASIEKKNRQNKTPIDLVDGKEQKLKLIKASESVKPTAGT

SEQ ID NO: 123858 - protein, 113 aa, Heterodera glycines
MPKKHTQSNKTRNMSGRDLDEIHADLIRPDKMQRIQERPFDDDLPGGGWHYCVACDRHFVDEQTKAGHEKTKGHKRRLRALREKPYTQREAELAGGLGVEEQIKLESLADLTF

SEQ ID NO: 123859 - protein, 151 aa, Heterodera glycines
MSSKPAYKVADISLADFGRREITIAENEMPGLMAMRAKFGAQKPLKGARIAGCLHMTVQTAVLIETLLELGAEVQWSSCNIFSTQDHAAAAIAKRGVPVYAWKGETDEEYEWCIEQTLIFPDGKPLNMILDDGGDLTNLVHHQHAELLPGI

SEQ ID NO: 123860 - protein, 159 aa, Heterodera glycines; identical to SEQ ID NO: 122379

SEQ ID NO: 123861 - protein, 262 aa, Heterodera glycines; identical to SEQ ID NO: 122684

SEQ ID NO: 123862 - protein, 105 aa, Heterodera glycines
MLLRFSLTVQLLLLFFAFEVFGAEPPEGAQNEEGQRDSKRLEMARKGLNVHMFSSPNFAPMFGIIAGLSVVLIIAIVFIVVGLLSMEPAKDSIIYRMTTTRLKKD

SEQ ID NO: 123863 - protein, 206 aa, Heterodera glycines; identical to SEQ ID NO: 122457

SEQ ID NO: 123864 - protein, 233 aa, Heterodera glycines
  unsure (1)..(233): unsure at all Xaa locations
MGVCAEKTVAEFGFTREQQDAYALASYARATRAWAGGAFGAEIVPVKVKQRKGTELMVAEDEEYRRLMPDKVTSLQPAFVKDGTGTITXANASSLNDGAASLVIASGQVEGAKPLAKVIAYAEAGRAPVDFSVAPVDAVKTLLQSVNISIDQIARWEVNEAFSVTALAFIRQLDLDPARVNALGGAVALGHPIGCSGARIVVTLVHQLESGEFGIAAICNGGGEATAILVQRI

SEQ ID NO: 123865 - protein, 209 aa, Heterodera glycines
MFTKLMPFLSLRQPLAVASYSLIQQARKFSTAVMTNYEMIKVERVGADDVVALITLNRPKALNALCSQLMDELAHSLTYLDKDDGVHAIVLTGSERAFAAGADIKEMVPKKFAEVFGGGFLENWSQVATVRKPTIAAVNGHALGGGCELAMMCDIIYAGEKAMFGQPEIKIGTIPGAGGTQRLARIVGKSLAMKMCLTGEPINASKALE

SEQ ID NO: 123866 - protein, 157 aa, Heterodera glycines
MKLLRLRSYLHFSCNLHVRNLTNLSKFGTYNEKAIQLIQQHYDEATSSSHQFVDSPSQEVFRMVLPPPNVTGNLHIGHAITVALEDAICRYQRLLGKKVRWTPGFDHAGMATEQVVQRQLAQRFGKQTDEMSQSEFVAHCEEWKEARIRDISGQLRS

SEQ ID NO: 123867 - protein, 169 aa, Heterodera glycines
MDFQNRAGGKTGGGGVASATDANVDRRERLRQLALETIDLQKDPYFMRNHLGGYECKLCLTLHNNEGSYLAHTQGKKHQANLARRAAKEASDVPYMPLPQQAKIEPKKFVKIGRPGYKVTKERDHASGQQALLFQIDYPEIADGVVPRHRFMSSYEQKIQPPDKRWQYL

SEQ ID NO: 123868 - protein, 220 aa, Heterodera glycines; identical to SEQ ID NO: 122603

SEQ ID NO: 123869 - protein, 64 aa, Heterodera glycines; identical to SEQ ID NO: 122450

SEQ ID NO: 123870 - protein, 114 aa, Heterodera glycines
  unsure (1)..(114): unsure at all Xaa locations
EHSSHFQVYMFNYDSTHGRFKGKISTNAGNLVVEKEGKSAHTIKVFNLKDPAEIKWGEAGAEYVIESTGVFTTIEKASAHLKGGAKKVVISAPSADAPMYVMGVNEDXYDPAKD

SEQ ID NO: 123871 - protein, 434 aa, Heterodera glycines
MSSDIVEKKETNPNETDDKTKEIKSLDEDEIAALSNYNMGPYADQLKQAEKDIDEIQKRINTLCGVKESDTGLAPPILWDIAADKMAMSHEQPLQVARCTKIIKEEGKETRYMINVKQFAKFVVDLHENVAPTDIEEGMRVGVDRNKYQIHLPLPAKIDASVTMMQVEDKPDVTYADIGGCEEQIKKLREVVEFPLLQPERFTSLGIEPPKGVLFFGPPGTGKTLCARAVANRTDACFIRVIGSELVKKYVGEGARMVRELFSLAKTKKACILFFDEVDAIGGARFDDGKGGDNEVQRTMLELVNQLDGFDSRGAIKVLMATNRPDTLDPALIRPGRIDRRIEFSLPDVKARKNILQIHTKRMSIERNIRYELIARLCPNTTGADLRSVCTEAGMFALRARRKVITEQDFLKAVQKVVKGYAKFSSTPSYLTHN

SEQ ID NO: 123872 - protein, 125 aa, Heterodera glycines; identical to SEQ ID NO: 122706

SEQ ID NO: 123873 - protein, 170 aa, Heterodera glycines; identical to SEQ ID NO: 122406

SEQ ID NO: 123874 - protein, 177 aa, Heterodera glycines
MFEGPIKIWSWNVAGLRACVKKGGHKHIRESGADIVSLQETKCSEFPAEINALDEYPYKKLLMTNEKKGYAGVALLSKEKPIKVEEGMGDVDFDDHARYIQAEFAAFFLIAVYVPNAGQKLVNLQKRGRFDELLLNKLSALNERKAVIIAGDMNVAHQEIDLRNPETNRNKTAGFTD

SEQ ID NO: 123875 - protein, 187 aa, Heterodera glycines
MPSTAIQKLLLAVSIFLIVAGIVLTVAGVFSPAWQVVDIREFRAEHQHGLWWDCIRAEKHVVAVGDFYEEAPLHCMYKFDESAALVIERALNHVDEDGAAGEAEHHRFWGWHKVVLSLILLSQLAAFVAVCTGVCAPYFAPSTFCFAISLFIAMLLSVLADGIFFFSANRVDIRFVTGMVGTYEQVI

SEQ ID NO: 123876 - protein, 175 aa, Heterodera glycines
PAVAAAFELVDPPGCFTRHEGRVTNIPSGMLNDLFAMDGLLTFLRTIESAPSIVGLALGHDLTNLGLNLNSSKRNLFQTFGGPWADFPCRIQDLDAKVPDEYLTNATIRDKLPNIKMNKLHEDVLFYLFYNCPGEVYQVAAATELYSRDWRFHKVERVWLMRAPFSAPPREIGGT

SEQ ID NO: 123877 - protein, 137 aa, Heterodera glycines
MLNDDDFPALPNSVLQSNQSQQISAQQRLPSQHTHQNNSLLVNDDATNARLSRMKQQMALENSDKVGIQTHPDGRVTNIPSGMLNDQCVTNETNIRLQINSFPLRFGMAGLLTFLRTIESAPSIVGLALGHDLTNLG

SEQ ID NO: 123878 - protein, 149 aa, Heterodera glycines
MANPFDDDSDEFIRKIRAGRGIEPTKSFTTPAASQNIEDQIAADEKAIERYLQASLDSTQRSRQQLSSSEGLAESTARELLEQREKLERAEQNLDTIHHTTQHTQRSLNSLKSWFGGLVRNKLSRAPKGLGTANVNANNQQQQQEQTVQ

SEQ ID NO: 123879 - protein, 156 aa, Heterodera glycines
MNKTDDQLAECREIFCYFDSKGDEKINVKQVGDVLRALGQSPTESEVRKCCEHWTEPDTRISFEEFVPIFQTVSKSRAQYTKDQFVEGLSHFDREGNGTIAVAELKHLLTNLGERLSEEEVEQLLAGHDVANGFVSIDSFIETVLRFPLTPPDNEK

SEQ ID NO: 123880 - protein, 242 aa, Heterodera glycines
SGPINGLSVDASDGLHFVTVGQDAQFKVWPLPIEFDGNAQPTQPVHSLSLDGVPHGCSHVAMSSDFVTCGEGISVWRLHRSSPIRHYAVGPNTVQHINCNPIEEGIMAGCAADRSIFLFDTRQKVPLSRVVLKLRTNSIAWHPLEPFTFVAANEDYNLYTFDMRRLDSARHVHQGHTSAVMDVDFAPSGHEFVSGSFDRSLRIFPVEQWRSREVYHTPRMQYVLSVLWSSDNKFVLSGSDDM

SEQ ID NO: 123881 - protein, 124 aa, Heterodera glycines
LSSTAAKTPVQEFGFEYLKRQMNLGRPLSPHLQIYKPQLTWVMSGVHRILACIMSGALLVGVFVFGICSVDFTSFAERLNSWNLWRPAFDMAKGTELASVYRSGYLVIGLSTLISLLIVANSKH

SEQ ID NO: 123882 - protein, 399 aa, Heterodera glycines; identical to SEQ ID NO: 122722

SEQ ID NO: 123883 - protein, 213 aa, Heterodera glycines
  unsure (1)..(213): unsure at all Xaa locations
MADDDAETFKLWRVRKTVMQMCHDRGYLVTQDELDQTLDQFKDQFGDRPSERRPGRGELTILVAHNDDPTDQMYVFFPDDPKIGIKTIKQICQQMQEQNITRAIIVVQSGMTPSAKQAIVDMAPKYILEHFLEAELMINITEHELVPEHVVMSSEEKAELLARYKLRDNQLXPRIQVSDPVARYFGLKRGQVVKIIRASETAXGRYITYRLCN

SEQ ID NO: 123884 - protein, 380 aa, Heterodera glycines
REIFHIQAGQCGNQIGSKFWEVISDEHGIQPDGTYKGESDLQLERINVYYNEAHGGKYVPRAVLVDLEPGTMDSIRAGAYGQLFRPDNFVFGQSGAGNNWAKGHYTEGAELVDNVLDVVRKEAEGCDCLQGFQLTHSLGGGTGSGMGTLLISKIREEYPDRIMSSFSVVPSPKVSDTVVEPYNATLSVHQLVENTDETFCIDNEALYDICFRTLKLQNPTYGDLNHLVSVTMSGVTTCLRFPGQLNADLRKLAVNMVPFPRLHFFMPGFAPLSAKGAAAYQALSVSELTKQMFDAKNMMAACDPRHGRYLTVAAMFRGRMSMREVDDQMMSVQNKNSSYFVEWIPNNVKTAVCDIPPRGLKMSATFVGNSTAIQELFKRI

SEQ ID NO: 123885 - protein, 127 aa, Heterodera glycines; identical to SEQ ID NO: 122389

SEQ ID NO: 123886 - protein, 157 aa, Heterodera glycines
MSSASRFNEYQVVGRHQPSETNPQPTLYRMRIFAPNAVVAKSRFWYFLKKFRKVKKATGQIVAVNQVLEKNPTQVKTFGIWLRYDSRSGTHNMYKEYRELTRVNAVQACYQDMAARHRARFRSVQIIRVAEVATKDVRRPYIQQILEKNLKFPLPHR

SEQ ID NO: 123887 - protein, 336 aa, Heterodera glycines
MQEAKPTASLNLFDLSVMPDSETSIELNQMRVDAVPDLARFTQLQFLGLRQNLLTSLNANLGRLTTLTELELYDNQLTEIAGLDQLVNLVMLDMSYNRITKIQGLSTMTKLRRLFLVHNKIKRIEGLEGLDALELLELGDNRIKVIENLCHLVNLNELFVGHNDIQRIEGIQTLIKLRVLSLPANRLTKLEGLDTLTELEQLHLSDQGIESLDGLGNQSKLIILDAANNRIVNLDGLGHLQKLEDLWLNNNKIVVWSEVDKLAQLRALDTVYLEHNPLYTTDTNQYRRKAMLALPHIRQLDSTVCRQQKNVVEEDTKQNSEDNNNAKPNSQRSAVA

SEQ ID NO: 123888 - protein, 110 aa, Heterodera glycines; identical to SEQ ID NO: 123155

SEQ ID NO: 123889 - protein, 130 aa, Heterodera glycines; identical to SEQ ID NO: 122114

SEQ ID NO: 123890 - protein, 56 aa, Heterodera glycines; identical to SEQ ID NO: 120012

SEQ ID NO: 123891 - protein, 173 aa, Heterodera glycines
  unsure (1)..(173): unsure at all Xaa locations
MSRPKVFFDITIGGKAAGRIVMELYSDIVPKTAENFRSLCTGEKGMGKSGKPLHYKGSKFHRVIPNFMLQGGDFTRGNGTGGXESIYGEKFVDENFKEKHTQPGILSMANAGPNTNGSQFFVTTVKTEWLDGKHVVFGRVTDGMDVVKAVEAQGSQSGRASKDIMIADCGQLS

SEQ ID NO: 123892 - protein, 42 aa, Heterodera glycines
  unsure (1)..(42): unsure at all Xaa locations
GGVGRKAQAQAWGTTQGRWPKKSAEFLLPLLRNXESMAEVEG

SEQ ID NO: 123893 - protein, 233 aa, Heterodera glycines
MPSRNLSAKKKQQNSLVRDESTSSPSRTPKSVSKASNSNSSQQKLQKKHNSSELSTISSESVEKDLSSSMSTNPHGHPTDKKWTIGEKVLCRYLNSEHIYYEAKVMFLKDLSGGDVGYGIHYPGWSNRHDEVVPQHEALIRFKNYSDEEATKAKEDVKRAQQMLNAKKRKRSELKNRSQAHDESSRSSTPGSADNASKRKIARRTTIETSAVAKKDMPQVTLTDPLRRILIDD

SEQ ID NO: 123894 - protein, 118 aa, Heterodera glycines
SSRVPISHLNGEQLESLFVDERVQRLLLSLTGHDTDKILRHRRINQTERKHYALMTDGMVKEFMSRLDQRAGKFLRIVPFKEPRSNRTEVLARDAEIDGFDTAKFVFTDISFDATDMD

SEQ ID NO: 123895 - protein, 197 aa, Heterodera glycines; identical to SEQ ID NO: 122435

SEQ ID NO: 123896 - protein, 114 aa, Heterodera glycines; identical to SEQ ID NO: 122631

SEQ ID NO: 123897 - protein, 406 aa, Heterodera glycines; identical to SEQ ID NO: 122265

SEQ ID NO: 123898 - protein, 189 aa, Heterodera glycines
MIYHLLDLVRMGILTASKVCTLPRLSSARSMTWWWGPEKNNGREVVGPTFHGDEFYQDRLDRWYPSIRFRKNDEVITPIRHKELGDWKKLSIEEKKLIYRYSFRQTLAEFEALTPYGYLTVTLFFSMLGLTILYASFVRTYVTKFNDRLPDTFDDEYKESQAERRVVLERGNPYGPAYYYDYEKNRWKD

SEQ ID NO: 123899 - protein, 166 aa, Heterodera glycines
MATVSSSSNNTCKPSESYSASKIPQCAETIKKMFHELGIKEYEPQLVLQLCDISYSLTKEILVDARSVSEFSGKKQVDRSDVDLAIKTFDEKHSNDRPPKAFVSELAAEKNALPLHPIRQNYGLRLPNDRFCQLQPNYIYIGDDPNNEDQAVHMEERPRQNGSSKF

SEQ ID NO: 123900 - protein, 72 aa, Heterodera glycines; identical to SEQ ID NO: 122636

SEQ ID NO: 123901 - protein, 240 aa, Heterodera glycines
WTPGLQNRHEPLKAVHSPAVHCLVLQCRLELHHSLFGPTEDGTDCASSTKSYALRSDGASCSTTTDAKPDFASTYEHCIDLTSTVGTSQSANLLDLVAESTSPLEVPMCKKCANAVTAELNKQLGHLEKECIQYKKSLDHLLRRRADCPFDMEASRIKLDALKSEERDLLEQLTLLEDEERTLLHELDTKQEERKKIGERDEQLYRQLRDNHSILIEQSDEQRSFKLQINQANEQIRRLS

SEQ ID NO: 123902 - protein, 167 aa, Heterodera glycines
ENLKFKRERREKFSQSAAIPSNLPPSTSNGQMGSLLLHDEMASASSGSSTFALDMDKLEQQRVQEQTTLLLDDTEQFHQSRFYSMESIESSISELGTIFRQLATLVSEQGEMITRIDSNVEESSLNVEAAHHELLKYFNNISRNRWLIIKVFGVLMAFFVFFVIFLT

SEQ ID NO: 123903 - protein, 240 aa, Heterodera glycines; identical to SEQ ID NO: 122238

SEQ ID NO: 123904 - protein, 173 aa, Heterodera glycines; identical to SEQ ID NO: 119685

SEQ ID NO: 123905 - protein, 126 aa, Heterodera glycines
MKIGHRTPPRQKRATDPPPQFDSSDLGSPQKVWSLLCEKDEKLRRDPHVFSRQKKINAKMRAMLLDWLMDVCADKQLHRETFHLCIDYIDRFIALSDHQMQPQRLQLFGSTALVIASKVEEIYPPK

SEQ ID NO: 123906 - protein, 271 aa, Heterodera glycines
MTTTETPTAPRLDHTTGWTCLACKLVFSSGQLQRDHYRSEWHLYNMKRQIANLPPVTECDFLEKLQYFLQHQQKNAFDADHRRLSSLSVSAAASSLPLGASAVASSLPPLSSSNLSSSSPSSLVCTVCRNKRFRSRNAFDNHLQSRRHKEEEQLQQQQKTTATIEANECQTEGRENGGMEAKLPKIVAQNIDGEEEAVLPIESDNDDDEEAEQKEDNSFAKKEDGIPPNECLYCELKSDTWEANLAHMSKQHGFLVPDSPFCTDVPGLLTY

SEQ ID NO: 123907 - protein, 185 aa, Heterodera glycines
  unsure (1)..(185): unsure at all Xaa locations
MGKGFQNFMSKKDFHPSAWWNLKRKXEAEQKNDLEKRRQDELRVQYEKEQEILNNKALLGDEKARLGLSFMYDAPAGINKKKEEGPEPKFEWQRKYNAPREEWAKGNELIQDQPFGIQVRNVRCVKCRAWGHLNTDRECPLYGMSGNAEDHGYANNPSDIIRDLNVEKKTKTVSDVTTNEQIDIK

SEQ ID NO: 123908 - protein, 158 aa, Heterodera glycines
VHFEGADVDASGSRYGASIPFEKAMRPEVIIAYEMNGDVLTRDHGFPIRLVVPGHVGARQVKWLNAIRLSDEESPSTWQQRDYKAFPSSVQIGDPLPFDTTPAIQEYPVQSVICEPNSNTKIAPGAKTITVRGYAWSGGGRGIIRVEVSPDNGTTWKC

SEQ ID NO: 123909 - protein, 126 aa, Heterodera glycines; identical to SEQ ID NO: 122425

SEQ ID NO: 123910 - protein, 196 aa, Heterodera glycines; identical to SEQ ID NO: 122092

SEQ ID NO: 123911 - protein, 153 aa, Heterodera glycines
MDDDDAIGGAEAFKWEQAYTEGLNIRSVLQEDEHGSVEESIRRLVMDEKRQRRMDRLPAKIRLGMMRYVHLAVDCSSAILSADFFPSRLSVALECLRKFVDKFFLLNPLSQMGLIAVRDKRAERISGFTSSVQFLLESLQDISSTNCGGEFSL

SEQ ID NO: 123912 - protein, 189 aa, Heterodera glycines
MAQPAKRVAVSSVNWAKLAERLTPQQEEELNRLKAQNSSYHAEVVQHQADLPKVDWATLKKQMPENSTVLDSLQKQWEALCIPYGTIPDNLKKQIDQWVKFNEARVKFHELKTADGLVEMKKIEDKWAKMPPVEQLWRDQLVQYFPHKYQDLRYLNEYYDPWGIGVNDTNWRERFKDFQSRPREGATLH

SEQ ID NO: 123913 - protein, 196 aa, Heterodera glycines
MASGFWAFVGRAWEWLKTLILPQSINGTCLNQTFINDTPSAGEFLADLEPFQIVLLSVGSVLTFTVFLLAFLQWWYIFNYVSSEQRRNKLYLLISLFPVCTFCCLVGMFCPRTALLVSSFGLLYFLLCLFVLVSLMRHLSGGRATLALSLTDKGKLIDFRGPPFCCLLYCLPRANPTEVNLTRLEWIVLQAPIIRV

SEQ ID NO: 123914 - protein, 472 aa, Heterodera glycines
MPIILNQGILSTTCDEQQRETLKLQLEPAAEYNETNFKRTVLNASGTPINGAFTFWSAPSTAAPAATASVSNLSATTTVISSEPDLTPLTPSTSDVTVNGHSSNVKVLKPVPLVIRTQSADEIAGAVAHPTKPSEIRKLIRSKMVRCRICRNRFLDKHIYERHLRDRHPKEHAAYLSQQEDEVRQQRKEEFEANRLDELVSGGFIPPQEDLDASKYEVNIKEIPLPGELTGGVPARFDRFGVLFQPKRVYKKKVSPQCPFCDKRYRNEYSVKKHIAKKHTECAEWAQCLKCFKAVPSKAEMVDHLGEMIYLCFECVPPRNLCNDVRLYNHRTKFHRGQNSGFKCNLCNQKFLTPRKLRKHKKMSHVFTKTYQCHFCEELFINETAVTTHERIHTGIIKFECKICDYKCNRFLNMEDHVKEDHGYLCSICQSKLSEWGDLKNHMLMDHGGYLSSEFNSGYIESPRVWLMFKGD

SEQ ID NO: 123915 - protein, 114 aa, Heterodera glycines
KLNPFVSSSARKSRKRHFNAPSHIRRRIMSAPLSKDLRNKRGVRSTPIRIDDEVTVTRSHYKGNARRIMRVYPENFFIAPLTKILPEKGQGTNGPRLGIFPFNGGFPKFENGKR

SEQ ID NO: 123916 - protein, 139 aa, Heterodera glycines; identical to SEQ ID NO: 122423

SEQ ID NO: 123917 - protein, 133 aa, Heterodera glycines
GTDSINYLGVRLLWVTGQSGATLQAKLSKDLMLVHMSVPRTMSPVAISVLGEFVQPALKSWDVLSVQEEMAYDLSQQSPYDLTIEGLYRAAFRNGSLSNALLSPHYQIGNITNKRTQQFVNSRWLTKETALIG

SEQ ID NO: 123918 - protein, 153 aa, Heterodera glycines; identical to SEQ ID NO: 122629

SEQ ID NO: 123919 - protein, 116 aa, Heterodera glycines
  unsure (1)..(116): unsure at all Xaa locations
MVRLIQNQFWRGTLTQPWGVKMFKYIWRKHSRFLVKTVMVQENDIDSAFHLLNRLMEREGLLKIIRNTQRYQKPFMQRSQLSIEASKAILEEDRDRKLKFLXRKHRADAYPGQLTM

SEQ ID NO: 123920 - protein, 290 aa, Heterodera glycines
  unsure (1)..(290): unsure at all Xaa locations
AHLNAAERGRPYLFIVAHYDTYGIIPSLGIGSDSNGSGTAVLLELLAILSQIYSLPSHKARYNLVFVLSAGGKFSYQGSRSFIDDFNERHSDERIALAICLDSLARGDSLFVHASKIPSDETKAFRFIQTLRHFANRPVELISKKISLASDRLAWEXHEIYNIRRIHAVTISHFSNHSNPFRNSLLDIPTSLDFSMLEDNAKLIANALVSFVFDLDSRLCNNAKENNLACSLLNDAVEVDPKRLKAWVSMFGSKSRPIVVSQHQLVANLFEVVKRLAHSAHVSEIVVNDY

SEQ ID NO: 123921 - protein, 194 aa, Heterodera glycines
  unsure (1)..(194): unsure at all Xaa locations
MIVNGSLKICRTALGPFVRRASASALGLPLEDGPSVSPPSVDRAKDISPRVRSLVDQIAELSLVEVSDLNFALKKRLNIPDTPAMAMSPEMFAAAGMFGAQAGGAAGAQTSQANADDDSASTKTSYAVRLAKFDDAKKIALIKEVRSVIPGMNLVQXKKLIESAPVEIKGDMGKTEADELKALLEKHGAECEVI

SEQ ID NO: 123922 - protein, 94 aa, Heterodera glycines; identical to SEQ ID NO: 123139

SEQ ID NO: 123923 - protein, 196 aa, Heterodera glycines; identical to SEQ ID NO: 122084

SEQ ID NO: 123924 - protein, 150 aa, Heterodera glycines
TPFAKKSEEQREAEEKKRAEKLQQFVDSRNLVFQKRKSGEYDDEVLTVCGELLKNNPDIYTLWNVRREAIEKRATKCEDESDEELAKRISELINGELKLTQSCLLRNPKSYSTWHHRYWSCLRHPTPPLRQELALCEKALGQDCRNFHCW

SEQ ID NO: 123925 - protein, 158 aa, Heterodera glycines; identical to SEQ ID NO: 122602

SEQ ID NO: 123926 - protein, 72 aa, Heterodera glycines; identical to SEQ ID NO: 122302

SEQ ID NO: 123927 - protein, 137 aa, Heterodera glycines
MADTVEVAAAEVHVASTMTVEEALQDVLKRSLIHDGLARGIRESVKALDRREAHLCVLAQSCDEKEYVRLIEALCAEHNIRLIKVEDNKKLGEWAGLCKIDRDGNPRKVVGASVVVVKDWGEESEALNIILEYFKSQ

SEQ ID NO: 123928 - protein, 158 aa, Heterodera glycines
  unsure (1)..(158): unsure at all Xaa locations
MDLVYHEKQVGRMCAQHALNMLLQGDYFTPDSLASIAQELDQRERAMLRDESEFQSQNYDDSGYFSIQVXTEALRRQANLSLEPIISPNAMKVLQNPSLAHAYICHLEDHWFTIRKIGTTWFILNSLFKAPRIVSETFLELYVHQLNTEAPNIFGHDE

SEQ ID NO: 123929 - protein, 192 aa, Heterodera glycines; identical to SEQ ID NO: 122297

SEQ ID NO: 123930 - protein, 103 aa, Heterodera glycines
  unsure (1)..(103): unsure at all Xaa locations
KCPKISPKVVSAKKKSGGFNTKKXYLDLASGGTAAAVSKTAVAPIERVKLLLQVQDASIHITADKRYKGIIDVLVRXSXFFGFLSLWRGNLFNXSRSFPTQAL

SEQ ID NO: 123931 - protein, 277 aa, Heterodera glycines
KEQNSGDEEAEEADEHRTKKRGILSLEDGIIVDAEPLAKREKKQLVIPVLQVSSRAQISRIQKLVDEGTATETDLARLSLLIDSLDDEQRKTTTLPLDARHQTVPTVAVADDDDPDYASVPVGEFGLAFLRGCGWKDEKSCIGKSNPQVVPLRVIEPRPKGLGLGAVLPTTAPPTANALKAAENGDEEATTLGKHSYVRCLSGLNKGSYGQVMSMDEENASIFVELAWPPANVGKTVRVSQWAVEVVRRKEYRECVKGGSGGGGTAENGRRLERVRV

SEQ ID NO: 123932 - protein, 223 aa, Heterodera glycines
VFIVTFFRAPQLLMFEYIDQLDSENKHEEAYCLLAKQSLNTGLNQQEILWRLARSCVQMAYPLDMKNPKKKKLLDEGHKYACSAYELCSDDFNVLKWTAAAVGSRTDFLGTKERIEQGNFFRDVLDKALAINPEEYTLLHMRGRLVLSVASLSWIERKAATVLFGPPPEVSLNEAIRDFTAVLELAPDWLENTLFLAKAYLANSDRESAVHHLKQLIDSYQQN

SEQ ID NO: 123933 - protein, 260 aa, Heterodera glycines
MANNFLSVRRFLHCCPPLRNVVNGRWTTTHYTQRPREKDGRWKCVDMACVEDEFDVVIVGGGPAGLSAAIRLKQLAAEKAKELRVCLVEKAPEIGAHTLSGAIIETGGLDRLFPNWRELDSPIKQAVKKDAFAILTKNGRIPVPLVPGVLLNNHGNYIVRLGHLVRWLGERAEEHGVELYSGIAAQEVLFDEAGKTVCGVATGDVGIHKDGSPKESFERGMELKAKCTIFAEGCPGHLTKSVIGKFGLREGRDPMTFGNG

SEQ ID NO: 123934 - protein, 180 aa, Heterodera glycines
  unsure (1)..(180): unsure at all Xaa locations
LAVSPSPFSVLDGDRVPTVDISQNTAEYRELIPEEVTXFYHELTEDDKNALNEVAERHEEFRTEEQAMEALKEKSEKLYNKAVELRTLVKGKIDQLVPDAKAFVIGMIEKAKGMRPKAGEKPKLEELRTAANELIEKYKALNDEAKESLKSNFPKITSVIQNEKFQTLAKSLLKQEAPAA

SEQ ID NO: 123935 - protein, 154 aa, Heterodera glycines; identical to SEQ ID NO: 122335

SEQ ID NO: 123936 - protein, 184 aa, Heterodera glycines
MSTFYSLNVSSNWLKYLSLGTALVVGYAVYIDRKRRLDPEYKQKIRQNRKQKQANFFYAKMSGGVDFPDPSDPQANEIFFFSQITLGEEKMQTGHIEEGITHLSNAIVTCSKPDELLRIFQQTIPPECFSLLVQAIPGAKMRRNASSSYRHGREPIDLDCAKIDDIGDNAVDKKMFVLQDDELE

SEQ ID NO: 123937 - protein, 257 aa, Heterodera glycines
MNRSVFSPPNCSLFRLAFFLVFCLLSANAMKFAVKGDDNKYCILLDSPQITGAIRYEEKNGSFNTTTFSLSNSSASVDKNASSCDASIQRISIQFAPLIEGIATEMSKKWNITLEFTKKDGKNYALSDYSLGVVFFPAQKASQKSHVYEKNGTAEWVAQLESDQSKHPNGFTCSENKLALSDASTINFEFLKLVAFDDNEKDEFRDGQIFENCPLDARTSDLVPIVVGALLAGLVVIVLIAYLIGRARAKRQGYTSV

SEQ ID NO: 123938 - protein, 125 aa, Heterodera glycines
MGQKLAVSLDDYFHPETAPRIDRPPTFDPLYGFPKGRKPREMQASWEELEKMKMPISERDYCAHKMVALRKCVWDRAPFASHYCHGRRHDLGLCLYDDHLMRMKEFEREKRLLMRKARKERAKAA

SEQ ID NO: 123939 - protein, 213 aa, Heterodera glycines
  unsure (1)..(213): unsure at all Xaa locations
MEQLFQQANMDLHQIHLEMRHLELCKNESEAQPLFQKLHQQIRQSAAQLDGLERLVNKEPSGKRHTSKYRFEQLRHDYNALEMAINSLQNRLTTKWRTAAEREELLTMRFKPNETHLDFEGTELLVNDRLKQSHNAVDDLIAHGNSVLTSLRHQHLGLKDVKRKMHDIGQXLGLSTTTLQMIEKRLEDDWLLFLVLCVLCVVFMYCFYRFWKG

SEQ ID NO: 123940 - protein, 231 aa, Heterodera glycines
MHEQAQEFLKRAIKLCPTNASIWVLLGHEYLETKNHQLASTAYKKATEIDSVCYRGWYGLGQLYEILKQSETALYYYQKAHKCRPADSRILIALGVIFSKIDRKSDAEKCFKKAFQIGDVEGNALTHLAKLYEEQENQQNAAKAYEAYLTLYTEELVGDLSLIAEACRFLARHNLDLGDLDTSYAYAQRCLNYDLSKEEGQRILRLIMSKRKEEQERKLALPVGTPQQQNI

SEQ ID NO: 123941 - protein, 210 aa, Heterodera glycines
PPYVHYINTHTTSEPQRGFAFMPKRGMNSLENEINRIYKVTTKGVVDILQFFVPRKSDLWQADLYPDTRSLIPALTAEEFVGGKNAPPNLIPVNPEAAKAGPKVQVAKKANILAQMPPQQEHPPEPPMQRPAPPQQQRAAPVRHDEEMGIVRSQRREPSPPEQQTPAPRQQVQLRSREARDETGGSQTAGQRRAAAELDRIRREQNRSGA

SEQ ID NO: 123942 - protein, 210 aa, Heterodera glycines
MAPRGNNMLPNAHFHKHWQRRIKTWFNQPARKERRRAARSAKAARLAPRPAGGLLRPVVRCPSVRYNKKCRVGRGFTLEELKRSGMGKYQARSLGIAVDTRRVNRSVESTERNVARLKEYRSRLIIFPKKMNKPKKGDSSPEELKLAAQMPGSVVMPPVVKQRRLKAEPITEAMNKFSAYCHQRRVRADKRLKGKREKKARNGGRRAGQK

SEQ ID NO: 123943 - protein, 339 aa, Heterodera glycines
  unsure (1)..(339): unsure at all Xaa locations
MTYYNDSNSPFLITLLGRICLSLLLAKVCRSLYNILYPYVIAKPRDLHELAGGDANWAVVTGATDGIGKAYAXELALRGFNLVLISRSAHKLEAVATELKQYSATSGQRGEVQLRTVQFDFTNANPADYERHIFGAISDLNIGILVNNVGMGNPNDYPERFDEMSTKLLSDMTIVNTLPVTVLSSFVLRQMVKRRRGAVINISSASAYMKWYQYAVYSSTKSFIVHLSEILRKEFASDCPGIAIQTVCPMVVATKLTQRSSRDGLSSLLAASPTEFARQAIQTVGLVPETSGCLSHQIQVELLFSLLLTFVPNSLFDFFVRLEAHLHKSVLNTASKQHD

SEQ ID NO: 123944 - protein, 89 aa, Heterodera glycines; identical to SEQ ID NO: 122405

SEQ ID NO: 123945 - protein, 172 aa, Heterodera glycines
MVALRAQFEASNDVGVFCKLTNAYCLVGIASSENFYSIVEAELADVIPVIHCTVAGCRIVGRVTAGNRHGLLVPNATTDQELQHIRNSLPDSVQIRRVDERLSALGNVIACNDHIAVVHADISKETEAALAEVLKVEVFRLSLGENALVGSYAAMTSNGALVAAKTPPEVQR

SEQ ID NO: 123946 - protein, 51 aa, Heterodera glycines; identical to SEQ ID NO: 122799

SEQ ID NO: 123947 - protein, 158 aa, Heterodera glycines
GTRVSGRWTILKKLGAGAFGAVYLCKDGKGTVAALKTEPIDTRQPLLVMEATVLDTLGKKLKNADGQHFCRLLDLGRSEQRNATSGDTVFNYVVMTVVGTPLDKLIRNAGDRFSPGTAIGMSIQLLSAIKALHNVGFLHRDIKPANTAIGRAETNEHR

SEQ ID NO: 123948 - protein, 262 aa, Heterodera glycines; identical to SEQ ID NO: 122609

SEQ ID NO: 123949 - protein, 157 aa, Heterodera glycines
IKLALVGQEPILFARSVAENIAYGLERCTIVDVVEAAKMANAHTFIQQTRDQYETNVGEKGSQMSGGQKQRIAIARALVRRPAILLLDEATSALDTESEHLVQEAIYKNLKGRSVILIAHRLSTVEKADKIVVISRGRLEQIGTHEQLLAQEGMYRS

SEQ ID NO: 123950 - protein, 318 aa, Heterodera glycines
QRSVFSLSRRFYVSYAQPQQKVQTYKREKPHLNVGTIGHVDHGKTTLSAAITKVLSRQKKARFVSYEDIDKGAEERARGVTINIAHIEYESDNRHYAHTDCPGHIDFIKNMITGTAQMDSAVLVIAADDGVMPQTREHLLLAKQIGLREIIVFVNKTDLVDTDVMELVEIEARELLTAYGFDGENAKIVFGSALRALADDDDKCILELINALDGLEEPVRTENGPFLMPISSKCKITGRGSVLIGTIESGTVKKGDTLELLGQEYAQKTLIADIHVFGKSTAQSSAGEHVGLLCKNLYYDPISRGFWLTKPGTVTPTN

SEQ ID NO: 123951 - protein, 165 aa, Heterodera glycines
MRHSAYFVERKFRLISFHFLRRFLSTSAMPTKPSRHSPSKIVHGAGKSIWVEFTALAVECNAVNLGQGFTDSPMPDFLTRHLADIGKSPERTDFHQYTRGYGHPRLVSVLAKLYSRLLSVSVDAQSEVLITVGAYLSLYYAFMGWLNAGDEAIIFEPAYDSYVSQ

SEQ ID NO: 123952 - protein, 165 aa, Heterodera glycines
MRDLFIEDNSPITPARLAELIRHFYALGWMRDNGGGMAVLCNGAVFGSPTSVQKEKVSENDLFVIDATTGTVLKRPQNAASVPSATCGLLMNTGLNCVIHTHSKYANLVSQLVTGNEFAIQNQEMIQGVENRSSGLRLDNVDRLVVPIVDSELNEQMLSPVLLRT

SEQ ID NO: 123953 - protein, 294 aa, Heterodera glycines
MASKSKRTTRSQREAAIHIDASADETIESSSNGSTINSSSGHLSSRQDEKNHLCNLNDRLAGYIERVRSLETENARLQIQVREVEVVERKEKENLSARYEIKIDELRKQLEFFTREKAKLQIESDKAQSGFEELKARVGKLEKDLRKAEKERTAAQADVQELTARFNNTDTALGNAEREIEQLRNEFNNSENMVDMLRRQLEDEVLLRTELENRLHTAKDDLDFARRSHSNQIEEIRRKRQVEMTSFSDEVEHRYQAKLQEQLQAMRDDFDNRIAQNRAEVDELYRNKLGEAVE

SEQ ID NO: 123954 - protein, 140 aa, Heterodera glycines
RTADEAIVATVSKVGENIQLARASVISSSPANKLFGQTHPKEEFNGVQLGRFISLVSLGHKSDESVSDFPTAQLGQVICQHIIGMAPESLGEPRKKGAKRATQMEIVDNGEGTEKERSANAENESDTGEEEDLNASQVDQ

SEQ ID NO: 123955 - protein, 266 aa, Heterodera glycines
MASIACLNPKAELARHAAALEMNISGAKGLQEVMKTNLGPKGTLKMLVSGSGDLKVTKDGNVLLHEMQIQHPTASLIAKACTAQNDVTGDGTTSTVLLIGELLKQAENYVSEGVHPHLVTEGFQLAHDHLLQLLAVSKKALLIDRPLLIEVARTTLRTKLDQKLADHVTECVVDAVLAIRRDENDTEPDLHMIEIQQMEHEMETDTQLIRGLVLDHGGRHPDMPKSVRNVHILTCNVSLEFEKTEVNSGLFYETAAERERLLQAER

SEQ ID NO: 123956 - protein, 160 aa, Heterodera glycines
YVRNMCTHLELSNKDQDYQWGLDFINKQSQLITNQLSVSSTELISESGKASTQFFFMPGQGHHFMSYGGRLVRVERERTEQMLQRADKRRTPLETVRLTTIGVKPEFWRQMLEKAAKDALSEVETGLAVYTPFGPEWHHFGKPLKKQPLDTIVLDNGIRE

SEQ ID NO: 123957 - protein, 140 aa, Heterodera glycines; identical to SEQ ID NO: 122293

SEQ ID NO: 123958 - protein, 267 aa, Heterodera glycines
STFKAFSKCHLKLCTFIDLGTTYSCVGVFQHGKVEIIANDQGNRTTPSYVAFTDTERLIGDAAKNQVAMNPSNTVFDAKRLIGRKFDDPAVQSDMKHWPFKVVQGEGARPKVMVEVKGEDKAFFPEEVSSMVLIKMKETAEAFLGQTVTDAVVTVPAYFNDSQRQATKDAGTIAGLNVLRIINEPTAAAIAYGLDKKGQGERHVLIFDLGGGTFDVSILTIEDGIFEVKSTAGDTHLGGEDFDNRMVNHFVAEFKRKHKKDLSSNPR

SEQ ID NO: 123959 - protein, 180 aa, Heterodera glycines
  unsure (1)..(180): unsure at all Xaa locations
MIIYKDAFTDDELASDSFPMKLVDDLIYEFKGRHVVRKEGEITMSGANPSAEEIDEGTEEAVERGIDFVLNHRLQEMNCYENQATFKGYVKDFMKKIIEYMEKEQKSADEIAAFKKKIQAWVVSLLAKDRFKNLAFFIGENMAXEGKGEGQVAIVEYRQGEXEEVPTLMLIKEALIVEKC

SEQ ID NO: 123960 - protein, 209 aa, Heterodera glycines; identical to SEQ ID NO: 122397

SEQ ID NO: 123961 - protein, 88 aa, Heterodera glycines
  unsure (1)..(88): unsure at all Xaa locations
MTMNRLLSGRSLLPKIMRNFSHSNRLAASEADPEHYGYFPDPTEQTWGLEREMLAARPKXYYRAEHSTKDVPNVVRVHLEDKVVGCLC

SEQ ID NO: 123962 - protein, 262 aa, Heterodera glycines; identical to SEQ ID NO: 122253

SEQ ID NO: 123963 - protein, 92 aa, Heterodera glycines; identical to SEQ ID NO: 122591

SEQ ID NO: 123964 - protein, 132 aa, Heterodera glycines
MVGRVRTKTVKKASRVIIEKYYTKLTNDFHTNKRICEEVAIVPSKKMRNRIAGFITHLMKRIERGPVRGISIKLQEEERERRDNYMPEISYLDAQNHQTISTDQETKDMIEYLGLGLNLEVKGPVPTGAGRR

SEQ ID NO: 123965 - protein, 158 aa, Heterodera glycines
MLPFEVQHFSTGTADTAPSFHADTIHHVEFDFYGQRVATVSSDKTVCIWDKDTQNGAWRKSASWKKHGGAVWKVRFAHPEYGQVLATCSFDNTIQIFDKDAADLSEIRPITGADSSNGWACRTVLRQSNASASITDIQFAPHYLGLQLAACTSSGRLI

SEQ ID NO: 123966 - protein, 163 aa, Heterodera glycines; identical to SEQ ID NO: 122256

SEQ ID NO: 123967 - protein, 310 aa, Heterodera glycines
LVEELAFFNEVEDGSVLRKEEIPQEYREEAKILRQELLENLANCDDVIAECYLNEVTPSVKEIKEAIRRATIKRSFVPVLVGSALKNKGVQQMIDAIVHYLPNPSEVDNFVNLYDKNDNAERVLMDPLRTANSEKQKPFIGLAFKLEAGNFGQLTYFRIYQGRLVKGDTIYATRDGRKVRIQRLVRMHANTMEDVDVAYAGDICATFGVDCFSGETFCSDEQLRVHCESMHIPDPVISMSIKPIGKRDMENYLRALKRFAKEDPTFKLFYSKEHKETVVSGMGELHLEIYAQRMGNEYNCPVELGRPTVS

SEQ ID NO: 123968 - protein, 340 aa, Heterodera glycines; identical to SEQ ID NO: 122299

SEQ ID NO: 123969 - protein, 160 aa, Heterodera glycines
ELPPSAKDGDPTRNGSPLTINGNPFVPLNERAYGRKKEAVEADGIRWQLAKKDEELLNLQKALKERDSEIGTMKLRVEMAKTQLAETTGKGGISVEMELLRQRCTGLENDLKRQKDEYEQQLDQLRQQLAEEHNRTREFSKKALFANMQNQQQQAAASAL

SEQ ID NO: 123970 - protein, 225 aa, Heterodera glycines; identical to SEQ ID NO: 122719

SEQ ID NO: 123971 - protein, 341 aa, Heterodera glycines
MLSKITVVLAFLCLLLALLVGIDAQQSQWEQKQNRAAPRGLASVTLRRMDTVRSRLAAAGSLVQFRKHLRQALRQRLDRLYSDKMARADVAFDTDAAAREGIDEVLRNYMDAQYYGDISIGSPPQNFTVIFDTGSSNLWVPSKKCSFFDLACRYHSKYDHKKSSTYQPDGREVAIEYGTGSMKGFVSKDTVCIMDGMCVEGQEFAEATSEPGDTFVNTKADGILGMAYPGISVQKLSTVFNNLVEQKEVEEPVFAFWLNRDPSYEFGGQMTVGGMDKRRFVEPINYVPVTRQTYWQFKMDSVTGGQNGKSKIACRNGCQAIADTGTSLITGPQKDVEAIHK

SEQ ID NO: 123972 - protein, 35 aa, Heterodera glycines
MVKPKVGINGFGRIGRLALRAAIEKDTVQVVAVND

SEQ ID NO: 123973 - protein, 182 aa, Heterodera glycines
KIRGLAYVCKVTPSIASRMIDGAKKMLHGNISDIYITIDQRKGPQGGLSPGFGIFLTAETTEGVFFHGEAMSRPKGQNEDQTVPEEIGEQAARRLLDEIHMGGCADSSCQSLAATFMTLCDRDVSKFLLGPLTINSVHTLRNLQMFFEQMFKLEEWWKVMKEIVGKGGNAMKNGSEDKCLMT

SEQ ID NO: 123974 - protein, 146 aa, Heterodera glycines
MRFQKAKFAIFRLNSHQIFILLLLLIKLAMTDQQNSIVGGWTEQNVNDEKIKSLASRSVAKINSESNDRFSLFPLEVLSAKSQVVAGIQYQLRIKVGRSNCSKNQSNLADHANCATEDDQTARKTFLVTIWEKPWEQFEQITYKLE

SEQ ID NO: 123975 - protein, 500 aa, Heterodera glycines
  unsure (1)..(500): unsure at all Xaa locations
MDPFHRNEAKVEVAVEPPTAIDQRVDDIMQTGRFGDGRLVKMEVDYSAQVDSQLIVADNLAKEGKTAEAIESLEKLEKDRRINCDMRSNQRLLCHMVKLAFDANNWQLLCETAKTLCKKRLLIKSSIKKMVQECCEMVPKAPDASSKSTLIDTLRAVTAGKIYLEVERARLTKQVAEKLEAEGKLDEAREMMMELQVETYGTMEVEEKVNYLLHQMRLSIANNHFTRASIISRKISTKFFEREGTQVQLMKLEFYKYMVQIGLSENNYLDVCKHFLAILNTPQIQENNVKKIEILKCVVFYLLLSAHDNEKWELLHRVNAMRELEQIPKHKELLELFIHQELIFWSKTIESEFAPILFAAQPPVEVISDSFLPSTHVFPMTKEDGQKRRERLHDCVGEHNVXMVAKYYSRITFQRMAKLLEFGIEQMEAFVCKMIVDGVIPEVKIHRPSQIIYLSPKKNGAEVLDEWVFNVRKLTDTMNKVSQLIAKEEMVHGLQISQRI

SEQ ID NO: 123976 - protein, 149 aa, Heterodera glycines
MSAAVSSSRPMEDWKSELAMPDKDLRYKTSDVTATKGVEFEEFGLTRDLLKGIFEKGWEHPSPVQEASIGIALTGQDILARAKNGTGKTGAYCIPCIEKIDPSKEYIQAMIIVPTRELALQTSQICVELSKHLKIKIMVTTGGTDLRDD

SEQ ID NO: 123977 - protein, 312 aa, Heterodera glycines
MLEMNGVGNSKDYDTKVKAILEQCRISQKLLNYTEHFNYPYVSEVTYYEQLLKIGQGTFGEVFKARCKRTGKLVALKKILMENEKEGFPITALREIKMLQRLRHQHITELVEVCTSKQKSGKEKFCFYLVFTFCEHDLAGLLSNTQVKIRLVDIKTMMQHILRGLHKIHSSQILHRDMKAANVLITGDGVLKLADFGLARIMYKQPEHCYTNRVVTLWYRPPELLLGTRNYGPAIDIWGAGCIMAELWIRAPILQGNTEQSQLELISKLCGSINPHSWPGCDKLPYYNNLQGSLQQNLPRRVRERINPFLQN

SEQ ID NO: 123978 - protein, 154 aa, Heterodera glycines
MSLIMPEKFQHIHRVMNTNIDGNRKVPYALTAIKGVGRRYAFLVCRKADIDIHKRAGELSEEDMEKLTTVMLNPQQYKIPSWFLNRQKDIRDGKNQQVLSTNLESKYRDDFERMKKIRLHRGLRHYWGLRVRGQHTKTTGRKGRTVGVSKKKGG

SEQ ID NO: 123979 - protein, 184 aa, Heterodera glycines; identical to SEQ ID NO: 122376

SEQ ID NO: 123980 - protein, 327 aa, Heterodera glycines; identical to SEQ ID NO: 122740

SEQ ID NO: 123981 - protein, 177 aa, Heterodera glycines
AESEGAKGDGTEAEGSDRSPLLTSVDVSRFRFLNERLCSQTSASSAKLFEEDPDSFRLYHRGYRHQVSKWPVNPLEKIVLDLGSLPPGSVVADLGCGDAEIAKRLGERLRVHSFDLVASNERVLAADMADLPLEAESVDVCVYCLSLMGTNLAQFFREAHRVLKTHGKIQIGQITKR

SEQ ID NO: 123982 - protein, 123 aa, Heterodera glycines; identical to SEQ ID NO: 122378

SEQ ID NO: 123983 - protein, 158 aa, Heterodera glycines
MADDKSCDGASSALPPCLIVLGMAGSGKSSFVQRLASHLHSKKVFPYLVNLDPAAATVPFPANIDIRDTVNYKKVMQEYGLGPNGAILTSLNLFCTRFNQVLDLLDRRKGSMPYAIFDTPGQIEVFTWSASGTVITDSLAASFPTVVAYVMDSARSTN

SEQ ID NO: 123984 - protein, 62 aa, Heterodera glycines; identical to SEQ ID NO: 120533

SEQ ID NO: 123985 - protein, 208 aa, Heterodera glycines
MKRLECAVQHYAWGKSGKDSFVAHLLPAERVDLDKRYAELWMGTHPNGPSRVIDGGAEASTNLKDFLAQNPQLLGHHEKGELSFLFIILSVDKALSIQSHPTKEQAKVLHAKDPANYPDDNHKPEMAIALTDFELLCGFQTPHGIISNVKAHRELLQLVGEPLLDELAQAEHHEPDWGERALRRMFCQVWTSPAEQIAHVVAQIVDRL

SEQ ID NO: 123986 - protein, 159 aa, Heterodera glycines
NYGIFPNEHICCMFLDHFLGSAQLQYAAKIAIYVMLQEMFDFPLLTFLATRALLEWTQGERKLDEQIHPKMAPSLEDETNFNEENVRLFRYPFLKNPFWDGHFDENDSDRMAGKALEWLSYHLKLAKNDETNYDETLIRVIRLLGLSIQRKWTEAKSLA

SEQ ID NO: 123987 - protein, 74 aa, Heterodera glycines; identical to SEQ ID NO: 122797

SEQ ID NO: 123988 - protein, 213 aa, Heterodera glycines
KCRIEDEYDYLFKVVLIGDSGVGKSNLLSRFTRNEFNLESKSSAGVELFFEFSPSIKVDGKTMKAQIWDTAGQERHQPIVSAFYRRAVGALLVYDISVRLTYENVGRWLKELRDHSDPNIVIMLVGNKSDLGNLRAVPTDEANAYAERNQMAFIETSALDGTNVGAAFTNILTTICRSQSTTAGSTPKIDINDDLIDEDALLEPEDLQRPEQS

SEQ ID NO: 123989 - protein, 329 aa, Heterodera glycines; identical to SEQ ID NO: 122086

SEQ ID NO: 123990 - protein, 154 aa, Heterodera glycines
MMKHTTSSSSSNSGDAKDSSCHRNQRSMSLGGPAHESLLSKQHSSSPPQTVELSRADNGDCVVLVVENTRFIVNPALLVVKPDTMLGRMFSLRARTGGGTNTLSVPSSSSSANDPGADRGSPSDLVRPNERNEYDVAEGLSAACFRVVMDFYHR

SEQ ID NO: 123991 - protein, 216 aa, Heterodera glycines
  unsure (1)..(216): unsure at all Xaa locations
MNQEQDNIPTFKLVLVGDGGTGKTTFVKRHLTGEFEKKYIATLGVEVHPLTFHTSRGQIRFNVWDTAGQEKFGGLRDGYYIQGQCAIVMFDVTARVTYKNVPNWHRDLVRVCENIPIVLVGNKVDVKDRKVKAKSITFHRKKNLQYYDISAKSNYNFEKPFLYLARKLIGDPNLEFVGXPALAPPEVQMDPALAAKYEQEVAEAASAELPDDDEDI

SEQ ID NO: 123992 - protein, 111 aa, Heterodera glycines; identical to SEQ ID NO: 122367

SEQ ID NO: 123993 - protein, 131 aa, Heterodera glycines
MSANTECYRCHEFGHISRDCPNAGRSGGGGGGGGGSRGGGGETKCYNCGRSGHFARECRDAGDRDRGRGGGGGGGGRGGDDRGSKCYNCGGYGHFARECRDERSASGGGRGGRDDRDDRGNKCYNCGKSGH

SEQ ID NO: 123994 - protein, 105 aa, Heterodera glycines
LFWRILCSLSVLSLAHCAYSAAQHRSYLRLVGQPFTHLPADLTTQTLLSLLFAIVSASFVVGDFQPIRTDLLISKKSWDVLGNCPSFYVFNHRAKCLMPKFDDID

SEQ ID NO: 123995 - protein, 128 aa, Heterodera glycines
  unsure (1)..(128): unsure at all Xaa locations
MVSMVAGRVHLLPRAASFGKSFLSSDATKKPDKTSFGNLNDSDRIFTNLYGRHDYRLKGALARGDWFKTKDIILKGPKWILGEISTSGLRGRGGAGFPSGMKWGFMGKPFDGRPKYLVXNADEGEPGT

SEQ ID NO: 123996 - protein, 272 aa, Heterodera glycines
MANIMKKKKKNAVATTTAGPQKDGGKFKQKGIKFNTEKGQHILKNPGVVHAIVEKSAVKGTDTVLEVGPGTGNLSMKLLDRAGRLIAYELDPKMVAELQKRVVGTPVQYKLRIIAGDVIKAAEWPPFDVCVSNLPYQISSPFIFRLLLQRPLPRYAVLMLQKEFADRLLAKPGSKVYCRLSVSVQLLATVEHLMRVKRSEFVPPPKVDSAVIRIQPRNPPPAINYKEWDGMLRIAFMRKNKTLSALFKQKQVVDVLRKNYAVVCGTKGKEVP

SEQ ID NO: 123997 - protein, 308 aa, Heterodera glycines
MLPIRLLFLLAVPSSAMGRFDLGGLLVNLPQFTRHACVHLSGIFGRMGQQQPNSAHSYDQPPRHFHRGGPPPHHHPDSGSGGGLGNIGGAVEGILSRVGVNPQLANQFGKIQIPPIPSLAVHNVLDGVPGILRQFLPAQTVGQITAIARQAIESICSSDNCLQQRPEWLHQRATVAQFETLIRKTFSPGQSDSQIGRDVEIRLSRTFQVKKALIRKAGLEGRVEPANNGVFQQDLLLTEQQANVLITEINQNEVGVGAVPPSDNRRFSRRHNFNRRRFTRAGNSLFFEASPTQKWPVGQPILYMFDQS

SEQ ID NO: 123998 - protein, 145 aa, Heterodera glycines
DPRHGKYMAVCLLYRGDVVPKDVNAAIASIKTNRSIQFVDWCPTGFKVGINYQPPTVVPGGDVAKVPRAVCMLSNTTAIAEAWSRLDHKFDLMYAKRAFVHWYVGEGMEEGEFSEAREDLAALEKDYEEVAIDTVEGDGAGDDDY

SEQ ID NO: 123999 - protein, 167 aa, Heterodera glycines; identical to SEQ ID NO: 122330

SEQ ID NO: 124000 - protein, 137 aa, Heterodera glycines
IINRGTIGRPKPLLKFHSVCGTNIQLLREGRVAPRKESFCKGLAFINRPISINEIVCIRLSEIGTNWSGVMRFGVTNVDPASFRDIELPKFACPDLTSKGGYWAKSLAERYSVEGSILHFFTNANGEMYYGVNGVHK

SEQ ID NO: 124001 - protein, 152 aa, Heterodera glycines
MVRTLKFHEKKLLKKVDFINWPAELDNSLHENKIMRRYHVEKREHYTLYNKLSREIREMAKRIRELDDKNPNKLVLARMLLGKLFDMGVIPTADTLERCDKVTASSFCRRRLPVVCHKMQMAPTVRKSSQLVEQGHVRVGVEMVTDPAFLVT

SEQ ID NO: 124002 - protein, 196 aa, Heterodera glycines
MLSSPPKEFVAPVGEVHAFVVKCMQSVGTSAAHAAQLADLLLDADIVGHYSHGLNRLCIYIEDVASGVKGDGEPKVLKQKGATAWVDGCDLLGAVVGNFCTELAIKLAKEHGIGWVVCKRSNHYGICQHYAKKIANAGLLGLSFTNTSPIIFPTRSSQIGLGTNPISCCANSREKGDGFILDMAASTVALGKGEIA

SEQ ID NO: 124003 - protein, 139 aa, Heterodera glycines
  unsure (1)..(139): unsure at all Xaa locations
MGKPTSVKDVDQHEIVQSVATFLKKSGKIKLPDWVDLVKLGKNKELAPINPDWYYVRVASVHRXGVGSFRNVYGGKNRRGVALSHFTNASGAVIRKALQSLEEIKWVEKDGGTGGRKLTKQGQKDLDRIASQLRYRTEE

SEQ ID NO: 124004 - protein, 97 aa, Heterodera glycines; identical to SEQ ID NO: 121214

SEQ ID NO: 124005 - protein, 267 aa, Heterodera glycines; identical to SEQ ID NO: 122328

SEQ ID NO: 124006 - protein, 436 aa, Heterodera glycines
ISKMNGSLTNGNKVDRGVTILLGAQWGDEGKGKVLDFLIGHHMIDIVARCQGGNNAGHTVLANGREYHFHLLPSGLASEKVLNIVGNGVVVNLDALFEELESNKIEDSADRLFVSDSAHLVLPVHIATDIMRENALGQNSKLGTTKRGIGPAYSSKCFRNGIRLGELLHQPEKFEQNYRSLVAHFKTLFPDIELDTESDVKQLKAHAARLLQMGIVCNTTVFLHKKRLEGKSILVEGANGTLLDIDFGTYPFVTSSNSTVGGCITGLGIPPTAVRRVIGVVKAYQTRVGSGPFPTELLDADGHPSEEGKRLQEVGAEIGVTTRRKRRCGWLDLVLLRYSAMINGFTSLAVTKVDILDQFHEIKIAIGYELNGRQIEYPPATVDDWANLCVHYKTFEGWQSPTTSARQWEQLPDKCRAYLEFIQNQLGVPVEYIGVG

SEQ ID NO: 124007 - protein, 159 aa, Heterodera glycines
TNKRIVWIDGGMHAREWASIHTALWFIDQLISLYGVDPQVTAYMDTLNFYVLPLANPDGFEYSRSDVNPQTRFWRKNRGQQVCKKDRWRRERCCGGVDLNRNFDFHWGETGSSSDMCSDIYQGAYAFSEPESRAIRDKMMSSELYGKVDAFLTLHTYSQ

SEQ ID NO: 124008 - protein, 145 aa, Heterodera glycines
MEELVALSPGIRVGRWTITKKLGAGAFGAVYLCVNDQGEQAALKTEPVNTPHPLLVMEAHVMTKLDALRDGDGKHFCRCLDLGRDEQKDQQSGQMKKFNYIVMSLVGRGLDGVVKDAGGRLSLGSAVGVSIQMLAALRGLHTVGY

SEQ ID NO: 124009 - protein, 183 aa, Heterodera glycines
GAPRGGGRSTTSGSPGLQEFGTRRLWNLWLAMFSIAGCLVTSYALLREIGTYGLVSSYTNCRDFFEGFTGLWTWWFCMSKFAELGDTYFIVLRKKPLMFLHWYHHVATLNYGLMSYVDNTAFNTWIVWLNFSVHAVMYTYYFLAACRIRLPAWFAQCLTTSQITQFLITLAILAHVGVRLLVG

SEQ ID NO: 124010 - protein, 158 aa, Heterodera glycines
GLLKRLEEDCIGSAPAAMDKDDAKQFEEYRARKVAMITGISGQDGSYLAEFLLAKGYQVHGVIRRSSSFNTGRIEHLYSNPMTHAVGSSFNLHYGDMTDSSCLIKLISTIRPTELYHLAAQSHVKVSFDLPEYTAEVDAVGTLRLLDAIHACGLTRLV

SEQ ID NO: 124011 - protein, 279 aa, Heterodera glycines
  unsure (1)..(279): unsure at all Xaa locations
MPSVSFVDVPVNSPFTFENLPFGVFSTNENSKKRIGXAIGTQILDLSVETHLFTGTLLSERQNVFSQETLNQFMGLSRQCWLEARLTLQSLLSNANPMLRDDSELRERAFVAQSEAKMHLPALIGDYTDFYSSIYHATNVGTMFRGKDNALMENWKWLPAXYHGRASSIVVSGTAVNRPWGQVKAEDDTQPNFVTSRLMDFELEMAFFVGGPENALGTPIPIEKTEEHIFGMVLMNDWSARDIQKWEYVPLGPFLGKSFATTISPWVVTMEALRPFVVD

SEQ ID NO: 124012 - protein, 331 aa, Heterodera glycines; identical to SEQ ID NO: 122237

SEQ ID NO: 124013 - protein, 136 aa, Heterodera glycines
TSQTDKRRQMGVAFVLCCFSVAFTPSLFIFRRFVAPDPLRIILFVLGAFFWLCSLLLSAVVFAVFGQHLLLVAIFFSILFQEVARALFYLLLYKTQSNLARLMAADANRTGTVSSMRLLYSSRHILAIVCGLGMGT

SEQ ID NO: 124014 - protein, 223 aa, Heterodera glycines; identical to SEQ ID NO: 122116

SEQ ID NO: 124015 - protein, 214 aa, Heterodera glycines
  unsure (1)..(214): unsure at all Xaa locations
MGRRIRAQRKGRGGIFKSHSKHRKGPAKLRPVDYSERHGFIRGIVKDIIHDPGRGAPLAIVQFRDPYKYRVKKETMIAAEGLHTGQFIYCGKKAQVQIGNVMPIGELPEGTTVCNLEEKAGDRGRLARTSGNYAIIVAHNPDTKRTRIRLPSGAKKVVPSANRAMIGIVAGGGRTXDKPLLKAGRAYHKYKVKRNCWPKVRGVAMNPVEHPHGG

SEQ ID NO: 124016 - protein, 158 aa, Heterodera glycines
SKLPPELTQQVMRGEMPDLTKLPLDLQQWIKDNFDRLVASLENNPDLSIDEIMKKLPTFEHPLMSTFSPYDINKVDADLVVQQRNEEEANHRFWRIFAASALALAGAVTLGVLSAFFWYLKRSRRLADPPMAPPIGIDGGPELPSVIREQYFRPSASS

SEQ ID NO: 124017 - protein, 136 aa, Heterodera glycines
MRRLSQLFLRCHWTPSEIAASCRHASSAATARPLYMDVQATTPMTWDKTDWRNARFEYTPKQVNPNIAAHLIAELAPVPSEERVVRCDGGHRELGHPRVYINLDKPGTHACGYCGQRFYNVHMTKAEGLDIHHIQV

SEQ ID NO: 124018 - protein, 286 aa, Heterodera glycines
LFLSFVLFFSINFSPSVVAQRTQWDAFNFPNPTAPGDFHRCKMRSTALLCDPDEVLSEQERYRLNYELGLIESATRQENGREFCERKGINAAVAIARQVKGGQEQDVRNMANDLLRRWTLDKQCEEALVIVLSLEDRRFWVARMPRVPVYAQEFTELFKREQGTFKTGRNSEGLQNVIRAIRDRALSKQFPSARPDDDGRSKGTPFVPMPKPTPHPEGKHRQRGGGGVLSWLFILLVIVFVVIPLACCCCCLYFCFFRKKDSGSNNRTPHNAENGGSGAERRGGTG

SEQ ID NO: 124019 - protein, 160 aa, Heterodera glycines
PRAATLQKQELDLTSAMIASGSWRGKQFKQYNFSAMGVPPPSGHLHPLLKVRAEFRDIFFQMGFSEMPTNRFVESSFWNFDALFQPQQHPARDSHDTFFLSRPALSTEFPEDYLESVRKVHSEGGFGSIGYRYDWKLEEAQKNLLRTHTTAVSARQLYLL

SEQ ID NO: 124020 - protein, 146 aa, Heterodera glycines
MGISDNDVQKQLRHMMAFIEQEANEKAEEIDAKAEEEFNIEKGKLVQQQRQKIMEYYEKKEKQVELQRKIQRSNMQNQSRLKCLKARDDHLKNVLEEARANLSKISADRERYPAILKGLLLQGLFQLLESKVVLRCRKKDEEMVAR

SEQ ID NO: 124021 - protein, 145 aa, Heterodera glycines
MDEEQLLDYEEEQEETQEQQSKNDAATNGDATKKIKGNYASIHSSGFRDLMLRPELLRAIIDCGFEHPSEVQHECIPQAILGMDIVCQAKSGMGKTAVFVLATLQQLTPTDGTVSVLVMCHTRELAFQISKEYERFSKYMPGVKV

SEQ ID NO: 124022 - protein, 439 aa, Heterodera glycines
MLSKKLFQSILNKSPKTAFSTSARLSASSAEVSRILEEKILGQASQINLEETGRVLSIGDGIARVYGLKNIQAEEMVEFDSGMKGMALNLETDNVGVVVFGNDKVIKEGDVVKRTGSIVDVGVGEALLGRVVDALGNPIDGKGPINVSKRSRVEVKAPGIIPRVGVREPMLTGVKAVDSLVPIGRGQRELIIGDRQTGKTAIAIDTIINQKRFNSSTEEKKKLYCIYVAIGQKRSTVAQIVKRLTDTDAMKYTIIVSATASDAAPLQFLAPYSGAAMGEFFRDNGKHALIIYDDLSKQAVAYRQMSLLLRRPPGREAYPGDVFYLHSRLLERAAKMNETHGGGSMTALPIIETQAGDVSAYIPTNVISITDGQIFLETELFYKGVRPAINVGLSVSRVGSAAQTKSMKQVAGSMKLELAQYREVAAFAQFGSDLDASTH

SEQ ID NO: 124023 - protein, 136 aa, Heterodera glycines
EWLGFVEKYANVPSVCTLNVSSLTDNSYNNWLQRILVSATLSMDVHSLHKWNLRCPILFQAEKEIKVNQQTENSAEPAVLLPNSLTHKLIVCKQNFKPLLLFREIDLNFDKWNRIIVFVNKKQTSRRLSSLMETLS

SEQ ID NO: 124024 - protein, 150 aa, Heterodera glycines
MTASLQPLRAQPGWTADKCKEQIEVAKSENRTFQRQTLQAHLVHLLNKEHKFNEAIQLAAQLVRELKKVDDKDLLVDVQLEESIGFYHLSNYTKARAELVSARTIANTKYTPPAMQARLDLQSGILHAADDRDFKTAYSYFFEAFQAFDS

SEQ ID NO: 124025 - protein, 213 aa, Heterodera glycines; identical to SEQ ID NO: 122316

SEQ ID NO: 124026 - protein, 161 aa, Heterodera glycines; identical to SEQ ID NO: 122769

SEQ ID NO: 124027 - protein, 160 aa, Heterodera glycines
EKGGDPEQIRKSQVGRFADVSLVDKVISADSEWRKERFFLDGLNRAIKVCSTAIGDKMKKKESAGDSDAIPEGQIKSLAELKMDDIKEMKISQIKTVKGMVDEEVRRTKLRMETLEGDRNEHLAKIGNLLHNSVPISDNEDENRVERTFGDCASRKSYSH

SEQ ID NO: 124028 - protein, 296 aa, Heterodera glycines; identical to SEQ ID NO: 122222

SEQ ID NO: 124029 - protein, 210 aa, Heterodera glycines
MAKEEYCFDAKAAAAAGQSRRPSTTASVLVQGDGQSSRFVDAIIRKVTQPPLQRFTDEITDEELKQLCKAATDFFRMQPTLVRIRPPVVVVGDIHGQFSDLQRIFTTHGPPPEQQYMFLGDYVDRGAHSMETIILLFCYKIKYPSNFMLLRGNHECSNINKAYGFYEEIDRRYPRTGARRLFDLFNQVFAWMPFVGLIGEKILCMDGGIS

SEQ ID NO: 124030 - protein, 219 aa, Heterodera glycines
  unsure (1)..(219): unsure at all Xaa locations
KVRHSPVQRFTDEITDEELKQLCMAATDIFRMQPTLVRIQPPVVVVGDIHGQFTDLQRIFHTHGNPPEQQYVFLGDYADRGSQSLETIVLLFCYKVKYPANFMLLRGNHECANINRVYGFFDEVNRRYQRPGPRRLYDLFNQTFAWMPYVGLIGDKILCMHGGXLSDPIHSLEQLSQLNPPANTTPRLRTLEKRILLWGETLPNRKYRWQAYPRTTMEK

SEQ ID NO: 124031 - protein, 214 aa, Heterodera glycines
  unsure (1)..(214): unsure at all Xaa locations
MGRHRRYPMKKTAKNTNQAQKIERLSFDTDQTPLQTPKDSRKNKNMNKKPSNSMLEEQPTTWKEQMLKKLTDEVAQQKNKIQKRNKKPKNRLLEETQKLGYHHMPWESAKTLIYRIQQDQNKAINEELLKARFAKAGRDVKEIAEEYKIMDEKNKMKKERRKVLHEKQSKLRAXKKTLTKESERIRKKKWTKTKWKKGREKTEEAEKRKRKEQV

SEQ ID NO: 124032 - protein, 141 aa, Heterodera glycines; identical to SEQ ID NO: 123048

SEQ ID NO: 124033 - protein, 178 aa, Heterodera glycines
HYTPNAGDETVLGPSDVVKIDYGTHVNGRIIDCAFTLTFDPKFDTLLNAVREATETGIREAGIDVRLCDIGEAIEEVMTSYELELDGKTFPIKPIRNLNGHSIGPYRIHAGKTVPIVKNGEQVKMEENEFFAIETFGSTGKGHVHDDMETSHYMKNYDLHEEHIPLRLTRSKKLLATI

SEQ ID NO: 124034 - protein, 127 aa, Heterodera glycines
KMEENEFFAIETFGSTGKGHVHDDMETSHYMKNYDLHEEHIPLRLTRSKKLLATINKNFGTLAFCRRWLDRLGETKYLMSLRDLCEKDIVAPYPPLCDQKGCYTAQWEHTILLRPTCKEVVSRGEDY

SEQ ID NO: 124035 - protein, 195 aa, Heterodera glycines
DKDDRTAINRMTSEEKKALDSSYEEIYNDFRRAAESHRQTRKYVKSWIKPGMKLIDICERLEAHSRRMINESGLEAGLAFPTGCSINHCAAHYTPNAGDETVLGPSDVVKIDYGTHVNGRIIDCAFTLTFDPKFDTLLNAVREATETGIREAGIDVRLCDIGEAIEEVMTSYELELDGKTFPIKPIRNLNGHSIG

SEQ ID NO: 124036 - protein, 145 aa, Heterodera glycines
MDQNNDQRRAVNEYRLNEDNELRLEVGKEEVILELLEGSAEIFGSQISMHKRYSLPPGFRAAVFTYKGALIEVVGRTDSAYIAQQTPMIIYLNTHAALESMRKSAETQLVADRTSSARGPRLLVAGPTDVGKSTLCRILCNYAVR

SEQ ID NO: 124037 - protein, 264 aa, Heterodera glycines
  unsure (1)..(264): unsure at all Xaa locations
LHQAFLESGRQHWIGVTEDMNGYRQEGLGKMDMTIKDGRRWSASSAYLTNILDRPNLFTTAGVTCTSVLFNNHRAIGIEFIRYHRFMLTEEVDAYSREKIYCEDSVILCAGAINTPQLLMLSGVGPASHLKVHQIPVVQDMPGVGQXNLQDHLELYVQQKCTKPITLYNKSTWRHPHRMVINGLQWFLTKKGLAATSHLESGGFARSSTEIDHPDLQFHFLPSTVHEDGRQSPNCHAFQVHVGPMRTKSAGEITLQSKDPRTSP

SEQ ID NO: 124038 - protein, 158 aa, Heterodera glycines
NSSLGRAYTPGGGGIEGVVESLNGANHNNGGTSGQSAARHADHSGIGQPCSSHVRELPTLNTHLTSPAAAVALGLIYLRTGDCWIRETLAIADTFYEIDQIRPDMLMIRTFSRCLVDFEDIKCTREWVDAQIPQIIRKYVKRFLEVKSKEDMWWSDFI

SEQ ID NO: 124039 - protein, 205 aa, Heterodera glycines
MSSQQQQLDVLIVIDGTNIDKPCVDIFSSSGFVASCLNWVSKLHSPNVIVALPNQPNDVAAELLKKWASKFKQLQAFGVSNCQSLNDVLREVDFRQILRNDFMLIQNLATFCFSYLTRQIEKFRNDRRQNNKNVLTLLYYSKRNYGRKFEEDRSLIGYIEQTQKLTHYENIGKHRTFTVPKSEFLHDTVFRVDLFSCGIALCGIE

SEQ ID NO: 124040 - protein, 234 aa, Heterodera glycines; identical to SEQ ID NO: 122120

SEQ ID NO: 124041 - protein, 344 aa, Heterodera glycines
TTHTQKLFNEPGGKDVYEGVKIDYSGTEVNPENFEAVLLGDEQRSEGKPVLKSTEKDKVFVYFSDHGAVGVIGFPAADLTVKQLTQTLKEMHAKKMYGELTFYLEACESGSMFDHTLAQSLKIYAVTAANGDESSWGCFCDTKFLPGNCLGDLFSVNWMQDSDQENLRTETLRKQFGIVREETNKSHVMHYGDLQIQDEHVSEFMGKEQAHKRNERPPSPHKFPMFPSRDIPMFMMARRQNESKQIQRNLRVAWKKRSFLEQSIKQIVHQLVHDMNNRRQMLTTYPQQIRDLDCHHEVMHTFSNLCFRFSENPYALKYAYVLANLCERPELDAERIRMALIEHC

SEQ ID NO: 124042 - protein, 199 aa, Heterodera glycines
PPQVQLSALVLPPSSQSFNIESPNSDLNSPQISNRQTNKTSALSMPRGTTKTVAQRRGGRRPREAEDHQLTDEDKDRRAKRRERNKQAAARCRRRREEKMQSLQEQVDELRKQNERRENEIRKMREKEQRLLEMLRLRNGGIVQQQLHHHLQAVHVQQQHQSVADHPTVSRPTSLLQPFLVGLNNKRDSVKPRQCHPRP

SEQ ID NO: 124043 - protein, 151 aa, Heterodera glycines
MTKTDNGKFTEENNTLMANGRTKPSEKTSLSTFIYNKQDGTFLGRSAKSWAQIIGFYIVFYIFLALFWLGCLWTFLNTIDDFVPRYHGENTIIGANPGVGYQPWLASNPESTLIKFYENDTSSYKDYLNAIDTFLEKYHNTENTRFCDENG

SEQ ID NO: 124044 - protein, 166 aa, Heterodera glycines
MSSSLDVFKLTDDDAMKFLVCESHIGTKKMDYQMEHYVWKRRSDGIHIINIRKTWEKLLFAARAIAAIENPSDVFVVSTHPNSQRDVLQFAAHIGATPIVGRFTTGSLTNHLLKNCLEPRLLAGSDPEVHQQEGRDASYENTPGIAPTNTDSTLRFVDIAVPANNK

SEQ ID NO: 124045 - protein, 159 aa, Heterodera glycines
NPEQYLANLHELYLKTHKLLGLLQEKFRTNSLDPQFLPTLTQSVFGPYLVTYAKIEHKFIADKCTFTLRKFYESKGHQKRSILSSGLQELKSRLLTAEDFGGETFLSEIIAINILQEFKNAFARCSSLCKKTESLELNTVLFDMLLKFLYTEHVEYAIE

SEQ ID NO: 124046 - protein, 190 aa, Heterodera glycines; identical to SEQ ID NO: 121702

SEQ ID NO: 124047 - protein, 157 aa, Heterodera glycines
MLSWLEDKNEKFLNIVTDIMQKVITKNSEQMTFFIGMNGHQKLVGLIANCRQEALLWRVTKLMDKIVQMDAERMVGAGLLEALQRHLDHPSQRLLRQVLSCVRSVSHVPTADRTVQPLLQKLLQLLGTSDIRLKENCVDILANLCANNSQNKSFLVE

SEQ ID NO: 124048 - protein, 342 aa, Heterodera glycines; identical to SEQ ID NO: 122168

SEQ ID NO: 124049 - protein, 177 aa, Heterodera glycines; identical to SEQ ID NO: 122762

SEQ ID NO: 124050 - protein, 106 aa, Heterodera glycines; identical to SEQ ID NO: 122303

SEQ ID NO: 124051 - protein, 157 aa, Heterodera glycines
IGLLLEQPVKKRKIEVGESDGNEQRSVAVRLFSEDGKEIGQAPVVLLASTTAEQLQVLYHQLLRSEKQQNGECGDDGDFDEGTAPVQFRTVADEKSGGKGTEIVDSLLDSLPSERLFLEKPLELVCLPQAVFRVRPVTRCTASLPGHGEPVLSVQFS

SEQ ID NO: 124052 - protein, 182 aa, Heterodera glycines
PPTLVQTQVEGGSTLFSLNFFGESAFLTQSSQLYLETCIASLGDCYCISQSYRAEKSRTRRHLAEYSHVEAEFPFITFEDLMVRIEEMTCDTVNRVMADPEIRELIQQQWQKDSQYEFVAPKRPFLRMTYAEAIEWLQKNEVMNEEGKPFQFGEDIPEGPERFMTDTIGQPILLNRFPHGIK

SEQ ID NO: 124053 - protein, 158 aa, Heterodera glycines
KSFIDSAIAFVRKHGFDGIDIVREYPKGGEQKRNFSRFFKELKDAVRKEASSSGRPRLLITAAVAAGTENIDNGYDIPTVGKLLDFVLLMGYDFHGSWEQQTGMNAPLYGRSKDVPEKRLWNVAGAANYWAKKGMPKSKIIIGIPTYGRGWTLSNPQQ

SEQ ID NO: 124054 - protein, 350 aa, Heterodera glycines; identical to SEQ ID NO: 122300

SEQ ID NO: 124055 - protein, 94 aa, Heterodera glycines
MPGNETIRGHLEKRKDWIRRTRDHQEKSADIKKLKRSARERNPDEFHFHMLRSQIGFDGTHRDLETEEEEKSEAQRLLSDVSDINFVQFKLGME

SEQ ID NO: 124056 - protein, 226 aa, Heterodera glycines
MLSQIEDHLFLSFWIEYAQKYLIDAKIGRVLTVALDHIPQIRHLQNVEYRHIRMADVESEELLASQKLQNALDYVEDSVNRGINIVVHCQCGISRSATVVMAYLMRKYKWNVNDSFSFVKARRSCVQPNPSFLRQLEVFQKLDYRCDLLTLRNSKLFKEFECISENPSEVSRSTCDIYSLNESAKLSVGRRFSCKKCRCDLFYDFNILSHNFVVASGQNESVKLAK

SEQ ID NO: 124057 - protein, 398 aa, Heterodera glycines
YSAHFGLLKHIQFQTEVLNVQRVEEFAQNGKWTVTYRKTEDEEQKVMDDTFDGVMLCTGHHCSERWPNPPFPGQSVFRGQVIHSRAFHTAKPFEDQTVVVVGIGNSGGDIAVELSKVAKKVYLSTRTGSWVINSVWEKGHPTDAVLLNRFAFALRAITPRSVQNRLIERKLNLRLDHERYGLRPSHRFLEAHVTVNDELPNRIASGTVVIKPNIQKLAEKDVTFDDGTTVYGVDTVIFATGYNFFFPQLENGRLISVQDNKTLLYKLMFPHDLSPKNTLAIIGLIQPTGSIMPISEMQARLFCAQLVGDISLPQKAQMEADALAQARRISKEFVNRPRHTIQVQYVDYMDELAKLVGCKPKLVGRIFTDPCLAKVLLFNGLVPYQFRLDGPHRWEGAR

SEQ ID NO: 124058 - protein, 212 aa, Heterodera glycines
  unsure (1)..(212): unsure at all Xaa locations
MGNYYSPPKRVGQNPFTRSGAPPPKLVIRKDKDVPMHRVNDPMSXLQLHMADERVRTAGLSKAEREWREKWVHDQSMHPDEPIHVDAVHRQLNPIRVLYRWPMDKLYKHFLRPTFGNYWATIIRVYVPKFFWFFMTFEFFYYVWKYESKSWQKRIGFSTINRPDRYVLVKDHDEETLKLGLTDYSRSDYFDKEFYQRIKTANIDFGPPKRPW

SEQ ID NO: 124059 - protein, 113 aa, Heterodera glycines; identical to SEQ ID NO: 122215

SEQ ID NO: 124060 - protein, 293 aa, Heterodera glycines; identical to SEQ ID NO: 122725
  unsure (1)..(293): unsure at all Xaa locations

SEQ ID NO: 124061 - protein, 219 aa, Heterodera glycines
HGQFPDLMRIFNCLGTPPEKKYLFLGDYVDRGAQSVETIMLLLCYKVKYPTSIVLLRGNHETSNINATYGFKKELEERYPAHSQALFDSFNDTFAWMPLTGLIGQKILCMHGGISNKIRSIEQLKQLERPMLLPPTDSLHIDLMWADPMEAQGQRPNPRGAGVLFGEDVVIRTCQLLKISCIIRAHQFIQSGFEPMFNQRLITVFSAPAYTGQTNTGAV

SEQ ID NO: 124062 - protein, 242 aa, Heterodera glycines
MHNQFLPLATALSSIRQYHSPSVYGKSDELLQLRIELNMTTEKATKFVSDSRQLVVLPHPFQHSEKRTILAFAGTKEAQQEVMLNGADIAIGPEMVKKILKGQFNMDDYDFCIAHTDMAKHILPLRGVIKTRFPTKINGGIGDDLNEILESFLSGINLTVRRDPTNKEWGLSEPLIGRLSMSDEQIEENVAVIVDTLCKMRKAVLGPFINRASLITASAGPQQSFFPVDVSPWEALPTEEEI

SEQ ID NO: 124063 - protein, 158 aa, Heterodera glycines
INMIGATWIKNLKITVQGREIYDSNSLYAYKAYLDAELSYSKNVKESDLQASGYYVDSENQDGTDITQQGFELRRKLFSQSQTAQFITKLDADIFNQDRYMVNGVEIDIQLTPNDNEFMVMAAADDKYRIEITACKLYVKTLEVVDGLALDIQKKLES

SEQ ID NO: 124064 - protein, 159 aa, Heterodera glycines
MGESTWAIRSSKSWSTISRYGQYQAESFRHSLKEETEKLRQANPKLFQQQTPSTSDTPPVDCASPAPSKKRKTAASMAAGSGTPTSRGRVEESSPYKIIKFGTNIDLSDERKFYVQLKELNKLPAFCRLHSASNMLSYLGHTVFGMNTVQLYLKVPGCR

SEQ ID NO: 124065 - protein, 147 aa, Heterodera glycines
MMDEDMEEVEIVFAQRLASGEPTARQRAMKHLRTHIRERTKTDAKGFSSVSLARLCKGLHYALWMQDKMTLQEELADEICALCNYFRTDEQLLEFVVVLFTTLSKEWPYIDRWRMDKFLMLVRRLVRTLFRRLSSHRWDPPLCDQFL

SEQ ID NO: 124066 - protein, 209 aa, Heterodera glycines
  unsure (1)..(209): unsure at all Xaa locations
MDDDDAIGGAEAFKWEQAYTEGLNIRSVLQEDEHGSVEESIRRLVMDEKRQRRMDRLPAKIRLGMMRYVHLAVDCSSAILSADFFPSRLSVALECLRKFVDKFFLLNPLSQMGLIAVRDKRAERISGFTSSVQFLLESLQDISSTNCGGEFSLQSVLQCALHSFQGLPAHSSKECILLIAXLSSVDASPLRHTFEQLKMRSVRCSIVSF

SEQ ID NO: 124067 - protein, 78 aa, Heterodera glycines; identical to SEQ ID NO: 123016

SEQ ID NO: 124068 - protein, 250 aa, Heterodera glycines
  unsure (1)..(250): unsure at all Xaa locations
QFAVPLFPDAVKKQCLKELKQRYENKEIKSPPENFEEWVLHHFGPQILDVFFNPYSKKVWTVKPSKMSPIWVGTRVAKLPQEKLEELCSMDANVLKNADFGWGPNAQFNFPKYGGTGAVWKNMTEKLPSEWFKYNSKVLRVDHRQKCVHYVQLNANGQPTGPTKSLKYDALINSSPIDAFVADNKICEMPLLEHNKVFVIGVGLKLPMTEFCEKYTWLYFPDPDVPFYRVTXSRYGEVTPDNTKFWSVLC

SEQ ID NO: 124069 - protein, 156 aa, Heterodera glycines
  unsure (1)..(156): unsure at all Xaa locations
MREIVHIQAGQCGNQIGSKFWEVISDEHGIQPDGTYKGETDLQLERINVYYNEAHGGKYVPRAVLVDLEPGIFFSIRAGPYXQLFRLDNFVFGQSGAGNNWAKGHYTEGAELVDNVLDVVLKEAEGCGRLQGFQXTHPLGSSKRTGRGTLFVRENP

SEQ ID NO: 124070 - protein, 222 aa, Heterodera glycines; identical to SEQ ID NO: 122700

SEQ ID NO: 124071 - protein, 162 aa, Heterodera glycines
FLGLSSRNVFPQSVRPSSLFACHFSSGTNDDVLFERVNQKLVITLNRPKALNALNFPMIRKIYPQLRNSSFDLALVKGTGGLAFCAGGDVLAVSKSYKANDPDRIFQQFFLEEYQLNHLIGSLSRPYVAFIDGITMGGGCGLSLHGAFRVATERTILAMPET

SEQ ID NO: 124072 - protein, 164 aa, Heterodera glycines
HDDRVPAFTELTLIRHSPDSENIQMQFAAFFIYSGLGRLMRPVRNLLFDQIEQIGIFEQVYLSIIIDPEEAEPGVTMHQELHPSSLFSFAGNLIPFPDHNQSPRNVYQCQMGKQTMGVPVHAWQTRTDNKMYKLQTAQKPLLKLEAHDKYEMDEYPLGTNACVA

SEQ ID NO: 124073 - protein, 231 aa, Heterodera glycines
MDVNQAYKILSNPQRRKAYDTFGFTDEQFEGMRKEFFREQQQHQFQFVRWPQPPRKKQTDISQFLLPFGSVLGTLFFIFVVGYFLNHMNVSEQSKRRRQPQNRAEEANEMGGGDTKTEDNEKELAEDQKAPLTEEERQQKLQARVWRVMGPMIRELRAETQFGLIRLLKPGCRSIIVLVDKDSKDKLLQQFARHLYCLRNNKTFSFGFLMVPKNLSWFRSLLELTLPDEQQ

SEQ ID NO: 124074 - protein, 261 aa, Heterodera glycines
MDDLLNDIDEDQQQSESGSSSLPPQSVNTMAWLEQNKQNQARAFSENLLKDLSAVSETGKSAEFNVKDEMEGEAGDEEENQFIQNCQRIRSYQVASEKNCNHEAIVPFDVEYQQLKKTNTPAKLYEFKLDMFQSQALKCLDNQQSVLVSAHTSAGKTVVALYAIAMALRDKQRVIYTSPIKALSNQKYRELVEEFEDVGLVTGDVTLNPNASCVVMTTEILRSMLYRGCEIVREVGWVIFDEIHYMRDKERGVVWEETLIL

SEQ ID NO: 124075 - protein, 426 aa, Heterodera glycines; identical to SEQ ID NO: 122347

SEQ ID NO: 124076 - protein, 184 aa, Heterodera glycines
MVAACVATPSVTVTATAATYFNHNQTGFAGTLGGGGGSKKGMEANSNPSKASKGVTMTTAEVDQLRQQLQSVVENGDLTASNVCVEQLESAVLSKDTLEATRIGRFVNDVRKQTAQQWPDFSKRCRALIKQWQKVAEYRPSSSCEGSSNGGTPQLVSPALKRGLTPRAGAVTTPGKRTTPHQPQ

SEQ ID NO: 124077 - protein, 150 aa, Heterodera glycines
MPSQGELKEIFNLYDEELEGKIDATQIGDVARACGLKPTNAMVWKAAGEEYKRKGEKKLAFEEWLPIFEQLQKEKEVGTYADFVEGLKVFDKDESGKIMAAELRHVLLALGERLSAEEADELLLGAQDGEGMINYDQFIKKVLAGPYPED

SEQ ID NO: 124078 - protein, 215 aa, Heterodera glycines; identical to SEQ ID NO: 122106

SEQ ID NO: 124079 - protein, 151 aa, Heterodera glycines
MFSTDAQDILGGGGSGSQLAKKSGLPTMKLTNLDKKKKITTNGQPKRPVGMHRELYNLFVHQGKDNNKEKIESLMPTQTKKGFSLAKAQLGKRPVRKWLWCPFENEARKDGLALKHWEREDKHSTPYSFVQFNKQLDVPSFTDEEYEEHLV

SEQ ID NO: 124080 - protein, 125 aa, Heterodera glycines; identical to SEQ ID NO: 123938

SEQ ID NO: 124081 - protein, 151 aa, Heterodera glycines
KHQSQPEKMCDEEVAALVVDNGSGMCKAGFAGDDAPRAVFPSIVGRPRHQGVMVGMGQKDSYVGDEAQSKRGILTLKYPIEHGIVTNWDDMEKIWHHTFYNELRVAPEEHPVLLTEAPLNPKANREKMAQIMCETFNTPGMYVGIQGLLSL

SEQ ID NO: 124082 - protein, 185 aa, Heterodera glycines
MAKSDVPALSTTNQPYPYKEQTPKGIFEKMGLQKTPDGTSIGEFAVMRMDDMMNLIGRGSLWPLTFGLACCAVEMMHFAAPRYDMMRFGVVFRATPRQCDLIIVSGTVTNKMAPALRRIYDQMPHPKWVISMGSCANGGGYYHYSYSVLRGCDRVIPVDIYVQGCPPSAEALLYGVLQLQKKIKR

SEQ ID NO: 124083 - protein, 356 aa, Heterodera glycines
MAHLIQDGFVVNDATWKLGIFITDMNISRELFVRGDMTIGSLMMQLVGQIGETQDWSDHYMWWPDRRKWLKHTRSTLDQIGITAATYLEFTPMHKHAKVQLPDLQIIDARLDFSVPILKVTQKICQELAIRHPEELSLKRDIPPDILRKGASVESEAQIQPYMKPGEESIGPGTLRTAKPIRASTVNLTSGRGSPALSQASAMGPGHLFNASEIGTLPKMGTIPRGMSPGSAAYREVLGRTPEPGYSEGGGLECDQFDENLINSPKITPGRETFRPQNYLEKAALNRGWLDSSRSLMEQGICEGDVVLLRFKFMQFFDMNPLRKCCRCKQEGQRQRKTVHKTRRNRNRCSCPRISI

SEQ ID NO: 124084 - protein, 170 aa, Heterodera glycines
REIVRDIKEKLCYVALDFEQEMATAASSSSLEKSYELPDGQVITVGNERFRCPEALFQPSFIGMESAGIHESTYNSIMKCDIDIRKDLYANNVLSGGTTMYPGIADRMQKEMTALAPSTMKIKIIAPPERKYSVWIGGSILASLSTFQQMWISKQEYDESGPSIVHRKCF

SEQ ID NO: 124085 - protein, 160 aa, Heterodera glycines
MGSRSVAGGVGASIMNKQASKYNESEGELLLNWIKQVTGATMTVNGTRENFQAQLKDGTLLCKVALKLEPNSIKGVTDKASSTFQQMSNLELFIEFCRKQGVITHELFRAVDLVEARDLYSVCMTLNSLGRIMQKKGKSHPKHVSASEIVNIPSTDALRL

SEQ ID NO: 124086 - protein, 139 aa, Heterodera glycines
FNIPIISSDRLPKLRNVLAGVFSIQNTYKYNDNYPLDGEGNTKGFCFLEYQTKEAANAVLAICDGHRLDKNHTFSAYPFTAIRSMKEPEKDWKKPERQPYVDLGDPWSWLQNPKCLDQFGLLYESGQGGTLRLDVFWNV

SEQ ID NO: 124087 - protein, 147 aa, Heterodera glycines
MAPAPEKEKTEDKKLKDGQKPNVTTDHAHCLSNVQPNLPVNKVVVHPLVLLSVVDHFNRVNKTHKVNRVVGVLLGCMKHDKTLDIANCFAVPYDEDSENSNIFFLDADFLEDMFGMFYKVAARERIVGWYHSGPRLCKNDILINEVI

SEQ ID NO: 124088 - protein, 184 aa, Heterodera glycines
  unsure (1)..(184): unsure at all Xaa locations
MVIKSNSVISRSHSDHFQEASGSLSATSGSEDAIKHWGWWRHFVAGATAGCVSRSVTAPLDRLKVFLQVNANHKTPHTLPSAVDYLYREGGFLSFWRGNGINILKIAQESAIKFMFYEQVSSSIFVLXFLDLEKQEFQKLTGHRDLDIFERFMAGASAGVIAQTAIYPLEVLKTRLALRRTGEL

SEQ ID NO: 124089 - protein, 159 aa, Heterodera glycines
MSEQSGETFAFQAEIAQLMSLIINTFYSNKEIFLRELISNSSDALDKIRYQALTDPSQMESGKELFIKIVPNKADKTLTIIDTGIGMTKADLVNNLGTIAKSGTKAFMEALQAGADISMIGQFGVGFYSGFLGGERGRVTSKRHDERLWAWEEISVGGP

SEQ ID NO: 124090 - protein, 162 aa, Heterodera glycines
NNHHPTVNGNGFGLTNGTHFADEFSESIKDVGIIGIELYFPKSYVNQEDLEKFDNVTSNKYVLGLGQQEMCFCHDNEDVCSLSLTVAAALMDNYKVNPKDIGFLAVGTETWFDKTKGESRGYGIVCRFRQLDLEGPRRKNPGFGGTQALVIAPQWVGPELPN

SEQ ID NO: 124091 - protein, 365 aa, Heterodera glycines; identical to SEQ ID NO: 122250

SEQ ID NO: 124092 - protein, 56 aa, Heterodera glycines
MTTTETPTAPRLDHTTGWTCLACKLVFSSGQLQRDHYRSEWHLYNMKRQVGQFLDW

SEQ ID NO: 124093 - protein, 214 aa, Heterodera glycines
  unsure (1)..(214): unsure at all Xaa locations
PIKMCDEEVAALVVDNGSGMCKAGFAGDDAPRAVFPSIVGRPRHQGVMVGMGQKDSYVGDEAQXSKRGILTLKYPIEHGIVTNWDDMEKIWHHTFYNELRVAPEEHPVLLTEAPLNPKANREKMTQIMFETFNTPXAMYVAIQAVLSLYASGRTTGLVLDSGDGVTHTVPIYEGYALPHTILRXLDLVRRDLADYXCKILLXRGSSFETTAEAE

SEQ ID NO: 124094 - protein, 85 aa, Heterodera glycines
GVYSNGYDGSLNSCHRFPLFHTVIIANHFTRKDPNQSDSLTDEDIKPSPNWQNFRNSSTIFLRGPPTFLGPAKWKQAIVFFFFGG

SEQ ID NO: 124095 - protein, 375 aa, Heterodera glycines
  unsure (1)..(375): unsure at all Xaa locations
GRRPPPDRFRLVYLIVLLHGMGMLLPWNTFITIAGDYYLQFKFANVSNEDNYKVYFFNYLTVCAQIPNLLLTFLNLFGVIRGGFYRRIYFTLAVIFGICLVTIAMGLXGFFLFTMLSVVLLNSASGVYQNSIWGLFADFPGEFAGAIIIGNNLCGILMAVLDILIIVLVGANAALAATVYFGLALFTVVLCIFSFHFLQKLNFYNYYVQKAAKARANNGTNILHEEETGEAKANIKVTHPPLKTYIAIFSEVRRQLLDVWLVFFVTLALFPTVLLKVSLISPFNDQKTSESLYKQLTVFLNFNVWAAVGCWLSGFSPRPSPDYLSLPICLRLLFLPLFWVCDYQYDHLTPRRFVFIHNPWVFTVLITLMALSHGY

SEQ ID NO: 124096 - protein, 65 aa, Heterodera glycines
LVSTFSQVLRDNIQGITKPAIRRLARRGGVKRISGLIYEETRSVLKVFLENVIRDAVNIFFLLGI

SEQ ID NO: 124097 - protein, 221 aa, Heterodera glycines
LSSKIPFWTKLCPFSKQQPEQQQSSPVAEDTIPPQQQKEGAAMSAEGNDAPPAAEQPPPAEAAPAEAVPVQEAAAPPVEAAAETAPAEAAQPVEEAAPPAEAPVEAAPAEAAPPIEEAAPPAEAPVEAAPAEAAPPIEEAAPPAEAPVEPAPPVEEPKAAEPEAPVSEAVPAAEAPVEEAVAAPIEVAPAEAEPVSAPPAEAVPAEEAPAAEVAQLSLEEQ

SEQ ID NO: 124098 - protein, 212 aa, Heterodera glycines
ISLAFGQKRTDLRLAPTDHDRTTLSLKMQRDKLRQAYQRYERNIAKDAERARALLRDGRKDRALLLLKRKRFQETMINRIGFFLEQVERTITDMEMAQINREVFDNLRLGTEALKALNETISLDEVERLMEESKEAQEFQEELSTMLGQQMSEEDNDMVEEEFERMLSEQMPAVPTEQPTDTKEGRKTADEERTKEEKEPKRRREGVAQEAT

SEQ ID NO: 124099 - protein, 170 aa, Heterodera glycines
WIPRAACTRHEVAQEPPLQIVIPRLDDDKPLVRRPTPQAQPAAPAVPAELRVSNREEDAQNIEPSMSGKQIVGLIIPPPDIRTIVDKTALFVARNGLEFEMKIKEREASNMRFNFLNPTDPYFAYYRNKVNEFETGVASADTQSKVKLPEAVREHVQRAEFIPRLPPKPF

SEQ ID NO: 124100 - protein, 157 aa, Heterodera glycines
MAQEPPLQIVIPRLDDDKPLVRRPTPQAQPAAPAVPAELRVSNREEDAQNIEPSMSGKQIVGLIIPPPDIRTIVDKTALFVARNGLEFEMKIKEREASNMRFNFLNPTDPYFAYYRNKVNEFETGVASADTQSKVKLPEAVREHVQRAEFIPRLPPK

SEQ ID NO: 124101 - protein, 221 aa, Heterodera glycines
SVRPRTSFARFFRRYTLISHSPTKHFTNKSSRRITKRKSREMPSQGELKEIFNLYDEELEGKIDATQIGDVARACGLKPTNAMVWKAAGEEYKRKGEKKLAFEEWLPIFEQLQKEKEVGTYADFVEGLKVFDKDESGKIMAAELRHVLLALGERLSAEEADELLLGAQDGEGMINYDRKRLLMKLTVSRVPTNDRSPLVFQSSSKRCWPGPTPRIERRNAN

SEQ ID NO: 124102 - protein, 279 aa, Heterodera glycines
  unsure (1)..(279): unsure at all Xaa locations
SIEARRWLNATVCSLVEFDDGNNPKSNTIVPLIDGGTEGFKGNSRVIIPFMTPCIQCTIDLYTPQVNFPLCTIAHTPRLPEHCVEYVKVVLWEKEKPFGQDVKLDADDPAHVEWAFRAAQQRANEYEIKDVDLRLTQGVLKRIIPAVASTNAIIAGSCALEALKLASKYLXFNVVALERDPECLVCGQKSVQMYSVREDCTLSGFLDDLKDKYQLQNPSIRAGSTFLYEINTLMPEMETASRKNLCKTLKELHVTEDSELLVADEALTRSIVFRIKYSK

SEQ ID NO: 124103 - protein, 120 aa, Heterodera glycines
  unsure (1)..(120): unsure at all Xaa locations
STHSRKALLLIAFAFKTKHQSQPEKMCDXXVAALVVDNGSGMCKAGFXGDDAPPAVFPSLWAPPLFKPSCSHGNKGLYLVTRANQPGFPTLNSPFNPVSPPWDTLEKIWPPSFKKIFFPP

SEQ ID NO: 124104 - protein, 216 aa, Heterodera glycines
MTSSDEEFKKECTFASLPRTVRGMPLVVSSNSDGTKFLYCNGNSVFIRDEENIADCDVYTEHATLTTVAKYSPSEFYIASGDQSGKIRFWDTTQSTHILKSEFALLSGAIRDISWSEDSKRVAIVGEGHERFGHVFLFDTGTSNGNLSGQSRPMNSIDFRPTRPYRLVSGSEDNTVAIFEGPPFKFKSIFHEHSRFVQSVRYNKDGSLFAAGGMDG

SEQ ID NO: 124105 - protein, 136 aa, Heterodera glycines
  unsure (1)..(136): unsure at all Xaa locations
RRAEKGRRRRAERVVFVKIAASGTYSTRSARAGVAFPVGRIHRLLRHGRHAQRIGAGAPVYMAXVLEYLAAEMLELTGNAATENKKLRINPRHLQLAVRNDEELNKLLSEVTISRGGVLPNIHTELLSKMQQNKQQ

SEQ ID NO: 124106 - protein, 252 aa, Heterodera glycines
MGVPAFFRWLSRKYVSIIVDAVEQRRREIDGVKIPIDATQPNENYQEFDNLYLDMNGIIHPCTHPEDRPAPKTEEEMFILIFEYIDRLFSIVRPRKLLYMAVDGVAPRAKMNQQRSRRFRAAQEAAEKRELIENVRKRLESEGIPLPPPRKEEEHFDSNCITPGTPFMARLSVALRYYVHKRITYDPAWQKIQVILSDANVPGEGEHKIMDYVRRQRASPAHDPNTVHCLCGADADLIMLGLATHESNFNII

SEQ ID NO: 124107 - protein, 58 aa, Heterodera glycines
ETQLLHQPFMLNPEQTVNEYLEEHGANIADFLRIEMGQEHTKTNDLVTRSKGFSFLGY

SEQ ID NO: 124108 - protein, 203 aa, Heterodera glycines
LASDETAYLIADTYYRTHKYLSALSLSIPCVSYKWIQQCVAEKQLTDHRPFLLPAGESSLDTKQQFEWRPLKGVLMKGKRVLIWSSSAETDPGIVSFAEIWTPILQNLGATLVGIGPGEPFASKSSANLEEKMEFCSKIEPPVDVLLAETGLPGRGGQAGRGTGRFGRVQRMGHSGHRHWFAARPGRARRREVPLRFCLVLAE

SEQ ID NO: 124109 - protein, 161 aa, Heterodera glycines
LARDRKYRIPVALKILFKSQLVKGNVEHQLVREIEIHAHLRHPNILRMFNYFHDDKKVYLILEYALHGELFKVLQKSRRFSESTSAQYIFQVSDALNYCHSKKVIHRDIKPENILLCADGKIRIADFGWAVHAKNRRQTMCGTLDYLPPEMVLKRQHDEKV

SEQ ID NO: 124110 - protein, 142 aa, Heterodera glycines; identical to SEQ ID NO: 122669

SEQ ID NO: 124111 - protein, 285 aa, Heterodera glycines
KAGAPRGGGRSTTSGSPGLQVSGTRYVETADRLVEIARNELPNARLPAFQVAQAVDVLTLGSYPRLPQNIKDRFIPPLPLGAAERRLTLRQLNKLIEFHLAQQAAQLSPRIRHITVQNGMACLVVPGEFEMELTRLGDEPTTRWTLLNIRILVESAEVGEGQQMVHPLQINFLHQMVQEKLDTANEPIMAAYIVLHWFCRSLHLDILFCQALQIAKINRSGKGSEGSSQQYIRVDEYNEKECRLAISYWLRREGGTIHGRLSSHYRMLIFGDKNNSHVGLKIRHH

SEQ ID NO: 124112 - protein, 137 aa, Heterodera glycines
CVDLFGTKDLYQILKLDRSKSNLSSAQIKKAYYRQSILWHPDRFASAQHDETTRELAKQKFQVIGRAYAILGDSEKRKAYDETGSLDDENEFYEGKDWSAVWRGVFKKVTPEEIEAYLAKFRGPYGKNNSSRMKMYK

SEQ ID NO: 124113 - protein, 220 aa, Heterodera glycines
VKTAFADVAGCEEAKIEIMEFVNFLKNPAQYKALGAKIPKGALLTGPPGTGKTLLAKATAGEANVPFITVSGSEFLEMFVGVGPSRVRDMFEMARKKAPCILFIDEIDAVGRKRGGKGAMGGHSEQENTLNQLLVEMDGFSTDESNVVVIAATNRVDILDPALMRPGRFDRQIFIPVPDIKGRASIFRVHLTPIKTTLDKIELSRKLAAHTPGFSGADIA

SEQ ID NO: 124114 - protein, 189 aa, Heterodera glycines
MLDMSFPETMSLFFAMTLREVISIHVGQAGVQIGNACWELYCLEHGIQPDGKMPSDQNNQDDSFITFFSETGNGRHVPRAVMVDLEPTVIDEIRTGTYKHLFHPEQLITGKEDAANNYARGHYTVGKEIIDPVLDRIRRIADNCTGLQGFLIFHSFGGGTGSGFTSLLMERLSVDYGKKSKLEFSIYPA

SEQ ID NO: 124115 - protein, 161 aa, Heterodera glycines
MLASVINDRFNRHSQYAPFFSLEFYPPLKEHPKNLADFFEMLDHLKQAQPLFVDITWSRRNDPGNLAKLNSSSAIAIATAAIFGKERTMLHICCNDHTRTESISHVKQTLSHGIANIMALRGDDMPTEQTLLTKNTKHFAIDLVKWTRELEETDGYFGNDR

SEQ ID NO: 124116 - protein, 264 aa, Heterodera glycines
MAPPPATVDEYTLSQSRFPSVASLAPPTVLMMSTAGQTPVHRRRHCSAGSNNAQPNNSHEAISRMDVLSERIRDFHYNEDQTHAQLNRKLQLRDQLYYAISPIFPMCGLYIVGSSLNGFGTKRSDLDLCLMITNRDIDQRTDAVVVLSSVMRTLESNQIVAEQNLILAKVPILRIKFIGTFHDITVDLNVNNSVAIRNTHLMCYYSSFDWRVRPLVMVVKEWAKRHGINDSACSSFTSYSLVLMVIHYLQCGAQPPRTCGCAHA

SEQ ID NO: 124117 - protein, 272 aa, Heterodera glycines
  unsure (1)..(272): unsure at all Xaa locations
MENPSDFTLGGALPTSSTDDYLKLKRLENKLANLDVMEEYLKMDMRNLEKELVHAQEEVKRIQSVPLIIGQFLEAVDYDHAIVGSTTGSNYYVRVLSILDRELLKAGCSVSLHKYSNALVDVLPPESDSSIQMLRADEKPDVVYSDIGGLDTQKQEVREAVELPLTNGELYEQIGIEPPRGVLLYGPPGXCGKTMLAKAVAKHTKASFIRVVGSEFVQKYLGEGPRMVRDVFRLAKENSPCIIFIDEIDAIATKRFDAQTGADREVQRILLE

SEQ ID NO: 124118 - protein, 156 aa, Heterodera glycines
MNYDNGISDDDDLEMDENGSDGVEIVDFVEEPHKEDNSAAKIAAHSKDVFCLALSPDGHWLASGSEDETAAVWDLRHGMTSPLLHRTISSHSDSVHLLAWNVSANILASADMAGRIICTKVTGDEATQTASLTIDDCFVEPSRRDDDNGEDEEGQG

SEQ ID NO: 124119 - protein, 418 aa, Heterodera glycines
MTDAKTDQKDNVKSEVGDVPNGGTSFTAQLSDDFTIQSNTNEVVDSFDNMQLKDTLLRGIYSFGFEKPSAIQQRAIVPCCSGRDVIAQAQSGTGKTATFSISVLQRVDENAPDVQALVMAPTRELAQQILLVMRALGEYMGVKFHTCIGGTSVRDDQRKLEGSVQVIVGTPGRVNDMILRGALKTDKIKMFVLDEADEMLSRGFKDQIYEVFKSLPNDVQVVLLSATMPNEVLDVTKKFMRNPIQILIKKEELTLEGIRQFYIFVDKEEWKFETLCDLYDTVNITQAVIFANTRRKVEDLARNMTQKKFTVSLIHGEMEQQDRDVIMREFRSGSSRVLITTDLLARGIDVQQVSVVINYDLPGNRENYIHRIGRSGRFGRKGVAINFVTKQDQQMLKEIETYYSTQIEEMPANIGDMI

SEQ ID NO: 124120 - protein, 219 aa, Heterodera glycines; identical to SEQ ID NO: 122351

SEQ ID NO: 124121 - protein, 157 aa, Heterodera glycines
MSAVKGRREQDRKEWAAYWNIRWKEVENSFVGKYSYYTNRFLDWPVTWFRENIVERLHDKHKMPYYHRKISRVPEIDECGVNDRICLFEAEEQFRLDKLVDHYIRDILYQRFTQCVRAEGYDHLYKCAKHVDDYENAELNFFIKYGELGSEQTVVAC

SEQ ID NO: 124122 - protein, 108 aa, Heterodera glycines
MSLPSLCKTDSVHAFDQLRPGSDNPETLSEAVKVLKGEYLVKAIEEHKMDQAIIFCRTKLDCDNMEKFLAPRGYKCVCLHGDRSADERTRNLLSIKEKIVRFLICTDV

SEQ ID NO: 124123 - protein, 140 aa, Heterodera glycines
  unsure (1)..(140): unsure at all Xaa locations
LRMTYAEAIEWLLTNEVMNEEGKPFQFGEDISEGPERFMTDTIGQPILLNRFPHGIKAFYMSRCADQPELTESVDLLMPGVGXIVGGSMRIWKEDELLGAFQKADIDPKPYYWYVDQRKYGGCPHGGFGLGLERFVCWLA

SEQ ID NO: 124124 - protein, 159 aa, Heterodera glycines
RIHCFGQESDKRLILDLDDQQAGPSEQKVGRRGPGRKSANPTLDNLLGHANLEHARGRTKEAMTFLFEVVKLAPYHVQTYKELSDLYSELGQKEKSFEFKMLAALLNSKTTAEEWDEIAGTAKSFNRLELAVACLAKAIRCDPENWLYYEKRIQILDAS

SEQ ID NO: 124125 - protein, 144 aa, Heterodera glycines
ERGVANRWRSLFIIIGDKAKDQAVTLHHILAKATTGGRPSVLWCYKKETEFSSHRKKRIKELKKRKESGLFQSKEDNLFEQFILSTQISYCYYADSHRILGNTFGMAVLQDFEALTPNLLARTVETVEGGGLVVLLIQSVTSLK

SEQ ID NO: 124126 - protein, 139 aa, Heterodera glycines
LLPPLENLANIEETVVRDKAVESLQKIAEKHSAAQLEEYFIPMVLRLSAGDWFTSRTSACGLFSVAYARANPAQKTELRAAFRCLCRDDTPMVRRAAASKLGDFAKVQEEDYLKNEITQMFEDLAKDEQDSVRLLSVEA

SEQ ID NO: 124127 - protein, 235 aa, Heterodera glycines
VRKCGHYQRTQSGNCVEASGQNWVDKLLKEQTTGLAQSSDCEQQQKQPQQKIDDEKQQELLMWNGLNEPSERFTTEKAMIPLNLQIAESALKVLQTKTPGGEIEQSATAGAHCTNNTCKKVFTGPESDAEECVFHPGNAVFHEGLKYWSCCGRKTTDFTTFLDQLGCTRGKHCWKKKEIVTNAREDWFQRGGQVHITIYCKGALPSETSAKSDGLTLEVTINGSTKRYELFGEIA

SEQ ID NO: 124128 - protein, 204 aa, Heterodera glycines
MSSESDEQSADVNGLCSQSLRSDEKVCPDPDTIKMFIGQIPKAWDELQLKEYFEEFGPIYQLSVLRDKETASSRGCCFVTYYHRKDAISAQNELHNVRTFPGLSHPIQMKPADVENKNERKLFIGMLPKSMDEESVRALFKEFGQVEDCSILREDGKSKGCAFLTLVSRSCAQQAIRKMHHSQIFEGCSKPLVVKFPDSCREKT

SEQ ID NO: 124129 - protein, 114 aa, Heterodera glycines
MAHIQFGPQQPEVEEDLVNWDEVPDDELEETAFERFEGLKEMFPTPVRSVLSTTVQLTWVVAQNSFSFARSAAWVLSTSALLMVMPYIVDKELQDVEKAQLKQQQQLLLGGRPS

SEQ ID NO: 124130 - protein, 121 aa, Heterodera glycines
  unsure (1)..(121): unsure at all Xaa locations
KNRRQTMCGTLDYLPPEMVLKRQHDEXVDYWSVGVLCYEFLVGRPPFETKTQEETYTRIMKVQYSFPSFMSPDARDLISKLLVKEPSRRLSFEHVLKHHWIIAHCNKNNDADSSTASSECW

SEQ ID NO: 124131 - protein, 197 aa, Heterodera glycines
QTAQTRIAIVNPDRCKPKNCGQPCKKNCPVVRTGKQCIVVEPTSKIAEISEILCIGCGICVKKCPYGAIQIINLPSNLERETTHRYSANSFKLHRLPTPRLGSVLGLVGTNGIGKSTALNILSNRLKPNLGSFKSPPDWPSILQYFRGSELQNYFTKLLENKFKAITKPQYVDQIPKFLEKQPLKKVGELLEKRAQK

SEQ ID NO: 124132 - protein, 178 aa, Heterodera glycines
QDQGRDDVDVRVIVHQSHAGAIIGKQGSKIKELRELMQAHIKVFQECAPQSTDRVVLITTQQSKMPDAIKHLMEFMREVPIKGPTKPYDPSSHDPRIVQCYGGFSGPMPPPPMGGPPMGMHGGGGGYAGFGPRGGPPMPGGMGMPGGFMQEQVTTTQVTIPNELGGTIIGKGGDRINR

SEQ ID NO: 124133 - protein, 154 aa, Heterodera glycines
MRIKKRIFRGELMSREVRASGVLAIGKLCLLDEQLAKKCIPVFVRQLRENPDHFVRNNIVVVICDLCIRYTSEVDRYSTILASCLWDSSILIRRQTLLLLTNLIKEQYLKWEGTVIYRFVTTLLDPEQCIEEYANFCLTDILLPQFRERMFFHH

SEQ ID NO: 124134 - protein, 360 aa, Heterodera glycines
SFQGECHLLPSQVAPQTSSLRLTYSAFHGVGSKFVRRMFAEFGFPSENISYVKEQDKPDPDFGTVPFPNPEEGHRVLKLCIETANANDSTLLLVNDPDADRLQLAEKEANGEWRVFSGNEMGILLTWWAWTNWRAANPTADSSRVFVLHSAVSSQMVATMAKKEGFKAAHSLTGFKYIGNLAHKLRSEGNTVIAAWEESIGFTPGTTLDKDGVSSAAVFAEMANWLRTQKGVSLREQLFRLFSIYGFHLQRNSYWGVKSTEVTKKLFADLRSDYPETIGQNFDVKFVRDLTTGYDNAQPDDRAILPLSTSSEMVTFTLVDGSAVTLRASGTEPKVKYYIELRTEPGKEEKDLSSVLEQLD

SEQ ID NO: 124135 - protein, 268 aa, Heterodera glycines
RTLQKSTQILYTPDIGTILLLLDVKPGARICETGTGSGSLSHAIATAVAPDGHLYSFDIDEKRAKTVHNDLKLHGLSQNATVLCRDVSQHGFAATDCAEKEWRCDGVFLDLPAPWLAIGHAHKVLLQNGPERRPSRLVSFSPCIEQVQRVCAELEQHGFVDIETVEVVPRKLKVVDLPCESLSEYAAKGANAQTFFQKESQHNNTDCEQQRQKGRRGAKRKADNAGEKTKMEEDADTCQNGLNGKVAAASIAQESDGPQTETDAMPFP

SEQ ID NO: 124136 - protein, 178 aa, Heterodera glycines
MFRNQYDSDVTVFSPQGRLHQIDYAVEAMRQGSAAVAIRSKDYAVVVALMRAQNELSSYQQKVFKLDDHLGLSMSGLISDGRILARFMQSECAEFRWNYHNPISVELLNRKLGLKLQSNTQYYGRRPFGVGLLIIGYDDKGPHVVKAEPSGDVSEMFAASIGARSQSARTYLEKNLPE

SEQ ID NO: 124137 - protein, 204 aa, Heterodera glycines
VHELHSRIPKYSEFGERLQMIVSSATLHNMVVQRLATQDMYFPQWIDLKGQDSDTETVHQVVCMVDPCEDKSWIRLRSKTGQSVHTDSVHARDQLQTGSDNPETLSEAVKVLKGEYLVKAIEEHKMDQAIVFCRTKLDCDNMEKFLAPRGYKCVCLHGDRSADERTRNLLSFKENIVRFLICTDVAARRLDILGVPYVDNVTLP

SEQ ID NO: 124138 - protein, 192 aa, Heterodera glycines
TTSGSPGLHYLRRGVSASLDKPMLLKRKEAKTYGKKQLIEGRFEAGQSALIIEDVVTSGASVLETVAALRAVGLRCVHVFCVLDRQQGGEQRLGREADIVLRSLLSMGSLLDFLEQCGTIDAGKKTQIVHQLQNPIFDDSATHLQEQKTEKNEAECVPLVVSSSVVPTTTSVGWAQQFADGTLNRRLAQIMV

SEQ ID NO: 124139 - protein, 151 aa, Heterodera glycines
MFFGEEITKIPREVGKEDVCKAISHQIEAIDIDQCNLNMYLKPDTGVISLDQFQAMGSKRLTMLRKLEMLKEKFGNANSQDEYKKAFREDIGALMPLVTNLCVNAGLNEARREDRISHFILRLAFCHIPEQSDWFVRLETELFRMRFQNET

SEQ ID NO: 124140 - protein, 268 aa, Heterodera glycines; identical to SEQ ID NO: 122682

SEQ ID NO: 124141 - protein, 155 aa, Heterodera glycines
MENAHTKSEDELFRFFGTGPDGLTEEQADELRDKYGYNEMPAEEGKKLWELILEQFDDLLVKILLLAAIISFVLALFEEHDDQTSAVTAFVEPFVILLILIANATVGVWQERNAESAIEALKEYEPEMAKVIRAGKHGIQMIRAKELVPGDLVEV

SEQ ID NO: 124142 - protein, 247 aa, Heterodera glycines; identical to SEQ ID NO: 122162

SEQ ID NO: 124143 - protein, 189 aa, Heterodera glycines
MDQQEKSSGWFANVEMGPPDVILGVTEAFKRDDNPKKVNLGVGAYRDDQGMPFVLPSVKQAEKELLEANLDKEYAGIAGLPDFTAKAIELALGRDSEVLKAKRNATVQSVSGTGALRTGAEFLSKWFPHNKVVYQPTPTWGNHVPVFKVAGFEIQKYRYYDPKTCGFDENGCLEDILNIPAKSVILFHA

SEQ ID NO: 124144 - protein, 130 aa, Heterodera glycines; identical to SEQ ID NO: 122180

SEQ ID NO: 124145 - protein, 199 aa, Heterodera glycines
MLFFQNGPVEQCPHQQQQNAAPLSHRPTAFSLPATSPFSTISSVGSLPSEPTTPTERMSTGNVMMMMSPKRMDKGNGGEKGQRQKAPGKERPKDGKERVHKCDQCQKAFRFKSNLFEHKSLHLGSSSRNPFVCPFCSKTCRLKGNLKKHLQVHVTSAEDLECLWKRSFSRSSGRPSKNAPPAPLPKPGDDLGMVPVLVS

SEQ ID NO: 124146 - protein, 250 aa, Heterodera glycines
  unsure (1)..(250): unsure at all Xaa locations
MTVTSTKNNSFPSSFKDITLHDVWASNLEAEFAKLRDLIDDYPFVAMDTEYPGVIATPVGQFRSKEDFNYQQLRLNVDCLKLIQVGFTLMNEKGQLPPARDIFQFNLHFDPSTDSFAHNSLELLKTAGFDFNKHQNGGHQXRTLGELLTTSGLVADRRITXLTFHSCFDYGHLIRAIMLVKLPEDDQDFFRYHRKLIPNRFHFEILLRLTGSRDTMLNGRLQELADQLHVPRIATCHQVGSDSLLTAMTF

SEQ ID NO: 124147 - protein, 135 aa, Heterodera glycines
MSNNDIIFRNEEGVNYLAPWTYSCLIKTSIDRLKTALSENREAIHALNHLQEVFRQIDRASPSFLYDFSKLLLIDSGVAGTNVQESYLRMHANAATEELELPQFAHIAEFQYLSMRAVSLCKVLARIPDEMTDRF

SEQ ID NO: 124148 - protein, 152 aa, Heterodera glycines
VFLAVGRVGSTSENIGQKVVWVEEHNKRHFLMDLLDASEPEALTLIFVETKRGCGDLSYMLQQEGYHCVAIHGDLKQMERERHLENFRNGTAPILVATAVAARGLDIPNVKHVINYDLPNDIDEYVHRIGRTGRVGNIGMATSFFNDKNRNI

SEQ ID NO: 124149 - protein, 106 aa, Heterodera glycines; identical to SEQ ID NO: 122167

SEQ ID NO: 124150 - protein, 297 aa, Heterodera glycines
  unsure (1)..(297): unsure at all Xaa locations
QSDSPVPNWLLNIGPISCHAWNKDKTQLAVSPSNNEIHIFARLETVWNPLHVLREHDLLITGLDWAPNTNRIVSCSHDKNAFVWTWEAEKNSWKPEMVVVRINRAATCVKWSPNENKFAVGXRENDWWVAKQIKKLIRSTVTSLNWHPNNILLAVGACDFKTRVFSAYVKEIDEKPTPNPWGTKMPLGELLKEYQSTGWVHDLAFSPSGCKLAWVSHDSSIAVIDKSNSQPQERPIQHKTAFLPFTSVRWVNETHIVTAGHDCSPMLFTFDGTALNFKCKLDVPPENKNGSNVSSAF

SEQ ID NO: 124151 - protein, 125 aa, Heterodera glycines
MSENKSEGGAEKKKSGGFNTKKFLLDLASGGTAAAVSKTAVAPIERVKLLLQVQDASIHITADKRYKGIIDVLVRVPKEQGFLSLWRGNLANVIRYFPTQALNFAFKDTYKRVFTQGVDKEKQFL

SEQ ID NO: 124152 - protein, 218 aa, Heterodera glycines
MTQFLPDNLLALFAPRPPIQFKPPPDDLFIHRKHMQMGGMAECVHGFEDPKDTPPKPKIETREEKRARKRKEKEELMAYKIELCIATWTPADNPKATVDPYKTLFIGRINYETSESKLRREFEKYGKITKIIMVHDKNSKPRGYAFIEYAHKSEMSAAYKKADGTKIDGRRVVVDYKRGRTQKKWLPRPLGGGKGGPRPMRESKAKMLARELARKGGG

SEQ ID NO: 124153 - protein, 155 aa, Heterodera glycines
  unsure (1)..(155): unsure at all Xaa locations
TFQEQPEHCYTNRVVTLWYRPPELLLGTRNYGPAIDIWGAGCIMAELWIRAPILYVNTEQSQLELISKLCGSINPHSWPGVWCDKLPYYNNLQGSLQQNLPRRVRERINPFLQNNEQALSLIDFMLTLNPEKRPSASAALDHXFFFEAPIPAINI

SEQ ID NO: 124154 - protein, 165 aa, Heterodera glycines
PSKIHEGVFAIVRKVGGEHIRLCRLISGQRVLIERLSFNPKDAIGHFYGIFEVSNGGDMLCPIEFASKLFFTEFSNGNSAGDRGHGNESTQQLTSNQIMSLKEDGITTNELVSKLVSGNCHFQSRTKFSKEKYMRKKVHKHSDRVVILQPNIRLLADCYYRKDPQ

SEQ ID NO: 124155 - protein, 108 aa, Heterodera glycines
MAKLESFCAINGSRPLEAKAEFRPINSMDFHSDVGRMLYTIAILLMFSFVIFALMVRSISRSRSSAELETLLDAMRFREELDIQLRQKHRLRKAKRKVTAWLCRGNGA

SEQ ID NO: 124156 - protein, 133 aa, Heterodera glycines
MTMNRLLPGRSLLPKIMRNFSHSNRLAASEADPEHYGYFPDPTEQMWGLEREMLAARLKGEDRYSPKIYYRAEHSTKDVPNVVRVHLEDKVVGCLCEHDGDHVNYWHIRKGDTKRCECGHWFKGVQADTDSFD

SEQ ID NO: 124157 - protein, 135 aa, Heterodera glycines
  unsure (1)..(135): unsure at all Xaa locations
MEGIFGTQRGGGDILPNNDNNGNHNDRQPLLLEENEKASYGSLVPTEDSFRQDKHWWKRSGKLKASKRQLGIFAYSSSVDYALIAFGTVASVLHGAGFPLLSIVLGGMTXRAENSDFVHGQTPRQNATNSSAISP

SEQ ID NO: 124158 - protein, 216 aa, Heterodera glycines
CALKANMIQAWRTHFVLEEGMLEVECTSLTPEYVLKASGHVDRFIDWMVKDKQTGACFRADHLVKNQAETLIRDKKTDEKTKSELMNVLVMLDGMSCDDLHEVIKKFNFKSPLTGGDLSEPVSFNLMFPTEIGPTCDQRAFLRPETAQGIFINFKRLLEFNQGRLPFAAAQVGSGFRNEISPRQGLIRVREFTMCEIEHFVDPTDKRHPKFEKIAH

SEQ ID NO: 124159 - protein, 168 aa, Heterodera glycines
MAFPPPFPNPLLPRLPNQSVQFPGQKFGFFSPQRQSILPGIPLLRPRFRPNFIPRELRPPNPLARPTGPPTTTTVFIGNISDKCPDRIIQEVLKKCGSVCNWKRLQDSRGKFKAFGFCDFMYPDGAKKALSVLKDFPIGDKRLNVKADEQTEKLLDEFSKNKLIAANE

SEQ ID NO: 124160 - protein, 190 aa, Heterodera glycines
  unsure (1)..(190): unsure at all Xaa locations
MSKQIRTCWVWRKNNRWWRYLPRRNDSHNLIDMDELGEQCATFSDPMPADPPKLWVAWLYTDSYGSGRKIRDQVTKLFGKDAKTGEMQVFKNTLSTNKQLWKIKHLLEIRPVTFPNGEPXPEDATHLEIMADGRCVIDRQSLPNVDEFQLIDXASQFSPRYLASRLMSKDVAKQDVYEDTVYNPENISIG

SEQ ID NO: 124161 - protein, 146 aa, Heterodera glycines
HPGHGKRVVRADGKIQIYLSKKAQRGAALKRNPRDVPWTVLYRRKHKKGVHAEEGTQRKRVKRTVQIASRPIADLTVEALLAQRNQKPEFRKQQREAAIKAAKESARVQKDETKKKQQKIDKKAAPTKTKAAKQVKAPKQFVGGKR

SEQ ID NO: 124162 - protein, 91 aa, Heterodera glycines; identical to SEQ ID NO: 122150

SEQ ID NO: 124163 - protein, 197 aa, Heterodera glycines
MQAVTEQCFCKRWAFSLKKSMESENFERHFRLAIQSVTAEDYEKMRQYRHREDSLATLAGRLFLRKAVQCLCGVRWADIEISRTERGKPFIVRPENISIGLNVSHQGDYTVFASSCTNQVGVDVMRLDMCRGNKTADEYINSMAKSASAGELRTMRGQPTEQMKMTVFYRYWCLKEAIMKATGHGLVNDLSRFDFII

SEQ ID NO: 124164 - protein, 150 aa, Heterodera glycines
MAGGKRKAGKDSGKAKSKKIISRSARAGLQFPVGRIHRFLKKRTTSTGRVGATAAVYSAAILEYLTAEVLELAGNASKDLKVKRVTPRHLHLAIRGDEELDSMVTATIAGGGVIPHIHRSLMRKPPSQLNHSHQHNHSQQQMTNVGNGDN

SEQ ID NO: 124165 - protein, 205 aa, Heterodera glycines
ASESGSDKIVFQKNVTGRGSQVLDDAEFVKMYDRSTSKTLNTSSANDNAQSNQQKEQVQKWKVGDQCMALYEVDGKCYPAKIEQISPVKNTCTVSYIGYDQKAILKLEDILGESDVEAADDHGDEREAEGTSGTTKIADNDVKKDAFPIPDLCPPPPPSMFGKIAVAGNEKEALTNMLMSWYMSGYHTGFYQGVMHEKTTRQKPK

SEQ ID NO: 124166 - protein, 151 aa, Heterodera glycines
AVLAPGKLRLQKWYVAYPDKAKKKITRELVTTILSRKPKMCAFLEYKDTKVVYKRYASLYFCCAIEQTDNELLCLEVIHRYVELLDRYFGSVCELDIIFNFEKAYFILDEFLLAGEIQETSKKQVLKAISAQDLLQDEETTQGLFEDNGLG

SEQ ID NO: 124167 - protein, 65 aa, Heterodera glycines
  unsure (1)..(65): unsure at all Xaa locations
MSGELRLDSSLDLMRRLPPQNCEKHLTDLVALAPDLCESLLTAVDQPLXVAKGLQTTGREYLLCG

SEQ ID NO: 124168 - protein, 336 aa, Heterodera glycines; identical to SEQ ID NO: 122321

SEQ ID NO: 124169 - protein, 52 aa, Heterodera glycines
GEETQLLHQPFMLNPEQTVNEYLEAHGANIADFLRIEMGQEHTKTNDLSVHC

SEQ ID NO: 124170 - protein, 133 aa, Heterodera glycines; identical to SEQ ID NO: 122713

SEQ ID NO: 124171 - protein, 203 aa, Heterodera glycines
FDFSYLNKAFKRALEPKLPSTDIRPIPDERCVNTAHLGEAEKERLEQIGLKAIAEGRVAAVVLAGGQASRLGSAQPKGVLRLGTGLGQDDVDSLLFIQAAQIVRLQRMAAEQFPAEAAKSGGRITWLVMTSNTTNAAVHDHLNAVLAETGLSSDQVLIFTQKEIPAFDFDGNALMKSSTELVTAPDGNGGFYDVVRPLLPNWR

SEQ ID NO: 124172 - protein, 125 aa, Heterodera glycines
MAQQQAITKKRKAVQDGIFKAELNNFLMKELAEDGYSGVEVRRAPSRTEVIIMATRTQSVLGERGKRIRELTALVQKRFGYSAGQIELYAEKVSSRGLCAVAQCESLRYKLVGGLTVRRACYGVL

SEQ ID NO: 124173 - protein, 159 aa, Heterodera glycines
MSKTSKKNFVTKQLVKEIVIPADNEFVGKILASRGNNLHEVETDEGENFLVSMPTRFRKKLWVRRGTYVILQSIEEGDKVRAEIVHVLDPENIAFLMEKEVWPERFIVEAAQLTKRGQRTEENDDSDLFPATSESENSAEESSSLVSEDVALNGQTNAF

SEQ ID NO: 124174 - protein, 134 aa, Heterodera glycines; identical to SEQ ID NO: 122599

SEQ ID NO: 124175 - protein, 112 aa, Heterodera glycines
TREIHLNSPFNIRTIYNFRLINTGSKRIGFAFKTTKPKRIFLNPPCGTVGVGDTVNVIITVAPFDPNNEDIKNDRVIVEWCNAPGPSDAVFNLDWFTENAVRNVRLNVVYNL

SEQ ID NO: 124176 - protein, 150 aa, Heterodera glycines; identical to SEQ ID NO: 119655

SEQ ID NO: 124177 - protein, 140 aa, Heterodera glycines
  unsure (1)..(140): unsure at all Xaa locations
MASRKGNVKEEQPAVSLGPQVQEGENVFGVAHIFASFNDTFVHVTDLSGRETIVKITGGMRVKDDRDEASSYAVMLAAXQDVAERCKXQVGINALHVKLSETGGTKTKKAGFFFQAEMRAHERSGMKIGRIEDGRPIPLD

SEQ ID NO: 124178 - protein, 170 aa, Heterodera glycines
  unsure (1)..(170): unsure at all Xaa locations
MAAQNPMRELLLEXLVLNICVGESGDKLTRAAKVLEQLTGQTPVYSKAKYTVRSFGIRRNEKIAVHVTVRGAKAEEILERGLKVKEYELRAANFSQTGHFGFGITEHIDLDIKYDPTIGIYGMDFYCVMGRAGFRVSRRRRAVAKVGAPHRIHQDETIEWFKKNYDGVIL

SEQ ID NO: 124179 - protein, 133 aa, Heterodera glycines
DGRHGVFFRNDLFPYSSGSSPVASFRLAVHHSRAPSTCGKFNESLLGELANSATLQSSLCVCTSIRRTAAVVEEEEEATEGRKLKLKEHPVTDEYKVSHEIVGIGESGKVMACFHKRRGEKCALKVLRDNARS

SEQ ID NO: 124180 - protein, 143 aa, Heterodera glycines
MPQYNLFANRSLLFTKRFFAVGPPGTKATYKRTKPHMNVGTIGHVDHGKTTLSSAITKLLAAKKQAKFLKYDEIDNAPEERSRGVTINAAHLEYETDNRHYAHVDCPGHADYIKNMITGAAQMEGTILVVAITDGPMPQTREH

SEQ ID NO: 124181 - protein, 158 aa, Heterodera glycines
MASECCIQVFCRVRPLNESEKKNSSTNVVKFQSKDTIVVGGKPYAYDHVFEPSSNQEAVYSTAARHIVQDVLTGYNGTIFVYGQTSSGKTHTMEGVIGDSEKQGIIPRIVNDIFTHIYNFVDTEMEFLIKVSYFEIYNERIRDLLDVTKTNLAIHEDK

SEQ ID NO: 124182 - protein, 174 aa, Heterodera glycines
MTQQRNPNGMKKTNKELTELNDCLSKFAYLRGFLPSQDDQRLFESFSSAPPQKEYLNIARWYNHVQTYEDVERSTWPDKSSNIVEEETAPKKDRVGEDSTKVTTQKRFAEMFGHLHFHEVGKNDTTEGYVRTENTERLLREHVKAVGGKVVTRFPPEPNGILHIGHAKAINIVF

SEQ ID NO: 124183 - protein, 159 aa, Heterodera glycines
MNQRSEMPAQLRFQPSNAIGTHQRSIITAQQFQQQPFCVKRARYDYDLYEGQSHHNFQRQRFDQTPPSAIHPMRTFQIRHRSTDKTRGLRHFAQKVCEKVKQKVQTNYNEVAEELVNEYFDNIAEVPSDPEKLQYDTRNIRRRVYDALNVLMAMNIIEK

SEQ ID NO: 124184 - protein, 189 aa, Heterodera glycines
MGNSSTTARSDDPQSTLTAGETLSDYDENIINRGRVARRKESFCKGLAFSNRPISINEIVCIRLSEIGTNWSGVMRFGVTNVDPASFRDIELPKFACPDLTSKGGYWAKSLAERYSVEGSILHFFTNANGEMYYGVNGVHKGLFLSGINVLSPLWIIVDIYGNSIAVEFIDPSEVQLQSKRTSSKNRAG

SEQ ID NO: 124185 - protein, 158 aa, Heterodera glycines
DIDQRTDAVVVLSSVMRTLESNQIVAEQNLILAKVPILRIKFIGTFHDITVDLNVNNSVAIRNTHLMCYYSSFDWRVRPLVMVVKEWAKRHGINDSACSSFTSYSLVLMVIHYLQCGAQPPVLPNLQQMYPKRFSVRADVRTLNVSLPFEPIPTAMGW

SEQ ID NO: 124186 - protein, 131 aa, Heterodera glycines
VSAQSDSPVPNWLLNIGPISCHAWNKDKTQLAVSPSNNEIHIFARLETVWNPLHVLREHDLLITGLDWAPNTNRIVSCSHDKNAFVWTWEAEKNSWKPEMVVVRINRAATCVKWSPNGRFDHSLLIHWPIL

SEQ ID NO: 124187 - protein, 89 aa, Heterodera glycines
MPESENDFDEEAPNATMETKVAGGGAAPKRVGRWTLSQLRQTDGIIPSQAGWNNGDSQKLMTNFGTPRNTTTKVKVENLAEIPEDILLK

SEQ ID NO: 124188 - protein, 201 aa, Heterodera glycines
  unsure (1)..(201): unsure at all Xaa locations
KHQSQPEKMCDEXVAALVVDNGSGMCKAGFAGDDAPRAVFPSIVGRPRHQGVMVXMGQKDSYVGDDVQSKRGILTLXYPIEHGIVTNWDDMEKIWHHTFCYELRVAPEEHPVVLTEAPLNPKANREKMTPIMCETFNTXRAMYVAIQGRAVPCTASGRTXTGLVLDSARWVYPHRGPSTRGYXPAPTPCLRLCLGRGGDVT

SEQ ID NO: 124189 - protein, 217 aa, Heterodera glycines
IDENRRWSDLRCLTDRASTFANSGFVPGIKNLKEVHKMPVLVVGAGGLGCEILKDLALSGFHDIHIIDMDTIDLSNLNRQFLFRENDIGRSKAEVAAAFIEKRVFGCKVTPHNCKIQDKSLEFYRKFFIIICGLDSIEARRWLNATVCSLVEFDDGNNPKSNTIVPLIDGGTEGFKGNSRVIIPFMTPCIQCTIDLYTPQVNFPVCTIAHTPRLPEH

SEQ ID NO: 124190 - protein, 165 aa, Heterodera glycines
SFQISTFNLFNLKVDIFSSSGFVASCLNWVSKLHSPNVIVALPNQPNDVAAELLKKWASKFKQLQAFGVSNCQSLNDVLREVDFRQILRNDFMLIQNLATFCFSYLTRQIEKFRNDRRQNNKNVLTLLYYSKRNYGRKFEEDRSLIGYIEQTQKLTHYENIGKHR

SEQ ID NO: 124191 - protein, 179 aa, Heterodera glycines
MITPSSNTTHYRESWYACRYRSGIPGSTSSSSWPLIRLTIGQNGAEEEDGGRGRYHGFRGFRRTSSSATAMTSRRTCSIFGALDNDFDFLFNINLKSIAKLTRLCAPYLEETKGAVVNISSFGTQRSLSDYTYYSTIKNALDNYCRSIAVKFAKRDIRVNNINPGFIIGETLDEDDNRA

SEQ ID NO: 124192 - protein, 132 aa, Heterodera glycines
  unsure (1)..(132): unsure at all Xaa locations
MLKMLLKFPSIHRFCSIRSLTQLPNSYEVLRDRGDTAELSQLKNGFRVASYANGRPTVTVGVWLNAGSRIETNDXNGIASLFEGLLHKGSGKRNSVQLQTELAKLGARLRSFTTREHSAFFVECLKSDTDKV

SEQ ID NO: 124193 - protein, 153 aa, Heterodera glycines
FAGGRGSRMPSLTNQMPKALLPMANMPLYWFSLNLLRLNRVRDCLLIVPLGQKLQIENALKTDGGGRWPTLKGMDIEVVAIDSLEEDVDDWGTADVLKRLLGKLKSDHILLISGDLVSDVRLRDMFKQYMENNAVLSCLLTDSALGGPIPGPK

SEQ ID NO: 124194 - protein, 213 aa, Heterodera glycines
LDGTDGDEALNLNDLDEKEVLGDDEEDQHQNQHTTKEEVEDLYDEAMAPSGALSEKRESAEVISSLPSSIQHKSSFAMPMMIKSEPGIAGGSQSGKRYCCYIGNMTWWTTDDQLQKLIQTLGVDDMIDVKFYENRNNGQSKGFALAVFASEPSVKAVMEKLPSKKLHEQSLAVLPYTKQSLAKLEEATKRYDQKSQKDDKVVNIGTVRIGTNG

SEQ ID NO: 124195 - protein, 77 aa, Heterodera glycines; identical to SEQ ID NO: 122121

SEQ ID NO: 124196 - protein, 136 aa, Heterodera glycines; identical to SEQ ID NO: 120882

SEQ ID NO: 124197 - protein, 82 aa, Heterodera glycines; identical to SEQ ID NO: 122810

SEQ ID NO: 124198 - protein, 94 aa, Heterodera glycines
MLLVRTGLKLKRGTLFKKKRNVDPKTIDLTIKKEQEGPRKTKAELAFLKRQEETAFDRLSKRAQISHREKVEKFNKQMEELTEFNDIPKVSWTK

SEQ ID NO: 124199 - protein, 138 aa, Heterodera glycines
  unsure (1)..(138): unsure at all Xaa locations
YRQDARTPSQIRNIVYQMGVYSHADGSAYIEQGETKVLCAVYGPHECRFRSRAKEDEAIVICQYSQATFSVPDRRNRPRGDRRGNSFSHLLERAFESVIFTNLYPXSEIDIFLELLDADSASLVFSITASLPFVTISI

SEQ ID NO: 124200 - protein, 149 aa, Heterodera glycines
ARKIPHIHRVMNTNIDGNRKVPCALTAIKGVGRRYAFLVCRKADIDIHKRAGELSEEDMEKLTTVMLNPQQYKIPSWFLNRQKDIRDGKNQQVLSTNLESKYRDDFERMKKIRLHRGLRHYWGLRVRGQHTKTTGRKGRTVGVSKKKGG

SEQ ID NO: 124201 - protein, 88 aa, Heterodera glycines
WRLCLGKIRRKEMVRLYKVKIMRSDGSVIFGRCDEPREIIQLPVDLRTLSDDERRMRIAERKPIAKKVVEDTLDDSFDFHKYVSQWKR

SEQ ID NO: 124202 - protein, 112 aa, Heterodera glycines; identical to SEQ ID NO: 122786

SEQ ID NO: 124203 - protein, 130 aa, Heterodera glycines
RFSLFHFLRRPLPLLVFRRSLFKPPLDSPFCGIYRTNGEICRTDDILVCQRKMNYHPGANVRHQRDRNQHLLKAVCDGTVVITREHCEVNPKNEWMYAQYAYRDFENIYKLTFNVIPRRMSNTFKLISEE

SEQ ID NO: 124204 - protein, 84 aa, Heterodera glycines
VEGGVITLHTRKVLNNRPLFRKQMVVDILHPNRASVPKSEVRERLAKLYKTTQDVVVAYGFRCQFGGGGRTGFGCVFNSLCYTK

SEQ ID NO: 124205 - protein, 155 aa, Heterodera glycines; identical to SEQ ID NO: 122806

SEQ ID NO: 124206 - protein, 142 aa, Heterodera glycines; identical to SEQ ID NO: 122788

SEQ ID NO: 124207 - protein, 208 aa, Heterodera glycines
  unsure (1)..(208): unsure at all Xaa locations
MASPALHTFNALLATGASLLTLMAFYYMLTGQGDRFDIAWFLTETSPYMWAGIAIAASLSLSVIGVGWGIFTTGSSILGGGVKAPRIRTXNLVSIIFCEAVAIFGIIMAFVFAGKLGKFTRETATQEVIVKNLAAGYAIFGGGLTVGFSDLICGLAVGIVGSGAALADAANPVLFVKILIIEIFASAIGLFGMIIGIVQTNKFNIGTT

SEQ ID NO: 124208 - protein, 130 aa, Heterodera glycines
SNNDIIFGNEEGVNYLAPWTYSCLIKTSIDRLKTALSENREAIHALNHLQEVFRQIDRASPSFLYDFSKLLLIESGVAGTNVQESYLRMHANAATEELELPQFAHIAEFQYLVVTLNCLGYLNFEMFAEF

SEQ ID NO: 124209 - protein, 171 aa, Heterodera glycines
  unsure (1)..(171): unsure at all Xaa locations
AAPKTVARRARPXRATSNVFAMFDQPQIQEFKEAFNMIDQNHDGFIDEHDLKDMFASLGKEVSEKFIENMVNDASGSINFTMFLTLFGEKXLTGTDPEEVIKNAFQCFDEDNSGTIAEDRLRELLTTMGDRYTEEQVDELFRDAPIKNGRFDYVEFTRMLKHWTKDKDEED

SEQ ID NO: 124210 - protein, 131 aa, Heterodera glycines
DGGVITLHTRKVLNNRLLFRKQMVVDILHPNRASVPKSEVRERLAKLYKTTQDVVVAYGFRCQFGGGRSTGFANVYDSLDYAKRFEAKYRLLRQGVGQKAEKGGRKQRKERKNRQKKVRGVKKVKVQAGEK

SEQ ID NO: 124211 - protein, 244 aa, Heterodera glycines
MTLRLGSKLKFSILLQNVGIRKNPFRNSYNYPITFEHVVFPPNNQFKLPTMPPEPIYDESLGETKHKLTKQFIEARGFEPIHTELIHKQYGLVAMSGGFIKAEDFAWIQQEVNEKLVDKQFAIWRVDAPWLPRVRRPPSTKKGGGKGPIHHYETPVRTGRVILELGGYITEQEARSILMHLYLHMPFPVEFVSQELMDKRKGLEMKVRANNRNKFDWDTLIKYNMQNCKAWLSPYDVYWKCRYE

SEQ ID NO: 124212 - protein, 90 aa, Heterodera glycines
GVPKYRTSKPRVLFRRFNRPFYQYTMRPLVQCPRCSASHEPWVLCMDCYRVLRDATEPIKRRMVSHNAYIGQRQQPMPRWTDENGINANP

SEQ ID NO: 124213 - protein, 125 aa, Heterodera glycines
MTRQKMQMYSPEMRAVNYQQKRTHMHAILTKKTVEDRVMLNLHLFDKVDNDKLTFDSDFFKDLGIDSLDFVEFIIAIEDEFEFEIPDGDSDRMRTPRDVYNYICDKCDVYDGMYDKCCRQKIVLF

SEQ ID NO: 124214 - protein, 146 aa, Heterodera glycines
MNKAFVKAALCSKSTNVCLFKRLVRPVVQIGSRPITGAGFGHPMTRQKMQMYSPEMRAVNYQQKRTHMHAILTKKTVEDLFMLNLHLFDKVDNDKLTFDSDFFKDLGIDSLDFVEFIIAIEDEFEFEIPDGDSDRMRTPRDVYNYI

SEQ ID NO: 124215 - protein, 186 aa, Heterodera glycines; identical to SEQ ID NO: 122790

SEQ ID NO: 124216 - protein, 188 aa, Heterodera glycines
MGRHKKTQKFRNKLQKLIKPTDDRIKDEIRVKKPPKEDENALKIKEAPKISAAMFLKYNTQLGPPFHVIIDTNFVNFSIKNRIDIMTGFMDCLYAKVVPYISDCVLGELEKMGRRFKLALKIIKDNRFQRLQCTHKGIYADDCIVQRVTQHKCYIVATCDKDLRQRIRKIPGVPIMYVRDHRYTIERM

SEQ ID NO: 124217 - protein, 44 aa, Heterodera glycines; identical to SEQ ID NO: 123524

SEQ ID NO: 124218 - protein, 150 aa, Heterodera glycines
AQIKAQMASAAPPLGPSLGQRGVNVANFCKEFNNLTSTIRFGTNLPMSIHVKPDRTYEIDISTPTTEWLLQQAAGIRRNRQEEGEIVGMISVKHVYEIAKVKSQDKSLIGVPLKEICQLVIERADSIGIKVQNEDLDPEEYRKFLEHRQE

SEQ ID NO: 124219 - protein, 51 aa, Heterodera glycines
SLRAQTVMKTRLKGAQKGHSLLKKKADALNMRFREILKKITEVSYLQQQML

SEQ ID NO: 124220 - protein, 197 aa, Heterodera glycines; identical to SEQ ID NO: 122644

SEQ ID NO: 124221 - protein, 176 aa, Heterodera glycines
ISINFFTKSDIESVNFINHLPEKLYFLESDGQVFHNLNDIDDGKLIQLHFRACGGKGGFGSLLRSFRIHKSSNQLMCRNLQGRRLADVREEERLKKYIAKKAEREKEKQKKKDEKIERLKAGGETKHQFEDQKHLRKRDTLLDEVEDAVEAGMDALEVKAASSEHEVSETIADTEP

SEQ ID NO: 124222 - protein, 83 aa, Heterodera glycines
KTSKKTDPKGGKAAPAKKKEGGGGGKAKKKKWSKGKVRDKLANMVLFDQATYDKLYKEIISVKCVVKHGSQLVYTRATKAEEA

SEQ ID NO: 124223 - protein, 106 aa, Heterodera glycines
TFEIYRYNPEKPEQKPFLQKYDVDLNQCGPMVLDALIKIKNEMDPTLTFRRSCREGICGSCAMNIGGENTLACICNIEKKTKYSTKTGGKRIMILLIRICILCISW

SEQ ID NO: 124224 - protein, 136 aa, Heterodera glycines
  unsure (1)..(136): unsure at all Xaa locations
DITIGGKAAGRIVMELYSDIVPKTAENFRSLCTGEKGMGKSGKPLHYKGSKFHRVIPNFMLQGGDFTRGNGTGGESIYGEKFVDENXKEKHXQPGILSMANAGPNTNGSQFFVTTVKTEWLDGSHIRFGRLTDGVG

SEQ ID NO: 124225 - protein, 73 aa, Heterodera glycines; identical to SEQ ID NO: 119375

SEQ ID NO: 124226 - protein, 190 aa, Heterodera glycines
TESNGPKVLRILEIVKNAQQKHGLRHENYRRYRGYCSRRIEGIRKSLKFMHSYKCAPKRTAKFIARNVSAELIGDLRFLQIAVFEVERNWAYAMQMKFEMVDLPLSRKKFHMRQKLRRAVKSAHFLHSLINDNPLVHEVTRVETVSYVSFIFGSLELELKNWKRAIETFDRARIGYSELLEQVPNSDLSE

SEQ ID NO: 124227 - protein, 190 aa, Heterodera glycines; identical to SEQ ID NO: 122780

SEQ ID NO: 124228 - protein, 92 aa, Heterodera glycines
MSGDNSALIAAEQAAYGPFFGSLGVTAAMIFTAAGSAYGTAKSGARSLRNDCLTAAKFLLNNGRKKEGKNGTSAEHCADRRVLMIKMTSHRI

SEQ ID NO: 124229 - protein, 93 aa, Heterodera glycines
  unsure (1)..(93): unsure at all Xaa locations
GKPTSVKDVDQHEIVQSVATFLKKSGKIKLPDWVDLVKSGKNKELAPINPDWYYERVASLALRLYIRSPAGVGXFRNLFGGINIRGVSPNHFT

SEQ ID NO: 124230 - protein, 129 aa, Heterodera glycines
ETKSKLEAEFEKLRNLEKDRSKCMTNRRQLESQLTENSMVKEEFDRLKSDAGVFKLIGPVLVKQNLEEAKQNVAKRIDYIRTEIERIESLLGDLEKNIEVQKESVERMRDTFRQTLAVATAPTANSINA

SEQ ID NO: 124231 - protein, 101 aa, Heterodera glycines
KNRKGCRKAVPKRNKLDSFSIIKHPLTTESAMKKIEDTNTLVFIVDVKANKHQIKSAVNKPYNIEAQKVNTLVTPDHTKKAYVRLAADYDALDVANKIGII

SEQ ID NO: 124232 - protein, 99 aa, Heterodera glycines
  unsure (1)..(99): unsure at all Xaa locations
AENIEEILAEIDGSQIEEYQRFFDLFDRGKNGYIMATQIGQIMNXNGYISRPTLKGLLHEIAPDLSDKGLEAAVDEIDEDGSGKIEFEEFWELMAGETD

SEQ ID NO: 124233 - protein, 169 aa, Heterodera glycines
MASIDLSQEVRLYDNNAERDRIDNMAELYAMVNALECLEKVFSRDYIHAKEYTAECSKLLVQIKVALRLVPGMTIDEFFRSYYIQCPAALERIREDRPITVRDDKGNALKCIADIVELFITFLDQLKLNIRAVDELFPNLNDLYASINTMSTLPDDFDAKLRVKSWHDK

SEQ ID NO: 124234 - protein, 131 aa, Heterodera glycines
ENAHTKSEDELFRFFGTGPDGLTEEQADELRDKYGYNEMPAEEGKKLWELILEQFDDLLVKILLLAAIISFVLALFEEHDDQTSAVTAFVEPGVILPIDATQPTENYQEFDNLYLDMNGIIHPCTHPEDRP

SEQ ID NO: 124235 - protein, 148 aa, Heterodera glycines
MASSTASSSSATNEQQKIVNGFQKLRELQQATINELNKIQTEQREHTTVLKTVQSLEPNRKCFRQVGDTLFEFTASELIVLLEETIKRFKQRVDELENQVVKVGEDINAYKEKHNIRFLSNKDVIELQKKQALSKISQLDLGPGGKSQ

SEQ ID NO: 124236 - protein, 144 aa, Heterodera glycines
  unsure (1)..(144): unsure at all Xaa locations
KASGETLRKYIVVGRKLPTADDPNPTLHEMVIFASNHVVAKSRFWYFTSMLRRVKKTHGEIIACEEVFEKKPGCVKNFGIWLRYDSRTGHHNVDREYRDVGEAGASTXWGRDGGGRHHPQTDGVXIMGREAIRVAHCNRAMVEQ

SEQ ID NO: 124237 - protein, 124 aa, Heterodera glycines; identical to SEQ ID NO: 122776

SEQ ID NO: 124238 - protein, 206 aa, Heterodera glycines
EETEGKLLQIREIFHDLLMSLELQEHVQWADMVQKFCSLAGMFASLQQLMRKPGHNNFDDNVKLMKMTQFVPKNVSLELDPNLTHLTEGRLSNFGHNIVPILLRTKLKPEVEEDELNIERDRSKGDIPKQIKTLNSHIDMLCGKLADFTKLHVVDRREAPSYSQEETVKLVKAICLGRGIYPKAPSSAHPGSADAGRSTSSSQKAK

SEQ ID NO: 124239 - protein, 66 aa, Heterodera glycines
KGIFISRLVEGGLAESTGLLSVGDEVVEVNGIEVNGKKLDQVADMMVANAHNLIVTIKPANQRNSL

SEQ ID NO: 124240 - protein, 136 aa, Heterodera glycines
  unsure (1)..(136): unsure at all Xaa locations
MQIFVKTLTGKTITLEVEASDTIENVKAKIQDKEGIPPDQQRLIFAGTSTFKPLQHHFYTXPLFSGKQLEDGRTLADYNIQKESTLHLVLRLRGGMQIFVKTLTGKTITLEVEASDTIENVKAKIQDKEGIPPDQQ

SEQ ID NO: 124241 - protein, 101 aa, Heterodera glycines
APGFDGMQIFVKTLTGKTITLEVESSDTVDNVKTKIQDKEGVPPDQQRLIFAGKQLEDGRTLADYNIQKESTLHLVLRLRGGNGKRNTGKNKKSNKKLDQN

SEQ ID NO: 124242 - protein, 109 aa, Heterodera glycines; identical to SEQ ID NO: 123498

SEQ ID NO: 124243 - protein, 454 aa, Heterodera glycines
MLSRFSKIIVRGYAKDLNLKEVLANKIPEHNKKVVEFRKAHGSTVVQNITVDMIYGGMRSMKGMVTETSVLDPEEGIRFRGYSIPECQQKLPKAEGGEEPLPEGIWWLLCTGEIPDQKQVNAISKEWASRADLPAHVAQLLENFPPNLHPMSQFVAAIAALQSESKFAEAYSKGVPKSTYWEYAYEDSMNLLAKLPTIAAMIYRNLYRDGSSVGVLDPNKDWSANFCHMLGYTEREFVELMRLYLVIHSDHEGGNVSAHTCHLVGSALSDPYLSFAASMAGLAGPLHGLANQEVLVFLTKMVADIGHEYSEQQLKEWVWNHLKSGQVVPGYGHAVLRKTDPRYTCQREFALKHLPDDPMFKLVSTLYKVTPDILLEQGKAKNPWPNVDAHSGVLLQHYGMHEMSYYTVLFGVSRALGCLSQLIWARGMGLPLERPKSHSTDGLIKLAAAATAAK

SEQ ID NO: 124244 - protein, 74 aa, Heterodera glycines
TWRFSGMKKWHVNWEIRHLKIQFDNEDVEFKPLSADCKVVHEFIGGYIFLSMRSKGQNQTLDEEGFHRLTGGWG

SEQ ID NO: 124245 - protein, 180 aa, Heterodera glycines
MITPSSNTSHYRESWYAFRYRAGIPGSTSSSWPLIRLTIGEKAKGARPGELENPSIFQKIILLNKEIIIMEENFCCFVFGWINIYLFFHTAFRYKFEKYVYKVTRERFGKMKAYIDNELKEAIEFRKTSKEQADSLKAVHENFPTIFQENLALQLEATYRKNVDYAWQEMKRRLDYLQEV

SEQ ID NO: 124246 - protein, 173 aa, Heterodera glycines
  unsure (1)..(173): unsure at all Xaa locations
LANAPKGGLFDAFTSNPLFTGGAGLMCVGVLFNYGRKLSTVGASVLRRKYVSTLELSNEDQCVHSRTITIQWVLDFINKQSRRKTNQLSVSSTVLISESGKASTQFFFMPGQGHHYMSXGGRLVRVERERTEQMLQRADKRRTPLETVRLTTIGANLDSILILNQKFYYCKFE

SEQ ID NO: 124247 - protein, 173 aa, Heterodera glycines
YVNYRESWTPVLPGRNSRVDIIIIIMAANTTHYRGFQEVISPNIYNAKLWEQSGHWHHYAENMFRFEIEKEQFGLKPMNCPGHCLMFDYKPHAYNELPIRYADFGVLHRNEMSGALSGLTRVRRFQQDDAHIFCRKDQILSEISGCLDFLNFVYVEVFGFSFRLHLSTRPEEG

SEQ ID NO: 124248 - protein, 112 aa, Heterodera glycines; identical to SEQ ID NO: 122753
  unsure (1)..(112): unsure at all Xaa locations

SEQ ID NO: 124249 - protein, 67 aa, Heterodera glycines; identical to SEQ ID NO: 122763

SEQ ID NO: 124250 - protein, 155 aa, Heterodera glycines
MIQSGLCRLTPDELWAVCQPEVGLGREKITLRKGDGLNLYMNRDLASIYARHRLYNADKYYYLVDYGQTNHFNQLRLLLRIRGDDDLADRMEHVSFGRIIGLSTRNGKNDSVDFLIDQGAREADAYVHASPTMRAEPAELGTICRRLAESTLLFE

SEQ ID NO: 124251 - protein, 114 aa, Heterodera glycines
MAQYVPWYYKRSPPIFCGVCVPVYLGVWSVRKFIVVLGFLLFLIGVLLLLGLLLICVAIECSAAAGALLPFALVLIIAGLLLLHCGWAAHLLDVGEGMPYGEYSTTKTVSTSAR

SEQ ID NO: 124252 - protein, 145 aa, Heterodera glycines
MAGIAAGRLTEERKAWRKDHPFGFIARQCKKEDGTLDLYNWICAIPGPKSTIWEGGLYKLRMIFKDDFPSTPPKCRFEPPLFHPNVYPSGTVCLSLLDENKDWKPSITVKQLLLGIQELLVSPHPEDPAQAEAYQIYVQNRPEYE

SEQ ID NO: 124253 - protein, 190 aa, Heterodera glycines
QEGLYTITQLGQSLAQLPLTPSFAKVVISSIRGGLLPFAVTLVSALSVREPLLFISSTKEDGTEERRKRMSEVIKQRFLWCAVGEARLFGDLTVILNTVGAADYEEENARAIEALGLRPKALKEINKQRHQLTLLLNKSDSVEKLPEKFRMDAPSQEQLRRLRHIMVKCHPDKLAKKVQSLDAPKGAYKT

SEQ ID NO: 124254 - protein, 99 aa, Heterodera glycines
MAPKEKEVGKGWSFAHFFWHLIKKETRNEKERHILANGRLALSFLAVAFAGFALLYDYFFPFPKSKIILAVCSISYFVMIMVLQAYQWYVEKLTFFQAE

SEQ ID NO: 124255 - protein, 139 aa, Heterodera glycines
GGIDQMIMVGHSFGGYLASSYALEHPSRVRHLVLVDPWGFPERPQIEQLHIPIWMRVFGRLLSLFNPLATLRAAGPFGARLVKKLRSDLGIRYAHQDPDAIYEYIYQCNAMEPTGEIAFGTMSKNFGWAKRPMINRFGG

SEQ ID NO: 124256 - protein, 204 aa, Heterodera glycines
MALLEEGKTEQNGDEPSTKVKMAENGGGGGAEVAQNKFGSSSIRPASSVLSFFRSSKPEDPYASKLFTFLQVLTACFSGFAHGGNDVSNAIAPLVSLYTIYDEGSVHQKGETSVYLLLYGAAGMCVGLWLLGHRVIYTVGENLTRITPPSGFSIEFGAALTVLFASKLGLPISSTQCKVGSVVAVGLVQAHPVVHWTVFRNISL

SEQ ID NO: 124257 - protein, 50 aa, Heterodera glycines
  unsure (1)..(50): unsure at all Xaa locations
MSAGRANIGKPAPNFSVXAAADFDFKTVSLDDYKGKYVVLFFYPEDLWVF

SEQ ID NO: 124258 - protein, 103 aa, Heterodera glycines; identical to SEQ ID NO: 119330

SEQ ID NO: 124259 - protein, 160 aa, Heterodera glycines
GGNRQKSKKGSQTMMKKRERKEKEEVVFSQPVVWVKQKKRNFLCKIMGSPGRRWYRILAISNLNPSPFFSRSRSRDLPSSRGGGGGGGYYGSRRFHDGRDNPNPNPCLGVFGMSLHTTERDLKHLFGRYGEVDSVQIVYDRLSGRSRGFGFVYFTHTKDA

SEQ ID NO: 124260 - protein, 143 aa, Heterodera glycines
MPPLRDYLPRPTWVKHGNEFPLRQLLPGHYDDPEWHPKDRGYAGSPRFGDKIPEDIMIYRRSPTEEEVPFLHKAMHKLMSMVFWYWVFYTIYWHHQEQFTGEWYFPYHYEWTDEELGVPPDDAPDPEERQFWGHPGELIGTYR

SEQ ID NO: 124261 - protein, 63 aa, Heterodera glycines; identical to SEQ ID NO: 123487

SEQ ID NO: 124262 - protein, 103 aa, Heterodera glycines
MSGRGKGGKGLGKGGAKRHRKVLRDNIQGITKPAIRRLARRGGVKCISGLIYEETRSVLKVFLENVIRDAVTYCGHAKRKTVTAMDVVYALKRQGRTLYGFGG

SEQ ID NO: 124263 - protein, 238 aa, Heterodera glycines; identical to SEQ ID NO: 122691

SEQ ID NO: 124264 - protein, 101 aa, Heterodera glycines
MTSIRGLLFTLASPLKAFYANVAVKQIDVTGMSSSVGILPTHVPTIAVLKPGVVKVHELDGCSKYCGIVQHYSNLYLVIDFQCFRKRLQVFRFFWYPFNEY

SEQ ID NO: 124265 - protein, 82 aa, Heterodera glycines
PIKMCDEEVAALVVDNGSGMCKAGFAGDDAPRAVFPSIVGRPRHQGVMVGMGQKDSYVGLHFCRRHSPKNSFIFCENKGSNC

SEQ ID NO: 124266 - protein, 134 aa, Heterodera glycines
AEDKFIVDEVKSNEWVKVNSNFSSFFRVQYSPNMLQSLLDGVKNRELGVLDRYQLASDLYALVKSSRVSVSHFLALLTVCQEEEDYFVWSAIDSGIGSIAHSLKHLDDERKLLDRFERFVCKMIESVAAKLGWE

SEQ ID NO: 124267 - protein, 114 aa, Heterodera glycines
MDAGFYRGTSSEQDIRLTDKERKLLRQMKFENVLETKVDLAKINLDVIKPWITLKLNEILGMEDDVVVEYVFTQLEEKELNPKKMQINLTGFLNARRAREFMVFFHLLDHLLSF

SEQ ID NO: 124268 - protein, 158 aa, Heterodera glycines
MFYQTVCLLLLLSASNDVAVFGQEETTTTSTSSTSTSTTSSTSTSTTPTTTSSTSTSTTPSTTTSSTSTSTSTTPTTTSSTSTSTTPTTTSSTSTSTTPTTTSSTSTSATPTTTSSTSTSTTPTTTSSTSTSTIPTTTSSTSTSTTPTTTTSTSTSTT

SEQ ID NO: 124269 - protein, 167 aa, Heterodera glycines; identical to SEQ ID NO: 122730

SEQ ID NO: 124270 - protein, 131 aa, Heterodera glycines
FRCLQFIEIDAGFYRGTSSEQDIRFTDKERKLLRQMKFENVLETKVDLAKINLDVIKPWITLKLNEILGMEDDVVVEYVFTQLEEKELNPKKMQINLTGFLNARRAREFMAEMWQMFVEAQDSPEGIPTSL

SEQ ID NO: 124271 - protein, 186 aa, Heterodera glycines
  unsure (1)..(186): unsure at all Xaa locations
LVVLRFGNRFISRSWSRDDIASVTISFKENFGTQGRGGYFDKSGIIRDVMQNHLMQILTLVAMEKPATLSAEDFRNEKVKVLKVIKPVELDQTVLGQYIGNPLGKDDDSRKGYLDDPTVPRGSTTPTFATAVLFVHNERWEGVPFFLRCGKALNERKAEVRIQYKDVSGDIFPGXSLKRNELVIRV

SEQ ID NO: 124272 - protein, 126 aa, Heterodera glycines
MEVENVKLFNRWSYETIEVKDVSLQDYISVTQHPVYLPHTAGRYQVKRFRKSQCPIVERLACSLMMHGRNNGKKLMAVRIVKHAFEIINLLTDLNPIQVLVDAVQNTGPREDSTRIGSQGTVRRQA

SEQ ID NO: 124273 - protein, 134 aa, Heterodera glycines
MANPSINAKAAVLVDNPRVEFVQLDSLVVMKIVKHGDIEFYAGMSKIAGETCQGILTGLISVEDKRLEVTCDDSWSPEQTKLAGVNFANFFEELPIVVKNSHLMNVLLAELALSTKCQRAASIRLELGTKQSLE

SEQ ID NO: 124274 - protein, 141 aa, Heterodera glycines
MVEPKIPTTSDFNEENPVKSTPESHSLIKNGFFMSEEYGMTTKSVYTSQISQSVIKAGLYSKKNLGVHVSAAGSLENAIWNAIEMGCRSFALFVRNQRRWNAKPMDESVVERWNCAIKKTKFPLHQIVPHGSYLLNAGSPD

SEQ ID NO: 124275 - protein, 144 aa, Heterodera glycines
  unsure (1)..(144): unsure at all Xaa locations
SGKTAINMYINCPGGSVTAGLGIYDTMQHISAPVATWCXAFLIWSGGIQKKGIYFTPGIGQASSMGSLLLTVGAKGMRTSLPNARIMVHQPSGGAYGTAADIVIRAEEINRMRKRLNEIYAMHTGQTVETIDQALDRDRFMSAL

SEQ ID NO: 124276 - protein, 127 aa, Heterodera glycines; identical to SEQ ID NO: 122688

SEQ ID NO: 124277 - protein, 124 aa, Heterodera glycines
LKLNQTEKMFVKTFSNKTVVFNVDPTELSVEQLKALIAEEEEIAVPDQRLVFAGCQLVDGTLLRTYGVDADSTIHLDLRLLGGGKKRKKKQYTGPKKQKHVRKKVKLAVLKLYKVVRHYNWEKR

SEQ ID NO: 124278 - protein, 86 aa, Heterodera glycines; identical to SEQ ID NO: 123461

SEQ ID NO: 124279 - protein, 143 aa, Heterodera glycines
MGKPKGIRTARKLKKHRQEQRWNDKRYKKTNLGTRWKADPFGGACIAKGIVLEKIGVEAKQPNSAIRKCVRVQLIKNSKKITAFVPNDGCLNFIEENDEVLVSGFGRSGHAGGDIPGVRFKVVKVANTSLLALFRGKKERPRS

SEQ ID NO: 124280 - protein, 130 aa, Heterodera glycines
MEKEEEGEKSMNDLVTASSPTEVRPASPPASSSVSVPPSAAGVPPSLYVRLPQPDDPFYFCALAVGLAAVPPITFGISGPPLHVFVQADGVTDAPKVELEDKQLWEEFHKFGNEMIITTSGRRIFPSMSV

SEQ ID NO: 124281 - protein, 86 aa, Heterodera glycines
MEIVDNGEGTEKECSANADLNASQVDQSELTRMDGEETQLLHQPFMLNPEQTVNEYLEAHGANIADFLRIEMGQENTKTNDSSVHC

SEQ ID NO: 124282 - protein, 159 aa, Heterodera glycines
  unsure (1)..(159): unsure at all Xaa locations
YRDEGPFKLYIPLITFGPFSSVHRQIGPNLAIIFLRHFVPMFAVFAFVLFWHGLSPNYFCWVSLSATALIAERIGHSLPKWHTIWPYLXEATFVRLKAASMLFTVIPGIFGIFFFLGLNGVGAFVFRSLLLDGLSQILSLRIFSSNSAGFVLLHFFLLG

SEQ ID NO: 124283 - protein, 157 aa, Heterodera glycines
MFEAKFTNAALLKKIVEAIKELVSEAPFDCTENSMCLQAMDGSHVALISLKLDIGLFEVFRCDRTIALGLSMGELSKVLKCSKSEDTLMIRFEDSEQDMVTFTFEDTKGRKQDITLKLMDIDNEHLGIPDQKYAAVVEMPSTEFQKVCRDIASFSDS

SEQ ID NO: 124284 - protein, 137 aa, Heterodera glycines
MSDDNCCGSVGARSPTGSISSSGSADYDVALSPTQLLAMAIKKRRHLLEDKQRDYQRELLHSHLIQNLCKFLGEGRARVRRHRRSSSRRKLVRHRRWDDDTSGNGDERGQQVVPDDSRSPSSSPNPSGIVFESTVQS

SEQ ID NO: 124285 - protein, 96 aa, Heterodera glycines; identical to SEQ ID NO: 123449

SEQ ID NO: 124286 - protein, 253 aa, Heterodera glycines
MVALFFSKFVVVPSSSSLGVSSSSAILSLVSLLSPVALPHRRSFAVVNNVKIVDPMDVRKDNVSTKKKDDGVAAEVRRKKKVYALAEFLDRPENWGKFGALDPSDRPGRSWTVEELRLKSNSDLHKLWYVLLKERNMLLSMDHAYKVRLRNMPNPERIDRVAESMERLEAVVHERNDAFLHLETGDSASPPKRTVTSFMGFTYDEYATEHYLPAEATGEKQYEQPMLDDQAHLMQVLWREKEQLKKEVALMDE

SEQ ID NO: 124287 - protein, 89 aa, Heterodera glycines; identical to SEQ ID NO: 123438

SEQ ID NO: 124288 - protein, 104 aa, Heterodera glycines; identical to SEQ ID NO: 123435

SEQ ID NO: 124289 - protein, 185 aa, Heterodera glycines
GIDINHKYDRKVRRTAPKSEDPYLRVLVKLYRFLAKRVDTSKRFNAVVLKRLFMSKRNRPPLSIARIVRYVKKPGNEKELVVCVGSVTDDKRIYTVPAMTDCAVRFTDGARARIIAGGGEWITSKSGIAGPKGQKTLLVKEQQRRAKRKTFPTAPGRLAILQNVGFREGKNFNVDPAPKTSGYKN

SEQ ID NO: 124290 - protein, 88 aa, Heterodera glycines; identical to SEQ ID NO: 119696

SEQ ID NO: 124291 - protein, 149 aa, Heterodera glycines; identical to SEQ ID NO: 122641

SEQ ID NO: 124292 - protein, 240 aa, Heterodera glycines
  unsure (1)..(240): unsure at all Xaa locations
KLNIADPSSGSRKTFEIDDEKRYHVLIDKRISQEIPGDQVGYEFKGYVFRITGGNDKQGFPMKHGVLVNHRVRLLLSEGHSCXRPRRTGERKRNAIRGCIINHDSAGVSLVDFKKGEDDIGGVTDVTVPKLLGSQRASEIRKTFELTKEDDVLKYEIRREVPEKSGXPESNAPKIQRLVTPLTLQRKRAHHAEKRIRAVAXREAAASYKKLLADRAHELYAKKHAKRVQRRSSTHASSTA

SEQ ID NO: 124293 - protein, 178 aa, Heterodera glycines
TSGSPGCRNSARGFGYSSKPHYTPEPDILYELLGHCPLFADPDFAQFSQEFGLASLGASDEMVEKLATLYWFTVEFGICIQNGAKKAYGAGLLSSFGELEYALSGQPELAAFNPPETCQTKYPITSYQPKYFVAESFADAKNKLAYCICRARVLSIFNPPRSRSTWSTSIPRQFQVNY

SEQ ID NO: 124294 - protein, 237 aa, Heterodera glycines
MEMQASPGPDCGFTTPSRTSTNSKFIVDVPLSTKREKLLRGTPTRFRLPPVRRLMKSAPNIHHRFYLARDHIEPFAQIVSFKRSEDRPSLSNRYRPELEETYLQQCFVLQGRLGQGDFGEVVSVRSKDDGKLYAVKSSLDIYRNSADRREKLQEAWEERGRLYIQTELCSQSLDDMARERHEIPEPEIWYYLIDSLMALEHMHSHDIIHVDIKPSNIFVTSDGICKLGDFGLVFDLK

SEQ ID NO: 124295 - protein, 98 aa, Heterodera glycines
LCPPPKAYRRMTCSKIFTIEDLPKSFFGPLQSNEYWLTFSFTDGKDKKLGCARLWVDVCKYHLQDKQQKCLRDPNAFKNFINEISSQAEQIRQRTNSG

SEQ ID NO: 124296 - protein, 143 aa, Heterodera glycines
MQPFVHWSKCIFKRPFSNSSKLFSSSFSMGFNFEFTEEQKQLQAAVKKFTQDEIIPKASHYDKTMEFPWEVIKKAHANGFMNVDIPSDCGGLDLELVSNVLISEVIGYGCTGIGTAILGNDLAATPLVIGAKEEVKKKFLSRL

SEQ ID NO: 124297 - protein, 155 aa, Heterodera glycines
MVQYKLYSFDGRGLGESIRLLLHYVGQPFEDIRIKDMEEWEKTYKPKFFYGKVPVLEVDGKPLGQSATILRYLAEKFGLAGKDECEKAKANEIIDFQKDANTDLAPYLYVKMGFRQGDLDKLRGEVFEPGVKHILPLFEKLLKESGSGYMLKSGL

SEQ ID NO: 124298 - protein, 126 aa, Heterodera glycines
KDECEKAKANEIIDFQKDANTDLAPYLYVKMGFRQGDLDKLRAEVFEPGVKHILPLFEKLLKESGSGYMLKSGLSMVDFQVANFLYTFTKLEPETINAFPELIKYVDRVHALPQLQQYLKQRPQDR

SEQ ID NO: 124299 - protein, 134 aa, Heterodera glycines
MCDRLTQTLDLVNDLANHMCNSVGVLQASAGPCEFGTAPEELKNEPNCRLFAQQIARTAKDIEILIDSLPADEQSLSVEEHEKALLELDDERARAAKELEQAVEKAEKLTDQLGELLSRIARLQMESRPMAFST

SEQ ID NO: 124300 - protein, 156 aa, Heterodera glycines
NHLYYVKINNPQFCGLRYVGRISPANPVYLSFQCGNAVGIAIHETMHALGLQHEQLRVDRDLFININWANINPQNYDTFARSELVKYTSYGVRYDYGSIMHYASNIASKSAGLKTMTAKTNPGANDAQMGQRRGLSATDVEELRRMYCMPGCADAN

SEQ ID NO: 124301 - protein, 106 aa, Heterodera glycines; identical to SEQ ID NO: 123405

SEQ ID NO: 124302 - protein, 99 aa, Heterodera glycines
MWHGRISRGDDAPPRGCFRSIVGRPGHQGVMVGMGKKNPTWKTRPIQPGILNLNNPIETGSYTMGNKLKKIGPNLLKKKWVPPPRKPGLFKKAPVNPKG

SEQ ID NO: 124303 - protein, 131 aa, Heterodera glycines
PIKMCDEEVAALVVDNGSGMCKAGFAGDDAPRAVFPSIVGRPRHQGVMVGMGQKDSYVGDEAQSKRGILTLKYPIEHGIVTNWDDMEKIWHHTFYNELRVAPEEHPVLLTEAPLNPKANREKMTQIMFETF

SEQ ID NO: 124304 - protein, 148 aa, Heterodera glycines
MTIHSRKVVAYYYDGDVGNYYYGQGHPMKPHRIRMTHNLLLNYGLYRKMEVFRPKAASLEEMTKYHSDDYMCFLKSIKPDNIADFGRQMQRFNVGEDCPVFDGLFEFCQISSGGSIAAATKINKKHVDVAINWMGGLHHAKKSEASGF

SEQ ID NO: 124305 - protein, 112 aa, Heterodera glycines
  unsure (1)..(112): unsure at all Xaa locations
AALVGGHGSGMCKAGFAGDDAPRAGVSVICGRPRHQXVMVGMGQKDSYVEKKGNPSVVFLTLIYRMENGSVTNWDNLKKILDPPLLKQIXVSPPKEHPGVFSQSAPFTPKGP

SEQ ID NO: 124306 - protein, 99 aa, Heterodera glycines
  unsure (1)..(99): unsure at all Xaa locations
AALVVDNGSGMCKAGFAGDDAPRAVFRPLWAAPSSGVMVAWDKRLERGRQAQSKLVFYAEYPNEHGIXTNWENWKKMGTNLLQKLGVPPQETPGCSKGP

SEQ ID NO: 124307 - protein, 186 aa, Heterodera glycines
  unsure (1)..(186): unsure at all Xaa locations
EIKXXGKWXXNXVXVXEIXXVDYVXVKEKGXKYLXXXXGXXXXKXXXKGXCXVVEXLXXXMMMXGLNXXKKXMXVXIVKXXXEXIXLXXGEXXXXVLVNGVXXSGPXEDXKXIXXXXXVXXKEXDVXXLXXXNXGIWLXCXGFREXGFRXIKKXGEWFGDELMNXXKGXKNXXXIKKKEELEGVXK

SEQ ID NO: 124308 - protein, 123 aa, Heterodera glycines
TQSLVTDQAAVFFCRISLFLLLITHFPPKACFHKRRGEKCALKVLRDNARSRRELALHLSVFGHPHVVSIEDMFENSFDGFKCLLVGVEFMGGREVLTIFEQNGRLGYSEKCVGRIVSQIGSG

SEQ ID NO: 124309 - protein, 154 aa, Heterodera glycines
MLLSKIPPPFCIALRAASTNPPARGPSVKTFEIYRYNPEKPEQKPFLQKYDVDLNQCGPMVLDALIKIKNEMDPTLTFRRSCREGICGSCAMNIGGENTLACICNIEKKTKYSTKIYPLPHMYVVKDLVPDMTLFYEQYASVQPWLQKNKPTKL

SEQ ID NO: 124310 - protein, 150 aa, Heterodera glycines
MRFTIQLLQKSQRCYKLLFANYTKQVASVSPLLIHRQNLISFSAFRNFCSSIETKKEEIGRIKSQLAIIFTCKVCSTRQGPKQFSRSAYENGVVLIRCDHCRNHHIIADNLGWFSDLDGKKNIEEILASKGEAIKKGTAVLEMEVPAEEE

SEQ ID NO: 124311 - protein, 156 aa, Heterodera glycines
MSFGKECVDLFGTKDLYQILKLDRSKSNLSSAQIKKAYYRQSILWHPDRFASAQHDETTRELAKQKFQVIGRAYVILGDSEKRKAYDETGSLDDENEFYEGKDWSAVWRGVFKKVTPEEIEAYLAKFRGSQEEIDEVKEAYQKHKGNMDKIMQSVV

SEQ ID NO: 124312 - protein, 159 aa, Heterodera glycines
SWSSPRWRPHTTSGSPGLHVSGTRVRSCLEIGPLGGVFHLAMVLRDCLFENQNQQNFKDAAEAKYFGTISLDEATRKGCEQLRWFVVFSSITSGRGNAGQTNYGWFFSTMERIIEQRRADGFPGIAIQWGAIGDVGVILENMGDNNTVVGGTLPQRMPS

SEQ ID NO: 124313 - protein, 219 aa, Heterodera glycines
NYRRKILKTKIQGPDLNRTKLLHTFTCTFRFDVASHLKRTVNKGQSIRIKIDRFSEWTEQDQTDFCKHLLQRMCHHQHGQIDQFLGPMLQRDFIALLPTGLAENVLHLLDAKSLCASEFVSRRWSRVIVNGLLWRKHIERQVRNDALWAGLAIRRGWKKYFFCSKDQATRAISQSWRQPKNGEDALEFQHKFYRELYPKITADIRQIEQNWREGRHRLE

SEQ ID NO: 124314 - protein, 82 aa, Heterodera glycines
YQKSTLLRIRKLPFQRLVREIAQDFKTDLRFQSAAIGALHEASEAYLDGLFEDTNLCAIHAKRVTIMPKDIQLARPIRGERA

SEQ ID NO: 124315 - protein, 52 aa, Heterodera glycines
PRPESFHADDGERYYVGADVGQYLKYHRGTLYKRYPQLWKRMASVEGKQEEP

SEQ ID NO: 124316 - protein, 147 aa, Heterodera glycines
KNEKFLNIVTDIMQKVITKNSEQMTFFIGMNGHQKLIGLIANCRQEALLWRVTKLMDKIVQMDAERMVGAGLLEALQRHLDHPSQRLLRQVLSCVRSVSHVPTADRTVQPLLQKLLQLLGQFRTKRTNENHKFERAFCLLKERVTFA

SEQ ID NO: 124317 - protein, 113 aa, Heterodera glycines
YSCVGVFQHGKVEIIANDQGNRTTPSYVAFTDTERLIGDAANNFVAMNPSNTVFDAKRLIGRKFDDPAVQSDMKHWPFKVVQGEGARPKVMVEVKGEDKAFFPEEVSSMVLIK

SEQ ID NO: 124318 - protein, 223 aa, Heterodera glycines
MRSPSPTDNDKARSLNVYRRKLAEYKEIENRLKELRTKERESHKLFDKSENEIKSLQSVGQIVGEVLKQLTEEKFIVKATNGPRYVVGCRRTIDKEKLKQGTRVALDMTTLTIMRQLPREVDPLVYKMSHEDPGNVSYAEIGGLSEQIRELREVVELPLINPELFKRVGITPPKGCLLYGPPGTGKTLLARAVASQLNWNSLKVVSSAMVDKYIGESSRRIRE

SEQ ID NO: 124319 - protein, 143 aa, Heterodera glycines
LQLVDPPGCRISARGLCLTMPLHWTSVDTRNALLCAAVPSIGAFVGSTMAIKDQELVQFLKNQNFPSFARCCKYNYLLANTAVTIPFGYASYLVYKIGGGFDYTDTTVALGLYGATVLSGCFLVPMLKKQDTKALTANAVVLA

SEQ ID NO: 124320 - protein, 148 aa, Heterodera glycines; identical to SEQ ID NO: 122097

SEQ ID NO: 124321 - protein, 46 aa, Heterodera glycines
MEHYDRAITIFSPDGRLFQVDYAQEAVKKGSTAVAVKGKNCVVIGV

SEQ ID NO: 124322 - protein, 149 aa, Heterodera glycines
MSAERKKSVLFLFDVDGTLTASRQSITPSMLAFMHSVKSRVPVAVVGGSDLAKIFEQLGGTQQRDQCLALFDFVFAENGLTGFKGTEPMPSESISKQLGEAKCQELTNFCLRYMSNIELPLKRGNFVEHRNGMINVSPIGRSCSQSERD

SEQ ID NO: 124323 - protein, 192 aa, Heterodera glycines
VAQRFLPMKTPLDSSYDHLIESPKYFFHPSSVFRSPLLGATKGAKIGLWVDLTNSDNFYNEEEVLNNGSKFLKMKMVGHKQTPTPEQTTAFIEAIDRFITNNPDDVIVVHCTHGFNRTGFLISAYLYEKCDMSIEMAVREFAECRPNGIYKQYYLDDLRKRYGDEDEDEMTFPGRPLWENGPISDDEFTNNG

SEQ ID NO: 124324 - protein, 146 aa, Heterodera glycines; identical to SEQ ID NO: 122643

SEQ ID NO: 124325 - protein, 155 aa, Heterodera glycines
QKAISFTSITGEVRTEERQSRVDAFNRTNTGPKVMLLSLTAGGVGLNLIGGNHLFMIDLHWNPALELQASDRIHRLGQKKNVFIHKFVCASTIEQRVLQLQEKKNAMATSVLEGAAKKLGNLSKDDVMYLFELEKRPNNQQKAGQSQKPTTSSQM

SEQ ID NO: 124326 - protein, 201 aa, Heterodera glycines
  unsure (1)..(201): unsure at all Xaa locations
MTASLQQIRAQPGWTADKCKEQIEVAKSENRTFQRQTLQAHLVHLLNKEHKFNEAIQLAAQLVRELKKVDDKDLLVDVQLEESIGFYHLSNYTKARAELVSARTIANTKYTPPAMQARLDLQSGILHAADDRDFKTAYSYFFEAFQAFDSVNESALAQQALKYMLLSKVMLDQSDEVHSIMTXKTAQKYAKTETEAMHAIA

SEQ ID NO: 124327 - protein, 187 aa, Heterodera glycines
STLHKETETDISVGNYGSYGLVQSSEKREDVVFVEIEKINADFDGKEIWLRGRLHDSRGKGKNCFAKIRQRIHSVQAVLFVGADISKQFVKFVQNIPKESIVDVYGLVARTPQPVTACTQSDVEIKVHKFFIVSQAEPRLPLQLEDAVRPDNDQEELAVVKLDTRLDNRVLDLRTPTSQAIFRFAGG

SEQ ID NO: 124328 - protein, 135 aa, Heterodera glycines
MAQQQAITKKRKAVQDGIFKAELNNFLMKELAEDGYSGVEVRRAPSRTEVIIMATRTQSVLGERGNFIRELTALVQKRFGYSAGQIELYAEKVSSRGLCAVDQCESLRYKLVGGLAVRRACDGVRASIVDRNARG

SEQ ID NO: 124329 - protein, 79 aa, Heterodera glycines; identical to SEQ ID NO: 123316

SEQ ID NO: 124330 - protein, 147 aa, Heterodera glycines
FVNSLSSNTKTIHFLKKYLLLAHNYCTFSREWSEMEYERRAEDTLVALTEYLDTLPDRVDCESAFDVSYSMGVLTAHISPRIGTYVINKQTPNKQIWLSSPVSGPKRYDLSDKGRWVYKHDGVTLHELLEKEFRHIFKNDQISLHQS

SEQ ID NO: 124331 - protein, 93 aa, Heterodera glycines
MPRGTTKTAAQRRGGRRPREAEDHQLTDEDKDRRAKRRERNKQAAARCRRRREEKMQSLQEVSANNERKAKGRKSATFCHWFFEQVDELRKQN

SEQ ID NO: 124332 - protein, 132 aa, Heterodera glycines
MASGVKVDGECKQAYDELHNKHQFSFLIFRISDDDTTIIVEKKGEKNAPYSDFVEEMKKVVGDGKQCRYAAVDVHVEIQRQGTEGSSNLSKVVFVQYCPDEAPVRRRMLYASSVRALKATLGLESLLQIQAA

SEQ ID NO: 124333 - protein, 139 aa, Heterodera glycines
MDIVDDPLSEPCHVCGDKSTGTHYGTVSCNGCKGFFRRTILRSQKFTCRFNKQCVIDKNYRCACRFCRFQKCLSAGMKKEAIQFERDAIGSPLPLKRRRVADDGRADHSPSPTGGRTATDGIGTAVGRPVMAQGDGKGQ

SEQ ID NO: 124334 - protein, 131 aa, Heterodera glycines
FVREVYHTPRMQYVLSVLWSSDNKFVLSGSDDMNIRLWKANAAEKLGPLCPREKAAIEYSQKLRDTFQGHPEVRRIVKHRHVPKAIYSATREHRIIRESQRRKDKNRRKNTKSAATEPFTSERAKAIVSEG

SEQ ID NO: 124335 - protein, 164 aa, Heterodera glycines
MAEVGNSYRPPLSEEKQNELRAIAQKILQPGKGILAADESTGSIGKRFDTIGLENTENNRRRYRQLLFTTPSFGQNLSGVILFDETFRQSTDNGVRFVDVIKKAGAVAGIKVDTGVVPLAGTLDEGTTHGLDKLSDRCAEYEKGGWGSAPRRCGVGAARPEPRH

SEQ ID NO: 124336 - protein, 89 aa, Heterodera glycines
MTYDLETAERAAYAPFFGYIGAASAQIFTVFGAAYGTAKSAVGICSMGVMRPELIMKSVIPVIMAGIIGIYGLVAARALPGRATCRVGG

SEQ ID NO: 124337 - protein, 140 aa, Heterodera glycines
MSSMSAAGGAIAASVEQQPAVEPDRSTFYHKDLSIVRATAGQMQPKPLGTVDQIKFGHHFSDHMMEVDWSDTAGWNQPEISPLHSVQLHPGAKVLHYAIELFEGMKAYRGIDDRIRLFRPEMNIARMKRTAARAALPDFD

SEQ ID NO: 124338 - protein, 136 aa, Heterodera glycines
MSPSLSVANSNVSRPLGQPKVAGFKDKDKPESVRTSNIVAAKAVADAVRTSLGPRGMDKMIQSGNGEVTITNDGATILNQMSVVHPTAKMLVELSKAQDIEGGDGTTTVEGVGGASINPADKLLGEGGRPNTNSDA

SEQ ID NO: 124339 - protein, 145 aa, Heterodera glycines
DTVQVVAVNDPFIELDYMVYMFNYDSTHGRFKGKISTNAGNLVVEKEGKSAHTIKVFNLKDPAEIKWGEAGAEYVIESTGVFTTIEKASAHLKGGAKKVVISAPSADAPMYLMGVNEDKHDPANDDAISNASGTTNCLAPVAKLL

SEQ ID NO: 124340 - protein, 131 aa, Heterodera glycines
MPPKTSKKTDPKGGKAAPAKKKEGGGGGKAKKKKWSKGKVRDKLANMVLFDQATYDNLYQEIISRQLITPHVCLERVKVPPFLGKGGLKNLPQRGVSIWWEKPGSHLLYPGAPQREDLKKGEKGRFCFLFF

SEQ ID NO: 124341 - protein, 144 aa, Heterodera glycines
MVNPKGYRRGTRYMFARPVRKHGVEPLSTFYRVYKRGDIVTVKGNGAFQKGMPFKAYHGKTGRVFNVTKHALGVVVNKRVRHRIIPKRINVRVEHVKPSGSRLEFLQRCKANDLQKKQHKEGNAPFVALKRKPKEPRVAHLVKV

SEQ ID NO: 124342 - protein, 176 aa, Heterodera glycines
  unsure (1)..(176): unsure at all Xaa locations
GAYKYMQELWRKKQSEVMRYLLRIRCWQYHQMEAIHRCTRPTRPEKARRLGYKAKQGFLIYRVRIRRGGQKRQVTKGQAYGKPKTRGVNQLKNTRSLQAVAEARAGRRLGELRVFNTNWEGQDSTXRILEVIIRDPSDKTIRRNPDTPWITKPCEENFEEGGLSSAGRRGRGLGKG

SEQ ID NO: 124343 - protein, 161 aa, Heterodera glycines
SFCTTYHTEVSAFSSQRPPIRPYFGVACDITPDCLRCRAQNIRDHLTKLFGKNAKPGEMQVFKNTLSTNKQLWKIIYLLEIRPVTFPNGEPGQEDATHLEIMADGRCVISRQSLPNVDDFQLIDYSKQVSPRYLASPLMAKDVTKQDVDEDTGYHPENITL

SEQ ID NO: 124344 - protein, 134 aa, Heterodera glycines
MPLHWTSVDTRNALLCAAVPSIGAFVGSTMAIKDQKLLKFLKNQNFPSFARCCKYNYLLANTSVTILFGYASYLVYKIGGGVSCTDSKIALGLYGATLLSGCFLVPTLKKHDTKALTANAVVLAGLSVATSVAF

SEQ ID NO: 124345 - protein, 155 aa, Heterodera glycines
  unsure (1)..(155): unsure at all Xaa locations
RILLRAIRLIEDLMTPRQDMTTRPDARIYICNALPYLVSTAIELLDLAEQQDEEGANVDLDAHXTKCAVIRTSTRATYFLPVVGLVDPEEMKPSDLVGVNKDSYLILEKLPPEYDSRVKAMEVDERPKETYSYIGGCDSQIIQLVEAIVLPMDKK

SEQ ID NO: 124346 - protein, 74 aa, Heterodera glycines
LPPQRPTDKPLRLPLQDVYKIGGIGTVPVGRVETGVLKAGMVVTCAPQGISTDVGSVAMRHQGVPQGLGRQSGG

SEQ ID NO: 124347 - protein, 74 aa, Heterodera glycines
ESASNSDWARWFYYLGRIEALKGTDAETYKAAEKHFEVALRKAPQNGAGGFLHDLNKWVVLRRGVFFQIPERGI

SEQ ID NO: 124348 - protein, 86 aa, Heterodera glycines; identical to SEQ ID NO: 123261

SEQ ID NO: 124349 - protein, 118 aa, Heterodera glycines; identical to SEQ ID NO: 122573

SEQ ID NO: 124350 - protein, 191 aa, Heterodera glycines
SNKSGGFYTKKFLLDLPSGGTAAAVSKTAVAPIERVKLLLQVQDASIHITADKRYKGIIHVLVRVPKEQGFLSLWRGNLANVIRYFPTHALNFALKDTYNRVFTLGVHKEKQFVKFFTMNLASGGAASALRCVLGTSMDFAQTPLGNGCCKGPMPAQSKGWAGLPHEQLSDGTGPIGFYGGLIPLPPGIDI

SEQ ID NO: 124351 - protein, 162 aa, Heterodera glycines
VHLDNERVLKALYHLLQGFSASPPNIFVFCGPFLGIQRAHSYMEQAANAFRHFANILSEFSHAYHATEFIFVPSADDAPPLQIFPRPTLLQLIQKCFKEAKNMHFATNPCKLVFKDRHIVIFRDDVVEKVCRSAVFMPKNAMASRIPKLFCDTIWAQRHFSP

SEQ ID NO: 124352 - protein, 86 aa, Heterodera glycines
QIVPEVIRQQFLAADLEESVRLREEAKKGPFQNSNCWRNVLLFVLLHFGALVGLCHLFLLANWATIGWCIFPMVPPGGVWGIMGGG

SEQ ID NO: 124353 - protein, 59 aa, Heterodera glycines
MYHIYRQLLLHEHPATHLRLSCYCTNNRDCAHLTLLPLVLLMTKGRSFFNHSVNTFLIC

SEQ ID NO: 124354 - protein, 69 aa, Heterodera glycines
MHSVPMLWQNLYLFVGTTAVSYRLEFGVMPSLERAPIILRKLDVIVAPAFCHKPCFRCHGMRLFRKTVW

SEQ ID NO: 124355 - protein, 497 aa, Heterodera glycines
MDNEKQHQFLLLCFLEKHENDEDKFSAFEKLKEKFGSATTHRKQYFHRGSVLVDYSSEESFCHDDYPAFDPYGKGILDGNVSDESICFDDYAAFDEPIYSSREHDNDLGIVRAPEFSQPLFEKMPSLLEKFTNVMDLSESSTNKQPRDQRTQQFVAKKICVFCAQQLKVNDERGVLDCGHYFHAQKPYYDWVADGGFKRCPKSTCRKAAYKKCVKCRTGLGNGTTLHVRCDCKESAATLLCTSDQHRIQSCCVSAPLSPKLIEAERKYCERNGQHFKPVFANLLTDVIGNDPLFSSLSLVFYNACSEKHCANLRTVYAETIHILCSDPASAGVNLELCESKEKFLEKIEFGLCVKAPETLFDHATKMVQSNYSNKFCALILAIAFKRPIIWIEPSAKPGSIVRMSREDAKRLLPQWDDQSRPKTVSYYLPNGKIMESTLHHPKNKKPQRAIEELFWTFQMNIQKTTYTVQNPILIWHNGYGLACPIVLSRRTPPKII

SEQ ID NO: 124356 - protein, 48 aa, Heterodera glycines
MNTFPTSFEDPSKVFNKLFIGLSKHFFIKKHFKVFRLQNLFKKEIMHN

SEQ ID NO: 124357 - protein, 29 aa, Heterodera glycines
MDKKAENALSSTNIICLLDEEFGLCKTGG

SEQ ID NO: 124358 - protein, 65 aa, Heterodera glycines
MSALFRGQNGLTFTNAKANEVQRSAGENSNSFSYIYFFLFLKKARAIFLKFIPGCVLSFSAITGP

SEQ ID NO: 124359 - protein, 63 aa, Heterodera glycines
MVVNPHFPVVNAYLPVVFYKLNLCAGNAHFPVGNGHFPVVLYKCNLSAGNAHFPVGNAHFPVV

SEQ ID NO: 124360 - protein, 108 aa, Heterodera glycines
MEDELSLEVPAAVADADLSLEVPEEWSDDDLVFAPDALADADLSLEVPEEWSDDDLVFAPDPLADADLSLEVPEEWSDDDLVFAVPDALADADCFEAEVVFFEVLTEP

SEQ ID NO: 124361 - protein, 308 aa, Heterodera glycines
MDRRWICGDVWMDILPSFDHAQLGLKMALLSDRFDVLVDKHFDGKSELTIWRRIRIRKDKGPKAKLYIDHSVLTFIRSNKPIWDRMGTKFEFFAKSIRQLGFTSGDAFDNLRRLISPTILTGLDQLNSIDSNELFPDGIADDGPNATAGQALVKWLHTPSKNGQPKRLYRNNYFGPQNLEWVNNFKETFISATTSVSYNIQLYFHVNTIPTEPFELVNKRTNEKLTLKQEIDEFDVNVYNWLLQRCPIGETARVPAIKWGDSLNPSANLNSIRFDLWSFDKSIEPLSPPTEEEKEEEEADKSNGNVVC

SEQ ID NO: 124362 - protein, 96 aa, Heterodera glycines
MNRRWICADVWMDILPSFDHAQLGLKMALLSDRFDVLVDKHFDGKSELTIWRAIEIRKDKGPKAKLSVWTDDKFVDFPMPDHSLPNKIRFKDLQIQ

SEQ ID NO: 124363 - protein, 335 aa, Heterodera glycines
MPIESFELVNKRTKEKLTLKQEIEALSNGIIYNWLLKRCPIGETATVPAIKWKDSVNPSANLNNVTFDLWSFDKSIGYIDHSVLTFIRVNKQIWDRSGTNLELSISNEQPIWDVFAHEIWPIFAANIRQLGFTSGDAFDNLRRLISPTILTGLDQLNSIDSNELFPDGIADDGPNATAGQALVKWLHTPSKNGQPKRLYRNNYFGPQNLEWVNNFKEVATTSVSYNIQLYFHVNTIPTEPFELVNKRTNEKLTLKQEIDEFDVNVYNWLLQRCPIGETARVPAIKWGDSLNPSANLNSIRFDLWSFDKSIEPLSPPTEEEKEEEEADKSNGNVVC

SEQ ID NO: 124364 - protein, 339 aa, Heterodera glycines
MDRRWICGDVWMDILPSFDHAQLGLKMALLSDRFDVLVDKHFDGKSELTIWRRIKISETVCGDRWQICGISIAGPFAAKQNPFSFPSDSVNQKLYRNQLICYIDHSVLTFIRSNKPIWDRMGTKFEFFAKSIRHLGFHDADALNNLRSRISPTILTDLDQLISIDSGALLRDGIADDGQMQLLAKLWSNGFTLRAKMANRSDCIAIIILVHRISNGSTTSKSATTSVSYNIQLYFHVNTIPTEPFELVNKRTNEKLTLKQEIDEFDVNVYNWLLQRCPIGETARVPAIKWGDSLNPSANLNSIRFDLWSFDKSIEPLSPPTEEEKEEEEADKSNGNVVC

SEQ ID NO: 124365 - protein, 107 aa, Heterodera glycines
MEDELSLEVPAAVADADLSLEVPEEWSDDDLVFAPDALADADLSLEVPEEWSDDDLVFAPDALADADLSLEVPEEWSDDDLVFAPDPLADADCFEAEVVFFEVLTEP

SEQ ID NO: 124366 - protein, 260 aa, Heterodera glycines
MDFADIAEEDDGSEEFEISSIMLYDHCACMLCGRIRFFYLIDYATPHVVTKWGGSYLKDENVLTHAGFCLGRLLTFVNAFAMDGNRLNAQKARQVVFAKNGRGNEDFSLFGIIDGQRVDVNRLFATPVATPDPTPVPSPVVEVEVETTVVVSMDEEDTNEQQQHQQQQLTHCAPATQHQQPPPMLSAAVQQAISTLQMRMPPLPVFPPFAMPLVLPPLQFAFQPHLQHQQQQQQQQQFAPPALQIVPLDDAPAPLPLCDV

SEQ ID NO: 124367 - protein, 1405 aa, Heterodera glycines
MSLEDHNYCGELGRNEETPTKRRKRNDDDREQKFQKNCIRTLSADKQYNQKFKVQSVKSTFVIENLPANPESMLRALFAHCMSTALDESQQNGITPDQLGATISSDLLNPSIWIPIRRISDNTADSIMNRFLEVAQSKSREGSLWGSPFTVTITTLDVAQLPHRQQVRGSGKRTANSVQHIIKESALLRINNNDDAYCLFYALETSRKYHIKEMSRQTFSKYINRQNGRRLEDVFGLMSSANIRTDLREYDAVVYVPIVVDYWNRKYATANQRFKVFIFGATGSYRPKFQYGPDNYNVEIPLYHHNGHFDGIRSGVGKAVFGRDYYCFSCECPYDNANDHSLQCKAKCINCGRIGVGRPCRADDNNDNYYRECTACGKDFMSQDCFSHHLSSNVCRQFKKCKQCGVVWNVKQNRRKGRSGHVCGEKFCYTCKCYHKPERGCFIQQLKARRPTKYRLIAFDCETTQNTRIEGDRRLHSVNFISCYVVCTKCINENLWRNSLQAPCGICGRQRTVTFSHRAYERTQTDAQFITPCPMAAFAQWLLSEFDPRYPTMLFAHFGGRFDNIMLFRQFFLNGFCPQMIRRGNKLYEMKIARGEKNPEIIVRDSWNLMPVPLGALPGAFGLNVQDKEFFPHLANVEANYGLILQSLPPKADYLYGGMTPDRQRRFDQWYAEHHHQQFDLCEQLAAYCTNDTRILIEALVAFRTEFLTISDPLERHGCLDDDNDDEDEEEEVDDDNAFEVIGGGIDITWEPMTIASASMRHFRLNHLKRDQLAIVPECGYDTTNTQSLVALKFMDWYAKKNGVSIQTAHSPGGEKKIGQYTVDGYIAATDTVIEVNGCHWHAHDHPRHRFQPQTVMANGKTAQRIREDDARRMAFITSQVQQVLVFWECEINAEKRNNDEMKRAFAQYKDSGPIRLKDCYHGGRVGPQRLHYEVPEGWRMKYYDVRSLYPHTNAVTAYPVGHPTRVNIIGEAEQAVDWRRADQVPVRGILKVFVVPPHHVDVPVLPVKFDQRLLFPLCRTCALQHPHGAVNEDYECTHREDDERGWVSTVTSIELEEALRNGYRCTAYYRSVEWDDTRWSDRVFRGYVAEFMAMKTHASGFPDEIGTTEEDQQQFIEECEDKFGIRIEREKMVHNKAKRTIAKLCNNSLWGRFSLRNGLSKTIVTDSPAELRALLDNPAVEVSSVDQLTDECVLVTYAAGNEWVEEHECSNIVLSLWTTSVARLHLLRLMQTVARAPNSVLIYTDTDSVCFAHREADGCPLETGPHLGDLSDEWPDHELVEFVSGGCKQYALRMRHRQSGEEKTVLKVRGITLSADACQLLHFDTFKRSVLRYAMCHSNEDDEEGDDDDDDICSILIEYPNFLRPNIKDGTVISVKLSKRYRPIVTKGVVGMNAIVHDFGFIKA

SEQ ID NO: 124368 - protein, 141 aa, Heterodera glycines
MQWIKFNCTLCPIGLHCFYPRKYAKPVLCAHPSVRNITDFLSTGQLDEAATTTTTTTALPTTAEVSAAAAECAPPPAHLTAWIAVCTALVALLVIAEAAGQRRADGTDEEPVYDEVPLDTVEQRRDEENGEEDEEDDDSDF

SEQ ID NO: 124369 - protein, 191 aa, Heterodera glycines
MVTKEGITLWCTRIEKAQFVPFDVVYELPGHCFFRVKNKARVFSVPYSELSSSDRCAQPLPPPPPPPMTTAKHQRTPDDEEEKNLRRKAKVALDLVEAGLAADAMMQDGTRWKKAKTAINVLANLLLAESLTDVSPTFEQQQQQQLSSKEEEKREECTNNSSAAATTESAPDGDVMDDFVNSIQAATSNMQ

SEQ ID NO: 124370 - protein, 131 aa, Heterodera glycines
MPDHELVEFVSGGCKQYALRMRHRQSGEEKTVLKVRGITLSADACQLLHFDTFKRSVLRYAMCHSNEDDEEGDDDDDDICSILIEYPNFLRPNIKDGTVISVKLSKRYRPIVTKGVVGMNAIVHDFGFIKA

SEQ ID NO: 124371 - protein, 146 aa, Heterodera glycines
MPEESNNNSTNYNNNNISNINNNNENAQLWKLVRKKYILTFNLCYGCSQKLFESTKNNNNNISNNNNYAFETDQFGGVKVQFRMCKGCVWLNMKLSDLNSAPKSGNNHMKTTRNFPNTNNATYSTDNNFGSFFNNTNPQNNANEWI

SEQ ID NO: 124372 - protein, 215 aa, Heterodera glycines
MPLQQHYEHQPWELDPPMPEQHLEIGPQLPDAWELVPYQPPPQWAQVVHVEQQQQQQQHHQQQQQQQQGAWDEGWEEQLSPNALAQIQDEADGLRQDLTFWLDEGTAGIPDQQQQQHPMQGWETPRTHFERPVPQRTPSPSGDSPAALIRELNFSDQCLLCMGEHGLDCEVTVRGNNCGCVTICDTCCENGWWARSRGTMCALSVSAARRAESTT

SEQ ID NO: 124373 - protein, 88 aa, Heterodera glycines
MSAARRNRQPARAPTPLILPAMLAGVSLRPTGVNLTVDRAAGQRRADGAIEEGEEPVYDEVPLDSDIVVEMRDEENGEEDEEDDDSDF

SEQ ID NO: 124374 - protein, 47 aa, Heterodera glycines
MCPDQPLHPWRVPFSAGWHNCHYTSQVPSQLATPKVGLSSPPQKFGV

SEQ ID NO: 124375 - protein, 620 aa, Heterodera glycines
NWERRDLAIVWLRPNQFTRDGQQPPWSVFNNPQPTDIEQGRLLGNCWLLSALAVISLLGNCWLLSALAVISQRPDILEKLFITKEYNHRGVYEVRLCIDGIWRRIIVDDFFPCHRSYEVRLCIDGIWRRIIVDDFFPCHRSTKRQIFAVGRRSQLWVSLIEKALAKYNGNYAILKSGLISEGINKFSGFGGYYMPFFRIFKSDSDFDSDSDFDIVWAKLLSARQLFFLMSCSCGAGERIIEERIIEEAEYRQVGLSPEHAYSLLDVRHSDGHRVILLRNPWGVNFVWRGVILLRNPWGVNFVWRGEFSSEWLGWTHQLRRELAMGEAAGPGTFWMPLQQFAFYFDSVEIAQLRVGWTATRYLMDIGWDQQNSMIRPIIDERTELCATLMIRPIIDERTELCATLFQQNARTTVDQVDIMLLLHKQEDGTTGELICRSPRRITGELICRSPRRITPSVRIEDTFLPPGEYLLCAHSFSKLKTNDSGTIVIHSSREIFTMKLRTTTLDDLRQSMCSLLLKEGVLQNVCFFSEFITHVLHDDAGLAYMVDNHSRDNYLKVHSDCQNSTNVLSTSSSLLAFDSIPPLHRQVLPSLSLSSQYLVLPGTPNYCLWTMISVGYLPNW

SEQ ID NO: 124376 - protein, 127 aa, Heterodera glycines
MISVGSLAQLERRDLAIIWLRPNQFTRDGQQPPWSVFNNPQPTDIEQGFSTLTVQPTLFIDLEFLSDSDFDIVWAKLLSARQLFFLMTCSCGAGERIIEEAEYRQVGLSPEHAYSLLDVRQTSDGHR

SEQ ID NO: 124377 - protein, 72 aa, Heterodera glycines
LYFPFHSLSYCLSPRPLTSPINMSPFPSLRAFSHSFHHFIILFYYYLFPAVLLLIYLFNKLFIYLLDNICFG

SEQ ID NO: 124378 - protein, 610 aa, Heterodera glycines
AVLKASAEQNNSSAALATSIDARLSTFEYDPELGHTFDVWLKRYGQIIAQDGHALSDQSKVQLLIGKLGEAEYKRYCDSIAPKTQNDFNWDETTAKLKKLFGETRSLFLRRFDCFQIRQEAQQDVPSLIAQINSSCENADLSLSKEELKCMILIIALRDEFTDLRQKCLQRLEDSRTSGRSTSLQELGEECRKYQILKESALSLGSNPCSTSAIRAKPQQIRDKQKSKSRPQQSQKGHFQPNNSTAIEKEVDLPDQPCYSCGGKNHWQKDCWFKNSTCEKCGRIGHIAKRCKNGTETRRVRAVATNSGNDMHIHTVLLQPTCKAIEGSSNKWWRIVTEINGMENPMNVDTAAQITVITTDSWQKLGKPKLGKTTIAVKNCNEKAFAIKGKFNCQVSYNGRTAKLIAYVSDEIHQDLLGMPWIEELEIIPKELMFPNSSQITNSVPMKHQKMPAVNFKNFGKFQQKHQNMERQFNDKYGAKPITFQNGEPVFIWNLKGNKANWLPATIIERVGNSPTYRVDVQTLRRAVHRHANQIRRRFPMEMETSQIGQANGNILAGNQPNRTPIKEIEKAKSPIGQNQNAPRRSTRAKRAPQQLNMDPSKRKYDVFRP

SEQ ID NO: 124379 - protein, 91 aa, Heterodera glycines
MASATGGKVTFKITLTSDPKLPFKVLSVPENAPFTAVLKFAAEEFRVDPSTSAIITDEGVGVNPAQKASDIFMKYGSELRLIPRDRVGQGE

SEQ ID NO: 124380 - protein, 463 aa, Heterodera glycines
MLSRMLSSAVAVPRMCESNKKLLRKGATFVGLLRGMSSSAFTATVAPPHRLMRSLHINEKKLFGPGPSIMPALVQEGLVHPLLGHMHPELFEIMDDVKSGIKYIMDDVKSGIKYIFQTENALSFAVSGTGHAGMECAILNLLEPGQTILVVQNGVWGLRAANLAERLGIKVHRLVVPEGEVINDDFAEAVDNYRPQAVDNYRPQVAFVCHGESSTGVVHPLERFGDICNAYDVLFLVDDVLFLVDTVASICGAPFHADALKVDCVYAATQVDCVYAATQKVLNCPPGLAPISFSEKALEKITKRKTEKITKRKTRVPSFYFDALELGNYWGCFDEPRRYHHTAPISLVYYHHTAPISLVYALREGLSAVAQEGIGHMVNRHKINAKLLYDAFDQLGLELFVQKENNRLPCLTTVRVPEGVDWKNNRLPCLTTVRVPEGVDWKAVQDKLMAQGLKFRAQGLKFR

SEQ ID NO: 124381 - protein, 30 aa, Heterodera glycines
DYFSKHLVDWGIIGDCGINRDWAIIREYTV

SEQ ID NO: 124382 - protein, 58 aa, Heterodera glycines
MVHKALNSLDQPEQKQFIERCLELDPARRANVTELLDRLGPPEPDPDDTLAQHPQHED

SEQ ID NO: 124383 - protein, 229 aa, Heterodera glycines
MEFWGKKNQENGIMRPALIVSSFPNDFGMEIANVVYVAPDEILYPVPRSLYTLDPLQHAYMSKSQCNKMTTVQSEDSVVTVQVDSKASKVTCMMKGGTGLFGLDKRGSDWMMDVDVAVSDEQPRQVFVCSPFLPGTLMKTLINLNDSKQGPCVKKFIENIGNQQGKQPGSIVTCVVSESNGSDKQQKQKDSVMACHLTDDSLRPVSEILSAGSFKQIMKVVNGDSGQNA

SEQ ID NO: 124384 - protein, 198 aa, Heterodera glycines
MKLFPILFLIVIFNIKFDQIGAEKKKLQQKSFDEIFGEKWEEKEEKKLNELKKREIIGKFYKIKEKIKEKGRKYSTKEWNKIEEKIAKKLGTNRKYIYEWIKEFGLQKQIHKNYKSTTDEEKIVIVQKFIKMTNEYKQKRKYSHKEWKQNYAEICKEIGVSRRTIYKWKKQFGIRGKITDEEKMGKMKKQFGEEMFEN

SEQ ID NO: 124385 - protein, 147 aa, Heterodera glycines
MRSVSFCANNHQQQQQQMLPHFDITGPEMLQFVHSSNRCPDERLNGQDERHLAEKCRNKNIRNGTNIGNDEHFGDADAGMSADAVERRGWCRFAASFGLLARLRHAPTNFHREIRHLDLAQSREVHKVTVIYVAKDQPVNGGEIKGL

SEQ ID NO: 124386 - protein, 165 aa, Heterodera glycines
MNGSIRWPTPNRMTVKHLRIANELKWHLCAVFARHSISLHWSNLADKFVATGDDFFEGFVIRLSGQWPLPGFPVTQWNSLPPSTTATATTAPHDHQQQQQQQANVGDGVGGDQLQQQQMVTFMETEGAVLNLDKDSNSLWSRTHVGRHCYRMQPICMEEETESPV

SEQ ID NO: 124387 - protein, 37 aa, Heterodera glycines
MAIIKNWCPDEKNVKILAAMNFGLKNTLITNLSSDYA

SEQ ID NO: 124388 - protein, 153 aa, Heterodera glycines
WESLDGLARLPDLAKLILRGAPLPGARGVDSREMIIAKLPQITDLDRCDVSPVARRSAELLFLSRFGADPIPAEHRATIARLATIYSISNDGDPSSAVSVPRPAQPFSTIHSKKVRLEHAGRSMERSLSLALPIHKVVGLGARLFGFAPDTLT

SEQ ID NO: 124389 - protein, 44 aa, Heterodera glycines
YIKCCLSSLNELIASFDCLFSLDNAFCSKFACLSQVIFLLNDSL

SEQ ID NO: 124390 - protein, 596 aa, Heterodera glycines
MANKFVLVPQEIYRGLTSATDTGDINLDAVRHDLTRARAERTNPSAKNVSYNQQLRRYLQMRREVADKPARVELVKGLSVLMRRGGADDEAEVVDTPPRPPRPPPPPPPPGQHPPRRPPSPPGPGPSPPGSPPPRPQRPPRPPRAAAPPSRRDGRVEEWRKKRNDIQQRQPVVRDLLAEAAAAPLPESDEEDDYMLESGFALPAPSQYYGDLPVLPDNADAIEEMDTAQHRIATRRKLHDGDDDLHRKKYRAYYPPPPSRPPPSRPQPKIETPRPPPRPSLKKEPQPLLDPRPSTSQQVDRKPKREPKFDLDPRPSTSRQAGYNPPAEPKHEQKPSKKPPPRATPYHIPKREPKIEETVPRHQQPPPAAPQVSSVPPPRRGTKRRHPPENGDESAEKMEMINTTLDKLYNDPSSPAAFAGVSALWKEARKKLKQLRKKDVQHYLEGHRTYTLMRPRRVRFPRAKTVAAGFMTDVQVDLADFQALSRHNRGHRYLLVAVDVLSKRLFVVPLKNKKAEEMLDAFKELVKQMPMVPHRIFSDKGTEFKNKLLKEFFEEREIEKHEPVHSSVKASVAERAIRNVKQRLYRYFAERETLNW

SEQ ID NO: 124391 - protein, 114 aa, Heterodera glycines
MSCTFCCFFGACTFFSSEPDLITSLILTIGTVFLTITTLTPPILYCICVIYMVFGIVKKAFFSSTANYPPPASNNAIDHLLRERTRLYLICLLGTLPPFILFLLPIVQQMLAIQ

SEQ ID NO: 124392 - protein, 89 aa, Heterodera glycines
MKKCLWIVLFIYRDESFALTTFDFASNCPYKRSIFWLTIAFPFAVSSLPFHSFLLQLTSAENTRRRLLFLCVPLFCVVFVRCRAETTPS

SEQ ID NO: 124393 - protein, 83 aa, Heterodera glycines
MPKFNERLSRDWSITKAEVPLICFFPIRPLSMALTQSSNSPESVTSRRLCPFSNLSQSQMTTKRRRAMKRYSLNFTHSASTPR

SEQ ID NO: 124394 - protein, 268 aa, Heterodera glycines
MVDKHERRIHELLITDFVRWWTLNNTDGGGGGGGGHNGGGENSTATHSLRSNFVGFLPEQKTDFFIAADHVYLIWRRRVYKFRVGHYFNDPSSQLQFLTNSSDIRFNFLIFERDDDAKLEDSTDRRNSRAAAEASAGLTPSSQMMNSIERLLLALMYLFDVAVICIAVCVIRLLRRTTSNSGPDNTSQARSNDVVHTTEMMALTSGEYGLIHSPGEYYPNPLAEFVCVHIANEDHADQPVLVNGTLDLIEGVELYSTCYPRTETGTID

SEQ ID NO: 124395 - protein, 872 aa, Heterodera glycines
MAHIRGPHANWRDGHWLWDWRTLAQLYTITFNNRMEAQKVQYMKQLQGRRRLVLPGSIINWLSALRDNKGYKGDIGRVYMTDEHFRGSRQYYQREYANCMTICREVGKPDLLITLTMDPECDELEEMLPTDPDGHRQQWYDRPDVICRLFVDKFKELRHDLTVKEVMGPVRGWFYSLEHQKRGLPHVHFALILDWDRIRSGGTINTPEDYIEQYISAEIPDNPSGRSSEVLLKRELYKTLRMKHIHTCSARRCLVDGKCLKRFPKPFSYDNVYNEHAYPRYRRRPPAPDARAAARHPEQYGRDFQYTDKSGKTIRVDNRYVVPFNPFLTSKYKAHINTEFVAGEGCTKYLCKYVMKGADMAFIQVQGGPDVRQKVDYDEFHQIRLARYITSMEAILSLWGTKLVGRSHEVDELDVHGPSGHRIAVEQGFDDEEENLNAICEAAQAEEERRLRGEERVTQLTAYFAFNEANPPIGLSYANCYKKLRYDRAKKQWKLYVDAPVPKFCRLKTVSPSNRELLAIRLLLLVVLDPKGWESLRTVNGNVFPTFVEAAQERGLLTDEDLWMKTIDDAFRMKKSIRQRIRWLAVFFATANLASPCTILDKVLANADKWLVNTSVARASAEEQKQYVLNAMEWFLLANGITPDSEPREDGTYESACEHIGLPRPQGLVLTKDIFMKLAFFRDDALNEHLHVDFLPDGQRRGEMRQDYLQKYISGPKPNEEQQQLIDAVQTALEHVQQVIDGQCPDFSPDIQRLFMVTGEGGAGKTFTYNKIIARAKSAGINFLPMASTGIAAELLYEGQTVHKRLCRLKQVDSSTSPNVDNESNFANMLRNIHGILIDEISMQHRDVLEFVDRLLRSVATQQFKDLPFAGK

SEQ ID NO: 124396 - protein, 726 aa, Heterodera glycines
QAVPLEKQHQTPQELQAAGDPTGESEPLRTPTRNEEQHAFLLDFFKRSPEQKQEAFKALKQRFGKSAVSPQAYGRWWKNFGLGQIILNQCGNTPSSKQSRSTRRIQKSNKCVFCTIPLNDADGYAMLNCGHSCHFDQPFAEWYTDVPNKKCKFRWCKKTTFLKCGDCRQKIGMGIYETGCYCTDASAPVYHADELEARLKASGGKCPDCGTQHPGFCILCQRLFKLQANGLRQSKVFLPCCDSYTHFECCQICGVENAAPLRAVPKPRGIIGARPLKNAKAASPTESIPSTVDTTTAAASDVSANESQALTDSHLMPPPSLAPRRSTRISRQASIASNRPSPVAPKPIAPVTHCCGTIRSAHFGYGCGSKKANHLPSYYNSLRDQAQHNCPHCNALLLPSEAIGPTAYSKCCAKGRVNLADRYKALRARPAELDNILQNPAGQYKGWRDSLFRNVLRYNNNLAFGNIKITRSEERIDHHRIVKCNNMINYMLWDFNPPDGGKPHLHGQLFTIPPADARTRLGEISREHSLDEELMEALYSVILANHKLAVVYETAAETYRQLPEEDRVQFRMLLVDTNQRGTERKLNANDAPAPDNLHVDDRANLKHIHPGRLEAETEAGSRLLAQIFLDCGANIMPPSVYDVVLTGRERTKIVYMKWWNRNIDPANFPLIFSFEQFGYEYGTKLALREHERFDSTYKQIRDKNNNVLLDAAEDLGEEEEFLGSEL

SEQ ID NO: 124397 - protein, 284 aa, Heterodera glycines
MSEHIDTCALARLRHLIKEMKKFAAGAKDNLAHSRGVGIAVQVPKPWPVAEEDGWTGVTIPGCEEKSPVAEPAIAELRKPKKQKLPKVVTDKRQPWLCNNDGRPIPGLAPVAKQLPVAPLRKLPTDMPRPKNVYHTIVKGKAVASSKLLELSKIDKPRVPIGYAPIARAEKPALQNRPVLNAVPKPVLREPSEEMFVVVGKAIPKSAMEKARKMPDVVKKVPPTVRHRRTVWNSSSVSFVVPCFYVLQQYIKATTSAVASSAPALKSSSMSYAQAVIIILSFCK

SEQ ID NO: 124398 - protein, 104 aa, Heterodera glycines
MRIAHLFLASNDFRALPIRCPPQILFFIFELLVSLMQFNLLIAMMTRTYEMIYATEKEWKRQWAQVILMIELSIHPKKRLMALLGYSRPIGTNKRKRAFVVSRK

SEQ ID NO: 124399 - protein, 48 aa, Heterodera glycines
MAVVDTNINNSGPSVAFFAPSNLLTNLVTTAIYLAIGIAVKAKTGDDI

SEQ ID NO: 124400 - protein, 115 aa, Heterodera glycines
SSNSSVGGTSASADDRRKTSRRNRTAFSELQLEELEKCFQSSHYPDVNTRDQLARRINLPEAKIQVWFKNRRAKHRKFLRNQPADDGEEEASATANNNNINNNNGQQEAESTTVI

SEQ ID NO: 124401 - protein, 407 aa, Heterodera glycines
TGKSFVQSAIFHFLTWLKKVTNMAFSALAATLLKNGRTVHNRVITIRFKYKFSSSIENNSKEAKEVRETDIFIFDEAPMAPKFVIEIIDKKLREIHKNNIIFGGKIMILSGDFRQCLPIKNKATKTEILDLTLQKSELWVNFKIFHLRKNMRTENESQNFANQILEIGNGKGNDENGICLPKICDVEDNDLVDEIFGEIIKTNDYSKLCSHCILAPYNREINIYNDQIKKFPGEEYVFRSIDDAESKGAPILPEVLNKLQTNSLPDHELKLKINSVTKLIRNINVNMGLCNGTRVQILDIEKNVLRVMILTGDRIGEIDFIPRITLIEDKKLPYVLKRHQYPLKLAFCMTINSAQGQTFEKIGIDLTRDVFAHGQLYVALSRTRSWERIKIKYSSENKEKTVKNIVW

SEQ ID NO: 124402 - protein, 63 aa, Heterodera glycines
MALTRKWPRENGPHAKTATRKRPRPWNGSKRVSSVWPVPSSKVMKTCFRAHKEHLDLSNDSKD

SEQ ID NO: 124403 - protein, 16 aa, Heterodera glycines
MSKYPWLKHNVAVNVY

SEQ ID NO: 124404 - protein, 109 aa, Heterodera glycines
IGFVVASYGETPATAGAASAAQDSQLTCETVVKGPTQLTCEPMVKGPTSSAHNDIANSEARPKATTTSSDFERMKGELLELFSNELQNLKRELAQTIRDEVAKLSADRR

SEQ ID NO: 124405 - protein, 261 aa, Heterodera glycines
MKLDVKIYQHFIKIREVNKKSKVHPNFDENLQSSGLTSINGQCKKDFSGLSNRKKSGSSSSSIVAIDNENSAQKNGCETSLRETDNGKRSFNSILVNNGSIPATNSSLSPPEGTVTKNKRICAGNHCSNTPKTVTSNFLGHRKQMGNCVIGNASVNTGDAGPIYERGLKRHISDDNVNEFGAPNKMRALHTPDNSKNKCSTELTTKDNLQCDFIQQPNNGETPIFQNFFPSVNRGCFEALSTNPASISTNSESLTRTFFEN

SEQ ID NO: 124406 - protein, 168 aa, Heterodera glycines
SNIFSAILDYKLLGSMEIVEKRRKVISDHFSADFAAASANCAHLSFTDLNLSRPLLKSISEAGFQNPTPSISEAGFQNPTPIQTACIPVALAGRDICASSATGTGKTAAFMLPILERLLFRSRRSRRTSVTRVLVLVPTRELAIQVFQVSRQLAKYTQVEICLAAGRI

SEQ ID NO: 124407 - protein, 352 aa, Heterodera glycines
YLATVTTERERTGSLMILTIPQAFSMFFGPILGSKIAIYTTLRFSQIVNGCVMATLLIPVILIFLPTTHSVPRLATARLRPQDYWPMTTKNGALREGLILRGLLIVQDYWPMTTKNGALREGLILRGLLIVAYVCYELIARNFVLRSYMHATSDNAEVMVTMGVSLVLTQFIILPVSLVLTQFIILPFLQRHVSPKTLLQLACFAQLCAYAGITLTNSLYQYLLITAIHTGAYAIAYAESSTQITSAVQAVQPSDLGKATGLASMVQWTAHFLVPLYTSHLVNYWHYTYAFYTSALIMLITIGYISVYAKQTNARLRTSALIMLITIGYISVYAKQTNARLRTLLPSLITTT

SEQ ID NO: 124408 - protein, 46 aa, Heterodera glycines
GLDLKAQEAALRLGLDIVIATPGRLIDHLHNSPNFSLANIEANLSC

SEQ ID NO: 124409 - protein, 248 aa, Heterodera glycines
MNMPATLQHYIHRVGRTARAGKAGRSVSLIGEHDRKLMKEITKVNQISNSFQLMQRKIEPDVIEAYCKRIQEMEPSMKKLMEEEQMEKQLIMAENSIKKAEKQIKSLGGDGTQPKLYSRKWIGGAEKGQNATEKLRIRSKGKRREAKKRLTEALPKRPTAEFASKQHQKSGKKKSAFFTTEIASVSQRAIKRVRNGISSPAITAIVATWGLNGIAEMTRLTIILPPPNFLNNCLPNTVICYNKQMQFI

SEQ ID NO: 124410 - protein, 82 aa, Heterodera glycines
QLLRKFGGGRMIVRRVISAIPFKPHVATIAVIAGIFAWMHGFKVLKRTVKEAFSKDTFVYHQEMEDFIQKISIEQQTKSKNC

SEQ ID NO: 124411 - protein, 176 aa, Heterodera glycines
GPFMRGTMPLRRTFYYLGQVGLKINKIKVFAIAFHNFPNVAQEGAKEFVFWHWAQLQFKNPHVQFVKLVDVCVTPFAQAFLGDDGREVVFDLECRTREQISEALIGTLGMTETVRKRMKMDSYKRENPAEFGCDCERQCICEMQCICEMQGQHPCTAILYAPKHLRGSWRWNHSTY

SEQ ID NO: 124412 - protein, 132 aa, Heterodera glycines
MGNSCLISESVRPINSSSNGFVTFFRQSSDSQLFVKRKLENKKQSPTEAFPKQKTQMSIALPEQKRSYNFLSSKDRELIFLCWRNDIATSRRDLFHKTMLKCIQSSPKMNEVIACGYYCYRDLTKWPKLNRI

SEQ ID NO: 124413 - protein, 75 aa, Heterodera glycines
MAKEMDQDDRMIDQLSDGHCYRHRRLRLRIPLFRYIFVIFVIYIFIVLISVTTYKSTPRNVGKNRKLLSVPFPKA

SEQ ID NO: 124414 - protein, 17 aa, Heterodera glycines
MSFCAEFAPFLWHFFCR

SEQ ID NO: 124415 - protein, 104 aa, Heterodera glycines
SRLAQRRSWPKWAKRGHGRTGEEGVAGPRPTSDLPIRGKTDHPSRRSFHPYDRSPFSPSPIVSPFVLFLIAPSPKCVSRLARMAAPSNSIKCIVCFRFTQCTSK

SEQ ID NO: 124416 - protein, 100 aa, Heterodera glycines
MPQAIAKGMDRKDQNFYKDRQSRRNIMDIWAHTKNIEKDSFAMGKFEGNWQRIVFGPVRIRWVISEYGSHSPIVQTTVVVLIRCTVVAHLWPLSAPSTPM

SEQ ID NO: 124417 - protein, 110 aa, Heterodera glycines
MPNSGVQNHYRKRVAYYYDSNVGNYYYGQGHVMKPHRIRMTHHLLLNYGVYRHLDVYRPFPASLEDMTRFHSEEYMDFLRSATPETLKQFNKQMLKCAFIFRFGLCTFSL

SEQ ID NO: 124418 - protein, 145 aa, Heterodera glycines
MSNLGPEFLKNKTGHKKCRKSWDRHFDFQTNSQFLVDIPCCSGEFPSDSDPVDGKSNLEQLPWLKGIGIDLYFLKKLDPNMKISEYRAQSYGKYKPGPNLISTLCQVDTLYRLSTTVGRSIGMKPQNLIKVSIIIIIPDISPKLM

SEQ ID NO: 124419 - protein, 54 aa, Heterodera glycines
MALLCAAEPDCMVPIGQTKACIYTATAPNLTCHRQDQSLMEILRYNMEYRQEIE

SEQ ID NO: 124420 - protein, 245 aa, Heterodera glycines
VVLGDMGGTWHCNLPFGHLGVGKTSILLRHDGQGFTSQMSSTLGASYICSRSANNGREANNGREFELQIWDTAGQERFRSMVPLYMRNSSAAMLVFDITNRQSFRDLASWIKVERIDETERIDETGNVLLFIVANKCDLKEMRMVSEEEGRQFAEKQNAHYCETSVKLRLDVPNFQRSVAKALKRLCPQLVKLRLDVPNFQRSVAKALKRLCPQLRNAFYKSLSLRLRSSVHCPFPGTAATAEKC

SEQ ID NO: 124421 - protein, 59 aa, Heterodera glycines
MRKPLLSGEPNAMTLLEEITETEETERGDTDEQQQNNSSQFIRTDNEQEKKNIISFIKK

SEQ ID NO: 124422 - protein, 56 aa, Heterodera glycines
MKWAPGKLDTRKLDTRKLDTRKLDTNGKMDTRKLDTVVNKNENKQNKLLNKNFGLA

SEQ ID NO: 124423 - protein, 132 aa, Heterodera glycines
MLSFIFDLATVILGAVLPMFRTWKVLKSRKSRQLEYEPNREVLMASAQYYASKATQHALAYAWNTITSCSPRSKAITTQANGQRNAEFRSVVRIVELEEQEEDFVDIIEQDEQFEDLEADSDNEMTSNSPIH

SEQ ID NO: 124424 - protein, 71 aa, Heterodera glycines
MVRTRLQKTNKSKKTGGEAKSKRKGEKKMEEEENQEKESKEEKREEDKEMTSQETKDITILKTVSSTDLEE

SEQ ID NO: 124425 - protein, 359 aa, Heterodera glycines
AGNEHNCQKTAEQPNDALENDIDKKVTDFQTMVETTEEDNRSGTATFESFGNSAEPTPMETTIYHSAKESSEIGTDNGLLSKMAESPPKVPPLTPPSILRKVNSPGGNGVKKLLEHLDQSTSEGAASPSADNESPAKRPMKAFGQIWPIASAGRPSTTTPTRWSKSARRLLPIHERGSPYDAPESVQKAQSSDNKSDQSENNSNDKQQHVDEQLEKLPRMDEQQKDDEIVLVGSANVCVVLPEEEANENRHQQKRDFEQPNETISNDSDKTATDLGTVSKESEENAVQSEAMFHKKLTTDNKSETFERIKNKLDEQQEKLRRQMEALVEESTKRMLAIVAEELAIAEGLANAMPTNDGQ

SEQ ID NO: 124426 - protein, 25 aa, Heterodera glycines
MSTCHEVTVARQCGMRVFGFSLITN

SEQ ID NO: 124427 - protein, 87 aa, Heterodera glycines
MDDFHISAGTKNCNYSIEQQSFSFEAVEKYHSKDFAIPIIALIDENFSEIDVKLTDANNRSLMEFHIGTNRSLNVTFPDVKNGKILI

SEQ ID NO: 124428 - protein, 65 aa, Heterodera glycines
MILWVALRKNSYEIMLNDTALDNRQFWPNDWWEGSGRENVTHIVIFSKIPFLSFLGIKFFFYSNS

SEQ ID NO: 124429 - protein, 94 aa, Heterodera glycines
MSEIGIPCHPWCAPIWTTLGEQLHLAYHQQFDRGTGHQIGFNSLVKISENCQRMCQCFEWTSGGQMAFHATAKQCAKGVQMLVEGGLLAFCVID

SEQ ID NO: 124430 - protein, 333 aa, Heterodera glycines
VLVIKQQICAHLHYQKIETAAGVGFVCLDVKAALEFRLNSAKDNLISFDDELLIKLSGDHGQGFTKLTISFGQALRNNSASNHFIAAVFPAKDTRENLEQYGALLWPQIDQMNALINRPIKWFLGGDVSFVWALIGHCGSAVTSFPSPICNCHRDRLLTEGQQCQTRTIMQTTQQSEQFSKAVENGEKATAAVRSSTMGIVKAPLMKTIEFDRIIPAPFHVLQGLGNALVRELEQQTDATIAVQQFLRQIGARREQFRKKDMTGNTIRKVLKRASEMEHLFESTWPKTICQALMHLGQIQNFTKRLEEQKEDDNFSEHSDGENDEDSVIDVIG

SEQ ID NO: 124431 - protein, 134 aa, Heterodera glycines
MEVNRILLRLPIPRTKNCEPEEDYCGEGKCMFSPADGEGANIFMHVQYCTNETLCEKGVEQDIISKEDNTVTGRLTCDKRTCCEWNLCNGTRAAVGCHLRSLCWAFVAMIIAFWAELEPKTVGDSTNSQLYHFV

SEQ ID NO: 124432 - protein, 81 aa, Heterodera glycines
MLHSGQQFRPSIRNTAMRLPQYSPASAHRNQLLHGQPLVGGRNRSCATFSNSALEHALTDNICPRSYKQRTGGNSSSFYGL

SEQ ID NO: 124433 - protein, 233 aa, Heterodera glycines
SSIYRPPYSSFYPSPPPLLPIHPLPPSLSSVSSLPLPFPFFTLVLIPTATILGNGLVIVSVLRFKALHSAINFLILGLAIADLGVALFVMPYAVYVYVQGGRWLLGVQGGRWLLGPLMCNLYLSSPLMCNLYLSSDVACSTASIILLALISFDRYQAISHPIQYSRQAQNIARVVRLFVGVWVYSLLVASPIVLGPSALSGAFELSGAFEPFQGRFYNPGSPCCPPSAPFLLP

SEQ ID NO: 124434 - protein, 18 aa, Heterodera glycines
MSKLNESNNGPMEMKFSE

SEQ ID NO: 124435 - protein, 33 aa, Heterodera glycines
QKCDGISADETAKNAEHCAQCELLQKAEKFGRL

SEQ ID NO: 124436 - protein, 93 aa, Heterodera glycines
MAKSDRQSKKSQKVIGNEDMIDKLVGRSQLMAAEPKSDRPVISPSLIKFLICCLSCCCFANLRQVDKAKIWPKKKSVRFVWPNGCNYKVLLRN

SEQ ID NO: 124437 - protein, 179 aa, Heterodera glycines
MGSDFLQVFSYFLANVSDFAQAYRLHCHSCMSPYLEDQFQFISHLYRRPLVFSEKCDHGQFDWRYIATKNCSDACVTLRMNDRVGGRRRFGFMRGCLSDIIHHNRTAVRWRTRQDSKVGRNNMLGYPTKGFVHLFGQHIHIELCACIRSNCNSATKKFGIKNAILGVISTIISFMFLIR

SEQ ID NO: 124438 - protein, 195 aa, Heterodera glycines
MKRKQRGGGRRCERKRTKEERIKEKKRRQRQKAKTDEGRKSKGKEEKEKTKRVKEKKERKRRDEGRKKSRGQEAKTPNQDKDGSNFVKRRMGDGAAEARVEQGGPEDVHFGRGALHDDHQLVVFVEEGHVGQFLRQNRQKALQAFTSAKSQLPRIRAFQSEANRIRISNSLTSPTLRAVSRRIRCPTSAPPKWGR

SEQ ID NO: 124439 - protein, 243 aa, Heterodera glycines
VRFSTAHFQSELVRLPGTVRRVDGGRMVAKCAHCGGTANTGGPIWVAPTWDTEFVGKLLKGPNAGQLRLKGPNAGQLRLGTRERLEGLLTVLSEELPDVPLFYEHDQLMVVMKCPSPKMNVFRSALLNAGFRCSISHCNPRAVKTDAPTSFLWDVCREWVKEHAESADANDHPPRSRILAKETKCEINFSTHPDSIPKCEINFSTHPDSIPKSKFIGMLRFQDNKGKNWGPKMKAKGLIKHTH

SEQ ID NO: 124440 - protein, 172 aa, Heterodera glycines
MDGAESVILQCATEKGNGVGPSVAADCEANKLAEVTEGLARITATAEGGETFYNRVQEFNRDLTVVVLRAFAAEIPNEKEPKTEEEGPKAKQRKMDEGKAPEANAAQSQPRAFSVLDALSASGLRAIRFALEVPNVTRVVANDFSEKAFEAIRRNVQLNGVPDKSRRSFPTQ

SEQ ID NO: 124441 - protein, 38 aa, Heterodera glycines
NKRGDPFVLQNFFKIKNHDNFLSGVLKVANHESDMYFD

SEQ ID NO: 124442 - protein, 132 aa, Heterodera glycines
MSLSDQISLNLYFIYRPEIVCGCSDGRQCIALVPMRCRRGLTGQRKLFMSDHGVNPTHPNPTHPNPTHPYPTHPYPTHPYPTHPYPTHPYPTHPYTQLIHTQLIHSTIRVVTVAFNATTKTVQPKNATTETA

SEQ ID NO: 124443 - protein, 65 aa, Heterodera glycines
MALHILSMFGNSSHFVRVVHHFNIPFVSHGYSQIFEHLSEKNCSPAKHNPIDKNEAFAFVDHRFM

SEQ ID NO: 124444 - protein, 37 aa, Heterodera glycines
MGYELHHYFCFYTFIFNPLYIGRCSAGPCKPSNVIYL

SEQ ID NO: 124445 - protein, 49 aa, Heterodera glycines
CHFPLVPPVQLNESDRIRDGKDGQCAQFQRRIGQLEQIGAPQRTFNTIT

SEQ ID NO: 124446 - protein, 475 aa, Heterodera glycines
LTSKELVTAYIDRLKEVNPLINAIAHENYKAALKLAKEVDTELAKMDSKKRKSLAFSKPLAFSKPFYGVPFTSKDNLKTKGFVTIAGNRYLKEGGKVATEDALIVKRMKDAGAILVAISTLPNLAMSYACDDTAYEGVTNNPHDTRRIPGGSSSGEGALGSSSGEGALIGAGASLCGIGNDMGGSVRIPANMNGVFGLRPTTDVVPAEGIVPTAFSTNQRNMLTNGPLCRYASDLPLILKVMAGKKVNSFQLDVEFAKDFKLYYLEDLNVLITHELKAEQRFAVRRVKSYFESKYNSTVQKVEVKSYFESKYNSTVQKVEFTLLSRFLELFYADPWKAGVPVCKSLKFGTNKLIVINLHIYFWQTFDELKTTYHVANDTFFALQFEALKRFAVPKSENEHLQVLLKKEKLRKQVLQVLLKKEKLRKQVAQLLGKNGLLLTPVWPTDVPFHHMEPFVAFDLKYTMVGHLLVPSSIR

SEQ ID NO: 124447 - protein, 316 aa, Heterodera glycines
MKIQILLFILILKIYAGGIKEEKSFDEIFGQRWDEKSEENGEKETDQHGIIGQKNDQNETKNDENIAQRLFAEQFDQNFDDNSEVHDEQSVLLSTNCDELEQAPVKFGQICDHFIIFENKKKIEIVEKFDKIKEKVKQMGKKYSKKEWNKIERKIAKKLGENQKKIYKWKREFGMMKNKNYSVEEKRIMLKQFDQIYGKLKMKLNGKLEGKRTKCQKIIATHLGISLKSIYKWKKQLKNGKPLKNQQIDDEKREIVEKYFKTKNEFMQNGKHSRKEWEEFRAKIKQIFGVNYLTTEKWAKKLNFNQNISKGEMFFI

SEQ ID NO: 124448 - protein, 136 aa, Heterodera glycines
MNKLSENAAFSKHLGVQPICLPSVVTDFGFGDTIEKFSKSFSVVNNQSLSADPDLFKPKEGMQMGTKLKYNNIMEELQIYLSTIARLLNSLLALEKREGIFWGGIWGLSSGMDLRGIISEFNITLRLKSNANCSFL

SEQ ID NO: 124449 - protein, 75 aa, Heterodera glycines
MALKRMFLAQKALRQEAATEAAEGTENGNNTTKSRVKGRRKLRQQQQQQQYHHQNVNAFQWIGSDGWADRLDVVR

SEQ ID NO: 124450 - protein, 101 aa, Heterodera glycines
MAKLAKLYSLLTDKELSSLSHTLQLARPSTITAASATDATSTSDYCTESSPPPPPQQSPTVASGAGVAAAAFVQPPQHRPTKRAFLEDNHNDYNTGGQKGT

SEQ ID NO: 124451 - protein, 36 aa, Heterodera glycines
WGIINHLIISSSYHPRPPSYICCLVKTKVCCINKWI

SEQ ID NO: 124452 - protein, 63 aa, Heterodera glycines
MASRRHIIKMSAHCRVKYGLFDQLNLMFPFDGVVGFWLGKTQGQQEPISNMGMIFEAPKGRRI

SEQ ID NO: 124453 - protein, 27 aa, Heterodera glycines
MSQNVPPLKISEKTENYIIICLHTICF

SEQ ID NO: 124454 - protein, 564 aa, Heterodera glycines
QIEKEALALVFAVQKFHRMLFGRKFTLFTDHKPLLAIFGSKKGIPVYSASRLQRWALIMANYDFDIKYTNTASFGQADVLSRLIANYPKPEEDVLIANICVETDCYINTILQSQTDHLPVTAQEIAESTTKDETLQKIVNFVISGWPTKCREPEIAPFHPKRNEILEIGGCLLYKSRVIIPSQLRGRILKALHFAHPGIVQMKALARQYVYWPGMDSEIEKVVRQCDECQSAQKCPIKAPLAPWTVTDKAFQRVHIDFAGPCQDGFVYFILMDAFSKWPEVYQMSSITAKYTVFTIRSIIHRLGIPKEIVSDNGTQFKSAEFAAFCQEFGIKHTFSPPFHPQSNGQVERFVDTFKRAMKKCSKDDKNWTEKVLLAYRTTPNNAIDGYSPDQLFFGRKLRTKLALVLPKGHRNDSENIDKIQRDKRRKDYSNKMAKQFDERHGAKEKVFFPAEPVLLLNYRNQKTYWLHGTIVERVRNSPTYRVHVPVLGRIVHRHSNQLRRNCVFEENSKHNPGPDQQPIPPVNGQAQNLAHQIADPVDQRTDQQAANDPPTMALRRSQRKPKP

SEQ ID NO: 124455 - protein, 644 aa, Heterodera glycines
MSRVLTRQFPVAQADKPAVDLEQLRQQLRQQHALNQEIVAEKNGLRDMVVEATKVARELSSTLGGQEGQDAMMAKVERAKRLADETMELGTERVAELEQGATRCGYLDFNNLAMDADQLKQILDAVLAKSEKRIQQMMNAQQNVGPSESLSHANLASSIDGRISKFHYDSESGNTFEQWFKRFGILIEEDGKDLPESAKVRLLLGKLADGEYAKYRDSISPTQPDTVNWKDSIDKLKGLFSETRSLFVRRYECFQIRQQPNQDVSTLIAHINASCENANLSLTKEQLKCMILVIALSDDHHDMRQKCLKMLEEAEKSGTRISLGQIEEELKAMQLIKDSALALLSPPISTNAIQLRPQQWREPKSKKGNYNSGKTTANQHTTGGKANQRKPIYPCGACGNSDHWRSDCRFFSAICHKCQKQGHIAKMCPQRSASTSNSRRQNRAVHTVKVTSHCLNVGLNRGHWWKLQVKINDNDCEMNGDTGAQATIITIQTWIKLGRPKLELSDIEMHNCNEEPFPTEGMFQCVVSCFDKPPKRLTAYVSSAVNYNLFGLPWIMAFDLIPREVMFPKVQQKEMCEPISIHATLAPMPKANIKDEASLIEALKTDLSDPETGCQANFLQGTANSTRHWAAPILAVKKKNGKTR

SEQ ID NO: 124456 - protein, 188 aa, Heterodera glycines
MTHSEMNLEDVLQLLEKASSQSSKLEKSLIETPKISGLFAEILDLFLVELTNLFTSMCFDLNKSRTLNSDDQATLCSIVRCVPYLITVIWKLLSSSNLCKILNCPPGVPKLFKRRWNLLSAFTNLSLLWSLNSNLFKTTLTEAIYWSPEGARNSRPIARISRYYARPIQAAVARIANCLSLFRCISSF

SEQ ID NO: 124457 - protein, 31 aa, Heterodera glycines
  unsure (1)..(31): unsure at all Xaa locations
LTQISNLPSDAKKKPQLTFRSKLNKKQIEFX

SEQ ID NO: 124458 - protein, 83 aa, Heterodera glycines
MPKCTCLLQSIITGKNYHRKEVEEFMNIIRYDVLQLLTFGSICANITFEGEKARMEWYLGRLSKNAQMILDNVEPYVSGELVR

SEQ ID NO: 124459 - protein, 69 aa, Heterodera glycines
MKLFIFPFYIHSFILKSFPKIETAMAKQVIDDMSFTQPVTDNATIFQIATNVFEILDEYGNKKSACIFK

SEQ ID NO: 124460 - protein, 166 aa, Heterodera glycines
MNTFTLAKTLSEQQEKPPYDDSIDQLERQLRLGKRLLSQFNRKKTPKLADEHGEEHKEGEEDEQQLNSSEENNDDELDNDQPQTSTANAKKKRGTKRRHMPSRVAKEIKKLFRQANRAMIEDDDEEEDEENGQSDRKSIKSESDGEKKATGRQIKRFLKCFGLFEK

SEQ ID NO: 124461 - protein, 115 aa, Heterodera glycines
MPSSSDLSRQPISSTPFRFRLNFDDPSAYSDNENRPSPANQTSVSLPDNGCNVSPYARYTGSGDSPTSSRSGNGRKRRPRRGDELFMDRRHLRKSREVEEDELDEVENDYTMGDD

SEQ ID NO: 124462 - protein, 193 aa, Heterodera glycines
NAISIINVSNFPCRFIEAKSDRVTVIFSTLFKDPDDVVIGKVFLQEFREGRRASQTAPQVLYSEFREGRRASQTAPQVLYSVGEPPLELRNNPEARVGDNVGYITFVLFPRHTNKKARDLFPRHTNKKARDNTISLIHTFRDYLHYHIKCSKVAFFLRMKFKTINFQQFLWSAVCPPIFRKKIKILTKSCKTL

SEQ ID NO: 124463 - protein, 41 aa, Heterodera glycines
MVYKKSKYVKMFLSLFISSIFRRLGSNFEEIKKIKLINVND

SEQ ID NO: 124464 - protein, 59 aa, Heterodera glycines
MQQNQQHQQGNTMEDGNDNTVVVVMGQQGGTTVDWDSREEQQQHLDMETARTSRTEDII

SEQ ID NO: 124465 - protein, 233 aa, Heterodera glycines
MAGTLDNKLYSWGMHKWAAEGQQPKENDGGADQSAKAAEDGAGGTSDCSYLSSTATSLTNSDGNTATPVEQPKQQKERKKRKKSKSTKTTVRHLFREPLQYEMSQTREGQLVRLKNRDDLMDKPKPFMMQPHLVLRLIPIPFVTHRLCTESKKKTNGQKVPFFVLSLPKNAQRLREEIAALRSQLAEHKNTVRGHQSQMSQLQVEEEARNNLERMPKPKKRQKCRVPGNTSPN

SEQ ID NO: 124466 - protein, 145 aa, Heterodera glycines
VGLTHPSLNYERIRTVGKGSFGIASFGIAVLYRRKDDDSFVILKEINLHELTPTERNMSLNEVALLSRLDHPHIIHYFDSFEEDGTLMIEMEYADGGTLAQLLAHRDDAQPLPEGEVVDIFEQMTSAVSYLHDNNILHRQSQSIN

SEQ ID NO: 124467 - protein, 153 aa, Heterodera glycines
MAQQQIDERVVVQVGNTVQQHVALVGRRGGNGSGGQPQQRGGGGGGRRCQRGAGRHIRGGGGTTADVADAVVCRRPSLFVTVAAQQRRLAFVNKFAHIVPHLAIIILVRLVTGDDANPKPAEVGTDRRSKLKAIHQKIVHIQHVLFNVLWLIL

SEQ ID NO: 124468 - protein, 77 aa, Heterodera glycines
FVLVGTDVISENVAAFVNKFAHIVPHLAIIILVRLVTGDDANPKPAEVGTDRRSKLKAIHQKIVHIQHVLFNVLWLI

SEQ ID NO: 124469 - protein, 66 aa, Heterodera glycines
MGGRRAEKGRKEGGGRGGEKGEGIGGGRERRRRKSRSNRNGRRNRRRKRGIGEEKEEEQEDEEEEE

SEQ ID NO: 124470 - protein, 148 aa, Heterodera glycines
MKVGSTITKGAHEVNQLVVSPARQKAGQGAKFVYEKATKVLKPKATAESAEAKGESANSSRSENGDEKQSCPDKANAAERQGEQSVDEQPKERHSSAGDDESASEEKPLNGESSGANVAGTANARRKCPVPAIAKKFVSMTVQVSKKN

SEQ ID NO: 124471 - protein, 178 aa, Heterodera glycines
MRFYYSTLLSLAFVLSLCLRCPTVWSVHSKNKNDSMSNHQSDHDSMAQHSETEGGGKLKMPEFIKKLMRSKQTKKDKKAAQNDARGEQSESESVQNGQNDNSAEIANMLNEMPRWTTSAGTSRNIAENNSPLHGSSPNYYNTVRGSRHQRTKSSNPNQQPGAVVKEGGYLTRALTMVI

SEQ ID NO: 124472 - protein, 76 aa, Heterodera glycines
MGETAKDEEGMRKSEETERKSKPMEENKQGTAEATTTWASTERPGSTAAEGTQRMNGTKKGIPEAEEEDQHQQQQI

SEQ ID NO: 124473 - protein, 47 aa, Heterodera glycines
MQKEEMHVIRNGRNGTKHDEVHSVDEAHDHVSGAGGGAHHDEMSINI

SEQ ID NO: 124474 - protein, 30 aa, Heterodera glycines
CCTSSNHFCTSSNHFCTSFITFVPLLITVV

SEQ ID NO: 124475 - protein, 44 aa, Heterodera glycines
MSVGEMTSWRNVIIMMSCLRTNKLYKIHRKVDIPYKYLIISELL

SEQ ID NO: 124476 - protein, 607 aa, Heterodera glycines
YHQIPEKFCFRKDFGQTRKTYFNTIGRMVKSPAEPERYHLRLLLLNVKGACSYDDLKTVIDINGIAKVCETFSAACLEKGFIRNDEEWKRALEEAESFEMQWKLREFFALILVHCNPAKPEELWNMFKDSLSEDFCRPTMEQINVDDDVETVPSRKIGFGTKNYSLMYDKQRNVCDAILHRIWNPVNEPPFYFLSGPGGTGKTHVNKTIVHMLRGQKKKVCTMAFTGIAATLLPAGRTLHNRFGLTLDMSNSSISPRSKAWHEVKDTDLFICDEAPMINKRAMRTLDELREIMNNGIAFGGKVMLWTGDFRQTLPIQKHATRAEMVNSTIKSEYWRLAKRYKLAKNMRALETEQEFARDLLEIGSGKLNNENDEIILPENCISNGDLAEEIFASIASENWNEMAKSAILAPKNIDVSEMNNRVLEMLPGEEVVYTSIDLAQDENRQRADEYLDEYLNALNPSGFPRHKLKLKKNAIVLLMRNLTIEMGLCNGSRMKVEQMQPNLIVCKLLTGDKAGQTVYIPRITLCCSEDYPFDLHRHQFPLVLAFAMTINKAQGRTLEQVGIDLRKDVFSHGQLYVALSRARAWNKLRIRLDDSNLERKVMNVVY

SEQ ID NO: 124477 - protein, 371 aa, Heterodera glycines
IDLVPGSLPFHFRPYRYPPETQKEIERQIKIMLDQNIIRESESEFASPIVMVPKADKKSWRFAIDYRSLNKMTKKRVFHLPNIQELLDLMGSKKYYTSMDMQSGFMQIPMSTEDIDKTAFISHLGIYEFITMPFGLTAAPDTFQRVMNSLRRRLTAAMLIYLDDIIIGSETEEMHLIDIENFLKLLKEVGLKLKMDKCHWGMAEIRYLGFLLSERGIRMDPRQVQTVQNFKPPKSLTELKSLLGALTYFRRFIKNFAHIARPLQTLIEGKIEENWGKEQDESLNLLKNLLTSAPVLQSPRFGKPFTIECDASKKAIGAVLFQEKGPVAYASRALNRHETNYPSIEREALALVYAVKEFSPYIIGSGVTKII

SEQ ID NO: 124478 - protein, 256 aa, Heterodera glycines
MGKILENEKEENSVKILSTKNEGEENQLEIKGANISIEEVVKEQRKVKELAQIYYILNSGKIPPELKWKRVPTDYCLINGAIYYKKGKENSEQPKLIIPYQLREKFFHNIHDEGHFGFEKTWPEIKNRFYWEEMKKDVRLLTETCELCQKRKIYPGQAKSAPSVPIVPAEAPFQRVHCDLMGPLKKTRLGNLYIILTIDSFSKWVTAKAIPNQKADTVSEAFIETVIHQHSVPEIVITDQGRQFTSQIFAELSKIY

SEQ ID NO: 124479 - protein, 354 aa, Heterodera glycines
MIAEVERLLTRKRSSPVHESFGNIDDDDEEEGEILDVSFVEEEEDNTGEAPLNPLSYLAKQSAAQQETLRHEKWAQEERKRREEEQRKQRENERRRREEEERRRKTEEEDRRKTAEKAAKEKKAKEEKEASEKKAREEKLAREKKEEQRIAKEKKGEKETKDKKAEEERVAKERKAEDERVAKERKAEEERVAKAEAERAAKAEAERAENETKKKQEEEKQLEELKRQQQAIRKQKELELLKEFRPWRGGYMRLVHGKDPTPDVHYLHETDDYHFVNAVHKYRVRHSELPWEAPEFNPSAHIQQNIGEFRELFEQEVYDENYAVKTREEKEELIELVKGFRFYFTEQIGRFELK

SEQ ID NO: 124480 - protein, 85 aa, Heterodera glycines
MDDDDVITIGDNNNTQTLLDLQPGPSKRGRKPRLDKIHEEIASAMKKAKAMEAEVDESPKKQPTNVFEYPTIFWKLARPKVLANI

SEQ ID NO: 124481 - protein, 808 aa, Heterodera glycines
MDYPRINESELAFPISSGIIVSGPSSSGKTQLVLRLLRHANVMFDPPPKAIGMCKGGFCAVGCCYLVWAYGEYSTQIPDLERQGVVPHPGAPSDEMLKKLPKPCLIVYDDLMGDIEAKKLADLYTKKSHHNNFSVIFLTQNLFDKSMRVPRSNAQYIFLMRAPNDMLSIRNLASQMFPREQGFLMDAYRQACALPYGYLLMTKRESFLPPKMVKREQKIGERVVHNYDYLKKLGKTTSEKKRRHLLNSAGCEELLTLVEICLNVLNGSFCLSRKQKQRLAPFAKDIRQLARVRSERARETKNDDDDDIAERTNLGFVKRQVTAAVQKRKGNVSERNAMYNQQLRRYLKMRKEHKERPVRVQLSNGAQLLNKTVETGVQVRPGPDEPKDKSVMVTDEDEEEEIEVPKFLTPTSQTQGSSRTPRTNKKAAKQQKLIEKKDHLLAIIMSDPQRFGATDRGKIINPKTGREFIDSDLAWSIERLVDPRPENAPSPRGTKELKRKLAQNPLASSLLNRLFVGSGFVGQRNTTYTLFKPKREKFRRLRTVPTGFMTDVQADLADFQALSRKNSGYRYLLLAVDVLSRRMFGAPVKSKRPVDMKRAFEELFEQMPRVPDTLYTDRGLEFVAKPLKEFYAEKGIQKFETSSKKKAAVAERAIRTLKTRLYKYFSSNNTSVWVDVLPKFLSAINNSVCRATGLRPNEISDANAREVWKRVYGEGLAQLDKSSKIRAGETVRIPEPKHIFEKGYIPNYSDHVYTVDEARSTNPQHYLLKDYYGTKLKRKFYLPELTKVQVDENTMYRIEKKYKERVRD

SEQ ID NO: 124482 - protein, 521 aa, Heterodera glycines
MQHTKRYLLVPEEIYQSLAAPPPSDGTPIGLVRTRIKQIKNDDAINEAERAVKYEQEVKRLNKLTKDEDERPVGVKLENLSDVVDAMPKPVNVTRPIVVSTRRHLKVGRARKENVEQLEDTDDDDDYQNPRSSSANKRQPTQTEILKLIYKNAQSLGVSEEGQVLRAGGRPFITSSVDDIVSHLLNKDKRGQNKEPTAFKEFVERARQNPLLTIIMDLKKLRLLEFLYKDLSSPVAFTSVEPLLREARKSQPKINRNDVQNYLTSQRTYTLHRQAKRRYRRLPTLAPGLHTEWQADLAIFDRLGKQNRGFKYLLVCIDTLSRQVFVEPVKTKTSANMIIAFDRIFKRSKYIPWKVLTDQGKEFTARAVQQFFRTKDVEHFCMLISPQFHAGMAERANRSIKERLYRYFTERNTYKWIDVVQDIVCAINHSTNSSIGMRPVDVNFKNAEALRQKLHDAAENVVRRKPKYRVGDRVRIEKYKHVFQKGYLPRFTNEPFTVAEVHSERSPVVYRLRDDNNEIIS

SEQ ID NO: 124483 - protein, 113 aa, Heterodera glycines
MSPMNLFSHIAIFIAKNLNCVLSGPIYPVCIHCGDANDFRAGKAFVSGWGQEEVKTEKSKFRVIAAELCWPAMAHTLFKLECFRLAYAIGGQKGVIQAFIHFWMARGLKKLLD

SEQ ID NO: 124484 - protein, 60 aa, Heterodera glycines
MAQSTSPASVPPPTEYRRENSNLNLAPKIVTKTRTRTNKQKMASRMYKEEMYYGNFFFKR

SEQ ID NO: 124485 - protein, 89 aa, Heterodera glycines
MDFAGGKRATKGTADRNTKFCGDWSADGGKDGPEHTAHGHDGIGQQCRGRGHRRQSQRTIGTCGRQIGPVHGAHRNIKAPGTAQQPRAK

SEQ ID NO: 124486 - protein, 154 aa, Heterodera glycines
MPMASACGMPPPYAMQTQQQQSAATISAKANHHATEAEEPPKKRKRISKKQQQKEEKEREQQQKQLRVQQEAALVQIQQRQQQQMFFQQRQMAMQQQGMVPLTSPALIGAPQQNYQQHVAQVNILQSLYFMTQYHTAPVPDGGCCTKPCPSPAH

SEQ ID NO: 124487 - protein, 35 aa, Heterodera glycines
MVRFVRNRVRYKRTSNSFHFLQGNIPSYDSENAYK

SEQ ID NO: 124488 - protein, 124 aa, Heterodera glycines
MASSSNLSPSEELRLLRDRSKELEQMKKDGQSEGNCANSVAEQQKEMKELRKKFAKMEMREAKHLSKIDELEKITHEAESEQQKLIADRNVLQAKMAKMEKKRKEEKEKYSKRIASEWLLWFFH

SEQ ID NO: 124489 - protein, 22 aa, Heterodera glycines
MMGRCSAVWTAENVPNFMEMYG

SEQ ID NO: 124490 - protein, 27 aa, Heterodera glycines
MRRVFAINGLVKREMTFKVGLSLQHGF

SEQ ID NO: 124491 - protein, 79 aa, Heterodera glycines
MVFESLKIFNPCKSSMQKNFRPREILGLEKWRHYELCAWTAAEAVDRFVEKVIIVNSWSSASNVTSTNSMPAPICSTKA

SEQ ID NO: 124492 - protein, 289 aa, Heterodera glycines
ALVPPQTPQITAQPTEAVREGEFVTVRCESQDGNPLPRFQWLFDNRTRVPDAWFHERHEGGGGSGTKPRAISTLQWHLTRSDNGAYLTCQTWNKALREGEVINAETNRLNVLYAPRVKVVPTPELNIEEGELAELKCTADANPPATNFAWTHLPSGETHADREWRVHVRRAHAGEFRCTAVNSLDSASDRIRLNVLYGPTVRIRTVVSPAEGDRLVVDCEADANPKADAITVRIRTVVSPAEGDRLVVDCEADANPKADAIAWSGPGGFQRTGSRLVIEAVNRVGLFLI

SEQ ID NO: 124493 - protein, 24 aa, Heterodera glycines
MDRMERTQLSSEGQLKKGKATTNQ

SEQ ID NO: 124494 - protein, 27 aa, Heterodera glycines
FTPHFPFRHSTDILLFNNCPFLNTEFP

SEQ ID NO: 124495 - protein, 476 aa, Heterodera glycines
VRESIKDSWVTGKWASDGEGEDDESDGERKNDEGQSQRNKKEEKWKAKEEENGDELSDWSGDEFEPNELREAGEAMTKREEGESSEDDEDEEEAEDGTKAEKGQNAEKGDGVAKGAKKERLRKLFDAEFDQTNEQYNALVEEMDKQSKLNKSVFDDLDEEQRQKLEGFRPGLYIRVEVEDVPAAFVDCFNPTFPYIVGGLLPVEQNDGYVQGMFNSALEVTPFQGVAIRTISGIRGLIKKALREPEGAFRATFEDKIKPNDVIFLRSWVDVPVPKFCVSMTDKLLPSGENWLGMKTTGRLRHELGIKPEQKADSGYHRHMKNVKHFIYSVNQMLILKEATEKFFVSAPLVIPKKLQKDLPYKLKPKVGRLCLEDAEEGRDSELVRNHTAELLMEPEENRVNAMMELLRTVKEEKRQRDKAQTKERWEKHQKELSEIEARRKRKMMATKKTVCRNMSRREAKRKRGDNTTEMETIGA

SEQ ID NO: 124496 - protein, 29 aa, Heterodera glycines
PTGNLPLTFLSVTPQIFCYLIIIIVHFKH

SEQ ID NO: 124497 - protein, 96 aa, Heterodera glycines
LMDWRSVVDRYADLNASVFHDESIFLDLIDNMPTDAWQSGLATLLCMCFICAVFMGHDWRTVLMAGTTIGSIIVGTLGTLSWIGATMDPIMMVRLT

SEQ ID NO: 124498 - protein, 201 aa, Heterodera glycines
HSLTLNEDQLEQFLDWPENRYWKSLIHLATVAEDRQNQSVNSFYFTTGYHGQRLRKWAESVNSFYFTTGYHGQRLRKWAERTHLLMDWRSVVDRYADLNASVFHDESIFLDLIDNMPTDAWQSGLATLLCMCFICAVFMGHDWRTVLMAGTTIGSIIVGTLGTLSWIGATMDPIMMAALIISIGFSVDIPAHFSYHFHSAA

SEQ ID NO: 124499 - protein, 327 aa, Heterodera glycines
MCNNATGPSATAALGADGRKRRIPSRERLSRARTGAIASLMVNTNCSIMQNAMTVELVHNTNNKRSTRAKKNAVDGGGQKGEEKADDDGNKMPKNDDDDEWKQRKIVLLNGSATSTLAEQRDGTKRIAAVDQQQPKRSMIMLGENLNKMAQKFARRRSSLDEQDTRKHSDSGGELFNRSGLVTTTLLLATSKSLCGEEQLRHEEYNGDTTMCNNNSFYHGIRQGAVPKNENVAKRSASTTGGGERTGSLPMSTSFSSSEDSDLTAEHSQYSVRMPCKLPVKKWQKEKQQRGGRGRRRHSMHGIPSKGSNSAEQQKMAPAATTAEEGK

SEQ ID NO: 124500 - protein, 272 aa, Heterodera glycines
SAPNPVVPTSFGPSVASNFGQMAPPLSAPPIISVPSQSQQQQQQHMVMMMQQHYAGGAGGVAAPSSAGPYSSMSSSSSSSMSQQQHQQQYGSLMRVSRNDVVAQIMMSNNQLFYHQQQQQQQQPQYHQLQRPQPNGDPSYKETLDCWEQIKSGVDTFMSTSDADAVEMDERVHHQLHHPFGVHAGGDGTMLMRVAGANVGSQQQQQMPMPMFNHHHQQQQQQLYSYGNVQLPHHNHPQHVGTTNYPPPPPNNIAVGDDQHHHHLPHHNRFHR

SEQ ID NO: 124501 - protein, 22 aa, Heterodera glycines
MSTSSTLFLVVVVLASLLISAN

SEQ ID NO: 124502 - protein, 263 aa, Heterodera glycines
YIDHSVIEFLRSNKHIWDRRGTNLEVFVDAIDMGVQPIWDVFIRQIWPIFATNIRHLSFTSGDALDNLRSRTSPTFLTDLDQLNSIDSGYLCPDGIADDGPNATAGQALTKWLHTPTKNGQPKQLRFRAYVGPPNFEWVNNFKETFRRATTSVSYKIQLYFWVEPMPIEPFELMNEVTKEKLTLKQEIDEFDLNVYNWLLQRCPIGETATAPVKWENRENPSANLNNVRFDLWSFDKSIGPLAPPAEEKEGEEEADQSNKNVV

SEQ ID NO: 124503 - protein, 249 aa, Heterodera glycines
YIDHSVLAFIRSNKQIWDRMGTKFELKVYSYETDQIWDVLAREIWPIFAPNIRHFGFHCGDHLDNLLRLVSPTLLTDCDQLNSIDSGYLSSSAIAVDGPNTISAWQALAKWLHTPSKDGQPKRLRCDDFSKSINYFKEAFLHATTSVSYKIRFNLFLVPMPIEPFELVNERTNEKLTLTKDGTGLFSDWLLERCPIIGETAADQWENDGNSDANLNNIQFFFWHGSNCFGPLSPPSEEADEEADQSNGN

SEQ ID NO: 124504 - protein, 213 aa, Heterodera glycines
PPFTARCVAYAQPETAEEFDELQLYFTYPGDLTLELVKGGKNVQVTKANCKQFMELVFNWRLVEGVRAEMEALRRGFQLIIGSESLQIFTPDEISELFCGTDDADDKVWSKSVLQHCIRPDHGYTYDSQQIKWLIDMLHGFPKEKRRRFLQFCTGSPRLPVGGFKGLSPPLTVVKKTASFVGNENELPSAMTCYNYLKIPPYESYNTFLDRFE

SEQ ID NO: 124505 - protein, 34 aa, Heterodera glycines
SHFPLVAHISIKQKISLNLLSLHHILKIVPSQFL

SEQ ID NO: 124506 - protein, 46 aa, Heterodera glycines
MAASSDSSNGHSVVRRPTFGLNARGKGPLVGAESQNIKKQIISREI

SEQ ID NO: 124507 - protein, 34 aa, Heterodera glycines
LWRCAVDERTAPDNQAAMPPSTSPVLPNKVADRD

SEQ ID NO: 124508 - protein, 82 aa, Heterodera glycines
MILLGAALLLLAMFGCCGVTATAPAQKRTKRRLGGGQSGDNNGWEDPVAVVYTSSPLLWLYTARKSFCKANRTCEELLNDTG

SEQ ID NO: 124509 - protein, 174 aa, Heterodera glycines
AKAKHSTGSSGGGPSVPAPNNRKKTQNQQQQKGNNELGGEGRENGGKREEKGGEKGAAAEAEEKEKKVAVEHHQKQQQQKQEVQAVQQQQQKQEVQAVQQQQQKQILVGMEMKMDNSKNGETREEVEKEGNSIGEGGETEEKERKRKNSKQGGGERGENEAEKKREEQQQIDTF

SEQ ID NO: 124510 - protein, 176 aa, Heterodera glycines
LVESQREFFRTGKTAELAHRRQQLKKLRKTILDNSEFLCEAVQKDLKRDAKLNYPLEISSVIIEIEYVLDNLERWTAPLNVEKTFTTLLDSPQIVREPKGVVLLIGPWNYPLNTLLMPLVDVLAAGNTAILKPSEVASNTAAAVDEIISKAFDRGNSNFENNIFTTSHLMALNNPS

SEQ ID NO: 124511 - protein, 30 aa, Heterodera glycines
RICSNYSPVSINPAVSNYPPVYEVFLKNNP

SEQ ID NO: 124512 - protein, 59 aa, Heterodera glycines
MFLIALFMLTFSLTFDLVVSFAESEQLVYYNYNPNDYYSTSGSSLSELKDILDSGDNIK

SEQ ID NO: 124513 - protein, 268 aa, Heterodera glycines
LSSTASQPLIVPSLFAMSNLAMSSDDEGGRGEQMSLKVVLLGDNGTGKTAICCRFAQHAYPQKYIQTSGVDFYSRRIAMPRNVSVLLQWDVGGHNLTSPAMLNTYIFGAQAVLFVYDVTNSQSFDHLTDWAVLFVYDVTNSQSFDHLTDWVGAAKKGGAQMEKPFCLALVGNKTDSEHQRAVKMDRHNKFADQNALSAFYVSAKTGDSIDLMFKKTTAEVLGIPLTKADQEWNVNVVQGSINKRKQQQKAEEPRKEKYGRRRGVDTVG

SEQ ID NO: 124514 - protein, 20 aa, Heterodera glycines
MVADWHGWQQQLAVEHWHRR

SEQ ID NO: 124515 - protein, 201 aa, Heterodera glycines
VGWAVAATKRCVSGCSCSSSYLSFTTVHAWTFCNSIWVAFGEWLTWLGSSSERNTRGTCATLEAGRLRNGTWVAPVQHWGNGRLRNVVHAWHHREKDAAGCAVAATGTEMMEYYQRFLSDYRDLMQWVDGMVQLVSSDKLANDVTGAEVVAYRTRNKKPKTLIRLFHRCCAMVADWHGWQQQLAVEHWHRRAKQIRIYEFI

SEQ ID NO: 124516 - protein, 154 aa, Heterodera glycines
MFKFFTIFSWATIGICPKQSSELGERICNRTGTYAYESDGTFWLSGSLKIRNAEYIYGADDVVGLALFGFADKHKPLLSLLNRSGTYAYASTGNFLINGYWEKGTCKFARGDVVGCGVNLASRRIIFTNKGQRLGWYFGKYHKALLMTPGLGVG

SEQ ID NO: 124517 - protein, 62 aa, Heterodera glycines
MGAISTHQVSFGNPTDTWGPFFAYVIDANNSAAVHWIPNVLTVQQLWSYMDQTERVSQTGFS

SEQ ID NO: 124518 - protein, 309 aa, Heterodera glycines
MHGFGLFLSLLAAINLSRGQIGPKDESKKGLFLMANEFLETGKMLLDEFPGNKQAENKSDDGLNSQKANGKALEEKSDNFQQKAFEFLCGIEMKAKNDEKGNDKTKKDDNLLAFKELEEKRLNFCQNWKNGKSIWKGWKEAGISIVTSVNNLKLNQQIYGESLRTLAKMEIFNSKNKEEFGNFTKFGIDLLMKVTEILKDARISSLALADQSDHDQRKGNNTSRRRKRAFHGIFRREFSLEKCFLYLLLTCMSAGLGTDMVVRLAQHKVRVVSFGNSAPPPPFSTEGHHTTPLEGFEIFVAIFCFLTTF

SEQ ID NO: 124519 - protein, 131 aa, Heterodera glycines
MFKLPCILLPFFALFLSDFIVGQPMKNAAETADQGKQKEEHLVCPHCNGHIKPGELKMQLKGKQSPAEQQKEKPKVARERHPWHVMDDVQIGEEHLPMNKGDDDADLRMEKKLTRETIGEQPKFWTESSDY

SEQ ID NO: 124520 - protein, 81 aa, Heterodera glycines
MPQKLLIKENRKKNIWCVRIEKPKVARERHPWHVMDDVQIGEEEHLPMNKGDDDADLRMEKKLTRETIGEQPKFWTESSDY

SEQ ID NO: 124521 - protein, 96 aa, Heterodera glycines
MSISTSSTNGDFTPSIGGGEVNDDSISLDEDWQFDRKNETVADRQQLLMVGNERSFNEAFTYIFRQNYLFLLEFHESYAKNKVEIEFKITKLVLEK

SEQ ID NO: 124522 - protein, 677 aa, Heterodera glycines
VKSRKNLNPNVIFRDSWNLIPGPLASMVPMFGLDVDDKPFFPHLVNRPENYGCHIFPTKADYLADGMNPVKRKEFDKWFEENRNKSFFLDEALASYCKNDVDILMSGLIAFRAEFMEMTKRSAGTDGKVDRAAHKTPHDGIDSVRHCITIASACMRHFRTNHLKPAHLALVPEKGYDSCGDNQSDLALNFMQWYSEEHGVRIQNAFSAEGEKSDRVGNFRLDGWIESEKKGLEIHGCVWHACPKCYPDDKDVMPCGKTAGRIRERNKQRMDFILERVLNVEIFWQCEIEQMLARDRKMKDKFSEFTGDGGPINIRACFMGGRTGALKLHHEIAADETISYYDVTSLYPFINYVTHYPVGHPTLHVPCEDVDWRRSEDNPYHLAILKVFVIPPRRIDVPVLPVKVDDRLCFPLCMKCCKKFPNGGVRETYNCTHIDRQRGWISTCTSLELNVALDEGYRVTELLRVLEYSKSDNQLFRPYMSEFIAEKMHASGFDDQIRGNFEAEEKFIAECREEFGIKIDRAKMVPNKGKRALAKLAVNNLFTGLDMLTPERILISYHQKNDWVKEHPCSNVVVSLFTTSAARLHLLKAMQKVVRTPGCILLYTDTDSLIYVHPKGANPLKTGPHLGQFTDEFPKHDILEFVSGGAKQYGLKLRKKGSEEEEFEYVLKLRGITLNYD

SEQ ID NO: 124523 - protein, 301 aa, Heterodera glycines
MHASGFDDQIRGNFEAEEKFIAECREEFGIKIDRAKMVPNKGKRALAKLAVNNLWGRFSLRNFGLTQTLITDDPSELGNYLDNKKIEVTGLDMLTPERILISYHQKNDWVKEHPCSNVVVSLFNTSAARLHLLKAMQKVVRTPGCILLYTDTDSLIYVHPKVANPLKTGPHLGQFTDEFPKHDILEFVSGGAKQYGLKLRKKGSEEEEFEYVLKLRGITLNYAVTENHGLRFETFKKRVLEFARTGKTQPIKVIYPNFLRPTVIKGNVTSAPLQKIYKPYVGKGIVCSRDFRVLDFGYSSR

SEQ ID NO: 124524 - protein, 171 aa, Heterodera glycines
MVLFTEKIAKILNCRVSELRDRLNHPSDCKIVEQALNGLPIQTTYKDRNGYTKTFSFGGITPQGASTMMAYGRLGRPFNVCVAAHFYVRHRIKLRHPFLHCAVERFQEGQEDRFYPLELCQMEDVPNELDWLGRMFTEIRSEKVNGMNEESTQISNEGRHECSQNDTYTFW

SEQ ID NO: 124525 - protein, 117 aa, Heterodera glycines
MSTSSNKNYLPKNQCPNCDDDEVDTDPSPEEVEKWTPEQVIEWDQRCYGKMPAEEELWQEFLDKGEANVLREFFGGKGALEVEKSLREYAKKKERRDAILIEKRNEYKKMMGKKDEN

SEQ ID NO: 124526 - protein, 245 aa, Heterodera glycines
MAENHNEQKMNEQQNEIIPAKNPRSIQSWKLFRPKYMLTFRFCDVRNVAGPSTASDGDDERENGPVLSAVIEGHMNRSRMRLIRDEMVHRAVQQQLEHQRHLLLQQAQQQQQREERERQQHFDQQMEEAELLHEQLQAAEQENDENIEPQPPQQQPQPLIRHQQLQFERNVRLQLRESQRFERGVASSMLVPPAQLYWETECIICTSNRAHLYSRNCGHIYPVLDMCGERGDPQGRDLYALSCAN

SEQ ID NO: 124527 - protein, 45 aa, Heterodera glycines
KVMRTRPIWQVKQRLLTSQKVRCRDETNQHCLPRGTRHGPPKEWI

SEQ ID NO: 124528 - protein, 95 aa, Heterodera glycines
LFEYPKRTLEKIDFFVFGAVPPNRCAQIYGETESFRNSFPIACTLILRWIFAPHNCLSTPNGHLKKSIFLFSGQSPRTDAPRFMGRPNPSGIASL

SEQ ID NO: 124529 - protein, 145 aa, Heterodera glycines
LISLYERAKADERNVPTLRANTARNNGQQQQQKKVPAANGGKKNNNGVAPVVKQQIVVIRQAEQRGETVAKREDGGVTRRRKRGNTATTEVGEQEQPPDNSTDDEKSVEREEQQVMEKKQRKAAAAAESVESIETEEKKQKTGKD

SEQ ID NO: 124530 - protein, 46 aa, Heterodera glycines
MWIDSSMVELTTEWAYDCLSFSCQGIELKLKFKTIPYVRMEGIVKV

SEQ ID NO: 124531 - protein, 37 aa, Heterodera glycines
IKVNVEASNQVENALFMLNISKLVRRKKKAIASKCGL

SEQ ID NO: 124532 - protein, 30 aa, Heterodera glycines
MALNVTYLFNLSLYCSNSMHEVQAVQKIYI

SEQ ID NO: 124533 - protein, 76 aa, Heterodera glycines
MLINNQLSDHQTTTFGPAYGSEGVKVNGTDTTTNKSNSNEWTYYLYAFLILAIGAMGIYGLYRLCRRSTFTYKKVK

SEQ ID NO: 124534 - protein, 63 aa, Heterodera glycines
MARRAENGVCHLSQKKRSGKRGGRGACGGGARHARAGDGRATRGSEGARAGDEHGREGDAPGE

SEQ ID NO: 124535 - protein, 391 aa, Heterodera glycines
TNKSRIFYYHHPDLGNFHYGPQHPMKPARLAATHSLVLNYELATHSLVLNYELHKHLTCVHPPRATQHDLARFHAPEYVQFLKRISPNADQYEGLFNRFNIGEDCPVFDGIPVFDGIFDFCSLYTGGTLEGAIRLNHGQAEGAIRLNHGQAEIAINWSGGLHHAKKAEASGFCYVNDIVIGIIELLKCHPRVIGIIELLKCHPRVLYIDIDIHHGDGVQEAFNLTDRVMTVSFHRYGSYFFPGTGDMYDVGMGTGDMYDVGMGHGRYFSVNVPLREGMDDESYHSVFKPVIQAVVDNFNPSVIVLQCHSVFKPVIQAVVDNFNPSVIVLQCGADSLGSDRLGCFNLSFDGHGEECVRFVKSLGLPLLILGGGGYTLRNVARITQKTKEEQN

SEQ ID NO: 124536 - protein, 1769 aa, Heterodera glycines
MFEKFKILQIDEELCLSGKEKQFKELCTELKENAYVDNFVMMCDDEKEIKFKHYWSKEIFKLASMNLREFVSNHEQSNKEIQKMEGSEIPKMTKMLGIKWNVDTDELELQIKIPLMSRDTTKRQILTMIAKNFDPMGWISPVILKYKLFFQKLWRSNKDWDDKLNDEEIREWNNISNIDEVSIPRSPFTSQNLKCASLHLFSDASELAYATAAYLHANNKTDLLFAKTRLTPLKGLTIPKLELLGLLIAARAVKFIIKESKLKFETICIWCDSKCVLSWLKCKKNLPIFVKNRVEEIKRIVSEFHITFYYVKSADKPADLASRGTTMNEMKYNELWWKGPKWLKLGKENWPAHSFYTPEQNDSLYDVNIMEIENTQTNLVKMDYQGFIEWKKYNSWDKVTRICQILLKFVFFTLKDSPEFKTKFKIQKFQNELSLKFMAQKMLIRIIQKEMEPNNEEERQLGIYRDNDEILKCGGRLKNAQIKATNPIFLPRTHFGTHLIIMDHHQRNLHAGTMTTLAEIRKTYWIPKGRRIVDQIRKQCFYCKRYNAKPYQQPKMPQLPKSRVQITEPFQNVGLDYMGPLQIKSFTEKCWIILFTCFTTRGIHLELVTSLSIQHFLNAFRRFISRKGTPKIIWSDNASQLKLASKVLPEVLKLKEILKDDSIKNYFEKENIKWIFSIELAPWQNGAIERLNQNVKSAMKKAIGRKLIEFDSFQTLICEIEALVNSRPITFIYDEINSYQILRPIDFILPHKNLCIPPILEENETNDPTYLPKPTYYDQTIELWKKTTKILDDYWKIWTEEYLPSLRERYKTENKNPKNCVKSFPEINEVVIIHDETPRAMWKTGIIKNVITGKDGIIRGANVELPNKNVINRPLKLLYPLEINKNDCEENETITNLIKTTEHKQIGANRKRKQSVLSSPKLSKVFLNTLTFLLLFMQLLPCLSHLYECPKTNEIWRTKYTTFCVENGFTIRQNKLTMEFCYRKIFCHKQHVIKNHPPYCGPQCKCPDWTNSCSFASYHRIKREITDQENIQKIISFFKPNICSFNKTEKCSLMDKNIFSSIMLYDNSIHSVKSFNLLHTQANSRIDYRCLGEGNLTIGTQKFCQEHECTDTHGTKFCFYEPHEKTYLVKSDREIIPIKAWGSIERIFYLANDTLMDELKRKKREFDPFENEQISAECTKGGIKINPTHATTELEILVDKYFILKRSPQSEEFISLPTKITMNEYKPVIKFMKGTSVSEYKNLTCPPSPICELIICRFCMEYIRNPQCIGQMHWALILIMIMLTLYVITLSLKIIKILYRFTIFIFLSVYNCCRKRKLKKIKIIKRKQFIYLIMISLLLNSPTIFSCDEVTNMVAGTNDCAIDQNGKIECIYDQTTQISITPEHKTCLKLDNEKTHTTMETIELSVESLTIICAERSEYFMRDYQLLSSSQKRCSGAGKCTGQICQTLTMKGKNPEIGDHANNQPGYSYCVPSCGGWHCKCFLATDGCLFYRTYTEPIDRNIYEVVKCPTWTILATIKISLDPKTIHTVELKPGVLTHVKDSNLSLTLTSTSIPPTPLFGSKFIINRSNAKAVIVDNENLLKNSLRCETKEKATKFSCTFPPEACQCHGGDSVVHCECEKNPLTEMFTRKENILPLETHGSQVFFDTLLRAKIKLTTSLQVQVTLKGHKVKAIYDKNNCTVKTKSLEGCYSCTNGAEFKFTCTTNFGTALANVKCHSQNFQIPCDTKGNQQQIQLSFNQPSVKEKCEVICPDGKSEITMEATLNYLNIN

SEQ ID NO: 124537 - protein, 132 aa, Heterodera glycines
MGTKMGTAQMGGRHKLGRHGNGQNVGTAQNGGTAQKWVKMWGRHRMGDGTKWVKMWGRHKLGNGTIGAAGIGEGWASGTDTSATRHGIGVCATLAFSNFLTFYYFFNIIHNLSHFNICLKSVISFNVQIIHN

SEQ ID NO: 124538 - protein, 16 aa, Heterodera glycines
MPLNYTSIKKQLIEEN

SEQ ID NO: 124539 - protein, 133 aa, Heterodera glycines
MSDCIWEIYTIFDKINSESEKVEVMWSEVDRSKDFDQVTKLEEKENENSSKHSMATCYKYRKQMRKFRIEIDDLFENIVSLAINYLNPPEESIKDKNDNNRNEIFFTPYRRNRIIHGQQLSEIFIVPIGGTES

SEQ ID NO: 124540 - protein, 192 aa, Heterodera glycines
MNCDAQVKAYKFVAYSALTFSLAAVLSVFIMMPLMYNFVSHVRRQLSQDMVLCQGSSSDLWREVEVLKNAPFIAHNGSTSSSFNTARTARQAYGGGAEVGAGPAHGAGAPAAGAGRAAAPGFCKPCCVPGPPGPQGRPGRHGKPGKPGAPGVPGAAGTGPAICEATPPPCPRCPQGPPGPPGELGPPGEVGA

SEQ ID NO: 124541 - protein, 161 aa, Heterodera glycines
FHGQLLRLPLSANKTREELVPESIRRLCLKIILEREENKLPSDEDINDFVECLEASKDVTLQETEGKTSVLRTVGKSLTNILSPVTFFTAHFPDWHLHSEDFRIQIETIVEYLSLKIVFIRYRIKMAQYDPNSTGCLSREQLCDYYLHEVMPRVDVLKDLE

SEQ ID NO: 124542 - protein, 75 aa, Heterodera glycines
PGLKCPAQAKNFFYFREKIEIFPKKIPVDRARKTMFWKWSPFLWEKSLKNPKIQKPENRFLGLARKIFKIFEILK

SEQ ID NO: 124543 - protein, 185 aa, Heterodera glycines
EEEEEDESGQAQDDEEQGDTGEETEAEESGEETENDEEGESREEKQEENSGDDKEEEEEAESRQEEEEEESGEKKEEKEEEESGEEKEEEEEEEKEEESGEEKEEEEEGESGEETEEEESGEEKEKEEEGESGEEKEEEESGEEKEEEEEEESGEEKEEEEEEESGEEKEEEEGGEEKEKEEEGE

SEQ ID NO: 124544 - protein, 173 aa, Heterodera glycines
SDDLEKALRQIGRDDIVLHRMYGLDITGATAADIDDAWRTSASRGGTPIVSAASLRRDHSSKGSLAAATGGLAFAAAPTAAVALSQALSATPPSSTAGISPTPSSVAAEQQQQPMQQEEGNVETVVTRTERFVHHAQNGEAPIVDERVTEHFYRDGEEFLKSKHYDKIDSLKD

SEQ ID NO: 124545 - protein, 149 aa, Heterodera glycines
MANISIKTLLLQRPGNGGGGANQWEIDATCTALYGGYPGKDLCVLAKKLAYLSVLNRAVSIPARPDGCWPLGQDRNKAVRRCIAEMRRRYDAETVKMADFILDERAKRHFMDEFAFERQAEEMKRAIEIEEDEWEGDEADKMTKWVSER

SEQ ID NO: 124546 - protein, 157 aa, Heterodera glycines
MKFSSKNSDNSAGRDFDQKLSNADLLPVEKQTWNAYNITALWMSVIHSVAGYIHSVAGYLTAGTLFSLRLASWQVFVVLILSVLITLFLCNLSSKPSQVHKIPFPVLCRAIFGIHGAHIPSLVRMLICVAYFGIQTFLGSKAFNVALLKLWPNVAYN

SEQ ID NO: 124547 - protein, 29 aa, Heterodera glycines
MRDLKNLNFRLFIRIRVQDTLPAAVFVGR

SEQ ID NO: 124548 - protein, 116 aa, Heterodera glycines
MKRRAATLTDATAEQHPEPKPQEETLKNVEPKDESVTKKRKVEDRELWKLAKGKFLLTTYLCPDDWNRLFNNQQKVKRVEGDRVCFSFDLCEECALANCRATDLLAPMKKRPKNDF

SEQ ID NO: 124549 - protein, 128 aa, Heterodera glycines
MPNRNNINGQQHHHLSSASTNDNSQHFTAVHHCFDFAFKMAIVARRLLKNRAIQKQLERRQKNMKTLRRQQAAAAGQSSIVVRSVSTGLPRNQPIHQRQQVCTVPSHEVIYDVPCTGEDQQEGSEDSF

SEQ ID NO: 124550 - protein, 68 aa, Heterodera glycines
MPDERVLHLECFESGDYDIMELYGPDRAKEMLVDLRDYAEAHGMPCQHVKMLLYKLDKGLIKWKGTKP

SEQ ID NO: 124551 - protein, 368 aa, Heterodera glycines
MAPEEIPLAEETKLAKGVRTDRQLLQRSIDRVNGMLRECFDHIQLLGDPFLKQAEEDLLAALPTFDDEQADPNVEEWPVITLLSKAQLILDGLQVYIEARFDTTDAISSRSSSRVSDHGADDENRIHRQRQSTDPPTQAQPVNAHQPSNSARADQTLFNQRTPAFPLNLTFPRASNRPTHRSEPHHGHFRQSTNDDDALRVSRIEIPRFSGSAEEWVTFWAAFDFAVHSRQYPAFQKHLLLLQYLEKGSPPRRMIEGYPPSDANYSTVVSILRDRYGDVGNRRDQLNAQLLHLKPARNNLKELRQLQQEIERICTQLCSLEPEGELSPIANSSLVTNLIKSKLPPPVLLELIRMERESYTSWTAQKLA

SEQ ID NO: 124552 - protein, 26 aa, Heterodera glycines
MEGKEEIRDSLKRAATQIGDGEGERK

SEQ ID NO: 124553 - protein, 436 aa, Heterodera glycines
MDEQEIHNQLLNVNEQLRELNAEDERRLLDESNRNRGANRDENLLNPGLIQQNQIAGNVGGIPIQQNANNQQQFGINGMLPPPFFWPQFPMQNLQQPMQFYGAQNLGPQLPAQNFSTFFNNQMPVMFPPQNVQYPNTAINPARQMVNQQAVNQREEGQNRQQQIFPQQTSLSGLEYAMILDRLPDIRGNEGGDSIRNFFKKYSQYTADWPNKKRIESLEAKLSGRAERAYNAALANEPFVYENVKRNILQQLEDTDCREMSAFNDLMNGVTRKHGENLDDLADRISSLVRRAYPGLTRNLADEYSIKHLIRSLNNPDLALNLELHRRNVMSFDEFVALASRAEATQMAAKRQSSEHRPNQERKYMHPNNREVETSSKNQLRPYQVVCYTCNEPGHVSRNCNKTMSRQNRTNSHRLFLSRINSKPQILLPLGQTEFS

SEQ ID NO: 124554 - protein, 169 aa, Heterodera glycines
MLKGAKHADHTKHVDDDEEEEEEEVLGRTHAKVFSAHLHFMNRIDFYESKAGTGETSKTSGFLGFELRASKKNCASASSANYFVLSNDTKNILGLFDHEQSYCMKTRYYQLIRLIKYLWTHKSRLDLEPLFSFEGVGRINLCSNILRLLFSWSAKFLLMTLKIICDCFT

SEQ ID NO: 124555 - protein, 18 aa, Heterodera glycines
MATSGFGDYHPDTDSWME

SEQ ID NO: 124556 - protein, 46 aa, Heterodera glycines
MLFSAFANLGRTLTEYCCVLWPKLLKWLRKILKKEENILFSNKYPK

SEQ ID NO: 124557 - protein, 72 aa, Heterodera glycines
MDQKAESFVHMKEIEDTTIWFLINLLAHIALIASVICWLLTGSLVFRLIDSEIGAKSFPRSVIWCFQLLTTM

SEQ ID NO: 124558 - protein, 178 aa, Heterodera glycines
FSKIVPTNLFNANVFFALESLGTLAIVGNCCLVVVLMRNRYLQRASFVLMLSLALADILHGIVTTTFFYPPILLRRVVIPAIGVRIFNVIDWTAWSITLTHSITLTHMSAICLDRLLAITLYGQYSQLITVRRAKLFTIFCWATFSTLNTVYILARFCCLISPLAESHFYTFGYGEFE

SEQ ID NO: 124559 - protein, 220 aa, Heterodera glycines
MTLGISINKNLVSNSTNPPTYGDLLQSAEFANGTVGTADPNHDDAVLFIYKQIVDKYSWQWLEQFAQRNQLITCGGVQLQQALENGTLKAIIGGFGSYPNNAGAATEYVIPADNDPFTAYAIYGAILKDAKHPEAAKLFMSWQLDIDGPNAVQTWPVRTDVTPKDNRRQIWEYPNTSHQKFLEFMSNVEERQRFGRQVALFLDDTKCNFASFVPGVRPLQ

SEQ ID NO: 124560 - protein, 933 aa, Heterodera glycines
MSRFCPLAQIKESGRLNTPKGKFSLFYALEIARSYQLIGKSITENKFRYLMKTEKKQREMAMELMENAGIRNFGTQHLEAVQKYWDREFPDMFRIVAFEMKTGLRPIFKGEGVRKNEVGVIREGDHWDGIKSASWFFGVRYFCVSCEVTYDRPERHRMECKERCKKCCRMGFGFPCADDSPEINCDECHRDFYNIQCFEEHKKLACKEYKKCENCGETHNTRNKHTCGEKFCKLCKVCHPGRQCFIKKIQVRPQKTYRIVAYDLETTVDGGEHRPNLVSAARTCNICAGEERECEICEGPSKITWSVADGFEPMSEFIVWIMGFQRFETIAFAHYAGRFDSHFVLSELTKKEIATELMMADLKIYQIKAGRVYFRDFWMLSQNKLADLPKTLGLKTAAKLYFPHKYNKNENFGKRLPNLPSLGDYCPDNMKEEEAVKLEAWHNENFQTEFELGEQLKTYCENDVEILMESILKFRQLFLGITGDLDVMKDSVTIAGVVMKIFRAKFLKDRHIPIMPEGGYEKAENQSKIAVKYFEWLAQKKGVKVRHACNGGEVEFGGLKVDCVIGAEKKIIEFQECDVREELKKNKEMKKFFESVPDKGPINPRDAYAGGRTMPFCLYAKATEEVEISMFDIISLYPFVNYGTPYPVGVPKIVVSRDFNVNWTTPDDVPYDGLLKVKVVPPKNLLYPLLPVHIDEMLLFPNCWSCARRAKNEFVMTKDVKKCNHRPPQRAFLGTFTSIELRKALELGYRIVGFYRAYHFEQFDSQLFKGYVRMFLKIKVEASGWPAEVKSEDEKRAFIEMYKAKYDINLAYDKIGLNPGLRMIAKLGLNSLWGKFSMRNTLSNTEIVGSMERWMELGRDNTIEFGRPVKISEEISRVVYRKKEEFIREHKVSNIVLSLWTTSAARLKLYEYMEQVYKKEGCKLLYCDTGEKE

SEQ ID NO: 124561 - protein, 148 aa, Heterodera glycines
MYSFQKYFEEALEKEDFFWQKNRAEVEALLIEASNYKIIIHRDYESRYSDYIATYHRTPLFCFCMIERNLRFFYDTGTGTPIGRVTTVLHVTVEASYTGEGFISPMFSFWFYWEGRSQTTNESFTSRLYLYTVSMLRAMGKAWAENYF

SEQ ID NO: 124562 - protein, 61 aa, Heterodera glycines
MQTIAEIKNFEIVDGGRIFVVRARIENVMEAEYRFGSCWSERKVVAFQKKKKSNLPVPEEL

SEQ ID NO: 124563 - protein, 133 aa, Heterodera glycines
REGKDENSIGEGGETEEKERKRKNSKQEGGEKEEEKDENSIGEGGETEEKERKRKNSKQEGGEKEEEKDENSIGEGEETEEKERKRKNSKQEGGEKEEEKDENSIGEGGETEEKERKRKNSKQEGGGERGGKG

SEQ ID NO: 124564 - protein, 19 aa, Heterodera glycines
GLLGSWVRVPPGELPFMFY

SEQ ID NO: 124565 - protein, 47 aa, Heterodera glycines
AQLLTMQSKKHINNVREQMIYTELNSSLKMRAAQIPTQKPRALFTKD

SEQ ID NO: 124566 - protein, 169 aa, Heterodera glycines
MGDGQILTVISAPPDASKLNFNSLRSSESTSSDEVLVNELTKDLLPALRRTRTRTISSSKGEEDIVTTESGQVTVLAMDSFYKVLNEEQHQLAAKQEYNFDHPDAFDFELLRESLVRLREGKSVEVPVYDFSTHRRAKNPKLMYGADIIIFEGILSFHKSEISDLMDLK

SEQ ID NO: 124567 - protein, 82 aa, Heterodera glycines
AVPTFSKTAKEAQNKRRGVIKSWSKKSPKNRMAKDIFEAIFVEAEELKATFGIEKGSNGKRLRMEPNFVAHTNMYCKRMESD

SEQ ID NO: 124568 - protein, 107 aa, Heterodera glycines
MSLYKEDVYETEDPPNAEPIETVEKFESEEVEKVHMSMGAAKKRFDHCLLDSEGADFSDSVGVRRLKRGFKASEVFESETIGSEEEETLEQKFNRLNREIRNLAARS

SEQ ID NO: 124569 - protein, 43 aa, Heterodera glycines
SQNESPSVKKEDVVALDELLKTIASNCKKEGRQPISHGRSEES

SEQ ID NO: 124570 - protein, 153 aa, Heterodera glycines
MEHLYHTRMELPIAHIYGFTGELLTGMDVDGSELNSEYLVTRWPIVRALVGQLKAEFNTLVVEMALWDMEQGIKQFVVANAQTDQAKILKQMMLWDWMMEYKQFIVEMDENDQTKIVDEMKEKFNKFVDYDDPKKGGGTIQEKILEYFHTKLQ

SEQ ID NO: 124571 - protein, 25 aa, Heterodera glycines
MGTAHTFGHLLIVWPKKRPNNSNSF

SEQ ID NO: 124572 - protein, 268 aa, Heterodera glycines
TKIDNSHENNTKLRTLGAERMDSGTYKLIATNEHGQDEAEVLVVVLDVPSPPNGPLEARDVTKDSATVKWYMPDDDGGSPITHYAVERQEGDGGRWVPCGETPDTQLRVNRLVEGKEYKFRVKAVNRQGESKPLAMDRGVVAKNPWEAPGKPQDVKVVDWDKDHMDLEWKPPISNGGAPIDGYVIEKKTKTGLWTPCAHVTGNQCKGTASGLVPVPCQSDKQGGRGRTVRPDRAQNGEATSTGAQAEPELADGHPCPGWATDHMHAEF

SEQ ID NO: 124573 - protein, 310 aa, Heterodera glycines
VVKRALRTDTGTHFITARNDSGTDTAQVLVTVLDRPGEPRGPLNISDVNKNGCTLDWKPDWKPPEDDGGAPVSHYVVEKQDLATGRWVPAGESTEPRIALDDLQPGHEYKFRVKAVNRYGESDPLEAVNRYGESDPLEAPKSMVAKDPFEKADRPGTPDIVDWDKNWADLKWTPPTDDGGAPLEKYVVEKRLGNGEWEYATEVPASKTDARVDGLVEGKQYQFRVKGVNKAGESAPSNPSRTLLAKARRLAPKIDRSAMPEIRIKKGGTIEFNVPVDGEPDPKCQWLINGTQLGTSDRVVFYKNNFTFFK

SEQ ID NO: 124574 - protein, 44 aa, Heterodera glycines
MNVGHIEWTFRCASIFMWQKLTNYVDLNTLFCFTIFVCGTNHLI

SEQ ID NO: 124575 - protein, 300 aa, Heterodera glycines
PPRIHREDLSDLVVRPGEDVKFNVHIDGEPPPTVTWTYEDGQALPSCANVQDQDYLSKFAMVKPTRAQSGKYTVTATNPNGSDSVTVTIAVKSRPTAPKGPLEVSDVFENQMTLDWKPPEDDGGEPIQYYEVERQDERDGIWVPVGTCSDPHMVVDGLAKGANYKFRVKAVNAEGKSDPLETDKSTLAKNPYERPDKPNAPELVDWDADHVDLKWDPPANDGGAPVEQFVIEKRSKYGRWEPALTTDGNTTAGTVDGLTKVIRATNENGEAEKRVQVDIIDKPGAPEGPLNVSDVHADRC

SEQ ID NO: 124576 - protein, 159 aa, Heterodera glycines
FNKKPKSSAILISELTLKVGQSVDFKVPVTGEPPPEKVWTFNDAPIADDKLRIANEDYKTNFSIRNATRAHAGTYTLTATNESGTDTHGVLVNVLGRPSAPEGPLEVKDVLEDRMTLDWKAPADDGGMPVDHYEVEKLDMASGRWVPCGRCTEPGITVT

SEQ ID NO: 124577 - protein, 54 aa, Heterodera glycines
MSISTNSTNIGKFSFDDYEMNYDELSILKEGAVVNTNCESFTDQQQLKAEKHRN

SEQ ID NO: 124578 - protein, 344 aa, Heterodera glycines
TSPADLSSQSSGMAKVANRKRNERRIRAVQDLARHLNHRMNRHRHRQRDGKRDPSEERHIRMTAERYADQLSRLGDDHIHRLQHQFPQLPNPRRRRSEVGGNLKGGKSQPKLASMVVRPPQGELLPSKDVGGAAPGASNSHGRNENEEEGREMAEKERGSRPRVLPPPGDSFGELLEKEAKARAEVAELEARAKKAKMEREEEEQKLKSAKEARLRDLGTQADDLRQMLGDASWPWSRGKDGKNGEAVAPRAGKAVAMPAVPMEDDGVSLADSEMEVVPAGGSVARSDEMTKTGGRSAPAKEFSISSIFAFIFSISFFIFPFSASIFASSAFVSCCFNFSWSPF

SEQ ID NO: 124579 - protein, 57 aa, Heterodera glycines
MMIFLINDQWNTNEKNLIIFPFFFFYTKFGLKHHIVINFSVVKLLLHKTVVYLLITL

SEQ ID NO: 124580 - protein, 51 aa, Heterodera glycines
MLIISPAFPEQNISTLINPTDARKIKNEFKNAFETIRALKEDEYVGEIFGQ

SEQ ID NO: 124581 - protein, 114 aa, Heterodera glycines
MREIVHIQAGQCGNQIGSKVANTCPVLFLSILSLALWIQSELERTDNSFGRTISFLDRVARETIGQKAITRRVLSWWTMCWMLCGKKRKAVTVCRAFNSLIHSEEAPAQEWALY

SEQ ID NO: 124582 - protein, 107 aa, Heterodera glycines
NSFSLTRLFPTLVFHRHGNIQLLQIAAYHEKVIDHYENPRNVGSLDKNDPSVGTGIVGAPACGDVMKLQIMVDGNGQIIDAKFKTFGCGVDGNGQIIDAKFKTFGCG

SEQ ID NO: 124583 - protein, 94 aa, Heterodera glycines
MNQQVHAFRAAKDALLVRVENSAGANLRVLFQGISAEFNIPNDIGIVEWLEENDPTNYGIVEFRAQMHALHLELIGNGNNELLGAATACMFLGN

SEQ ID NO: 124584 - protein, 25 aa, Heterodera glycines
LKYSVYVAQKISYSELIAFSKPLNS

SEQ ID NO: 124585 - protein, 49 aa, Heterodera glycines
MIENGIRGPLNFYIPTDGTHVKYDGNMLGLKYCKIPENIIYCKGNFGSL

SEQ ID NO: 124586 - protein, 72 aa, Heterodera glycines
MTTAAFLPLLKKAASAGEFARVVNIGWVKTEMGGANAMMSVSDSVAKIMARICALTKSDSGKLLYGEKELLP

SEQ ID NO: 124587 - protein, 157 aa, Heterodera glycines
MLALSIGQMSPDNLSVDNPSVMDNVNKCFDKIFWCEQSLQMYCSLHTCNIMTMNGGVMLFDSIEKIREHIEIAIAPAAGAHETEKYMNNLDLASVSKLFGINIIVCEKVSKEIFRWQVYSPNLEISLSISQKKSSHSIFLYYHDAHFELIKQPQKIK

SEQ ID NO: 124588 - protein, 418 aa, Heterodera glycines
INSIWKPDVLLYNSVDQRFDTLWLYNSVDQRFDTLWPVNAIVMFNGSVTWIPPDIIRSSCPVNAIVMFNGSVTWIPPDIIRSSCRIDVTSFPFDDQTCIMKFGSWTYVTSFPFDDQTCIMKFGSWTYSGFSTDLFNSSVSLDPYTPNGEWHLLSVSSVRNYLVYDCCPEPYVVSSVRNYLVYDCCPEPYVDVTFHISVRRRTLYYGVNLVLPVNLVLPSLLISSLALLGFSLPPDSGEKLNLCVTIFMSLCVFMLMVAETMVTIFMSLCVFMLMVAETMPQTPQTSDTLPLIEVFFTCVMFEVGASVICTVFFTCVMFEVGASVICTVIVLNFHHRKADSYFPMPKWLRILLLDFFPILLFMRRPPLRILLLDFFPILLFMRRPPRVKLPNCDDGENDQNKKRQREKVIREHRERERK

SEQ ID NO: 124589 - protein, 82 aa, Heterodera glycines
MAIPAMIASVPSTKLLGCSKICMAKEKQMIKLCCSNKHPKDWLLRLCPALGGNDCTIGQQNHVESDQRSPRGHHSRTFFDEI

SEQ ID NO: 124590 - protein, 89 aa, Heterodera glycines
MGRQRQKAEESAEERPIAVQGIGTCPKLAIPSDALIAQNGRRAAPNQLRPYWVADQLESIYHLFQSPSTHPRPGPKAKGGEIRAEIVEE

SEQ ID NO: 124591 - protein, 57 aa, Heterodera glycines
MGIYLFVISGFSKEERTNCKPQKKIKYKEKLFGDYQTNFRDEQRKRAKERATDWDLE

SEQ ID NO: 124592 - protein, 155 aa, Heterodera glycines
SKSEKVPPPADFDSDLRSALAKRRSKVQQKGENEAGTSGQQNNETMPSSTCNTTSENNDNSRNNGNGVTMLHFLAHFAGAQRLRRHRTTEPKPSKPPPFPTFTGAPVSACSAPRLRSQSANGGGGERSAVARLSARTVGAARGIATTGTKKPTNC

SEQ ID NO: 124593 - protein, 136 aa, Heterodera glycines
ITEPGAVRRVLHYGLGELELDRLVGAFDQCGQMMRFQCKGGGPTFDALWGGKSAVRLVRDAQRAARAAVGRRTALLARLHVRNERLVHGAQVKRTDQNLKFGMPSRLKTNPSAEKALNTFPGAAIVTAATTRWTLA

SEQ ID NO: 124594 - protein, 181 aa, Heterodera glycines
MPKQNEIVLKYSFLDLTWFLDIEAVFYAISKTKKCLVVKTIFHISLHNFVSSARIETGIRPLERAARALQEVKKLFEFLQFCFHNFRKLFGIIMPKQNEIVLKYSFLDLTWFLDIEAVFYAISKTKKCLVVKTIFHISLHNFVSSARIETGIRPLERAARALQEGMERKNSYFWDFFRNQN

SEQ ID NO: 124595 - protein, 256 aa, Heterodera glycines
LNWPEYNLYRGMVKSHKNGSKTVLDSFMIIVTYHGVELREWHERAVMMQRWRKVADNYVKDFNVSVLHDDGLFLDLLENMPTDIWQSALGTLVCMSIICAAFMNFNPFVVAVTSIVIACILTGTLGIMALIGMTITLGIMALIGMTIDPVVMAAVIISMGFSVDIPAHVSYHFHIAKSEDGQRQRTIEERIRMSFASVGFPAVQASTCTNICILCLLVVPVYPAQVFVRILCTCITLCVFVRILCTCITLCTIHSL

SEQ ID NO: 124596 - protein, 54 aa, Heterodera glycines
MDHIFEQIQEETVIMEHGHIEILHIIVGHLAPPLHHHRPFMPLPQLHAMSLAMS

SEQ ID NO: 124597 - protein, 156 aa, Heterodera glycines
MITRCNNKNCFFISDYKSLNIMVTNFDVTIGEERARKAGQERASKAWEWLFNVLPTFDRSIADLLWTHINANYNINSISVLLENFEKAEFISLTSDDFYSNLSVLREYGGGTGMCGVSSVQVYEKLGKFFSAGVVTYYYAGSFLHQCESFVILFFV

SEQ ID NO: 124598 - protein, 117 aa, Heterodera glycines
MKYVKTILAVFSSQLSLLTFGSICANITFEGEKARMEWYLGRLSKNAQMILDNVEPYVSGELLKSFPKIENAVAKEVIDEMTFTQPVTDNATIFQIATNVFEILDEYGHRKSACIFR

SEQ ID NO: 124599 - protein, 193 aa, Heterodera glycines
MPKIAGVHRHHHHKHQMNGAHKQNKGPNGAKKEKYKSMAARELGQNVRKDQQKGHNKQKAKKNSNRKKKEKKKKLKEKAKELAEKALLKALDKVKLGKSEEKEKLKRALKKEMGREEEKENKEMEREEKKQTDKERKKETENEKKEKAEREQVNEEIDARESRSEVSSAREKSRLFGDFGHGFINGLFETQLI

SEQ ID NO: 124600 - protein, 59 aa, Heterodera glycines
MTEILAKVWNKICSVSSIVYLKNGKILNYNEKTATKEQLINSTYKKSIFKTPYEITTRD

SEQ ID NO: 124601 - protein, 103 aa, Heterodera glycines
MVNYALHKMVPVLVGDQSVLVSFELLAEQLADLGPGQINDELNKMGISMNQGRVSIVPNVMHLNDETSVAIDAQLQKAFFSTVDNCTQNLENSQHQQKTFSAK

SEQ ID NO: 124602 - protein, 244 aa, Heterodera glycines
MVVIGQIDALNDVFAFVTDVNGKEFRVPRELIFDSSVSEEAMEENETEQKANGNVKLHVEVKRSGRKNKNGAEIYCSDNFPLVIDSSGLLNRFLEDEPIIRHAPDRKFGVWCAPRKYSIDGIQWKIVRIDPESKPKKSVPNGVSKMNGRSKECVSNGGQTDECISSSPSTVPSLPSTTVRNSPKLEEEEEKVDENELFEGLICSQNETHFLVFSPGRRWLGRLDKAKCGKDSASILGMWIQFKM

SEQ ID NO: 124603 - protein, 212 aa, Heterodera glycines
GAYSFNLLIETSGTDSEHDLAKMDRFLDRCIGDALAADGVLAKNMSEAEHMWKIRENCSLGLRQDGYVFKHDISLPLEHFYEVTEQIRERCETNVRRICTFGHLGDGNAHLNVTVDGNAHLNVTVPTFDEDVYQRLYPFIYETVASTGGSILYPFIYETVASTGGSISAEHGIGLLKREYHHKLIDQKRRMFSSGIKRLFDPRLILSPYKMI

SEQ ID NO: 124604 - protein, 109 aa, Heterodera glycines
MALLKCAIIRGLLHTFNGRHLFSTVIERRGEFAELTEDDLRNFRGIVGDRCVKTEEIDEYNTDFMRWYTGRSQCVLLPQSVQQVSAVLKHCFHRRLAVVPQAGNTGLVG

SEQ ID NO: 124605 - protein, 35 aa, Heterodera glycines
MKLSTNDSVPYLSMALSWGERRHFVMTENLSLGYT

SEQ ID NO: 124606 - protein, 70 aa, Heterodera glycines
MLIAFVRNDQKMQISEYSKQKYEAYLGTIYFMSKNWQCDKIADEFKNMNGQNAKNLAKYLDYFVRDICLE

SEQ ID NO: 124607 - protein, 92 aa, Heterodera glycines
MMSDRKRGTNQTTKILILPLTNRSVLPFPAPPLKCLSTSESENKMENDEPTEAAKLAEEFATKNLTTKERMDAILKMISGRSGEEGAEEEEE

SEQ ID NO: 124608 - protein, 91 aa, Heterodera glycines
MINLSSDNWTGCHSAISDALSRHSTGADAAYGDSELDKKVERRFCEIFETELAVFLVGTGVAKLALFMAKFPLFAPGTAANALSMAYVNRA

SEQ ID NO: 124609 - protein, 67 aa, Heterodera glycines
MYTCAYVFTNSDFDFYTSAELLNMRAPPFYAKGSKRRAAAAVGGAVRHARVAASAARRGLSMGRLIE

SEQ ID NO: 124610 - protein, 239 aa, Heterodera glycines
MPADQCKDVLYLTVVPDVNVIASKCKVYMEELSNMYERRCRLGIHVPIGIREAPRDGIFRVGREESNSLSSGSTPAATVAIPTFPHSVHAMFMQFEPEFGDDMQPSLQRLRIFVECCYAKLCRFFLHNDHLFERRAFHESAYRQQQQPPQGTSLATVPDTVAMPPPAVPSGGSALGTIGGCSSAGPQSGPASATSTMLHHHHTGGPGSSSSSGSVLHSSPMAQHQHQTSPATGNNGPNS

SEQ ID NO: 124611 - protein, 50 aa, Heterodera glycines
MHCLFSIVYTILTIFMVAHTLSKGTVGGQPMKTERGLRLFSIFSAYFGGF

SEQ ID NO: 124612 - protein, 339 aa, Heterodera glycines
GFSFDCSLLDLFHFGSLPHPQYLLNIRIPANRTLCLLSNNKGPNCAFPGPLHELRLIEIHQNGGFTLVWLWLEIHQNGGFTLVWLWLKSALSPVLLSVLFWFFRRVRALPRQPVLLEKTIFVLGCSLLLLDVPIEWLSLRMDFPALLLFGPIEWLSLRMDFPALLLFGDLRQGFFYAVLFSFWLIFAGEHLIDDRSRNDLRNYWRNLSLVVLSCARNYWRNLSLVVLSCAVLLGFDLSERGRQLSNPFHSVWSSEGSPRLALVSIVLGIGSAIIYTLFLLYKVCMGWLTILFLLYKVCMGWLTIRQKREAELRRHNPRRRLRVEAVLFRFRFLMLLTLL

SEQ ID NO: 124613 - protein, 363 aa, Heterodera glycines
LKSPLLVLCFVVPSSFSDPCPFFGDYQCPEGFHCAFDKCQDEQGIEPPGDCAKIRCGKESECRQGIRCGKESECRQGKCVLYVGRPCGRNVLVAEGLARAVVSDCGPQGKCIGGRCAIDRCADTVCEEMSELCRDGMCMQLSSIDRCADTVCEEMSELCRDGMCMQLSSMFCFSPFDCGPPSLFECHQNKCQRRRDTIVPVCSSGQSCFNGFCVPTSNSNCANSGECAEMNICREGRCVADICKANGGRCLPENACSPVSVPEGECRPFQGIPCSLSAAAEDFPRHTFAAEFVQKMVSGSDMATNTMPAKECFRKVCQIGERCDGGICIRVEGNGCRDAIRECGEHFDCVAGYCKDRISAYKE

SEQ ID NO: 124614 - protein, 59 aa, Heterodera glycines
MPLDRASVAVLAAAAAAAGAEAATTVTTAATGIVENENVSSTPSPAVVSCSQNARANGD

SEQ ID NO: 124615 - protein, 145 aa, Heterodera glycines
MPRKSLNISPRKRKKNGDQQEQHQESNNDKEKYQKWLEENAKLYKTVYARSRVDWSAWLQCISLILLIIILICLIIAALIAICSCILAAADNGGRRGGGDIFIFNNSSSSSGDCCCCFGTSSSSSSREYSYGRPELTYFDSCSVV

SEQ ID NO: 124616 - protein, 216 aa, Heterodera glycines
MIILYYFFISYTVLLCMGLSTKELKDLNTQIDIIKHEITETIGRENEGKETMDDKVIKKLEDIANAKIVIETLSNFAINMTAQDYANLMFFEKKFTIPEIQEEHNARKEMNKLQILKKELDDKIEEAKKFWKKNGKGRKNQSQTEIIEMKVKLELMDLMKESNLLMTRQYENLAKECAKFGETEKNEWGKKLVEMFLKSLKEKMDKLREKLTKMIG

SEQ ID NO: 124617 - protein, 571 aa, Heterodera glycines
MDSGHNNQRHYNFRRRVPVNYMEQESGSSQWSQNLGNLRNSGQQLNENTHAIVQPNNAQGNFSNHPLENQPFPAPAQNQSNPQNSNHGQQQLAVPLNPVINFFGGNEQNIGNPRAASTPISPHISFQEGGNYFVNFPREMQNRDLVQNRYNHNRQNPAQNFYNPRVFVNSQLNRNNERPNRNEFPVRDSNHRMHSQFANHQNEQYSARDARMYQHLSRQEANSNFVPPLNLQFSENENRHNHGQFPNPRNFQQNPEMVYAQINPPVYQNQAFPAQTIPIPDIIMELHKVTLSNQYANTMREIPILNGTEGSDKINDFFLTVEMCVGEWRHEKKLEMLKTKLKGKALRALNMALSKFGNTAPFETIKTEIMSTLRETDYKEASAFQELTQTGKRKEGESVMKFGERIQRLVNCAHIGLSEAQRDEISKKFFVLNINDTNMAKFLECQSKPSQTYDELLMVANRLSLVEEKTEERSVQIRNSQNPFHLPNANQISYQNEQSRYFGQRNFQNSYQPQPKYFGRTGPPSHSYGNNFGGRNFPVNQNFNRYPSNQQNRNFGNERAQSNKPRQNEKH

SEQ ID NO: 124618 - protein, 175 aa, Heterodera glycines
MTTIDKEIQFINNEIVARWKKERKIIMEADRLVSYCNNISFYAKIYMIIAFSAPGIHQLYEKILEIAQNIRLLYLQILNEYKNISKILRDNENCLKYKNIKKCQENENSSKHSMATCYKYRKQLRKFRTEIDDLFENIVSLAKINPPEESIKDKNDNNRNEIFFTPYHSNMLMQC

SEQ ID NO: 124619 - protein, 135 aa, Heterodera glycines
MSINGSCVKRFPTNLKWISLKEKKVNRAEVMSLAEQIIAPEVNDNELFDEITALNEILESISDEKFGEMNAEQKWMKVFEAELPNLVLLVNKILSIPVSNACVERVFSLCSAQLTDVRNLLKVETVKSGPNQIEL

SEQ ID NO: 124620 - protein, 90 aa, Heterodera glycines
MKASCLTGAGAHDEMEEGKEEEKKEEGADEEKKEEGEEEEKKGEGEEEEKKEEGEEEEKKEEGEEEEKKEEGEEEEKKGEGEEEEKKKSG

SEQ ID NO: 124621 - protein, 145 aa, Heterodera glycines
MKRCKCDLKRYKSDKRYKVIKRGTTVIRRGTTVIRRGTTVNRRGTTAIRRVIRRGTTVIRRGTKVIRRGTKVIRRGTTVIRRGTTVIRRGTTVIRRGTTVIRRVTTVIKRGTTVIKRGTTVIRRGTTVIRRGTTVNRRGTKVNLL

SEQ ID NO: 124622 - protein, 148 aa, Heterodera glycines
MNYKIVFQLVRTNLKIYTDGNIDEANEQLRAAIRRIWKRTPIKMLDEVVPPAGRDDEVTVGKFYATFLIQDYFRRFKKRKELEAKGMAAPNTHAMALQAGLRTLHEIGPELKRAISGNLDPDFVHEAEEPQHRVKMHLVYIYLLIYFY

SEQ ID NO: 124623 - protein, 73 aa, Heterodera glycines
MPCVICPAGPPGQRGSQGERGRIGEAGPSGEYGSEGKEGIMGPNGARGYVGAMGIKGVPGRPGLQGDQVVAGK

SEQ ID NO: 124624 - protein, 43 aa, Heterodera glycines
MGILCSTCALLVLLFLVPIIVHKANILRAELEVLRGLTVRPER

SEQ ID NO: 124625 - protein, 196 aa, Heterodera glycines
MEIFTRFLHFNNSLFTTIICSSPSLVKRLHLLFINPSSVATRAHFKMDALKRLASRARQKSAEIILSAEKTEIGAELEQLLTKTDKTEEHMKKLVHAIEVYLQPNPAVRALDPRKDKSGRQNTLDGLGEAMKVEAELRKAQDEFDTQLETISTALEALQTAVDRQAEQLVQFVAAQIEYHSSSLKLLKDLKRDLGA

SEQ ID NO: 124626 - protein, 363 aa, Heterodera glycines
MPISPTTPPYSPPKKPDDATLSPLEQKPVDKSPLTKKSKAKSPFKKKLGTKPSKKKAGAKTPFKKKKLGTKPSLKKKAGAKTPLKKEPEDKSPLKKEPEDKSPLKKKLEDKWPPKKPDFSSPSKKPVPLPRAAPGAKPVALPLRPPSPAAHGQAVHQPVQHGLHQPVHPYAPPHQQQPIHPRYSPPQPLPFQMPAMPTIATGGGPLIQVNVQRKEKPTPQPVAPLRAGVKPIPLRKPVKADDEEEQNAEDDMYSPKQQQPLDHGTPKNALDEDDMYNVPDALKSDHGRGDVQQNHGTTTPNNALDEDDMYNVPDALKSDHGGGDAKQMGAPKNDVDEDDLYNVPNTTKDSTDDDDLYRVPKSY

SEQ ID NO: 124627 - protein, 91 aa, Heterodera glycines
MMACYYLAAKVDEFNVSIDNFVDNLRNGTRQYNTETILTLEPDVMLKLNSLLSDAMFLYSPSQIALAAVKFGMDKALGGAFSLSMDWFRNK

SEQ ID NO: 124628 - protein, 367 aa, Heterodera glycines
MLEDAEKTGTDITLQKVEEELKAIQIVKESALSLLTQPVSTSAIQLRPQQWRETIKGKHKAKPAPKWPHHEPAPKSSHHAPSPKQKSDDKANRGHPSHPCASCGSNDHWRSDCKFANAFCNKCNRQGHIAIVCRQRSSNTAHKSQNRSFHTVVVKSHCMVIGTTQGRWWKIPVTINGINLKMNGDSGAQATVISFKTWIKLGQPKLSPTDIETRNCNDTAFSTEGKFHCTVSCFDRPSKTLIAYVSSDLKHDLFGLPWIEEFELIPREILFPKSIKGKPNASINANVVKATNPAIGITDESSLTAVLQKDFEEVFKNGLGHCAIKAHLILKPDARPIFCKARPVPHGAIEAVDTELDRLLQIGAIKP

SEQ ID NO: 124629 - protein, 58 aa, Heterodera glycines
MVTKMAKIHNVAELRRVHVDLGEHRVGQFSGQTGKYEYNAEKQTMEFENLEVEKDDGF

SEQ ID NO: 124630 - protein, 132 aa, Heterodera glycines
INAFPIFTNVAIFALCAVPFTLGQLQNAVKGKKCAKDQVVNKLTVYEDGAIEAECGPLPCGSTASTCAEDLDLSTCKAPSEVFSGMKWAQNGQSLLLRCCSMRASNKLYIGTDLVTLVKKINSIFAFLKIYF

SEQ ID NO: 124631 - protein, 56 aa, Heterodera glycines
FSAVFWRESDQKWRKKLGEWTNGNRNEKHWPIRKEAQGEVEFWEESAWLKQLKIIS

SEQ ID NO: 124632 - protein, 59 aa, Heterodera glycines
MEASHWHSAASISRNNLLDADTKPNEFRMLISDPIHCMGPSSIDLKFRQEKKLNKQFNN

SEQ ID NO: 124633 - protein, 180 aa, Heterodera glycines
MIDLLLKDHNLLINEIVDRVVVTQRKSPSLSSSSETSCHPLHFQHQRVGTPPLSVPSSPMVSNEESSKKQPSHLTNSRITGAASVPVSPLVVVQTQSANNSNIGNSPPANVWQKRAEAIREKKAVHVATGTQVKSLNAEELAILSREEHQRKAPGYARPQSSASMTKQMLSNMEKTVFNA

SEQ ID NO: 124634 - protein, 342 aa, Heterodera glycines
TALTLACVGGHAGLVDLLIKRGAHIEHRDKKGFTPLILAATGGHAEVAELLLKSGANKEHRNLSDYTPLSLAASGGYVDIIQLLLCNGAEINSRTNSKLGISPLMLAAMNGHEEATRLLLENGSDINAQIETNKNTALTLACFQGRTEVTRLLIQYGANVEHRAKTGLTPLMEAANGGYVDVGTVLIQANADVNTTPVPTSRDTALTIAADKGQAAFVGLLLRYNAQINARNKKGCTAIWLELIEKCGQSVQFISEAKEKQAEQANKAAQSLLALLAHEEAIEESKKRSKERQKEKKRAKKQAKKENEQQSETTEPETVDEEKEELNAEKKSNVAPEGKAIP

SEQ ID NO: 124635 - protein, 344 aa, Heterodera glycines
MLLQAGTDINALSSTHNTALIYACASGYIECVKELLATGRCDLDIRNESGHCALMEAASIGNVEIMKLLVKHGAKVTNVVESVEYKESALTLAAFKGHFDAAKYLLSLMPDTKDALEEEEVYTALIEASMDGHVEVAKLLLSAGAKVNLANESFENPLTLAAGGGHTEMVTNCKTYNPIEFYIKVKLLLSAGAELEEPNDEGYTPLMEASREGHFDVVEMLLDQGANVNAKNEDGLETPLTLAASGGFKDVVELLVSRGGDLTVGERTPLYEACQEGHEKVVQKDLNESLLCTAGIDSDSICKLLIENGAQIDCFSKDNRTPLMEAARQNCTKVVELLIKNGAD

SEQ ID NO: 124636 - protein, 50 aa, Heterodera glycines
MCGTQRINVSTSLEEHSNYVRVPATTCLAKWKYNGTFHGSVNKKIYKGEI

SEQ ID NO: 124637 - protein, 125 aa, Heterodera glycines
LFEYPKRTLEKIDFFVFGAVPPNRCAQIYGETESFGNSFPIACTLILRWIFAPHNCLSTPNGHLKKSIFFVFGAVPPNRCAQIYGETESFGNSFPIACTLILRWIFAPHNCLSTPNGHLKKSIFL

SEQ ID NO: 124638 - protein, 44 aa, Heterodera glycines
MGKVTKENATVTVLLLNQAIETYDTVPKSVNDFMDEQGAVMGFV

SEQ ID NO: 124639 - protein, 267 aa, Heterodera glycines
MNDQTTRQYIIDRTELILKTMVTQIFHIRSQHLEQLDGVKEGDQKEQELSEFMRSICNFLSTLTNEMTIMQRISTDTLRSFIDSLLSLVSDQRLKILNKQVFRSLNIIVIRLCEFTNPNVCFVALMKLVMKYQASDPGGQLSSLVRKCLTKFTDAIVEPTRIEKVDILTVLHPIHEYYSRFYVADGQTNQISDTVKDTSKLLCIFLQRLVINQKYAAVEDLYNFMDIHPDQNLKFEQLMARCEYASIVRRAFVEIRQTRLNREPLKP

SEQ ID NO: 124640 - protein, 188 aa, Heterodera glycines
EEAGPQGHDSFWSKIRILRRTLCDFDKAGDESGGLNIKGVGGAVEPFDARGSQKGAKGNRMPPMRSLFHFKLKPGSTACVADFLAEAMPSKFFYISKRSLLGSTDETSATPKTASALRGVHSGRAIFNSDGINAGWSTSPCKSPLACEKNFIHRDLAARNILISHPSVVKIADFGLARLIRENEYEAR

SEQ ID NO: 124641 - protein, 36 aa, Heterodera glycines
ATGPGPGPGREFPVIRGPGPGSRSRVLKSSGPGPGP

SEQ ID NO: 124642 - protein, 21 aa, Heterodera glycines
GPGSRSRVLKSSGPGPGPGRA

SEQ ID NO: 124643 - protein, 164 aa, Heterodera glycines
CEHALQAECLQPFFTDIRRSESRLSMGLSPDQYCLNVRDIDECALGLHNCSTYATCTNLPDGYTCQCPAGWEDGNPELPYTCQCPAGWEDGNPELPGRICASKLCAQCSEHGSCIHPANSTNVVCQCFDGYAGTFCEIAPSALPLVLAIILALLFLLLALWSVC

SEQ ID NO: 124644 - protein, 271 aa, Heterodera glycines
VDVPPHAPAPRELANSATLSSRSRSSTRPFASDDIAASIDVHGSARFGTAAAAGLKRVGVTFVMLSASNAMQWIEYSIIIIAHIISAYYGVSYSAVDWTSMVYMLTYMVLMFPGSWFLEKFGLRKSIWFLEKFGLRKSILIGAFGNSFGAWLKMLSTAPGTTKMSFLLLLIQIVVLPQCILGIPPRLAAVWFGPEQVSTACAAGVFGNQVSTACAAGVFGNQLGIAIGFVLLGIAIGFVLPPWLVPCSAATRCVGYRKKVLQALRLQRVFT

SEQ ID NO: 124645 - protein, 19 aa, Heterodera glycines
PQIPFPINLAANPQIGQNM

SEQ ID NO: 124646 - protein, 46 aa, Heterodera glycines
MEHHANTSIDDALLVDDNEKQKRLFMLGLFILFCWVGVIILCAYPQ

SEQ ID NO: 124647 - protein, 357 aa, Heterodera glycines
MSDNRKEAEEKMAKAIFISGDCWLCVFDLLPPSQLGLGIALISHRFDFYVDEHFKTRKWTLKHIQIGSKIGKNGTNEMEIVNSDWKSMPIPQNPLPKKIVGFERIDILFIDRNAIAFFHHFRPIFPINLAIRSIMNNKRNMELILRNIWPILGKNIYGMELSAFIFHRLRKFVPSFLNDCPSPRFVSFNHGGLFTKFPADDSAMASDGQALAKWLLTPHSTNLPKVLKCMVDRDDPNLASKIEAFKAAFANSSSPTNFIISVWFPRPFADSVVPFDLTNELTREQLAFKRTNISLHFLLIRCPIAREASKWTKWEEEAIGWRIDDQWNFIKIHVDADNDIGDGLLNAMIGPSDQQQK

SEQ ID NO: 124648 - protein, 183 aa, Heterodera glycines
MALVRFEEAKSNRGKILLSRLGFEYAYESDSRIEQGWEYWKCPKRPPYCPGRACVQMAWHVDANGSRYKMGRMSADHNHAAVFGQLNVGDVGLDALPIENIVIPNALQNRVIFNQILNGHRMIVFCSAHALEILRQYNTECAIDGTFESHAFMGYCQIRRGQHMYVSLRQSETALATIGRRKG

SEQ ID NO: 124649 - protein, 51 aa, Heterodera glycines
MEKEKEQMEKDANANQSKELLERIIELEKRQKQQKEENERKGRNLGDNIGI

SEQ ID NO: 124650 - protein, 40 aa, Heterodera glycines
MLSYAQQLRTTEYIKGSKRLFGCTDAGFVAMCGWTFSREA

SEQ ID NO: 124651 - protein, 296 aa, Heterodera glycines
MARKIGFVVTCGWTFFHLLTVLNLAFRIEKGEGPKAKLSVLIDDKCVAFPFPDHPLPNKIRFKDLQIYYIDHSVLAFLRSNKQIWDRSGTKLEVFVPLYMTDVKLIWDVFTREIWPIFAKSIRHFCIRNANHLDNLRRLISPTLLTDLVQLYSITSYGLCPDGISDDGPNATAGQALSKWLHTPSKNGKANELYCCAYFCEITWINTFKETFLRATTSVAYNVRLELLMASEMNTVEQFELVNEMTQEKLTLTKDEEIWLLKRCPIVGETAAVQWEKDENLDHVCGLYFNLHGNCI

SEQ ID NO: 124652 - protein, 122 aa, Heterodera glycines
MGGGGMMGGGGGDMGGSMSMGGGGGDMSGMGGGMMSGGGGMMGGGDMTGGGGMGYGNSSSGWCAFEGGGMGGGGGIAMGGGGGGMGMGGGGGMPMEGGGMDGGMGGFGGGGGAAKPILTQIN

SEQ ID NO: 124653 - protein, 176 aa, Heterodera glycines
PLPPDAPPPIFEPPPPPPPNPPMPPSIPPPSIPPPPPNPPMPPSIPPPSIGIPPPPPIPMPPPPPPMAIPPPPPIPPPSNAHQPDDELPPYPPYPIPPPPVMSPPPIIPPPPLIIPPPIPLISPPPPPILIDPPISPPPPPIIPPPPIAESQSNAKLKLCLPPSGIPPPLSIPPPP

SEQ ID NO: 124654 - protein, 312 aa, Heterodera glycines
MTVSSHLESSDDRTEAQRTGEEKPDLNNVDYAGLRSDNSEVRRKQLDNIAVAALEFQPKGNTLETTEVKTEVPFLIRGDLREYQLVGLDWLVTLYEKNLNGILADEMGLGKTIQTIALLAHLACDRAVWGPHLIIVPTSVILNWEMELKKWCPALKVLTYFGTAKERAEKRKGWSKSNAFHVCITSYKLATQDIRAFKKKAWQYLILDEAQNIKNFKSQRWQTLLRIQSRRRLLLTDTSPVHSEATEVGSGKAIADQDGEDHSLSIVKKTALFIQRISVKANDNGQPQVRQHAFRAWHYHPAAQVLQPPEPF

SEQ ID NO: 124655 - protein, 157 aa, Heterodera glycines
MADKTTINLILQRLEAIERKVNNNNNAVPAQLNEQLQSIVDQSTKEKPIERAKEDADMVSDVLDALDVEVCPQMVYRMGRRNDDKRRGPRLVKVVLPASTFQRFALAQWGRRRNVLRAKNEEWDRLLVRPSLTKEEQKAEHEARVKKREEYEQKPGW

SEQ ID NO: 124656 - protein, 23 aa, Heterodera glycines
MCYMQSEKKKFQLIEERTELIAK

SEQ ID NO: 124657 - protein, 344 aa, Heterodera glycines
MSDNPKEAEKEMEKAIFISADCWLGVFDLLPPSQLGLGIAMISHRFDYFVDEHFKTRKWKLRPIVIRSKIGENGAKEMEIVNSDGKELPIPQNPLPNKVIGFRCIRTFFIDQNVLTFLGHFHRFFANCATELDITTENVRILEFIVHNIWPMFKDTIYLLILNIVAFRQMHQLAPSMLNDCPSLRTFNLSDGISLGFPPDDSANASDGQTVAKWLFTPRHDNLKKKFICVMDSTMEQWLATVEQIKAAFSNASSPVYFGISVYFTPSSSLFSSVVPFKLTNELTGEKLELAKEAEEEEDLISFRLNRCPIVPEDKKQQKMVKELDLLLWNRIEIYIEDDGVGDG

SEQ ID NO: 124658 - protein, 290 aa, Heterodera glycines
MYVNIRRFPTDQFADQVDIYRDDPREDVHELWRKFTESIDWIHRLNCGRKLLQFIQLLHRLLPKYTEMNRLKAEDQREQLEEEMFWAAEEEETVPTPAEGAARGDDEGNSAKNRVLRAFATLELETIYKKIKEKMLAQFEGWWKRVPEQKEPLYEFFKQLEDISTRYVMAIVDAFFDGISIESFRQEYSLGVKGGAVSGMIRIGFDTLALIQTSKFVYFNEHWEKCQLNLSVLIRDRTTGVGGSRVLIPTESRTIPTILKERSGRIPNLIPLDSEKIQRYPNPVRSLVLI

SEQ ID NO: 124659 - protein, 59 aa, Heterodera glycines
MPDAEQMRQQLEHHFVSNWLMDTGRLDELKLREEERREQAAEDRTNEESDQDADIDVVD

SEQ ID NO: 124660 - protein, 51 aa, Heterodera glycines
TFPFIYSLKSSKYINSMHWESNLGPTPLVTFSQTTSPHIQIFFGTAAQFPD

SEQ ID NO: 124661 - protein, 77 aa, Heterodera glycines
MATHCVKGCALANGRLIIAPTVVITTGTFLNAELVWGAQRKPGGRMGEATSSGLAGTFRRVGFRTGVFEAILYKHFV

SEQ ID NO: 124662 - protein, 189 aa, Heterodera glycines
CETRKLELGRIEKFTWLPKKNQLLSYVGYTDERQLLSYVGYTDERLVKIVCENVDESRALNEGIKGPRYCPSLEAKCLRFGHLKHRIFLEPEGFDSELIYPQGCALGFTMDVQQKIMRSIDGLERVEVVQPGYSVRYDFVHPQQLWPSLETYSVRYDFVHPQQLWPSLETRKVVGLFLAGQINGTTGEK

SEQ ID NO: 124663 - protein, 34 aa, Heterodera glycines
MTIVSPLWVGALPHVTAMLGWTLAIHFISKYTQN

SEQ ID NO: 124664 - protein, 16 aa, Heterodera glycines
MKCLYPYLAIFYPVYL

SEQ ID NO: 124665 - protein, 207 aa, Heterodera glycines
RRMEKLGEGSYATVWKSETVWKSENRLDGSIVALKEIRLQEQEGLPFTAIREVSLLRALRHANIVRLHQIIIHHHSLVLVFEFMNTDLAKHNTDLAKHMEQFPHGLDSFRTKLFLFQLLRGLAFCHEQKILHRDLKPDLKPQNLLVNTNGELKLADFGLARAKSVPSRTFSHDVVTLWYRPSDVLLGSTVYSTPLDMWICWAFLTHF

SEQ ID NO: 124666 - protein, 80 aa, Heterodera glycines
MTKKVALALIDFWFQLDPRKRISAAGAMLHKYFNEMPKTLHALSPTESIFAAFDGIIQQQKLSIASETTNDSDERRTCYV

SEQ ID NO: 124667 - protein, 108 aa, Heterodera glycines
AYPGAEGLCSPEIEISEGGTMLDGKGKFNDLKAMLDSNRENIKMDAMRRIINMVARGRMVARGRDVSELFAAVVKNVAVKNLELKKLLKKLVYVYLVRYAEEQQDLAL

SEQ ID NO: 124668 - protein, 135 aa, Heterodera glycines
MGNIVYSDKLSCYESADYCARSCSASSQCVYVDNCGDSANAHYACLPFDTRLLTWILVVSFLVIVLCCSALVVFYALRVIRRSFRNPVQTDGDIVFYNARNVHNFPHPAAMKQPTVEDDGRQEYYYNNSRRNDYY

SEQ ID NO: 124669 - protein, 202 aa, Heterodera glycines
IASGNTTQNSTETTIEVEEEIPTAPTVTEASTTATSKTTEQSLDDQTSNGTSSPSTVNEKQPKTIGNDTTTAEKANTERTEATTETETTPIHNSSLNVPIDEQQKNNTTIANEHGSLNVAEETTATTRIPTSPTTFAANTTESGTTDGLIMEGQQNETIIVPPANKEREKGEKAQTIKLPVAKSEKQIEISEQSSPNFPRQM

SEQ ID NO: 124670 - protein, 151 aa, Heterodera glycines
MCKFLNITLIAVILLKTVKSAYLSTKCGFHWADYSIKWAFEPQTQSIVFVLKTMPPRNLSSEGILTTGIAFEAEEHTEFIGVAISKQKDGEMKVIRAKAKGTEGLFELNSDNTANRVREITMKKRQNGEIIVEFARQLKGENERRLLTGCR

SEQ ID NO: 124671 - protein, 290 aa, Heterodera glycines
RILARLPLEPKMGKMIVLGAALGVGDLMLTSASATSFNTPFVPRESATSFNTPFVPRERMHTKLSHMHRSFSGNRPSDHIGLLNVNQQFAQEYEMDLTQAENFCRRYSLSFPLLSMSNEAKRQLYDVMVHISGFPEKTQLYDVMVHISGFPEKTFQVFPIDVHGDDSNLDIFLSLMIAAYYPNVCYIKLMIAAYYPNVCYIKDKRRVFTLEQTTDKRRVFTLEQTTAILSNMSSCVPFNRNETNMSSCVPFNRNETFDFPSPLFVFAEKLRTSCISCKQASMVSPLQLLL

SEQ ID NO: 124672 - protein, 171 aa, Heterodera glycines
ALEELHRMRVPPLLYAQRLLCKDGKLLIRKNEIKSGILTPVDKPALEELHRMRVPPLLYAQRLLCKDGKLLIRKNEIKSGILTPVDKPLDIWGQTYIGLPYPINYFWDANCFSPRRAAPDASAAVAVRSTVAVQRRKIAYQKKRNKIRNTHARRQTVGYMGTNLYWTTIPN

SEQ ID NO: 124673 - protein, 21 aa, Heterodera glycines
MFEEPFESCTGCECPRCCTLN

SEQ ID NO: 124674 - protein, 74 aa, Heterodera glycines
MGNERCTNFGRRTTVKLGLEKSTSANGWINDTKMVVLNALRLDKPHTTENCDLYLGTNRAPDFSTAKDFSTEIL

SEQ ID NO: 124675 - protein, 142 aa, Heterodera glycines
SDEMIGSQFVILFNRSTTSQLNSCGRLEAIINGKNVDCIYIDFQKAFDSVPHNLLLYKLEKIGIKGKLLMWIKGFLSNRTFRVKIGDSLSVKVTSGVPQGSVLGPLLFLIYINDLPDALPSGVKIKLYANDVKLYICYKAKS

SEQ ID NO: 124676 - protein, 92 aa, Heterodera glycines
MGYMKTSYPYLSLLIRNCSTVIDFFFLLYCRRHTVPRTKLFWSVATWFVFEFLLNMAGNTLWYACRYSVLNKGLSTLKNLLKIARFLVLAMD

SEQ ID NO: 124677 - protein, 101 aa, Heterodera glycines
MIPRLLDLDAKEKSYNGKTSWRPNKFTFFHLKEKACKHQKKSLSDGLCRQMPPPLRLLPFRSPEAKENEEKDKDKQIQVTKAIIKSKFRHNQIQIRQSFIS

SEQ ID NO: 124678 - protein, 79 aa, Heterodera glycines
FCLEEHSSSHLPHQHYFFNYFFHFITQRSRLIRSSPNFAGKLLRTLQMLINFLRIFCLEEHSSSHLPHQHYFFLIIFCI

SEQ ID NO: 124679 - protein, 92 aa, Heterodera glycines
LFEYPKRTLEKIDFFVFGAVPPNRCAQIYGETESFRNSFPIACTLILRWIFAPHNCLSTPNGHLKKSIYFCFRGSPPEPMRPDLWGDRILRE

SEQ ID NO: 124680 - protein, 102 aa, Heterodera glycines
MYKKVLFNKLSKFQCPPKCAVSIYSPIDEEEEAKCSGVWHFRLEKSPMCEYMVRFISELKKLQEPSLMNSVLENFTVLQIVTDKQSNDTLMVIAFMVGIREE

SEQ ID NO: 124681 - protein, 459 aa, Heterodera glycines
KIDPKITTDDVHKFLEKQKTYTIHKPIRKRFPRLKTIPSGFHTDWQCDLCIFDQLKKHNDGYKYLLVCIDVLSRMIFSAPAKSKKSEDMIEAFDREKFIIKNVMYSPDLHAGVVERANRTIKERLYRYFTKKDTLRWVDYDSPRFWNWAQIWSVALSSIIYPYSFTLLGINGQEFIKVWENDSSVPTQVYLPDMNFKTAGGLGNKINEAFSHHYKIKKQRGRREAKAEDTKDSKIDVAKSAAERAGRDVERHFNQINNISNSIQTQLNTLRETNPHILEEPDIKIWFDKMVEMGTEIQTSRNELKSFQEEVDKAKNITLEHVEKNDLKKAKKSADVAKGIARQAKTKYTSTLEGYNDKSEKGFSGIVNRLNEALGEHIKRKDIENRQVSEAEKGPQKRERLANEDVQFQYDSIDQKFIVYLSAAVSHIDLSKHLAYVLGFKNTRLFHAEEATYMPDLTG

SEQ ID NO: 124682 - protein, 52 aa, Heterodera glycines
MCVANGNTDQITKGEINEEGHFNNESKCCGITVSYCKSKTVPIQYSNYGTKK

SEQ ID NO: 124683 - protein, 31 aa, Heterodera glycines
MTSDEIGWIPSTRRFNFGLQVQLSWIFRLSG

SEQ ID NO: 124684 - protein, 70 aa, Heterodera glycines
MIDQILIILVFIGTICDNKPSYCLIIKRRILSEKNSFLLVCILNHFFISLMNLFNVKILMVKKLNVNLCD

SEQ ID NO: 124685 - protein, 52 aa, Heterodera glycines
MSSNVTDTDSFPFCLLAKLPVGLGVCEVGNGEDSSGRENASLAVGLLTNKSN

SEQ ID NO: 124686 - protein, 72 aa, Heterodera glycines
MAFLQIYCIRGDWCDYDCGKFHRRKLNISDNNFVRAHVDKLEKAALPNNENGGWSNVHCGQGKEEPWPKLKN

SEQ ID NO: 124687 - protein, 203 aa, Heterodera glycines
MALMPFLCIIIHSCQQQLSHFECDAKRRWHKLCPMHNSFLSFCVLLSLFHYNFAGASQCPTKPILLTGTIKVPKNVVDFNSSAQCLPSCNQTGQEGNKTFGLTFRLPIDVGQCDEGLLICYPGTLERVSGGGGGGWQNMAAAIKKQYKISDYKNNTNIPNEKCRQNWEKDGKKDGPIWHGVYVYTERNNEVRHIMLELSFSSE

SEQ ID NO: 124688 - protein, 184 aa, Heterodera glycines
MTRHLKNSRYNFGPNRRQISIPFFGNQSELVGYGGDAFKEFDDASLGTSFIQNIQEGAFLKDFVGLWTLGHDMMAPPSAAGTQQSVVLYFYRSCSCSMEAWFTRPTDTEMPANREAISVGTADCAKTVDTMIPFDYNEKSEFAFTINGITDENAVNISVQLLQEARAGHSLVLEFQNSYFMKNI

SEQ ID NO: 124689 - protein, 149 aa, Heterodera glycines
MTQILKLSEIPMIFPKISFFSTDNISHAAGEQQHDQIESKVQFEEQKQSENYAMACFFFTRLYRKLAGLLETPFYGKTRSNFIRPQKYTTKQIEDTSGYQMIPSMLNLDASGKSYGVDQKLIIFMVINYSTKYNFLCANRRTTIPKPIR

SEQ ID NO: 124690 - protein, 67 aa, Heterodera glycines
PSASDFGLAASSSSTSTGEEDDAQLFGRRVVKFLRSLNNGRRRRRACIGIEQVMIEFETEEEEEQKR

SEQ ID NO: 124691 - protein, 88 aa, Heterodera glycines
MPKQNEIVLKYSFLDLTWFLDIEAVFYAISKTKKCLVVKTIFHISLHNFVSSARIETGIRPLERAARALQEGMERKNSYFWDFFRNQN

SEQ ID NO: 124692 - protein, 33 aa, Heterodera glycines
MIKNYRGGIRDNQNAMAEKMSGIDAKLEQIENG

SEQ ID NO: 124693 - protein, 91 aa, Heterodera glycines
MATLNVAHLITLIGVGSIASSVVADEQQNQNKTQNGGGGLKHLLGSDVFTELRAKQNAMAEKMSGIETKLEKQIQNGNNFILINSFSTFVD

SEQ ID NO: 124694 - protein, 115 aa, Heterodera glycines
MKLMTDLINDGRMKLKENSSEILIKQEKENEENIEGEKIEKKAKRKKNGKQHYDALKEEFRENYQIFKNVHNMKDIEISKLFGINRETVRRWKQAFFSGMIQNPDKKSHGLMIFL

SEQ ID NO: 124695 - protein, 60 aa, Heterodera glycines
MAVLIDSMMDNLKNKENADLVAPLFPITFVILGGELLVERENLEIDYIFNFLSGSVTDDI

SEQ ID NO: 124696 - protein, 204 aa, Heterodera glycines
SSAELALNDEKSWANYRRRLATFDVASRIAKPKEISPVVCARHGWKNVGEEFLQCDDCGKVLYIKLPGDEVSNRVLNHCIRHIQRKLVEAHTVICPWRISPGLNTSATYDITARYHQLVDSGQPELPLADNVLDEALADKFGVQSRFFLALAIFGWLPISKQATNHVEMNKPQPNFHCPLCGRHLCASVFSSDNPLDPREQHQH

SEQ ID NO: 124697 - protein, 89 aa, Heterodera glycines
MDAGFVISDPENIRKGVLPDSLLIIIFSKNLWGPIIQEPRIVVLKVKGNVIIRAPNSALVVHFMRPMDFSRVPRDREFLPKPGPGLAGT

SEQ ID NO: 124698 - protein, 530 aa, Heterodera glycines
MVTIGTLDVQWIDIHFTDRRATDEDRQRVIRVPVPKASHSRVEQLRDFLAVTLRNRSGAKLLPTPSEVEANRNRTKLLDSPPPLKREKRDVSSTPMFDASGKRLQDSPPLYNINEDERLEESPPPFEETKISAAPPPPVTSPVKPTTTVKTPAAPAAAPSATAKPATQSTVTKQAPQSPKPTAKPTTATPVKSTTAPPPTVKTTTAPPPTVKATTAPPPTVKTTTEVKSPSVKPTISAPPAQLKSHAKTTAPAKAPPPASVSAELAPRAPLADSPPRFDEEENKTDKLTAAKPSTKTTITAPPAQLKSSATPHQQKQQVPVKPSAPISVPAKPSGSPPRFEETRQKQQQPPPPPTSAALTLADLPENTLSVQIDPLSYVPNSVSIQYLENMERFKLVFNEAIVSHVSFSPQLGYVLGFENPQHVVSNELSKYPVDLRGGISSFAVYSKGLTENMIIGNSLSSLLRVVSISGAIPWEYNEKIYDSPIFARVLPREINEIEIELRTMDKGRLVPFAYGTTMVVLIFKKVINF

SEQ ID NO: 124699 - protein, 279 aa, Heterodera glycines
IILLGRYNSKDIIKEAQDKVTKVIILLGRYNSKDIIKEDQDKVTKVIILLGRYNSKDIIKEDQDKVTKVIILLGRCNSKDIIKEDQDKVTKVIILLGRYNSKDIIKEDQDKVTKVIILLGRYNSKDIIKEIQDKVTNVIILLGRYNLKDIIKETQDKVTKLIILLGRYNSKDIIKEDQDKVTKVIILLGRYNSKDIIKETQDKVTKVIILLGRYNSKDIIKETQDKVTKVIILLGRYNSTNDVILLQIFKKLLITFVKVNQIKHSWKHSIAYGFSISSL

SEQ ID NO: 124700 - protein, 85 aa, Heterodera glycines
MSQLQFVWRGSKRIIAVGTQKGLPPNRRTKTADESLRHALPFISKLGLMWGPIQRPITSGTPTLSTVIQSDKLLFSPSNFSCAFM

SEQ ID NO: 124701 - protein, 146 aa, Heterodera glycines
MSLFLNWATFTIFTIALAVPMFQSFSGVQSYANDENASSLTGESMKKHFTKEYNALDQCTKTEPYRSRSPSLFAGDHFRIRISVEQSQFNIDIHGARVAFFVPKMPTSTGNVLGIDGDLKAEERGTFVTIENEAKSLERLLTSLIF

SEQ ID NO: 124702 - protein, 376 aa, Heterodera glycines
MQFFIRFSLVFVCFYGKFVPNIGQLICKNEEKQNLILVKLYNDELATNDDTGELWEFICELEQQNLAMEKAFETQKQNGKMWRKSSETFDGEAEFFRHKFEIIRRKDNELAELFTKLRSTFYSTVLKGIKRLTPRHFIKNNKMNGKKWTIRQWHYEIVSVTLQMCDGSMAECLRNQLTQFVLMLTQRFKISKEEIMPKKEEPTIALKLIKEFAELWREIKVKQKSKSDYKGTENGKNNGQNEREKCWDSDEKQRKMLRLVFTAVNGDGNIMALNGATKVNGGGRRSQKRRRKKRDLVLLILLIALLISLFFTVYSYCLHSSNDDSLEQQNADMEMLLVVRQANEIFVKFRYGDDETDKKGNPKSDHIYIVVDGKGE

SEQ ID NO: 124703 - protein, 66 aa, Heterodera glycines
MFQFDPPLIVPPETVESVDAIFEAMLTGHWPPDSHTYALHSCIDFAYQFVCRLNNGMCGTFDYFYS

SEQ ID NO: 124704 - protein, 68 aa, Heterodera glycines
MKSFFNFPFVFCILLLIGCVDKCVGGVAALPPKYLGIKNHDKCLTEIWKKANIRRLAHESEDRSERSK

SEQ ID NO: 124705 - protein, 66 aa, Heterodera glycines
MEIVFFFISLATILLIGKTARLPSNKKGNDANKSDFASTSNSADQTQNKHKSGQCRITSTSCATLH

SEQ ID NO: 124706 - protein, 376 aa, Heterodera glycines
MQEAEQKADGPAQFPAAAPKPQNKTKSYYELNDFECLHQGARQMSSPLVHPKPSGRKQKCLSGKDDESSISAIDRKLWQGKTTIKISDLEKAQNDMGKLEDGVNRAFRYMNRSLNQKVNWVKDVVSNTNANFETLKVQYETLTERVEMLEQDSDGTNSGGTVSISNLNRASRVPFVTPMGNAQPNQVVPNPVPIHQLSSEDEDDGPTLFGLNMLSNGPTVGSGLEMFCEESVFAFDDWAERFKDYLSVSGKAYTEQEKVTRLKLALRDTPRALFKELLPAQMDTLDSALSELRQKLDSPQRREIAKRTLSLCKQREDETVAQFLRRLTPLVDATNSTLTGEIRKEKICEEFLDRLKPNISFLIRLVGLSRAKDLDL

SEQ ID NO: 124707 - protein, 43 aa, Heterodera glycines
MPSARTFVRNRAFYPCRKSRPECALFLLAAAQTFAATCHQMAR

SEQ ID NO: 124708 - protein, 352 aa, Heterodera glycines
MRGAVALPTQQPLTLTVSNSVDNGGIGQHPNGGGGIVQHPNGAVGIVQHPNGAVSGASVPMWSLNSALPPSVREAVALVHARQLQKMVNKHIQPEFASVVPAIGENGFSNLWWIYLEWQPDMVMNRVVGLVVLAGPFTTQTDISGYDVRIIFDHNDLEHEMAMHGWQECVPRMSNICAGQIVEFTRLKVRAQGHNAKGSFPFTLLYNAESRHRIVGQSSSAVATSVFNPPSTNTPIIVEANDSNNAISIPSGGSGPISQQGGNGVFGGGGSSVMAAPRQSDQQQRAGVRANAGSEQHRLVMQSDDDDDGEEQQDEQSRGSGGDGRAANFALPSAGTDAPRTETGASSTVSRK

SEQ ID NO: 124709 - protein, 33 aa, Heterodera glycines
MHSFLRSRFSMLSDIHCFLCSTIEGEAPTDYRF

SEQ ID NO: 124710 - protein, 187 aa, Heterodera glycines
MLFLLFIFVFLIINNSTDKTLSVNLCKKCRPTFAEIFGEEWQNEIIIGGDENENETDQNTNFHQNDQNELTDQTDQLDVQQKIEIIHKFHAIREGIKKKGKYSAKIWNKIEQKIAKKLGINRPKIYEWKKEFGIYYYKKKKREFIDQIDEIKRMPKNGRQKQFAKELGISKETLRKWKKEFGIEMSK

SEQ ID NO: 124711 - protein, 91 aa, Heterodera glycines
MGELSFLNEENKETWKKFVKLSSKELMEFEQSIKATIVLFLQHTKTIKNRRQKRMDNNHPPNTPLANDARIPIGNAKGIQSANDARIPMGL

SEQ ID NO: 124712 - protein, 64 aa, Heterodera glycines
MGDNRKDLDLSNDSSKIWLFLSKIIAKRNFHMRFRTNFRADNESNQKNINATNLKEVSMIVICI

SEQ ID NO: 124713 - protein, 42 aa, Heterodera glycines
FENFFKRGDPFVLQNFFKIKNHDNLLSGFLKVANHESGMYFD

SEQ ID NO: 124714 - protein, 78 aa, Heterodera glycines
RPSFVEILANFVDFPGFTIGSILDGYNRHKIPGGRVKVMVECFINSKTADIHRSPFPNIFLLIYANGSVFHLTMSLVP

SEQ ID NO: 124715 - protein, 174 aa, Heterodera glycines
MLKDKIVDKDSQYLVKMQLNSEERWTKAMKCVLLNMKRVIGILTTLPPTLMVNPTTAAAAATAGSRTANTTAIIGTAIPTHSPSTSSSSRSSCTGTAPVVHSSQTVPAAKDAPSSSTGQRKQNSFCSATQRHPPSTGGRRPLLLPPVQWPMATAATKRKYLRRPFTLKTAVVDP

SEQ ID NO: 124716 - protein, 95 aa, Heterodera glycines
MSNKLNLPLAFCTLFVHILLDVPSSSDGMIANTVRNPAFSKFVTQITHKSTQTAQLAQRVVAQKATGGTIRRNVANTQTKNVGKMPKTATQETTN

SEQ ID NO: 124717 - protein, 45 aa, Heterodera glycines
MEEFKEGLINAALDILPDFAFAVPVSLFVANPPAAILWAGWLAVG

SEQ ID NO: 124718 - protein, 367 aa, Heterodera glycines
LTAKVEDQEDDVNATTASNSTEETAVTAKVEEQKDDANATKATALTAKVEEQEDDVNATTASNSTEETAVTAKMEEQKDDANATTASSSTEETAVTAKVEEQEDDANATTASSSTEETAVTAKVEEQEDDANATTASSSTEETAVTAKVEEQKDDANATTASSSTEETAVTAKVEEQEDDVNATTASSSTEETAVTAKVEEQEDDANATTASSSTEETAVTAKVEEQKDDANATKATALTAKVEEQEDDVNATTASNSTEETAVTAKMEEQEDDVNATTASSSTEETAVTAKVEEQEDDANATTASSSTEETAVTVKVEQQEDDVNATTASSSTEETAVTAKVELQEDDANATTASSSTEETARTVK

SEQ ID NO: 124719 - protein, 334 aa, Heterodera glycines
QKKQQVTAKVELQEDDANATTASSSTEETAVTVKVEQQEDDANATAASSSTEETAVTVKVELQEDDANATTASSSTEETAVTAKIEHQEDDANATAASSSTEETAVTVKVELQEDDANATTASSSTEETAVTAKVEQHEDDANATRASNSTEETAVTAKVELQEDDANATTASSSTEETAVTAKMEEQEDDVNATTASSSTEETAVTAKVEEQEDDANATTASSSTEETAVTVKLEQQEDDANATTASSSTEETAVTAKMEEQEDDANATTASSSTEETAVTVKVEQQEDDVNATTASSSTEETAVTAKIEHQEDDANATAASSSTEETAVTVK

SEQ ID NO: 124720 - protein, 33 aa, Heterodera glycines
MEIRRIMRSIFGLETYDSTKRFIDQSILGCVIY

SEQ ID NO: 124721 - protein, 25 aa, Heterodera glycines
MELLEPRKGPGLSEFSRHYDPECFN

SEQ ID NO: 124722 - protein, 173 aa, Heterodera glycines
KCPVKGFNGECFERNGGNDTEYENWCYQYASTSMNYDMKPSLILVASSTADVIAAVRFARSKRVNVAVRSGGHQFSGASSASGKNIQLDVSQAFRDFAVLPNCSNSSVAVRVGISFTLLEFFLMMAEKGLFVPGGLCSNVHIGGHIQTGGYGVAIRAFGLEADHVLAFDHYGR

SEQ ID NO: 124723 - protein, 123 aa, Heterodera glycines
MRLWVASLCFYVSIFIFCEILRGFAYRFELHIQIGGEHHQLITSLIYEVAFVKLRIGKAQFLTASNTSDQLLSFSRSICLIERFVLIGPQRKNLPYFTIAAGISRDSLPGPTFYQFTFFLTAL

SEQ ID NO: 124724 - protein, 226 aa, Heterodera glycines
MSAKIYKTDGFSGFYNGLSASIMRQLTYTTTRFAVYETVKKQSSGDLNFGQKMLLAGVAGACGGVAGSPADLVNVRMQNDIKLPPAERRNYKNAIDGLFRMAREEGVSKWFNGCTMATGRAVLMTIGQLSFYDQIKQVLKTRMMNAPPGQFKGLWDCCVYTAKLGPTGFFKGFFPAWVRLAPHTILLFVFFEQLRMRCGYLPEKKVMQKEADDPKNITTENFSKEK

SEQ ID NO: 124725 - protein, 84 aa, Heterodera glycines
MDFLKADERRVSRWYFGGIAGSMAACFTHPLDLLKVHLQTQQQGKLSLPGMSAKIYKTDGFSGFYNGLSASIMRQLTYTTTRFA

SEQ ID NO: 124726 - protein, 93 aa, Heterodera glycines
MVDVRKKLELEVKIDPAIFVVCSGGAFDPTKTTLIPELGQLKLNTLDEPSTKAYEHITDQRLRSLVAKAYDNFQLCLSNLRLVFSTRRRPNSD

SEQ ID NO: 124727 - protein, 42 aa, Heterodera glycines
MNSLVEILCDFNDSEPHELSEILRHRKKEKVKLLRRHTLITP

SEQ ID NO: 124728 - protein, 195 aa, Heterodera glycines
MRFAFAVSRPGVLIIVTLLALCCAISEGGKPRSKSTHKPDVSSSSNNIPSPQFKWNNNAPVLAPWRSAANQRVSDLRTVELPFYQHIKQINSKPEKKQCSFPVDITRYVHPRDSENNEHRLEIEWDSDKRAWAFTINLVKRLDSNNLLSRILDNPNARRPLESTRQEIVKLNNPVEDGEQMEMDALKLSLVDPVS

SEQ ID NO: 124729 - protein, 87 aa, Heterodera glycines
QRVAKELEEFAGICETIAETKEKGKRKSAKAEKEEEERAEEKEEEETRGTKKRKKRGETTDEGEGQQKGRNGKGQTRRNKTQRGPDG

SEQ ID NO: 124730 - protein, 371 aa, Heterodera glycines
FREELLWCFYWLGLGVLSSIGLGTGLHTFLLYLGPHIARVGPHIARVTLAAFECNSLDFPEPPYPDESVSPDAMGHSSLVTLWTIIAKDAMGHSSLVTLWTIIAKVRLESLMWGAGTALGELPPFFMARAAVRLESLMWGAGTALGELPPFFMARAARLSGHEPDSEEYREFIAIVERDATNQNLMERIKLWMERAVNLMERIKLWMERAVTRMGFPGILLFASIPNPFFDLAGITCGHFLIPFWTFFGATLIGKALVKMHMQMLFVVLTFSEHHVEHLVSLLNKIPRIGTVLQAPLKEFLQAQKISLHRRPGDPIPEQASSLSFCRNSNSFCRNSNVFFQILWFVYSLINSLAQQYQRRMWEKERIDKKL

SEQ ID NO: 124731 - protein, 74 aa, Heterodera glycines
MFKFLFSRPELLKKIAGGERKVYSDAEKLEYVKRDEEMKRRNPMISDRKIAEKLSIPIANLIRWTKKLGTKLNR

SEQ ID NO: 124732 - protein, 48 aa, Heterodera glycines
MGAKEMDRNPDPAWEIALEKLIKKLFLIESVRVRISTLGPPKSVRLKM

SEQ ID NO: 124733 - protein, 256 aa, Heterodera glycines
MKLTIFAILFVALFIAIAEADGNVRAKRHEERLKRQDNRADEENRQVDSADREKRQDNRADREKRQDNRADREKRQDNRADREKRQDNRADREKRQDNRADEENRQVDSADREKRQDNRADREKRQDNRADREKRQDNRADREKRQDNRADREKRQDNRADREKRQDNRADREKRQDNRADREKRQDNRADREKRQDNRADRKKRQDNRADREKRQDNRADEENRQVDSADREKRQDNRADREKRQDNRADEENRQ

SEQ ID NO: 124734 - protein, 152 aa, Heterodera glycines
NRADREKRQDNRADREKRQDNRADREKRQDNRADREKRQDNRADEENRQVDSADREKRQDNRADREKRQDNRADREKRQDNRADREKRQDNRADREKRQDNRADREKRQDNRADREKRQDNRADREKRQDNRADREKRQDNRADRKKRQDNR

SEQ ID NO: 124735 - protein, 161 aa, Heterodera glycines
MGEVFGKKRFSELEKRKIVRHFMEMKANNWTKMDNKTRSEKEKEVTMTFEVSRTTIAKWKCQLRKRGDDQWSEEEANEHTSDEGTENLDGEEDGQQPMAHEDNANENDSENANYSENDNENANSSENDSENANGRKNDSENANYSENDSENDTKIGVKESL

SEQ ID NO: 124736 - protein, 220 aa, Heterodera glycines
MTDQQQPKKKMPIELCQEVVQMCDHKGPTAFVKIAKINFQFWKLVNDHLRNKKWLLDYLEIDEKQMNGRTEMVIYDGTGKILPIPQNPLPNKISGFQTIWITYLDANVIAFLHLFQHLFTSCEITLTIEMTNGQFLFSLAQNIWPLIKNNVKRFSMPTNFEHFRHHFPSILSSDQWPSLQFVYCEDVLPDFPADDSANASDGQVLTNWLFSAHSCDLPPK

SEQ ID NO: 124737 - protein, 77 aa, Heterodera glycines
MCDGRGGRIGHLLAHFVHSRTDSARSAEFIGPCAPPIPTSSAAAATPTVGLSHGVKRLNRQTERRTAPSIIPKSLSV

SEQ ID NO: 124738 - protein, 46 aa, Heterodera glycines
MPTVTIKFGRIVHKIEGQTQFKFQPFPSLGALQYCLGRHRPQSEQV

SEQ ID NO: 124739 - protein, 27 aa, Heterodera glycines
MSLFNPNEPFEMRIETVQEEGEDCRFS

SEQ ID NO: 124740 - protein, 29 aa, Heterodera glycines
MHLENGNFVLRSAPISNDALRLLHSLKIC

SEQ ID NO: 124741 - protein, 44 aa, Heterodera glycines
SRGNSVGHRRFRCPIFGHIVFNSNLTFAILTWFLIGYSFLNIIV

SEQ ID NO: 124742 - protein, 126 aa, Heterodera glycines
MSFFILTVRGGAVRGGRGAFIFIGALAVAAVLQGANADQQAADSIQINVDISATISIRIELGLQALRPIVPLPDPRIWPLKRPEISSPRGRGLTPILSKFIKWAVFCGPLAHKLESRVNYSITNLV

SEQ ID NO: 124743 - protein, 38 aa, Heterodera glycines
MAKVSILICYLGSLDPSGANWAYGMSPEIQFQVPNHQE

SEQ ID NO: 124744 - protein, 107 aa, Heterodera glycines
MAFVPFRPLIVHPSSALRSLCLLLDNPLRSGTVNSWSNDAVCAATSSSVPNVTAPAATDRLRFTFRTIPFIAKMDNKMTLKTISRDMVEQNYEQMVAISKHIIQMIR

SEQ ID NO: 124745 - protein, 120 aa, Heterodera glycines
MAHLELKHSTPGFRVKQPWLHTHLEFENRRVEQMTGFYTENAQLRARAGPNWCAGTCRTRPPPTPSSSQHGPETIAQFTQSKQHSPGSGYQTPKGWPQDRAHAATPSISAHSACKCPIRH

SEQ ID NO: 124746 - protein, 73 aa, Heterodera glycines
NALLVRCFVGSCTCTCSYVTCSARLWGFGVLARTCGSNSRFTDRNSSAPMLCMLWRSAWITGIPALIFRPELR

SEQ ID NO: 124747 - protein, 63 aa, Heterodera glycines
MIVFQILCFKVLFVYLIYRLYFFAFLNKQFVPNFEELKRAVGQLHGSDRQNSGVNDLSTMYVI

SEQ ID NO: 124748 - protein, 158 aa, Heterodera glycines
KSFSNKRISAQVKPPQNGNVHSSQNKAIPEINGFVGFDSLPYQLVRKCQESGFQFNLLFQFNLLCVGETGMGKTTLLESLFNMKMEFEQCNRELKTVELREKTFDVQEGAVKVKLRVVETAGFGDQLDKEDVQEGAVKVKLRVVETAGFGDQLDKEKS

SEQ ID NO: 124749 - protein, 144 aa, Heterodera glycines
MVGFHINALERLMNDMIQAPSARALRLITTECENGPHTPRKILRWINLIADQNCKLPTVNEAKTYARALEVTTQIKKLAQRQNRITNSSFYAMWQSALLKKQINFESLKTPHEISQRMVSFFIENRFDSYHADVHRNASADYFE

SEQ ID NO: 124750 - protein, 218 aa, Heterodera glycines
MFSVPMPSCLLPSPSSTSLTPVQTPVLSPIVNDSRFSYHVPMPFSPFSPPPTPTFFQTAVPVTDDTLLRLANFVRSTNSDTQQQQQLVRQQQMAGIESKDDDARRISAANIGTMARVAMLELVRAQVRSPIVDFLCMVLSDFNQFGHFCSFIDSREFKILNTKAFTELLNLRSKQKPKSYLQVARALKGYEGRLVDGHVMLRKVKDKRNQFKFFPDLP

SEQ ID NO: 124751 - protein, 33 aa, Heterodera glycines
MDIANHKWGREETAAWHREMMDRKLWWGNLSLL

SEQ ID NO: 124752 - protein, 84 aa, Heterodera glycines
NEIRLNRRLNKTAPSQLLEFIIAFTNFSYGIKLNGKFLLSSNISDGEEEFFPQKWWEKLRFDQMTSFEVRKSVDKGLKVLRYRK

SEQ ID NO: 124753 - protein, 268 aa, Heterodera glycines
MPSKQQNLRKKMQDVYRRQAERSVSRDNSPVSDGSADGNGEASAYLRGTSTPSLSALQISTPASSIGSKKRGRPLRAGAKPILATQERVSLIDTPRTAVTQSDQGSPCKKRGKVAECGQPMFANEAIALTPVSTLSRGGRPVKQLGGHAGKGRGKTNESMSKCSEIDQSVENALSPAPSHIVPEKINFSTVQINFATSRNFACKIWKWAAIGLYERDGETPIAPSSGPRYIETCWNDMTQFLNDGFAATYLAYLATISQRKVVVVDPM

SEQ ID NO: 124754 - protein, 25 aa, Heterodera glycines
TSLLKSLINQHDPKPSTSSSDGQVT

SEQ ID NO: 124755 - protein, 21 aa, Heterodera glycines
MRTRPIWQVKQRLLTSQKKGF

SEQ ID NO: 124756 - protein, 297 aa, Heterodera glycines
SPKKKRDIEKKQRNSTQSGEEEEMTTPKTSRVPMKASAITERARKANKNGNNDKFSSTISNGSTSSAASRGVSSSSTQTTQSSSSASSLLNIAPDILRQQLPAKPIGTDAPTTFPLLTTLSSLPAAEAATASSSAFNLHGGVRPEWFDRLFASTTHGAAATVAQRGAGGTTVTELSSSTQQHYQQKQQQPKHRKRWPETADEEEEFGTTFVWEQLYATKMFQFEQDKAEEGVDEYGGVAQHLREEAIRIGDKGNHLLKTLSNGSDEATAADANSCVGDDESNAAPEWADQGIADFAT

SEQ ID NO: 124757 - protein, 36 aa, Heterodera glycines
DSKQAAIPNNPMSPPLLIIPKLLPSETVPHLVLFPV

SEQ ID NO: 124758 - protein, 16 aa, Heterodera glycines
EAIPEGFGLPINLGAS

SEQ ID NO: 124759 - protein, 291 aa, Heterodera glycines
MKKMYNKAKENATKMEQNEMEQKIFLTGNGQLFGMDMAQTSSSLSSSSKSASKNADANKNYGEKKDELILHLLIYEVESVIEDEAFLMFVKGQSNFMYVLEYAFDTVTRHNLRQTVDETNKRFYTQKYVKHLGILHLMRRDWHCAENGAKFKPESSSDKNAQEIERNDSALVQYEQNVECKKFRSYLDMVYEFLFRVHNGVASAVKPIFEMSGTILTLIDVISALGKISNLNFGFELENFVDVQKLKLLNWNELLKYRKTAAKPKFQTEELFIQVSSKKPDNQKLSDEVYE

SEQ ID NO: 124760 - protein, 99 aa, Heterodera glycines
MAASALYIPVFKRCSNLSKKLNGDGEAKAEASSQNSTQIYAYIFALVQSASTLGSFFGSTIGGYGADAFGFPWICAFVAFAHFLFIILEQIRRILSKYL

SEQ ID NO: 124761 - protein, 41 aa, Heterodera glycines
MVYQMYLASNFNNCKSNTSQDFLVIISFCFRIATFGIQFVT

SEQ ID NO: 124762 - protein, 359 aa, Heterodera glycines
SVTGKEFTKTVFLFHRNFRWITSGEYIQMKRRAGRRGKDKGLVILMVDQQMSAETAMQIIKGTSDPGTSDPLNSQFRLTYNMVLNLLRVPDINPQFMLGNSFYQWQNYSRLPDLLQKLNTKRQLFLSAHVDHLSELLNTKRQLFLSAHVDHLSELEGLFRLEKQIEQQRNAIKALVLKPAKVIRFFQPGRMLKLKCFLKCFDKDFGWGVLLRYTKKPNPLNPLSPESAVKPPPPGENGVAVKPPPPGENGVVVVLPFAFDCIQAVSTIRLKIPQELKSKEAFQAVAKTILETKKRFDQLIPELDPIEHMNRSDPQLKKSLEELKRCEERFTEHPLKGLDIWEASIMGQKLEDEYKQAKK

SEQ ID NO: 124763 - protein, 206 aa, Heterodera glycines
MSSTEEKVRLAQAKATKTKKLSDHEKKRITKQFFNLKEHLENEKMPTKMLEKKIANTFGIHERTVYDWKKKFGINAKTKIKRYSKEQKFEIVQQFDQMKSQMKGKSIAKTAYEMDQQIAKELGVSRSVICQWKKDFGMTNSNHCHDDSEKIKIVKKYFKMIKLNPHLSKNSFAEQFNISHRTLNNWISKFAMKNVNNNKTVVAEIA

SEQ ID NO: 124764 - protein, 517 aa, Heterodera glycines
QRRTEVKLSKSMKLTHEGRTIESNIHVISGKHKNLCGRDLIMGLKIDLNRAFGIPTIRAVENKKELEACLAHEVEKVLDQWQAEKIIEPVATSEWATPLVIMPKANGKLRLCFDYKVTVNPWLDVHQYPLPRPEELFSILNGGEKFTKIDLKDAYLQLMLDEKAKNCLTICTHKNFARLPFGVASAPAIFQQVMEEVLQGIDGVAVYLDDILITAATDQQHVKRIDQVLKRLSEKGLRVKREKCEFLKSEIEYLGHIVDKNGLHASPGKIEAILKMPEPKNLELQSFLGMVNYYGKFVPSLATLSEPLNELRRNDAKWTWTKSQQKAFDRIKNFHKDEKRKVGVIAYASRTLNSSERNYSQIEKEARAIIFGVDKFKQYLYGRKFVLQTDHEPLKEIFGPKGELPIVAAKRLHRWSLTLMNFDFEVVYCSTKNLAADGLSRLPCPEETTIDCVGLEVQQVQAENISCLPVTVSARKEVKKDEILRKVKEFIEKGWPQKVEINPLKFFNYLFSQQKYK

SEQ ID NO: 124765 - protein, 571 aa, Heterodera glycines
CECFSQFDQVPEFARTTIENARYLGSEILHKYEKREDVVLAYASRTLKSSECNNSQIETQEKAMIFGVDKFKQYLYCRKLVHHTDHEPLKKIFGPKGELPIVAAKRLHRWSLTLMNFDFEVVYCSTKNLAADGLSRLPCPEETTIDCVGLEVQQVQAENISCLPVTVSPIAKEVKKDEILRKVKEFIEKGWPQKVEEGLKSFHVIRNEFALMEGCIMFGNRTIIPSKFRTKMLEILHATHPGMVRMKALARQKMWWPGIDNEIEIIRKRCKICQEEAPDERKVPLHPWESPERLWQRIHIDFCGILGINVLISMYAKSKWPEVVRMRTTTALATNEALRIVFTAHGLPEQIVSDNGPQFSSKAFGDYCQSRGIVHTLIAPYNPKSNGAAERFVQTFKQGMNKLQKEGMKQEIALSQFLLKYRVTPHAATELAPSEILFGRRLRTLLDFVKPTAKESYAERMKRNFDRGANKESYAERMKRNFDRGANSRKNFEVNQRVYARNYPDGSKWIPGQITRKIGTAMFLVRTARGMWRHFDQLKENLTDQNSDNSSSESEDNSDSEDELLAQNFSK

SEQ ID NO: 124766 - protein, 101 aa, Heterodera glycines
MSVRKCPSANVRPQMSVRKCPSANVRPQMSVRKCPSANVRPQMSVRKCPSANVRPQMSVRKCPSANVRPQMSVRKCPSANVRPQMSVRKCPTAPISIFIYA

SEQ ID NO: 124767 - protein, 96 aa, Heterodera glycines
MPIDQFELMNEQTNEQLTLLSNDESANCNHWVMKRCQIGQSATAQWEDRNLNDLMNNVNVEPYHDIPNATLMGINMPMSVPLAQEAVKFVVKLVHL

SEQ ID NO: 124768 - protein, 62 aa, Heterodera glycines
MFRRLSPGEYAHFLMQEKRESTTAKITTELTNLKTKMEDEEWLPIEEMEEENDKVGEEVIKD

SEQ ID NO: 124769 - protein, 57 aa, Heterodera glycines
MALLFSPPGIEKMCFNPVLDIFEPCADKKGNKIENECFSNRAAVIRPQETINFDKTE

SEQ ID NO: 124770 - protein, 75 aa, Heterodera glycines
MNNSTFASKNDKLKNNHSNNASSNPKISTKQAMTSNYTKASQIFLKKSKSSDCQAHDDAPSSNDESMNNIEQIES

SEQ ID NO: 124771 - protein, 68 aa, Heterodera glycines
MPLIIYFSVLFYCVFLIFKIDPQGLNWLQLYNLLAAIPMFLPLALNPIVPICTINYYRLNFISYVKRF

SEQ ID NO: 124772 - protein, 153 aa, Heterodera glycines
MVVHGLVTIKGVENRIWNLLALTFWMFLVYVSMFGYVSQFIFRYFVIVRDKNISSLKYFLLLFLMLLFPFAYCVNVFICFFPPSDHAILDDKYVAAILGINLDDQIILAGYTFNDVRVTIGYCYIIIVCTFAYLIMFVLAFRIKQFLEKKSKS

SEQ ID NO: 124773 - protein, 27 aa, Heterodera glycines
MAITIILVQTCVTDILMLTMTLLFNPV

SEQ ID NO: 124774 - protein, 121 aa, Heterodera glycines
MNKATAGCQICGPYRTVVFCQRRFVYTQVNKQVVTENPLKAFVDWLVFQLPKKYDTYAYSHFGGRFDMVLVFRELFRIGFNPNILRKGNKLYEMKVHQKKTSNPNIIFRDSYNLMPCSLKV

SEQ ID NO: 124775 - protein, 246 aa, Heterodera glycines
PVLDCQGVQQQLSQQEERILTDKSKKWKQLQSKRYAEKRKFGFVDSQKEEMPPEHVRKIIRDHGDMTSRKYRHDKRVYLGALKYMPHAVIKLLENMPMPWEQIRDVKVLYHITGAITFVNEVPRVIEPRMRFPPFDDEEPPLDYADNILDVEPLEPIQMELNDEEENLVKEWFYDYKPLAKTRFVNGESYKQWSFSIPIMSTLYRLANQLLTDLLDENYFYLFDLKSFFTAKALNVAIPGGPTFDH

SEQ ID NO: 124776 - protein, 168 aa, Heterodera glycines
TSKLEDYDLPAFYFDPLINPIAQRNTERQMPEPLPGDDEEFEIPSDLVPMFNEFPLYTENTANGMALLWAPRPFNLRSGRTRRIIDVPLVKCWYREHCPAGMPVKVRVSYQKLLKVFVLNALKHRPPKPQKKRYLFRSFKATKFFQNTTLDWVEAGLQVLRQGYNMLN

SEQ ID NO: 124777 - protein, 60 aa, Heterodera glycines
MVEQLQSFAGENEADVHFLLISAHKLILSSSSEVFDAMFRFDAQNAKNGKSKKTKNELSK

SEQ ID NO: 124778 - protein, 42 aa, Heterodera glycines
MAKDLHGNLISDQSAVLCNSAEDGCWGRTKTPSFFPPYRYVN

SEQ ID NO: 124779 - protein, 54 aa, Heterodera glycines
MCPPMIMIDHNDVKRIHTAKMGTKCEEERRECVRQMAHTQFVAKKKQKLNGEKH

SEQ ID NO: 124780 - protein, 79 aa, Heterodera glycines
MSLSSKVHLGVGNRRAKAKRQEEATHEKVFFAQANAALVLAASVARATEAGGVATTMGDPATMANGTVVTKCQTMTTTW

SEQ ID NO: 124781 - protein, 175 aa, Heterodera glycines
MFNVQSLLAENGTKCKSGTKSENGGELEKKHEAISIDNLALKTTTASTTPLLDHHKHHNHSLLLLQKPGTTTSTNCPAPLPAAPFDLPSTTTCCPATAVFPMFVPSGGANNIFPPVAGGGIVPPGSRNADFLPPQMNHHHHAAVAAAAFMPGSPMAAAAMLWLHQQINQQQHQQG

SEQ ID NO: 124782 - protein, 43 aa, Heterodera glycines
MIKFVKIWVEKYLWEGSPLKKYFWIFNKFIQLLFFRRLMNFRN

SEQ ID NO: 124783 - protein, 86 aa, Heterodera glycines
MPPGAVQLFTNGTKRNDDEMCHQNAIFYGRQFRKIYCLSAILGDEKVSIFFEFFCNIFPQKQCSKMFNGNEKNTLNFARSPFIRIF

SEQ ID NO: 124784 - protein, 84 aa, Heterodera glycines
MARVEDEAEVGRRTNTRCACPMWDGLDAKPIRWSDRLSEKGVEDGSKTRPSFAETEKALDETDSKDANVQALPFPRFKPIYPTR

SEQ ID NO: 124785 - protein, 79 aa, Heterodera glycines
MAANRAHAVLFPFHYAQKATKKIWIILYKTYVRPLLEYAPEVWNPSLLKNIKKLKNVKNISPKEFFLNAAFHPFHTNKD

SEQ ID NO: 124786 - protein, 165 aa, Heterodera glycines
MAHLGKIQIFTKAQPLSPADLDGLETASSVQVISRPTINGANTSFKKDKGPFAASTFVPFARQHRFLGLLDEQGDEALHSVLRRLEQLWKTMPDDEQMRQQLEHHFVSNWLLDTGRFDELKLWVERRALKNVVQLIKREEEQREQAEEDKMNEESDQDADIDIVD

SEQ ID NO: 124787 - protein, 51 aa, Heterodera glycines
YWSEAGPGILGKTGTRTCRDLRSRDRDLDFSSGPGTGTNREILKIQKNFKN

SEQ ID NO: 124788 - protein, 154 aa, Heterodera glycines
RLYKDEIDPDNPPQQQIVQRIDAKAGKKGNKNRTDVNYHCDVHYHGTYKFTYLTNFFARWQTGAKIDRIDLFMGKAYLNYFLWHDANNETWESDEDDVLKLFRFQLPKMAKKLNTRSQFAMTVLPGLHEFCCPTDLANDDDLENCIGHEVANTK

SEQ ID NO: 124789 - protein, 17 aa, Heterodera glycines
MLYKNKPFFLFYLLAQF

SEQ ID NO: 124790 - protein, 208 aa, Heterodera glycines
MSALSYRTEIDRLSLAVNDSTAPSVGQPITMATRSASAAAYPVATPQLIVGTAGAGGGGKMPNAAVTAKQIQQQRHWQRQQQEQMQNLTFLEIFPSLENVVFKQLFLLALVLEGESNFSRHHHPPGNMLSTTLHQQQQQFSAGSDGGPFIRPSHQQQHTPWCRMLSLQLASSTAAPTRVILIDYQKRKSIPLPKYSKKYIIPRENGKN

SEQ ID NO: 124791 - protein, 989 aa, Heterodera glycines
MYVKKVSLMDGLALDIERKLEIKPARYAGRKTMMKSMFISQDRFEFTANLFMDQITRRITMGLVSNADYSGTITRSPFNFQLFNVREIAIIANGRSYPQAPYDLDYPHDHNYCGELGGNETPTKRRRRNDDDDGEGEPKFQKNCIRTLSADKQYNQKFKMQSVKSTFVIENLPANPESMLRTLFAHCMSTALDESQQNGITPDQLGATISSDLLNPSIWIPIRRISDNTADSIMNRFLEVAQSKSREGSLWGSPFTVTITTLDVAQLPQRQQVRGSGKRTVDSVQHVVKESALLRINNIDDAYCLFYALEASRKYHIKEMSRRNFCYYINHPNERRLEDVFGLMSSVNIRTDLREYDAVVYVPIVVDYWNRKYATTNQRFKVFIFGVTGSYRPKFQYGPDNYNIEMPLYHHNGQFDGIRCGVGKAVFGRDYYCFSCECPYDNANGHTLQCKAKCINCGRIGVGRPCRADDNNDSYYRECTACGKDFMSQDCFSHHLSSNVCQQFKKCKQCGVVWNVRQNRRKGRSGHVCGEKFCYTCKCYHKPERGCFIQQLKARRPKKYRLIAFDCETTQNTRIEGDRRLHSVNFISCYVVCTNCINENLWRNSLQAPCCICGRQRTVTFSHRAYERTQTDAQFITPCPMAAFAQWLLSEFDPRYPTMLFAHFGGRFDNIMLFRQFFLNGFCPQMIRRGNKLYEMKIARGEKNPEIISLPPKADYLYGGMTPDRQRRFYQCYAEHRHQQFDLCEQLAAYCINDTHILIEALVAFRTEFLTIIDPLERHGCLDDDNDDEEEEEVEEEDKDNAFEVIGDGIDITWEPMTIASASMRHFRLNHLKREQLAIVPECGYDTTNTQSLVALKFMDWYAKKNGVSIQTAHSPDGEKKIGQYTVDGYIAATDTVIEVNGCHWHAHDHPRHRFQPQTVMANGKTAQRIREDDARRLAFITSQVQQVLVFWECEINAEKRYNDEMKRSFAQYKDSGPIHLKDCYHGGR

SEQ ID NO: 124792 - protein, 157 aa, Heterodera glycines
MDENFHHRQLIPSKYLPTHPFSRRFLHTPHPFSCRLSANQNRAALFPMELWNMVEGDLYRTNNSVEAWHRNLNALFRSPSPRLSIFLRKVRQEESHWRQQVKDFANNPANGIRGKGMKRKQNYVDQDMNLNELYVTRNNRHPLQYLRAISNRMAEPL

SEQ ID NO: 124793 - protein, 56 aa, Heterodera glycines
MSDMSAYMGSGPAEPAPSSGAAEASPSSGVASAYMGASPAYEPPAQEKSPDQSAYM

SEQ ID NO: 124794 - protein, 190 aa, Heterodera glycines
ASHRFLFIFSLFQLEMLNKKIIKTKYIINGVENKIIQINESEVYRTKYHRGRMLNRPYEWVFGMIQKSNKVRFFPVPDRSADTLLPIIAENIEVGSTIVSDGWAAYGGINNMQQQYNHEWINHQIYFVDPANPQIHTQGIEATWRALKQSLKHLHGTTPELLPTYLFQYAFRRYHENKKIFQHILEEMRH

SEQ ID NO: 124795 - protein, 71 aa, Heterodera glycines
MPFRQGMMLECRGVHSIPLPQRNESDEAELDAQLKRAALAHAEHLERVIRTQKQIHDMETQQIVQVVVVKE

SEQ ID NO: 124796 - protein, 44 aa, Heterodera glycines
MFKNKDFLRSGGGAGTPGKYYVVDFVVLQYFPIVTKESNLNLRL

SEQ ID NO: 124797 - protein, 108 aa, Heterodera glycines
MSQNRDENSQPPVLDGPYPLAQERNEFVEDEAPVLLEMLDRLSQGGICQAMGVFSFVLADCLATFHTFAILFDCETPVPFDEQHKRYVFEHRDKPRLIYVSEDGSAIQ

SEQ ID NO: 124798 - protein, 27 aa, Heterodera glycines
MGGVHGQLSASHLSAANELTNTFKFNY

SEQ ID NO: 124799 - protein, 171 aa, Heterodera glycines
MRALWRLARAFPGTLIRCICFYAAQALEIERLVAQQEIPDILVTTADATQGHESSLAVVVTTCSVFDSGADSQPFWADAARVDVAISRASHGMIIIGDLLLLNRTETWRRYLDQATTETTVVGPEYFDFEQFNNPDNYYDKDGQLISANGGAVRSELFYSKYGKNVWYNNS

SEQ ID NO: 124800 - protein, 108 aa, Heterodera glycines
PIWSVFAHEIWPIFAPNIHHLSFSDGQHLDNLRRYTSLAILTDLNQLNSIDSDNLLPAVIADDGPNVTGGQALAKWLQMPRSDGQPKQLICCVDTSEAIECVDSFKEA

SEQ ID NO: 124801 - protein, 132 aa, Heterodera glycines
MASNGKATEASSEEVRCSSGAAAASTASFVPSSDSPHNQPGSHAIDWKTYAALLSSPSGADLMAAMFSSAAALGPTKAHGEEEEEESERGEGQENVGEEEMTRKGRTTKRAVKDEETEEAEGEEREGKRMEL

SEQ ID NO: 124802 - protein, 127 aa, Heterodera glycines
LAEDFAKLCISNYPIKPIANELTSGENGGESGAKPYNKEELETIGRFLTDILAFQQADESPHTPPAHLNLPTMAVLKKQIGDGVSAGFNRFSLVTHGFGGYAFAGVINVLIEMVKECEQRLSSTTEG

SEQ ID NO: 124803 - protein, 122 aa, Heterodera glycines
STILHLLSLFQINEMQKEQNKELTEENKRLKAIIEELKAGKQKALITDQSQSSSTASAKSPSKPFKDHLRKTGSNSVDLRKSIEKSGIEIQTGQRQHSEDTCFTFLLEAEAVKASYGECLSN

SEQ ID NO: 124804 - protein, 345 aa, Heterodera glycines
AGPRMMRVPYLSGGGGGIGGQRRSTGGGTDYWHKKGGGGSQSGGGREDDRDRRPGPGGSSYYHQQRNNDRWKRNQHPNAPPPLSVAQRRARGPLPDWDEVTGTLSVHQSIHYVSEHLMSGARSRGRQLRLHGNNGEPIFVRMRVIGLCQYYALSAVPPFDPSLGVIASAAAHPSAAPIVPSVAVTAAHAANVVSASVVPPASLLSPTGLISFPLSAPTALSPGAVVVATTDQFPPTSAAAQFTPVVLTAQFPSNALFATRPTTTAPFIDEQKLKDLVRSQIEYYFSADNLQKDFFLRRKMDIDGFLPLGLVASFPRVRSLTLDQNFIVSSLCDSDKVELNEDHQK

SEQ ID NO: 124805 - protein, 165 aa, Heterodera glycines
TTYSVIISAEQSFKDQTQETITNGALIAFYVALAISFFEIIAFSVMSTLNLKLFTSKLETQNNVHNLSERYQLAENIRTGRQLGPTFLLHFLNNCVVIIPSVLGFYQIITHPKLLEMIWAFSMKIPLVQRIGDTEGQKIGRIDGKRMQEKKMNEMDNYFEMLTKQ

SEQ ID NO: 124806 - protein, 57 aa, Heterodera glycines
MEGIAGKGEESDEQKAIKELHEFIKTKFEALQRHRQQESNAIKHNFIGTDYQNVLKI

SEQ ID NO: 124807 - protein, 104 aa, Heterodera glycines
MWDCGLGSRKIPQFPKCGIADWDPAKSHNFQNVGLRIEIPQNPARDPVPHRAIPIWYHINIFYFDRNSRKCLPTLICLPDICGQTFADGHLRTDIHEQFREKIK

SEQ ID NO: 124808 - protein, 249 aa, Heterodera glycines
MPVLQSDRAKWRYPGSMRVLPGYRPQAGGVLDFGSLGGMGRCLPTAGGPSLNHTVQRHSDPKGRWTDMVTTSDQGSCISHTQRKFGKHFGIKSLTLLPTYRYIYMGTPVNVPMVRPNLRMVFTDFMLNNCDRAAAVQRRWDELADVAQRVHSGVQNVIYTEKPKKEPPVAGYDFVPATKAQEMYKRHGLAQALLCMGTNVNVYNVHNFSGRKIPLLYQCDEATGIAALHLTHRPVLHGPLVPTGEPPLS

SEQ ID NO: 124809 - protein, 265 aa, Heterodera glycines
MFFGSLMRKSKRSTHVWNWKKGAAAYAAHWRDEFIGSDNPDVRAAAKAAAEGNFVRLGTNEYVRLDVRDLTQLNIDDALGNNEDVADVDLVKPLTAPTLKNVNADTRHEIMGTIVKRSLRAKAIIGLLQRKVVLTRHALDRTKAKFRKRKRELKREVNTAIGTIRAAEDDLFQQVQQLKEIAPKAKLKKLGLADIGPELSSESEGDEEEEDAAHNTEQQQQDDANDVPDDLTMDERADAARRREVLDFETPVYARELRVFFLECS

SEQ ID NO: 124810 - protein, 100 aa, Heterodera glycines
MINLIIVQFVSIFISVPSLFLYALECWFIFEGRNQKFEGSFYKIFLLSAIIIFSSTSPTYWSQSVPWQLRHFLTLWHQCLVGWHVSFSPRLFTMCLWKIA

SEQ ID NO: 124811 - protein, 194 aa, Heterodera glycines
MTRKCCVTDVPPTNEPLGLSDSGSPSASDSSYSSPNSEESASGTKKKPTRKSAAAGRSTKQTKSGPKSRHSPAGRGGGRPQTPRMKKQPLKKKPPSRTPGRRVKKPSTKKSPAPRRANTSTKKRGRPAKKAEQAKPSDSGTAADSGRDDSGHSEECLGDEEETNSQERCCWTFHETEGIARRTCGQQKGAGRTL

SEQ ID NO: 124812 - protein, 24 aa, Heterodera glycines
ITGVSIIAVLFLVFLMPSQNLVRF

SEQ ID NO: 124813 - protein, 95 aa, Heterodera glycines
LFEYPKRTLEKIDFFVFGAVPPNRCAQIYGEAESFGNSFPIACTLILLWIFAPHNCLSTPNGHLKKSIFLFSGQSPRTDAPRFMGRPNPSGIASL

SEQ ID NO: 124814 - protein, 45 aa, Heterodera glycines
LNLKKCQRLLFLKFFEILTFSLIIYYFAKLIHKYFLERALKRTKC

SEQ ID NO: 124815 - protein, 165 aa, Heterodera glycines
MPAGPEGAEASAKPTGQSAAPGGTSAAGGTSAVGQQPAEASKKSLAPAGTASAVPSAYAAPGTGTAMSTTSQKSAAGGAMSQKSAAPAGGASALSTASQKSAAGGAMSQKSAAPAGGASALSTASQKSAAGGAMSQKSAAPAGGASALSTASQKSAAGGAASQKA

SEQ ID NO: 124816 - protein, 214 aa, Heterodera glycines
MNSSIYIPNDVLFDVFKLCDRFSINERFEFVNAHWSAFVAANEANHFPKFKMGKLWICPLFCSLQYSLRAHEETTNGEPHAEHFKIRTSTEPWAFKRVVELMKQKITLEIDKNYLIEMRQNGHQFEKLYEIDNSVIEFILTGRQFCSKIVVEAHQFALLFELIEKYKSASIFLHHAIPIVRLFVPSFAWHCRQFVEGTLCQVEETVYVSWARTA

SEQ ID NO: 124817 - protein, 25 aa, Heterodera glycines
FFRKMIKINTITYLSVCFQRKNNKT

SEQ ID NO: 124818 - protein, 204 aa, Heterodera glycines
LGLLIAKMCKKSFNKLLNSQKCSLALFIRHFFRFPTKFCQKISDQFMQNAITAEALSSLASPVHCFSTPMALTFIDHLRNEKQQNIVFVDAFTWLRWHFQCDRPYELSFTSSINSSDGIIDQFSRICFVRPFPFALLNFRFAILSPFTAFNLFGISTIGNEFTNVFLVNAICVESSPKFAPSFHVKLIDQHINSFPFECPLEPE

SEQ ID NO: 124819 - protein, 16 aa, Heterodera glycines
MENVQQLNNFLGARYQ

SEQ ID NO: 124820 - protein, 242 aa, Heterodera glycines
MFPSLPIPSTIAFIHPIMSAKIIRVPKIACDLSLAKNGVSKNRNYAQKASQTILALPIPSTIAFIHPIMNAKIIRVPKIACDLSLAKNGVSKNRNYAQKAPQTILALPIPSTIAFIHPIMNAKIIRVPKIACDLSLAKNGVSKNRNYAQKAPQTILALPIPSTIAFIHPIMSAKIIRVPKIACDLSLAKNGVSKNRNYAQKAPQTILALPIPSTIAFIHPIMNAKIIRVPKIACDLSLAKNG

SEQ ID NO: 124821 - protein, 82 aa, Heterodera glycines
MKKDNKRETFGGHESNRERNPHGRVPWHAMPTVMDISCGTVFISSLMVCARRRRTSSRLRSAIAVKLMVNEELSRGELQLCT

SEQ ID NO: 124822 - protein, 771 aa, Heterodera glycines
MQRKLFNSIVLHDNSIHMVKTLNLLFSQIDSINNFRCFGEGNLTIGTPIYCREHDCFKNNSFKQIYGTKFCFYDPYEKIYLVKSDEELIQIKAWGTIEKVFYLPNNLNQSFIENRRNKREENSSINEEATIECLKGGIIIKAINDIQELQISIENYTIIKKNPQKEEIIYLPPKLTSFEYKPVIKFISNPDKSNEKQITCQSSPVCELINCRFCMEYLKSPQCVDQIHWALMLVIIMIILYVISLSLQIIRILTRFIHWILQFIFNCFKRKPKVNRIRISRPKLKRPLIYLITSSLILFKMIFACDEVTNLVAGTNDCAVTQEGKIECSYDQTTQLSITPEHLTCLKLDNTKTNTTMETLQITIETLTIICTEKSDYFTRGYELSSTSQKRCSGAGKCTGQTCQSVKMSDRNPEVNDHANNQPGYSYCVPSCGGWHCQCFLATDGCLFYRTYAESVGDEIFEVVNCPSWTIQARIKLSINPELTYSVNLKPGILTHIGDESNSSISVTLTSTSIPPTPLFGSTFIIVREELKAAIVANENLLKNILRCKNKEEAQSFSCTFPPEACQCHGGDSVVHCECEKSPLTEIFARQENLLPIKTQGSYVYFDSQIKAKIQQTTSLQMQVTLKGHKVKAIYDKNICNIVTISLEGCYSCTSGANWTLSCKTNFGTALANVECPSQKVQVNCDKEGKEQQIQLAYNKQNITENCEVICPDGKSEITLKANLEYISQQDTKIIPANNTNENPIIGTSLDQNYVCLPSSFAWECRDSAKS

SEQ ID NO: 124823 - protein, 99 aa, Heterodera glycines
NTMDVLRTVREEGIRQPITVMYQRAPAPEDLPENWPDKAQIESIKMAWEAYNKSDAIVVILINEISETIFDANFFETELDRLSNGRIKVERITLNDCVH

SEQ ID NO: 124824 - protein, 67 aa, Heterodera glycines
MVHPNTRPKINEMVSELAVYGVLIGNMTTGAVSHNVQQGHLLKTKLATANEGGISTGSAVHDSPILF

SEQ ID NO: 124825 - protein, 30 aa, Heterodera glycines
MPKALINQLHNGEMEEKQTPKRKATWEKGN

SEQ ID NO: 124826 - protein, 185 aa, Heterodera glycines
MRRRPFLSLFILFLSLRFTPILAHTDNENAEGFGTDIEWVPWDQAVSVALDLNRPIFLLIHKTWCGACDALKKSFATSPKRKELLELSKQFVMVNTEDEEEPEEEEYAPDGRYIPRLFILSENNGTRDKKRANASSTNQFFFYLAPLQLILILIKIILNLGTEEGESVEGKEKREKEEEGKKKKK

SEQ ID NO: 124827 - protein, 169 aa, Heterodera glycines
MNRRWICNDVWMDIFPSFDRPQLGLKLALLSPRFDALVDKHFNGKSELTIWRPIEISKDIGTKPKLYVQIGDKFVEFPLPDRPLPSKIRFDSIQIEYLKSRAMTIKAFISFSVTLITPSSLFFVQIIKFSTKEASIYICGFLHIPRMANQFGTFLFVKFGPFLRQTLVI

SEQ ID NO: 124828 - protein, 1162 aa, Heterodera glycines
MEWPAFWQSFESAVDRAALEPVDKLNYLHGCLRGKAARAVTAYRGGDNYAHAVAALRRLFGDPRKIAEALQSELINLRPVDDSVGSLQHFLETLERVCRQLLNLNMPDDSPFMYQIIRSKLPSTVLSELIKMERAAGIPWGTPQLRAGLAEVLGVREEVERCLREANADRQTRFRHEARPNRPQRPERHENARVFSVAQSVRNSDDKRVPSCLFCPGRHWASECNKVTDAETRKRCLLQQNRCLNCLRKGHQLRECRSKQVCRVCKERHHSAICPSAKGTSSARSKQQKPSPRNKQSFGNERNSRPLVSSAVANEADSITEPKTVNTIMAIVSPSVPHLVMLMALRAPVFSESAPNKRRDALFFFDPGAQVTMVKTPLIRQLSLPKLQDDQLEVNPFHTRQPIKMKAPQHVLCVQREDGGYETLVAHRTDWIVPSVRRATFLQGMLVPVDEEPDILVGMADFWKFFNGVQRVSPQLFKVKTSIGSTVCGRDEIPSRPTADHPLSVMPVTVHVPANEDEMPNTAVSGIQRNESISDLDSLRQFWDLQNIGIRDDPLENDDETAQQIFDQTTTRLANGRYSVGWPWKNFPPDLPSNFAMAHRRLSSILNRLQHFPELLAKYEATIQEQLRLGLIEPAVRTRGLEHFLPHHCVVTHKFRQVLDASAHPKGQNSLNKCMFRGPVIMPELAGILMRFRLAGIALWGDLEKAFNSLSLLERDREFCKVLWVNDVRKPPLPDNVVIYRWSRVPFGVIASPFLLAATIQKHLKQDGSPLAIEMAENAYVDNLLMQCTSPSEALNKYMSSKTLFRACQMNIREFICNSDEVMCRIPKEDQLVKEVPKVLGLHWELRPDKLYIDFPPMDTESRCVTRRTVLQQLASVFDPLGLVCPALHDAKMFFQSLWETKLDWDDPLSTDKVQEWNTIATTWNQQKVRVPRRVIPLEVASHQLHAFVDASKDAYGACIFIRAQHEITITAHLIFAKSRVKPKGSNLTIPRMELMGMLIGIRMLQFAEKQLGLAVRHKFIWCDSKPVLGWVSSSEQQPRFVENRLKEIRAVDQVCFRYISTEQNPADVASRGCTVLELTSHPLWWNGPSWLIHPEDRWPITIEVKPANDDVQTIAEIAAIVPIVQKVEAWICADRFSDCTCLRNVVVLLLRALRRWLSMSR

SEQ ID NO: 124829 - protein, 210 aa, Heterodera glycines
NGRYSVGWPWKNFPPDLPSNFAMAHRRLSSILNRLQHFPELLAKYEATIQEQLRLGLIEPAVRTRGLEHFLPHHCVVTHKFRQVLDASAHPKGQNSLNKCMFRGPVIMPELAGILMRFRLAGIALWGDLEKAFNSLSLLERDREFCKVLWVNDVRKPPLPDNVVIYRWSRVPFGVIASPFLLAATIQKHLKQDGSPLAIEMAENAYVDNL

SEQ ID NO: 124830 - protein, 182 aa, Heterodera glycines
MSSARCRMALGPALFRLRQHVTTAENLLDEPVINAETTENLEQERGHITRILSRMEVELDAWGAIMNGLQGPAREAEEALFTAFIRDDRHLTEWLEDAREMLAHIAAELADEPNQPIAAGRQQPAVAVNPPVPAVPFVNNAAFLGGANVQQPAAVANHANQPRLVPNNKSCQTCRLLLRLRL

SEQ ID NO: 124831 - protein, 25 aa, Heterodera glycines
MEKACKIWRDYIDFSALEHFLKKYL

SEQ ID NO: 124832 - protein, 92 aa, Heterodera glycines
MAVLVIILYFVCSGQCSYSSGEKYADIDGDIEAGTAHGPHWPSEIRVKFRYGSKDRDLEENRKTDHVYIVVGKYEYDHTTGGARARNKCDLK

SEQ ID NO: 124833 - protein, 50 aa, Heterodera glycines
MANGKWSNGSLDSFRLCLDFAYQFVCLLRNGDKVMTCFVEKIAKMADFTK

SEQ ID NO: 124834 - protein, 22 aa, Heterodera glycines
MADHGGGGRTRGVWQSHFKILL

SEQ ID NO: 124835 - protein, 33 aa, Heterodera glycines
ARGFGGEPSAPKTKCVHPEGTRIGGSRFFTTCD

SEQ ID NO: 124836 - protein, 282 aa, Heterodera glycines
MNLFLTPAIFLFLFYFVFISNVKSLQTVQQLEDEAMVAFAKGRTFFDEFCATQWLTIDRYNDNLAQKYETFLGVLYFIKTNWQCEKVVDKLVKEETNSDDDVNDVKECGIYRKHVIILYEYLFREYARQSVKAADPDLAEQIPIVEQPIVKFAYHERGWGVLYRNAGTLIDLMQSLCQIWRFFFDQSYRRTFKSRSVCWLAYHRIQKPSFVNQESLVKKYGVELDKLNRTEFLYNTKNLKISANSNFDNSYLRHRKIFDENMAKFLEKVETNHKQSLTESKG

SEQ ID NO: 124837 - protein, 49 aa, Heterodera glycines
MDIRRHFMCQKLFCLPLLMIITSFCTRSSNAELSQNNKKLSWIIGYNLT

SEQ ID NO: 124838 - protein, 211 aa, Heterodera glycines
MILGHKPPLMNMLDQLDQPVFTIWSDWRRPAELGGSGGFMTIGGPDNDHCSGPWHNVPLISRWNSWTFRVDGFQIGKYRSYRDYTAAVDTGTALIGGPVHLMEMIIAATNADYCEEDNLYTVPCDQRPKLASIVLKVNGKDIVVPAEEYIIDLNLPDGKCALGLFGQYGVGFTTDWDWSIKLFGPFTLAFLRKSVLIVPLLTHLFPGLADP

SEQ ID NO: 124839 - protein, 93 aa, Heterodera glycines
MASNSPYIISDLAQQLQVALDTCYPFFWVIDCRCTDQNCHYAKDWEYEKHCFNASKSTSLHGSGDKLTIPCHNCMDDIEAAGDGHRVEKSLIK

SEQ ID NO: 124840 - protein, 65 aa, Heterodera glycines
MSSAPQHHASSHEQHQPHANGSIFQMEIVESKATTISTSSASSNVDVELQANEQQMGKEIAEHKF

SEQ ID NO: 124841 - protein, 68 aa, Heterodera glycines
MCPPATNRTTDTDHIKVAAATVDDSRATVGEGLADGDDDDDASQLRHASTPLLTRYYFDAVTAQCYPF

SEQ ID NO: 124842 - protein, 68 aa, Heterodera glycines
MSHQKLRRNAKKKGLQTDSLENQENEDPMPANQENVIANDAFDEEEDLLNMKIPAPPESFMHRDGNRM

SEQ ID NO: 124843 - protein, 68 aa, Heterodera glycines
RFVTWLRYNVWLLLYPLGLFLEALVLLISVPFFYSSVVYSLQLPNALNFSYNFGVVLALFSFICFPFS

SEQ ID NO: 124844 - protein, 113 aa, Heterodera glycines
MPEILKTVNNDKNGKQKTKQLSSSNYEKQLQQEFAILEKKQILEEKPLREELKDQAERVGAALLYTLIHMKMRLLFEREKVKKEISISKKSAKATSQMWGLFKRVEEAVVKPV

SEQ ID NO: 124845 - protein, 681 aa, Heterodera glycines
NQWIKVHLKNGDKIKIDIPAGSYQNEQELENAINESIKNGIKQPATRVKRQLEDGVDLFFHYNPDDYWEKIEEERQRYKELLKLIVTKSRERDDETDTHRKRKIEDEEITPLQNQSLTKKSRIEALEEAARQRDDGKEEKEERTGQEFLKMYPVNYREKLNEVRLELIRDLFNIQDHMKKYQGVTDGRRIQELNEAALRMRTAMKHRRKNLNAFNKAVLKKDLRTTAEEYERTSYEQNKDYVEPFFDSYPTDYWEHIHKKYGGLQDDYKKIRKLREQQQFLTDEQKKQSIQDEIDQLRRLIDYRRKRFAALEYEAKKRDSLQQQPMALALTHGEVLKERLGKIERTTTSHGEETKTHGKSLVELIEQVQKERGENKVETEGKTRGEILGDKLKAKIDEQDSGADGATDGEALKNKPETTIIGEKGMTRGEILGEKLKSKDEEKKEERITHGEALKNRIEQIPEEEKTEGKTRGEMLKEKIGASKPIEEEKTEGKTRGEILKEKIGASKPIEEEIEGVKTRGESLKDLIVSKQIETILFKYLKERRKFSIDFNDQRIDFIELSAQLGYILGFEDPTKILIGAIAKYYCDLKGGIDSLCVYINGITENVIVGDQLASLLRIVVVEGKFGDVIEKIYNTPMYIKVAVKEINEIEIEIRTREGRLIPFQWGTTLLVLAFKKSIVF

SEQ ID NO: 124846 - protein, 177 aa, Heterodera glycines
MPMFLQVQMRKVKLIFKNIQILYYSHCFLEIEKFSTNLSKLTLSNTHTSQLDDQAMEVNPNIGSVDPRNVQMPMQMSMEVSNEHVNSANGQKLNSTDQNYVDQAHPMSEGTTDTNLISHKSDQIGPETSNSQQKRAKQRKQSTNNIQRTEFITEIKGSFSFKPKASEEPIVKYIEKQ

SEQ ID NO: 124847 - protein, 44 aa, Heterodera glycines
MKNRNLIFLFLTSRILIENCCLAGKHADEAAKTDMRRRRNEQIQ

SEQ ID NO: 124848 - protein, 267 aa, Heterodera glycines
MLYNQIFWTALSLSVILMAQKANGGNKKRKLILTAEASSEEPPHIAYSDSEDGIIKLSLSQASVFLIKMDKFFSKCELISDDHSTRNCLKELKIVDLRSIFLQNATQNDQQSVPDQQKPSSSKHLESDMDKKMTPRVVDSDQLMKLFIVKSMQTLDNPSNSLEQLRMKFTKFLKFFDLFPNVFATRAIKELTTEQNLLILHELMLLSIDYAKQIYEKLYDKNNEMKLKLYGEQYPLLYFEFYKNLEEKFNTISLEISKILLNHFGRK

SEQ ID NO: 124849 - protein, 133 aa, Heterodera glycines
MQNYKSAWAVWKKAGKKILVTRSHSHAPSSTRIEVLIAKSDIRRAAVNAISATPGAIVANALEGISDAAKHQLPKIANLKKTATRQRKGIGDGAADNPLSSRETLRKSLVQNYRNGSHRRTTVTVPMPQTSHY

SEQ ID NO: 124850 - protein, 16 aa, Heterodera glycines
PVSINPAVSNYPPVYE

SEQ ID NO: 124851 - protein, 71 aa, Heterodera glycines
MGARRCGSEMMNSDHHESRFHNDPISALPVDVDAGPDNHHPVTVHLEQVGAVQQLNALDLIRERKSGMIKI

SEQ ID NO: 124852 - protein, 102 aa, Heterodera glycines
MPDFTNEIETLKKPQNSPPKEKKKVGKAKKQNAKGCSNSISKLFKTKFKNMLKSPKKTNGSSSSKTSETQNMANQQKQEELQPLTSYLLDQKLNGQVKMGAN

SEQ ID NO: 124853 - protein, 104 aa, Heterodera glycines
ARGNEANNNIFLNSLQFKRYLCLTQVLVLRDISIQVRKRFPNMESLVDSELIQVSRTTNIDQNGIIRFECKLIKLPELDLMENVKSEFPKYWMPINWSVNHYLC

SEQ ID NO: 124854 - protein, 359 aa, Heterodera glycines
MESLVDSELIQVSRTTNIDQNGIIRFECKLIKLPELDLMENVKSEFPKYWMPINWIFSLCYELRQKGNIESDLQMNIILQECKLYREVVFLAVRIYFLLCLIARQYRVHENAEEQNQVDRVIPLMTMLQLIFVMGWLKVAEALLNPLGEDDDDFECLKLLLLFIICKMTDTPLGNYIIDRNIGIFLTMVDECYDQKPPQWAESTNLKNTKKPLYAENCALYTQNPLVGSATLCHLPGESDRVRMVQRRPSDMGRRHSSNFPSQRPYLISPKRLRFRHSLPIRPAELVLFVHKCEQQPIIISSGLYENDIVKSAENQGISSPCPSSAEVPRHLDTVKEDEEVETANDIATEENGTKGRGD

SEQ ID NO: 124855 - protein, 47 aa, Heterodera glycines
AGLSRCSPHCATGTARAPPGRPCRRGPWSRHPIGARPPPARLRPLLA

SEQ ID NO: 124856 - protein, 136 aa, Heterodera glycines
MNLSTASFVPLAPAPTAGVPPGRLYPTIAPPGTVAVQSTPDSHFHTLRESLENPPLPPIDQQPFANQSQQQQPLPFPTIAPPPYYDHFAGPANGVGSIGVRYLVHGPSQTHEVHSVHAVPSGNAGAARGGGRQAKS

SEQ ID NO: 124857 - protein, 230 aa, Heterodera glycines
MITFTYALFQLNSIELFVASRFILGLFVTIGIGISSVFLIECSPVQCRGGIGMITGLIKKAFTNRITFLIIRSLGIMIQFGCIVGALLAMPELLGDQSHCFLLFHDQHDKAADAAKFYWGQNKSANAILDGFRTEQTKRSNAMGMLEVLREKQSIGTARGLWIGIFLSICMAFCGISGGHLLANFLIVFIAKFVLQLVIDAYIVEVLQQTMGFSALSSSFVYIGIQIFGL

SEQ ID NO: 124858 - protein, 145 aa, Heterodera glycines
MCRREEQSDGKTKILAFDLSTNRFGKVRALPDPKYGVPIGRKCHALVQKGNLAYLIGGCRDAETQQNVRGKGDERGEREGYSAKSKPSADSRRLEVRHEHRPMGPNAQQLGEGGVFPFGCPYLRQYCRDFYLKIPNGQLCCYLLG

SEQ ID NO: 124859 - protein, 159 aa, Heterodera glycines
SRRPEFCECCPIPRSGHRVFADSDFIYVFGGYNPFHSPDSTYTDFWRFNRLTHLWQKCGLSSSDPTTQLPNSLASFALASSSRPSECFIFGGTGIPFGLAASNELHRIRIDLLGNVNVRTEPKQSYEQRQNTANIRQRGRSGGEAADDAAEQRLMPPRM

SEQ ID NO: 124860 - protein, 276 aa, Heterodera glycines
MAYRRLTTMLQRLQKTPEVLKQYTTVITDQLNAAIIEETTIGAGKHEHFIPHQAVITPKKLRVVYDASAHTRGAPSLNDCLLRGPVWLPDLAGMLIRFRACRVPVIADVEKAFLMVGIEEDDRDVCKFLWVRDPFRPVTTDNLVTYRFRRLAFGLTPSPFCLAAVVRHHLRKYDSNFAEELIRDTYVDNVLIPADTAEEAAIKGQEAKRMFADARMNLREFLSNDETLNSSFSDAEFLGKTTAKVLGLEWNAETDKIRMKYPGSEPGTPIGTTRRT

SEQ ID NO: 124861 - protein, 199 aa, Heterodera glycines
MVRDSQQTRAQPNGTRKEEQYGTNARFTERTVARGNENGHKGGNGPRFAQNGLPPSFGRGNCSFCLESGHRPSECRAYPTPQARRKRLIEQKRCLRCLGSDHTFEQCQRTVRCDACRKDDHHWLMCWKNQPGNQSRPSGEPERKENNHAMLISGMDQPTHVTTSRDEPNSRDISEMNAGEQRAFTAFGSRVPAQQMIEE

SEQ ID NO: 124862 - protein, 340 aa, Heterodera glycines
MDDFYIVLPSNTPGQENTTSKFTVRLPETLELGTNWSVALSSIIYPYSFTALGINGQEFIKVWENDNNVPIQVYLPDMNFKTAGGLGNKINEAFTHHYKIKKQRGKREAKAEDTKDSKIDVAKRAAERAGRDVERHFNQINNISNSIQTQLNTLRETNPHILEEPDIKIWFDKMVEMGTEIQTSRNELKSFQEEVDKAKNITLEHVEKNDLKKAKKSADVAKGIARQAKTKYTSTLEGYNDKSEKGFSGIVNRLNEALGEHIKRKDIENRQVSEAEKGPQKRERLANEDVQFQYDSIDQKFIVYLSPAVSHIDLSKHLRYVLAFTNTRLFHAEEANICQI

SEQ ID NO: 124863 - protein, 240 aa, Heterodera glycines
MPYAIFDTPGQIEVFTWSASGTVITDSLAASFPTVRFFEFFNTNAKGFLQVVAYVMDSARSTNPTTFMSNMLYACSILYRTKLPFFVVLNKSDVVDPAFAVEWMRDFEQFQTALDQSSSSFMNDLTRSLSLVLDSFYENLNWVSVSAKTGQGFDKVLELIEKCRLEYWEVYKPMCERVAQERAAETANDGTTDAMPTEKLANLEIRENDVPSDEKGQTEEAQITETNGEEHSTEESEAQK

SEQ ID NO: 124864 - protein, 33 aa, Heterodera glycines
MADDKSCDGASSALPPCLIVLGMAGSGKSSFVQ

SEQ ID NO: 124865 - protein, 151 aa, Heterodera glycines
DVQVSSFDSRTLRVVVEDVKMRSQPSAKPSFDAKLIFDDHIRLMAAKQRLSRGKKSSRAFKLSLIAELFGIRLPPQQQQQNDGIAFRHSLPCQSNSASSSSTEEKRPRGIAPGSVQKLQMQTKENDQRSDSSAAPPDPETARLLPGQIHHL

SEQ ID NO: 124866 - protein, 72 aa, Heterodera glycines
ENNSSIDQAAHMNEHRNRPSPPKHGPMGTKSAREWRQHQPMHVNVLPQMKEVTAKKEEKEEKKTAHLISPFL

SEQ ID NO: 124867 - protein, 245 aa, Heterodera glycines
RFHVSTLLPFTIGDAQQLQRKRHIGNDIVAIVFQEQNTPFCPDMIASNFLHAYLVVHPIEPFLHAYLVVHPIEPGTDRTRYRVSMTARDDVPFFGPTLPRSSIIWKCQLRDFLLTKLINAENAAYKAEKFAKLAERTRASLLDGLYSNLKERAQFYGMAERTRASLLDGLYSNLKERAQFYGMAFLDSVDSAETAATGETTTNGKTTGKTITSTAKRSFCSSRSFCSSYSMIKRAKHIFDLYNIS

SEQ ID NO: 124868 - protein, 81 aa, Heterodera glycines
CHAMPPPDSTVVLVTGADCCSSTITSTRQGASAAAASSTTNTTMACDVTAASSLNLLLIAANDGQPPSGRKPSSSSSSTST

SEQ ID NO: 124869 - protein, 31 aa, Heterodera glycines
MLPLLIVEFYVLLVISFVMPMEGDSCDVAFW

SEQ ID NO: 124870 - protein, 34 aa, Heterodera glycines
MAIKYGPKIAKYGHKFFQIEGTISQNFFKFAKRK

SEQ ID NO: 124871 - protein, 581 aa, Heterodera glycines
MSKRFTDFSIDSILGKKPRQGFLINQILGIAHVLGSVQHGQGSSNKPVNEYVKKLEGSLEHNEKFHYTKMKSRFSIEDVPANPEALLSAIFQYCIEESIADSRKRGIEPTHLGCLISSPLLSGGDIPIPIRQINENTVNTILNRFTQVAQSKKQQNITLWGEPFTVVVTTVNRLGLPTKRQVKGGARRQLARILNPDRHNFCLFYALQATMVAKTKQWPRWKFHRYLNNQHGQQGQLQHDAVQLMNQIGAPLNLNAYDADTYVPRVINHWNNNHQHNRFAVFIFGTTGHYKPIYKYVNNSYNTPLLLYFNDNHFDGVQKQSGLFGKPYCLECEQPYGRASKHSKSCKARCILCARCGPAFPCEATGGFFRNCTLCNKNFNNNDCFQHHLQSGFCKRSKKCRDCGVVWDVTDNNRNGRKGHVCGERYCKLCKNFHNPERGCFIKPLEPRELDPYRIVAFDLETMQHQPISRREPEKRQHQPNFISAKVICPGCIDNGRWRNGTAGCKVCGPHRTVAFCQRRFVNTAVDKQVVTDNPLETFVGWIINDLPKKYDSYAFSHFGGRFDMVLVFLKCVHRWVSTLK

SEQ ID NO: 124872 - protein, 39 aa, Heterodera glycines
TGNSLALFTAPPKLSSGDCLEVTPNEAADELMKGISGRM

SEQ ID NO: 124873 - protein, 124 aa, Heterodera glycines
MGNGKGNFRPTCGKVAETFIEIAIHQHSTPETVVTDQGRQFISQIFGNLTKIYGFEHIMSTAYHQQSNGMAEGSMRILANIISTTINAQGDNWDEILSHAIFTYNKYISAYGNKIFTLFYHLFA

SEQ ID NO: 124874 - protein, 265 aa, Heterodera glycines
MRFWYLLNISDHHTQFLSCFRVSNRTLCFLFGLAQFLVVLASLFQHVYSWTKFGHVHVYSWTKFGHVFKCFKCKSNISADATTEQRLLAYDLVIFDFGLMHRILKMSKCVANYLDGGYLRFSWLDGGYLRFSWCVEHSLALLVLLIVCVEHSLALLVLLIVLILSLKRIWLYWPALFMQSTYLFMQSTYVLGMAILTMATTPKMLEALLEALSRSVDNALGIAFCIYIGGVLLNWMFTLVLWHHYWAEEANLAQNIRENESADGE

SEQ ID NO: 124875 - protein, 30 aa, Heterodera glycines
MFEAKKGELLNGWTHFPFEFVYYVKTQKVI

SEQ ID NO: 124876 - protein, 30 aa, Heterodera glycines; identical to SEQ ID NO: 124875

SEQ ID NO: 124877 - protein, 137 aa, Heterodera glycines
MPEHLIPFDPGHIIPCPFFTRTVRNIVEQTKPDVVFMVFRWYNEVLNVPFNENGTTKNDEILKAFRHELRHFQKFVSNRIFVSAPTLQFKHDVAKELAKRLWQHAPLGDLQLSLRVGFEIENSNKVRSFFSQGSRAA

SEQ ID NO: 124878 - protein, 86 aa, Heterodera glycines
DRYKILPGEERTERWTKQLKQLLVQEGNKTPQNLLKFVIDRKVKGTGNGTVLLVGNSHADVVARELGEEMNAYYHDFQVFTMPGII

SEQ ID NO: 124879 - protein, 144 aa, Heterodera glycines
MLDSDFQKARFDMYWALAFVANIQPVFENNDYFAEQKPMQNWCQKELGVEAIIEICYYSIAYSTQFRSSPKGVLLPSLPPLLVPWRGNAILPARPVGHAFAAVTSAAYTARLLRHFFCSTVLLASVIGTQLLTTVMPALSFGLM

SEQ ID NO: 124880 - protein, 161 aa, Heterodera glycines
MAISVQMHLEMIKCCSVVQTKVKARHQQKKPLLLDFLSAPDFSVPTQAMLFALQQCAVMLWWRWQRCFDDHCVLSGRRCRGLLKLSQANVCRRWFAAVVVVVAVVLPLLLLLILANYTIRVQEKAVLRLLLLALSIIFATYRRRGGGGGGRDGLRKEHRLR

SEQ ID NO: 124881 - protein, 142 aa, Heterodera glycines
MRFLFNLHFTAPFVVSLAKRSSNNPNLCPTSNSMSDIYGFINNISDRISRRVRRKRPTESGVSGVSGAPPETRKDDKAKGGGCSKKCACIIVCSILTLIVLVIGGLVLAAVLTPETFKNAPLLSLIAGKKNGGVDGEEKETE

SEQ ID NO: 124882 - protein, 45 aa, Heterodera glycines
MHIYVCVLYFGLLNQSLLGFGLFCTKLMLDRYWNMLLRKKYKEHK

SEQ ID NO: 124883 - protein, 182 aa, Heterodera glycines
MSTTTDVQHKSIYDFKANDIDGHEISFDKYRGKVLLVVNVASNCGTTEFNYSQLKQLYDKYKGKGFAVAAFPCNQFGGQEPGNANEIKDFVHKKYNFEPDLFEKIDVNGSNEHPLYGFLKKEQHGTLIDAIKWNFTKARGRHTTTKRVFLVDRNGNVVQRYSPNTEPRDIEADIEKLVAAAA

SEQ ID NO: 124884 - protein, 28 aa, Heterodera glycines
NWHSICFVLKSLQRFSMVSEEAIGETIN

SEQ ID NO: 124885 - protein, 138 aa, Heterodera glycines
MPEGPVSEPQMVRHMPEGPVSEPQMVRHMPEGPVSEQQMVRHMPRRASQRTANGATYAQKGQSANREWCDTCPEGPVSEPLWRDTCSEGPVSEPQMVRHMPEGPVSEPQMVRHMPEGPVSEPQMVRHIPEGPVSEQQM

SEQ ID NO: 124886 - protein, 32 aa, Heterodera glycines
MGKLSYTSEIALFRCPLAIRGYAVFNIIKNSD

SEQ ID NO: 124887 - protein, 39 aa, Heterodera glycines
MRLMGCVLGQGGHNGQDDEEREQERVNREINKELKKDKK

SEQ ID NO: 124888 - protein, 30 aa, Heterodera glycines
MICRKAQLTPIPTVSPTPPSLEGLIILYEV

SEQ ID NO: 124889 - protein, 127 aa, Heterodera glycines
YWGIIFGFAVKQQNKLDRSILCERGTYAYESDSNIWINGKRNGTNYKYSYVVGDTVGIGVHLITRQLFFIKNGLRLDTSDLLVDPSFADGSLYPFVSLFYSGEKIEANFGPNNRKILSFPWVFKTKR

SEQ ID NO: 124890 - protein, 100 aa, Heterodera glycines
ASTTTTTTTTEEQPRVEKFANTPPLICILDSACNYATKYPTAKLSKRFKISEDCSELAKRIEMKSTDADWQMSFEFMNGFKYAAFIFDFPMLGGGKGGGQ

SEQ ID NO: 124891 - protein, 30 aa, Heterodera glycines
TLPALGQIWPTPSGVTLPSDERRTSSRQHH

SEQ ID NO: 124892 - protein, 189 aa, Heterodera glycines
LLFLHVRNCSKLLFEYRMDLVKRIVNLKMNSHHKILFLGDSSVGKTSLVNSLCGIGSPPQSTLGCTVQVGVVVCAFHQFQHQFQAGTPNEATELLEFWDVGGSNSHRKASAVFMDGADGVVLVHDLNNVRSEQNLALWVDLLYAQMGDNAKSGSGERFIALDMDRVYTIPILIVGVKFLFSPNVNVTSF

SEQ ID NO: 124893 - protein, 261 aa, Heterodera glycines
MSNKLLPDEMYCSRYKEIKNAFGKRIASAWTEKTDPSKFVYEDCGIVAYLLELWQSYGIGPSKQFADLGCGNGLLVFLLSCHGFRGLGLDVRERNIWEQFRMQGADLRETKFDPSSRDSVAEHLKGVDFLIGNHSDELTPWIPVIAARLRCNFFLLPCCTYDFFGKYSKKMPSEKALAAGAPKGIAEQHFAYIEHICHQLGFKVEIDQLKIPSRKRKCLVGVVPADGLGSSERIEAAINGLLSLAKIGTKDIFTPRPSKEQ

SEQ ID NO: 124894 - protein, 108 aa, Heterodera glycines
MPKRSIGSEDSEDELRESPSGPNGESPCAKRRKCVEFEPVRICSIGSVKEIENRVLLAQHYKLCERFRLKEKIRLELEKRIEGFERRQIQDDAVMCIINRYWNRVCFS

SEQ ID NO: 124895 - protein, 33 aa, Heterodera glycines
MAKMPVVMAFISKQSMSMTAILFSLNKNYYTFF

SEQ ID NO: 124896 - protein, 68 aa, Heterodera glycines
MGNGFGGGMGNGFGGGMGNGFGGGMGNGFGGGMGGGSGGGYGYDVKHIFGVPPKFPGHRPINSKITDQ

SEQ ID NO: 124897 - protein, 87 aa, Heterodera glycines
MYGGYAVLSGGRVSDSFSDLTGGITEEWDLKSLDVAKRRDMELILVKRPPNSGVKNYSENCVFGCATGPVNSDLTRAGLVEVIFNLQ

SEQ ID NO: 124898 - protein, 39 aa, Heterodera glycines
MDQNEKVRQKMKEKTGRRIDSFCIFYLIKFICLFSFLHH

SEQ ID NO: 124899 - protein, 89 aa, Heterodera glycines
MASAANAYVNSWKKSRKGQKQGDKVGTSSSGAQKSPEMGEIENPLECKIVKPILLIEERELQMSSAMEAIKSVYRDFFLWGKGKYLKNT

SEQ ID NO: 124900 - protein, 283 aa, Heterodera glycines
MVRKKQIFPSEGNKAKDQQIDAESIELGSQLPLKSGLKGSKLPDKSGENDNWVQSSQKKRIEQYKQFIDMIDKPSTSQQCKMKEIDRNVNYLETNRFENRKRKSDTFINLDEIDLDESSKISICDRSQEENNLHRHFIENIRKYNNSFACASLACQVYHKFNSTAQPIDQNSLPTNGQLYFLDSSEAQNVRLNSFELNEHLIGKIETSLRKNYPFAKAYEMMKNVINEQKTFSDKSILNETQEVKMFLSFKNGFDPNRYNIQQSNEVAAIMVCNGMMKSRLQI

SEQ ID NO: 124901 - protein, 45 aa, Heterodera glycines
SFAVTEPEAGSDVSNVSTSAERSEDGTFYVLNGAKKWITNCGVAQ

SEQ ID NO: 124902 - protein, 27 aa, Heterodera glycines
MSLQIGIPVLGNGAWMWERYNFKNIVE

SEQ ID NO: 124903 - protein, 131 aa, Heterodera glycines
MPKKQQKDAIVDNNKLPTEQQQQNDVLLERNSNEIDQHKLDGIDDNKNNNGKQFGAKKAFDQFEIEQPKSTKFLAPYQNRVVFHWSLYSIVITAMFYQVQNYIQNLWDFHRKADEREWNGFVESINTLLSE

SEQ ID NO: 124904 - protein, 75 aa, Heterodera glycines
MFGFLFVVFLILIVTCSEATILLAYFHLCAEVVSTILYFSYTSIFVFLFFLMTGTMGFFATYWFIYKIYSSVKVD

SEQ ID NO: 124905 - protein, 50 aa, Heterodera glycines
IKKFTVNSAGNTMTNLLVSDHNNPPGKCPPHSATTATRTELSYVVLFRSL

SEQ ID NO: 124906 - protein, 96 aa, Heterodera glycines
MKREGNGREMVVGGEQTAEQHNGKDQAKDGTLGRVGGMETKRTANGQETVGTDGDDQPVQIEGKCRIKSDLKRMTDQMATAEHQLAKATKWTRSDR

SEQ ID NO: 124907 - protein, 135 aa, Heterodera glycines
VETVSKQLAAHVYNFLGKDMLTSGSTGQQMAAYVYFGPIYYQKLKHMVMDKMHARAKGPRAVLTRQPTEGRARDGGLRLGEMERDCLIAYGASMLLMERLMISSDQFSVSTVIPFANDSIFASSFVRWMFVPSAV

SEQ ID NO: 124908 - protein, 529 aa, Heterodera glycines
LTIKQLIPTVCIDTFCSENLTPWTTVMALFLLYLITLLWMCKHGKNICHPTPDSIYPYIGRLKQLKRHGKNICHPTPDSIYPYIGRLKQLKRDLFFIIRVTLIYFLISKRWTIYLSNIELTDIKLGQGAVGLSNIELTDIKLGQGAVGFVFKGYVVPKSQTRFKQKVFAAVKMSYPMPQKSIGLLEEAARMARLNHANIVRIIAVSKLSFSAFRPMFAMEWLHGGSLAEFFREEIRKEDERERPRVFVRDIVHVLTQVEIRKEDERERPRVFVRDIVHVLTQVGNALKFLHESRDLQGNEFAHGDVAARGNALKFLHESRDLQGNEFAHGDVAARNILLTERNLSRCVAKLGDFGLPIDFCVAKLGDFGLPIDFGPRLPIWLPPEIVCSTDRTNAKHRPESDVWMFGVLCWECATLGAMFGVLCWECATLGAEPHYQQTFDEICDSFRLTHRGLPLQKECPPDYAAFVLDCFSEQHRRPRFSGPTNGGVVLYTLIFCFHFVFHLAHFKVVHNVSNCTCAQHRCNVPLPV

SEQ ID NO: 124909 - protein, 117 aa, Heterodera glycines
SFSHGVVLPPFSPWRRRPPLCSAQHSAEHFHQQPSPAVAAFIPLIIIISIVPSAFADLDERKTKAVIQLNALQSNAQTLVLARTQQETRPEWRLEETKEFMDILGISVPFYYLIWFQ

SEQ ID NO: 124910 - protein, 99 aa, Heterodera glycines
LGLIKCNRDGYVTLQEFMAFMINKETENVRSSDEIEMAFRALSKEYRPYVFAEELFANLTQEQAQYCKQRMKPYVDAASGRTIENALDFEQFVHSMFMN

SEQ ID NO: 124911 - protein, 110 aa, Heterodera glycines
CGQCNFCEFIPSFLYFVTQKCDVDLRKTLYQNIVLSGGSTMFAGFGDRLLAEMKRLCPKDVKVRILAPQERIFSTWIGGSILASLDTFRKIWVTKQQYENNGKIIMAETF

SEQ ID NO: 124912 - protein, 42 aa, Heterodera glycines
MALQHNANGRRKLNNGIFLIKIDSLIIMNSFALTFEKHVNII

SEQ ID NO: 124913 - protein, 75 aa, Heterodera glycines
MRKFIEIRLSRAQLSPLVGANLVRRLEKCGTAGEAMTELLNSVVKMYHIIEMYKKRRKELDERFNEVKRMADAIK

SEQ ID NO: 124914 - protein, 119 aa, Heterodera glycines
MYKIRSKNLLSPFINKLNTYSNYWDIAACHPNLLISNSASINANAPLNKAQQLLKSNIFTAGAAILATLPGYVRKSVVVKHNGKNSGFCSVFSKISIPNGSFFYYEVTILHKHYEYVNS

SEQ ID NO: 124915 - protein, 30 aa, Heterodera glycines
MRKMTMLMQPMNAATCSGASPEWVVASTLA

SEQ ID NO: 124916 - protein, 19 aa, Heterodera glycines
MANKLMRIAFAFTPNSMDE

SEQ ID NO: 124917 - protein, 77 aa, Heterodera glycines
FKKVMPRRESKTPVIRTFFALIFLCINKKFWKICRLIAFFECFRIIPRMFNLVEKEKSYGRKIRSTTFRLTTVLPTP

SEQ ID NO: 124918 - protein, 29 aa, Heterodera glycines
MGNWSKDYRISLPIVSKMRENFVAKFLSK

SEQ ID NO: 124919 - protein, 235 aa, Heterodera glycines
MTSVAPLRGLNFLLQSSDDHQAAAAEHARDFNESITQGLRDSAVVHLIHTGEQGVGGKSSSSMAFDTTDADLEAVIKRAQNAPVTTALADSSLENGNDDNVALSRHVIQPRSFLFLNFLVSFLVDARGGAMRGCRHSGVRVIIPPRKAAAPIRITCRYLKKEKLTHPPPLSEGEALASRILEMGPHGAKFLGPVILEVPHFASLRGREREIVILRSDDGQHWKEHQLEATEDAVQ

SEQ ID NO: 124920 - protein, 200 aa, Heterodera glycines
MDPRNGFYDKNEDKVTLAIDVIVGQAEMDRPISADQSKSKGTLFMDIEKVSQFAREIIWSERKSETVTCLGGLPWKISVQIFTIMGSAVKCLSLFLCCTAPKEDENWRAECSAKFRIVSQMSGVGEFRKEFEHTVFNSETNCWGFPDFITFAELMDPGRGLYDREEDKVTLAIDVTVMKERKGTKRKLAVGNAHPIINLT

SEQ ID NO: 124921 - protein, 24 aa, Heterodera glycines
MPRKENEVESKVRERNAMEGAIFF

SEQ ID NO: 124922 - protein, 82 aa, Heterodera glycines
MAGNLLQSQVNSARGILMDLLTANRRDLSPDVAACLKAVTALLNPAASPAAQQTYAAGGCANVGAANAAVSGRKEKPMFKSK

SEQ ID NO: 124923 - protein, 62 aa, Heterodera glycines
LIAIFNIAICSFILSTVCQCVDSVQLSLTELGVPSVVESPYSGEVHVASVGPISAICHLLFS

SEQ ID NO: 124924 - protein, 239 aa, Heterodera glycines
PPEIGALRSLVELYVDENSLERLPDAMLRCTKLEQLDASSNKLFLLPDELGELGALVDITVSHNCLRELPNSIGRLKRLMILKADDNTIDTLTPAIGGCTSLTEVYLQQNLIGELPSSVGNLKACPANTEHGPVPTAPCARSVGRMCLADRVVHAGQSVARVAHGNWQIGTSTGDGRVQQPTPAFALHAKCAARVASVVAVREPVPSTAPPSAGHRPAERRQSAHLLSVAPTGRIRWLK

SEQ ID NO: 124925 - protein, 88 aa, Heterodera glycines; identical to SEQ ID NO: 124691

SEQ ID NO: 124926 - protein, 47 aa, Heterodera glycines
MNQQLPNKHKRDELKQQKKQKKVTFQEPTKKEENAGDKTEKFPRSTL

SEQ ID NO: 124927 - protein, 1089 aa, Heterodera glycines
INLNNEKGLNQQQNQSEKLDSNALLSAIAFDNAELLAELLAARPLLANCHDADGRMPLHHAAAGGHAKCAEILLGSGGDLKFLNDTVKTPLGLDTVKTPLGLASAMGHCTVVHLLAENGADLFYVDSDGHSALQLAQMGGHDQVATLLIGIIERIYAEAERKNQLCAACVDGEVGPVLDISDLGPKSIRKQILNGRSGEQKSALFLAAENGRAEICAHCSPYSTIPHFAQRRHGMDINVNLLLYLEKAINFASNSFFMFTKNFSFRLALGLLFEKFPVIKSFPLLASSCRLPLRMWQLLQILHKFPFLMDAVNEEKNLPLHWACRCCGNARVVQALLSAEYPAEIEIFRVSADGYLFVCDLNAVDREDGYLFVCDLNAVDREGRSAFFLAVMEGHSEVVQLLAKVVKNKYNKQRKHFKLPIYGTRHRREMLRIEEKQNLMEHPILFDGRVNGKTPLMVLDVNYSANERRCRRSGGGALAEAANSGHLEVLQALFHQGAFDYGNRTLRGRLANDSGHSKMVGLFLQQLVHHDNENCVNSARSPRQKKEHGQLPLSDHLPSTKGCQLNWQSTGIRELRSEWMVDAALKLNPQIPRKKSLALNAISRIDLSSNQLCSVPHILFTHLSSLRSLDLSKNCIPRFEIPPDGANWQMPSLDRLCLDENQLEELPKQLLSTPRLCFLSATFNRLRRLPPSVWTAPRLLELHLANNLISELSAAARNSEGSGDKRSNGRGDGHPQVGERRESVSTKFIPTKATFTKLFRVNIWQEKIHLSNIDEDGPTVANEEATGDELAAQKLAFVQFGRMPTCLACCCPRLAKLDLSSNSLSSLGPVGCLPSALRHLDVSKNQLVRLFGGENPAAEAKAALLRGSVRIWNCRCENGRRWRSRSKSVARSQRSLSVVRKSGGGVGRAEQLCCVHKSHCRFEALCCVHKSHCRFEALKTLNLAQNSLEFVDILLPMGGVLFPSLTNFDLSLNRIRQLPTTISLLGSLAMLNLANNVELDSLVPELGLLERLWTIGLSGCQLRAEEPTLQAMVQAGSYKTGEVLAQLRQRLENSMPYPMLKLMLLGASSVGKSTLLQQIRLEGTLSKKP

SEQ ID NO: 124928 - protein, 255 aa, Heterodera glycines
MGGVCGKRRKNWDKEMDCKMGYKDREYQSVQRCFFTRRCLFLLLWKVTDGDIALADLHDFLLAIQAQAPNSYVLIVGTHSDFVREQPHRFPSDYLSQMDKQIQQRFILGADPEKNGVPRVLGSLYISCCSREDVRSLCALIYTCATEIRQFSRGGGPARQRLLAQKVPASFVLLEHIVAAMSDEFRAVGKEPIMHFNEFWSLATDRLAQLEEQKEQQQDKKTSTTKPASGTLHFRGAQDFRQACLFLHENGPTYP

SEQ ID NO: 124929 - protein, 274 aa, Heterodera glycines
MHQNSVIESVELYTALKRAVRHNLAHRRLSRAVATSIDNLNSTKLTENNGTGENEEKNADLIKILAVDQCKEECLRRLYVMHYIPPGFWARLTTRLLDDERVGNVLTKMLLISRASPLPQQQHMMSMTETDQQQKQPLAALWSTEAIVAAFGRALNAGRMVNLAQRPSIRRDASAADEMENVPEEETSFIVVNSAEEMTEEFAFNSNNKGNPSSSSSSGGTVVVKCCERGVEATDERCRGTGGGIGKVGEELGNVLEWMLWRSGVEVGEAFWAG

SEQ ID NO: 124930 - protein, 109 aa, Heterodera glycines
MKQLLLENATAAGRLAKWRRTANDPLNGAKGTKSTDRRHLRRECANHQSWIMPIQQSSTQLPQFRVQLAPLRCLCQPIIAPLPPPRRPFRSSIFLYQCRKYSSPSLPTQ

SEQ ID NO: 124931 - protein, 97 aa, Heterodera glycines
FITALEVMDLSTFGTDKERWRNEKGDEGEEEEQLLVGTSNGVVLIVRGIEMSPISAFRPFCSVQRIICCPPPFGQSSSSCRILQKELLHSSTKKAPL

SEQ ID NO: 124932 - protein, 107 aa, Heterodera glycines
MISPHSPPNTERHSSKKRSLLIEKSRSIMLKATGGAVAGTAAGNGECQGQRPKMSASIPAEEGKQQQQQFFVAGVCANQPKEEAEEPWYITMMRGSKARKCQRMKSG

SEQ ID NO: 124933 - protein, 66 aa, Heterodera glycines
MVNIYSNGLYFSPELFFIYLFIDKEKLPSEGRRPLTLMTDHNKIVSDSIGSCEVVKLPKIGRPYSN

SEQ ID NO: 124934 - protein, 124 aa, Heterodera glycines
MSLQIGIPVLGNGAWTMATLFKPFWIKNLKLEKFGFSNFCSNSDPGTVVKRTRTRQQTVTMESSSQVATEVDAVFSQVLNIPHMDNPIEELKRQMQKLFIQKESEWAFKLNEVKNCKNSLKKFT

SEQ ID NO: 124935 - protein, 65 aa, Heterodera glycines
MSVQPKLVVINYPLGNSFGVFLTEPKPMEWSLITPWTHFDCIMPTEVSIISHLELRSSSVSQKGD

SEQ ID NO: 124936 - protein, 43 aa, Heterodera glycines
IFSSFLLYFFFYFIIFCNYFSFFEFISFFFFFFFPFFSKYFAK

SEQ ID NO: 124937 - protein, 84 aa, Heterodera glycines
MKLFPLLCLIIFLIIVKIESEKKKLQQKSFGEYLEKNGNEEKLEEKRETIGKYYKIKEKIQQKGRKYSKKEWHQNYAEICKCRT

SEQ ID NO: 124938 - protein, 113 aa, Heterodera glycines
KGYIKGVKGPFDWYIVSKMQKPIIVNIIALANLGTGIKLNSLTITECEFKYNPRKFNAAVIKCISPIKATALLWESGKMICLGTKSLIDCENAIKKFIEIIKGSGCPGLLTPD

SEQ ID NO: 124939 - protein, 907 aa, Heterodera glycines
MENYKLMDYQTTTCQKFGFTKNITEFRINPDVERPDEAMKDAIDNMIKVALKTTEEKMKRKVRMFGVAITGAGLAFPVWVPYRAYPQNNADVIMEEINKLGQSGDGDENKKMLLLSEPITMKITCVTMPSGEGPRNVHKFDFGFKEHQRIGIVNTDNKFCLFYALASSMNYLIMDRFEFNRFMKNIVRQRDAAIELLRNCGIDGNEISYGVEQLPNVQKYWDEIYPGKYRVVAFEKSADPRKSIRVLWKAPMGREKVVPIFLENGHWDGLKNYVCFFNRGRKFCVECECFYDQDVYHTMDCRARCYYCNRVGGMPCEKESGVKIECPKCRRYFYNWECYNYHQGHQTCKLWRRCVICDKTYRFNPKKEHECGETYCQLCSVSHDPKRGCYIMPIEEKEEKYVYRIVVWDSETSQDSIYKGDQKEHVINYISVRVTCTECCDDKNRMNCKICGEKRIKDWSEAEGHEPTKDFVEWILTAFTNYDTYIFAHNAGRFDGHFVFNYLCRTGKNPIPLINGLKIYEFKVRNSKKHSMLIWRDSCLLMPVKLESLKATFNLGCEDKPFFPYYYNKKENYGVCLEHLPPMEDYSPGSMNKEKFAKFEKWYNENKGTPFYLDEELRNYCRNDTEILLLSIIEFRRILINDITKGFDPLPRSCTNAGVAMNIFKAMFLLTEQLSIVPEKGYERCDRASVMAIKYLEWRSKRDEIEIRHAGNGREVKVGNYKLDGFIANNGARDKCIEVMGCYIHGCMSCYDPAAELIGGRTAQELNDETQERLAELRKTLDVEEVWGCQIEKELKKDEEMRDFFDDRGNEKGPIDPRMAYAGGRTGPMKLYAKSDEKKKISVYDIVSLYPSVNYVTAYPIGLPQIIIRKSDEIDVNWTRPEDLKYKGLYKAKALECGYTVDRFYRA

SEQ ID NO: 124940 - protein, 160 aa, Heterodera glycines
MFRRSVTNSLLPSSGNDHRRHSHQTITVVENSRHRRQQKEDDDRRMDASEQLAKEKTCRWSDILGGWSGNGGKGRDGRRESDGGDSAEELIAALKSLQSTGKMTEKAAEAQTKGAKALAKWASKSKNEAMADIVGRVSELMEMHAERQRTFAKDYGHYLK

SEQ ID NO: 124941 - protein, 113 aa, Heterodera glycines
MVAGHSLATNSGCAAVSALPLHHAVPPPFSSPLVVQQFNQHRHQMALALAGINANAHNSNAFDAATAAVPFHQQSNQKHEQSCSTEVPAVQQQIMSTESKQRQPNSIGNVVIK

SEQ ID NO: 124942 - protein, 65 aa, Heterodera glycines
TTSFLHQTLNVAFGCNEQIYSPHYILPTPDTTSFLHQTLNVAFGCNEQIYSPHYIIPTPDDERGI

SEQ ID NO: 124943 - protein, 170 aa, Heterodera glycines
MPRWVRFVFLKLMPHLLCMKRPSPAINRLAWHATDGADSDGLTTLPGVGQFTVPPSAHHPNCPAAGKRDNKMEQKSDNKAFVPIFSMKVRAVHSIEYITEHMRREEKHKTRDDWKYVAMVIDRFLLYVFFGVTFGGTIGVLLSAPTVFESVDQQAVLQRLIQAYNSGGRL

SEQ ID NO: 124944 - protein, 100 aa, Heterodera glycines
MSSINPNDFLSPSILAAADFKMQAPDWGNYDTNGTDYDYIYNNSDERDNWNSEQAGVFRHLVTQLGTTQTLQNLALPTFVLERRSLLEMYADFFGEYIAF

SEQ ID NO: 124945 - protein, 181 aa, Heterodera glycines; identical to SEQ ID NO: 124594

SEQ ID NO: 124946 - protein, 312 aa, Heterodera glycines
LGCYWHGCERCFDPGDKLVDAKSCRELNEETNLRLMQLREGDVDGQGLQVEAVWECEINAQLACNAEMRAFFSDLGMDRGPIEPRGAYFGGRTGPLKLFAEPKEDEKISVFDIISLYPFVNYTCEYPVGIPTIIRPMADEMCVNWTRPEQLPYRGILRVRVVPPRGLRVPVLPVKIDERLLFCCCHHCATMFRKKSTRRPHKCPHTDAQRSFTGSYTHIELERALEHGYKIDRLWRAWHYDEWSDQIFKDYVRLLIKLKIESSGFPEGVSSADQKQRYADEYRRIYEVNIELENVKKNPGLRFIAKLMLNSL

SEQ ID NO: 124947 - protein, 20 aa, Heterodera glycines
LIQMLKTFLLLFSHDHTING

SEQ ID NO: 124948 - protein, 60 aa, Heterodera glycines
MDSFQDAKQVIKPVAGPAEATDISTKQQRMPRMQVAATPPTEKPKTRKRKYELDFFLSFS

SEQ ID NO: 124949 - protein, 104 aa, Heterodera glycines
MPTHPRGKEAAELWLKHFRRELEEGRERRRQMFMVAMRKQLDIIRRYQQGKLPKEELDALLEEARQRDAQRPDKEQYEEKIKQHMAKAYFEDVKNVHLLTLFQL

SEQ ID NO: 124950 - protein, 134 aa, Heterodera glycines
MFANAVMYNSTGHYVNNYAKEMVAYALKCIEVVQFPTGQFHAPPPSRQSNGSSSEGGAIGGGGAAKFTIAWATTLIKPKGVDQKKAKGRNDEELTSSSSQDKEREADQRDEEETRRLFQRRRMYNKKYTFTSTI

SEQ ID NO: 124951 - protein, 57 aa, Heterodera glycines
MPATAALWVWEADRDYERWEGSRVLRERRVPKFVLPRTIFDWSDFDYAQQMRKAPTG

SEQ ID NO: 124952 - protein, 107 aa, Heterodera glycines
MQVFANYAINLIEMENKCSLNRVLIEMVKIENLWSEKSSSDNYFIQALAKSGLEAFRRKMCEVFWQKNPTIVQCAAFLDPAVNGLLSQICHSNSNWGTQTMVMSRDF

SEQ ID NO: 124953 - protein, 97 aa, Heterodera glycines
MESDSNPQQQSVPVQQLPSDASPQPQQNGGGDSADKIGPDQMRLLSAQIAAYKMLARNEPVPRALLREDSKSHRPAHPGVAMFAHGHAAPFAHPCRN

SEQ ID NO: 124954 - protein, 88 aa, Heterodera glycines
MLNETEKAAKKINKCNEKEGKGKLKKEQKGSDLEEKLEENRRTKRKGRTETKAKETKGERETDRETAYWNEYWDEEQRRWICETQQKP

SEQ ID NO: 124955 - protein, 214 aa, Heterodera glycines
MDKENKKRKGTKRSKNPEKTSKQREENQNKENDDEFIHPPRRRSARLIAISKPALSSDLSASAEDFVHGKGTKTAKSEVFGTDALFGVSSASFTSPFNSYLTSSVEPIKLSSDEATVSSNRSLTKRLNATNIQNAQSLGEGTSKATLPLSSDDDGEEDEWGAMELLHTDKTEKKVIEVELDEKHSGKFVQTADKSVERERRKRSGGKGKMGARN

SEQ ID NO: 124956 - protein, 111 aa, Heterodera glycines
MAHGEKATTSGGNLKAPPMEVYLEWIANAWDSLPKQMIADSFLTCGISKEEKGRHDDKIHVFKVLKNPDGAIPNGLAILKQRRQEEDVLKLVEEIDLSEDESDEEIDAEVS

SEQ ID NO: 124957 - protein, 52 aa, Heterodera glycines
IKKRTTMIRRGATVIRRGATVIRRVTTVIRRGTTMIRRGTAVIRRGTPVIRR

SEQ ID NO: 124958 - protein, 35 aa, Heterodera glycines
LETGASARLRPRSGLNSPTNLETGAKRPSEASKLP

SEQ ID NO: 124959 - protein, 154 aa, Heterodera glycines
MKTGIILTLLIIKNSFHQTFFSKLDQIKSFNEIFGHGWSDGEEQIGENQTELAGTSQSRRNDLERNDLQSRIDQSQINGHRYDNSFSNHFENVKQKYSDLEKLEIVKKFFELKAKRVAAKDKAKLNEQINKEIANELGTGVTTIYNWKREFNID

SEQ ID NO: 124960 - protein, 148 aa, Heterodera glycines
MENFDETEKQKEIVKLFKKYKKQNKEKTNLEIAKELGIHQNKLLEFRKRFDPTYKKKLLANSEKIALVRKYYKLKRKFPELSQNKIAKILKISKNALIKWKQQFGNQFEEQVQKMSHPKMLMRQFGHGTMKHKKEVENEQNLLLKLDE

SEQ ID NO: 124961 - protein, 153 aa, Heterodera glycines
VHQQQSATAAFAVLHQTQQMQPQRTVCGHGNGGTIHLWHFIRELLDQPRDYGGCVRWVDRKEGTFKTFKIESSHHLARFWGLRKNRAAMNYDKLSRSLRQYYKKGIIQKPLSRSLRQYYKKGIIQKPEKKQRLVYKFLPPYNQVYKFLPPYNQ

SEQ ID NO: 124962 - protein, 94 aa, Heterodera glycines
MPQVDDSDCCIEMRQCRLFGTQKRPSSVRNLKVAAEVGTVSSSSILLRWDTADRADIYYVYWRGRNAAEWSNRSARNTTLMRINVDAAMVDEVH

SEQ ID NO: 124963 - protein, 58 aa, Heterodera glycines
MRSTENGKFCAICRHKCAENEEKPRKENAMCCTIKTICILQHQKKPAPKALKMDSILV

SEQ ID NO: 124964 - protein, 483 aa, Heterodera glycines
MDTYVVALTILIQEFNEEAQESADGPQLKNAAASPKIIAAATKAILVPIGTFFVHQTQSKRAMASECGDGECQQCDNIGKLENKISMITSKGQKNIIRAEEEEEEEEKRKSEEEEEEQQQQDEEEEEEESDGTKKGGQWEKHYGKGAMGGGPCGANCGKQCPRRCCCCCVNLSRIILELLSPNNVPVMKCQKQFSLSVKGCAKECERSEKGADKSILGPINRQQSAQKKVPLRLFKPFFARNANFGVFNSPPKLIGFNDKVAEKQRSSVDESLENLKERLGKISNKLDFWKTNLLRKPLQAIDESIPTAADQQQKETSRADQLKMLKEGDNQQGIGSDYGNGKIDKNTFGQWRRKCSKGWRWAEQHGDSTNCDIDLTTSSTSTPTAAVNGTLFTLTTRQLQTASAAELPTPPPYVPANEPSNMPIVNVRSVIVQEMAPTENATGNNGTAKSTTLMSLTQMDQNGNVKANGGAFIGDSFKLRFY

SEQ ID NO: 124965 - protein, 86 aa, Heterodera glycines
MFKCDCNDAEKKDEKFNKISGKEENDEESVQSDQNVALGVDVISLESFFMLIYKFMCFRKFLGNALRLPAPGQSDSGHSDKWTILQ

SEQ ID NO: 124966 - protein, 114 aa, Heterodera glycines
MAKMRQMNFFVCITATNFVDEHNNRFSYVQEWFNVSSAQNDILFFANFNQNPWVNDLSTVVIPAWLLLWASSKLREIISKQLKIGNEKSRNTIHVHQIMTVSARTQQIKGICRR

SEQ ID NO: 124967 - protein, 87 aa, Heterodera glycines
MDPSFFYPCYITSTLSPLMGSSASAPFFSAMAMLANSNLCPFLFALAIGIPSAVLYCSLLLVIVANFKHFSSPFFILIIIRAILVGK

SEQ ID NO: 124968 - protein, 60 aa, Heterodera glycines
LAGNTLIGFFLPQMIILFFSPFVLHKFCVFRWNSKGTHWRREIIPKSERELPTRDNGSIV

SEQ ID NO: 124969 - protein, 51 aa, Heterodera glycines
VASSPSKVPSRKFCAVCGLFAGYTCVRCSARFCSIPCKDMHLDTRCLKWTV

SEQ ID NO: 124970 - protein, 117 aa, Heterodera glycines
MRINPQICEPCFIVGRIISQQPTKCFDEAAKRRRIQQQLESLEKVRLLAENDAFPVFQDNFQEDPHANITWHKAAPKFDDEMVFGDKEKKRRKRKIASPSKVSGAEQASEWKSGEEK

SEQ ID NO: 124971 - protein, 56 aa, Heterodera glycines
MNVIPTYKQACASAAKDIVVLRPFDQWVNENDPMIDYCRKNGATVDMPSEAELFLH

SEQ ID NO: 124972 - protein, 22 aa, Heterodera glycines
MNVMKTGEEQDITNFKLGKTQK

SEQ ID NO: 124973 - protein, 19 aa, Heterodera glycines
KNSNFNLYQVKIIQNYLVF

SEQ ID NO: 124974 - protein, 88 aa, Heterodera glycines
MIPYQTLFSGTKFQSEIIHIKLLFKKPIQILNIYRPPNCNVHNTKKLLKFISDQSDSENIIYCGDFNIPNILWDGNKGNEKTIAQIKK

SEQ ID NO: 124975 - protein, 29 aa, Heterodera glycines
MNVNKEEERLEKKVTKWAIMLTSEDKRKF

SEQ ID NO: 124976 - protein, 189 aa, Heterodera glycines
MTQKAKAATHHQQKKKKERMEAAGEINSIASLFSGEPADVKVNFYGAIKCGIFRDGTANSENIFFSIKKINNFFNHERVAADRTAISGVLDELGIESPITVYRMGSPDQAKTGQNRPRLMKVIFGCSKHQRQTFGSMEQTARSNQSKTGDEQHQNSPFTQPRGTQGPTCAAGRVQQKKKGRWRRVGGLR

SEQ ID NO: 124977 - protein, 43 aa, Heterodera glycines
MRECWISVPVIQNIFDEGGRENNFNRERNGKGVVHVSSSLILL

SEQ ID NO: 124978 - protein, 103 aa, Heterodera glycines
MSKIKSLGSKSRKIEKIRDHGQPCCVPFVTAFCLAFHGTQVTQQHTANEKQMAQIIEILDDEEEMGEEEEKAKNEENENEEKSEDKRRKKSKKKDDCYVYYNF

SEQ ID NO: 124979 - protein, 24 aa, Heterodera glycines
LTHRPLRRKNQLNCTWSPKLNRRV

SEQ ID NO: 124980 - protein, 234 aa, Heterodera glycines
MYTYQTSEIERKLRHYGVRALTVDAYQAQECDVIIIVTTRSKYSEMGSGRTDNMHFFEDDQRATVALSRARHAVFIIGDLVSISAGQVWKRFIEMAITRTSVVRAEYVLALLGRTLVRSSTCLFDSAKRESVEDEGFLESWALKHGLRLDRTNAFGQQQSQQPRAPSFQFQNRHFPALQTTGPSDQAGPSGSGGQQRGAPTLAPQYGRGQGRRGPDNQWMHYGGNPKRQKGGRR

SEQ ID NO: 124981 - protein, 54 aa, Heterodera glycines
MPKPQEALLTDQIIILKMTEDGTIALPEMTDDGIIKPLKMTDAGMLGQFATTVG

SEQ ID NO: 124982 - protein, 203 aa, Heterodera glycines
WRNVRFWLSWRNECFWLSWRNDKLAKCHGAPCRSPKKSGPKNRHSPAGRGGGRSQTPRKKKQPLKKVPGPSSRTPGRRVKKPSTKKSPARRATETKKKPTRKTAGGRANKQTKSRGRKTTKKTDQEEERADSEAEAAGSPRNSGHSEESASGTKNKPTRKSAAAGRSTKQKASRGGRAGNKKAQEERSESPTESGSDREEDEE

SEQ ID NO: 124983 - protein, 573 aa, Heterodera glycines
MNKEEWNNEWKVQKIFREKHDYLKTIKEIDEILDTLKDVNLEVKRRLKLLKAKSSSDSDPEDESNDYEHENEDEVEEQEEEKEYESDNEDESPELSLNDQIHHDRIPFVNYRSRIKLPPQTLTHFNGKFSQWPSFWDDFKSSVDNDPNLENIQKLKYLRGLLHDEPYRIVSPYPLTNKNYTIVIKLLKSRYGNPQLIRENLHSELRNLKRPTESTIELRRFILLIDRIILQMKSQGEDINHPQIKQSIETKLPYNIRLKLREKFKIYSTKEIMEFMNDHTQAREDIERMEESNRQIRNFPSNRPPQNGVQRQFYPNFPHNQMKPNPRNQQNTSSSPFPYTSALTTKSNPVRLAQFKSNPTQTRTQNKIFCRFCERENHASKECNFNCKYKHNTLLCTRKQTQYKAKEQKTKVNMAQNYENHEETQTFMTMDYDKNFYNYEEEELLMTTEVNVINPDKPKIKKEIILFDNGSQKSYITEECVQTLQLSTIEEKLLAISTFNQNKPKIIKSRLVKVGIKTLKGEIEYITLQTVEKITDVTKMVNKETVDVLGIKIPIANACPQILIGIDYYWHFM

SEQ ID NO: 124984 - protein, 71 aa, Heterodera glycines
KFEVDTINILLLKLCPTWSICLDENRHDSSLSDRSRPPTFPRPATLRASPISSPSRPLHPAEFDANFLSPR

SEQ ID NO: 124985 - protein, 118 aa, Heterodera glycines
MGLVTLILPDDEQLRNGEFDVLTWQSGADRTGSTVRRMGTAGQTGRAAGTAGQMGTAEWTGTTGRTSTAGRTAGQMGTAGKARSRVVAPILVVATKNLRRTLRGEGDGKGMKWARRAE

SEQ ID NO: 124986 - protein, 31 aa, Heterodera glycines
MAKEREGTRAGADREGTRTDREQRRPGAVKG

SEQ ID NO: 124987 - protein, 34 aa, Heterodera glycines
VGIKHHSPACLLFVPISILPKFLPGRICLCLVPT

SEQ ID NO: 124988 - protein, 73 aa, Heterodera glycines
IERRRGGTFPIKLRFFPFLMKLHHAYKIYHFHFISRDVSRDTPHSKVVGGFSCCKSACMLLFYFLCLIPGCLC

SEQ ID NO: 124989 - protein, 72 aa, Heterodera glycines
MNRRWICSDVWMDILPSFDRPQLGLKMALLSYRFDALVDTHFDGKRTELTLWRPIAICKEKNIGLEARLCLH

SEQ ID NO: 124990 - protein, 37 aa, Heterodera glycines
LSALHHDDKEEFDAVNGNFVSANLRRIPVISKVIMFP

SEQ ID NO: 124991 - protein, 17 aa, Heterodera glycines
LGSPIIWKSIFFSWTVG

SEQ ID NO: 124992 - protein, 41 aa, Heterodera glycines
MQCDTGEANTQVLKIMRELKFAVHKSAMYRLKTWDFTGYGH

SEQ ID NO: 124993 - protein, 43 aa, Heterodera glycines
ESDECGEFEEEYNGSSDAVFCSDEAQNAETQIKQQNPIEKIHN

SEQ ID NO: 124994 - protein, 171 aa, Heterodera glycines
ANFCQQQQQHFPNPRDSSTPKSNSNGSSPSSITSNKPFSSSNCLGNKIYSTQSSSNTVVANGSGANRSTATTAAFVAEDSCCNQMRGELVARNSVAERAEKASSVYENVATGERREAAKPAAPREANYDANDGANDHNYEQQQQHGPPQNDQGGERREGPKGEIWYEFGCV

SEQ ID NO: 124995 - protein, 232 aa, Heterodera glycines
MKGCLLTSSLFVFLIIILISINYVGSEKKKLEKKSFDEIFGEKWEEKKNEEQKKREIIGKFYKIKEKIKQKGRKYSKREWEKIERKIAKKLGTNRRYIYEWIKELGLNQKNFYKSKTDEEKLEIILKFIEMKNEFKEKGRTYSKKEWNKNYEEICKKIGVGLFIIKKWKNQFGISRKITMEKEKTEKMKMYWQIKGEKPKMSDKEIGKMMKITSRTIAYWKKQFGKEYVMRN

SEQ ID NO: 124996 - protein, 128 aa, Heterodera glycines
MALAQRHNRDRPSSSSRNKYANYSETDEDDEEDEDGGRYDEDEEYDSDLADFIDDSMVDDMQREDFEETLKIINPRYNKEKWLARERMIDDRRMDARFRDVEAEERHSSRLGLVEDLREAKRGSKALG

SEQ ID NO: 124997 - protein, 62 aa, Heterodera glycines
MAIKYGPKIAKYGHKMAKISKYGNKWQKCQNMDINFSKLSAKFLQIYWLKLHMRYISKFFDS

SEQ ID NO: 124998 - protein, 51 aa, Heterodera glycines
LQIYWLKLHMRYISKFFDSVRRFDKDGFRFAISRSTFGNWSRIFSAITCNH

SEQ ID NO: 124999 - protein, 61 aa, Heterodera glycines
MQPLHDDESSDPKATPRQHLTTSMAKMRYSARTAGGSEAGNGVNEFTAYARKRTNELMYNE

SEQ ID NO: 125000 - protein, 233 aa, Heterodera glycines
MPLFSRQIIWFSLLKMLCHPKRYFRSLFMVVFLLGVHLFALCAAIHNIRTALPVLAGWNLGAWVLNSATIFSGNLEFSPRFLTFLSPRIGEDLSIYKIVRGPKISKYSKNFSGWGESPENCQKNTPRGDPFVKLCEMQYLCNTVLFIGHTVTAYKLFLRQRLEPFLVRPCFSAVPTLHPSIIHCIQILWPWVTSFLCRKDLCPFSADKMASCHQRYTAPTRARLSHPPVVSRF

SEQ ID NO: 125001 - protein, 165 aa, Heterodera glycines
TESAILIEPSIITMTASEIHCMMTAGFACIAGALFSAYIALGNCPIHLLSATLMNSAISLGISKLVYPEVEHSQHKEAEKMKFAERDNEETILECITASSIRTKILGFCFFPLAWAMGVSDAQNTEVMLDETMKVAELMGIKTALNEFIAYQRLAQMVTNGTLNG

SEQ ID NO: 125002 - protein, 77 aa, Heterodera glycines
MLVDSLRPATLSSSKKRSAHSMDDTDQFIGHSPPHKKQLMDEENDQILTQNTPNDSLDRRRPIAFATKAIHAGNRPE

SEQ ID NO: 125003 - protein, 92 aa, Heterodera glycines
VMLLRPTVPFVSLSLFLLLFLFIAFPSTDGFGVERGGWPWDWIGKQACKTAANCKCKDGKSWAKCVKSEGYAASNCCDKNYVWACCGKKPKQ

SEQ ID NO: 125004 - protein, 206 aa, Heterodera glycines
GRQTDKDRTQPRVGGRRPAFGDPQINSDRILPTEVYGSLAPSGGASAAAAVGGANGPTVPRPIAPGGSCLAAVTSSVSVVATTTACPSSTGAPPTCAAPSFPFLPSSSNGVTTSASATVIPRCLATTSVHNSIQIAQLNAMAAATTLANTAAASAASNNAAQQQQQRHQSTGGSADGTTNSAATASALNALNQLGLTSATEEQVEL

SEQ ID NO: 125005 - protein, 35 aa, Heterodera glycines
KAPTWHLEAWNSIPLDPIINLINSMPRRIEAVIKS

SEQ ID NO: 125006 - protein, 67 aa, Heterodera glycines
MTIRRYSVCSIAQCVIIILPNFFQRPEEQKFILIIHFIINNLALLICKTIAVNYHQKNALEKRWFII

SEQ ID NO: 125007 - protein, 169 aa, Heterodera glycines
MPTSAATDDHKFKHSASEKKATAQQQLEMKAVKKEEKEEEEEKVQKTAKERGKCQAANSPLMTEKKPIMAVKGISVLSGGTTPPAQKGGPSQSGGGRPLSADSDSESAKSSSMVGESRRNHHTVVGVVSPMQHQQETTLEGTVRANCTEEGGETAENDQPIGEKRHKGN

SEQ ID NO: 125008 - protein, 139 aa, Heterodera glycines
SECRPHALAYIRMGKYCIIGEGSIIRPPYKYFSKGFFTYFPVHFGDYVFIERGCVVVAAYVGSFVHIGQNSIVGQNCVVKDCCFIQPDSVLMPDTVVPPFSIVGGNPARVLAEWPPTCQSLMVDACAGFFDNFQPETTM

SEQ ID NO: 125009 - protein, 350 aa, Heterodera glycines
LPFLMLPTIKWLNGPSDDCPSSKLFLLDSDSFSLFRVNDKPPGGSAAHLAGPSAFSVDPLVSSCSPLLQRQEQELVRTFSLDHTRDNRLAIGFTSGRISVVSANTQPGVKYLRGEDIREAQKGINCLDWNFNDSSRLCAAYESQLDPSQRKGLDIDGHSYGVHFYSLPGMSSLTSFDWHPTISDRLALLPVQEKPMAFAHSIASTKRIAIIKLRDDVNSVIGPSGDFCISAGPQLNFENGEKLLAKPNCTSDIDTETLFKRRVLAGYGYGNSLNALAIIICSKKALLEYSKKAIERDQFASDDLRFCWDWLWMQFQSADANEVQKNYGTMCEALFGCPQLIYFHFKVRWH

SEQ ID NO: 125010 - protein, 145 aa, Heterodera glycines
MFPNTNSLSNSPHSDSFNRNSTSKRWEETIAWVTHGKRLSRRILNPSKDFSDGALVAEIIAQHLPRYVLSLNSFPQVHSLALKKYNWETLERTVLRHLGIHISTEHIESLANAEEGTIQNFLPILRSQIDDAISKRHFRPSSTSS

SEQ ID NO: 125011 - protein, 284 aa, Heterodera glycines
ESLGCSVASSANLQLRSRLLDAALAMHNALGVKGASLCLRFPKFSPPPRSLTAFCVQTLAVSTTCRSFLNPARLCWSPSDSSPKAKATRCKAWPCDGCAWRSFSAVFLSRELLPLLNFYECSLVPLEPGLYVAYLRLHSSLNSIHVLVPDNLISSLPFANVRSNSHVTREEWALLKSLAEADDENGVPLVMEKALPEQRSFYEQLSKASSRLVNHLELDSDQILGTRLFRHRLVQLNKYVSLILVMPRAEEVCQVNACAKGADNGSAVATFRGCVSVPVPVFQM

SEQ ID NO: 125012 - protein, 95 aa, Heterodera glycines; identical to SEQ ID NO: 124528

SEQ ID NO: 125013 - protein, 142 aa, Heterodera glycines
METSLFSSSSCSAAVEDDQQQQQPPAADQQPTLAPDFATTADQQQQHPPLTMAQALIGGFQPAVSSAADAADHHHINELTLPPHQLALSSSPATITSSSLIMAPDFGADQSAEQQRQVGATAATMANGNCSAAIGSEMAAQN

SEQ ID NO: 125014 - protein, 99 aa, Heterodera glycines
MRDARCAAAVFFCARSSPALHANYRLQQFVSWKAKATESWLAIAEVASDSEIFDALFKITFYAEVKRWPNGLEVYKFRHEMATMGWSLQIKQLDVDEWR

SEQ ID NO: 125015 - protein, 42 aa, Heterodera glycines
MRIERARFDEVLVSQKKIQTFFIKNLKMRIHARFSGNKLNMA

SEQ ID NO: 125016 - protein, 116 aa, Heterodera glycines
DREYYEIGRPFFEKAGVAHKVDFREGPAVDHVDKLLVDEANVWAFDFAIGDAVKPKYVKHEQMLRLVVGGTIVYDDTLVVSTVVMAPDTPMSDLDRRFSGVIRDLIVRLSAEERIE

SEQ ID NO: 125017 - protein, 80 aa, Heterodera glycines
MSIYGLNHVSIHGLNHVTIYGLNHVSIHGHDLRVNLRSFIIHVSIYGLKHVSIQLIIHMSIYGLNHVSIHGHDLLVNSRA

SEQ ID NO: 125018 - protein, 103 aa, Heterodera glycines
MPNECSGEWLMEVAVEIEVKETTENEGTDEANGTANSKPKMAQEKPKRQQGEEEEIALLEASLLERNERLKEMLKENVFMRAQFKKVQNEFGMQTLNEVFNRR

SEQ ID NO: 125019 - protein, 466 aa, Heterodera glycines
MSDEFVVAKFDYEAQEERELSVTELSVTKNERLKLLDDTNPWWKAMNARGQIAMNARGQIGFVPSNYMQKESIGERRKRTKSLEEMKSGEKDKENLRSANHLSKAPFRRRRSVRLRPPKGSFFPNLNSLGQIGPFAICPFKDDELALRRGVRLRVLDKSADGWWKGEEEGAGARRGWFPSNYVREQPATTNCRNSAKTERQKSTATAEAPQTQHSPDRVLEVSAGNFQIVLCLYSFEAQNPQELSFVKHERLDILEHPVDDPEWWMARNQYGQTGVDDPEWWMARNQYGQTGLVPTNYIEVVDLVPTNYIEVVDQNPNRGAFDSPGVSAAPPSVPPLPFRPWYYGHITREQSDTLLKTRGVEGDFLVRDSESKPGDFSISLKDSVRDSESKPGDFSISLKDSAKNKHFWVQSASAQFIIGNRRFESMEKLILNYMSSPIFSDGNYMSSPIFSDGIVNLFLRKPLPK

SEQ ID NO: 125020 - protein, 83 aa, Heterodera glycines
MLLALDTYMPKFSRRNLHHFAQMIVIFCFIVLTVLVLLKYEGVDLDAVILDEESAEGEEAKKSWTRENQKGQNSEGEMFLRKA

SEQ ID NO: 125021 - protein, 101 aa, Heterodera glycines
MEEGTVKIWDTVEDTVEDTVEDTVEDTVAVAIISVRLAKRRTELVMASNSFAWIPKRTVTTAFVANLPKTPAFTAVRWALSPMALAAAASNFGAPTHEKHA

SEQ ID NO: 125022 - protein, 126 aa, Heterodera glycines
IFLKRSAREQQQQQHKSVWRLRYGRNIALREHTERIRYRHRNERIWYGNNALRNERLRYGNNERLRYGNNERLRYGNNERLWYGNNALRNERLRYGNNERLWYGNNALRNERLRYGNNERLWYGNN

SEQ ID NO: 125023 - protein, 96 aa, Heterodera glycines
MNGYGMGTMPYGMNGYGMGTMNGYGMGTMNGYGMGTMNGYGTGTMPYGMNGYGMGTMNGYGTGTMPYGMNGYGMETMNGYGTGTMPYGMNGYGMGG

SEQ ID NO: 125024 - protein, 81 aa, Heterodera glycines
IHLFSFCYGNTKWGRRTVPTNSAPLAVHVSAVVGNCNHCGTVGTVDTQDGRTEHHHGLWLDCKRDFSYDYGRPREYYETLH

SEQ ID NO: 125025 - protein, 183 aa, Heterodera glycines
MATQICVLFPNAPLSFLLFQFFAIYSKWDWANEPIKLAQLAPATLNKNVRNWRPFLGRSSMTVITPTFPQQNATFNVNKFTLRKIVEELENANEILAENPQNWSKVFEEIKIEEKYRHFAVIVCSAVDYKRYSTNCAFQKSKIRQKLFEWANLEKNSSQLDNYHLMPQFEQKTKCKMLPKCAH

SEQ ID NO: 125026 - protein, 98 aa, Heterodera glycines
MAEDALLSEFVKGLATNFDKFLRLFLFEKFQKNYWQKYAAHFGVVYLMKKYWQCDENILNGSDEECQFYGKYLHILYEYLFRLNLEGLFFHYFRKNCH

SEQ ID NO: 125027 - protein, 62 aa, Heterodera glycines
MAQLMPMIPQKWRRPVPWTSKIWHQENRQANRDAISLNSLIASLQRSLNPKDRECDYKNESC

SEQ ID NO: 125028 - protein, 132 aa, Heterodera glycines
MPINELILQLAIDTANEWQTNESAERIIQENFDKNLKEMLKKRKSRQLRTIDDCLFTEFVIGKTTSIDKFFKNDEEDSESKVAHIGILYLMKMNWQCDKIDGKFDEYEQRECQKYRRYFDILYEYLSRIYVE

SEQ ID NO: 125029 - protein, 165 aa, Heterodera glycines
MTTEEVYNTNHILNEPKQHILNGDCGVSTSTAVKSQQINEMTSKDYYFDSYAHFGIHEQTPGNVERRSSDSDLSERNLPQPSPLQEQSGDGRRFRDGYSFDVCCSRRGKESFCGTLLINGRHINDEFWPCSGWNTRKMATQSKKIIKDNQMDGVIEVIHSKIGGH

SEQ ID NO: 125030 - protein, 44 aa, Heterodera glycines
MKPALLLIFIFLVFYFQIYSANSTECGGIPTDLLAKMVNPRTNV

SEQ ID NO: 125031 - protein, 19 aa, Heterodera glycines
MNFKLIGEKRMVRSRFNEK

SEQ ID NO: 125032 - protein, 15 aa, Heterodera glycines
MNLGPYKLAFNVLIK

SEQ ID NO: 125033 - protein, 103 aa, Heterodera glycines
LKCQHIHCYKKWPGHKFDTFMHVTVAEQQKQQHSPKLCAASEHGTNKSHCFCPPLTDLDSLHKMLRVKGARRVTVQPWLAVNGETENNTNNSNNRVSGTIAAV

SEQ ID NO: 125034 - protein, 377 aa, Heterodera glycines
MIDNFLLVKPPNKSINNVSLLKAVLQKDFPEVFEEGLGHCSKAKAHLILRSDAKPIFCRARPIPHGAMEAVNAELDRLLQIGAIKPIDFSHWAAPILAVKKKNGKTRVCIDFSTGLNNALELNRHPLPRPDDIYASLNGAKFFSNLDLRDAYLQMEMDDKSKQLCAINTHRGLFQCQRLPFGVKSAPAIFQHLMDQICAGIPGVFAYLDDGLIATKTLDQHITALYTLFGRIKEYGLRIQLDKCKFLQPELLFLGHIVSANGIRPDPSRSDAIRKMPAPIDKSTLRSFLGALNYYGRFVKCMRELRAPLDKLLQKDVVWNWTSEQQNAFEKAKETMTSDLLLTHYDPARPIVVSADASKDGIGATLSHTFPDKKEKV

SEQ ID NO: 125035 - protein, 685 aa, Heterodera glycines
DDDSVYVEKPTIQCQKIWQKKFQVIAFLRSNQQIFDKRGTYLYLWIPSPHNTDGQPIWDVFVSEIWPIFSTNIHHLDFYNGDHLDHLLRRTSPTIFTDLNQLVSINSVDLLPDAIDDFDVPNATAGQALSKWLHSPRKDGQPKRLHCFDHNEQGNTNWVNNFKEVWSGREQDIVQMITMGKAQVMNIFQKNWPDFANKNIPNPLAIRGTILLKKWKIINCWITNRQLAKKFGFTKNITEFRVNPDGGRPDEAMREAIDDMIKVAFKTTEEKMKRKVRMFGVAITGAGLAFPVWVPYRAYPQNNADVIMEEINKLGQSGDGDENKKMLLLSEPITIKITCVTMPSGEGPRNVHKFDFGFKEHQRIGIVNTDKFCLFYALTSSMNYLIMDRFAFNRFMKNIVRQRDAAIELLRNCGIDINEYSYGVEHLPNVQNYWDEIYPGKYRVVAFEKSADPRKSIRVLWKGPMGRENVVPIFLENNHWDGLKKYVCFFNRGRKFCVECECFYDQDVYHTFECRARCYYCNRVGGMPCEKESGVKIECPKCHRYFYNWGCYNYHQGHQTCKLWRRCVICDKTYLFNPKKDHECGETYCQLCSVSHDPKRGCYIMPIEENEEKDVYRIVVWDSETSQDTIYKGDQKEHVINYISVRVTCTECCDDKHRTNCKICGEERTKDWSEAEGHDPTKDFV

SEQ ID NO: 125036 - protein, 109 aa, Heterodera glycines
INRFFYFINIFSESALKRTKFYLQVNFSTLMLYYQKGRWRKNFLKIFPYILVISFCFWWGAWNSGIMRTRPIWQVKQRLLTSQKVRCRDETNQHCLPRGTRHGPPKEWI

SEQ ID NO: 125037 - protein, 74 aa, Heterodera glycines
MLLKLPIFLYSSRQFFRAVAFAFDMAKGTELASVYRSGYLVIGLSTLISLLIVANSKHLTKEQFQQKYKKEANK

SEQ ID NO: 125038 - protein, 148 aa, Heterodera glycines
MVAEGLPADDGDYNNSFMDTSEDSRDGVGGGGGGHAAMVPMDAAADLLMMSNGGGQHATNGNMLLFERYRNLLEFGHHISQFALKTDAEEGPCQGSAPLRQRMNEAFSLLCYPDPTQSAHANLFDQIQRDLVAKALNAAILGIFFLPS

SEQ ID NO: 125039 - protein, 91 aa, Heterodera glycines
MSSFTTSSSADEFSPLQPIFPNLSTSEEMSVLIARIAELNRAKTTEPSVASSEVFGQDGYGREFCIIEWIQYENYTIKEMVLKFLKSKKLF

SEQ ID NO: 125040 - protein, 59 aa, Heterodera glycines
HKAEGVCSSQSAPLVSISFTHSSGQNRNCIEIAEHNLTSKQTIGTGKMKRNASIRLNAN

SEQ ID NO: 125041 - protein, 75 aa, Heterodera glycines
MPDRTGLVFSKMTGFRILSHNPVNPDYSAAKALHISDTDKRKYFHLNIISKPSKKKQSMKSSDCKYLCVGNKSKA

SEQ ID NO: 125042 - protein, 122 aa, Heterodera glycines
MTNSSGLRTSAMLRPKITQNFQNAVADQQQHQAAAPSAFKVENAVGHDNQEQQQKAAEHLESKFVASGTKSKLMNTDARKNVHEQQQQQAVGQQAVQQRTDELRQHLEQPSTSAIEGSSWTM

SEQ ID NO: 125043 - protein, 39 aa, Heterodera glycines
MASEEQFCSEFDAEVARGDGKRPLRRIVISLKPNSKFKK

SEQ ID NO: 125044 - protein, 157 aa, Heterodera glycines
MTKRGQTEQDDVVVVTKTNDDRIGRSDSGMSSRDLHSVDSDSYVKGMHEEGLSERVRNICVQSEKPPHSMPQMPTPTANRRPTTFSLPRIFTQKKKDVIPLAVPHLPSAADTVPAPVTSSSVDEHQQQPQLSPGTTTTTTSAYNTGVDTGQDHRQPH

SEQ ID NO: 125045 - protein, 122 aa, Heterodera glycines
MSKIHISGLANPLPNVSLDIVVLPLLVQCLKRFYNFYNCKVFRIKKIVFRPLSPPSSTIAVSASETVPPIPSILVIELNNNNNHNDDVIEYDQLRLNDIPSTLIGHISSHSQPMPTIFGDFF

SEQ ID NO: 125046 - protein, 271 aa, Heterodera glycines
MSSTQCLIKFCKVEQSKAKYVNLYGAPFVVTVTVLNTDGLPRRRTTKGNAPPIHSSQSHIFKINNNDNYCLFYALELMRYYSLYKRGIITRNKWRWTNNNQTTVLQQKVQLLLRDAGIPTTEPEYDAEIYIHQVQGLWSTKYPGEYKIFIFNDYQTRPITKSDVTDYQFPILLYHHDKHFDGIKTLSKFFNKNYYCLSCESVYERKSRHSMNCTSLCHGCREVGVDYPCEAQQGYFKKCLHCKNNFYNKDCYERHLHKDLCSKFQRCEECG

SEQ ID NO: 125047 - protein, 235 aa, Heterodera glycines
MRPWTFGLVKPDGVANPIAVRWLLSAMHCEGFVITNGCRLTLTPDLAGELYSSHQDAFYYGRLIRHICSGPSVAMRMELRKLNPAQNAFDEDDEEGDELHGFSSSSSAFHRSATECQENAKKFDPLEAINRWRTLLGPSKLFANIYLSSCAEFDEIKCKNLRQMFAVSDTRNLCHGSDSLDSLCREFSLFEVDMKPVERPEIELFALDDYTLTEADYQTDNNRRNQDEEEEEEKG

SEQ ID NO: 125048 - protein, 19 aa, Heterodera glycines
MMMLLTCSSRSAFSPLQSF

SEQ ID NO: 125049 - protein, 22 aa, Heterodera glycines
GCWFESVVQHEYFYLFLSKKLK

SEQ ID NO: 125050 - protein, 485 aa, Heterodera glycines
EVTKQKLDIDGLPYILIKQCADLLAPIISELFRIILDYGEIPNLWRTSFIIPIYKKGDKSNPNNYRPISLTCTLCRVFERLLAWNIVKHLEKNKILTDEQFGFLKSRSTTTQLLVSLDYFYKSIENGQNIDIIFIDFEKAFDSVPINLLIVKLQNIGICGKILKFLQNFLICRSYQVKIGENFSSFRTYSGVPQGSVLGPLLFLVFINDLLIIYQLQSELNYADDVKIYISHDNDISLALANLAKTKDNGIAIAHEKCAALYLGKNNSRHEYKIGEKVILSVDCVRDLGVLVDQKLSFNNHISKILKAAYYKAYQILKILKTRNINTLILAYKSYIRPHLEYASEVWNISLKEQSKRMETVQKFFTRIVYKKCGLKAASYEKRLEICKLEKLSNRRSLTDMNMTFKIIRGLTHLDPKKYFEFSTRSQRKTFRIQNKRFSNKSRNNFFIRTINPWNCLPKTAIEIGTLAKFKNFVKEFYLENKSVV

SEQ ID NO: 125051 - protein, 203 aa, Heterodera glycines
MVSSHLFCIGNFMVVFLVMFLNNGGKPEIKLNSFWFGSFLLSNQNNCGNPEIKLNMVSSHLFCIGNFMVVFLVMFLVLSFLLSNHNNGGKPEIKLNCFWFRSFLLSNQNNCGKPEIKLNSFWFGSFLLSNQNNCGKPEIKLNMVSSHLFCIGNFMVVFLVMFLVLSFLLSNHNNGGKPEINEQFLVRLISLLTRTTVENQKLY

SEQ ID NO: 125052 - protein, 109 aa, Heterodera glycines
MPMESSSNRREEFLEIELKKVREELAEYKRREMCAITTPKKKGILKKKPSAEYRPYVFDNFHPKHRRNKAEPTSSSTAALDIFDGQQDNANPTTTTLGSYYDGGLLLNL

SEQ ID NO: 125053 - protein, 63 aa, Heterodera glycines
GSGRINPANPAILQILHLKSAGSCAGLRILGNFKKFCINKKVFQSIAKYSNIFLNQKMMKMKN

SEQ ID NO: 125054 - protein, 21 aa, Heterodera glycines
LKSFAIKLEKIIHDNFQARRT

SEQ ID NO: 125055 - protein, 19 aa, Heterodera glycines
FSNFVGLGRALRDRFLNLF

SEQ ID NO: 125056 - protein, 268 aa, Heterodera glycines
MEINFVIIFILFLIVLIDGIDEDLFNDLWKNLKPSTSKNIKKPIFGEINAIKEEKVVKNENDEQGNANQIEMEDIKPKLLQNIKKEKTLEEQNNNLKIKIKMPKIEMDKLGEESFENEFNEEADQNVSSADHNDSVDQAYYNIMKKLGQLRERMEESEETKMELTRKFDKMRKEKICGFKYDEKKISVIECEIAKKLGTNRNKIYQWKRKFGKSKIYSDAEKLEYVKRSKEIAERNSMLSERKIAEKLGISNDNLRRWKMKFGTKSIR

SEQ ID NO: 125057 - protein, 294 aa, Heterodera glycines
MPQINFVIILFIFLFVLIDGIDEDLFDDLWKNQKPSTSKNFKKQKFGEINAIKEEIIVKDEKYEQQNANKIEIEDTKPKELQKIKKEKTLVEQNNNLNRKIKMPKIEMEQLEEESYENEFDEQADQNVSSTDQSNSGNDEDYNNMNTEEINEMQIVNEFNLRNNKLRKENVYNKRTNTQFECEIAKKFDTNPDTIYKLKKELGQKRVKTEESEETKMELIRKFDKMRKEKICGFKYDEKKRSVIEREIANELGIKRNKIYNLKKEFGEKKRYSDAEKLEYVKRSEKMKIRNPMI

SEQ ID NO: 125058 - protein, 171 aa, Heterodera glycines
MQIVNEFNLRNNELRKENVYNKRTNTQFEREIAKKLDTNRNKIYKLKKKLGQKRVKTEESEETKMELIRKFDKMRKEKICGFNYDNNKRSVIEREIANELGTNRKKLYKWKREFGEKKRYSDAEKLEYVKRSEKMKTRNPIISERKIAEKFGIDRLSLRRWTKKLGTKSIH

SEQ ID NO: 125059 - protein, 195 aa, Heterodera glycines
MPQPLPLRDMPQIHHPPRNVTSIWIKLWLLFLSLWVFLQGIHVRQIQREYAVPQFADPPPNVPYHPPENVPVMLGLVFLAFLIFPDAFSGNSTNATTAAAERRATIRPPAAKRAVSSTRKRSGNSTSATTAAAERRATIRPPAAKRTGNFIPCLTPNTETSFLKQMHANPPRVMEAIRRLGEWRGRPTDPRRPPQ

SEQ ID NO: 125060 - protein, 175 aa, Heterodera glycines
KSIEFLFVKIGDAYMIVSGVPRENGNSHVQHIGDIALKMRSFVTNFKVFVTNFKVAHRPDDIMMVRIGFHSGSVAAGVVGLAAPRYCLFGDTVNMASRMESSGVANKIQESSGVANKIQISESSSNLISESSSNLLKCFYHHFIVMERGKIDIKALIDETICKILIYLLRAKASA

SEQ ID NO: 125061 - protein, 254 aa, Heterodera glycines
HFFCQGYMQQAPEIIREFIFTKNLPQGCQAADMYSLGMVLYQILFKLEPFFERNLPPSKILQKIALASEDDQIIRPSFPNQHSEEAYNLQLLSALEACWLELALEACWLELPEMRPNIKRVKAIVNANLKSTGSGSLVDQMMKMMEDYTTNLEQLVKERTVLLEEAQQQADRLLKNMLPASVADDLKAGRSVPPLLYLGATVLFSDIRGFTRMASSSTPLQVVNFLNDLFSGFDAIIAKHDAYKVETVGLAYNL

SEQ ID NO: 125062 - protein, 92 aa, Heterodera glycines
WRQRVWCSFGECFLAPNKLSMFVLIIFFYNFLFDYLHFKHSRGIIFNPLNPTKRILGSRCSLASIHPPPQQQHWSRSNPSFLYFLLVNPQKT

SEQ ID NO: 125063 - protein, 72 aa, Heterodera glycines
MSIKVPTLEGDIIPLNIKHVTKPGSTQRIHDRGIPNPKTGKRGDLVVEFDVRFPDSIAPAARELIANALPPN

SEQ ID NO: 125064 - protein, 43 aa, Heterodera glycines
TEINLPIDASSRLGNLNRSKTTSSGLSWRKAEFGEVIKTVAYL

SEQ ID NO: 125065 - protein, 58 aa, Heterodera glycines
CVHPCIALITRAIRNQLIIPNWTEFTGKVRELFEECRAETGGQVATYIPQLARADPEK

SEQ ID NO: 125066 - protein, 142 aa, Heterodera glycines
MCLIVVSVDHRPAQQTPAGPLAVTNCVLRTGDGHRVEASGWQAHAGTLAALCVGSAYWFTNCLARAKYQRLDCWFRIGVGGPNALVVPHVAPEFPANVPPMLPVQIGAGRDAVRVLPNVTNAGDEQRADAELDNNNNNNVRK

SEQ ID NO: 125067 - protein, 686 aa, Heterodera glycines
GIREKNDHDEKEFMARYVCRREAVWRIFELHMYDRSHSIMSLPVHLQGEQICYFDENMEEEEIRERLANGSELMAYFELNKTNALAKTLLYHQIPEKFCFKKGKWTERKTHFNTIGRMVKVSPAEPERYHLRLLLLNVRGACSYDHLKIVIDLNGTVKDCESFSAACLERGLIRNDEEWKRALEEAETFEMPWKLREFFALILVHCNPAKPEELWNVFKDALSEDLTMEQINVEDDVEQVFDLAEELDLGQRSYAMMYDEQRKVTDDVMRRIWNPVNEPAFYFLSGPGGTGKTHVNNTIVHMLRGQKKKVCTMAFTGIAATLLPTGRTLHNRFGLTLDMSNSSIGPRSKALQELKETDLFICDEAPMINKRALRTLDEKLREIMNNGIAFGGKVMLWTGDFRQTHPIQKRSTRAELVNSTIKRSEYWRLAKRYRLTKNMRALASEQEFARDLLEIRCGNLNNENDELILPENCICNGDLSEEIFGSIVSENWNEMAKSAILAPNNVDVSEMNNRVLDMLPGEEVVYTSIDIAQDENRQRVDEYLDEYLNALNPSGFPRHKLRLKKNAIVLLMRNLNIDMGLCNGSRMKVEEMQPNLVVCKILTGDKAGQVVYIPRITFCCSEEYPFDLHRHQFPLVLAFAMTINKAQGQTLEHVGVDLRKEVFSHGQLYVALSRARAWNKLRIRLD

SEQ ID NO: 125068 - protein, 91 aa, Heterodera glycines
MRSLMFGLMYKSECAFFTYHNQYYDSFKIPGNEKFRTYIIRDNGGEALFPVDTWNHHQSVIDNMCRTNNAQEAFHLNLRRKFHTMHPALSK

SEQ ID NO: 125069 - protein, 86 aa, Heterodera glycines
MSVRKCPSANVRPQMSVRKCPSANVRPQMSVRKCPSANVPLRRGIITLREARIRLPSPPPPPTSAPAQQMLVLTLTYLPGGRDKKQ

SEQ ID NO: 125070 - protein, 156 aa, Heterodera glycines
CLLGGSACLFYRWYAQEKSKTVYEIMGCNSWEFIVYAIIRLETLGEKPKSTQVFLYPGRTLKWNNISLTPIGVTFPPAPVLNSDFVFDGNNMALTREPLTIDFNCKSRQEAIDFNCSLGVQACTDCIPDHSSGLVNCNCRSHNLEKLMESPERRLP

SEQ ID NO: 125071 - protein, 402 aa, Heterodera glycines
MEFLANGKKLRVVYDASAHTRGTNSLNACLYRGPVILPDLVGMLMRFRCPKFPLLSDIQAAFLQIALEPEDREVTKFLWVKDASKPLAPTNLITYRFCPPFEEYESPVAKELAQSLYVDNTLLECESAEEALHKYAESKAILKEGLFNLREFVTNSPEVMKAIPEEDRLNKPKFPTNGLEKVATRRLVLSFLASLFDPLGLMGPCIQPLKLFFQTLWEEKKGWDDVLSEKEQTQWESFQENWKDQTIRIPRRSMLQGNPSLQLHAFVDASIHTFAAAIYLRAAEENLEEGSLDNEEKVFFVNTRTEELIDSPLIDPKKFSSWTKIVQVTLFVLRFLRLKLIQKEYPSKLFEIRRKEIAKVSEKGLFSAEDVLLAENLLIRMDHIKSAEDFLSYPSLKDSEGI

SEQ ID NO: 125072 - protein, 233 aa, Heterodera glycines
MYIETAQENLGKELADQSVRADLIAERQNLCKIISLLEKYNGKWEAIFLRIKGPALQEEEQNYRDFKPEGKAFMHWVDQARGLVDTIEGALGLSELGDAIPQPNQPAQVVQQQQLVHQRHDVTLPPITLPKFSGEPRDWPLFWKLFETSVESLQIEDFKKHIYLLGCLPEKSIARRAIDLYPPSDENYPRVVEILKKRFGDEKTNGGVPPSGVTPPSQTSRIRSVSETILRVH

SEQ ID NO: 125073 - protein, 51 aa, Heterodera glycines
MIADGSEDFEQLERSLSFEVADCIAADMDDGEGFVFMEMRKEGPSVELVEE

SEQ ID NO: 125074 - protein, 139 aa, Heterodera glycines
MSNDKKDESSISTNTLVNKEKASIVQESSFVTPGIFRRRKMLTGRQLNDEGNNEAKEKSADFKWSIDQIAKIQPIEFDETEEFSLPPENWDPCAKFKTPQFENIDHFWTHNNLIAPSPGLFATGTKTFSFNKKGYFYTC

SEQ ID NO: 125075 - protein, 20 aa, Heterodera glycines
MALVFGFLKKIFVFLCYVGR

SEQ ID NO: 125076 - protein, 69 aa, Heterodera glycines
VVHLIHRLNFTQIGLHFWALPSPAHSLHHQFHTLEIMEKVCMSKRTKWKTGRVQQPQVKTDGEKSIERE

SEQ ID NO: 125077 - protein, 21 aa, Heterodera glycines
MSSFPDSTNYTFTADQEQFTH

SEQ ID NO: 125078 - protein, 67 aa, Heterodera glycines
EIRISRAELSPLVGADLVRHLAKCSTAGEVMYELLKSAAYMHHIIEHAKKGKKQAKGLIFAIFVSKN

SEQ ID NO: 125079 - protein, 327 aa, Heterodera glycines
ETVVLENGLALYARPNDEREVEIFANGRRHELDNRWVVPHNLYLLKMFKCHINLEKVNSVSSVKYLHKYVHKPPDRARLELEEKNDHDEVKEFIDARRVRGPSDNSAQLPPSARLHQQKGCRIPHALTQQQKHQRVVTCTELLARLSAGMQLSQLITCDEKWVYLNNKTAQKQWLKPNELCEPTPRRLQHAPKVLLCVWWCSSGLVRYELVPRVHDQIRRPPFSAKFRGGVLLLHDNARPHVAFSTQQKIEQLRWAVLTHPPYSPDISPCDYYLFRSMEHFLRGKEFADQNEVENALDDFFGSKNDQFYKKGIEMLPERWGRIIDQN

SEQ ID NO: 125080 - protein, 73 aa, Heterodera glycines
  unsure (1)..(73): unsure at all Xaa locations
ILKRSKMVDAQHFTQLLIGMMNSENEIRSEAEKQYEAIALKDKXPLLFXPXLXSSADVXSRSLALVLLRRLLS

SEQ ID NO: 125081 - protein, 55 aa, Heterodera glycines
MTMDAETNDGEKRNGVAAAGGGGDQKISQKIFLLFVWLIKHIKNVRMIPTMLDLD

SEQ ID NO: 125082 - protein, 66 aa, Heterodera glycines
MDQLISGLLGGGGGGGANSGDNQPQQGGGGSGNQLADMAGELIGGFLGGGGGGSGALGGGAGGGVK

SEQ ID NO: 125083 - protein, 347 aa, Heterodera glycines
MDPEISDNFPAENEQSEEVFIDENENNLSKLQLTEPSASFLRYYQFNKGDKTAKCRICGVQISRKMGNTTGMDKHLKQHKKSLNFLLFLKEEYRNKFSIVKEEICTAKFLSFTTDNWQNVRKKKSFLSLTVHFIDSDFNRKWRILTTQPMPESHTGHNISLRLNDILTNFGIEPNQIHIFLRDAASSMICAVEELGYEHFDCFCHKIQLALTDALEHRTKRVGEVKEQLHLCRDLVAFFNRSKNFQNVFQRQQELIGAPKNGLIQDVTTRWNSSLFMINRITEQQRPLSLAHIDFPDLKMPDFEMLKNLSNVRNDRNYACKQFSKVLTPFDTFNLYLRFGGRVRGKF

SEQ ID NO: 125084 - protein, 74 aa, Heterodera glycines
MATAVALRGNERIVQDGIIPSQNHLPCCIGNICLATFVPWPLFGAVAFSFNTSSRQSVIGNIPINNCISNCSEI

SEQ ID NO: 125085 - protein, 29 aa, Heterodera glycines
MSDSIWEIFTILDKINLESEKAYVAAYYA

SEQ ID NO: 125086 - protein, 43 aa, Heterodera glycines
MGNTLLPFSNSIVTNRNVLPLLKKARGQYKSKLRNMYDGHIND

SEQ ID NO: 125087 - protein, 52 aa, Heterodera glycines
MLKIVMIGGTVVSSVAYHHSIVPVEYQARVCTERGSASELIIELNELDFSSF

SEQ ID NO: 125088 - protein, 30 aa, Heterodera glycines
MLARKSRGARTNAREQEPAEREATASQFFI

SEQ ID NO: 125089 - protein, 96 aa, Heterodera glycines
MALLLLPLLAYVAAQDGIKKQQQNNGGQSFTGSVNNAEIRRAVNGTEFMLECPRAAYLVRTHMAPDFEHPQLVRRLDWLHDGALVASYQQHFIINL

SEQ ID NO: 125090 - protein, 259 aa, Heterodera glycines
MLRRSTGSNWSWDERLPFITFCYNTTPSEVTGFSPYKMLFGKPANFPGDHDINWQKNPAYTIDQETYLQIFRENIKDIINVAKKTAENSREKSKMYYDKRPNVTENKFGQGDHCMVIFPGSNSRSPHKKLMWNNFGPYKIIEISKSSAKLVPVDKKNAEPISVPLERLVRVPPGLPNISTLPKGRNVYRNVLNALLTPNLKLTEKEPKKRGNNGEIGRTDKKSIIQLGTIEFLGGDMELDGEGNYALSWSSICCGKGHE

SEQ ID NO: 125091 - protein, 37 aa, Heterodera glycines
FGPRGRLGPNPKIEKCAFLKIKILKTKPEGSLATCIS

SEQ ID NO: 125092 - protein, 77 aa, Heterodera glycines
MNMSTHPEPGRARRAFTGRPGPGPVFFWKKTGPGRPVKRAFFERAARPGQFSKPGPGPGQFDRAKTGLNSASETAQN

SEQ ID NO: 125093 - protein, 159 aa, Heterodera glycines
MSGEYRNGYAAPGATGAGAAGGGGGGGAYTEQQRFYDAATGAHGFSESSSWEQREHFERKMQKGAKQRGLVREGSAAALVRDGSRSRIVEGGASYANGLAIERISAQKPLDRLRNAFDAFESEFGVAELLDPEDVCEVDTPDERSLITYVSTTARSIGG

SEQ ID NO: 125094 - protein, 191 aa, Heterodera glycines
MFIDGIGKDRAAAEQALAMVGTQNAQLAELLAASAAQREEMLSTELKQLAELRDQLAEAEATAAAHQAMLVFRKKRQTNEDGVQLKGSQRAKVIAKVTQLEMEAQKIRGIYDATRLEAHRAIEAANAFTQIAHGLLQARNNTRTAQQLMKETHGHLRGVAEAATNAKSASKAMGASIDIGCNGSGCVEKKF

SEQ ID NO: 125095 - protein, 172 aa, Heterodera glycines
DFALFDRMTSFDQLMRGIRRRPNESVDELGNRISGLVRRAYPGLTEQQYDDYSIIRAISNPELAITLEMTRRPRATFDEFIAQAARAEATQSAARNSFRSNQTFQRQMPNSSYSSNNVPSNNYTSNWSRPEINTNKPTNVTCFMFASQLLGEQKRLGFECSLSSLLLDTIFF

SEQ ID NO: 125096 - protein, 368 aa, Heterodera glycines
NFEFNSRPIVAKVSIYGRQSDAMLDGGAQISLISAEFFAQIMDMVDKTYSERRIVDINGKEVKCYGTVCLPIVRGTETARIRMFVVPTFGYDLLFGTNALNQRKAMLRKLNLSKIGMNKIRLHHWLKNARYSEKGRAGMIKDILTRIDRSYKNEHGQLENLILEFEQIFALDDNELTQTAITQHIINTGSAPPIRNRMRPLAFAHREKVSMMLQDYLSRGLIRPSKSPWASPIVLVPKRDGSLRFCVDYRGINSVTVKDAYPLPNIDYILLALGGKKYFSTLDFLSGYWQIKMDEKSIEKTAFVTEFGLHEFTVLPFGLCNAVATYQRFMSRLFEDLINDFVYLDDILVASETFEQGSIEDCFERIQD

SEQ ID NO: 125097 - protein, 211 aa, Heterodera glycines
MSTMECFEDEDQEVHLMLGDECANETPKLANGTYNYPRRRPKPPRLTKDQTFKVPPQMTLDMPCKDEVLQLYEELQSSGVPQIMSRFEEVVGNLCREIDQKRDENERLQHQQKAERESYNKRMAALENEIDQQLLIAEKKARDEVGNCARESHTEEQFGGESLGDDADQSRVGGDQKRVRKSDTAHAVGAAAGAAERGRSTTNPTAAATAL

SEQ ID NO: 125098 - protein, 103 aa, Heterodera glycines
MKEVPILLVGNKVDLRNSGGDGTTKDESSSTFVSRKEGENLSELLGTDFIETSALDGTNVETALLLLVGEMLKTEDDQLKQTAMMLQNGGKSKKSKCLSCGNS

SEQ ID NO: 125099 - protein, 95 aa, Heterodera glycines; identical to SEQ ID NO: 124528

SEQ ID NO: 125100 - protein, 47 aa, Heterodera glycines
FEYPKRTLEKIDFFVFGAVPPNRCAQIYGETESFENSFPIACTLILR

SEQ ID NO: 125101 - protein, 88 aa, Heterodera glycines
MAIKYGPKIAKYGHKMAKISKYGNKWQKCQNMDINFSKLSAKFLQIYWLKLHMRYISKFFDLRKINQKSEILSFLLIFDINLLIFKKI

SEQ ID NO: 125102 - protein, 51 aa, Heterodera glycines
LQIYWLKLHMRYISKFFDLVRRFDKDGFRFAISRSTFGNWSRIFSAITCNH

SEQ ID NO: 125103 - protein, 121 aa, Heterodera glycines
PPAPPPPPPPPVPPSPLPVTAPPVPVPPPPVSVPPPPPVPTPPPPLVPLPPLLVPTPPPTFVPQFPPPPVPPPVSPPPPPPLPTPPPLPPVPPPPPLPVPPPPLPSVPPPPLRSLPPPPPV

SEQ ID NO: 125104 - protein, 131 aa, Heterodera glycines
VGHLKIQKFHLYFLNASSFHAQVFFLGIALVLFSSGVYFAEQSEPNTKFTSIPASFWYVLATMTTVGYGDLVPHGVYGKIVGSCCALIGVLTLALPVPIIVANFKRFYRQEIILAKMYEQNPPPKQVRDIN

SEQ ID NO: 125105 - protein, 152 aa, Heterodera glycines
MAEASSNGTEIHGTAIIRGTTIFAAYAMAFLELGTFIPTIPIVAFCASIVYKTSILHQNLKGILLAQLFGIIMNLWPRAFMLIAQIFVTKNIFLLPPNFISGASTAALTFNNMAGHVLIVERICATVYVGTYESYRSWTFTALWLPIMVKTY

SEQ ID NO: 125106 - protein, 117 aa, Heterodera glycines
EFKYNLRKFNAAVIKCTTLIKATPLLWESGKMICLGTKSLIDCENAIKKFIEIIKGSGCPGASYTGLNFKRGKSMTALIFWTGKVVITGTKNNSEIDEMYHYILPYLKMAQKKLGRR

SEQ ID NO: 125107 - protein, 101 aa, Heterodera glycines
MNCGKRVKLITAVENITPYLKLAPHKVEIVHYEPLVVVFRNVISDEEIAVVKQLATPRLRRATVQNSRTGGLEFASYRISKSAWLKGDEHPIIERINRRIH

SEQ ID NO: 125108 - protein, 268 aa, Heterodera glycines
MLLLFASASVLRVAVADVFTAMVDLENLLASESASTSVIEQYIEAERARLVQLSEWGDIYILKFLKFYARIKDSVMNPVNAYLLIKRLTRDWQRIRQLMNANPGDQFIKNITGNQIFFQVNQIFFQVKYPDDEDLDGAAQGLLRLQDTYKLKTTDLANGFVDGESVAKELNANDCFEIGRAAYNQKDYYYTLEWMQEALRRDPSAALEADILEFLAYALYQQGNQKRALTMTKWLVRLAPGHPRAAGGCARWCQNWDVKTQCPGNGGG

SEQ ID NO: 125109 - protein, 135 aa, Heterodera glycines
MVQITFKEVDRLDRRREEILNTIVSAANIQGYFGNAVVEPLQYFRAASLTTMEFVFMPNDYIVRGPSIRDRMASFLRPGQTQWGVENPPDYGTKRPRSEIIGKLKKRLASRCLVNFYLNAQETVWTRLLEEVQKA

SEQ ID NO: 125110 - protein, 251 aa, Heterodera glycines
MIVRSPPLTRQRAQNAGIILNQEGQEIFRENRNNAENGLRQNEDGMSEHSNFSEPMMNTEQIHDALLDVGQRNVRDGEEDKGNENEQVDNANGFGGLNFENFENLEERTFNVHNRNVSLTDFDAGRMFENVRLERQQNLLPISFPIASTPVENRVANQMGMDQVRENFSVIARLEKELVINGEPQIVTRQQRNPTSVAQPQRVIHQMNLGRQNVQHQNYQHEYGMRQRVAPAPSAPIQQYVQFVEQPNMNT

SEQ ID NO: 125111 - protein, 109 aa, Heterodera glycines
MAFDCRPYARKKSADGHRQFGEIFCLSNSPSGADGPPCRRPPSPPIRHRHSAVVAKSGHRTTAKMFIGLYVNACTYPQSRAKTQCHHAFSAPLLICVSHLPLLLPMGRR

SEQ ID NO: 125112 - protein, 140 aa, Heterodera glycines
MVPWWSSNPSTLNSSMESIEAAAAGEQHRHVRPVHATPPPADEFDGIVIVGQGVTADATAAGDFVPCSTSTLAQSIERVFGNLQHQQIHPESYEEAKRLLVFAGLFFLLMCAFVLIKFQVELGKFLRRENHQKMVLKIPK

SEQ ID NO: 125113 - protein, 88 aa, Heterodera glycines; identical to SEQ ID NO: 124691

SEQ ID NO: 125114 - protein, 401 aa, Heterodera glycines
MTKRLLPDQQQQGFHPLHSSVPIYANANLRGDFNMEKLVKLESELRKGTERHQLLVKGILEMIKSSSTHPLDNELAHNALTLLLRLVSLDGMAQEFLNEDGVKALLEMKRNPISAQMVTNGTTTPPTLNTLATLILRQCIDSDAALLQSAFEQMITATCNGQPISMQEITSRPMRTKRYQKDVKRVVRMLVPLAVRSPSLYMDAAKKCLAIKQNEILVKEQRGDVTGNGNAAAASDQFLKTLLSQIVTELTQFDTFADADKNTRLMQPPNLLKLIAEVLHSYPKMAVPIFIEQSLGEKSVLRWIVERFLLSAPVNDLSDTVYWAKAVVSELVSNSSSQRITDHVVGNIKSLLIECGDFDCTVVTSDESNSGAHAKFADKVTILAKLTMHLRECLQVRVIKS

SEQ ID NO: 125115 - protein, 62 aa, Heterodera glycines
MELKMKSAGATTSSPKNSISVINNDSGAVAAFAAATPPTKIVAAAKPSPPPPSQQQQQQSIR

SEQ ID NO: 125116 - protein, 209 aa, Heterodera glycines
AHAAGGLSLSGALNEQLPPPPPLRHRASLNQQQQPKQRKLSADQRRHSALVDGTGTDKQQKKQRRQTHGCRDEQQPLLISNGPKTGANKKRKHVEKASRTGSNASTTSGGGGGSGAGLYNGVRKSAAAVSSDEAGNCVSEDDDVDSHEDENECVVNGSDDGGWMNNHVEDGQQQQQQQHEEDDGEASQSQIQSKGPSSDYLPFSSVLHH

SEQ ID NO: 125117 - protein, 130 aa, Heterodera glycines
AKTFYTLTTIANLFQEKASRTGSNASTTSGGGGGSGAGLYNGVRKSAAAVSSDEAGNCVSEDDDVDSHEDENECVVNGSDDGGWMNNHVEDGQQQQQQQHEEDDGEASQSQIQSKGPSSDYLPFSSVLHH

SEQ ID NO: 125118 - protein, 280 aa, Heterodera glycines
LLRIEVQALKTISYLAISNPTTKNQLSVFGCAPAPTSPPPYAPAVESPGYCPYWWCCPAAAIAPTPPDIPPADAPLPTAAPPRPPPPPPLPPMPLYPPPPPYPSSPPPPMAAAAAAAPPPRPAPPPPPAPPAPPGCRGVPYPYPPPNPPPFPPVHPLSIPTLPHSVCPMRPPPILHHLQPPIHSLPPPPPPIPTSSSSPVPSRTPPLPRSPLSSAPKPRALPRRPPPSAASAPLALPPSPPKWRQPARLPSRPLHPPPSFDPPLSSQLIPPIFCSPPFFF

SEQ ID NO: 125119 - protein, 181 aa, Heterodera glycines
MMNGTDGSFLASSTVGATSAVNGGNANGAEAADGGEVVEAKPVVIGADDSGDPGEQQQNFTPVQPQVNAPMPVSTQQPQSPQTDASCFLRCRGLPYSANENDVRKFFGEFTVYDVHFTSSVDGKPTGECYVQFGDRESTAVAQQKDRQTMGSRYIEVFQVGDVEMDQLMRRMQVGIENWGI

SEQ ID NO: 125120 - protein, 119 aa, Heterodera glycines
MIILLGSIVCLVPFNLSLLICQNCLLITLIILVNAGLTILMLFANPFTEAEAVGMEMRWRLAAVIEPLNLGTPPIGAEFANSFLFVFHISFDEGPSFHKGSGIHIIFVDYKMNRIIEKA

SEQ ID NO: 125121 - protein, 123 aa, Heterodera glycines
MKRYKSDRRGVTVIRRGTNLMKRYKCDLKRYNSDKRSTKVIRRGKKVIRRGTMVIRRGTKVIRRGTHLMKRYKCDLKRYKSDLKRYKSDKRGTKVIRRGTPVIRRGTTMIRRGTTVIRREFLE

SEQ ID NO: 125122 - protein, 422 aa, Heterodera glycines
MPTTTTTTPSEIAPNCGDEVRPNEDGGWGGTSPSSQCETLAAASDLSPSDHQKNNAPSEQQPNIKPPPLHFGGLPVLPCGSETKFGGLTAGTPVRRHAPAQAEAEFQHNATEKLLSENAMASGYRDGKTPPLSAEIDQSVGEQQPLLKATRVDQQQQRKSSSLPPNGGTVWAAPSANAIPQHSSFSTNADHDDGPLFRPELRHAYSWPPLKGTVILAIERKSFVQKVCDLFKQATAVALPGGAREFNLRAELFWLKSAIRHSVCRLLNWQDNSNLYMVLEFISGGEMFSHLRRIGRFSEPHSRFYAAQIVLAFEYLHSLDLIYRDLKPENLLIDSNGYLKACKSPRGEDGVWHSFCKNAMPLKLDSQFAYDIPKLASLFPQITDFGFAKRVKGRTWTLCGTPEYLAPEIILSKACFLDEQIY

SEQ ID NO: 125123 - protein, 57 aa, Heterodera glycines
MYVKKLSQKSADGSLMGFLAIWENLFSKRNPKFTNHQTHCPDHVHLQQAWEKDVDTS

SEQ ID NO: 125124 - protein, 92 aa, Heterodera glycines
MNSQLLLAIRRIGTVTRRKFEENVVIERDEAKDGHRYGHCLLLQFTILCRKRRKGTKNGGESQFAMPLVVFGGTQKWVAGSAGTSSFLENGG

SEQ ID NO: 125125 - protein, 21 aa, Heterodera glycines
DGERASALLAQSLLWRRMIIS

SEQ ID NO: 125126 - protein, 503 aa, Heterodera glycines
MPEEGYEKAENQSKIAECDVRAELKKNKEMKKFFESVPDKGPINPRDAYAGGRTMPFCLYAKATEEIEISMFDIISLYPFVNYDTPYPVGVPKIVVSRNFNVNWTVPDDIPYDGLLKVKVVPPKNLLYPLLPVHIDDMLLFPNCWACAKRAKNEFVMTKDVKKCNHRPAQRAFLGTFTSIELRKALELGYRVIGFYRAYHFEQFDSQLFKGYVRMFLKIKVEASGWPAEVKSEEEKRAFIAMYKAKYNISLDYDKIGLNPGLRMIAKLGLNSLWGKFSMRNTLSNTEIVGSMERWMELGRDNTIEFGRPVKISEEISRVVYRKKEEFIREHKVSNIVLSLWTTSAARLKLYEYMEQVYKKEGCKLLYCDTAFAHRKGRCPLVEGKFLGEMTREYADSEILEFVSAGPKQYALKLRRKKDGVIWHKTKIRGMTLDRRNEFKYDLFKEMVLDYKKGVKKVFHYPEKIGPTNDFRVLSKDVQKEYTPVQKKGIIDDHFNVLPFGYY

SEQ ID NO: 125127 - protein, 151 aa, Heterodera glycines
MNSEKSEKANSILLEAAKKETERAWRDVAALTDEVSDFAKSSRETLNRGIKSREKAPYANGIRELYLKMSDSIWEIFTILDKINLESEKAESTWRDFERYKTFDQATKLEEQSQNSLTEARRLHFESRRVQSQMLNYENRLQTIVWEHMGI

SEQ ID NO: 125128 - protein, 104 aa, Heterodera glycines
MLKTGTKNRFPPSIIDEIPGVLSDRRTLLGELNWIFTAITDAIAWCRLPRSTFQKLFRQDLLIASLFRAFLLSERIMRENGCHVVSTPQLPRVHDHPLWEYWDL

SEQ ID NO: 125129 - protein, 136 aa, Heterodera glycines
MPSLSMVFEIIILGLHLAIIFCAILGIYLDMGIEDNVFIISSAVLCVVICQLKAYFYKKKGVKSSCADMLVLLLHLVVFFVAILGIYIDMQTEDNAIIIGGAVLSLVICQLQNYSAAKKKENPNAGKISIFVLFGR

SEQ ID NO: 125130 - protein, 115 aa, Heterodera glycines
MIPPEKFVPRKLMTPNYAKTKLLDVEINADEMSEEQLANELAEALGEKVPELMQKVVHFAGKSHAVELFKQCQEVERNGGMLTQNRLRRRTPGGVFMKLFNESKEISEENKAHLI

SEQ ID NO: 125131 - protein, 134 aa, Heterodera glycines
MQKKRRKKQKKKHHSEKELEKRVANGQKGENEGRKEENEGRKEENEGRKEEEFKMAKGTEEEEEEERRSGTYSSSGEEVYLNEREEEELLMVMEQGLDRRLGKERGQVGEGKDKQQQQNGDKEHKEEEEEQKQQ

SEQ ID NO: 125132 - protein, 242 aa, Heterodera glycines
MSGVAEAEAVALELAFCRLCAAPATFSARTGKNGNAKAAVALRAPFLRRRPNGRASRCQCCRVRAQQSECLFRLKSANPWHWHFPLTFMANSPPRRSSRSFSSASSRFRRSHSRSVAAEKSRKGQKSRKGTDGPQSPDDRESVELRTFATDMEMREAMGKRENEREGEKANEAKEQRERHEQTKSYGHRRRYSHRHGCRSCCHRQSRKSRCHRRHRQKRAKQSLREEEESARKGEKMPKNKR

SEQ ID NO: 125133 - protein, 66 aa, Heterodera glycines
MSVNVKQKKTAPKRDVSSSPSQSSTSDSSEASNESVDEAKEETTPANDKVLTKYSMAAEIVNTVLK

SEQ ID NO: 125134 - protein, 404 aa, Heterodera glycines
TEEKCGKEEQRQEDEEVPLPELDNSGVQTDKTGVQLSMGDLSKQVAEEEIERANESRESAMAAFSEGNYQSAFDLLTKAINYQSAFDLLTKAIELNPGSAILHAKRANLLKMSMMKAAIQDCDKAIAINPDSAQPYKFRGRANQLLGNWLLGNWTEAHHDFATSCKLDYDDVAYGWMKEVEDYDDVAYGWMKEVEPNAKKLQEYERAKQRRAEEKEQRERPNAKKLQEYERAKQRRAEEKEQRERLERVRRAQEANRKAESAADSGEGGAHFNGTLHGNVGKFPCHSLFTIDLRSCGPRIVKCHQKRPFADSEFDSKFQVISILFKKLMEIMQNPANMMKHMNDNVQKVLEKLGSKLGSASPFANETGRDSTPFGTATEGTPQQKSTADKGPEAPKKAPEPELD

SEQ ID NO: 125135 - protein, 43 aa, Heterodera glycines
MYIKLLFAQKIEIYLFIAAAVDKNFLEEPDEKFGPTETGQEGR

SEQ ID NO: 125136 - protein, 139 aa, Heterodera glycines
MKSLLLKLFVGLCFIDFTSNIKSKFEDFLENQEAMKLIQNYQEKRIKTIKELHAELTKKGIKLAERSLRLYLCKIKSANSDTSKESPNIPEIKFEKCLSRDLTYTIYLIGNGSNWRKYRIMNENNADIYIACSKHSVKD

SEQ ID NO: 125137 - protein, 51 aa, Heterodera glycines
MKCHAFHAHFDRFCDEKFTKEYVRSDCNDCFGSDCNKDQLKLSIGSKAIFF

SEQ ID NO: 125138 - protein, 189 aa, Heterodera glycines
IGSIKLPKIFFNNYLIALNCFQIRKAQRRKERLLREKRAREAERQTDSNSEKRAREAERQTDSNSTSIMLVIIVSIFLIVNLPTALFMAMLCVCLPPPPKFPFLEGVFPVTFFLEGVFPVTFLLVNNMLVMATYPINFGIYCFATYPINFGIYCFMSSSFRDTFWMLFCRRKSCTEGDRRNETINMVKS

SEQ ID NO: 125139 - protein, 108 aa, Heterodera glycines
MDLLVFITKFATFFHLIVSLPIYLSVLAFLLRQRHRPQFTSSFYMLFIALGFVDLSKFLLYLIKKCAYWGYVPAIFYPLNQANSAANLIYFSLWALCLIQLQAFLILK

SEQ ID NO: 125140 - protein, 77 aa, Heterodera glycines
MSLNRFCAICCSQMYRRHWSQIISKYLLAIILLFALAISAPILWHSVCFRLSEVRTPLGQGQHKMDGPVFMEIPTQP

SEQ ID NO: 125141 - protein, 89 aa, Heterodera glycines
GQIVADVVQNVVQTDAAATPAVQHGQQQQPQAVVELAADEPPPNGRPAHDEEKTPMTTSTSTTVLVVNNDENDADAQAGFFFEKFEFNL

SEQ ID NO: 125142 - protein, 287 aa, Heterodera glycines
MGQKHSYNLNRAKATRQSTQIIQDEIASTAEPTHPSEPVPLGVRTSLDGSDYVRREVERQEQQEKLAKCQENGTSGQGKGEEVPLESKANAVEGSQTVAEPVEEDVPKCNVVVLKCEENAMESQTGEDEVPKCQKNALENRSESVTEPFADTIPSPQANVHEVEAVPEFANDALKSEESAIDVQETGKAEVEAVQEVPTINQLVEECVAGTKDVLLEVQAVGLLIHENEEHSAQSQTDGGEVPKSGGEENGKTEQTGKAAREERWESIDQVLEDKTGASADVPEEEM

SEQ ID NO: 125143 - protein, 64 aa, Heterodera glycines
MAFAYTYKIWHIRRSYSVPIYALPSGKQRQQQQAQDDDDNDNEQQRGRPPLPPCPLPGFCRDGH

SEQ ID NO: 125144 - protein, 16 aa, Heterodera glycines
MAHFIWHTKMPKQVGH

SEQ ID NO: 125145 - protein, 36 aa, Heterodera glycines
MATFGMALLTILIGIGLSASSVRADDNKTKLKMEET

SEQ ID NO: 125146 - protein, 50 aa, Heterodera glycines
MTKWCKKREGSAESFWYYWKQKDAEPMRIEEMHCVKCDPEKDKRCKYIPQ

SEQ ID NO: 125147 - protein, 92 aa, Heterodera glycines
MIGRAVRNRPFIFEGIFKFILYPRKMAISFFEKFYTSQKRLRMRRRAVHNRHFISQRIFIFRGYPRKMAISFFDKFYTHTNALEHDREGGAQ

SEQ ID NO: 125148 - protein, 92 aa, Heterodera glycines; identical to SEQ ID NO: 125147

SEQ ID NO: 125149 - protein, 129 aa, Heterodera glycines
MKWGCSTIAGNCDFVNAKNDEMDKCLCPFGEKDVDFSNENLTIEIPAVMTTPTLTTLTTKETTTTTTTTTTTTTVTTEEPTKPKTTATLVELAQSTINEGAIRLPNYLFKRICKLQEMVFASAMVCIAI

SEQ ID NO: 125150 - protein, 235 aa, Heterodera glycines
MRTKTGCQTIPTPKLRPDYNGQTTPARLHRPDYNGQTITARLHRPDYTGQTTPARLHRPDYTGETTPARLQRPDYTGQTTPARLHRPDYTGQTITARLHRPDYNGQTTPARLRPDYTGQTTPARIARLHRPDYNGQTTPARHRPDYTGQTTPARLHRPDYTGQTITARLHRPDYNGQTTPARLHRPDYTGQTTPARIRPDYTGQTITARLHRPDYNGQTPARLHRPDYNGQTTPE

SEQ ID NO: 125151 - protein, 433 aa, Heterodera glycines
GIPIRPHFSISLQNAKESLEISCLPGTSQIRLRATAATCGGCGTVGSSSDDGGTTAFASGGPTGAGEVVLLDIKNEIEEFKKDLKFLQFIQSDDIYNIEQFISTLKVYHPVSETTFREEVAAVVDMFIDADHFNYFFTDRDGTLKSYSCSYVASIQPAYSGVIQAQFARRCAQTCAIVTTAPMMRLGILDVCTIPEGYYYIGASAGREWFVDPANKFKDQSIPDPDLEKLNYVFDSISELLEHPEFKIFAWIGSGLQKHYGHVTLAHQDVFGTVPRELREQIDQRIRAIVEDIDSTHQLLEVKTTETDIKVFIKSSLGHIFDKGNGIQLLIQHLKCDLREGTILVCGDSETDIPMLRTCLEHNPKNVYTVWVAPESKKELREKVSQLCKSFGNEHFLFVSSPEVLLGAMAQATGSGDKHRPRSNGLSTPPNGA

SEQ ID NO: 125152 - protein, 46 aa, Heterodera glycines
MCDLHLFILVFTDLQRFKTHILTVFSPYFGPYLAIFELFSPYFGLF

SEQ ID NO: 125153 - protein, 82 aa, Heterodera glycines
PYAPFLETIRCLGLIAYYATPTIKDIFRPSRIFITVPFIASAIAWAVFVLLKTFVCLRSLKFKRPRKFRFEKIYRSYGTSTM

SEQ ID NO: 125154 - protein, 32 aa, Heterodera glycines
THFVFINFEKFWTFRGFLLFWTFRGLDTLWGR

SEQ ID NO: 125155 - protein, 24 aa, Heterodera glycines
MAQHPILLWADDVPSEQGKIVSID

SEQ ID NO: 125156 - protein, 46 aa, Heterodera glycines
VADFGCDGFHLVLVAMRDIDSDEELLYDYGERRPSVLAVNPWILGS

SEQ ID NO: 125157 - protein, 84 aa, Heterodera glycines
MQQKLEMLLMDAVNREEKAMPQRTVQWKANGIGVQAENGDGKVEKLKMLGQQPYRTVKANFTIVFVNCFFLRSFGVLQLFSPWQ

SEQ ID NO: 125158 - protein, 83 aa, Heterodera glycines
MPPKNAPKTSKKAEEKKKQKVLEDRTFGMKNKKLRAQMEKNIMGAPSKQFTPKKKQEDEDLKDINKIFKPVVQATQQKVSAGT

SEQ ID NO: 125159 - protein, 92 aa, Heterodera glycines
MACGRLQTQQALPSSDFCSIPGELVFNSVNRPGIKCDMDAAYIAAEAIVCFIEDAGQTYVEFSFERRCPVQQRSAPEFGNEFRKYGAFCPLN

SEQ ID NO: 125160 - protein, 213 aa, Heterodera glycines
VTFNLDSRRPFGMSIVTKNNRSGFAGIYVHEVNPGGLVALDGRIRPGFIILEVNDISLDDLSSKEALNLIISSVRNATETRGSVICLFDGQQPPICCIMPPQCQPNAAKPMASKSSTIPKTNPQQQGKVHEKQHQFAGAANCAVDGDIRMIQNPSTDITTTESGISSVECSIGQLEPSTKAKGASTGNRKRSKTTETKKRRGSGGIGTALRRL

SEQ ID NO: 125161 - protein, 130 aa, Heterodera glycines
MTDRRYPIRDGAQWTIISTDTIQYRFFEALRPVQNEEGVDYVLGARCSLLSVPCPLSSPSHSPTTASSPPFLHFLNGTTTVSYDSDQELEFPLSLVRDDGVIYATQLSVSYTRPREQQFRTGIQGTQPNS

SEQ ID NO: 125162 - protein, 22 aa, Heterodera glycines
CVRRPLWRNSFHLLPPIRFLSS

SEQ ID NO: 125163 - protein, 135 aa, Heterodera glycines
MPKEGPKMATARGAKNLKQLAFEVERFVAANLTDANERQSAEQRMVVALGAKPPRRKAINYRTLKEQRTEAKRKTMEGEDGQQPEKDLWRMVKEGKVRKREGGRKRKNGSGVLKKWKKEKQKMSGRKKDKKMNAC

SEQ ID NO: 125164 - protein, 50 aa, Heterodera glycines
DKLQWCGLAIHRRTLSLTVDYCRYRQRRPSISFPSSALRSSDHFRFICNT

SEQ ID NO: 125165 - protein, 136 aa, Heterodera glycines
  unsure (1)..(136): unsure at all Xaa locations
TKTEAGLSYDDAFSRIXCKGSEEFNSPFKSEISSVEFLKMITQFAMRTLIREPFCALTSSAQNRPLRQRLFVSGRGIGQGSSLSVALCNLYLGWVERQICLHSPEMGLTNCAITLFCCRYMDDYLIISNKRERVEK

SEQ ID NO: 125166 - protein, 48 aa, Heterodera glycines
DLNNCYTSFEHKVLDEILHKITPSDSKFVVVSVQVNSKIYKYRKTKTL

SEQ ID NO: 125167 - protein, 106 aa, Heterodera glycines
MEIVKEEIFGAVMLILPFKTEQEAIARANATQFGLASGLCTTNLARAHRVAAQLKVGTVFVNTYNDAEILQIVFETMLPSNPKRSGAVEGQSTGGDHVDNDEQRLL

SEQ ID NO: 125168 - protein, 74 aa, Heterodera glycines
MAEQFVQPETAEEQQVKAKKPRVDERFLWKITRGQFVLAIRLCSAFIGLEQFISQQRQDTSAGRWASGDWTRDV

SEQ ID NO: 125169 - protein, 104 aa, Heterodera glycines
MHPSIFQVKGHQRFYALVAFHRTSVVLSGLNYAQAKNVEKIIAQISGLNPRRRLETAPSKAFATAAELLEYHQESNTTSETTNIVLLIHDGFNTDMGNETFEAM

SEQ ID NO: 125170 - protein, 19 aa, Heterodera glycines
MAIIQGTCGGRAYQSQCDN

SEQ ID NO: 125171 - protein, 147 aa, Heterodera glycines
MTKGVNVEKCQKFKERRGDSMRRIEENLWATVKLVKTEYAWAGEKCETTVNDYIEKEPSDLYWATHAPVGEFLAEITDDAIVVESEQSVFYFEKENTGREGIIGVPEDAYKMSNDVFIIIHQIDHRFKREAKKKWSLTEKKGQLNRK

SEQ ID NO: 125172 - protein, 192 aa, Heterodera glycines
MQSTKAPLLSTTQITPKVREVITTEAPPITTTQTVKIELTTKPRKIEPKVKVETPKSFSKGIQFKRVRNEQQIYKIMGIRKGTILTTTIPFISTTQAPKITKPTTVSSVTVPTKSSQNVKTTMKQKVDTKLPFIKTTVKPTVTVTTKKTSKTMPVTVTLAPKTEKTVTTPKPIFTKVMTTVATTTTISPIKL

SEQ ID NO: 125173 - protein, 95 aa, Heterodera glycines
MSDRSSSPICTGNPMIDVARLLLMNTSPEVRKELEKDGRLLKQYLEVHRTEGGQNQFDLEKTGDCVQQIDAMLGEVRLNTNPLPWYNNHKRIFFE

SEQ ID NO: 125174 - protein, 131 aa, Heterodera glycines
MWIIRWSQQTTKLKNAISNEENDVSNENDGIGSEDNSSNDVVSNGEENLTVTIRQIESAMPTSLLFVMILLNYLIYSFQRTDEMDRNMKDIAASVRLLLRQQRGRWVAGRWLIGLLMGGQCFVAERIQEFL

SEQ ID NO: 125175 - protein, 421 aa, Heterodera glycines
MITRSLHRNVNQRRVVGENEEQNGGNSQQNNGNNHHSEPMMEDDEIRRALLDVNGQQNEQNQQLNADEERRLLDQSNLNGLRNLGENFGWNLGNNRQNENAAHMAQRINNFMTSTPNISPGHQARQNFNFVDNRVNRRVVERPRDARGRFIRIENNDEQEMPNFLQNPPRNPQIPPVNQQQANNLGNFGIPNNPNLIQPLQFGMNGMYAPGAWPQQPMMAYPPQNFQMFYPPNFVPQMPAQNFVPFMNNWAPNAFQPQIPQPAIQPMRAQPTNVVQQQQIPPPTNQAMAQQNPQQEVNRQTTGLSGIEYAMILDRLPDIKGNEGSDSIRNFFKKFSQYTSEWPNKKRIESLEAKLSGRAERAYNAALATEPFAYENIKRNILQQLEETDCREMSAFDDLMNGVYRKSGENLDDLANRISSL

SEQ ID NO: 125176 - protein, 45 aa, Heterodera glycines; identical to SEQ ID NO: 124814

SEQ ID NO: 125177 - protein, 94 aa, Heterodera glycines
LFEYPKRTLEKIDFFVFGAVPPNRCAQIYGETESFRNSFPIACTLILRWIFAPHNCLSTPNGQLKKSIFLFSGQYPRTDAPRFMGRPNPSGIAS

SEQ ID NO: 125178 - protein, 124 aa, Heterodera glycines
MASKESDIWNFFTKISSEVAKCRLCENQLAYDIWAQPKSPCGISIPSTISGDPDSDFLSKIEAELACFKAGQRMEVNGDLFSWWNQNTGRLPELSKLARMVHSIPATSVSSERLIWLWFDLILV

SEQ ID NO: 125179 - protein, 98 aa, Heterodera glycines
MWKRKWKKNRKWKRKWKRNRKWKMNRKWKRNRKWKRKWKRNRKWKRKWKRNRKWKRKWKRNRKWKRKWKKNRKWKRNRKSNKGKEEGTKKEESKRKRE

SEQ ID NO: 125180 - protein, 416 aa, Heterodera glycines
MRRELADKPAKVELTKGISVLLRRGGEDEDGEVVDTPPRPPAPPPPPPPPPGRRPWRGPNLPPPPPPPGRRPRLPPSPPGRAPSPPGSPPPRPQRPPRPSRPSRRNGRLEQWEKRRHDIQRRRPVVRDLLAEAAAAPLPESDTDDEYMLESGLALPTPSQYYGDLPVLPYQHQIDQMDTAAQHRIAIRRKLKKDEAYDDDDSDRKKYRVYYPPSPPRLPLPPPRFTTKSRAASVEKEPEFPLDPRPSTSRQAGYLPPPKIIPKPEPTKRPVPYRIPKREPKIVEQQPQPLQQPLPASAVEEEMPTIPPPRRGTKRHYPVNGENDGEVRIRKRVRQARRVRVQYSPEPGPSTSAQRDEQQQQRELFAIPSNQLTMTQRIERLHIKCNHYADRMGVRGNTINTANGKPLAHSNLRMAL

SEQ ID NO: 125181 - protein, 75 aa, Heterodera glycines
MISKQLAQWKIILFLAIYYLICAFVFTPCLTKFECAVEALDGKLGTFLAKVAHHRRLILYCLMTHLQKLLIIFFE

SEQ ID NO: 125182 - protein, 37 aa, Heterodera glycines
MNLIKVISLKHYIKWPSDVINLIISNNTSSLIRLRLV

SEQ ID NO: 125183 - protein, 358 aa, Heterodera glycines
MRQWKFYCHKTKFLRFLSFISGDCWLCVFNLLSPRQLGFGIAMISHRFDFYVDEHFKTRKWTLGLIRIWSKIGENGTKKMKIVNGYGKRMPIPQIQMPRKVIGFNYISIYYIDQNAIAFLRHFHQLFATCPINLAIETENDRILVFILRNIWPMIGKNIHFMELSAGIFHRFRQFVPSILNDCPSLRFVCFNFHNLFAEFPCDDNAMASDGQAVAKWLFTPLQNDVPKMYKCWLKNDDSSWSSKIEAFKAAFANASSPVNFIVTIWFSFASSVVPFDLTNELTREQLTLKRTDYSNRFLLIRCPISRDASKWAKWEKEAIDWRICGQCNRIEIQIYVERQIGDGLLDATPGTSDRQQK

SEQ ID NO: 125184 - protein, 99 aa, Heterodera glycines
MKNNERRDSFIGTPYWMAPEVIICETFKDQPYDCRADIWSLGITCIEMAQMEPPNHNMNPMRVVIKVQKSEPPTLVQPHKWTPEFSDFLRKCLVKNVDS

SEQ ID NO: 125185 - protein, 40 aa, Heterodera glycines
SFTLRTCAMKSTGCIAGTRTCRFSGGKGSCQRCEGDLCNL

SEQ ID NO: 125186 - protein, 110 aa, Heterodera glycines
MISKKLANLENKFNPSDVCRAIDRSPQFHSLCLRSSVVKQKGFIPKHLRPPWLDSSLFEDNKLKAEMKVSANGCYACYRGRKASNGTNEDEDYCACVVRYSQRKGWAYYT

SEQ ID NO: 125187 - protein, 111 aa, Heterodera glycines
MNSKSTESGRNSSPLSAEDEPPVKEIMWPPHGHVYQQEFMLPAYCKPKLIPLKSVTLEKLEKMQAENAEKLRKMEQEAESEQQQQDGSKHENAPGSVGGQSGPPDIWKAEE

SEQ ID NO: 125188 - protein, 146 aa, Heterodera glycines
MSYAIMKMSIVLLLVPIALIFAFLLFKINNSLPTNTNSKSDTFIVKKFKESELAHRLLDGKFGIEIGASSHNPFGLDTLNVDYTDDPTAFFQQDQIKNSGLQLMTKTVRASPIVLEPFHTIVFIHFKIFDTDAKSDQKNWSNEQKD

SEQ ID NO: 125189 - protein, 105 aa, Heterodera glycines
PLIVPFIQDDEIKRQAEKIKLLKQELEEKDAEIKRQAAEIKRQAAEIKRLKQQLEEKEKKLLEQEEKLAQQGQKILELENEVGALRKIVNAMSEQFMPKDKHQKM

SEQ ID NO: 125190 - protein, 77 aa, Heterodera glycines
MAMLNASFDKFNISNSDKIRTQRLISMSESCEEWKTCTKRETYALLDQELNKLLTTSPPEKMEANFMGISTKSKMEI

SEQ ID NO: 125191 - protein, 44 aa, Heterodera glycines
MRRMDKDPMQIKAKKHKIEFAEDITPQQKQKLSNDTQNVWIEQV

SEQ ID NO: 125192 - protein, 118 aa, Heterodera glycines
MCQSKGRKRKMVEAKKEGIDEKKAAQCFTVSKILAMFVGRDKSQFYYIDWGEEYVGQESWEPLSYINALEMVAEFVERSTIDCVLKALLGEQSVPEHIAKKLRNSDKFKECTDEFKYF

SEQ ID NO: 125193 - protein, 212 aa, Heterodera glycines
MTHSGDMWQRIQVLELAKAFECGYRVDRFYRAWHYEAADDDLFKGYVRLFLKLKEESSGFPKGVESDEQKRQWAEEYKEKYGIAIELCRVQKNPGLRYISKLMLNSLEGKFSMRNSLSKNAVIDRESAFYELACDHKVELCDIVEYSGDAMRVIYRDKEEFVTEHKSSNIVVSLCPTRESKVVTRESHKMYKPVCQKGIIDEELNVMSFGFC

SEQ ID NO: 125194 - protein, 251 aa, Heterodera glycines
NLGFCGFLLTILSVVFLLITAPFSLFFCVKIVKEYERAVIFRLGRLIPGGARGPGLFFVNPCLDTLFFVNPCLDTFRKVDLRVLTFDVQPQEVLTFDVQPQEILSRDAVTVAVDVVVYFRISNATISVTNVEDCSRSTKLLAQTTLRNVLGTKTLAEMLSDRDHISLKIQETLDEATYPWETLDEATYPWGVKVERVEIKGVKVERVEIKDVRLPFQLQRAMAAEAEAREARAKVRAMAAEAEAREARAKV

SEQ ID NO: 125195 - protein, 170 aa, Heterodera glycines
MRQQTGRENWGGFYTPGGTETTAAANARRGQKRRVFKLKGNVEMNEADRTANEELDNVINISANANANNRTNGEGVAVAVNDGGASADTGTNTETVAVAVNDGDANANNETNCQGAAAGMSDGGANANNGTNAETAATAQNNGLEGNADNGTNGANANNGTNTETVSNCN

SEQ ID NO: 125196 - protein, 102 aa, Heterodera glycines
MLKLNFIIIFFNILLFISILAVDDLDFLDDLLNDLKTTTTQNLLKKQKFEENNGGFPSEQGFKVLTSRQIIVFDPFLKRDNPSPSKFVDFVQLGAPGDKGLA

SEQ ID NO: 125197 - protein, 1102 aa, Heterodera glycines
MQQAAPVQHLQNDRNEQPQNIENRPINTANTGVAENSVNDGEILAHTMNSDQILHAVLNVGSANRQSGHGQDEENVENQDLAIHPNLTQQHGGLRMRFRRLPNLEENSERELWQAGNENNSGHHSHHILNRNFLRTSTPNNEHIIHELHIQHPRQNPPNIQANPNFVRQNLQKTVTANQRQANPNVLIPPPQVIQQPIAVYPPVQPPIPETYWGYPAPYYPHPPPPMGYPNQQMFGNANTKVPQPTQIRQPYNHQIPTQINAQQTALNGLECVLILDKLPDIKGNEGNDSIKSFFKKFSQYTSDWPNKKRIDSLESKLSGRAERAFNSALANEPFIFENIKRHILQQLEATDCHEMAAFDELMQGIRRKPREGLDDLADRIVSLVRRAYPGLTRNLADEYSIKHLIRSFDNAELALSLELNRRPGMSFDEFVALAARAETTQNAARRANSDRTQQNFGRSQPHRQYDGPMAKQSTNAFEPNKFQRFNENRITCQSCGREGHVARNCFKRFADQDQRRYFGQNQNATGANRAQMPTHSNPNVSQKSEQNQFGQRQQHQQSRNFLKQNFLVEQNEKQVESSNVQCAGVISNTPEMLDFFRKFWTKCNETVDDGQKEAFPIGKIMAIKVKIYDQSADSMMDSGAQISLVQASFVKHLLENSTLQVENLKIFSKTRNVVDINGKIVECYGIIILPITRKGCEAVDVPFHITDAPIGLPILFGTNAMGLLGFKLFDSQNGELIEFECADNKSDYVRIVYSTLIEPHSTKFVELSVSPKFSGKDFILSPNDERNDLRVEPSLNKERRGKTIAAITNFSQNALTLKENEEVAVVEAIEDVADVENCLGDSWLFSEPSEVKMEKPKPENEETNAKFGLLSKENSEILENLLNNFSRIFAFHDYELTQTEMVKHQIDTGEAIPVKQRMRPVPYAYREKVAAMIQEYLGRGIIRHSISPWASPIVIVPKKDGSLRFCVDYRGLNAITRKDCFPLPNIERTLLMLGGRKFFSTLDFLSGYWQIKMAKNSIEKTAFSTEFGLHEFTVMPFGLCNAVATFQRFMSQLFGSKLNDFVFVYIDDVLVASESFEQHLIHLKFVFEQIQEAGLKIKISK

SEQ ID NO: 125198 - protein, 1400 aa, Heterodera glycines
RLNENRITCQNCGREGHVARNCFKRFGDQNQQRYFGQNQNATGANRAQMPTHSNPNVSQKSEQNQFGQRQQHQQSRNFLKQNFLVEQNEKQVESSDVQCAGVISNTPEMLDFFRKFWTKCNETVDDGQKEAFPIGKIMAIKVKIYDQSADSMMDSGAQISLVQASFVKHLLENSTLQVENLKIFSKTRNVVDINGKIVECYGIIILPITRKGCEAVDVPFHITDAPIGLPILFGTNAMGLGKDFILSPNDERNDLRVEPSLNKERRGKTIAAITNFSQNALTLKENEEVAVVEAIEDVADVENCLGESWLFSEPSEVKMEKPKPENEEANAKFGPLSKENSEILENLLNNFSRIFAFHDYELTQTEMVKHQIDTGEAIPVKQRMRPVPYAYREKVAAMIQDYLGRGIIRHSISPWASPIVIVPKKDGSLRFCVDYRGLNAITRKDCFPLPNIERTLLMLGGRKFFSTLDFLSGYWQIKMAKNSIEKTAFSTEFGLHEFTVMPFGLCNAVATFQRFMSQLFGSKLNDFVFVYIDDVLVASESFEQHLIHLKFVFEQIQEAGLKIKISKCQFCAEELKFLGHILTRNGIKMDAEKTKPILELPVPKSKKDLHSFLGFMTYYRKFIYSFGSVAAPLFKLLKKDVKFQMGEAETQAVSTLKEKILSEVVLYFPDFKAAMENPSRKFIIMTDACKTGISAVLCQSDNENRIRPIYFASRQCNNFESRYCPTELEALAVRFGVKKFSQYITMIPTKVLTDHKALVPMFKSKSETGNARVDKWIMELSARFILEIEYNPGKANIIADVLSRSGALKPRELAEKIFRVEQVDGNISASVPKMEMIEWVNAIKESELGNLYQFLEKRKLPEDKRECQRLFDTIHKFTLIEGLLYFHDSNYGNLRLFVPQKFRNKLIEERHEGKCAGHLSGKKIFGQLAERYFWPNMRADCVNAVLKCRICAHTRNPRANAPELRPVITAEPFELICMDILSIGMSERGNRYVLVMVDHFTKYLITAAIPDKSVESVAKAFVEQLVLVFGKPKRIHSDKGAEFVNKTMEEISQILGVEKSTTAGYDPNANGQAERANQTILNMLKRSTDSNWSWDDRLPFVTFAFNITPSETTGFSPYNLLFGRPVNFPSSDNVNFTVNPSYTIDEESYLQLFRENLLKILENAKNNSDKSRERMEKWFNSQPKVTLQKYQKGERVMVIFPGANKRSTHKKLKWNIFGPYQILEISKSSAKVTPADKKNADPICVPLERLIRAPDGLPNISTTPRGKNAYKNVLNVMTILIFEEKSMEFEQENFLGKTKTSSGTMNFSEEEENMDIAEAEIKWTMTCEGGGHVLCKKLLAGDLDPVLSKTQGIGAMVVQTPLQGLITLFILRSNVSMSASKDLLKVANQLEKLGHFDFGP

SEQ ID NO: 125199 - protein, 221 aa, Heterodera glycines
MKVAFFLNGTPVQSSDRVQVLYQNGFALLSIAEVTEQDAGYYVCQAENEIGSAETSATVVVVPRTGDGKFLAESEVYEHDVEDMRELQQLLASALAQVNNFGFVSLTIHPTYPEDAGVYSCMLTNSLGQAQADANLSTISSGDIMSDPLHAGALPTIQAHEEYQVHMGPMFQPERPEEFQSVEQPRFARPLDGQVEVEQEQPVHFECRVQPANDVVRREMK

SEQ ID NO: 125200 - protein, 419 aa, Heterodera glycines
KSRIFSDPQHPSSYARIQEMEAPKPLPEEVPEPDKQSPQFTKALSASAGHVAEAESVYLEAQYGPLDDNSIVCEWLFNGQPLMKAHRFVLSQDFGFAALTILYIGTYTLLIRNAAGESSSSVELSCEGKAALLSDPIHPQSVARIAELEAPRPLPEEPAEPEKQAPQIVKQLTVATQGEGGPAETQALHFDAQYTPTDDNSQAQTSASVQIEGGALILEDTQHPESFRRIQELEAIRPAEPEEPEIVPEAPQFTQELTGLVDDLADGMPLHLDGTVMPITDPKLRIEWFFNGQPLQFSSRIRTIHDFGYVALEFAHLLPSDSGTYTCRATNEVGQAESSITIECETKRNLYLDSQHEQSWQKIQEIEGRQPTKEPSPELHFLPPTFIVPLSNFEDLVEGDVVRFECRLQPVNDPTLKAI

SEQ ID NO: 125201 - protein, 50 aa, Heterodera glycines
MRATDCGWIGSLSSAALPSQLNSTDEEDSPAAFRINSVESVSADYPITDQ

SEQ ID NO: 125202 - protein, 419 aa, Heterodera glycines
NWTRTFENVELEHLGRIVQLVGHVEPEGDPNMTIAWFLNGMPLQNANRFRQEKNFGEVVLHILEKNFGEVVLHILHVLPHDSGVYTCTASNAQGEATTSATVKVAGYEKILKDVQHPDSWNQIQILEAPKIREEIEIEEILEAPKIREEIEIEEVKEKPRFLTQLESVADAPEGTPVRLEATFQPARDNDLICTWEFNGSPLGASQLIRTRNDLGWAALDISAVNMDHAVNMDHEGVYTLKIVNSEGEAATSASIKVAGVGNVAGVGNILGDTQHEESWRQIQILEAPLERPPSPPALEYPPPTFQQQISDILERPPSPPALEYPPPTFQQQISDIECDEGDVVEIRMLSMPDDDPNVENQWVRERKCPLVHARKYANRETFGLCAFDVGYTIPEDERPVNLRYWGKPEKNGTSKKDSP

SEQ ID NO: 125203 - protein, 108 aa, Heterodera glycines
MHRAECQRRGEHRGDHRSADTGRAGGADGAATAGGNTGRRGGRIRALGVPRDAHQRPATAGALAEERTTAAGRQSLCVVDNLEHHLRQFTKAQLALTAEDAWQPGKMI

SEQ ID NO: 125204 - protein, 235 aa, Heterodera glycines
IDGIGVHWYTLGGHSEQDKFHAQHPDKMIISTEACTGFIFHSGPRLGNWTRGWQYGWDIVQNLRHWSGGWVDWNLCLDMNGGPNWVHNFVDAPIIVNAERDEFYKQPMFYFLAHFSRFMPPGSVRIGSRFMPPGSVRIGSTLFASDSVQHVSVTTPHGHKVLVLINSATNTLFASDSVQHVSVTTPHGHKVLVLINSATNPFKIRIDEVGRSDGEETPVIELGPEAIMTLIWKNI

SEQ ID NO: 125205 - protein, 200 aa, Heterodera glycines
KGCQRRYSPGQDSFVCACDVSHCDAFEDGSVDEVPSDTLVTYSSDRKWKRLERKEMPMRAKGAATEGAVLRLSVDPSDKYQTILGFGGAFSDSSGINLNALSAPIRRHLLEAYFHSAGIRYSFGRVPIASTDFSTRQYSYVDQEDDFDLSTFSLAPEDFEQKIPFIKEAVRLSGIPFIKEAVRLSGEKFRLFACPWSVPF

SEQ ID NO: 125206 - protein, 19 aa, Heterodera glycines
GPGSRSRVLKSSGPGPGRA

SEQ ID NO: 125207 - protein, 42 aa, Heterodera glycines
MLLCSKISHFLLLLLGALLLLSFISMGNVSKNPQNGFAKNTK

SEQ ID NO: 125208 - protein, 154 aa, Heterodera glycines
MNQQQVIKTKRNNDKLVHDGALYVFHKFSNDGLKKFWRCEFHGPADQCKGRLHTDLNNVVQKLVGVHSCDMNAAHVECQRLVTGLKRRAAETCEAPATIRAQVLQNTCTPVLASFPSKDATKKVIKRLRREENAPRVEPLNLEQLEITGYLSCL

SEQ ID NO: 125209 - protein, 28 aa, Heterodera glycines
MAVRKRRYENVQKANRRHLALSNDTINV

SEQ ID NO: 125210 - protein, 300 aa, Heterodera glycines
TNLKNNGHFKIPFLEYLLNSKICVICCLVCVVLGVWLIFDRYAVDNLATAIGHQFKASKPTAVRQIGYLLLFGGIAVIVVASLGCCGAAKEWRPLLCCYASCLMVILAVEIAAGIYAAMHSHHSHMFDKDFRQILRASLRMYNYNGTENGVEGSDSMLVKTAWDKLMQEKSCCGVDSRVGEFQQKSCCGVDSRVGEFQQSGWYQMTKGRHEFPPACCPPKKNGKLAPSCPTVFRFGEGCHDHLYYEHYVRIAFAISFLILSTIFKLLPHLPFVSTIFKLLPHLPFVQLFCVLFTHKLHFR

SEQ ID NO: 125211 - protein, 36 aa, Heterodera glycines
MAPTLHISITQCNNNSTMMKMAWNYLPLRGNGSLFY

SEQ ID NO: 125212 - protein, 81 aa, Heterodera glycines
MGRTVKDEEIPEEKEQKGDETFGRIPDSSIPKSLILITLPPVGAAEETGRTPVVVKSKQGSEGRKSRAVPNRPTKGQGRSS

SEQ ID NO: 125213 - protein, 362 aa, Heterodera glycines
MYNPQGIITLAQHKVAELEALADIDWRLHSCFNLSCVHFSLPDPPTSIAKNTDAAIEEFFFGDDDLNLPPGQPNPRPQPNTPPPLNSDQQKVFDAVLLAIQSNPRDSTVPRRFFIYGDGGTGKTFLFGQIIRRLRKAPYTYKVLATASTGCAAILLPYGKTAHSTFRLGREVSLDKLPSIPLESFFARRIREAQLIIIDEITMLHNTVIEVIDRVCKEMAIRQHKDLLFGGKTVIFSGDFKQSLPVVPHEGLTAQVTACFQTSPLFGQFTTMKLTINQRLGQGQQAYLQMCRQIGLGETGEHFWIPPQFLVKSKEELIDYVYPNFQQLLGNDKELLNRLILAPHIDTCDEVNEIMMANVPGQ

SEQ ID NO: 125214 - protein, 37 aa, Heterodera glycines
MSLQPSPFNGSPEKPDLHWQSKPPTKFVHTVFACGHT

SEQ ID NO: 125215 - protein, 115 aa, Heterodera glycines
MQIVKIWMALFAVNAMMGLSKCQTHRPAPNAKTSMSATTKQCAIMQQPVQMWRAATFANVWTVSLAMAKSAMRQFCFQLGRNAIFLEFQTSKWIPKLCNWTCQCKYLDKIIPNFT

SEQ ID NO: 125216 - protein, 29 aa, Heterodera glycines
MCQLIRLSSSQLLLLLPKICALIPIVLGR

SEQ ID NO: 125217 - protein, 19 aa, Heterodera glycines
DCWGREFESHRASYLLCST

SEQ ID NO: 125218 - protein, 110 aa, Heterodera glycines
MPGKKNGVLCKKPANNGQNNELFDKICPNMATKWPVARKDRQPISPPLVAQSIIKRSGQLGQPGEPGLRVLEGQARETAAGQSDGLGEFDGKNQLGQIAASGALGYRQHG

SEQ ID NO: 125219 - protein, 128 aa, Heterodera glycines
IAQKIKKFVVPQGAPTFTRKPQILQKTSDSGDPAIVFDIGFQADQNPEVIWLNPKGKKMKESSRIKFGLTPDGGANTYTAQLELKNYKAKDSGTYTCNIKNDAGEANVELTLNIEGPLDDAGDDESQA

SEQ ID NO: 125220 - protein, 88 aa, Heterodera glycines
MPKPKLLVDQLELLLNTGNGADVYFLVAEDEEKEATPSNPVVVTDICAVPFKAMLRFIYTNNLSVLDGQNAMAVFYAGQKLKFISPMD

SEQ ID NO: 125221 - protein, 68 aa, Heterodera glycines
MAGSPESDVFCKICGLRVKALESKFVCKKCGKKMHLDDICYCHKATTKCHCNARKCCDTKPEECGSFI

SEQ ID NO: 125222 - protein, 160 aa, Heterodera glycines
MRQLDASILFNFPSLRFVGFIGDILPEFPPADDDDIAANASSDGQAVAKWLFSPRHDNLPKLLLVTIAFSIASSPVAFSICVVFPYSFPFPVVLPFEHTNEFTQEKLRLSKKFVNVFKLIRCSIAAADDEKWMMEIDEVIRGQKNSKIWICIGDDGVNNG

SEQ ID NO: 125223 - protein, 176 aa, Heterodera glycines
MVEIETVIFPFENIVCRQFDVTVKVLKWRFMYNNESFVVALNNKTGGIVSYDELPVIYGSVEHRIDLGRHLVLSIFPLLKDEAIYEAKLYCIEKTKALISHFQIDAKMCQKECSKMIFHKEIQCPTDQYDITVWKWNNAAEKASITRKEVRMHFTKLFIMEGQEHRINYVLERDKN

SEQ ID NO: 125224 - protein, 123 aa, Heterodera glycines
MRCLRKFRQLFWAKNPSKNFVKELSDIFTEYSNSFMENWISFEKFGSKNFDRYRAFVWKQITEKSKRSEERIEMDKFVGKLFERRQFFELEKYDANFEKLFAIKVFIPKIIGGNRSNGNEFYQ

SEQ ID NO: 125225 - protein, 36 aa, Heterodera glycines
MNGSGNIVRRFFLFQIKCANALTKNRRTNSKLIISI

SEQ ID NO: 125226 - protein, 298 aa, Heterodera glycines
MKRHLKASLKSDPKKTVASLMIILSIVLFHRCFLDGVGKPIFHAHANTFYGAWMRDAYPRSAADLNKRWLAVHFEGDSLMEFASEADLRRGRPSVSHSLPHPFRGSNSVFFNGSFFYHRSGTPMLAKYELHSHRYDEVQIAEGIAHKYDDYLFNASKSYMDIAVDENALWLLFHFEDVPYLLLFHFEDVPYLSVAKMDINNLSMYSIWNLTMINHTDVSNGFVLCGVLYLVRSSTELTTDISVAFDFYREKYRQPNIRWVNLYGNANHITYNPFDRRIYMYDHGYLLTLPARISWRAK

SEQ ID NO: 125227 - protein, 68 aa, Heterodera glycines
LPSHYDRDGANANANHALLARGDLANDDGNNDPMGFGQAEADQTARHRRGPALILLLVVLPLVVGAFT

SEQ ID NO: 125228 - protein, 19 aa, Heterodera glycines
MPNYKFSCSLIANPTKNEK

SEQ ID NO: 125229 - protein, 73 aa, Heterodera glycines
MGLWSTTTCPLWDCGQQRPAPYGIVVNNDLPLMGLWSTTTCPLWDCGQQRPAPYGIVVNNDLPLMELWSTILD

SEQ ID NO: 125230 - protein, 59 aa, Heterodera glycines
PGLKCPAEAKIFFYFREKIEIFPKKIPVDRARKTMFWKWSPFLWEKSLKNPKIQKPENL

SEQ ID NO: 125231 - protein, 67 aa, Heterodera glycines
MERLIATSEMVKGVQIVQEKPGTPIIAVIVPKSFNQITVADLKQEMIAICREQKANCMINQNFIFTK

SEQ ID NO: 125232 - protein, 190 aa, Heterodera glycines
MAKEYFSIVIKMLGQMPPKIKNLFENDIEILNFKFKNKYQQNIGGGGGGTINLDKILVENAMDYDEDTLRQTHRSLIERFAIKIGRMLEMTINNAFVPSNDIMAIIELHIYQTFSEGLKNWNKISKSLSAQMHESPSKLPIDVKLLTKYFVSMKIAISFISAAIEVPMFTDYKNTKSIQLIKSGYFLQKF

SEQ ID NO: 125233 - protein, 199 aa, Heterodera glycines
RCFHPSFPICSMRLFHAFTGDSPVNKQFLLFVIFLCFVATAAVGPTRRSAIRNAPREAKADEATPKCDLGDIELNSEEFVHTCDEDKFENANIYCKGKLLEARKSGLSAVNYHQLLDDNDSKDFVDRPLRRNASEVLRQFEQKFGGQNESASSIDVEELRDFLDENFDRAGGELKKWENGRIIGRGASKENEKGEEKPN

SEQ ID NO: 125234 - protein, 161 aa, Heterodera glycines
MQKKAFWLATKWVLSNYRVYRSEVPRGNMWEKYAGEGRDLVVAIGLFLCQSGFGWSNGVILDLLTTFGDRMEFKNDLEEDPSAVAKEVIKAEPPNLPTPNPNITPVLNGPFVAVGPQGEGIGIPRPSGALRTAMAPRHTLCRWLWWWTSVLMALLVTRTIH

SEQ ID NO: 125235 - protein, 182 aa, Heterodera glycines
IAAQRLHAEFKQLSQLPLQGCQASPNSENICQASPNSENIFQWIAVIEGPKETVYEGGTFFVELNFNKNYPFDAPEVVFLTRVYHCNISNGKMRLQVISRQSWRPSFGVATVLQSIISLLCNCDPYNSLVPLIGETVLQSIISLLCNCDPYNSLVPLIGEQYQQQPEEFNKAARIWTERFAH

SEQ ID NO: 125236 - protein, 108 aa, Heterodera glycines
MSKHQKSAVTPPTTTTTAAESGGERDGRTETTSGQRKRHSANQTDSANGAAGGQGLFPGFGFCWEVFMSTKIATLFVIGSNNAVVLSSSESAAKEAKVRKMSTTSQNK

SEQ ID NO: 125237 - protein, 135 aa, Heterodera glycines
MKRTNATNITPPRAKRSMAPAMDPITAALAEQERQRRLVFIGLPESNAVCPSERVQEDREATTKILDHLEVEAEPTTVFRLGRYDPQRTTPRPLKVVMPTPTHQHVALGGWKRERARVRSQQNQTRLFVRPALSK

SEQ ID NO: 125238 - protein, 69 aa, Heterodera glycines
MLINNLPFSSVEEAEKQALAQYPDALNAMQAMWNKVKEMKSCLATCFAGRVQNQTAQQIVQQFSVKSIK

SEQ ID NO: 125239 - protein, 109 aa, Heterodera glycines
MAELLLSNGQAIRQRKRGGVGEVVQEFDAFLKVSDDVKEEPKAIKFVDDEIEEGLQEVEEEKERNERIEMEIKRAEAKAKGRGEGTAEEHVIMMIGNGFGIFQIIASGR

SEQ ID NO: 125240 - protein, 43 aa, Heterodera glycines
MLKGCLYVILELIANCYVQLKIQLDRFMGSGQTPKKQGVFILN

SEQ ID NO: 125241 - protein, 205 aa, Heterodera glycines
PSFFFWTEKTENLLDTVVDSFSAQLLLALCSLLTIGIGFFRMLRSAAEYESNPMLFLIKLKSVLLLSGYELQKFACFPLSRLLILFFIFKCFDYCMALYSVLCWCCSAWASSCLLLYWTPYWSCMNFRADDTNVPLVTFVFDIVMVCSFVFEMFFNNSLVKKRPENASFAAANRKLRNDVATECANVAIHRQQQQKNGSAIIMQT

SEQ ID NO: 125242 - protein, 19 aa, Heterodera glycines
MPTQFIKVLLKNQLITIKI

SEQ ID NO: 125243 - protein, 103 aa, Heterodera glycines
MSQKSCMEDYKRQIANEETFNNKEISMRFPNFVSFAELLDPSKGLYNQNEDKLKLAIDVTVKLVHGKRYKILNRFFTPLATPLAESETMEKTTIHADFSSQKF

SEQ ID NO: 125244 - protein, 62 aa, Heterodera glycines
FNTPFHFFFACLIFFQPFFLTIPKLEIGPLIFLEFFMVSYNKNECLIYNLDRSNTNMAIFAT

SEQ ID NO: 125245 - protein, 132 aa, Heterodera glycines
MLARRKAMRKCFANYVDDGPLVIRDAFMGGRTGPMKLLRRAGPGEKISYYDFTSLYPYVNQLTVSNYSLTHLYSLTRPQTALSHPALSHLISDCSLAHLYSLTRPQTALSHSALSHLITDCTLPSCTLSFHL

SEQ ID NO: 125246 - protein, 88 aa, Heterodera glycines
MRTTDLTACSPSSPIAVFNTAGASNSSSDEVWLMFFFPAGAGPMPGVALSPSRTPQYDKGQFPWAQLVEYKRSAFFKFFIFSEIFMWF

SEQ ID NO: 125247 - protein, 101 aa, Heterodera glycines
MALKSDTLPKGRKTFAKCGKEQPYVNLESTNTENKKTEAKSSPPEKTDKTATKRREYERMAPKPDKLATNNSGEYERLATAQKEKRREGGQMGKNWGKKEK

SEQ ID NO: 125248 - protein, 81 aa, Heterodera glycines
MNNIDDICKEIELRLSVHGALLGSGWATMETTVTSLLNNNQNDISILKSLQLEQEANAGLLVQKVDGLLAGNAADITAMGS

SEQ ID NO: 125249 - protein, 150 aa, Heterodera glycines
MRKERKKWEEEERKKSEEEERKKWEEEERKKREEEERKKSEEEERKKWEEEERKKREEEKRKKREEEERKKREEEKRKKREEEKRKKKEEEERKKCEEKERKKREEGKKREGRLRSKKKLNVYSGFDHKRSSLNKTMDTDYDDSFWSDSD

SEQ ID NO: 125250 - protein, 526 aa, Heterodera glycines
MKHPSHSTLLGYIREKHWIPKGRRFIRNTILSERHGCLNCRKERLKPYAYPQMPNLPSERVAMIRPFEKTGVDYFGPLTIKGGVKVYIALYTCLVIRAVHLEVADDCTATEFLRTFRRFSSRRGLPSLMWSDNGTNFIAGAECIKEEWRREILVETSHSGVSWKFNVPRAPWQGGAWERLVGITRSALRRTVGKSLMERQEFDTLVCEIEAVVNTRPLTFQSEEEFTQPLRPVDFLLPYKRVETSLPLSDEDPMDPDYAYQPRKRGELHQLMRVAIKRIDRFWKQWKTEYLLSLRERDRTNRAEGSLPREGDIVLVEEEEDPRSIWTMGKVEKLLKGRDGLVRTARVHTKGKTLVRAINLLYPLEINTSAEDEVSQIQVTAIMDSPSAVMEGRDPQTVTTESSLPPGTVMQDSQIVTTESSLSPVRGRNERQAVKERIRKRQPTEEVRGKGKLKKNGPYDPLRPGNYRIPRRNPFFPSQVAYNEQTRTYRRRRGRTIDLSGLRKLFAGLGGGKGGTGKSFGDSEKC

SEQ ID NO: 125251 - protein, 167 aa, Heterodera glycines
MQKRLVEQWELVKARQSPDEGPFALTKTHLRLEKSLLNSETEPTEEEMVAESTMSLFSRECASFASTFILGESFSPKNVKKEAIVSQIAQILLMDKYATSFDEQTAVQILIHALQSLQMYVSDELAAGPILTLIFNIYSTFRPKYPALLEVLRQVSVNILVLYYLSV

SEQ ID NO: 125252 - protein, 146 aa, Heterodera glycines
RIQKRHAIKQALEAKINKYKAPQHQLRLQYGTGKCKNYTEEEDRFLLYNIYEIGLDNENLYDELRQNIRTAPQFRFDWFIRSRTAMELQRRCNILISLVEKEMGDLGLEQKGAQGGRGGRKKQSTQEKAEASTGATKRKEPSGATA

SEQ ID NO: 125253 - protein, 49 aa, Heterodera glycines
MAKTQYYGQSLMDTGTAAFIFVNAIADHDGMARGQSPRQRAAKATIAFL

SEQ ID NO: 125254 - protein, 42 aa, Heterodera glycines
MARKLHFCALIWLVLWLALSTVRQVFDIIGKLWALVLIDMVQ

SEQ ID NO: 125255 - protein, 47 aa, Heterodera glycines
MTHTTIGGPRGLKVILITEPISMANDERFSDEKFSVERFSDETFGHR

SEQ ID NO: 125256 - protein, 70 aa, Heterodera glycines
MQENNSSSDEEGQLLSSSSGNEEAANQELIQFIEFKSKRGASLLARDGFEYQFERNSALVDNVEYWKCVK

SEQ ID NO: 125257 - protein, 87 aa, Heterodera glycines
MKPKRRKKRDLGKCFNGFILCFFVFVIMPITNLSNAIVTTLKLDEDSKISRALDKLSVQNNNKEAEECPICLESFELGKKNPVLKCS

SEQ ID NO: 125258 - protein, 50 aa, Heterodera glycines
MNEQLAKKNRRRDEKSCNKSISIQFIMRNVALSYGHFATYAWMLYWILKI

SEQ ID NO: 125259 - protein, 118 aa, Heterodera glycines
MAAIELFWPTSKHLLPVILLVISGEWIKLMDHLPIIIIYFKYFYVFPLFDECAHSLGFVRAMFAIAASASSHASNNSEWQALSTQFGQKVTEIDSKCAEFGISIGKVPIDGPKDKIFH

SEQ ID NO: 125260 - protein, 63 aa, Heterodera glycines
MEKNLNFIRQAKCKNPPRAVQKKQQQQQQLQLMQNGGPDAYELKEVFGYYNNGCHEAYYVSWL

SEQ ID NO: 125261 - protein, 78 aa, Heterodera glycines
MFAIAASASSHASNNSEWQALSTQFGQKVTEIDSKCAEFGISIGKVPIDGPKGDHSQRNVPSTDSVISMPGLTGSHKH

SEQ ID NO: 125262 - protein, 119 aa, Heterodera glycines
QIYVFIQSFVVFQESHKNSLISAIFIKCFAIYFLSIFDCSFAFFYFSTFSAFFAIQFRFRPSHQKCQPTIGFTACCCCTALIWSLAINSAEGSNDDTIKSSRSANCSICYVMVDNIIVK

SEQ ID NO: 125263 - protein, 38 aa, Heterodera glycines
FMENFMNFLSSNKIKSVFVVQHWDGLVQKYQHFCGFRL

SEQ ID NO: 125264 - protein, 73 aa, Heterodera glycines
MPEGVNCLRVGHADAHRDSYVIVCGCGTTIWGFRLDGTDVFWTALGYEVNVIELCDMDGDGQNEAKNNGEKLI

SEQ ID NO: 125265 - protein, 236 aa, Heterodera glycines
MGGSENLPLTVPSASASSSSSSCSLTFSEFLRLGQSEIYLTIHEAKKSIAEQEEQRGVISMHVCWNDFSPDQNKRKVRWLFEIQQLFVQLPKMPREYIARLVFDRSHRNLMVYKKNKGAIASICYRPFAEQGFAEIVFCAVAADEQVKGYGTHLMNHLKDFMVSQLGIFHLLTYADEFAIGYFAKQDFVMQIPLPQGRYKGQDFVMQIPLPQGRYKGFIKDYQVATLMYCQLHPKS

SEQ ID NO: 125266 - protein, 55 aa, Heterodera glycines
NIRKNLEPPKYVEQVKAEGDAAKPPVPVIPLQLPADDGQAAAAPAEAAAPPPPEK

SEQ ID NO: 125267 - protein, 236 aa, Heterodera glycines
MPKLNDFGWHFDAAVRQSSIVDHGKLKTELAQQQRAVAEREAAWDRERAELNQTVRSLNNTLEELEQELRQREVHGREMQLQFERTVVERDMAQMELLDNAKQSNHNQQHHHQQEHINAAAHRSSMLHLASSNSAESGTAEEHNSSTAAAHVDGGGPSLASSSGIDSSTTSFSVTADAKEIDTKHLRLARRKLIECRQKVARLLRSAEKAMLGERLGRDDLFGSYLGKTKKKRFKF

SEQ ID NO: 125268 - protein, 171 aa, Heterodera glycines
ELGGRKFFSTLDFMSGYWQIKMEENSIEKTAFTTEYGLYEFMVMPFGLTNAVATFQRFMSRLFDGMINQFLFVYIDDILIASESFEEYLIHIELVFSRIKTAGLKLKLEKCHFCATELPFLGHILTREGIKMDADKLKPVIELPTPTTKKELHSLLGFKTYYRKFIHSFGT

SEQ ID NO: 125269 - protein, 177 aa, Heterodera glycines
MVWLGLFFAPLLPAINNVKLVIFPFYCPVCLCSFVLIPLPDHHHVYPWLGLCHLQCAGPGNFSGVELLILFIVFLISLVRGLRKANTDLQKQLIHERTEEKRKIFELAGGANRNKTKASTKAEEQRKKMGGGAGRKLEQGQHLPEVERKRREPWRLFANLAKNVRKGTKKGGGKRKT

SEQ ID NO: 125270 - protein, 152 aa, Heterodera glycines
MHTDPKWGKAAEEAMRYFTSLVETLNTTPRKQFVKLSDEIFEAGTNFVDGCERPVKLSSDEQNQFGVRTSHLNGPWTQQVDRRLRWFSYRKYFEHNEQQKFVPKCAAELAEAQQIVQKCSLNFDAIGPQLNECDVEFATAVPFCPFNTLITI

SEQ ID NO: 125271 - protein, 65 aa, Heterodera glycines
MCSPVIGFSMSVPRLFSIAIAPICSRAYLDASKLKHSKLPISFVYCFCFCCFNVCILRFLSEILR

SEQ ID NO: 125272 - protein, 136 aa, Heterodera glycines
MPKESHEYKQIREVLMKIKKKKFILYGEDKVAVRDVATAIRNIKGADHYFKQFEKFVEAMPKESHEYKQIREVLMKIKKKKFILYGEDKVAVRDVATAIRNIKGSGVGNSWKNRDRDMSGPRSGFTIGTGPTGTFT

SEQ ID NO: 125273 - protein, 55 aa, Heterodera glycines
MMSPRTFNSKEYSHYREMEDKMTFMAFWAYVLLSAKSKILIDLWVTGDATFDHDW

SEQ ID NO: 125274 - protein, 77 aa, Heterodera glycines
MSKERRKNKLIQFYENWKSLSGGGRWCFDGGGTANAAAVVAVVPGQQCPMQTVHNQLIRADGKRRVGHRSDQLGGTN

SEQ ID NO: 125275 - protein, 20 aa, Heterodera glycines
MNHKKLEHEGHLYVFLSNFG

SEQ ID NO: 125276 - protein, 61 aa, Heterodera glycines
MTPPHPHHRRQQQQMPSAQSVGSAAQFGRQPFGAGGGPIMANNAIANRKKRRFADKMVAPE

SEQ ID NO: 125277 - protein, 91 aa, Heterodera glycines
MFGPDLGRSQEKETFTGQLPRTKHIFFGLLNPEGSARVREWVCHLWKVRNVPPGFRDSVRSNSMDAVQSFSVLAHIRAVDRPTITIQKSTF

SEQ ID NO: 125278 - protein, 151 aa, Heterodera glycines
MAHLGKIQIFTKAQPLSPGDLDGLETAVYQFKAFLDEQPMVRTLLSKKTKAHLLLHHFVPFARQHGFLALLDEQGDEALHSVWRRLEQLWKTMPDSEQMRQQLEHHFVSNWLLDTGRLDELKLREEEQREQAEEDKTNEESDQDADVDIVD

SEQ ID NO: 125279 - protein, 29 aa, Heterodera glycines
VVCEKVTKGVGPRFDSQCMLLMYFYDFNE

SEQ ID NO: 125280 - protein, 113 aa, Heterodera glycines
LKKKELANSPGIFQMITDHLAKDHQMNDCRSLIALSDVQTIRDVVRSLRNRWSARTLPMRVCRDWTKRNVNASDRLRVQRPSDAIWPIYVPRLGQNDVGPFGQMQCLPEYHFP

SEQ ID NO: 125281 - protein, 129 aa, Heterodera glycines
MDEEMLEFGDSLPSTSATPIGDLVPFPSTPTAPMDTGEMTPPPVAIDERSPRIEQLEKQLKDRDDTIQFLREQVRNREALISDLRRVRHHQRRHQHQQNNAKQRKTKEGHRRAPTQLAKTVDGADFGCH

SEQ ID NO: 125282 - protein, 25 aa, Heterodera glycines
REKKIMFFSGTLYLLVHISFFETVC

SEQ ID NO: 125283 - protein, 322 aa, Heterodera glycines
MANGRVWGRPINKICPLEEAPPKMAEMDDQADQAVHVRHEVQTVETQSEAREQNTPSAARKDGENEGSKGEESAEKRGREVEAVHPDGRVNREIREDSSREKAPNDSDGENGGDTAPLKSAVSEKAAEVPSAAQGKAGTLAHPHSAQRHEKKYLGDSSMAPSLLKVPTKFQPNSTRSEGGDRFGADGPQAVQAGEIGGEFPEAPAVEQHQNELEQTPNKPVEEVHDGKDVREVQAVPGAEQRKSARTRRNREIWSPERHVSRKRGLIKPKTGMALLIMLISIVGTFGCQPSMRSSGMDPNLPFQEGPKMPCTMECAKRGVTI

SEQ ID NO: 125284 - protein, 229 aa, Heterodera glycines
VQEVIFYIRVGHAEKRANGIFRTAQKKEKKRTEIALRSSPILRGFTCGLWMVFHSLTVNAFRQNSDQQKQFHPVAVLLTIKDWVTHFFACEHCRAHFHRMTTKTAKIEAAVRQKEDVFLYLWKAHNLVNGRLRGRETEDPKFPKYQFPPKFLCPECRRGDKFDEGKVREFLLKYYGRVRPIDGEQRTTENGRGNGEHGGGGEEKEEEADKQQRNERMPKVIGGTAEEEK

SEQ ID NO: 125285 - protein, 178 aa, Heterodera glycines
KCIDFFQKNGCPAEKRQLEEIMAKSGAIRHAKTQEYTGPDIPLFLFFESILGDHIKRLLLASTEIRSIGTPFSMDIAALLDEIRELHVFGRADLLTTEQITDFSNKYLGIHGYFKAKNFFAFFSHSPFKNWETYPTAFDTNNAAGFTPKLHWLLAHGPDFAKRWGWFAWISEQGIEHL

SEQ ID NO: 125286 - protein, 589 aa, Heterodera glycines
EMRDLRAPLDLLFKKDTPWFWGPDQQKAFDQAKQVLQSDLLLTQYDPSLPIIVAADASQCGIGATISHVFPNGVERVIEHASRTLTPAERNYAQIEREALSLIFAVQKFHRMIYGRNFTLLTDHKPLLAIFGNKNGIPIYTASRLQRWALILSNYDFTIKYVKSANFGQADVLSRLISEHRTDEEVIVAHTSDNDVDSTEEVDNLEQLPVDAKEVSELTTSDDLLQQVAQFVRSGWPNKCPANELMPFYSRRDTLTLVGGSILTGNRVIVPAPLRQRVLKTLHFAHPGIVRMKALARNHVWPGLDSDIEAMVKHCAECQFAAKMPPKAPLRPWPIPGEVFGRVHIDFAGPCADGNIYLILVDALSKWPEVMQMRTTTAKGTIEALNLVFHRYGAPKEIVSDNGPPFTSHEFKDFCRLKGIKHKFSPPYQPHCNGQAERMVDTFKRQAKKNAKSNQQWISEFLFAYRSSPSPILNGFSPAELFLGRTLRTPLSMLEPSAEREQQPTGQYQSRMSQQYNRHHGTKSRSFNSGDSVFLNYGRSGKPSWLEGKIVRGSGLIWKIEIPILGITVTRHVNQMRSKFGSSTFLDVR

SEQ ID NO: 125287 - protein, 121 aa, Heterodera glycines
MSEISKIFWKKNSKSHACLFSPLQMPQCCTRWTPWPSGNSPRCASTPVSNIAQHPYFSAYTQFRDLKRVLTTNIVACFNVPIPLQTAALRPFIFRTKLRTKWEMQQIVGRSCEVGGRHLSV

SEQ ID NO: 125288 - protein, 72 aa, Heterodera glycines
MEHHQGQETWVPLVEYKKEWETILDKEGEGILPKQSGDYGFASQAGEVNIGARRNQVALIRGRLPNDRRKED

SEQ ID NO: 125289 - protein, 94 aa, Heterodera glycines
MSKCTNYHIHLNIQYCTREYRVTVIGLRRTLTLPCSIIEHYGQKKCNGCEPSCDNPNPKICTKKKCNCSCECLPGLFRNKKSGKCVKKCPYKAD

SEQ ID NO: 125290 - protein, 52 aa, Heterodera glycines
HIYLSIKLINLDNNCKNLEMFVFFLSHFAKSSCSPIHKHFTSPSVFFSIQSQ

SEQ ID NO: 125291 - protein, 54 aa, Heterodera glycines
ELLVLFDSSMCLLLICKISKIFVKFQKSYGQKELKNPVIRTFFALIFLCINKNF

SEQ ID NO: 125292 - protein, 258 aa, Heterodera glycines
MEAEALPRAAERRKGAETEEEQEEQQLISWLHHAQWDTIAELLENEWVREQLKIGFISNDEAKERLTYLVSFEMANEIVAFLNLATEKEKKEKIKEMKKKYEKTKEEKEKKEEKEQSEQKKLADKNMREMIREEEKMKELKVRREQMQREKQKKKAEERERERERREKETSAKMKREESEEKSSRDREEKEMKETKEEKEGKEKGAAKRKEKGKKKGKTQTEEREESERGKMEREKEAEEKSLESEMAQVQLDGKRNV

SEQ ID NO: 125293 - protein, 708 aa, Heterodera glycines
MVAKTCNWPRWKFSRYLNNQYGQQEQLKHDAVQLMLQVNAPMDLDGYDADTFVPHVVDYWNNAQRQHRFAVFIFGSLGQYKPLYKYIDNTYDTPLLLYFNEDHFDGVQKQGGLQPYCLECERPYRRMSTHSKSCKARCVLCSRVGPAFPCPSSAGFFKKCKECNKKFTNNGCYQHHLQSGFCKRSKKCKDCGAVWDVVNNTQNGRKGHVCGERFCKMCNNYHNIERGCYIQPIEPKESDAYRIVAFDLETMQHTPSEKPEKREHLPNFIAARVACPDCIENESWREASGGCEVCGPNRTVAFCQRHFTETTVDKQVVAESPLEAFVSWLINDLPLAYDTYAFSHFGGRFDMVLVFRELFKRGYNPDMLRKGNKIFSTTYPIEHPKVLILNENVEWTSVRDNPYKLSLLKVWVIPPRKCDVPVLPVKVNERLCFPLCMQCALDYPKGGVNFDYQCEHDDQQRGWVTTCTSIELDAALEEGYRVTKVFRLLKYKHGDDKLFRPYIAEFMSQKIEASGFDASIKGNTELEQQFITECAEKFGISIDKNNMKVNKGKRSLEKLCLNNLWGRFSLRNFGLAQTLITDDPSVLAEYLDNRSVDVTSIDELDADHILISYVQKEWVEEHECSNIVISLWTTSKARLLLLKAMQKVMRTPGCRLLYTDTDSLIFVHPIGMNPLQTGPHLGQFPDEYPNHEIVEYCSGGAKQVNLSF

SEQ ID NO: 125294 - protein, 67 aa, Heterodera glycines
MDKIDGTKTVVNKCILIRILKLKNLFDGNIFQNCPFGVLKHLWGAKIQRRIKVQTIGKLFPKDSVSP

SEQ ID NO: 125295 - protein, 203 aa, Heterodera glycines
MLIDAAAPPFMEEPVAATAEEDQFKSESSDESASSLFEEEESESDSDQEFSNKKSLTNKKRRSIDGGKHHPLKNWRQLINEYYLIKNAQNITDKKIAEQFGITRKTLCTWKKKHEAECVAQKQLAPFQNEHNVSKMEKLSTTITGKAPMMDKRRANKVKIGGGTSMAKKLKIGTSAGSSKAQKIEPQQHDKEKKSISILFRQF

SEQ ID NO: 125296 - protein, 563 aa, Heterodera glycines
MLWPIIFGLLFLTIELESVDRDKNRRDRVEPGSSEQTLPQNDIENMPFDDFVDDLFTLPQKHVENMPFDDFVEDLFQTNYAHAKPQIPIKPSAGKQRNDQPTTSRFNTVPNRAKQTQTRRIDQPTTHQTDHSMIKGKGIEIGRQISDQSTTSRFNTVPNRAKQTQTRRIDQPTTHQTDQSMIKGKGIEIGRQISDQSTTSRINTVPNRAKQTQTRRIDQPTTHQTDQSMIRGKGIEIGRQISDQPTTSRINTEPKQTKLTQITQNRPTDQLTTHRTDQSMIRGKGIVMGGQVSDLSTIAMKDNKQTERQIFEKPTSSRNNTEPKRNKQTQTRRIDQPTRTDQPLFRAKGIVMERQVSDRSMASDQSTITTKGIVMGKQTSDQSMISANERKQMERQISDQSTISTKGSDQSKISEIEPQPMMDNRKLKEKQTDPIQSSNLSRSKTEPMGQKQTKRQLNDQPKFNRTKSDLLGNDKQTEKQMSRSNSEPAKKTDEEKRQIVHQFIELKKKYLHLTDENYDLPFIEMEERIAGEMGLKRSTILSWKKEFEKNKKRNFLKPHFWKK

SEQ ID NO: 125297 - protein, 169 aa, Heterodera glycines
MSKELYPLYPSNSRVIDLRSKITPAPMSKTKQFFNELQRIAGSSPTKSSSSLHMKRAYESERWFSPRVDSDQADTSGPPRRSILTQSRLQLLSAQRGRETRKPYWRCPMPSARSIDTEITQPSLVDIIATPLARQGPIKPFRHREPETGRKTNSFAVDEDILTVEEKEK

SEQ ID NO: 125298 - protein, 123 aa, Heterodera glycines
MTTSFAILAQIKRDINETDSSSEWDENEALEDEEKEESQIIGAPSELLVMATHDSVQVSWLPPRDDNVLIRGYLVGRRFNNHTAIFFFQRSVGVLTYRTWKRRRLTRRLGILLFEGSNRTVNM

SEQ ID NO: 125299 - protein, 364 aa, Heterodera glycines
PLTTLRFWVVSVFGTSITSIALCSIVENLFFFYLFSTSRKHHRTTFNMYMMFISLFDIFISISYILIQSMNVLMDFLRSLTLFRIWHIYMVPFLTISHCAITSHIYMVPFLTISHCAITSASFLILAATIERYLAATIERYLLTANSKHIRLVQRNRRYIIAFAILMGIISKVTICLEFKISYLEDCANTMNEIEINFADFVFDTDYHLWRFYYRNFVTIFFPFFALLWRFYYRNFVTIFFPFFALLVRLIIIYYLIICFINNLYINNNFNLKLIFPQKKVTRAATITTILLVCSYLVSNIISVALTTWEHIDKPSLVGEYIQLYLISILYLISIDMSSLLTVCSCAFRPLIYLICQPALRKEV

SEQ ID NO: 125300 - protein, 36 aa, Heterodera glycines
YREAIPEGFGLPIYLRASVRRDCPETQKSIDSSVRL

SEQ ID NO: 125301 - protein, 50 aa, Heterodera glycines
LLFKYAKNFRLNFFFINWSEANQILREHQKDKEKHCYDANSSNSEFKIFY

SEQ ID NO: 125302 - protein, 87 aa, Heterodera glycines
MQQHVQKRDDKPGTELPGLARPMTDPKSAKKGQIRIWVKGFVVPPLEAWPLEDRPLKDPPLEDPPLEDWPLEDPPFADIPDIEGPTF

SEQ ID NO: 125303 - protein, 112 aa, Heterodera glycines
MSSPQKSSPQKSGPQKSGPQMSGPQKSGPQMSGPQKSNPQKSGPQKSGPQKSGPQMSGPQKSNPQKSGPQKSGPQMSGPQKSNPQKSGPQKSGPQMSGPQKSGPQMSGSRNF

SEQ ID NO: 125304 - protein, 329 aa, Heterodera glycines
RDIPCPCISGDEAKAELLDEWLDQHPGYELVSRDSGATDSEEEEEDVQTEEEEEEEELTDLDEEQRNRRIIEKARNEEDEYDNKNARAQMESYYATAHRVKEKVVKQHSTLGGGDDTLQLKPYQLKGLQWMVSLYNNNLNGILADEMGLGKTIQTVALITYLMEVKKVNGPYLIIVPLSTISNWKIELDKWSPHVVKIIYKGDKDQRKRLEPLVLVRKGAFNVLLTTYDYVLKERSLLGKIRWKYMIIDEGHRMKNHNCKLTLTLNAYFTAQHRLLLTGTPLQNKLPELWALLNFLLPSIFSSCDSFEQWPSVKMGERVNISFWEKVPI

SEQ ID NO: 125305 - protein, 101 aa, Heterodera glycines
MACTCTWIQEKYRPGSRMDLTPEQERELYNAYNRPNVPEDLTEAELSHEVHLGAFNQAMQMRHALSTTDLNAAPKDISITLPFTPEVIRNKTIFWFRAVIF

SEQ ID NO: 125306 - protein, 87 aa, Heterodera glycines
IRHAFVISIRQLRLAIEIGDPVLISRCFLYIALAFAQKGQFLPALKIVRQEWNRDTELRSAFLLNCTRGIWSSIKWLKMNRKVMMLK

SEQ ID NO: 125307 - protein, 550 aa, Heterodera glycines
MERNSEPLDEEAANGNGNQGDLPSDRQDGERANAAQQTKTKKGMDAQGLGTSQTGVTPAASKNLRSGAITVRSARDRIERAAETLSSRIAEARELMDSDFTRGEAPEHAARLMAMERGLGQVTRIFEGHFDKGIAEAGAAPEERQDFLYDFVAAPLPASTKYLQLREHPTPAELLQIAAEHLGDMQAMRQTFEDEEREQSISRSSRSVDTEDSHPSKELPRTMARRSMPEWETSFRDALARFQAGQVGQAPQRFEQANRVAPPVMPNMAALIQRRSNAPSVASVRVNNPVREWMARNRGGENEPPAQQQPQAQQPLQAEQQRFERLTLNDQGQAFPRASHHARIRKEEHPSRERLRTQGAAPSHHHHSETRADTLTTFETVRLQPPTFSGKPEDWTTFWAYFQRAVDDKPIPGFEKQLHLLRCLKEGSPARRAVEVYPPSDGNYPVVVQLLKERFGDTNDLQRAIRAQLLHLPPAKDNVASLTAMIDEFERGVCQLEQLGANVDDESFGPLLEAKLPVSILTELRIRESMMGAKWTVRESQKQSRHQSNA

SEQ ID NO: 125308 - protein, 216 aa, Heterodera glycines
DRQDGERANAAQQTKTKKGMDAQGLGTSQTGVTPAASKNLRSGAITVRSARDRIERAAETLSSRIAEARELMDSDFTRGEAPEHAARLMAMERGLGQVTRIFEGHFDKGIAEAGAAPEERQDFLYDFVAAPLPASTKYLQLREHPTPAELLQIAAEHLGDMQAMRQTFEDEEREQSISRSSRSVDTEDSHPSKELPRTMARRSMPEWETSFRDALA

SEQ ID NO: 125309 - protein, 18 aa, Heterodera glycines
PYRDRDLSFSKPGTGNWD

SEQ ID NO: 125310 - protein, 21 aa, Heterodera glycines
MTINCEKEEKQRIFMLKYYKM

SEQ ID NO: 125311 - protein, 64 aa, Heterodera glycines
MNKRLPNELIWEIVAAIPIMYLFGGVAKKPDRSCSKFREALCTEEVTVRRIVHTVRLHSIWIRK

SEQ ID NO: 125312 - protein, 315 aa, Heterodera glycines
MKFAKKMLMIPEAEYLALRSAMNSGDYLQNEKASLDAKISQNLQDPGISEDLKAKRHDWLYKERRTVKGILENRPQKVVIENHVPGPNVAPYLGLNTQSKPQETDEPRKIIIPRKRLEEQTPDPESDNDTINELTPEPQTTSTLKTPIPIKTIIHPTLLNGLFRDVLLYLAGKKDETPRGAKFLKDRLLKDPTVKDMVDKSKVMWGQKQKTYTIHKPIRKRFPRLKTIPSGFHTDWQCDLCIFDQLKKHNDGYKYLLVCIDVLSRMIFSAPAKSKKSEDVIEAFDRVFEKSKIIPMKIYSDEWAVNSQAKEKMKK

SEQ ID NO: 125313 - protein, 231 aa, Heterodera glycines
MNAHVQAQIGFNVGIFNANLGGSLRWNQAEAQSLARDARADRCHRQRDERNAAVQNARGRTDQNAAARRIDLRFAREEVQRYVVEAETIAEQARDRRRHAERRGKQRNELMISVVGSTICDGLKSEQLHKQRKRGVALTESLVRDSIELEERWEPFTPPPFTSFPTASPTRIAPFVVPTTDFGTDTVRPPPHVTPPSDLTSLFTSTVISPRTRPKPYTRHSATVPWETGIP

SEQ ID NO: 125314 - protein, 137 aa, Heterodera glycines
VVALPSSVVLFANAVTGTFLFVAVFALFAIIRFEHATAFASDAGQRERRTICTVVAGTDHRGHRSDGRLGFVVRLANGAPKSAGDEHPSGGIVGIGRQRLTARSVVVLDGGAHANSTGPRHSGRFPALLTIDDVEFY

SEQ ID NO: 125315 - protein, 443 aa, Heterodera glycines
MIGVSGALLTTLGTLNPDPQTLSQMCAAIASGSLIGSIVATRIKVTDLPQLVALFHSFVGIAATATCVSNYLAEFSHFLADPAGTVAVKTCLFLGAYIGGVTFTGSLMAYGKLQGLLGSAPTLLPARNMLNFALLSANVAALGFYLTTDSMAMGLSMLGTTSLLSSLMGVTLTMAIGGADMPVVITVLNSYSGWALCAEGLMLSNNLLTIVGALIGSSGAILSHIMCKAMNRSLFNVILGGVGTKSQKGGKAQEITGTAQFAEVDQVVDMIKDAKNIIIVPGYGLCAAQARYPIAELVKYLRERGANVRFAIHPVAGRMPGQLNVLLAEAGVPYDIVEEMDEINDNFPDTDLTLVIGANDTVCPIAFTDCVNRAAEEDPNSSIAGMPVLKVWHSKQVVVMKRTMGVGYAAVDNPIFFDHNTQMLLGDAKKVCDKLLAGVKSGT

SEQ ID NO: 125316 - protein, 114 aa, Heterodera glycines
MKGLPNLAMMGELFCGLLGGASFGKNVRSWREVQKAANLGQCFVAIDPECFAPTFVDYLQLFLDQTRGLKPRDPSKSVLVPGDPERMNSERSAKAGGVIYSAGQIRDLLSRRST

SEQ ID NO: 125317 - protein, 143 aa, Heterodera glycines
MDEDFAKVGAKIVNREEALRADVLLKGAIVRGFDTRPAVKDQVKSLGAEFLEVKIQESGEGVGGYAKEMSPAFIEAEMELFRQQCREVDIIISTAAIPGKKAPVLFTKVILFKMAVLFMPISGHDRPDEARLRFGGLSGRSRR

SEQ ID NO: 125318 - protein, 95 aa, Heterodera glycines
MTKFLVYEHRAPGHQQMLLKISSQGPTQRKPSDGCIAQLNSWHYAEQENDKKSEYSQQWCAKKEGMRKNRKLNGPIRMVEKGRSTANSKKNSLKI

SEQ ID NO: 125319 - protein, 435 aa, Heterodera glycines
EYVGEVPTVEPKFVLQKNKLEIEGPIIYAVNCLTKISQLYFDKYSAWNYKRKLNKLFTYHFEPKLLNEHRLNYNVKLVNEKPKVPINEMILQLAIDTAYGCQTNESVDGIFRQNFNEILGEMFKKAEQRAKREDNYGIFVTYDIIVRSIFDDYCLWTDDAIFTEFVKGQETNFEKFYRMLKEYYSNSVKSKEFYLQKYGAYFGLVYLMRKNWQCAKVGEDLKEKCQKYKKYLHILYEYFFRISAEAKNPNMTNQLPAVKPVFECSNKYWYSIIFIIQILNDFSICFWKNGEKECENAYGNYEMELQNEKETNHAIEEEEKNGQNLERKSKKQSTEIGKLRTEFDQKMEEIYENTKEKEAEEKAKLEKALAKVPNDLEIKKMEKKYEQILAAREIAAEEKSKLVKKMAKLAINRERKMMEDEFEEKFGAFNSSPFA

SEQ ID NO: 125320 - protein, 367 aa, Heterodera glycines
IERKRGHPAALHSDIGFNEPGQLNDGPLCKCSWASKQSGIRHDKFVGEQFVAKCQQNSSSIETLYHYVLVVDPSIETLYHYVLVVDPSPCAFSRRPTAIQYDGHSYEFEGFSIFFHRPLPRIPQTPINQWTNDFQLRLVKENMPESFTVDDLELFYEFLFEEVLELYDLNRFSTDKHSENLGCPFYHCMPRFARKLPDTDKHSENLGCPFYHCMPRFARKLPDDGKELLPMSDGKELLPMSAVLTHFTREFSPLVDDNMANYFCRDKTAFIEFALQKKGQICLNPSKRPMALRVDMIRVQFGPRPMALRVDMIRVQFGPDKPRLYPILVHFGVKPTAYAFMKRPQYQEALKKHIKFYQEALKKHIKF

SEQ ID NO: 125321 - protein, 415 aa, Heterodera glycines
RWHSYGILAYASNQIHFRLEFLGDAVVEFLTTIHLFFLFSDLDEGGLATFRSALVQNRHLAVQNRHLATLADRFELHKFMVYSHGPDLCHEADLRHAMANAFEALMAAMFLDSNLEECDRVFSNVLFKDDKLLRNIWVALPEHPLKRNNPFGDRHLIEKVQRNNPFGDRHLIEKVQCLQLLANFEESIGVRFKHIRLLAKAFTRRNVPYNYLTLGNGNNQRLEFLGDTVLQLLTTEYLYKHFLLTTEYLYKHFPLHQEGHLSLLRTCLVSNKTQSLVCDELDMTRFLVIPETLAQLRLKDKADLNEAFVGALYVNEAFVGALYVDRGLIYCRQFCRSCFFPRLKYFIMTQRWNDYFIMTQRWNDPKSQLQQCCLALRECGSGDPDIPEYKTIGVEGPTNTRIYRVAVYFRLTLEK

SEQ ID NO: 125322 - protein, 131 aa, Heterodera glycines
MTPDGPLVHKIKLAQLETLVDSLCANMVSQNEQLRDVSSIALKTVLNELPSGSITTQMFLCVRRVIPKLIETLKLEFLLKFRLGIWNCELDAGFVIIDPEKLQDQVFMTKFSNHPLILIKFKKYQFAISAQ

SEQ ID NO: 125323 - protein, 43 aa, Heterodera glycines
MNDYLGTITTNITKTLTDSAADGTMKIEILRFISLLLNTHEPE

SEQ ID NO: 125324 - protein, 124 aa, Heterodera glycines
MSSSRQNAHHARSGSGADAVRGNSRERGHRSALELPRGRLCWRHYEQLLQPEHDRNGAVIRRPMRPRLAYRQVMQHINRGNFDRFCGQHLTWDITDPRNDEEVAYQMCQTLLQERAKEDDKNWG

SEQ ID NO: 125325 - protein, 141 aa, Heterodera glycines
MQRPILMTAEQAKALEAERIEAQKRMAADRRVQDRLRQADQFLKQHLDQQKRLKQRNLVWGRHAAYERYINERLEKLKADVNALRKSARESINFTEINLFLPTRQAVEAYCADIIRYANHHAELDVQKAIKEHQQILERRK

SEQ ID NO: 125326 - protein, 29 aa, Heterodera glycines
MGDGIVGQVQAGQPSIWGKKEKEIFGKIK

SEQ ID NO: 125327 - protein, 77 aa, Heterodera glycines
MKHQKIMVKLNTLQAKMLKMEQDKQQTEMEKNASVDQIKKLNTEQQRLFQRISTLEKINQQQNVNKFMGRGEEKNFS

SEQ ID NO: 125328 - protein, 74 aa, Heterodera glycines
MEMELKETKNLHMITKLELENVALRERMKHQKIMVKLNTLQAKMLKMEQDKQQTEMEKNVVLQFPTKLLGCQFV

SEQ ID NO: 125329 - protein, 106 aa, Heterodera glycines
MHTRESSFSGSGRGDGELINRDSEALIDQLSQESVPEIRDREFDPGQGRIISKENGILFQKFPTFQFRVPSLLAKPLTRKSRCRTDQTRELIIEPGNSRIFCQAGD

SEQ ID NO: 125330 - protein, 191 aa, Heterodera glycines
MDEHEKDPDTYGNWQYEEKPCACHCSYLRAKKFYRVDCDFMDRTTKIVLDAFLSDTALSGLVEILIKKNWHFENGFALSIAVRSSTVPSFITDITHTALEVHYECILCLEIAYKTYEIVCEDETSDRWGRYMTTYGDEPIVGIRTTDFDGIQRVFDGMWKDYNLIVSNCKHWTDNMIRRLMSVKAEIPINK

SEQ ID NO: 125331 - protein, 129 aa, Heterodera glycines
MQVKLIFYVFYATVLDYSDKWFNLFDDVSEANQILNSIPKDELQKLNSEQKWMKLFEADLPHLYKLVSIVLSVPVSNAFVECFRFAAHNGLINSSTSQSPGLNSPAFQWPGLNPPAFQSTGTQLSGNPI

SEQ ID NO: 125332 - protein, 26 aa, Heterodera glycines
FLFFLCTQPIVRRFRKRERFFGADLG

SEQ ID NO: 125333 - protein, 64 aa, Heterodera glycines
MSDNPKEAEKMEKAITARPPLLITCQGIPLALLQFMRPIVFYASNRLLCVQSLFMRPIKVLCVQ

SEQ ID NO: 125334 - protein, 151 aa, Heterodera glycines
MLVKRLSQQKRRSSACDSLVAKANMAKRDAFRHFGSHVQLCVMIKITTFSLTFNADYCGALTEKVLKNLQTNKCEEREKRTEVLEEFNREHFGNMLTSLLIDFSEMNALKQLLKHPGAKTRLLRLVGLAELFEKFWEKLGLTGEEFTDSGK

SEQ ID NO: 125335 - protein, 234 aa, Heterodera glycines
MHVATHTVERRYEEEIAEIDGRYDEEFAQLDRRYDDQSAEIDRRYDEAIAEIDRLYDEEVAEIDRRYEEKSAPIERRYGDETAVIERRYREESAEISRRYNEEKAVIDRRYNEQMAKVERQGPNNYTIPFSTRQPNPVASVPLQSLAPNYATNYCQQPLGLHFAARPPTSASSALSPNYGTNYCQQPLGLHFAARPPTSASSALSPNYGTNYGQHLMGHLPGHYHLISSVIIPK

SEQ ID NO: 125336 - protein, 132 aa, Heterodera glycines
MTLGSAYAVQPVLMLNASKWQWPHSVRRMQRLLTKATTATNDDKTATETTTTTAPQQQSQDGAATTAATAQPSVTNTDSRMMFTIKKTKCTNGTHAFRRSRFGASSFSTIAFFFDIQIQHCWYHSKALNMLY

SEQ ID NO: 125337 - protein, 60 aa, Heterodera glycines
MTDCLQIFNKSAKSKDPPKNRKLVIKQLVNLAQTFSKIIYLFRMLNLVCLIQNYLKLNNS

SEQ ID NO: 125338 - protein, 139 aa, Heterodera glycines
MFPTFLLLLLPLFALLLSECRGIELVLRNNSSLNQLNISLPHAPSTKISKKILVKFSEESFRPIFAFAGTSLDRPYLYVDESDNIKSVNHKAMENAIKNDLAVQKKNANIKHAIEDTTYDIQQINLKQHQIKRQVDCKF

SEQ ID NO: 125339 - protein, 41 aa, Heterodera glycines
MNTSFEKCKYIVIVQKLAGAKTTWPAFFVRKFCVLSPLFAL

SEQ ID NO: 125340 - protein, 124 aa, Heterodera glycines
MRATNVLLAVVPFVYVLFNFMYNLKNFLKFFQTNKSQNIFLEHHYWFVVGSYFLFCANFALNFILYSMISPVFRKEFCRKWLRKRATIRPRSTTMTTKDVQTESAKKSLQMKPIETKTAAETII

SEQ ID NO: 125341 - protein, 113 aa, Heterodera glycines
MDGKEFMSQFNLIWRNPWSESNKVHLIRKKIGKNASSYCVNNLGIIFDEQMKKLKNGTPISLEPKCNRRLHLQVFWQLRWTLEKMPEFTSISAQKKNAIAFLDGCIKVLRYTE

SEQ ID NO: 125342 - protein, 29 aa, Heterodera glycines
MTLTKNVEIVTRTVGNGQTKANANGTFFG

SEQ ID NO: 125343 - protein, 45 aa, Heterodera glycines
MCRRGGRGKRQISMLLEGAAGSPPGGHSEDQKGQKSMPESNGMPT

SEQ ID NO: 125344 - protein, 99 aa, Heterodera glycines
MPIQCHHRWNTLMEQQQQRLHPNDENANKQLNATPLCQSRRAKSPLVTGLGTIGKRHHQFGNGMPNNSNSSQENNANSPCQLSTDSEVLNIKLKNEVMN

SEQ ID NO: 125345 - protein, 76 aa, Heterodera glycines
IAKMEINYEDECPYNLGFARAMFDLAAAAAGHAGNGTEWQNMKSKFVQESQAIKAIGQDLNIKVTDVHFGATSKGK

SEQ ID NO: 125346 - protein, 264 aa, Heterodera glycines
KKFGKYSSPSKFSKASSSKSGSSVSRGQLKEETRTLDEIYMAALKEGDKFILYAGGDFPGDIDGIKGAFEARLPMEVIVDYSKFHGPRIDIQLENNSLVPDVVQLQTLHDFPRWKKRGMLMQYKPKGWNAIYEGYRDRDGYFTGIMIAVFSNNVNTQVSNESDWLRNATDCLKPIFANGRIIQTYPNDDDAVLFWFKQVVDKYGWDYDKLAARKPVMVRGTQVVDKYGWDYDKLAARKPVMVRGTGVVAQISVGHVTKWFSVLI

SEQ ID NO: 125347 - protein, 56 aa, Heterodera glycines
MRGSVQTFVCLLDGEFTLCKAGGGPPTFQAEFADFLRQKQFGGHGIGQIGTGRTGR

SEQ ID NO: 125348 - protein, 179 aa, Heterodera glycines
MGIVLTVSSQEEADDRQILEANLRADEWQYAGDANYSLSDIVLQPYDAFTKIHTVKLQHILYNERNGIRSGQISHLVEGYLTKYGLPLEHAAHNQCTVLAKFGSLNERTIASFTDALENVLFHYPKKRETAPTYKYDEVQANYSLSEQRTEEKAEEAKRGAAEEFEADFSKMDAENPAQ

SEQ ID NO: 125349 - protein, 27 aa, Heterodera glycines
MPPHFCSHQNGRTVWARNDRSNGHGDA

SEQ ID NO: 125350 - protein, 283 aa, Heterodera glycines
ANYSLSEQRTEEKAEEAKRGAAEEFEADFSKLDAENPAKRWAAAFEQATLMPPSDSEVNLAHKMNSDGSEDPFDISAALEGTKRATGGEPFAPMPTLESSPSFDPFEVIPVEELIAKAREKAELERAKREAEHEGEFVAENRIARPNDHLSASHLSSPTPEGGSPVSSVARPVGFYDDFKGAQANYSLSEQRTEEKAEEAKRGAAEEFEADFSKLDAENPAKRWAAAFEQATLMPPSDSEVNLAHKMNSDGSEDPFDISAALEGTKRTGGEPFAPMPTVDEND

SEQ ID NO: 125351 - protein, 133 aa, Heterodera glycines
LFVCLFTDHFRCPQIQANYSLSDIVLQPYDAFTKIHTVKLQHILYNERNGIRSGQISHLVEGYLTKYGLPLEHAAHNQCTVLAKFGSLNERTIASFTDALENVLFHYPKKRTAPTYKYDEVQINCYDECEASV

SEQ ID NO: 125352 - protein, 83 aa, Heterodera glycines
SSRIKVILRPDVPPWHTSATALAMCEQLSTHIGPDAGAFGLHRKRRISSASRHRGARILQSRLSGISIASHHWSIDQTHEPNT

SEQ ID NO: 125353 - protein, 147 aa, Heterodera glycines
METKDEAIAFTEKYEHFIVIECKGSSHNVDKFCDFVGKRLRYELLEFVENPLAIWVDFCHVRPKMIGPTECPSADLEKNGNSIGLRHWLVGIQMAAEQKANSAFKRKLRDNLRKKLDVKIKEDFEKGSFHNVQLKSEFAEKENLRKW

SEQ ID NO: 125354 - protein, 153 aa, Heterodera glycines
DSTDVRREKLNKAITVHQFLRDIDEEESWIKKKKEFQNFIGRVEEEEAWLNEKQQILSSPNVGENMAAVQGLLKKHDTFEVDLQMHQQRIDELQRQGEQLINSGNHHAKNIGTRTEQLLKHLILIKELAVQRLQKLRDNNAYMQDSTDVRREN

SEQ ID NO: 125355 - protein, 99 aa, Heterodera glycines
DLRKTEEELNLLRKQYNERGTLLKEEREAKAKARRETDRLRELLLFNGGDEEAKDPLDKLEEFEGGNVGEITDQTKAEESDQAEEGKAEQRGQVDPFTE

SEQ ID NO: 125356 - protein, 259 aa, Heterodera glycines
MNDVLRGQNDALNREREKLKAELDELNAFLDDIEAETELKSMSKTKERGRKNGQKGRKTKGGKGKAKGGKGNERRQRGETSAKERGQQQKNSANGGQFERMGRTAAESAGTGQTLCGHLQGKRRKERERIKRKCEGTIGKSGQNIGRISPIGGTTPNRTHRSTERKKRSGGTEEERRSGNGRGDEQKRRKEADGRMGSGRSGGAVGEADEGIGEAAEEDGGGAGGDGEGADEAQRDHQSQGRERETAQRGRGHEGCESA

SEQ ID NO: 125357 - protein, 290 aa, Heterodera glycines
WLNDWISRVDGKAIYTTDGKVIYCQACQQQVKASLFIYKQHDYNNINNEKHFQVPSKMFYQLKQHNETAKHKANVELFMRPCGSKKQQFLTTQTTKKLDEFSMDLCTALTSANIPFFKLENQGFRADDLLLLVTDAARYMVKAAQGLKIFYPNLIHLTCLCHGLHRVCEEIRGLFPNVDKLIASTKKTSSKAPSRLAKFRERCDLPLPPRPIITRWGTWLNAADYYCQNLNQIGAIIRDFNPSDSDAIRQSQIAFDCSGIRGDLAFIKSHFDILPGAIEKLESRNLTLIE

SEQ ID NO: 125358 - protein, 120 aa, Heterodera glycines
MAIPPLKAFFGQKVNLTGQLARTVPRHLKFSKDLQILTFVPSETVDCTVVQQYGNATFTVCECGVHTPGTVREKLGKSKGTSKKEGIDGEGIWGPTFAEGPENRATLRKPSQRRTDRDAC

SEQ ID NO: 125359 - protein, 66 aa, Heterodera glycines
MPGGRGGQGMCDLLTPLCANEGIYRLAYIFRQNGGSFSRIDLLERKYLDTYGTRLSTSEPSKSNKK

SEQ ID NO: 125360 - protein, 28 aa, Heterodera glycines
MANVLGVSIFILVIFYHYIVANQKKQSP

SEQ ID NO: 125361 - protein, 94 aa, Heterodera glycines
KPEMFPKKIRRTKLSLSFSSCLSFNKERRTYLNEEFNVSKCFVREGRNLCKVKPRIKNKMVKVGFSFRVFTPFQFSWEAKSPCSNCRSAIRTIR

SEQ ID NO: 125362 - protein, 57 aa, Heterodera glycines
MGIVARRLLKNRAIQKQLDRRQKNLKTLRRQHAAAGRPPIVVHSAVLGLPGPRPYIK

SEQ ID NO: 125363 - protein, 224 aa, Heterodera glycines
MVKIKIKWGTKELNVDANPEEPPLLLKAQLFGLTNVPPERQKLIVKGKTISDEAWNGIKIKDGTVIMLIGSTESMLIKAENAESSGHANSTETEPRQQFPIGLRNLGNTCYMNSSLQCLKIVPEFETALKQYNPNQSVDGSNQRIKLFTNSMKKLYNEMNVLAKDQTADSPEVIPLFLVHVLRQTFPQFDTQDERGNHQQQDANECFCEMLRMISDETVFTPET

SEQ ID NO: 125364 - protein, 231 aa, Heterodera glycines
MHSVAFSSLSTEEARLNFEQIFHENGFVRIDGVFSTEELAELRDAVKLIVEGFDPKDHPRTTFNTSDEEKHVSDSYFLESVDKIRFFYEEKAVDEQSGKLKVPKEMALNKIGHENCQSDRRCSASRDAKHVHLQSPLEFRPFQRMALIQKFKQPKIGGSTNEHVDSTFLHTENGDNLLDANYLSATKQYKFTRTETKHNGKKASSDGPLLKFVGNRPSFEGCNFIALECQP

SEQ ID NO: 125365 - protein, 88 aa, Heterodera glycines
MNEVTNEKLTLKLSKELGYNCLYNWLLQRCPIGETAPAIKWEDSVNPSANLNNVTFDLCSFDKSIGPLSPPTKEEKEEADQSNGNVVC

SEQ ID NO: 125366 - protein, 92 aa, Heterodera glycines
STYDKVLALLESKEGGNEERKQRAEELRKRTTELLAKIKRSREEKISLIERADSLDVELNSFHTSTEELSDQIDQVTSEIDRRVEFHATCDA

SEQ ID NO: 125367 - protein, 214 aa, Heterodera glycines
TDSIYYVAKNGRRLVPEGEGLGQMKREHTDRRIFEFISGGPKNYGFRHCDRVTRADEKAELKVRSFRLSYATNQLLNFESMKQLVLEHYNFDGEIDPALYMNDECYVCPGSSRSIRVTFPQIGRSPCSDLYTYQAHKDYRPHYVKGRVRPGMETLPFGYRNGFTRANTQQQQQQPQINEMHGRNVNDGDDAAFRDLPGCSHWQPTHYRNRYNYQ

SEQ ID NO: 125368 - protein, 184 aa, Heterodera glycines
MEEEEDSHIVRAEALSEREGGVAVAAANKGQTQKTSDDNNDDHDGAHQQVVVMARGGEDARAKAEASGGPRSVVETRISDNQRGGERLALGSAIIHRQGRRRGGGGGGGGRNRNRQRGKEEQGRGRRPIANDKFHPRPPQYMELNNRQKGNEQVTVNNNVHTMSPVSYPYLLRKQVGRECFCTC

SEQ ID NO: 125369 - protein, 374 aa, Heterodera glycines
QKRWQGNTNDKIISIRERIRERIEKVKRLLDEGVELEQFEAKLSEMCEWVEEKEKRVKAQTAEAGGASLEQKLDRLKRQQALQREMDANGTRIDKMRERLERLRGRHGTETAVSRADEFLLRWSKLSEAMRKLHAALDEARDLLELEQLADRLCTFVRAKEGMVGAEDLGKDLEHCQSLSSRLDRLDESQGIDEGTLAEANRLSSRLDRLDESQGIDEGTLAEANRLGGRLIGRKSAESDYVRKRLAEVNEGWQRLAGRLSIYRTLLNAALAVHRFNHNVEETNERIGEHRFNHNVEETNERIGEKAAQLGGTEMGKDMETVERLIRAQDAVERDMSAIHRKLNEHDEWAQQLLDGELPLRDSVLDVLFPLFIL

SEQ ID NO: 125370 - protein, 224 aa, Heterodera glycines
MAKEAARGAGSVLAVRSFLADGAELEEWMEQQKQTTNSEECGNDLEQCEQLRTKFEEFRQSLRMGDERMAKVEEAEGELISHVDDEKLAQKVAIMSDRLRTTWAQIGQLTERRGRKLKEAERTHRLRREAEVLAERIREKTAEIPTEVGKDAKQAYALMLANEVLENEVAQLHEQLQVGGTAVPDGFGLIGSHFKLLLERFESVESPNPLVDFLPGTNGFVRLP

SEQ ID NO: 125371 - protein, 138 aa, Heterodera glycines
LQNEIVPWRKAFGELRQRGEQLAKRGHESVAERMERVENQAKALEGMAKEAARGAGSVLAVRSFLADGAELEEWMEQQKQTTNSEECGNDLEQCEQLRTKFEEFRQSLRMGDERMAKVEEAEGELISHVDDEKLAQKV

SEQ ID NO: 125372 - protein, 219 aa, Heterodera glycines
QISLFRKSRHPFADRKRRFFLPSFSFVGGPGRGKGTQRERIVEKFLLHISSSRRFRSRARSCIGSVLGKQLEGNSDAGGLVPFDTVLAIVKGAMLKKRESSNGFLIDGYPREVTQGERFEQEIQSPVLVIYFEAIQSPVLVIYFEAGDETLVKRLMGRGRSDDNVETIKNRLHTFVESTKPVVDHYGKQGKLVKVSQSATTNKCWICWIWNRSVRKCRA

SEQ ID NO: 125373 - protein, 267 aa, Heterodera glycines
MGKIGGKWEKFGEEKLAKSDAINLLLEKLHLLDDELNELTFGGANERESAAVKAMEMILKLETEKEGQFEFGRGKMGKKTDKTTQQLHLQTIGTLKAKELLKAELNGNEKQWKGQNGKTMSTQKKMKQLLLSKEKAEKKFLTKFINGMKAMITQQKLDEVEGFRNMNIGDNNKVDAGKEPAADKATKKGKAQKAGTKPAAATNEPAAAKGTKNGKAPKTKAKQEVATNEPAAANEWNDQLMGMSVEKFNEELAVLLPKDRTLLWKML

SEQ ID NO: 125374 - protein, 210 aa, Heterodera glycines
ACNGTRSSRSRFQQVREKGANNRQSRRSSTEAARLARPHKHTHSSIPTLPQQGGQRRAGRSSSSFKSAIGTHALSKAEKFNLLRNLLGGEAREVVAGFRLEDNNYDTALQLLKDTYGAPDEHIRALHFELANLKPCKNLCDTKEFLLQLERLTRELNNTGEDIEGPPTFLMLEKKLTPGFLRTILTKKGEDPARWNTTKFRDVLNEAVRK

SEQ ID NO: 125375 - protein, 574 aa, Heterodera glycines
MAAPIQQKLSAALKVLSRTRTAAELNIQADQAASNLENAFNFEAQLEKVQKEAKTMDIFLDDVRESLTAWADLLRKLPATERDPAEADFNKFEKKERTTDKVDEAALKLRDLRDLISTLTVQSRLYRSKADKEERDAQAAHANAMQHTSQQQPNKTPSFTPPFYQFQPIQLDKFFGNKRKWPEFYESFKSAIGTHALSKAEKFNLLRNLLGGEAREVVAGFRLEDNNYDTALQLLKDTYGAPDEHIRALHFELANLKPCKNLCDTKEFLLQLERLTRELNNTGEDIEGPPTFLMLEKKLTPGFLRTILTKKGEDPARWNTTKFRDVLNEAVRKESQIQEVMGEYGHSPQQRPQPQRPNFSASKFRDRAPIPQQRERTFITSAVDDNHKRLINRQPQHRPQQQRPRAPQPQQRNCALSTIKGNFQLNVPMRPTINDNFQLNVPMRSTIKGNFQLNMPMRHSINASLQVHASSVTTITGMKNAGNTAQFNSEEKCCAQRHYASNASKAIIKQAIAHNRKDASNANNLIQRHYVMQTKNHRTKSQQQCWGKHNKMCQSQLKTEATNQRHRHRKCAMP

SEQ ID NO: 125376 - protein, 264 aa, Heterodera glycines
MPPMEAPTFTAPLYQFSQSSWTKFFGQNLKWPEFYESFKSAIGSQLISKAQKLNLLRNLLGGEARELIAGFRLEDQNYETVLQLLKDTYGAPEEHIRALHFELANLKTCRSLRDTKDFLLQLERLTRELNNAGEDIEGPQVFLMLEKKLTPAFLRNILNKKGEDPANWTTTKFRDVLNEAVRKEVQIQEVMGRNCGSPNRGDQGQLKRLTTCQSGMAQHKQGQGIRLHPASSAMALTGMRNARNSVPFSNGQPLFEKKACASSA

SEQ ID NO: 125377 - protein, 500 aa, Heterodera glycines
MEDTKVLGIKWTPRYDQLVFSMPHFDSPITKRNILSHIAKVYDPLGLISPALLPAKHFLQIVQNANYKWDDPLEEDLKLMWIKLMHAWDGFGFNSLVEFPRHIIAGISEEFHCYCDASKSGLGNALYQVAETHYNKRESNLIFGKSHVKPLKVAYHNSTIPKLKLQALTLGVMATNSSSIEPLRCQGRLENADLPNESKHPTFLPAEAWTTKLIVIHYDRALKHCGPRTLLSKLRENYWITKGRQTVQHILNSNKFGCLKCRLVRLKPYAYPDAPDLPEDYSAEAFLRAFRRFAARRGIPSLMMSDQGTNFTAGAKTIQENWTVQLFPNEISGQLAHQGVTWLFNTAHAPWRGGAWERLVGITKNALRRSIGRNLLTWEEFCTLTVEIETIVNYRPLIFESDREPSPVIRPIDFLIPYWPAETNFQVIAVDPEDPEYTEHTCRRWRLNAWKLGDSPEDRSEDSPEDRSEDRLEDRPEERNEEVLWRTEEDSRMFPCDLCD

SEQ ID NO: 125378 - protein, 254 aa, Heterodera glycines
MSNLIRMVLGPQVAILRQRVNTARTHVDREEDEEVNNAALMEAKVLLLKVLQRVEAELAKWENVISGLQGQEKQTEQERLETFINEREVANLLADAHATMDEILVALAGESEYDGSENGDNAVRENAQRQRQSPAREERQLPSRVQRQSPVREVLHQPRIRLPELRMPIFSGDPLEWPTFWQSFENAVHNQAHLQPIDKMNYLMGCLKGKASRAVIGYRGGQNYENMVETLRRLFGNPQVIVEALQAELFNLPN

SEQ ID NO: 125379 - protein, 75 aa, Heterodera glycines
LRQIFACGTACVVTPVGRILYIRQGNGRAGRMEDMQIPMPNSDEEPLNIMQRLYKAITDIYYGRQKREEWTRIVV

SEQ ID NO: 125380 - protein, 136 aa, Heterodera glycines
MKIWCLFRHLMTPYTIVRDPSTLFPAEKQINYSAGQKRTVFNLTFVKCVAEIAYFRVINENDQSKDAFLEFKVVPGINALNEFLGFLHFDQSIGQQISHKFKSEFFSTESPLAESVVNQVMQLAFSFAARVILCIM

SEQ ID NO: 125381 - protein, 73 aa, Heterodera glycines
MCMALPTKVLNTKFGTLSPLSASQPCKHPFVFVRVLCVCIVLCAVHSLFLLPALFTFLDAICKLFRQFMCQRR

SEQ ID NO: 125382 - protein, 153 aa, Heterodera glycines
MIKITKAGTNESHEYFFTEKQLLLYNYRTSYGHNVPIVLGFGIEPSVYKTFQVRYENARIARENYRYVVEYIITVKLKMDNYPQHLVSENFIRPLKSTFILISSIIITAHFVWPKMFSSRTMHSKLIWTPHITEVHMVELDQCQDQLPMSKVA

SEQ ID NO: 125383 - protein, 44 aa, Heterodera glycines
LARHNSALRLISQKIKTFFLRTHGCSIHPPNFIWKSHGHLGTFL

SEQ ID NO: 125384 - protein, 119 aa, Heterodera glycines
MMRERTFTPKSDTWAYGVLCWEIFSNAQQPYQFMSNNDVAPMVLRGTRLRFPNVTPPPFAEFISANVWTADDVRRYSMRDVLAWIEQHIDELIDDTTASRHDTTTTRNRGSRQGSRSGP

SEQ ID NO: 125385 - protein, 119 aa, Heterodera glycines
MVTKVFLLFPGETSVTFLLEKFFLIYSFWVWPMPLQLKEINYAKEGAFLNWSPEREWFERKQSEVGHAQIGMEMPIISPIIPHKNMANKIQPSVAKNILNEFLNEFKQFMAEENLSKNS

SEQ ID NO: 125386 - protein, 177 aa, Heterodera glycines
MVVLSVFCAELLNCRVSQLCDRLNHPEDRTYILNSLKGRKVTTTYKDRNGMTKTFFIGGLSEKGAALTMAYGCLSRPFNINIAAHFYARHRIKLHHPYIVCIIERFSKGKEDRLYPMELLELTEDNPIWQQWSGPLFAERDPTPPRTSGRFENDVDDDETLKDVGRNQCTQSPDLFW

SEQ ID NO: 125387 - protein, 443 aa, Heterodera glycines
MANKFLLVPQEIYRGLTSASDTGVINLDAVRHDLDRARGERTNPTTKNVRYNQQLRRYLQMRRELADRPTKVELTKGLSVLLKQDGGVDDDDGEVVNTQPRPPAPPPPPPPPPPPHQYHRRHPSPPDQQSSSSDDSHPPHPPRPPRPQRTKKNHHSSIKYGRLNQWKQRRRDLQQQPVVRDLLAEAAAAPLPESDDDDEQMLEGGYLLPTPSQNYGDMPILPDYADEIEEMDTAQQRLASRRKIKGEGIDKNKKYKIYYSPPPSPTLPPVYKRPDHPPPPPRSIPKVELKRGPQPTKLKKSASPPPPPLPPHRAKREPKIELAPPPPPRNVSTRELKIELAPPPPRHFTKREPKIEVDPRPSTSKQAGYFPPPKIKTEPKHELQPTKRPVPYRIPKKEPKIEEKPLQQQQQQQQQPPPPPAVVVERKCPMFLHLGGGPNAHTP

SEQ ID NO: 125388 - protein, 277 aa, Heterodera glycines
SDEKIIFILVKNSSSSDQPLLSPISSALDSIRSAVRKFQEFAGLPTTGDLDNQTKQKMAKPRCGIQDVQMLTSGSQIFKWRKRRVTFQLMQSTNDIPERMQKQAIQMAFDTWSKIVPLDQAIQMAFDTWSKIVPLDFSEASRYDTPDVKVLFARRNHGDPWPFDGRGGVLAHATFPQDGKLHFDDDENWVFMDGRKIGNHRFTHRFTDLYWVALHEIGHVLGLSHSNIETAIMAPFYQDLVDWRGNYKRPDLVDWRGNYKRPELTQDDVRAAQQIYG

SEQ ID NO: 125389 - protein, 32 aa, Heterodera glycines
MADVLLLTYITKLCSAIFISAHNLKIIYKPFL

SEQ ID NO: 125390 - protein, 28 aa, Heterodera glycines
MNAVRLRVWKILEILLSNICAITLNVYA

SEQ ID NO: 125391 - protein, 36 aa, Heterodera glycines
MANNSHTLIQPPLALLAMRLICGFFALMKCGIVPMI

SEQ ID NO: 125392 - protein, 31 aa, Heterodera glycines
MATAGKAYDLTMKICFMHRPTIQKIMQISSA

SEQ ID NO: 125393 - protein, 57 aa, Heterodera glycines
RDEQPMSERKIVVKWSTAALAESERGHKEFAQHRIFPHFGRHSSPLHFFLRFNYPSL

SEQ ID NO: 125394 - protein, 24 aa, Heterodera glycines
RTLSTAVRQRSSKIYSMPQILWAG

SEQ ID NO: 125395 - protein, 130 aa, Heterodera glycines
MKKKGQQQENTVLENTVLGKSKIPSDGKKAAKASGKEVKVMKEKGQQQENTVLGKQNATAKLQCKRDCVVSMIKHGWLNKDNQNDIKTQLVRLQLFKSKAAIPSMHDYESEFGDKRAQSTALANVSVACC

SEQ ID NO: 125396 - protein, 103 aa, Heterodera glycines
MYTEPTKDMTLARTPLFKTPSDGTDDQEDDKRDDNSLSGCENSTDSDAENTDEENASLEYNAAPSPERSNKKEVVAAAVTKAVTFSDVVYENVKPVAKPRGKK

SEQ ID NO: 125397 - protein, 64 aa, Heterodera glycines
MSGRKCPILAWAAKSNKKVLETTKNNQLYVERIRKVRQQLQERRPLFQWTLKDFNRCAFAELLS

SEQ ID NO: 125398 - protein, 25 aa, Heterodera glycines
VSARNALADAFRGLLPASVAAAVAP

SEQ ID NO: 125399 - protein, 113 aa, Heterodera glycines
MKTLCKIQMANVWRKNGPNSTGKSIPKWLDILGFIGEMRHVQIQIDAFVKNLLIGTEKCDDGMVNVTERQSFITSQIHHNLSVQYFTIIFHCLKLNKQPAGQMGIVMSPDLGL

SEQ ID NO: 125400 - protein, 72 aa, Heterodera glycines
MQAPQPLPNLHQIFQAVDRDRSGQISADELQRALSNGTWQPFNPETCRMMISMFYYNNDGGISFARVQSLWN

SEQ ID NO: 125401 - protein, 34 aa, Heterodera glycines
HINFDDFIQLCVVLQTLTAAFREKDTDLDGWIRI

SEQ ID NO: 125402 - protein, 75 aa, Heterodera glycines
ADPALYWEVNSQKWPMIGAVVRKFLSPPATSSESERLFSTAGLISDDLRKSLQAENLAKLLFLHHNLLLTGFSIE

SEQ ID NO: 125403 - protein, 85 aa, Heterodera glycines
MATKKERRQFTNVMIRARPTGPGHFWQPGFCPGNTGYSPRLSTKKLGFLHKIYFSWIFVKEIQAQAFFKMSSSREDNVEIRSPKI

SEQ ID NO: 125404 - protein, 96 aa, Heterodera glycines
MFLIWIWLLLRKAFFEAFCQIADKSAVVPARFVTFSLSFHSFHAGSKRAYRWMTEHRENGGATAETEATTEANGTAAKNKVIRPEAEENGKQVPKM

SEQ ID NO: 125405 - protein, 46 aa, Heterodera glycines
MNEKRNRYFLPGNVKGFKDFFALSLSERQLATNEIVFLGVPITIKG

SEQ ID NO: 125406 - protein, 134 aa, Heterodera glycines
TFNFFSRIRFNRSFDVLRSRVRSLGLLRADDAFFVLKFVQCVALIAFAVFLQSRDFFLASAFCMGIAWQQLGWMIHEYGHQQHFGSWWWNDVCGYVCGNLMQGFSLGGWKVSRKEKHFSDFIYCDSDLSLAPSL

SEQ ID NO: 125407 - protein, 37 aa, Heterodera glycines
MIGLTIQDPVVIAGVIISIGFSVDIPAHISAFYGHII

SEQ ID NO: 125408 - protein, 19 aa, Heterodera glycines
MTQMLRKHAGSKCCFLSEI

SEQ ID NO: 125409 - protein, 221 aa, Heterodera glycines
MNSLLNSLSEVLEDTGPAILISALTNITSDLVGMWTGSPEITLLCIGNIASISFDFFYQITLFTAVLIICARLEFKAELKSIEQNHNSNSTSATGTISSTDSNSDEHNDTSSRAKFTSNFERIANAYIKFVSNIFASIGIVIVSAVFFVICFRAVLGFEINLTMVKLFPPDSPLLEVDNYREDKLMPFYTMAQIFVNNPGDLSNATRRHKLHQFIDEMEHL

SEQ ID NO: 125410 - protein, 87 aa, Heterodera glycines
MFLTQNKYSNEQKSQKLKQYFEIKELKPTISDGIIAEKLGIGFSTIKNGFWNIDFCEEVYAIRNVFVNVKINFCFILFFFCDQMANI

SEQ ID NO: 125411 - protein, 181 aa, Heterodera glycines
MAIHPGDPSIKQDLAYLEVQHTPISPLDTFLDVVRLTPLGIVSLIAGNLLELDDLSDTAAVLLLYVVTVLTAFTAHTMVTMPLLYFVFTRRNPFKVVHGMLQALVTAFGTASGGAALPVSMRCMEEHLGVDRRITRFVLPLGSTINMDGNALYEAVAVIFIAQLNNVTLTLTEVITVRRVK

SEQ ID NO: 125412 - protein, 36 aa, Heterodera glycines
MHTCASSFSEQKRHKKSDQTIKEVSRSRRTDSLTRP

SEQ ID NO: 125413 - protein, 29 aa, Heterodera glycines
FFLFLAASIFYNNLSAWSDVRQTEKIIKI

SEQ ID NO: 125414 - protein, 54 aa, Heterodera glycines
MMSASFAEIGENAGKLWSIPQRFEKKFLGNHLEINLFMLITEPIGISVRFLSCA

SEQ ID NO: 125415 - protein, 95 aa, Heterodera glycines; identical to SEQ ID NO: 124528

SEQ ID NO: 125416 - protein, 68 aa, Heterodera glycines
AVLVRFITAPNLLASQQSLLNLPDRTGAHDSTVPSTPPKAKRYNQNIKKNFLKNFFSIFLFDTKASEC

SEQ ID NO: 125417 - protein, 19 aa, Heterodera glycines
MLPEWKISTQIIATYNARK

SEQ ID NO: 125418 - protein, 125 aa, Heterodera glycines
QINAAPPPNVTALPANAKSSIRRPCSKRAPKATSSTRRSSTRQVNLAECRVVVKMPKLVDQSELTISPLIHSSSVLRESHSNFTSTRNAVRSGAKLISKYGGRETTDKVGFGDQMKFSKGAQPCK

SEQ ID NO: 125419 - protein, 45 aa, Heterodera glycines
MCQLLVLLVLILLDMLLLLLLLLDMLLLLLINNGCAVDDNLHVRS

SEQ ID NO: 125420 - protein, 144 aa, Heterodera glycines
MQWIKFNCTLCPIGLHCFYPRKYAKPVLCAHPSVNNITDFLSTGQLEEAATTATTTTPFPTTADVSAAAECAPPPAQLTAWIAVCTALVALLVIAEAAGQRRADGAIEEGEEPVYDEVPLDSDIVVEMRDGENGEEEEEDDSDF

SEQ ID NO: 125421 - protein, 127 aa, Heterodera glycines
MTTAKHQRTPDDEEEKNLRRKAKVALDLVEAGLAADAMMQDGTRWKKAKTAINVLANLLLAESLTDVSPTFDQQQQQQQQQLSSKEEEKREECTNNSSAAATTESAPDGDVMDDFVNSIQAATSNMQ

SEQ ID NO: 125422 - protein, 32 aa, Heterodera glycines
YTFETIGQDKKRMKLMPHETRNWLCFVENILT

SEQ ID NO: 125423 - protein, 148 aa, Heterodera glycines
NELFTPVIQLPLECTNAIDTDALLDRINPEKDVDGLNHVNTGKLARGELGDGILPCTALACLKLVQNATGQEDFAKGKHVVVVGRSRIVGGPTAALFMRHDATVTICHSRTERLAEHCREADILIVAVGQRGMVRGDWIKPGAVVIDC

SEQ ID NO: 125424 - protein, 116 aa, Heterodera glycines
MAIHSSSGQCAKGVQMLVEVVAFANASSPVNFIVAVWISAPFAFPAQFDQTNEVTREQLTFKRIGKSIRHLLLIRCPIVRDTNKWAKWEKEAIDWQFNDQWNRIDIQINNERKMGQ

SEQ ID NO: 125425 - protein, 44 aa, Heterodera glycines
MEKLKNFTVVDLCKVLALPDKEFEELAVTDHFFPHTFLIFCGKI

SEQ ID NO: 125426 - protein, 103 aa, Heterodera glycines
SLELSVLRWRLRFLLRCFSRLLLPLSRIACRYALNPSFSLKKIDKDSSFAFVVLCRHENTIYATQIANVLDVGELRNNKVKFKELIVFEEMPQDFCVLIEVCY

SEQ ID NO: 125427 - protein, 27 aa, Heterodera glycines
QIKEDLCDYWVQFRDLGPQIIKNVRSS

SEQ ID NO: 125428 - protein, 91 aa, Heterodera glycines
LFEYPKRTLEKIDFFVFGAVPPNRCAQIYGETESFGNSFPIACTLILRWIFAPHKCLSTPNGHLKKSIFLFHKYFFQGSALKRCAQILFTT

SEQ ID NO: 125429 - protein, 179 aa, Heterodera glycines
MDIWAAGITIFTMAFFTTETNALEEHQKIGELFRSEKLNSVDGGLSDSLMHKLKLPRESAQSGSKDWWQRYLSTVTNILSVWQKMPAIAFLSANMLNIEPKKRMTAQGIVAFLDGKCKPTDYPKTHLKMALFGEVSAEKLLKMINYENERFIKREWATAEKSVRRFLKELENRTEFCDQ

SEQ ID NO: 125430 - protein, 232 aa, Heterodera glycines
MNAASSLLLIVFLFYFQFDCALLSFECRGVPTDQMEPFQYPSTQWRRPTESTAQIKIFFKKLAHNIFMGFSTDANHYLPKNKCIAIKIYEEEFKKEYLNSVKILKNGNIDETNLIIDDNSNLTVFEHGERDLDEELQRGNFSSRELNSMVKSIINSLVAFHKVGIHLDIKPMNLIVFERNDFFGKVKELKLIDFDGSVLYSDEQRKMIKINEDSIGCTKTYAAPELLQVRIK

SEQ ID NO: 125431 - protein, 27 aa, Heterodera glycines
MGLGMYFRFYCSFKFQKIVRIVCDVIN

SEQ ID NO: 125432 - protein, 153 aa, Heterodera glycines
MRAILFLAMVCLVMAVILETANSKAVKNKKGAVATPAKGKAAPKGAAKGGIKKDAKSKGKGKKDAKGKKVNPMAAVKAVPKAAENAQKGPSSAEVVAEENNLDTEAVDDLGAEESDFDQLAEDELLEDDAMDGEADEWEGMGEETEMDSQMAL

SEQ ID NO: 125433 - protein, 244 aa, Heterodera glycines
MKRISRLICRVGSVHALGHRTNAARLIRTQISDHRKMREWLSDLLSRRFGPKCKFGIWYETGSAIPSAKSPEMGQIVFAVDDSVRDAYFARKIKKDVMLINYAGLWMLGLDFLPMNNRDTLQMHVYRDCGCEMHAWDNKTNEEFVDNEMRKLARERKFKAMDDEDEEEKGGGEEGEEGSGKGGKGTNKDKYIEVQLVARKYFYEVKVGDRKVFNYFPKSDEWWKTWQMEDITQVEASGQAEGQI

SEQ ID NO: 125434 - protein, 68 aa, Heterodera glycines
MAFEVFPLLSVGDSILIEGKLKDNATIFKINLFHDVNEKNPYASDLVLQILFNFTGDGTIQLSSLIHQ

SEQ ID NO: 125435 - protein, 274 aa, Heterodera glycines
MHFPKHFIFLAILFLLLGTARSALVENDCPICDNEMKKENQRIVSLSCEVIFYSTRAYLGSIATLTSVQQQPQNASWWTHQHQTNMQSGQWPNPWNNVNQQPWRAYYQQQMPNPPSGAQTHPQNVQHDSRTNPEHVRMPWTNLQQQPAHAQHWNANEHQQAPNAPWWSHYTWQHAGHPQMPWAYAPQQSTHTPWWTNPAHMWWQQDANASQVNAHNIHVDGNATVVQEGNDLIINGQRHRNAAARGVSISTGGRVNHDGVQTRETSFQSKFWAE

SEQ ID NO: 125436 - protein, 86 aa, Heterodera glycines
MVHKPFSLCLSVFFISAFFFVYSADESIKPPTRNVLITAEEEKQRDVEGFLAIKAIHAVLDDDNSGSIDRFESADVCASEMTRTHQ

SEQ ID NO: 125437 - protein, 97 aa, Heterodera glycines
MGKNCGNDEKSKGEQFNGRMMVHPRTNQGKMAWWQSISDEAMLRDHLEHIIGQLVNVSKPLSPVRFVSEKATTSSAEADVSNGTHSEEQPECSVARL

SEQ ID NO: 125438 - protein, 78 aa, Heterodera glycines
MHGLFILGRLVPVLVLLALLGGLLHTGAQESISTRSTRAEGTLMCGKLPASKVYVRLFKTNSDGQQAAEWAFLIAIKI

SEQ ID NO: 125439 - protein, 88 aa, Heterodera glycines
IWLHLGPDPDDTLDEKFVDAAGAFKLNGYTRELTDIDPVLYVWTDCNDGHTEILIDYSDHYVIRSLVKTRKPMIGLTSEWSISSQGVK

SEQ ID NO: 125440 - protein, 35 aa, Heterodera glycines
MVICDKMICILPVLLFFCQALDGQQTRKIHALDGK

SEQ ID NO: 125441 - protein, 171 aa, Heterodera glycines
MDNFSNWIISNATKFYCFSIILSVPSILLYIGEMFAIVKNKETRANSFYRLFCVRGISFWNKLFWLLIMVMLAIPSLTCYPIMQMHATLSENANGTFLIMEPAHSIFSYKNQTPSHAAQFQRYTPLKKISTLYKISTSVGDYVKSILGVLYKFCHPSYAMLIGIFCTVNRK

SEQ ID NO: 125442 - protein, 34 aa, Heterodera glycines
MFGLKFKLGCAYFTYLNRYYVMCRVLGQVVSEIL

SEQ ID NO: 125443 - protein, 108 aa, Heterodera glycines
MPTDKQIDDGTALKTMHEQIVWKLLNNKAFRDKLKKIEINKKRMSDLIGDGTEIGNNLLSESHKRKFEPKGKEIIKMGNQKETQKAAKGNGQKQNETPKSDEQSKKKS

SEQ ID NO: 125444 - protein, 17 aa, Heterodera glycines
MAQKLKMAKYRMQHTSC

SEQ ID NO: 125445 - protein, 28 aa, Heterodera glycines
MKINDDVAKANRTLNNHTNALVVENAFS

SEQ ID NO: 125446 - protein, 67 aa, Heterodera glycines
MAHCHDYESKLGQAKVRWVETEISKSAGPDRSDIFRNNRFPGPASQKPVKPDFQIAGPGTGFRFGKI

SEQ ID NO: 125447 - protein, 180 aa, Heterodera glycines
MPCQCNSSKLRAVHVRVWQHRMYESGPLQFITHDAVLITWHCRACNGRFFQTFEFSTSGKSDRWGRYRLYQSKERRFDINVTYQDIRQVYDQMPGAGMYHVIYRNCKHWADKFVPLIRSKSRIDDVTCACDNWHFRATKIEVYMNGEEWVILVRFICENCRRFPNMMFSVLFGEFGKVMR

SEQ ID NO: 125448 - protein, 85 aa, Heterodera glycines
MAHCHDYESKLGQAKVRWVETEISKSAGPDRSDIFRNNRFPGPASQKPVKPDFQIAGPGTGFRFGKNLNSHMYFNAKINKNRAKC

SEQ ID NO: 125449 - protein, 77 aa, Heterodera glycines
MAKPTVNIPSNAGPITFVPPIRYYNNRPLQLSIDFHPTPVGFFWGERVHSLTSTATRESPSNFSRQQGPCLWAAWSR

SEQ ID NO: 125450 - protein, 258 aa, Heterodera glycines
MSERFLADTKMYKQMVSEKKNVPLLWENGPEDVTLLSVLAICTEEIFAQIRRIEKMQNFSAKNKATEKFSEEFLLEFTLCLNRNLKKIEYLTANEQLSASSDSSDGEEIFTDAKENFKKKNEKETKIINKIEEKTEKNSENLNEKEKESSNLNEENSKKEKKKEKEKAKWKKKEEEKGKKKGKILSKSEKFKNSKASEETETKEKGNSEELKMKNEKEIKNGKNNRKWERNNERTVEKHSAEQKWEMTAETSGKWNWI

SEQ ID NO: 125451 - protein, 75 aa, Heterodera glycines
MAMISNAHHETLGFLFSFQRYNDLYAQLYESFFEANTKVGRWRARIVLDTFLYGEWAEDFLGNESQKISTGASSF

SEQ ID NO: 125452 - protein, 57 aa, Heterodera glycines
MDSPRHVIAHPLNFRLFARILVRGSKENNLVWANCYVANGIHWLQYIDRPCNATGLS

SEQ ID NO: 125453 - protein, 97 aa, Heterodera glycines
MLIFKDVLAYKDIFYFQERGPNFRDVLAIQGRMATLSKPLSIHLIDIQKPQNEAKASDLGALDITDYNSQDEKDDLEIDRTYLVNRKGTDVITRDRI

SEQ ID NO: 125454 - protein, 403 aa, Heterodera glycines
LIVPFSLPIRCVVVRSFRPLLCFFSLLTFVGLLGNLLNLLVIVAIIGDKRMRKSVMNLLLLNLAIADALNLLATTVEWVPTLRHNGPVWVLPANLLATTVEWVPTLRHNGPVWVLPAVLCPIIRYLECVFLFTSILTQLVLCPIIRYLECVFLFTSILTQLVVCVERFIAIAVPLHARRLCSRKNILLTICAVWCVVALAALPYATHNKKAENCKKTHALTIELFSVSFACTNFNRKSYFWHFYKFAFVVLFLFVVLFLLPGIIFLFLYTKICRILWAKNDKLYDRANSCVGSPVSGAHEEALKTRRTVVKMLVACVSVYFICYSPIQAFLMQRGLFNLSIHPPYEFVLLMNALAILCSACNPLLYTLFSSRFRARIGHLLCLCCDIFYRRNNKNAKKNRQSN

SEQ ID NO: 125455 - protein, 262 aa, Heterodera glycines
MEELQRRGVRPRRLVATGLRVYTLELGGRNQRSVVAKDSLNFFGCALSKLPAMFGLDGVPEKPFFPYNYIRAENMDVVHVGLPPAVDYDPDRMRPAERDAFQRWHAEEQQRRPNRLFVLRRELLRYCANDVRILRRACLRFRHVVGELSGGVEPFLAASTIAGLALVIYRQRHLPRDLMVHTPEGGFLRGRRASAASRHFFALLERLRPQWRGRLRTARWSIGEACVEDDGYRLDALLYRPVPLRPLVIEFNGCFFHGKEGE

SEQ ID NO: 125456 - protein, 132 aa, Heterodera glycines
MGSDGEEEEEVEMEERGDQQGQTDEAEKRMRNGRTMTAYNANEDNAMNNNIISPCSSSSTITIEGRTTSDDGVRRHGIAGGAVNSSEQSYEAPKLRDPVELDAMKRELFDALVDKKARQQQRKRVRFSCIRQ

SEQ ID NO: 125457 - protein, 130 aa, Heterodera glycines
MATLFHLLIPAFAQVWVLSSELTRYLFIDLAFARPFFFTYAKSCLLSLLLLRYSCNCCTEEADASKKDGTEDTAGGDGGGGGHHNDANDDEDDGMASGSSRNGVSNRKSKKKRSSSSSGGGTAKTTKSGT

SEQ ID NO: 125458 - protein, 28 aa, Heterodera glycines
MGKQKLLRIMGKLPKMVKFKHHKFGVLL

SEQ ID NO: 125459 - protein, 69 aa, Heterodera glycines
MARNSVSLFDTTIICAYNASFAFPVKAAEQREHWRPGGPADGGTVQQRHRRGGGDGDDDYGRGHLMSDD

SEQ ID NO: 125460 - protein, 130 aa, Heterodera glycines
EYFGDLWTFYLGTGTKNKFLGVSGIDFLAIQLHKSKNKMGEINLHKRDSNLWGQKQTPNAQPPHHRTTQNGTNVYSIYWDRKKFGTSYLGTRTHFAENKTTFLKNPWVLYAPTKFHSETPRTPQDLPLLA

SEQ ID NO: 125461 - protein, 175 aa, Heterodera glycines
MDEERERETNGNGETAERDKLEQALAYIERRCHVMEQIGLDQGIVLGRLDEFRPAPGDVFTFRGSKGTQTMLTAKALGYSEKELDELQVQIRVSKRAKGQLKKQSKMKIELIAVKVNANGICGGQNDNERPIERHRTNADHENGVGHHTDCPIGKCCQKHTVGGRTAPARKRRIH

SEQ ID NO: 125462 - protein, 113 aa, Heterodera glycines
MNLYFYIFSYYLAVLSRAITTPKKSPAEAEGKNDRNPAYWKGYRKHFDKMLKQMWKSAKAKAMSERKQFFKNQQRRSIEQKDRNQTEQSEMAKKCAELNDKFGIIYKAPIICF

SEQ ID NO: 125463 - protein, 48 aa, Heterodera glycines
IFEKKTGLGALCQFILTRTGSPRWSRTGQTGLKSLLNKTIGGPGTNKP

SEQ ID NO: 125464 - protein, 147 aa, Heterodera glycines
MDKNYFPLHNLISKLGTPTLLDEKKWLNKAGQVSLGQNIGAQKKASVTPSSSQSAEALSNKKPKSKSQAKGVTKKDFNELLKQMWESAEKEAMEKQKLFNVENSNLASSNKLKDILEREKLKIKRAELDDKFGIFYIDEKSPLAKVI

SEQ ID NO: 125465 - protein, 68 aa, Heterodera glycines
MTLPERARDEYNAYIALANGATEEQKRRGTHLAAFINLFYFFMQCVMDDEDLKDLSKMAKNIMPTYQK

SEQ ID NO: 125466 - protein, 91 aa, Heterodera glycines
SVHLNNFYPKNFFWVFGAVPLNRCAQIYGETESFRNSFTIACTLILRWIFAPHNCLSTPNGHLKKSIYFCFRGSPPEPMRPDLWGDRILRE

SEQ ID NO: 125467 - protein, 76 aa, Heterodera glycines
MGTGIAGVRVGVVLYCPLIQYMRDLDVLSHDFSAQNGFFVGTTAFALFISAGTFLNSATYGRFLNPLPLRRQINMD

SEQ ID NO: 125468 - protein, 85 aa, Heterodera glycines
MLIDEDLIILLNDLKATPDQAKKLDDQSRTSAVDQHKKKMLEAYFGFIYLIFSFLNQYFYRHCNNPISEHTCSSQKTELDVENLF

SEQ ID NO: 125469 - protein, 184 aa, Heterodera glycines
MPSLEKIPSMNNGLRQATIHSPYRLMPSDSEEYLIVQEEEGEEQKGKETVREKGVDERAEAEKRLAGKQTVRHQTEQSSKSTMQSSTETGLILMPEAKLGSLPSADAMTTKSEVVVEETTEVEVHEEGERVEEEEKQRTEREAPDEREEERPKSAASRTGTPTIWDQYKILGDQFAKYGSLEIE

SEQ ID NO: 125470 - protein, 228 aa, Heterodera glycines
MEQYRETDKEQQKKGELGKKQERHGMKWGEFEEEEREERKEKEGEKKEKEGEEEEKEEQRGEEKDAGRSIPADTLREGALSIGFVMPSQVGAQRKVLTRAADQSHAAPPFPQIKRRAFGNERLFEKKPAEPKQTFVKKPIRGTDFVVVKGRAEEGKEVRESTRSMMGQRKRDAFVRGQQRDAQMEETERMRGESQEERALKRESQEEGLRKRESEEERARKRESHEEG

SEQ ID NO: 125471 - protein, 42 aa, Heterodera glycines
IGLLTMTAFCYPNEMVHSVRVGIAHSQSAWHNFKQAPEPKSS

SEQ ID NO: 125472 - protein, 225 aa, Heterodera glycines
VLISDQPMNTKKPSAINREALNESVSASPGHGSKSKDFRNCNDIKLATRKTNEWGKAQLKGCTKELCIRCVLDADMYYRTMHIYDGHLAKSRDACEQMAKEKAQLAEEVARHRRDRTELTTKYQQLEALLHHEEQGQQRQMDDILKERNIKMGELQAKVDELTGIIGQRDAKIAEMTNQFAMTMSIKMEKAEQKPEVPKKVHLLALLQFIRPKKDLTTLMHHNFF

SEQ ID NO: 125473 - protein, 89 aa, Heterodera glycines
QAISGAADQASELFSQTPGYPEHCRHPPHSCVAFSAWLYRRVFGVCGFICRLFFTHDQPLLSNGRRGLFGTNRTRKTSAVCPAKLWRKL

SEQ ID NO: 125474 - protein, 39 aa, Heterodera glycines
MTNSFKTNFTCFPYFLSSKVPSPRKMNPLVCTADFAVAK

SEQ ID NO: 125475 - protein, 25 aa, Heterodera glycines
IGFLAIIGIGDLIGIGFCLARHIPG

SEQ ID NO: 125476 - protein, 90 aa, Heterodera glycines
MLRVGVGTVELIAGTKMCHYVDHFGSASKRRHLAPCHIGCGGGETVTAANEFPNANRVFTVGESDSYICFDPIRILNPNSNKKSKLQIFF

SEQ ID NO: 125477 - protein, 183 aa, Heterodera glycines
MPSNVPLRIVVLRLARHSSKFVSLILLVAFVKEIGRNSTIIYRHYPLFAVPSGIFTNDEFVCVYQFNFYLIHGVPGLYPLKFPIQNRISFWNIAKANRGTLAMEIEKFSEFAREVGRMQFSDAVGINGFQWEIFAGINTKKKSTEKCLGFGLLFTTVSEKSENNVNNLRKKSLVVNGAVKLFL

SEQ ID NO: 125478 - protein, 113 aa, Heterodera glycines
MGDKVDANGTVKRTAWHNNKDLVEVNEYLRAKKININEDPISYWSGANELKWPLLTKLSKKYFSAPATSTESERLFSTAGLIVTDLRKRLLPENVDKLLFLHHNLKIYDFDYE

SEQ ID NO: 125479 - protein, 131 aa, Heterodera glycines
MGVKGKNGIQRDWHIIITGHTYSHDKKGGGRGKAERSTIREIHRCRAKGDVKAKNGWRGRNPRVTLGVIIGTLGWGMVVVRWSSTFQMLDRFLQNKTVVGLLCAEDISFPNFSADDWRIISALKQVVPNAC

SEQ ID NO: 125480 - protein, 285 aa, Heterodera glycines
MLIAFVRNEQKMQISEYSMEKYEIHFGILYYMRKNWKCSKISEEFEEYEWTECQKYRKYFDILYEYLCREYVGIPTVKPKFVFEDRIEIEGPIIYAVNCLARISRFYFNSDEFYKLNRLFKWVYNFEPKLLNEERLNFGIKLENEPKLPINEMILQLAIDTANEWQTNESLEGIIRQNFDNKLEEMYKKAEERAKEYGPWGANEINDDKHMIIAYSKFDDQRTWTDDAFFSEFVKGLTTNSKKFFKMAKEYSNYLRLKKEKGNYILTDERPMILWVKGIENRKSI

SEQ ID NO: 125481 - protein, 250 aa, Heterodera glycines
FTLASHCCQLFLIITDSLPEKKTAELPLPPAEKIESLPLPPLEKMKTPPLPPADKMPSPLPPSSKPPRPPRPPPPPPPPGQHPPRRPPSPPGPGPSPPGSPPPRPQRPPRPPRAAAPPPPPPSRPPPSRPQPKIETPRPPPRPSLKKEPQPLLDPRPSTSQQVDRKPKREPKFDLDPRPSTSRQAGYNPPAEPKHEQKPSKKPPPRATPYHIPKREPKIEETLPRQQPSPAAPQVPPVPPPRRGTKPPPP

SEQ ID NO: 125482 - protein, 22 aa, Heterodera glycines
MVKTGTLVLSYQYKTLKANERN

SEQ ID NO: 125483 - protein, 419 aa, Heterodera glycines
MLIDFVKGQQEIQISEYSKQKYEAHLGIVYFMKKNWQCSKISEKFEEYERTECQKYRKYLDILYEYLFREYVGIPTVKPKFIFKDKEEQFEINGPIIYVVNCLVKISRFYFNSKWNKIYKYKLNKLFKSVYNFEPKLLNENRLNYGIKLENVQKLPINEMILELAIDTANEWQTNESLNGIIRQKFEENLQEMFQKAEENAKKDYSRRVNIINDDKHKIIIFSKFDDQWTWINDALFSEFVKGQAATNFKQFSKKFIEKYSKKCLENYEAHLCVVYFIRENWQQCEANCKDNAKCQMYRNHFNILYEYLFRLYAEAKNPSESKQLAPVIRPIFFGPNGIALSLIEVVSSFNHVSKYSCNEMFGQISKLYPMKLVNEVEFNYDENNKDALNESTDLNESTVTDEIIRKEFEQKMKKIYEG

SEQ ID NO: 125484 - protein, 188 aa, Heterodera glycines
MPLINLGFPIICAHFCQILSNPDDNRANEDGRLLSFNQIGEFIEAIKEPNFKQIITFGRPTVPINEVTEESEEADWTDKLGNKMIQAGEQYGTTNLIREINSRINTAEPIIFEYIRNENSVTCADQPDNCQEMVKVAKAQLSVRLLISMAKQIVQEKILHQIYNNPLQKARLCKWWYRFRLIEDIWSY

SEQ ID NO: 125485 - protein, 83 aa, Heterodera glycines
MPSASAGTVSVSNGTKANGNQPNKHMQMLAMAGPAPFSDSPEAIAIRDAVDYTQKITLEMAYNNTGEHSALSAMTQIGGAWGY

SEQ ID NO: 125486 - protein, 59 aa, Heterodera glycines
MLKEWTDRSDEFIRNFTSTFNSDGPIGRFLSSRSPTPALEEQEEAAASDDDEDEEHNEA

SEQ ID NO: 125487 - protein, 98 aa, Heterodera glycines
MTEKRSHTKIVKNNKKRQIHSLIFSSLSITFENVFDQTEVEDLCTEHQLQTIPFDVYAFPGPLQRTVEAIPLLKYMPFMPKQKKANANLRNGFGENKF

SEQ ID NO: 125488 - protein, 126 aa, Heterodera glycines
MPLSVPRNPYFEHFGPKYRMTLSKPPLVSLPYMSDKLLPFVPKSAIYSQLFVSNQTQNEWHEDTFRLKLNLEGCKHLWKTKQPQMMFKIEKVLLAECPFCLQYTDDEDKLPHRLKACNVKIFHNEH

SEQ ID NO: 125489 - protein, 126 aa, Heterodera glycines
MDYPPTDCPFMVYPLTDLSITDGLFTHGLSTNGLSTDVCREDILFLESGKKDQPAQTNTIKKVVYRKMKKETVHEFVIRQPVLQNGEGGIRFTYELELDENGKISEKNVNDQSLKVVDERAVIMFI

SEQ ID NO: 125490 - protein, 110 aa, Heterodera glycines
MSFRSAAALGLNLRKASKFVLFGALATGGSVLLYSLENSGARAYDFVVHPSHLPWSHGGLMDAIDMRSVRRGYQVYKQVCAACHSLKFIRYNHFVDNFMTRDEAKTEAAE

SEQ ID NO: 125491 - protein, 337 aa, Heterodera glycines
MKHTTRMLLVPEELYRSLLARSSAPVADASSARGGLPQHMTPIEHTAKRMARAAHSGGVTQSTDGVSPASKQHLLNDDERLIHYQQEFKRFKKLLEDEQERPAPVRLTQLPTDEASKGLLRDALSEAARTIQQQQPQPRQPAPHQQQQQSSQSDSSPMRQPPRRRQRPAKRTHRTTSASTDGAEASRFPSSSSAVSLLTRTDNGGKGGAETTEREDSSNDDRPQNVAAVDPARKGQRKEADVQLHPSTSTATAVPAAVLRDTEQRKRQAIDYALRNAGTLGIGDGQQVYRLMQGAYRPMQNSDLDALLTFHFAEPQPEKAPPGYKTFIGNAAQDPRM

SEQ ID NO: 125492 - protein, 352 aa, Heterodera glycines
MFLLLVGCGTILWFFFGLFKKRRLPHKKIFICSDCWLLVFDFLAPSQLGLEIALISHRFDFYVDEHFKTCKWKLNKQFLIQWDIEENGTKQMQIVNSDGNPLPIPQNPLPNKVIGFRDIQIIYIDQNVVAFLRHFHRRIFAVCTMDLYIITENVRILDFVLLNIWPMLRDAIRVMYLNTIAFRRLRQLAPSLLSDCPSLRFVSFKDAILPAFPPDDSANASDGQTVAKWSFTPCPDGRSKWLKCFVNAPVDQWSSMIEQFKAAFSNASSSATFFISFHFPPSSPLDFIVPFDLINEVTGEQLTLGQSSANACWLTRCPIAWDERNWENMRNEMYVRLNPIEIRIRDGGYGDG

SEQ ID NO: 125493 - protein, 123 aa, Heterodera glycines
MMIINFGPHKFSILIIGVITVQVCLFSSISSNSIRSKRQYVQQQQQQQHNEEYFVQQLIGGQFQQNSYVVPNQQQQLNPNLALQQQQIVPINGQPHLNSQPLPQQQESAQQQISPINGRQSVC

SEQ ID NO: 125494 - protein, 81 aa, Heterodera glycines
MSNQNRMPMPNTNKNNAKRLTRYNEQYAKIMLALSAGAYFRSAHSAEECVANWLPEPNQWHIYASINQTCDILDNPCSSYT

SEQ ID NO: 125495 - protein, 98 aa, Heterodera glycines
MSFSLRLRYSRNVEEEERRVREGQERRKREEEERRKRVDEQRRRWEQQEVEQLERIRRERERMEQALEAQALDRERVERDRIGRDRAEREAAEKRRRE

SEQ ID NO: 125496 - protein, 13 aa, Heterodera glycines
NLFFNLKFIKAIN

SEQ ID NO: 125497 - protein, 376 aa, Heterodera glycines
MFLSGKDDESSISAIDRKLWQGKTTIKISDLEKAQNDMGKLEDGVNRAFRCLNRSLNQKVNWVKDVVANTNANFETLKVQFETLTERVDMLDQDSDGTNSGGTVSITNLNRASRALFVTPMGNAQPNQVVPNQVPIHQLSSEDEDDGPTLFGLNMLSSGPTVGSGLEMFCEESVFAFDDWAERFKDYLSVSGKAYTEQEKVTRLKLALRDTPRALFKELLPAQTDTLDSALSELRQKLDSPQRREIAKRTLSLCKQREDETVAQFLRRLTPLVDATNSSLTGDIRKEKICEEFLDRLKPNISFLIRLVGLSRAKDLDLVRAQAEELEALLLMNKGDEASRLSQAVHALSNQSPQSNWSTEANPNNDRAGQWSSGNN

SEQ ID NO: 125498 - protein, 84 aa, Heterodera glycines
MENGCGLKLRNGIEIKCEMELKLNMKIGEMKNGQKGKILREGPGRARGGKPENEFCPGIEERKNGKRDGEDFASPELLGVESPG

SEQ ID NO: 125499 - protein, 82 aa, Heterodera glycines
MNEEQISADDAIVSATSDDKLESFSKEMAGLIISPHDGVKIQPKHKYAIVCGKTLITIMGNRMLMTLVGVVHIGLFKLVVHG

SEQ ID NO: 125500 - protein, 26 aa, Heterodera glycines
MQIRGKDFCFQKCTAESDFFSFYYNV

SEQ ID NO: 125501 - protein, 30 aa, Heterodera glycines
MNLVEENLESTSNANSLIEPIIASPNAQGT

SEQ ID NO: 125502 - protein, 169 aa, Heterodera glycines
MRRETEEITRERAVHRQQSLRRPPLARTMNGSIGGTKIYTPFSSYVNQLYMNAAFGSGDESSSTETNAVDEKRKARVRGLLEQIPVDIYTEGAKGPAECAICMGDFEVSLWSSFMIYGKSICSSGGRLHSLFALCPFLSPPMHRRLAPPLLHLSVLHGTGGLRAAFRLH

SEQ ID NO: 125503 - protein, 96 aa, Heterodera glycines
ILQDLFKMISARRWIHVAHTKILGTSVKKSKLKYLEDFYMGMGEKCIQRDLGIISVFGDSCRHFAPLFHLKRGKNTDHSLLMFWVVTSPPSFAVFC

SEQ ID NO: 125504 - protein, 20 aa, Heterodera glycines
DSTVEEKTKESDLSSVQQPN

SEQ ID NO: 125505 - protein, 23 aa, Heterodera glycines
MRQIINFYLFVLFFAPNFAEKLR

SEQ ID NO: 125506 - protein, 150 aa, Heterodera glycines
WNATNGGAWPIPPGALCRCKFLPQHFDRKEIIIRSTDVDRALESAQSLLSGMFPPQSDGDRFDPALNWAPIAIHATREANHDSLLNPSGFPCARYKHLRQIVADEISAHLLDKYRPLVDFVRPHLNISKEKPIKMVQLMALRHIKPEVKA

SEQ ID NO: 125507 - protein, 146 aa, Heterodera glycines
MEIRQKSWLPYFNGNEEITRLNGGVLLNDLLRRFNIVSQGNAKKLDASKMVLYSSLFYRRNQILEPMAIAGCEAKCDLINFLQILEPRSIRGGEEELKILCDEKVPNSAARRMGNIPGFAKSLIIAIFISIAAINHGTQSTVINVR

SEQ ID NO: 125508 - protein, 115 aa, Heterodera glycines
MFQLLRIQRIQLIVQKQANGKFVVSSFCPPFLRLVFIFAFASAVSRPPPPPAKKTHKGKIVPPSMLSKPQKIEPFKVNQSFFAHSSPICLSFPLFKPQPSPMGLPHPKKGVRTGI

SEQ ID NO: 125509 - protein, 274 aa, Heterodera glycines
MNAEDTITTTITFTLPRSAFLFGALGAAEVGAVRGTSEGGTAEEGPEGAIGHQNTGKHQKAAKAANRSIPLQEFLPNTSAPSTEDRKILAAEGVLAPYSVKSLLARLGSQPFSLSIDASNFGHEKLFPLVLRFFTKPNGIEIRLLDLEALPGESSIEVHQWITKIVEKHNLDFSNLTAFSADNTKSNFGGEERRGENNVFFRLRQQQERLIGVGCVCHVLHNAAKRATDNLRIAGNALDIEAVVFKLAGHFKNSTLRTEELKGFCDELEVQSRN

SEQ ID NO: 125510 - protein, 62 aa, Heterodera glycines
MVKFWLTLFFVFTGNNLYSIFAHKPNFSQCGISDFEPDLDNVPNVKIGTNHKVIKMEEFVLV

SEQ ID NO: 125511 - protein, 124 aa, Heterodera glycines
KPIAFTANARPICLIEYGSNNHSTFIVAGWGITSPYCLKDSKPGPSNQLMYGKMKISPPENCQSASIKKFKRVAIEDDENSSHHNKHYQIICVVPGPSVIESQYAQIDCNWIEEATNGEVKCIE

SEQ ID NO: 125512 - protein, 69 aa, Heterodera glycines
MDVSSRACPTQKVQRTAPQGSAEPNENLTLEAAAVDDQTQQTVQTEPEMNLQAAPEDLQNVVDQNESEV

SEQ ID NO: 125513 - protein, 118 aa, Heterodera glycines
MFSNADSLVQRMRHLMTTGEGADVHFLLIPAHKLLLKTASSIFDKMFSTNTFNVKSEDATWEVISSVEVIDVDVGTFKTMLRFIYTNECCGLNEHNAMEVLYAGQIYSLFISKFIILI

SEQ ID NO: 125514 - protein, 81 aa, Heterodera glycines
MGHHNSATFLFGLLLGYFLPELAAQLSKDEQDYCVKFSNNLRSNVATGNQQNKGGGKLPSATNMLELAYNETIGQTAQPKR

SEQ ID NO: 125515 - protein, 104 aa, Heterodera glycines
MKCSTDLKTFDAKELVANFLIGDEKAGANPPRRARVLAFNKGTDGQRIGKEFDTDEEDRHGDSVFSVPNTNPWAGPSKTKKYRKKGRKATRRSGGLPIHQSLNR

SEQ ID NO: 125516 - protein, 150 aa, Heterodera glycines
MTFSFFIYSIYYIVYINLNKIFSCFLLMLNFLLLLLAINATNFDEIAMEESIGVDQTDKQQQNKSDEHNTASSASADPSPPNIEFAEQKAQKQKNIIKKGRTDAEKYEIVKQYHKIKEQKPKLRNIDIAEQLNISETSLRNWRRELKRRF

SEQ ID NO: 125517 - protein, 206 aa, Heterodera glycines
GIERVHFGLYAQGVCRPKKSPTNAFPWLCLPLQINLLSLGSADVTDQIGHGFSKISGKWSVEQVEVEGGATRRRLVFLDSANLIQSEVEVVRKSKNGNRWHIVWSDLSCQHHKMMLSAFTLLPSLSSAGLADALEAPLRIALLGLGGGILAKFMHDKFKQSEIVAVEIDPEVLAIARKLFDFPTESDRLEVVICDAMDFLCENSAQ

SEQ ID NO: 125518 - protein, 487 aa, Heterodera glycines
MILHGKPTGHSGLVINNPLATITYLILDKKQSSPVRQIDPNGEISAVKNAASADQIPDKSADQIPDKSADQIPDKSADKIPDKSADQIPDKASAARNAASADQIPDKASAARNAASADQIPDKASAARNASSADQIPDKSADQIPDKSADQIPDKSADQIPDKSADQIPDKASAARNAASADQIPDKASAARNAASADQIPDKASAARNAASADQIPDKASAARNAASADQIHDKASAAKNAASADQIPNKASAARNAASADQTDKASAARNAASADQIPDKASAARNAASADKIPDKASAARNAASADQIPDKASAARNAASADQIPDKASAARNAASVDQIPDNDKAPGVKNVMSNSVFADEPNKTLSVQAATDEKNAAGGNKSKSAENNALSSAANDESLASDEADNAVPNSSDEKSVPKAGDNTKKSASPNGNSSVPTLVQNWAANPPQLFETILAIIWLLRQTERQQPLRICWHKHRCILMK

SEQ ID NO: 125519 - protein, 139 aa, Heterodera glycines
MRFTSIPLIFCLIALVCVIASVPELPQKFLKSWSVDHSENFDEYLEAKGYGWFMRQVVKLAGITKTFSKNENGTYACKIETTKKNVEWPSFKLGEEFQAEYLDDSVPKQIGFTLFTKRFKMKLLKSTEFSIFLPKRTPF

SEQ ID NO: 125520 - protein, 58 aa, Heterodera glycines
MITFDYNPTTDELIETHKKVDSEEKPDIYKYNIDSDGFLVMQMEYNGVKTKRFYKKNE

SEQ ID NO: 125521 - protein, 51 aa, Heterodera glycines
MVPPPIPPPPPPPLLAQPLPFPNCPPPCMQQLLVVAFVRPAICHAPLICAA

SEQ ID NO: 125522 - protein, 228 aa, Heterodera glycines
MIKLLPPPPPPPPMPLPPPPVPVPGPVMPLGPPPCLPVCQPACTIHCIFPPAAAMSPPIMQMPPFASPVPFPPPPPPPPPPPPPVPMVALFAPQMPCAPPCMPTCAPACVQEFPPIVFPPPPPPSPPPIYLQPPAIPPPPPLPLPPPPPAIMPCPAMCQPMCMPQCMMPMPPPLPPPPPPPMAMAPPMFVVPPAQFAPPPPPPLPRLPPMALMAPPPLPPMECVAQCQ

SEQ ID NO: 125523 - protein, 75 aa, Heterodera glycines
MCLHAKVGHKFSCKCNGHGLALRSGITDAKCDDGKWEKLNDLNFKNAHSCINLPNCNNLCTKIFVTVQENAKKHF

SEQ ID NO: 125524 - protein, 53 aa, Heterodera glycines
MADLKKMKRDTEAEKTKLTTLSPNMALDLVSGFSTNLYSSNFMHGVGAVQAQG

SEQ ID NO: 125525 - protein, 112 aa, Heterodera glycines
MAIELNNNNACASTEEDTSSSPNAANLTGTPSGEAMSGEESARLKRSYVLQELVESERTYVQDLASISDGYIASLREMELSDEDREKVKIIFANIEQILDFHKTFFLKEIEK

SEQ ID NO: 125526 - protein, 21 aa, Heterodera glycines
MRTRPIWQVKQRLLTSQKKGF

SEQ ID NO: 125527 - protein, 145 aa, Heterodera glycines
IIFIQKIFFFVFGAVPPNRCAQIYGETESFGNSFPIACTLILRWIFAPHNCLSTPNGHLKKSIFFVFGAVPPNRCAQIYGETESFGNSFPIACTLILRWIFAPHNCLSTPNGHLKKSIFLFSGQSPRADAPRFMGRPNPSGIASL

SEQ ID NO: 125528 - protein, 158 aa, Heterodera glycines
SFANRREIGHGLLAEKALRQVMPEQFPYTVRLACQVLESNGSTSMASVCAGSLALFDAGVPLLANHVAGLALGLFTDGEGKRTEYTLMTDLMGYEDYAGDMDLKIAGTQTRFTAMQMDLKICGLPLSVLRDALLQGKKGIVHLLGLMRDTIAEPRFVQ

SEQ ID NO: 125529 - protein, 105 aa, Heterodera glycines
MSSGRARRENGSFYIIVEERNHANLMEKLEDYAKIEKACRKLHRQKELSDQLTPTGKEIITNLFGELEDEEEYLPYLINKCGPSKRRRLYDRKVWTDGGETLENV

SEQ ID NO: 125530 - protein, 172 aa, Heterodera glycines
MGTIVKRSLRAKAIIGLLQREVVLSRSALDRTKAKFRKRKNGLKSDLRATLKNLGAAEDDLAAAEDDLAALRARAAALHNQVQQLKQIAPKAKLKKLGLADIGPDLSSESEEDEEEENAADNTEQQQQDDANDNVPDDLTINERADAALRTLMPLTTSRESRAENATTQSTF

SEQ ID NO: 125531 - protein, 108 aa, Heterodera glycines
MAFAQFLVNASLSLLKAPKATITIAWKSQSITDVEIECYEVQYKNVNEVWKTIKCPQHAFLPKKSYTAVVKNLKPATLYALTVVALNKHGNTVDVLTMSPVATKPRFT

SEQ ID NO: 125532 - protein, 50 aa, Heterodera glycines
MEERIIEKFDQFKEEMEQKITTKFDQISTKLDEMKDELRLEFNQKFDALE

SEQ ID NO: 125533 - protein, 129 aa, Heterodera glycines
MSLLWLGKENIPPSFEKHEILLNFSSGTDNSSTGAATASSLNSSNSSTTTTTKTSANDGDEQRRIKRTKTMATTTTTTDSGKSSSKSRTTTTTINTTTTTSSSTSSSKKLLVVDENAKTCGGVGIGADG

SEQ ID NO: 125534 - protein, 76 aa, Heterodera glycines
MTSDDGQASLSTVHQRKMTTSIKTTEHLSKKKKKKWMLLISLDVMSRRMKTNAENGRTAELSDFLFGWINFIFFFP

SEQ ID NO: 125535 - protein, 70 aa, Heterodera glycines
MFVIAASASSHASNNSEWQALSAQFGQQISEIDSKCAEFGIGIAKVPFDGPKVKICAIYVKINIIKAINE

SEQ ID NO: 125536 - protein, 83 aa, Heterodera glycines
MSKNGKQKQFAKELGIDRKTLSKWKKEFGIEMSKRYSNEEKMSKMNDYYEMKKANPSLSDKEIAGILKIGFATLTRWKKENNS

SEQ ID NO: 125537 - protein, 260 aa, Heterodera glycines
MGKEMQYLKAEAESIRNVAIFGVCIATVASLVTRTQVLSDVNGGAPRAPAAGAATPKQRQTRSAHHHLDTVLRNGRLSLWKRSGYGAESGGVTGGGGGGACCGCGTSEQGPPGPPGAIGEPGADGQPGAAGNAGEDAAPPPPAPYIEPCQECGTAQDGLPGPQGAPGPDGRPGEPGAPGERAIPGPQGDEGAPGVDGVPGTPGEPGPPGPPGSLEQGAENFVFLDRNNWNKMPDYAPIVGPPGPPGANGQPGTDGTPGGM

SEQ ID NO: 125538 - protein, 25 aa, Heterodera glycines
MPRVEKNFGFGFRVESKNLGIRDQF

SEQ ID NO: 125539 - protein, 19 aa, Heterodera glycines
DCWGRGFESHRASYLLCST

SEQ ID NO: 125540 - protein, 79 aa, Heterodera glycines
MLFVSLLATFCFQPSRCAFFDKHRKRNAMDNVNGECAEDGCVSDVEAGSGAEDGDELLDDDDVQQQQHLKSEESEFKML

SEQ ID NO: 125541 - protein, 86 aa, Heterodera glycines
MDGPKATVIRMAPQQQHGWALGNGRAATTTGELPHLRRRDFIGKTKNIAKRSTAVGVGTVQKGNIQAKGHEKVSQSMLHINWHFYF

SEQ ID NO: 125542 - protein, 59 aa, Heterodera glycines
QNGHQKQQQSVHFAPEDPQQRTPWDIYYHKESVSAAHTTAAYTIFEWDYLEILTTAVAS

SEQ ID NO: 125543 - protein, 50 aa, Heterodera glycines
MLLKLADYFQNYFLNLDVNKFRAFFKANNEQLFLVVSKEFLCVLFVRLCG

SEQ ID NO: 125544 - protein, 61 aa, Heterodera glycines
MGVNIYDAFIGILKKAWTWTWISWTKIRENPGPEKIQAPRDLDPGKIQAWTQVHADLFYYI

SEQ ID NO: 125545 - protein, 32 aa, Heterodera glycines
MDVEINFTALFGVFGSKIIFVSAANWVTSRNE

SEQ ID NO: 125546 - protein, 459 aa, Heterodera glycines
MRSLGSSISAKLTPMHSFDALMSAQLAPSHSFDTAADLIGHNHSFDQMDSKKAGKSLINDKKQKHIELEADQFVAFMLKKMLKKVPVEFKERLKIFQKQKRNRTLAEELSNLTSKQNLLMLLELYYMANSMGEIFLKQIAANDQTDLRRFGGKNSLIDFEYYEETNQKFSKIYQTILINEPTKKSANKMFPFRRTKSGKAFFWFNSHKTFLVANEWRDGAENILEWKFKVKIASTKLGKIIRTIGQFIRIKCGKYLWNLDEETDEIQNCAKQINFSELNQIFLKKFAKNNENTLGLLNLVGNLLNVEALTNSDTNEKVSSPYSEDIFTEIESYEQKIHILNGLLNFGRLFMNSFLALAMKITEENRTINWKNISIIFTRNKNAEEENYLLKKLMIEVAEIALNLVLNRFKTRKTKRNWHFSFFKNSNPDIFVVIRILDKLNVKNQGKVEPMPSADNERF

SEQ ID NO: 125547 - protein, 63 aa, Heterodera glycines
NRNYAQKAFQTILALPIPSTIAFIHPIMSAKIIRVPKIACDLSLAKNGVSKIVITLKKLLKQF

SEQ ID NO: 125548 - protein, 163 aa, Heterodera glycines
MPAFAGGGGFVVSPMNAVQNMHHSTKNKVTIGPICSSWSLIWSQSTDFSAIYFAALHSHYATLLPHLSEPQPSDRPEFLRKQCNTTAYQIVKHCLEQSALKIKDLLVSYLKLASFLHVFPLASDMNLLRESMKQIRSQIMPQNAAAFQDYVEVHMKQIFTNRG

SEQ ID NO: 125549 - protein, 143 aa, Heterodera glycines
MLFASSVFRFFLRPPPKRYSSFLLNTMWSPLFCLLVFAGLAACCVCESFRPFRGTFPASALPQIQYVNDKPYYLMQNMECRGGKIYEINQVQVKFNGPSFHFCLIRMPKLKDIDECKAACVTRNCRAVNLFQLGEFQFKCEIL

SEQ ID NO: 125550 - protein, 99 aa, Heterodera glycines
  unsure (1)..(99): unsure at all Xaa locations
RTASTDPTTSFLSAAIILCIMRAGITAAAGTRLDLSXYSLKGLNCTHSDDRPHKRSXLVISRHYLLALRVVTISQVPSPESNPYPPLPVITMVVRYITI

SEQ ID NO: 125551 - protein, 231 aa, Heterodera glycines
MAWGFFSRPLGTSTPCSDTGDKYVGYASSKYKRHSPSFDQATVRFFDTKKISPDISRWIAHAIVAFFALLFFTYIAKAHSETVSSGISLTAVGLFIFGIYKLASFRNYRKVEENRKLILLVERITDIIYESGTSGVAEPHVRDMIMPPTKRSEEEAKRWKEAARFINNEDSRIRTEIRLINGTECNVWIWVGAGKERWQGTALLEGSPMARVPEQALTRCLKLRGVNFSPK

SEQ ID NO: 125552 - protein, 29 aa, Heterodera glycines
ESSGLRRNHPTIWPVIPSMTLRIGEDQFG

SEQ ID NO: 125553 - protein, 36 aa, Heterodera glycines
PPHTVSLSRPSPPSVPSNSFGIFILRNPFPLIGGIK

SEQ ID NO: 125554 - protein, 146 aa, Heterodera glycines
MHFIVRLAQHSLAHGVARTFFDFVQCLPKTEEELQQKWTRTGFRGRNSWCLSEDTDCTEYIERFGTVATVDAVLSALLGESVPASIADELQANPKFGQVLAKFDDIEDEFILRTTKYNILFAKGLMESAEGQGIIEDVSTQMHFLI

SEQ ID NO: 125555 - protein, 180 aa, Heterodera glycines
MAQFNAMFPNLNSSVVESVLRNCDGDVSRTIDELLRRSGQEEGNNSETDERRKSVSTPPRDQCANDEKIALLVQNREFLRYLRRDPNFQREMLGRSNSSDYRHRHHSSTHRSRNLPVLLTSSRTSQSPNSIRFFRTSADVMTNPAEDSVGRVPEGPLVEFQTSEQECNSRRTFDCKRKEE

SEQ ID NO: 125556 - protein, 16 aa, Heterodera glycines
MVCVLKIFNCSIQMYS

SEQ ID NO: 125557 - protein, 33 aa, Heterodera glycines
AASRPRTSALRPFFKFCWAYTGASRPFLNLLGY

SEQ ID NO: 125558 - protein, 34 aa, Heterodera glycines
MRRPFFLGMSFICRKKTQKNIASIKIMTLQMNII

SEQ ID NO: 125559 - protein, 185 aa, Heterodera glycines
MCLSLREEMTFSLLFMLAGKVCIQGAFNILYIFTSELYPTVIRNSAVGTCSMMARFGSAASGYIAILSDVTLPTVPMAIFCIFSLFAGVLIYFLPETRDLPLPETMWDAVRMLNNTEANRCVGGIQMEEGDRDESYGQSERKKRRKGRGDGRDGKEEEEEEEREEEEEEEDEEEEDVPLYTNASK

SEQ ID NO: 125560 - protein, 244 aa, Heterodera glycines
MLFAQSSQYDADLPCTSAQALQHDQQRQQQVLVETFMDGRLRLLCSTRPDENGVGDGGGCGEDGGTTGANAVGGLERMSADVLVNFCASDILSEIAHAILPRPVQGDVVDLDELVEFDLAMCYRNVLDLSTEDGHCSVLFTHPLLNFVGIACQSGDILQCYMDLMAELAQHGWADFVAAHSSALFSCLVDSFDTGNKFEPSGASKGAAASLEDPALRVHLVGDDPRRPRRGQPKQLVSYELGVS

SEQ ID NO: 125561 - protein, 250 aa, Heterodera glycines
MSGFLRTKIAIELKALEKAKTATELYAEPDQTLTSLENAILLESAAERIKSEVEAVNAKIEQIWITASKWHDVIQKMDKDERKSEQTAYEQFQTTEKLNTKMEAANTKLTELKDLEMKVEAGAKLQRSKADRDARVEQREHAKAMSKSNAEADKGNNRARGNEMTAALYQLPTLRIKPFGGDKREWPMFEEAFKVAVDQKPGSKTEKLNLLKSLVEREAALLIGGLRLEEKNYEIAMKLLKDTYGDKGEY

SEQ ID NO: 125562 - protein, 41 aa, Heterodera glycines
MSDNRKEAAERKMAKAIFVSADCWLCVFDLLPAYQLGLGIA

SEQ ID NO: 125563 - protein, 105 aa, Heterodera glycines
MFVGCCAILWFYWDRLKKPKKKIFISADCWLCVFDLLTPSQLGLGISMISHRFDFYVDEHFKTRKWALTHIQIWRRIGENDTKEMEICHDGGNPLPIPQIPLPRK

SEQ ID NO: 125564 - protein, 21 aa, Heterodera glycines
MAEKANERKKKIVQTKEKRGK

SEQ ID NO: 125565 - protein, 44 aa, Heterodera glycines
MTCEGCSNAVKRVLGKLEDKVKLLSVDLNAKEVQVESSSMGQDE

SEQ ID NO: 125566 - protein, 31 aa, Heterodera glycines
MKRDREEQQEEIGGKESDGESNGEEEQFDFE

SEQ ID NO: 125567 - protein, 92 aa, Heterodera glycines
MCNFAVFIHIPIEPGILKWPGPGSGPGLGKWTGTGSRDRESRFSGTPGPGENQATPTEFVAKLFAGITDRFIESAAARLPLLGRQCTDNYGS

SEQ ID NO: 125568 - protein, 58 aa, Heterodera glycines
MAFRAGAGTGRELAQRPDQYLDILTNFDCCWSTPDEVHAIAEQLDEFVHHEIRLVFIF

SEQ ID NO: 125569 - protein, 212 aa, Heterodera glycines
MFNRSREVYKYFVRCSKTTAWSLIKVSRTVQQFLDELSSFFTLTVSTDQTNSATSDPRPLPVVTESVPEESTYDPPWDDRPLRFIETMAAFEAHRSTNVVPTVPSTSAAAPRPLPVVTESVPTSEIPALFAEFLRTNCVGHVPKEVLVAYLEEAIKILNCGGGQSANTPKISKFRKVLFHSLQNNRTRRAQWGFTGSPGITFLDQPPGRAIR

SEQ ID NO: 125570 - protein, 34 aa, Heterodera glycines
IKVNVEASNQVENAFFMLNISKLVRRKKRHMPQN

SEQ ID NO: 125571 - protein, 90 aa, Heterodera glycines
MKDYIDEVSAEDESEEEERDDDKSDEEEEEEEERKKGRKKGNKDEEEDAESDDDEEEEEEEREKEKGKEREKEKGKEREKEERKERRRRR

SEQ ID NO: 125572 - protein, 59 aa, Heterodera glycines
MQVSQMRTMSLSVASLVALLVLLAISSHPTFASPISSRDLNDAAEAGPLQAVEKRRNAE

SEQ ID NO: 125573 - protein, 79 aa, Heterodera glycines
MPKIRKMHSLDALEGCNVFPSAADKTTEEIKGSPLAMGCVVVVVYDENSIIFHGRWDIGRKLERIWRMAVKFNWVVIDK

SEQ ID NO: 125574 - protein, 202 aa, Heterodera glycines
MVTSLAFVPLEDLTPALAALEDHLPGELEGVLDWFVINYVGRLRNNGTRTRPLFRPEEWSVYERTMSGTDRTNNFAEAYHRTLQHAIGQGHPTIWKFINILREHQKVIDVDFEHFLAGNAPPPKAKRYRDTDKRILRILQRYNEEKAQPQIENDQGNIAKTKTKIRLLKCLGEFRAIIKRIVDFFVNFICYYILDKTEIFKN

SEQ ID NO: 125575 - protein, 45 aa, Heterodera glycines
MFFGSICANLSFAGDEKRMEWYQNQLVTVSTSIISNVDPYVSANF

SEQ ID NO: 125576 - protein, 217 aa, Heterodera glycines
PESDEYKALMKLQKTMDENFEKLQSTIAVSERVIALRGNLRDYKNNVRRPMKTLRRYVSLFWDPAIVKTDKDVERFIGLCDDPDKQTPLSILDYIQTYTVDDCTIGLSPEQIERQAEFVPMLNKIRMQISSQIEREKFDSISAELVIWFTELETDSANSVLQKVENNIAVKEIFLETGTYGPISVCLLNDIVVGKNFHRKEIKELENIIRLDVVKLV

SEQ ID NO: 125577 - protein, 206 aa, Heterodera glycines
MFGKNINRLELFVGFFHRLRKFVPSILNDCPSLHVLTIHVTNFFIEFPADDSAAASDGQAVAKWLFTPLQNDAPKVLKCAWDLDAVNLPSKIAAFKAAFASASSPVNFIVIVWFRPLPFADPVVPSVLTNQLTREQLALKIIDDNCTRFLLIRCPIVRDADKWAKWEEEAIGYHQWNQIGIEMNDEDNIGDGLLDAIRCPNDQQQK

SEQ ID NO: 125578 - protein, 84 aa, Heterodera glycines
MGCQDMIMLITDGAPGFFRETFELFNPEKRVRFFSFVVGEEAKDFEQVLIPYIRPNLNLKKVRWMACANRGFMAHISSMADVQE

SEQ ID NO: 125579 - protein, 341 aa, Heterodera glycines
VAAIPEGLPIVASVTLAIGVMRMGSLNAVVKKLSAVETLGCVTVICSAVETLGCVTVICSDKTGTLTKNEMTACIVVAADDTRAEVNAKGYGSGSGGECRLSNGERVVGHSHPAISRVLEIGCVCNNSHLANGTIIGQPTEGALLVLATETQLDISRSTQLDISRSYFRRLNEMPFNSDNKWMGVQVEPINRVRIIFIKGAIDRVLKGAIDRVLGMCVGYLDNGVAHRPLDVQRREHILHLATGLGQSGLRVIAIAMACGKDMNSLYYVGLVGIMDPPRPGCRQSIETVQNAGVSVKMVTPPRPGCRQSIETVQNAGVSVKMVTGDALETAISIGTRLNIF

SEQ ID NO: 125580 - protein, 209 aa, Heterodera glycines
MTNQDVVPYNPYLIKRFKSHINIEKVADIKAVKYIYKYIFKGYDAATVRCVTTEKGTVKELIYDEAGSFLDARYLSPVEACWKIFKFQLQEKSHSVQRLPVHLENEQTIFFDENDEEEKIIEKKDKKSKLMAYFDFFKENPNSPLFLYPEMPKFCVWNPKQGKWILRKNHTISKTIGRMYPVSPTEGEKYYLRYLLLHVSGKSFEDLKT

SEQ ID NO: 125581 - protein, 139 aa, Heterodera glycines
MVRKKQNFSVGNSNEFPNTSSNNQQQIAGFEAPVKSGETIERVVSSLKKQSDHIENDNDRKTIKRKANNFDVIDLDEVFEEFFVGNNCNLSEKDKQIENSEQTTISRMQLSRMNMSSEKADVSREKDRKRKVSRNQMSE

SEQ ID NO: 125582 - protein, 48 aa, Heterodera glycines
MRENREQKANASATVFVTEIAAFVVFFWLSFKVSTDFWKNIFAIYQQF

SEQ ID NO: 125583 - protein, 350 aa, Heterodera glycines
DSVETLPRGQSNRYHLYNSSASLEMNSVPQPLHIHQQQQHQQQQVGQQQHLGGTPLTPRNAHVVYTRVDRQVDCPPIAKMDFTVSGSAVSNGVVGPPHDSPHNLQQRHQFSGTVSASGAGGTPPLPPPPSLTAANRGITTAAANVQQYNRNDSNGYQTVGGRANAAGGAAMLSFVNGTTADGDDGKGGNCDAAEHGVTSAGEHQQQKAAKHQHHQQQRMAHIVRPIVYVGGGGGVAGGASPSPSTIRSATGQSQAQKTTPTSAIVKHSLIIFIFSTVHKFAYNNNGAKVPVGRAMVQPRVNLAVSSSNAIATPYGCSSSSSQYASVRVNPSNAGSVSNNAIIENDESEVK

SEQ ID NO: 125584 - protein, 35 aa, Heterodera glycines
MLLLSDLLLLVLLLLMNVQWLRHRIHFQTGRRIVK

SEQ ID NO: 125585 - protein, 141 aa, Heterodera glycines
HSITGDSTHQHSNQRDSTLQHFNHWDSTLQHSITGTQLSSIQSLGLNPPTFQSTGLNSPAFQSLGLNPPTFQSTGLNPPAFQSLGLNSPAFNHWDSTLQHSITGTQPTNIPINGTQLSSIQSLGLNPPTFQSPGLNLSKFL

SEQ ID NO: 125586 - protein, 263 aa, Heterodera glycines
HFLVRLSAVPLPGASPVASVCDERCPLCFSRSSYLLPSRTLFPEFVLRCPTSKFRLFVRPTRRHFLVLARFTDHFQSPGRANGRGANARGAQIMCRLQRLRNLVSGRNGMKLRRREGRALPAGKSANELVTVRPLFPQQSLAFGFSQHYGALTCEGCKGFFKRTVQKKSQYVSSSLFWSFITQSLGRCQYCRFQKCLEVGMVREIVRYGSLQGRRGRLPSKVKSSSGGIGGSAGTAMPIGMGGGVQPEPAPSPPLPILTIIAK

SEQ ID NO: 125587 - protein, 113 aa, Heterodera glycines
MELFYAGKLLNRILDLHKADQSPTTITEQPKSEPTEEIGVDQNLNPVVQAGLAHFSLLTHGFGGHSVQAVLETMIRVINECNVVLTRKYQSPINAVTAAGQQNAVLSMPFDLP

SEQ ID NO: 125588 - protein, 60 aa, Heterodera glycines
MMLIDTIDHGTRQLGPGTFGPQRFFGYNFFFFVIQIKHCWYHSKAANRASEGLSNDTNDV

SEQ ID NO: 125589 - protein, 396 aa, Heterodera glycines
DKLMKLGKFQTIYTFYMSKRQTFLSSFSKNYSTIEEKLRRFSIFVANFEQLEKIGREGEVYGITTFFDWSDEELKEVITDQTKELTDRLHFQFRPMDANFKRPSEFDWFRPMDANFKRPSEFDWRKKGVVNHVKNQMRCGACWAFRCGACWAFATAAVVESQHAIHNGTLLTLSEQQMIDCDQSNNGCEGGNRPNAFRYVRDNGLLREDNYPVSRPPYVRDNGLLREDNYPVSRPPSQFATFVDPTQRTFVDEVRVDPTQRTFVDEVRTLPSDEQQIADFVVEKGPVSFGMNVTKTMFHYVGGIFSPTADEFGMNVTKTMFHYVGGIFSPTADECQFHSMGRHAMEVVGFGEDEKSAFWIMKNSWGSSWGINGGYMLLFRVDACGLSREVHTALIT

SEQ ID NO: 125590 - protein, 115 aa, Heterodera glycines
DKDKANSYHKEFQTFREDVHDLFYDKGGWFDYDLKNQKLINRFYGSIVVPLFARCYHTADVEETEKMLTQLEEFDKKNQIMSQKFGVPTSAIASGQQWDFPNIWPVKAESVVYYN

SEQ ID NO: 125591 - protein, 219 aa, Heterodera glycines
MIGQLFASVLPLVLFANLINVGEMVRGGSNSLSMTNGGGPPIQQQNPSINLVTNVAHSLNNLRLNPSAEENQHQPTPVNAAQPKIRQNPNKKGVKVGSKMKLQQKLKSGVKSKDLGEKKSKLGMAMFYVFMLIRLFVPHTHVPTNVMLRYDNHFVPIEQQFVSCQPMDNNGIGQKCEFIVEQMAMNKNMPNVSIWANLDGDKETIQQLGHQVGIIHSFN

SEQ ID NO: 125592 - protein, 15 aa, Heterodera glycines
MYCNTKVHKMNILCL

SEQ ID NO: 125593 - protein, 100 aa, Heterodera glycines
MTVTSNTEFRLIECVPILEEVAREFGCITPLPNLGSHRDYRVSGCMMIRTLTSLNRLYIFDAEDCIEVNGKYVSYFIAILGEGFLKARGRHEPKSGQRIL

SEQ ID NO: 125594 - protein, 78 aa, Heterodera glycines
MPYFRILSLAFSFLKGVPHPDFGEAVVAVCEPSDAFAEKLSGVAHQLTDDEKSAFRQTLAPYKIPKAVQFMPLPRNHL

SEQ ID NO: 125595 - protein, 16 aa, Heterodera glycines
MLVTTSSTSGGKNWDF

SEQ ID NO: 125596 - protein, 17 aa, Heterodera glycines
MEKACKIWRDYIDFSAL

SEQ ID NO: 125597 - protein, 95 aa, Heterodera glycines
LFEYPKRTLEKIDFFVFGAVPPNRCAQIYGETESFGNSFPIACTLILRWIFAPHNCLSTPNGHLKKSIFLFSGQSPRTDAPRFMGRPNPSGIASL

SEQ ID NO: 125598 - protein, 51 aa, Heterodera glycines
  unsure (1)..(51): unsure at all Xaa locations
KNRFSLVSVWGTQTFMGSKNPXQIKVQAIGKLSPKDRSPHKSGRIGSGGLP

SEQ ID NO: 125599 - protein, 72 aa, Heterodera glycines
MVKKFFLLSTNMPFLRVYLGRGRGYILIDFTMLIFQKLAKFLENMCNEGIEADAMKAGGPAVSLGATGKMHK

SEQ ID NO: 125600 - protein, 150 aa, Heterodera glycines
MIRAITQFTHSSQAILGGVCVDTEEQLGPPLTHLVHTFIGVGGANREAVHLCRLFEWAMPCNPVNGMRCHSQFLYDINSKVGYEATTRIFVIRSMDDGTVGTRDCEGRSVSAIDGQNDEIVLRNYSHQMVIFGTGDNSSNFYILINCFLK

SEQ ID NO: 125601 - protein, 93 aa, Heterodera glycines
MCPPATNRTTDTDHIKVAAATVDDSRATVGEGLADGDDDASQLRHASTPLLTRYYFDAVTAQCYPFGAQTCGGNENRFETKEKCLTKCRIGTD

SEQ ID NO: 125602 - protein, 71 aa, Heterodera glycines
QYSVFILLCLFLIAEFGHTSAECQKDKTEATKEALLLQYFFARGFPFLSDSDDLPTAAADEVKQKLTNKCD

SEQ ID NO: 125603 - protein, 53 aa, Heterodera glycines
MASKIGGPGSLGDPSLWGSSSRTSTAILLNKNDAADEECPNWRCVIMGNNLRS

SEQ ID NO: 125604 - protein, 52 aa, Heterodera glycines
MSKVSKPVKEKATKDVSIIEKEEPECFYVKKILAMYVCHDKEKSRLFYIDWE

SEQ ID NO: 125605 - protein, 146 aa, Heterodera glycines
MCERRVGNVLTDRKCGGSDALVVRRQTDQTRANEVQNFLRKIHAQKSTSAKPTKRLALFLPSALSKLHESVQQCIRNASDFVGSISKFCVFIEHSDSDVLDALLLASTDDDDGTATNDDRDTNKNISNQHQQDDEDGTDHRHDDLR

SEQ ID NO: 125606 - protein, 98 aa, Heterodera glycines
MVSPDEVAEEYRAALSELTRNDKTQINLLTILAEDYASYASAIVAVIEERLFKCPSPMKIVMLYVLDSIVKNIPATSGAYRDLFAKRIVDMIVHVFKE

SEQ ID NO: 125607 - protein, 206 aa, Heterodera glycines
MRKEHADRPTKVELTKGISVLMNRGGEEGEVVDTPRRPPAPPPPPPPPGRPLRRPPPSPPGPGGPSPPSPPPRPQRPPRPSRTSRRSGRMEQWRQRRYDIQQRQPPPLVVRDLLAEAAAAPLPESDDDNDADDEYMLENGFALPAPSQYYGDLPVLPTMRKKLRKWTQLSAGLPSEENYSRTRLTMMMINAKNIGFINLHHCLAQK

SEQ ID NO: 125608 - protein, 107 aa, Heterodera glycines
MHSETVFIYAQEQEPKHNDKNWKAPLGAVLKHQILDPPQGFGIPVSGITDFYIYLRRCAAFFPANAENADLFSINIIMPNNTEGLTIWYSIPAADFQKFKSLAVHIL

SEQ ID NO: 125609 - protein, 253 aa, Heterodera glycines
ENRKPNFFLALTQDRVQKMYPKIASFSYTFFFKNSELNTHQPQVEVVRSKGKELAKSSEIGGPEIERRIKALDQSWTQMVELAEDRQKKLQESEEFQNFIGRVEEEEAWLNEKQQILSSPNVGENMAAVQGLLKKHDTFEVDLQMHQQRIDELQRQGEQLINSGNHHAKNIGTRTEQLLKHLILIKELAVQRLQKLRDNNAYMQFMWKCDVVESWIGDKEPHVRSADYGRDLSSVQLLLNKQDTFDNGLNNFE

SEQ ID NO: 125610 - protein, 72 aa, Heterodera glycines
MAKRSLLAKNASTNDLTQYINPVLANRRRSSLFCTAVDPAMKRLRQREAYKTAMCQVGAFTALGKKHWLRLF

SEQ ID NO: 125611 - protein, 80 aa, Heterodera glycines
MRYKNGGKGLYFEEKKSKCFPSGPYRPQWIFYTGTREWGGPLDSFVSVVKPKSTISKQQVKQGIGRFGAAVLAPASVFLL

SEQ ID NO: 125612 - protein, 52 aa, Heterodera glycines
MAATKCSEVLMIGRKKVNRLIMAGLISELQGNDGRNGQKGKCEKISSLRRVA

SEQ ID NO: 125613 - protein, 177 aa, Heterodera glycines
WDLAKLKLINLLFLIFYFCSFGPINLNTCLSESSASDSISAQLNKPISGGQFTFYGIGGQGACGLDIATPTKSAAGSGTLFNSDAAWVESCLPDARYLLNDLVCINRCVKIEYKGNTLTVPINNKCSECAKDHLTVPINNKCSECAKDHVDLSEEAFNWLEPGGGSVGVAKSEKAKT

SEQ ID NO: 125614 - protein, 128 aa, Heterodera glycines
MPSFLPMLILLLSVQLLSFLPCSFSASLSVAPAYTTKDTCLSESSASDSISAQLNKPISGGQFTFYGIGGRGACGLDIATPTKSAAGSGTLFNSDAAWVESCLPDARYLLNDLVCINRCVKIEYKGNT

SEQ ID NO: 125615 - protein, 948 aa, Heterodera glycines
QQQQNRIVISITSHCSSMSTSNKLRRKNSSSATPSSASLLHINDARIAGLYDLEHTIGKGHFAVVKLARHVFTGEKVAVKVIDKTRLDPVSQAHMMQEVRCMKLVQHPNIVRLYEVIDTQTKLFLILELGDYDMYEWVMRRPYEKGGGGEAEAQLYFSQIVKAINYCHKLHVVHRDLKPENVVFFERLGMVKLTDFGFSNLFVPGEQLQTSCGSLAYSAPEILLGDSYDAPAVDVWSLGVILYMFVCGRLPFQESNDSETLTRILDCKFSFPDHVSVDCRRYSFAGILCDYIVSPAPLIRLISSMLLRDPSRRATLEQIVQNKWVKAGDKGHAEALPLIIRDHLPACAHATIVEQMVAGKIGGEEEILCAIELNEYNHLTATYFLLAERVLSCYRQAQANRLMAAVEECQMGDLSSQLSNGGGTAATTANQNRSRSRSNSWRGPAPRRAYSILKEESEEELSSYNLRSSSRQSSRFFNVVPSSAGVAVSAKPRDASARSNLLATSRANSNDSFAPGPSAILEDEVEADEQQKPTSSTDQSQSQSEDDALASLPPSTSSTAQSVDFPPPSATSTPFLQRILAPICEFRDQSPDTAVDSVQSAFPFDVPLVANESASGGGIVRRIRPHSAVFGASAPRPVPGRGVALPSSAGHLPPLPSSPEKMRTTRNGHNHSRMRNASSLEMFPISNGIGGKENGSSFLLLEPCSATSPPTPNPNNNGVVHCWPNMLLERHPNFTNLCNLPISSAANLIKRPSSSSLTRRRVVFSARAFVFDFHFLFRNSSPSAPLTFRATSSLHSSCDRISPHAIQELLEFSRLSGRMRRTASPDSRLSSRSPSPSCLSSGRTSPAMSGIVSRLKTTNFLPSTGGMRKLSSSPHLLGICEETEEGGDMQDLLGQGNSAFCPDTFITSRANGTSRRQDFQCNGKSASAVVVRSARSASMGLGTIGRMS

SEQ ID NO: 125616 - protein, 127 aa, Heterodera glycines
MFGQQWTTPLLFGFGVGGLVAEHGSSSRNEEPFSLPPIPFEIGNISRLEALRIREWLWPLRVVRIFSGDDGSGGRWPAEDGSATPRPGTGRGADAPKTAEWGRIRRTMPPPLALSFATSGTSNGKAL

SEQ ID NO: 125617 - protein, 115 aa, Heterodera glycines
RILDCKFSFPDHVSVDCRRLISSMLLRDPSRRATLEQIVQNKWVKAGDKGHAEALPLIIRDHLPACAHATIVEQMVAGKIGGEEEILCAIELNEYNHLTATYFLLAERVLSCYRQ

SEQ ID NO: 125618 - protein, 128 aa, Heterodera glycines
MQTRYASSVRFHLIGFTSSLTLSSKCFATFPHGTCSLSDSWPYLVLDEVYHLIWAAIPNNPTPRHVKMGRHRQLDRSCTFSGAPVKGNLNKRANPSSRSIRYTSQPQRSCDSALDSSQFTRRYYGNPR

SEQ ID NO: 125619 - protein, 367 aa, Heterodera glycines
SCDSERGDCCGVDFGTGRATKTGDKGTQRLLRRHRDTGDSRAVVADTAVVVATMPSSQSLSSSAATAAETTTSNNDNGNSKKKSLRERLRHPDLHLGSLFTSGKSGGGFGAFRRATLSSGCNDGRKAARRQHHHAVAAAANSRHATASTTVAEESPPPPLAGGCGDDTQSLLSSVDLNKSEEQPYHHQQQVPSSSSSYQPAPVPTRGRLQPSVSVSCSTGAGAVGGSSYNYHTHLGGMGAHGRRESFLYRAGGFGMTDDTSPVLQLRDYATVSGCGNSGAAGLQRPASRASSVASSELTTAAMHGDDFIVTPFAQLLASLRNVRANLVAIANLPQQCTALAPDDGTAIATINVGGATSSANMNNVIQ

SEQ ID NO: 125620 - protein, 223 aa, Heterodera glycines
MDKPKCDDQWVIKQMLNNLGTSPTQEEIHMRIMAHLIETNVPFFDFMHQSATNLPHSFLSEYGSINAKELNIFYKNYLLKQSKIVGSWEIKMIMKLLFKQSAEVEQKMHQTKKNEVQWQLKNEFSKGQINEFYGPQMLKKAQKMSAPELIGQIVEHAQIFSKYTAAVCQKAAEPYAKIANAKAELFAMLKASAGEMPKDIETNEQSIKKNDTLLGFICKLTQC

SEQ ID NO: 125621 - protein, 80 aa, Heterodera glycines
PGNLLVNSNCILKICDFGLARIFDRCDVQNMTHEVVTQYYRYNEKVDAQGPIDQLNMVIDLLGTPKPDEMRECCEGALKH

SEQ ID NO: 125622 - protein, 19 aa, Heterodera glycines
EPVNSCIGCKCRRCCTPNS

SEQ ID NO: 125623 - protein, 138 aa, Heterodera glycines
MRIFGNVQLCAVRRLHTSVLRRSMAVPMSRYEPNSRLPYQKLDANLAVIRKRLDRPLTLAEKIIYSHLDDPQNQKLERGVSYLNLRPDRVAMQDATAQMAMLQFMSSGIPAVQVPTTIHCDHLIQAQVGSEKDLYRAK

SEQ ID NO: 125624 - protein, 80 aa, Heterodera glycines
MEAPAEIDEIYRPHEARIHEAFFNTLSKPIHSKNERRNRAEGIFTTSESQQDRERIHVTWRHFGQKTKFFLDRNEHDLFE

SEQ ID NO: 125625 - protein, 54 aa, Heterodera glycines
TGAHRPLAPTPCPGHRRQQRAQKGGQQRGHAQHSAHLRADGHARAAVGAEASRT

SEQ ID NO: 125626 - protein, 80 aa, Heterodera glycines
MTRPHLRNAPGTFSVLVPHLIFTDKKILYVSVFFSFLIGCDAKTRKCLRQHLYELLYGQFVNGQSVSNGQSVRIFDFLDT

SEQ ID NO: 125627 - protein, 62 aa, Heterodera glycines
MNCPMTDCPMIDCPSGCRRVYLYSMLSPFHHNLASNFINPSSKSHVHRQDEVQNGSNYQQKE

SEQ ID NO: 125628 - protein, 119 aa, Heterodera glycines
  unsure (1)..(119): unsure at all Xaa locations
EWRGEIVDGHHSWVRFYLQEKAGDIEYTXYYVKPRHGNFIGTIQYKWKQYLKRIGGFMIGTSPAFDFSLLTVCILTEPGDRKCKFQLKETPMFVSSFLEDCVIDGSFRHNFCIATAYPG

SEQ ID NO: 125629 - protein, 127 aa, Heterodera glycines
FSPFIIYVPDWHYYGTVFCAILPQFLALFCPLFPNLFLANFWLCFAQIFNPLFCLFLHIFVPNFPIYFLPIFRIILPQFLTLSFANFCTFLCQISLFISCQILHIFVPNFPIYFLPISCIYFPHFLI

SEQ ID NO: 125630 - protein, 38 aa, Heterodera glycines
MKPMQFASFSPVAIIFLLFLVTELWAGCVLSTQKPKKD

SEQ ID NO: 125631 - protein, 374 aa, Heterodera glycines
DERVQKAGKKRGRTEKKKCKETEESESSEEESKEQKQGGKEGKGKKEHSKGEEETKDEERRGEKKEDEESKEKRAEPTAAEEKASPKDQAQSLYEEAKPASAAVPAEAAPAENAPAGDAAYGMAPNASQSPPESAAAPAGGAGYGATNASLPPPPAEPPKDQAKSLYKEAKTKPASGTAPAEAAPAESAPAGGAPAEGGASNASLPPPPPPDHPPPKDQAQSLYEEANKPPVSAAAPAAGAGYGASNASLPPVLPPPPPPAESEAQKGAGYGGGGTPAEEKKEKTPDEQLADVLKEGKKKGLIVDKREEEGEKERERKKKKKKKEEEQRETERVEEEEKEREETEERGKKKEKGEEKKEENRDTEAQTSSGEAQ

SEQ ID NO: 125632 - protein, 353 aa, Heterodera glycines
YRFLGRFMLNYIWNSNYPEDVLKSLFLMCLTYAMKGAEAMNIVANHFIFLLTARHLDYEIAVHFKNIKKIDGTMAETILTRFEIVDQSNKAKERPSICEESFVIDITAIESGKQRKKLAGKGRRPDFNIPYSICDGTTFELMNNDNFCLFRAFEFLRMKHVLPQQRFSEYKRNPGWQLNDEYYAELHPDTFRLFCFGTSGKMKPLWKADCEMPYSHQNQHNSKCKWKCHNCQRVGSDFRGNCIDSNDNFFETCLGCSKTFKCRKCYEHHCKLSQCKIKRGTEVTTIEKSICKSSKKCVDCGIIYQTRVHKDKPHVCGQKFCKVCLGFHVPRECYIPYRAKKKTEERIIFFDFE

SEQ ID NO: 125633 - protein, 97 aa, Heterodera glycines
LFDGHSLMDVLIAYWLMDVLIAYWLTSHVFWSYHQQFEMPTAQRTQSALSNIWWFWLCYWFESEVPDTGPIVNDWNWPFAQPHFMHTLMAKLNAKLQ

SEQ ID NO: 125634 - protein, 94 aa, Heterodera glycines
MPPYGYMPQNVPQMGYQQAPLAPPQVSVPQGKTGGYKPSCAGPAPAPVPCVAEVLTQLVADFTTFTTEFNNNLSAFSTEFAQLSKWLRENVGVA

SEQ ID NO: 125635 - protein, 86 aa, Heterodera glycines
MKWTSHMRAAFSKTLLIVYLNSYFHFTLPIINSLLIVATIRKMERTVGSCVRHNSVWTKCDKRQIPEKGNVSPFGIDKIYPYDSKG

SEQ ID NO: 125636 - protein, 67 aa, Heterodera glycines
MLYMTYAGAAPTLLKCGQHVFPDAEKANKRCEALAGMAKSNQANCTSQNAEWAIQFRSVNVEFDMHW

SEQ ID NO: 125637 - protein, 75 aa, Heterodera glycines
MRTCQQLNSPSTKRSPINRRIGPSVNINLRAQTQNCLKTVDVGLNRPEKWKKGLICANDFFHRMAQLFQFYNKFL

SEQ ID NO: 125638 - protein, 187 aa, Heterodera glycines
MAHLEISRNSQRPYIDHSVIAFLRSNKQIFNGTRFALSLSVQAPKNAAQPIWDVLAREIWSIIAPNIRRLYVPDADHLDNLRSRTSPTILTDLNINSILSGHLLPDVLGDFDGPNATASAGQSLSKWLHTPTTDGKPKRLRCDDFNGQGNAEWVHNFKEGAPSFLLFCHSFASFSATKFSTINAICF

SEQ ID NO: 125639 - protein, 69 aa, Heterodera glycines
MPNLKDNTYFVPRNRYVVYAERIWLDYDASQIPPEWHRWLHHICDKPPTVEPPPERKKWMLEHEPNNSI

SEQ ID NO: 125640 - protein, 90 aa, Heterodera glycines
MKRCIPCGGDLSSFGRRCRTLNKCANSWSIISSQIGYGHRQTRRIEAEGGGTTVASGGRQNEMKKVIKKLTSMSLTDRGLMVFIFITSGR

SEQ ID NO: 125641 - protein, 59 aa, Heterodera glycines
LIALVCLIGVLMFFAHSLRDEPLPTGAVKTPTAPDENTVDAYYKSHAVAESSDMDNNFA

SEQ ID NO: 125642 - protein, 38 aa, Heterodera glycines
MPITRRVLCAVCGKKIGGNFTTRQAYQCRAKKLIGPNS

SEQ ID NO: 125643 - protein, 320 aa, Heterodera glycines
FICGDCWLDLFDFLPPSQLGLEIALISRRFDCFVEEHFKTRKWTLANEIKIRGVIGQNGAIEMGIVNSDGKALPIPQIPLPNKVIGFGSIFIHFIDQNVLTFLRRFHRFFSVCATKLYILTENVRISEFVMRNIWPLFKNTIHVMCLNPIAFRQMRQLAPSMLNDCPSLRVVFFDGGILPEFPPDDSANASDGQAVAKWLFTPRPDLTKILGIENLTVDQLLTTVEQIKAAFSSASSPVNFSISVDFPSSSPIDSVEPFQLTNEFTGEQLVLLQENAYGFVLIRCPIVPDDKKRQKFKKELGDRWNQMKIAFTDQLVDNG

SEQ ID NO: 125644 - protein, 338 aa, Heterodera glycines
MAIPQHKDLLFGGKTVIFSGDFKQSLPVVPHEGLTAQVTACFQTNPLFGQFTTMKLTINQRLGQGQQAYLQMCRQIGLGETGEHFWIPPQFLVKSREELIDFVYPNFQQLLGNDKELLNRLILAPHIDTCDEINEIMMANVPGQVREYLSSDKPLDERPLDIDEIESEVAALNRRTDSGMPPHRLRLKVGSVVVLLINKSDKEGLINGTRIVLEELGDDRLVGRVINSNAVGGQVKFFIERTRNVYEDKTPGGLKYERLQFPIKPAFAMTILKGQGQTINTVGIDLERDVFSHGQLYTAFSRATDGNNVRVYAPRRETDAQGQTKVLNIVAKNMLKLQ

SEQ ID NO: 125645 - protein, 557 aa, Heterodera glycines
MLVPVDEEPDILVGMADFWKFFNGVQRVSPQLFKVQTLIGSTVCGRDEIPSRPTADHPLSVMPVTVHKNESISDLDSLRQFWDLQNIGIRDDPLENDDDTAQQIFDQTTTRLANGRYSVGWPWKNFPPDLPSNFAMAHRRLSSILNRLQHFPELLAKYEAAIQEQLRLGLIEPAVRTRGLEHFLPHHCVVTHKGILMRFRLAGIALWGDLKKAFNSLSLLECDREFCKVLWVNDVRKPPLPDNVVIYRWSRVPFGVIASPFLLAATIQKHLKQDGSPLAIEMAENAYVDNLLMQCTSPSEALNKYMSSKTLFRACQMNIREFICNSDEVMCRIPKEDQLVKEVPKQLASVFDPLGLVCPALHVAKMFFQSLWETKLDWDDSLPTEKVQEWNTIATTWNQQKVRVPRRVIPLEVTSHQLHAFVDASKDAYGACIFIRAQHEVAITAHLIFAKSRVKPKGSNLTIPRMELMGMLIGIRMLQFAEKQLGLAIRHKFIWCDSKPVLGWVSSSEQQPRFVENRLKEIRAVDQVRFLYISTEQNPADVASRGCTVLELTSHPL

SEQ ID NO: 125646 - protein, 68 aa, Heterodera glycines
MFQIAANIFRYERNRTERLFLYLQIVTGKWARRKCFSGKNLAHYILDLYRLCEFYEVDDEWTRKLWVK

SEQ ID NO: 125647 - protein, 20 aa, Heterodera glycines
MAIIRDMLLDDIELFQRSSM

SEQ ID NO: 125648 - protein, 168 aa, Heterodera glycines
MMFNRELRTKLDLVQPVFNPKKREEKEEKQKVVDNYRDRVKRNFDRSTWKRSFDIGLKIFARNFRDGTKWMEGEIVRQISPSLFLVRTKRGIWKRHLDQLKSNETDSESADTDSNSSMAEQAEMDTDVENQPDIDAQDEPQNVLTNDQEELRRSSRQRKPRTIFDPSR

SEQ ID NO: 125649 - protein, 145 aa, Heterodera glycines
MYSGFVWQQRYCAGAEWVLKVDDDIAVHLRRMVEWTEKKFQKIATEHPLIYFGVPADRGLSRDKNSKWYVPYGMFTGEHFPPFLYGGCYLTTPSTIKAVLEQAHKTDSFYLEDVLYTGILAELANVTVSDQLSHFYGNGLQVINN

SEQ ID NO: 125650 - protein, 72 aa, Heterodera glycines
KVEDKVEAEQKVEEEQKVEDKVEAEQKVEEEQKVEEEQKVEDKVEAEQKVEEEQKVEEEQKVEERQLENYLF

SEQ ID NO: 125651 - protein, 219 aa, Heterodera glycines
MRISAIHEAIRDDDQMTLKQLVDDWDTATGRDQHGRTPLHIAVGMRERGRERAFGQSVIGQSVMGQSVIGQSVMGQCVSLPFSASLRQAFIHFFKFSLFFVSSCLTDDQQRAQMTRILCRAGAESAATATKRHNENAAGRHTEEADDMLVLNELHRRDGLIGEEAEEEEDEDDGGGGDVDQSADEIEFGHVAARRLAAKAKNAAMIKGWVWAIRLIDIY

SEQ ID NO: 125652 - protein, 127 aa, Heterodera glycines
METVEEDSEKERAEEKRLEEEKPEEKGSDGNEETESEGKGKKRGDEESQLTDDTAEKEKELVSLTIEEKTVEISESEVVNCDEREGKEKSVPPVETEAAGRSTQRQRVQGSTTADEEATIAAFFDFK

SEQ ID NO: 125653 - protein, 312 aa, Heterodera glycines
MVKLKVILNEPVSQHEQVLILSMISATISNPMLCHHRAQKNYDVRIDRDTTQCKLIANLFDEPQRELEVDIYQPNSEPFTFKAHRCLKVKQSQKFWTNLLNDKFSDPVSVSTLPTTIEDCQEMINYEKCEFGPLSGQSNEQFHTNQELHIDYSWWKFGKDKSEVNNCYHAIITLLGKPGSESLGSPTEEVSKCKFSKGSCRLGDNAILIWNLDSTEHQRACLYNKVTTENGKFTKRMWISKNSQFALSFQENAKSVESCGHTLKLSDQGFAVPSWQFRIITGKTTHRIKREQWWPREKPLDQNEKAQQQLHN

SEQ ID NO: 125654 - protein, 120 aa, Heterodera glycines
CKFSKGSCRLGDNAILIWNLDSTEHQRACLYNKVTTENGKFTKRMWISKNSQFALSFQENAKSVESCGHTLKLSDQGFAVPSWQFRIITGKTTHRIKREQWWPREKPLDQNEKAQQQLHN

SEQ ID NO: 125655 - protein, 124 aa, Heterodera glycines
MAVGALGGGRAEGRAKGSRKKAEEEGKKEQAKEKKGGGRGREGRGVATEENGGGRRRERRGKGAATEEHEGERKEERRDGKREEGEGNASASNGQTHLFLAERIKQKQQNKTQKRQQKKQNEKC

SEQ ID NO: 125656 - protein, 157 aa, Heterodera glycines
MTRMDDGGDAYLSCGSEKYTAGVRVVEGALSVGDHHQQTAEWWQLLCCQSDSVRVRAEDCVETKFINDFRRSSSFSSGAQHFHHYTFADENMAADFRRRRAEIANAKVNSYAVPTVNVEENGKRQIMTTTIGKKSENTTTARRNSTSTEHQPQKVNG

SEQ ID NO: 125657 - protein, 34 aa, Heterodera glycines
MTFFCAVAERKEFQKVVKADVHLEVDQAFNMQDD

SEQ ID NO: 125658 - protein, 340 aa, Heterodera glycines
NGGENVSLSDSECGGGTEFNGMAGGSSDRMPNGGAKMSQSMHRLTSLSDYDKRKRKKHELLEEAMKARTPFALWNGPTVVAWLELWVGMPSWYTEACRCIQSGSIMSALSDQEIQREIGVSNPLHRLKLRLAIQEMVALTVALTSPSSPQILRFGMAFGEMNHEWVGNEWLPSLGLGKYRTEFMECLVDARMLEHLSKRDLKMKMIDSFHRTSLHYGIVCLKKLNYDRKQLEERRNASENVNRDLMLMVWSNERVIKWLEEIGLGAFVVNAVDSGVHGALMALDGTFDVPAMAHALDGTFDVPAMAHILQIPDSDSARRTLEEEFQKLVANCRGRGEPRD

SEQ ID NO: 125659 - protein, 241 aa, Heterodera glycines
MEPALKRTFKKGIDYPTHFDWRERGVVTPVKAQGKKGAERNWDEQLPIRKKYAPKVCAARAGHLRRWQPQNRPTQLRTGSCAVCLSRSCSTATWRTTHAKGATWTKRSGRVGQTILFGKAKKHRFIHDIGLETEDEYPYLAHRQNVCMMHEGNRNLTKIDVAVFINPDEQSMIDWLINFGPINVVGLHSMLVVGYGENIYGDKYWIVKNSWGQKWGQEHGYLNFARGVNACGIEDEPIGLM

SEQ ID NO: 125660 - protein, 59 aa, Heterodera glycines
MSPLRTYVVRPNGADPLFVPTSWNHHDSIIANLARTNNAQEAFHLALRRQFAKEHPPIT

SEQ ID NO: 125661 - protein, 86 aa, Heterodera glycines
MDLIEPLFPILFTLEKNEFLLESKDFNYSHFFSMIEDITGRSHVKEICFYTKDGGDRKIGRSRKAMAIVLMYGLMNGKSLELFLCS

SEQ ID NO: 125662 - protein, 147 aa, Heterodera glycines
MVHNSRRYDNCGPAIADRTIADDNCGRQLRTTIADRTIADDNCGRQLRTTIADRTIADDNCGRQLRTVLLRTTIADDNCGRQLRTVQLRTTIADDNCGRQLRTVQLRTTIADDNCGPYFCGPYFCQKINWKGGPRQYDPFRITNLKS

SEQ ID NO: 125663 - protein, 413 aa, Heterodera glycines
LHVARVQKVLPQRQGMLLRSGKTAGPMRERDAKRMEFLRGKVNRMDVYWECEIHRMLERSKEMRKAFEDYVDDGPLVIRDAFMGGRTGPLKLLRKAGPGEKISYYDFTSLYPFTTCYPIGTPKVHVLNQEAEWRSAADNPYPLALLKVWVEPPRRVDVPVLPVKVGERLCFPLCITCAKEHPTGGVDNDYHCEHSDRQRGWVSTCTSIELNEALDEGYLVTKVFRVLEYEQSDDKLFRPYIAEFMAKRSRPKKDWVDEHSCSNIVISLWTTSAARLVLLKAMQKVVRSPGSDLLYTDTDSLILVHPEERCPLKTGPHLGQFTDEYPDHDIVEFCSGGAKQYGLCLRRKGAEAGAQLEHVLKVRGLTLNYDVINNQGMRYENFKEEVVRYATSGEYEPIIITYPNFLRPNIREG

SEQ ID NO: 125664 - protein, 119 aa, Heterodera glycines
MVLVFRELFRIGFNPEMLRRGNKMYEMKVRKQKRRNPNIVFRDSFNLMPCALAALIPSYGLDVEDKPFFPHLANRPENYGREIHPTPEDYLASGMMPSKRQKFDVWYAEHRHEPFKLDE

SEQ ID NO: 125665 - protein, 172 aa, Heterodera glycines
EVFEMTNSTASATIEKLRYLFTRHGIPETIVSDTGTQFSSSEFAKFVAANGITHLFSAPYNPMSNGQVERIVDTFKRAFRKLKGEGKPNKEIIDTFLITYRTTPNDSLPDLKCPAELLLGRRPRTTIDLLRPPPHPFETFCPRFISSSFASLFLQCLLSSCRQTHACLLIDL

SEQ ID NO: 125666 - protein, 253 aa, Heterodera glycines
MALISPRFDALVDKHFDGKTELTLWKWILIHKGKGPKSELYIDHSVIEFLYSNKQIWDRISTNLELSKYCHQSIWDVFDHQIWPIFATNIRHFGFCGADLDKLRRRISSTILADLVQLNSIDSGYLFPDGIADDGPNATAGQALAKWLHTPTKNGQPKRLYRNGYVGPLKLEWVNNFKETFRRATTSVSYNIQLYFFMEPTSIEQFELVNEMTNEKLTLKYSEEYNDGSLYNWLLKRCPIGETETAPVKWKDR

SEQ ID NO: 125667 - protein, 24 aa, Heterodera glycines
MDDCQTSATAHVGKWDGEESGGLR

SEQ ID NO: 125668 - protein, 232 aa, Heterodera glycines
KSMKSDRSSSQQEQMRKRMRQRKQQYNNENQIDENITPRKMGPLCSDFPSPSTAPPLKRHIVLHNCGRKVQSAGRTTRHGDGEAAGNEPSSWLNRKFYIVVNNGKPIEVYCTDLIHRVKQCPQRQRLGVEDGQRFLRVVDRWREEWNHGVQMPPSKLVAMDTSVNNRYIDEKHFHFAAKPPTLYYNLDEEDILWLKKRPTAVGADKCKGRTSSIAPRTFVDAMNCFELLTYK

SEQ ID NO: 125669 - protein, 117 aa, Heterodera glycines
MQGFSDPADAEQDPAGLIPQIPHFPKNALLRTRILKNPARGSVPGLALPSTDRFSTVTVRAIVEVASMCHRRSCRYRRCFATASVSASRNIVAVVIVVLGVVIVVALPLTIFYFYYF

SEQ ID NO: 125670 - protein, 41 aa, Heterodera glycines
IFYKFLNVWIFFWLTKTSSNLALSILIQIAPNFFYSLTRPY

SEQ ID NO: 125671 - protein, 72 aa, Heterodera glycines
MEIQNNIDVSGLVALIKFHDLNTVLLALLSVADLCSCLGILALGLMRKALYERIVETSQVPLEVKGHHYLLK

SEQ ID NO: 125672 - protein, 124 aa, Heterodera glycines
MLLISLFSTLTVTVPNVLFLSNILFCKWMHSDLTDPSNWMITAKCAANFFVFLLFKEEFRVRIYEILGCISRDPSNERQYEVSALGIAMTSRRRKISVAVVEQQRNDQQQVTIGGTNQIHLETK

SEQ ID NO: 125673 - protein, 68 aa, Heterodera glycines
MTTREFAKRQKFAMEENKRKIRGFGKAIDTAIFGTLIDDFCKTNKSAQDELLHRILQEIGVAAQRPFR

SEQ ID NO: 125674 - protein, 44 aa, Heterodera glycines
SVHFLWDSVVPVLRWHWFEFIPCFLDLAHQKLSNDTKFVRIWAF

SEQ ID NO: 125675 - protein, 140 aa, Heterodera glycines
MSKRTVDQQRQQQNMQKKHNELEQFRSKLDQIENELMEVSDQLKDQLARNDQFRKGKGFMTTEEAAMGWHIVQGHPQYAAQLLQKQLERDAQQRQGTNGTETTAQKRKRKATEEQEKPTKLFRDLWESSKDEEETEQMNS

SEQ ID NO: 125676 - protein, 18 aa, Heterodera glycines
NSIVIDFKFFVKELLPIV

SEQ ID NO: 125677 - protein, 56 aa, Heterodera glycines
MIIRIAAILPIIFVYGMERYPDTTNKRDNLAMKKKQQGNLSYLYSIGEDEKVLIDY

SEQ ID NO: 125678 - protein, 41 aa, Heterodera glycines
MTLKQFVPTEHRTVGVTICASPTTAVRSVRSDICCRPFMTT

SEQ ID NO: 125679 - protein, 155 aa, Heterodera glycines
MSSQFHHFFFITLLYLLISLLCQPYSVHAEPPLRVTDGADVPAQSPIASPPGAEDGGAQPSLSNSNNNDNDVLLEPYGPSAFPAGDQQQQQQQQPNGPKKKKQKQFPQLIGWVDRPGERIGEQCDPRMKPACTVPNSECVGGVCECLAIFKKVFS

SEQ ID NO: 125680 - protein, 28 aa, Heterodera glycines
MGLNNKYSKWFELEVVYDCIKKHLMRLY

SEQ ID NO: 125681 - protein, 218 aa, Heterodera glycines
KPFVMNANNQELLDMILLAFGMTGEMIYSVAGLLGLTGSARTEERNWEQMTLILLFKYNLMDLKVGLQSCLIYIAVILHFLISDKSIQKGKQAITFLLLANISMFLMNLLEAEKAGVSDTVVNFYGKRNWVFLVRSFSPLTIFYRFHSVFLVRSFSPLTIFYRFHSSVCLAEIWKSTYSWKETKPIGRLAEIWKSTYSWKETKPIGRKEQHIFVTVQS

SEQ ID NO: 125682 - protein, 236 aa, Heterodera glycines
CTKEVQVALHIAQAPIGFDLFVSIDKILIILEKGTFPDSEKQNLLELLSQFKNIFAVSDSQLTQTTLEHEIETGIATPVRSKMRPVPYAYREKVAEMLKDYLERDLIRPSYSPWASPIVIVPKRDGSLRFCVDYRAVNSVTRKDSFPLPNIDNTLLLLGGKKFFTTLYFMSGYWQIRMKAESIEKTAFVTEFGLHVFVVMPFGLSNAVATFQRFMNRLFEGMISKFLFVYIDDVFN

SEQ ID NO: 125683 - protein, 125 aa, Heterodera glycines
MKLEGNGTRGNGKMGNCTEAEANKWEKGDTESDAAGDGSGIGPPFEDGDRPAVPSDAERAPLLSTTPTTIAYTTVPPPAKTQNVLVTQMRPKAWPPSEADGRWDGGAQLTPGPKGEKGDPGVPGT

SEQ ID NO: 125684 - protein, 37 aa, Heterodera glycines
MEPNSHNLLAKAERLLIVIFVIRRKSYGTLKPKFEFK

SEQ ID NO: 125685 - protein, 28 aa, Heterodera glycines
MNWIKQQTIPIPGTRPGRSGYPGTKSAL

SEQ ID NO: 125686 - protein, 58 aa, Heterodera glycines
FGPRGRLGPNPKIEKCAFLKIKILKTKPEGSLATWHKLGLINIRSFFTILLIPNLIIF

SEQ ID NO: 125687 - protein, 111 aa, Heterodera glycines
MLLPQLRSCQVISSISEFVYLILLIVFASQGRIDVDSAPIGCLRPFSREEFGPTAAATKWPKRGTNALRRWIANPGTRGKFGTTFVEHGIGQFFGSFNYYQILLLTMSDRP

SEQ ID NO: 125688 - protein, 53 aa, Heterodera glycines
MFRSPALFAMFLLLLIVFQLFGVEIVQGSKRSKGRARTRESEGISNRGKDRQR

SEQ ID NO: 125689 - protein, 183 aa, Heterodera glycines
HIIFPGSTKNAFIKLNIFKSKKQYKRNCFSVLIKKIKLNLFTALTPTIFSIHDHSAAQCFVKVLDGQLLETRFAWPKKEEGPMRATGTALFKTEGPMRATGTALFKTNGVSYISDKIGIHRMENPSHVDPTVTLHLYIPPYSQCYSFDQRTGRKQRTGRKQQNTVSFHSKYGRKVDYGSGNRK

SEQ ID NO: 125690 - protein, 245 aa, Heterodera glycines
MNLLCLIFITIFFIFVIDSDKIRPNFDEIFGNGWDKKESEQTVKIEQNERNENSQSAAVDQMGEEMGNDRNDQMKNDHKKREIILKFEAIKEKLKQKGKYKRKDYGKIERKIAKLLGTNRKKIYKWKKEMNLNKKMEKSFYEDKKKEFIERFDEFKDLYAHGKQKEFVKELGISKQTFRKWKKELAPKYNKTPPKYSNEDKLMKMKQYYEIKEANPKVTDKIIAKKFGIGYATMRKWKKRMLSSI

SEQ ID NO: 125691 - protein, 92 aa, Heterodera glycines
MNERTNETLTLDKEENDDGCIVWVLKRCQIGGTVLWEDKNLDNLNNVDFLLFEFGPLSPPKAGQMNAKSRLKMNTGPNGRKKLMKYVLGNDR

SEQ ID NO: 125692 - protein, 70 aa, Heterodera glycines
MQPTDLPACLKQPARVMVRGGIHPQIRSDENEVYHLYNSNLMKKVGYISMFYHVRIGDCVWLSIDLVLYY

SEQ ID NO: 125693 - protein, 21 aa, Heterodera glycines
MAKDLCRYSKKSLLMHPEEIE

SEQ ID NO: 125694 - protein, 129 aa, Heterodera glycines
MRFGHGTRPPPLASSAAATAETSAGPWGAADGRVQRHGLRKCSEWTARERRRTAPTDDGGAAWRRQRSPLAAAAAAEATVAAEAGKHRLDGFLGTARKNGVTVISRGKTEGDKQNCDQSEADHQACPDL

SEQ ID NO: 125695 - protein, 161 aa, Heterodera glycines
MGQDMDGLFPYLLLALGLALLAFFIILYAILNALLQRKDAQQNGEGEEEDEEERRRKRRNRNRRRRRRERVRQKHRTARDTEEDEEWMGTEEDDEGMESEADSWDAEEPRAERRERRDQARNRAFTGLEEDEVQTGCQLMAYTNMALAPSCADVVPELRDS

SEQ ID NO: 125696 - protein, 73 aa, Heterodera glycines
METPSRVSAALVNMCTQIAKAKENKNGDEHSELIRQWTRHLLNFLKESDLFRQALKTYDVEIALMVASIDQSC

SEQ ID NO: 125697 - protein, 82 aa, Heterodera glycines
MFKQMNLFVLFFIFSSYSFGTVEGSAFTDFFTDLGNKAWEGLKEAGEAILDGINEATKALVIPGWECGPNDPKYLDGPSHVH

SEQ ID NO: 125698 - protein, 95 aa, Heterodera glycines
MKITTIPVLKLNLNNQYCSDMKVKPRTFPVLKLNLNNQNYSDMKGKPKLFCNENQNYSGCYFAPQCRNILRHQNKPLIPEDCNGRFELRGWAGLS

SEQ ID NO: 125699 - protein, 122 aa, Heterodera glycines
MYSGGGRRSSMVHKDGNNGDDFGGGRRLFMSNKGGSCGEDDARLCAIIGRSHVLGTEPNAKTAALTESNAFDIETTKTPHKFPNVQADGSGVFPADFTCRFMLDVGALAQLLVSKFLQLTFT

SEQ ID NO: 125700 - protein, 87 aa, Heterodera glycines
MSFYIDSLKMYSGDGRRLFMANKDGNNGDDDMRLCAFVGLSHVLGAEANAKAAAVTEVSRNVTKVGTGNRGIFQGIKKTPTAIWHFY

SEQ ID NO: 125701 - protein, 265 aa, Heterodera glycines
ANERSFVIVQCVENGPPGSPLTPKSSNNGHCRSGLAKGSLTNNNQRHSSLNNNKLGATVAKSPQKTARQQRKHEAEECNNINDKEGDENKTMPEGANDASAILVPITGTFGGANVGLVNDGDNVGGALPPHPSAAQLCLINNNNTTNNISEQYSNAIVNQQQHQQQTVPIRPMVGSHPFPTNPSSTMMASSSSASSTSSACFNNLFAEISTEQQQLQQQQQMPRMETNFNVTNEALKQFNGLLKDANKLSPLSYNMIVSFLNGNK

SEQ ID NO: 125702 - protein, 188 aa, Heterodera glycines
MHQDIAIWTKACVNCQLRNNPTPAYRAEMSITPANTLFAKVGLDLAGPFPLTIRGNKYLLNIVCWFTKYVISVPLPDAKARTIARAFLTNCYLKFGGCTELVTDQATSFTRPACTKPTLTEDEHQAPDRAEAEELTNMPGYYHRPQANATEQKETSEKAQSEVDDTNQETMDNNKNEETTEKSRRLRD

SEQ ID NO: 125703 - protein, 175 aa, Heterodera glycines
MEEMGHGKMPNAGEEDTVDEDSLGEKGEVSRDLFGGSDEPRHPRPPHIKYRVGQVVRHRIHNYRGVIIAWDEKAKAPEWWIKKVHGDVPVDEPNYTLLIDTRGKAEEYAILKLRILVPFFQKDRLIPQIAYVVERNIVLLSSGAIVHPLVKHYFESFDGTCYKSRPWHKKVYPND

SEQ ID NO: 125704 - protein, 218 aa, Heterodera glycines
MIDFMRHKKDSTTTPTPTTTAKMEDGGGSRGRAKAKHSTGSSGGGPSVPAPNNRKKTPNQQQQKGNNELGGEGRENGGKREEKGGEKGAAAEAEEKEKKVAVEHHQKQQQQKQEVQAVQQQQQKQEVQAVQQQQQKQEVQAVQQQQQKQILVGMEMKMDNSKNGETREEVEKEGNSIGEGGETEEKERKRKNSKQGGGERGENEAEKKREEQQQIDTF

SEQ ID NO: 125705 - protein, 93 aa, Heterodera glycines
MKSNDQEEEEEKEEEEDDGEEAQDEAEEEEAVVVVGELITTRKRALFGRGRLHQLKAEFGAEHDDDSEKFIKMALPDYNSVLENEDTPDELFK

SEQ ID NO: 125706 - protein, 39 aa, Heterodera glycines
MNKMIDYLKMKKANPSLSDKEIAGLLKISKGINDTVLGR

SEQ ID NO: 125707 - protein, 378 aa, Heterodera glycines
LKVSQSLPKFKEASILGTYFLPIDESIDNSYIQRENIFVGYYQWVPIVLAAQALLFYLPSFIVPIVLAAQALLFYLPSFIWKSCNFSTGNESVANSPICPSLSVARLRQREKCAEQCGTRQKEVRQGHAKCPSGKSSQPFDGPALENATAFSLSVYLFTKLLYVANVFLQFVILNAFLGPQYTFWGIGILSDIWNGREWSESGHFPRVTMCDFNVSGHFPRVTMCDFNVRVLGNIHRWTVQCVLMINMFNEKIFLFFWFWFIFVGLLSLLSLFYWFWFIFVGLLSLLSLFYWAFATLVPAFQKAYVCKYLRCVGIIAHFTTQALNRLFFYFLRTDGVFLLRMIQTNGGTNGGDLLVGEIVAALFSRYQTKIERHSDPT

SEQ ID NO: 125708 - protein, 43 aa, Heterodera glycines
INFLVCFNLNVYQYSTLLVWKWPKCLSRGLAVGNRPVGNWPVG

SEQ ID NO: 125709 - protein, 135 aa, Heterodera glycines
MSAHLYPNILTVFVAVHAQQIEQQLAHALEFRAHFDATKQLKREAKYERPNGDDFSFRHAEAVSAGARDGTLWERNARADGGRAFAKHKTEDERTRVVGGNGSAAGESGQTKTPGGRTLRHARTGTRTPPAHGGL

SEQ ID NO: 125710 - protein, 328 aa, Heterodera glycines
SAPLVAAAVTSKGGSGGFAGMSSTSMGHPRVGDIRRPSSPPVLPGLPLIEIRRPSALSQFEFGYFVNSPEIVSASRGGSGAGSTDDCAPLLLSGGSTGSRKSSDESSMCGWSSRASSRMSQRSSSGGLRLSTFSGGTSIASDNSGPFIFSFVLRKRASTIGTRIPLPKRAISRSSGDSLRVPEREVSFQLLCGIEMSPSFQLLCGIEMSPEFQCMRQLLLNLLCMYSNKDSNFVNTLRTCSDVLCQALNTPQHPTVKNWCADILNVINGQLETECADILNVINGQLETEAECKLESEERSNDEYLDVSNEAQAQCIPLVRSDRRTIKL

SEQ ID NO: 125711 - protein, 101 aa, Heterodera glycines
MKVGEILRLATNGDNSDPATRTSNINALCVHLQKVLKFHHRLYQKHISPHSFFRLLNMKYSAYYVTVVYLFTKCLFFVNVAVQLNVLNRLVLIWPSIFIYF

SEQ ID NO: 125712 - protein, 131 aa, Heterodera glycines
MLDEGTSYKRIRTRFKKLKSDEEISRIRHYIQKGGTKYEKFEKIEQHVLAVFAEARSRHEAIHDQDLVTIALLKAREIDFEFKASAKWVLNFKKRNRIVSRRVTKIVPATYAADEEVLNKRASECSLVNLI

SEQ ID NO: 125713 - protein, 64 aa, Heterodera glycines
MMPLAVDAFVGGDLNVKPQLELIILVNEKDCDLDQLLWTDTRKNLDGLSATLKCCGRFRCNSAR

SEQ ID NO: 125714 - protein, 127 aa, Heterodera glycines
KILKPENWSTICNVGKDHEKKVTNEPDYSLKKDFVTLKEILLRQFDQGNSLKLERYIGVLLMEYKTQKQMVATDPCEEAKLKVIKLMKDVQKSLDKKEKDGVTKTDKGGQNELIKMEETEVENRYTQ

SEQ ID NO: 125715 - protein, 90 aa, Heterodera glycines
MVATDPCEEAKLKVIKLMKDVQKSLDKKEKDGVTKTDKGGQNELIKMEETEVENRYIFHFLMHTRKLKKIFVNEDKQFYYCYIVELLGNR

SEQ ID NO: 125716 - protein, 346 aa, Heterodera glycines
MAESQVYAPALLQEMNLYAENAHDDGFTAKKVEMAKEFFYQLLIETKMPDIEESIRNAFCVLYHFFECMVLEKQLIVKVMMAHCEREVNVKMAIAMQRDRMRGRTMQFVVNSLASPELLMVQRIRRTQGGRTRIWKLLYNYDQKIEQNEKEMANLWETLELSDDIIIDYEDNQQLISHYENVLLNDDRNEFIRMEGKMKAEICLFISWINGQFLLTKSFSAKVLENVQIYLPLSVKMLDSFYDRLFDHQQIEELEQDEQELVDLIMAIRSQIEQIVVGHQPMKSETELIKEWRRRNFAGVKRSKKPQQIAKAKHCAEYGAWMRQMHGQTLIKLIKTDEQFAQKLKN

SEQ ID NO: 125717 - protein, 52 aa, Heterodera glycines
MPKTEKDDGLGRHEMCEERKAIGRVASANRFSRVTDQKRVYISLNLSSWAPN

SEQ ID NO: 125718 - protein, 253 aa, Heterodera glycines
MDKKINKIYTDPANPGGYAGASALYAAVKKKHPKLKRTEFEDFLKRNTTYTLFKPKREKFRRLRTVPTGFMTDVQADLADFQALSRKNSGYRYLLLAVDVLSRRMFGAPVKSKRPVDMKRAFEELFEQMPRVPDTMYTDRGLEFVAKPLKEFYAEKGIQKFETSSKKKAAVAERAIRTLKTRLYKYFSANNTSVWVDVLPKFLSAINNSVSRATGLRPQRNQRHQCEGGLGRGVYGEGLAQLEQTPKIKAGET

SEQ ID NO: 125719 - protein, 139 aa, Heterodera glycines
FVDEIVGTALLLFFVNALIDPRNQVPKWVHPIGFGLAIFLITSSFGMVRLTLARSFSHSSIGIFRLTECRLSDQSGTWHSYYFWIPIIAPFVGALIGTWLYQCMIGLHVPDDEAAQSVPTKTGEKSNDFEFDPLNGPSD

SEQ ID NO: 125720 - protein, 407 aa, Heterodera glycines
MMPTRVFTDHRALIPMFKSKKETGNSRVDKWLMEMNAKFLLQVEYHPGKKNVIADVLSRSQALKCPEAPKESDKIVAFQIRQNEDGQKQHGIENHREWATKTRESELGFLYEFLTEKTLPIEPKDRQKLMSILNNFTVLDDLLYKCEKDGKSRLFVPSVYREKLINERHSGICSGHMSGKKIFLQLAEKYFWPNMYSDCVRAALRCRICAHTRNPRSNEPPMKIVATSEPFELVCLDILSIGPAHSSCKYILVAVDHFSKYLVATPIPNKNADTIAREFVKNFVLIFGTPKKIHSDRGKEFVNETLNEITKILQMEKTLTSGYDPQANGVTERVNQTILGMLKRSTASNWEWDDRLPFVVFSYNTTPSETTNISPYHLLFGKPANFPSNISLPVNPLYTIDVNGYIQ

SEQ ID NO: 125721 - protein, 200 aa, Heterodera glycines
PLSSSVSHLEFSLGTGGKGMERELASHRLDDNVATELKLVLAAGLYPQFGVVDPTNNFREGHDQFAHTPSKPFGGLHPNSALGQRPEVLRSDDLDSEGHSAQHQLIYFGLLLETTKPYLCNSCRIPASFLLVIARNVRPFSRWSVLCCDGFVEFHFVKARHCDDSLAFACRVRSLFLQSLEHKLRSDVFGTGRPKLKRCV

SEQ ID NO: 125722 - protein, 205 aa, Heterodera glycines
MTHVFFDPESVDWSSFFTSQHGRGQKQYFVGSKYQRGFGLLGNVARFLTHIARNIASSAGQEGLAAGQRVLSDIAQGHNQFCDLNKTFLYLSTSIERKDKSNWIPITTDSEADQHVGVIQNFGHSFVKTLKVSISGVESYDSEDVKKGLCEASCYYVDDVDQNDYTNSGFKNRASRFADGAKCETMMKLNFDLARQPNLLLNNSD

SEQ ID NO: 125723 - protein, 268 aa, Heterodera glycines
KQRTYTIHKPIRKKFPRLKTVPSGFHTDWQCDLCIFDQLKKHNDGYKYLLVCIDVLSRMIFSAPAKSKKSEDMIEAFDRVFEKSKIIPMKIYSDSGLEFQAGKMKKYFEEKFIIKNVMYSPDLHAGVVERANRTIKERLYRYFTKMDTLRWVDVIDKIIININNSVNRTLGAKPVSVTFENARPLWEKLYKAKEFKISKKNKFKIGDIVRITKEKGKFAKGYLPNFTEELFKIVIVNPTTPDSYRIEDLEGNLIKGIFYNQELVKTDG

SEQ ID NO: 125724 - protein, 38 aa, Heterodera glycines
MGVRSCRFNVPTIETLGYKNYAYVPIMGAPADGSIRFL

SEQ ID NO: 125725 - protein, 252 aa, Heterodera glycines
MTHVFFDPESVDWSSFITPQHGRGQKQYFVGSKYQRGFGFLGNVARFLTPIARNIASSAGHEGLAAGQRVLSDIAHGRDLRDAVREHSRQGLTNLTDKLQQYNQFCDLNKTFLYLSTSIERKDKSNWIPITTDSEADQHVGVIQNFGHSFVKTLKVSISGVESYDSGIYYADGDHLNKLRYHTSPTLLTDLDQLNSIDSGYLFPDENAPNSTAGQALAKWLRTPTKNGQPKELRCSHFAFMKINNWFHNHKQ

SEQ ID NO: 125726 - protein, 113 aa, Heterodera glycines; identical to SEQ ID NO: 124938

SEQ ID NO: 125727 - protein, 1330 aa, Heterodera glycines
MSNRSNNEPSPPKRRRMPNILKSGSNNNNNNNNGKRRNFRHYVRALNTDVAFNKKFRLMNAKSTFMIQTLPSNPESLLRVIFGHCIQSSLDEAQRRGIEPSRLGATITSQLLDPDIWIPIRQITPNTVDTILNRFLDVAQSKSREGSLWGAPFSVIVTTLDTVNLPQRDTITGRGSEHRTLKGAHHIIKEKNLLRIRNNNNSYCLFYALEISRIYHCMVMPKQTFSNYINKMHSQQQQDAERLMLDAGIPLNQERYDAEVWVPRVVDHWNAVYPELKFKVFIFGTTGQYRPKYKYGPEEFLTPISLYYNNDHFDGIRCGVGTAIFGRDYYCFACELPFKNADTHKSSCILNCKECGRIGAGRPCRDDGFKCECVGCDKTFMNVDCYHHHLSSNFCHKSHKCKKCGVIWNVRNNKGKGRAGHVCDERFCRTCGAFHNRERGCFIRQLKPRRPKTYRLVVYDCETTQNCHVIGAPEAQQRRVHIVNFVSAFVTCTKCIQIGAWRNSLLNVVPSCEICGPYRTLTFSHRPFTGTEVDFQHVCDDPMSAFTDWLLLGSHNNRNNNTINNNNESNSKIKPHIKYPINVFAHFGGRFDNVILFRQFFNRGLCPKMIRRGNKLYEMKVLRAKDNPEIKVRDSWNLMPVPLGALPGAFGLRVQDKEFFPHLANVEDNYDRVLPSLPPREQYLYGGMIPERQRRFDEWYAAHQHEPFNLCEQLASYCVNDSRILIEALVAFRTEFLMVTNPDEQHRLTEDEGEVEEEEEEDAGGIELGDDGNGGIDITWDALTIASASMKHFRLNHLRSDQLAIVPESGYDTANNQSLLALKFMEWYAEENGLQIQTAHSSGGEHRIGRYTVDGYIHETDSVIEVNGCCWHAHDHQRHRFKADTVMPSGKTAARIREDDARRMAFIRSQIRGTVSIFWECDIEERLRREPDMRQAFSSYRNSGPINLRDCYHGGRVGPQRLHYQVPEGWRMRYFDVRSLYPYTNAITEYPTGHPRCVDIMEGANRAVDWRHPEQIPVRGILKVFVVPPRQVDVPVLPVKFDQRLLFPLCGTCARLHPEGGVSASYRCTHSDEQRGWVSTVTSIELAEALRNGYRCTAYYRSIEWTQEQWSERVFRGYVAEFMTMKTHASGFPEEVGNGEEEREKFITECEERFGMVIDPARMQHNKAKRTIAKLCNNSLWGRFSLRNGLSKTVVTDSPSELRAYLDNPQLEVSSVDPLNEQCVLITYTAKKEWTDEHDCSNIVLSLWTTSAARLHLLKLMQRVVRAENTELIYTDTDSVCFAHREEDGCPLDIGPHLGDLSDEWPDNELLEFVSGGCKQYALRMRHRQT

SEQ ID NO: 125728 - protein, 172 aa, Heterodera glycines
MPDPVQNGMANRQQQYKSKPIRSARGGLASVQQSFDKSASPNGRQQTGPLGAIQLAPHKQRRLPPVPSAAPQQQAVIVPQQQQHNNNNSNIMHIIIHEYSSADCVLRPGDRVVVVDNGDPDWKHGFKFNDCLEHLLTFPSSCVAAYHMEEQPMKLLQSCNLVEQKIRLYRDQ

SEQ ID NO: 125729 - protein, 561 aa, Heterodera glycines
MADDSNNNYFFVVLPSNVTDYVDNTTSKYRVHLPKPVQFRGSWVCGLYSIQYPHSWASTIGTVEDQWIDIHYIDGRLLRLHLPKSSQQNTEGLQRHLNGTLTTALSRKSTEDGQTPSIKRSKRSVDQGKQQSREETEKESKTGTMEINDEGERVPQDNQITPPSNPSAQRQQQHDEPRAQALTRGEQLGQRLRKTENEVQSQQKSPVNESLEAQTQFSDAKDQSKTHADVLKDRLSTIHGDVSIQAPLQKSSSNDGQTSIEPTIRPKEQSDREPQSARTHGEQLRSRVEVVQDERMQNERQLHEAKTHGDLLREELKKIRQEGEKREQELSVTKTKGDTLRAQIEKIREESGQKDKQLKVEKTHGDALAKLLEESRKKMEETEKRLTEARTHGKVLTDRIKEIQNERTALSAPADVHFNYRTDIDRFHLMISDPEIDYLSMSSQIAYVLGFPNKERVVQGETAKYGVDLRGGFTSFAVYATGLTRSVILGNSLSSLLRIVSTEGEYGQVVERIYDNPMFIPVHPREINELQVELRMMNGQLVQFDYGTVLVTLVFKKVINF

SEQ ID NO: 125730 - protein, 955 aa, Heterodera glycines
MSGEGSDFNPAFFTVEENAQYQTILERLRSFEAAVCSQFRKLESSLNGSERATKDQLSRLESSLQNLDENEEMDEFETKEKIFKLEEKLEETHNKFEVLKANVSENLKECFEKIDTQVKESKCLVDLINEKIESVEKEMKFSIDVVETRVEFLELEKMGDSSLDEYWQDNGHHDLQKQFAQGNNSSENGEKRDADNGRESHEIGNDENKDENNEGQEKEKTLMGETEDLEVMMADPFLMNVIPPGVYDGNPSSSFSRWSERFMDLLSLYPQLTEEQKLSRLRISLSGQARGEMEGMSPAPTTLQDAFNFLKNKFENENTKSIARQTLSICKQAPGEKVYEFANRLSEALRTAMAGENEGTIKKRLLEEFMERLTPDLQFEVKAGRPSNYSNAYEMAQHFELLLASRKQSQVSVAELSSRVEALTIQTQRNIGKRADERRVCYYCNRPGHIVRDCRVRKEGRQSGNRQSYYRGDRAAEGTWRRDYRNEPSESNRWGRQNHRDENWERPNWRNDRSPERPNWRYGRSPERPNWRYDRSPTPDQRKPWTGRNYQRKPHRSPSSDGDESNRSHSPGKRVHFKRGKVAAVRVASPLFLAIIAFLALFGSNGASEVKAKPMICLPDAPTSIWSLPVDPICPNWVPTQVPVPFALNIYRPNTVQYKTEATACSCILTRISRRRGFFGGTYEEISAFHSVVPTAICRKMAVDKDSPAGELYVNDETLMATNNSLEIGWGKWPSNLFWRTEEIDNYYVYKTIVFTRHGMEGLNTPIGECSNCFYKSGECQCVKISLIWTPDKTQLCSFVWLSKWSGEYASLIWTTESGDFALSFENTSSHSQPGCYAESGQLIVSDQAFAVPVSDFQEMVEKAKGSGTRKTRETTEIGPVYSSQLAAQLTALSTKMAITTQRLFTETIRKICTSMQIMADQALTLSIANPSLLARFFLGNPFLSARLITEKLME

SEQ ID NO: 125731 - protein, 187 aa, Heterodera glycines
MALLSDRFDVLVDAHFDRKSELTIWRSVVIRKDKGPKAKLYIDHSVIKFLRSNKPIWDRNGTKLKVFVYAFDTDVQPIWDVFIREIWPIFATNIRHLGFDDGDHLDNLRRRTSPTILTDLDQLNSIDSGALFSDGIADDGPNATAGQALVKWLHTPTKNGQPKRLHRNNLLGPLNLEWVNNFKELIF

SEQ ID NO: 125732 - protein, 80 aa, Heterodera glycines
TDARLANMCLRLFIISRVILRSSSSLFLCWFLNLRLFSIRVASSDLPVIWMLLDVVLGKISTQQQLDHLIAGPVLQLQGI

SEQ ID NO: 125733 - protein, 559 aa, Heterodera glycines
EKEWDWNENCQKAFKIEKNFGIDLLLTIVVAADASDYGIGAVISHKFADGSIKAIAHASKSLSPAEKNYSQIEKEALALIFAVKKFHKMIYGRHFTLQTDHKPLLSIFGSKKGVKQCSANRLLRWSLILLAYDFSIEYVRTNDFGNADALSRLIAKGIECEEEKVIAALDVESDLTSIFNLNLEKLPIKFADLATASKIDGSIQKAIKFIRSNWPNNDLLKQESETVQLFSRRKDELSILKDCLMYGDRIVIPKFCQKKIMEQLHKGHPGIKRMKQLSGQYVYWPKLDAEIEEVQNCQPCQAAAKAPVKTDLHSWPKAEHPWQRIHVDYAGPFYGKEFLIVVDAFSKYPEVFEMPTKSTAATVDKLRYLFTRHGIPEILVSDNGTQFASNDFAKFTAANGISHLFSAPYNPMSNGQVERFVDTFKRAFRKLKGEGVPGKDVIETFLVTYRTTPTPDKSPAEMLLGRKPRTTLDLLKPPLSQPSERDAEMGQRIFQMKDTVYARHRQRIFQMKDTVYARHRLSQNWRAGIICDCKGVIYTVKFSDGSINRYHANQLRERR

SEQ ID NO: 125734 - protein, 259 aa, Heterodera glycines
EKPGFPVTIDRLIFLIKECLPNLLPALYEETKVKQELVREVEMGPFKHIVDDGLDLRKAAFECMYTLADQSLDRVNINMYTLADQSLDRVNINEYLTYVENGLKDQHDIKLLTYLMLDQHDIKLLTYLMLVRLVHKCPIQMAQRLDAFCEHIKPQLLLRPKQNAVKQENDKQDEHIKPQLLLRPKQNAVKQENDKQDELKRSAVRSVIALRKVPNSDRSQKMTDIRILFRQSNNNNITLATVQKVSHSSTHHTSLPLSP

SEQ ID NO: 125735 - protein, 201 aa, Heterodera glycines
MDDRQRNRRRAFAHLDEWLRLDQWKSKEKEHKTARALTLGALPNGVIGLTEEWFMDKLRLLVSYWTTACCIYVTFIFGRDVLIPLVWVYLMGPVIVTIRNLVTGNQWTQRNRATRGTRRAPAISRIEAIELVSPPMPQEMRANETASSQQEDPEPSPLVMELKRQMVAFRSKRRFQSRGNVATERQPRMSVERTNEENGEE

SEQ ID NO: 125736 - protein, 57 aa, Heterodera glycines
MDTAGKTIKCRAAVAWEPKKPLVIEQIEVAPPKEGEVRIKASEEAIELDWIIRKMLR

SEQ ID NO: 125737 - protein, 134 aa, Heterodera glycines
MLDKLAIVRAGTGGMEMLAHTEMPVNKPRHKMGRTLYEAWKLFGDPNAVLLFVNQPDLFPFCHFEQLQFTTFEVEKLAKRDGNVVQVIRMTFKECAERCHLDESDFSLYVDGKRVALVHMAYGYIGEHYPTEVN

SEQ ID NO: 125738 - protein, 54 aa, Heterodera glycines
MAVLIKKMDKIFVLEAIRPSENHGPGPLDAKLMILYSLNDLSNNKLKMLIPWLL

SEQ ID NO: 125739 - protein, 269 aa, Heterodera glycines
MIIDPPNGNSSSPLWSSSTNETNEHSFQNDFEKHSESQENDQIEKNNNGIFGSEKIRKNGKKKETIRWVVHLTKNWLDSKNSLKKVQNLLAIIFVCIELTVSPIPIIGRAIGEQKTLPNCLMSPTVMAHFALSLLTIPPFYTKFGPVLKAQKKPGKYLTAVKFVEEIFKIILKNEGEIGEMDEKMRNLQFYSLFYEFLCAFFKGNKKTIADFPSEKHMKSWERAKQFVQIYEQMFKHQLEKIETIGLGGTMAELGKIKRGDKVIEEGPK

SEQ ID NO: 125740 - protein, 236 aa, Heterodera glycines
MIIIPSIVPLGDSKYMAEHQQTKNFSCSYLDYVFRKAQRENQRLFQNNKPHLVIKFSKLRSKARKATKFSHLKCGLKESFVNGKLADIRQEMLCQSYTRFGHCRNRTDCVKEHDVDLLLDLEDKRAQLKREKERKRRSKKETEKQKEESDGEENQREREEHENERGKEGGTKRKWEVSKVKGNKWKFHNIISSLPSPRRKVSRFLPYRTTALEKRRRNQKKITKMEKELGTLSWIH

SEQ ID NO: 125741 - protein, 166 aa, Heterodera glycines
VQYGDFFQLAGVVTLAWHSASVLLTSLTKSVADIPGLVQGAHRNEGLGFSFLRHIVRCECVLFVLDFTQGNLREQYELLQHEMTLYDDELSKKEAAIVINKTDLLDGEMASIVSMFPEQSVFFVSGRHRIVSMFPEQSVFFVSGRHRLGIEPLLMFLREKHERFLK

SEQ ID NO: 125742 - protein, 60 aa, Heterodera glycines
QPFSPKFSHFFTSLIYSKIVGPKTTGQQQKTAFPFINNSDLDKNLCPSNKRRATGDVYPL

SEQ ID NO: 125743 - protein, 146 aa, Heterodera glycines
GTSAALHRELRNLSFRNPGYRCTLPEPSRAKRTVVISAQQPKTSAEPSADRRSMRKRTAKKDGSNSDVQTRSAKSKLRYNNKGRLVLPSRTEVDLCDCLDQKCNGCQYQCKKCGGNKCSYACRVNRTTFIEHIDTLGGGRTNNPFL

SEQ ID NO: 125744 - protein, 292 aa, Heterodera glycines
RESIRPILLKYVSLLVLVLQNACHVLVTRYAMTRVGPEILFQVEILFQVAILFNELVKLCVSLILFFISTNDLCKFFKILYHHFGPNCLDTLKVGTNDLCKFFKILYHHFGPNCLDTLKVGVPAVIYLVQNLLIFLAIENLETGTYAIENLETGTYMVTYQLKILTTAFFAVLILKRKLSIIMVTYQLKILTTAFFAVLILKRKLSIIQWGALLILVAGVALVQYVSWHRLEGGGGESTRNGSVKNSLCSGLLFSAPGRMLVSSVFRQTIRLQQRRQQNPVLGLVYVLIACS

SEQ ID NO: 125745 - protein, 165 aa, Heterodera glycines
MTIKIGSEIIQKDNNGQKAAKKGKNKKKKKAKNEGPLQSAEICPPTNMATKPEPIPDDKSGRAKMAVNCAPIRSDKIPPTNKSKSAKCANNVSRSKAKSGRKWTKAVASNANESGTELGELVEKVNKNAIKFRRVVARTVQNPHVLHLLYALEKRQSSMEKLTKE

SEQ ID NO: 125746 - protein, 156 aa, Heterodera glycines
PSPTNHLVALVTPTTSGFRQILQTKSIEFTLPFKTTEFVELGREDCPKDFLTNIGDESIGMDHDEWLRDLGISPRSKFKLKQSPSELDVSSASLLSNESKNDSSGLTNCKSSEDNSRGLSAVSSVESSKSAVLICGAKNVEAFCRLLIGQPTLCST

SEQ ID NO: 125747 - protein, 450 aa, Heterodera glycines
VWRRRNGNHPIDSKSFINLSVNSPAQHDRSEVKDFWALESIGITDCPEMNDDEKAVQKFDQSIKTDQEGRYEVSLPWKTEGERPPENFKFAFSRLAALVRKLKDAPQLFKGCDDIIQDYVAKGIKKWTRTTEQQYFLPHHTVMGKKLRIVFDASSEKGARSLNDTLFSGPNLYPDLAGKLIQFRATKFPIWADIEKAFLMISLRESDREFSKFLWVKDIKAPLSGNIIVFRFKRITFGIVSCPFLLAATLKYHLDTHPSSLAREIVEKSLLYVDNLLKPRLRMLGMKWVINEDNLSLSFPPVPGPEGLTRRVVLKTIASFFDPLGLCSPCLVGPKMFFQKLWNESQGCDDLIPISECTELMKIQKHWDSEILSIPRHRRVGSNSLQLHAFSDASPEAFACAVIRAEMQNKNVVSMVYSRSRIRPKKNGLTIPRLELLGILIGTRAIKFVN

SEQ ID NO: 125748 - protein, 41 aa, Heterodera glycines
MSGSHLFLLIWINYWFFFGSRPLKSRVTGIFSLEHIYIDIF

SEQ ID NO: 125749 - protein, 71 aa, Heterodera glycines
MSKFKQFTFTALTFHLFFHSFPWAALPLSYRGTSALSFMDLINPRFPRFNRPASFFLTAPSSSGPVPRSIS

SEQ ID NO: 125750 - protein, 50 aa, Heterodera glycines
MTEIKFFSQSSAGKNVKYLGIFSTAGLIVTDLRKRLLPENVDKLIFASQS

SEQ ID NO: 125751 - protein, 29 aa, Heterodera glycines
MPRKMIKYYETKISIDSMIIVVESLSSRP

SEQ ID NO: 125752 - protein, 222 aa, Heterodera glycines
MFPNDDGYESEDDEILLPPPPIPPQLGHPPPNVPAVRVQPIHVGQQQLPLRDLPQFEDHPQNVPAVRVQPIQQPLPLRDLPQIFHPPPNVPAIRVQPMQQPVPMRAVPQFPQPPPNVSAVRVQPVQQPIPLRDVPLFVNPPPNVPVIRVQPMPQPLPLRDMPQIHHPPRNGLQFGSNCGCFFSVSGCFFREFMFDKFNGNTPYRNMPIRRQTCRIINQKTFR

SEQ ID NO: 125753 - protein, 19 aa, Heterodera glycines
EPVNSCIGCKCRRCCTPNS

SEQ ID NO: 125754 - protein, 25 aa, Heterodera glycines
MGGGREAHFFFAPYPSFYMKADPTF

SEQ ID NO: 125755 - protein, 298 aa, Heterodera glycines
MKTGMFKVPSAAVVVISDFSDIAESVQSNIAALLAAESAQSTEASHSSVADASQPPTIADEQVTVVRQFQLDQHQNSAIDENGVSPMDVTQCLAASLSTLPPAFDMEQQKLQTEEVCANMPNRTDPALLAKQDEHFLRVNGFHPIGILCERIDLVWQRDKKAVEREKLRRERERRAEAAEQRRKERRDGSEDKVRSEAVAPQKRNFNRIVQCSYCELIVRHDRFGGRESAYCSAECISRRVDMCVKESERILMIDLKGNIYNASVNPTIETLEAFLNQNPSYNPIIDDARLGQSYFQD

SEQ ID NO: 125756 - protein, 62 aa, Heterodera glycines
QGWAEVSLFAFRLSHYSHFLAFRISLFAFRFLARNATFTPLRIGLNSHKIFQNFTYKLANFQ

SEQ ID NO: 125757 - protein, 293 aa, Heterodera glycines
MDRRGETDSRRTAAKHATVPNGKCKKAQQQRQQQHQLEYEQQRLVEQQQQLQTLLQQLATVQRQRQLQQQQMLMNSQRQSGQAVQGRNERLASRASSSSSSSSRAANIEKFPPPFASPSFFGPANNPFQPPPPISPPSSSSALFPGKFLPSSASAFRLPGGLPSPTAPIFGGVQPSDSKFAVQPSPISAPFRPISSSVDSAADLSALLQKLSWNNPTNQNSGNSATVVVPIPTVLSNAANRGGAAQFVVPKPQQERPLVVKLVAAGKSEQQSQQQNPNNNNNNGNDNSWDYYI

SEQ ID NO: 125758 - protein, 15 aa, Heterodera glycines
MGLPNETFRGWGIEL

SEQ ID NO: 125759 - protein, 50 aa, Heterodera glycines
FIVLSVLITYASSFFHKFFLSLSTNFRPFSFHMAKQKLKRKAKQCNIKKI

SEQ ID NO: 125760 - protein, 294 aa, Heterodera glycines
MVTWVPLLSPTQQQSLADSNLLRGLLQAFSNLLTPQATASGGVSPSSSAFVPPTVGQQQQQVPNIGGTNNFGKSQFVGVPQPQQQQVQAVQQQSQPQQIGQPNSAVQFVAVYEPWRMAQQQQQINGANFITAATSGDGAVPAQSAAVLPQEVGAVGQLQQQFIGSSQPVLPQLPQQQQQQVGAVSVLGWLPTRAGETNAFSADGLFWPQQQQQLQQNNFGSNNDNGNDILVQRRTAQRRREDGQQTNGEEAAEEEAEDGGGAAERGEAEEEEGEERRREGDEGLEDTGKWGNDV

SEQ ID NO: 125761 - protein, 224 aa, Heterodera glycines
CHDLCQLSELNDASVLAALRQRYSLRLVHTYSALFCVVVNPWSLATYSALFCVVVNPWSLAPLYSAQMRSLYANANGATLPPHIFAIAQSAFEGLSDGTSRLNQSILITGESGAGKTENTKRGESGAGKTENTKRIIEYLMDIAERNAKVSDDQQKAATVEKALISAGTALEAFANAQTVHNNNSSRMGKFVRIDFDREGKLQSAQIVVSLFFIFNSITLFPFF

SEQ ID NO: 125762 - protein, 135 aa, Heterodera glycines
MLREGMSNVLLHAFMKMCHHLVTTMSWAAALNWRHAKFFTRKTDGDWSLPFCLSPLCPSICSHVFRCVAQKWKRILALMISFTKIQMSFRKGRVMNENGGRTTKMNDLYRILYICRLSKLNSPINQLSCSRDCEI

SEQ ID NO: 125763 - protein, 124 aa, Heterodera glycines
MGDIPSKQHQKMRTNVGRRIVTNGNLKLGGDGLVPPTENLGGDGLAQILPPKEVIDQQQHNYGQQQHEATTDQSDQQKQYVDEATNGGGEIVNQITLPSNPLGMGTVVEGEEHQKQATEIWGLC

SEQ ID NO: 125764 - protein, 56 aa, Heterodera glycines
MVGGLSSTKVAKSRKNLNKLLALGRRRCSENRQFLGQFNQNKSTNFSKTANHHLKN

SEQ ID NO: 125765 - protein, 304 aa, Heterodera glycines
RAVLFPGPPPPRRPPAPPPPPPPPGRPPRRPPPSPPGGPGAPSPPTSPPPRPQRPPRPPPPLPRAKVKVEQPRPPTPRPRPNVKREQQQKPKSEFKPPSTSKKTGRPTPAKRVPEFVDLDPRPSTSRQAGYNPPPPTPKIKHEPTTKRPMPYRIPKREPKVEEAPQQQQPLPAAAVVVEEMPVVPPPPKSPSPIATPPVPAVKPLTTTTTTTPTPPAVKPVTTTTPAPQSSAKPSAQQQKPTPVPPKPSAPQTSEPKIATTTTTPAPTTKPATPPPPKPKTTVALQPKQTTPTPPQQPITTPTP

SEQ ID NO: 125766 - protein, 149 aa, Heterodera glycines
MIGQLFASVLPLVLFANLINVGEMVRGGSNSLSMTNGGGPPIQQQNPSINLVTNVAHSLNNLRLNPSAEENQHQPTPVNAAQPKIRQNPNKKGVKVGSKMKLQQKLKSGVKSKDLGEKKSKLGMAMFYVFMLISLFVPHTPHVPINVML

SEQ ID NO: 125767 - protein, 120 aa, Heterodera glycines
MNSNDTIDDGLFTSHLKDQNASKMPSSISDEAGPSSSSTKTTDFTEQPEFTEFRPELIVWRNKFYEVDQEEDEEFAWDDFLKSPERRPFELDEQSTSGQSKTVNVRVGETKVVLKGNFRF

SEQ ID NO: 125768 - protein, 344 aa, Heterodera glycines
MHRIPFIQLFILLINMIGIANSKDGIKNLFVGKKNNNDYDKCSDQFHYEVIEDGTTEEEDMKKAIQIGKTFFWREMIAKWECENEDLYNNPQKIGKKSIKKLKRICENWKMKALSADAFVKSLKCKKKQKYFMVTLLIKIDEGGQPLNELKCLCVKPRFLVEEGELQLSSAMEATKAVYRDLFKWGNGKGLKIAIKFENERAWDLVDRWLKAFKGLRIEQNDEVNQMLKKAQSNQILFKAENALKFDPYFEKFENSEFSKTFLNAPPRFRKERTLASINEMTYNDKKKNRYYLNEFINVAEDYKEQWDFLQQKNLNDYEKFEVLKQIKQESSVQLWHISQQLGL

SEQ ID NO: 125769 - protein, 71 aa, Heterodera glycines
MRSNETVNRKVLFSLMTIFLVETFGWVSNWSLRLLLIQFGATESTKWFVMSYAGYVMQISLALNGPILYVL

SEQ ID NO: 125770 - protein, 34 aa, Heterodera glycines
IKINQRLNIHRRLKYSVNVAQKISYSELIAFSKP

SEQ ID NO: 125771 - protein, 733 aa, Heterodera glycines
MQRLEFEDGSESNMDPANEGHRNGAQHDENVQDGDGPVASTNEEQQKVARVNEATRGSNMATGLGTNQQGMLPFPSRNLRSVSIPVRTARDRIERASGTLAARIAEAREVIDQDLTEGEAGYQAARLLAMERGLKEATQIFQGHFEIGMAAAGAEPAGRQDFFYDILTAPLPAATKELQLRNHPTPAELLQIADEHIGDLRTMRLALEDEEEAIARSRLSGSFGTNNSHPVGDDPPPPENRNMEEWERSFQVAAKRWQNDGQGVQQHNRRPMGRVATPVMSNLDGIFQRRAKVPSVASMRVTNTAREWINRNRDEMGAFPPATAHRPALMQPKIEKQQAHVNDDYRERQTYPIRRHARDEGEHDRKHGRDESTGMTTFETVRLQPPTFSGKPEDWTTFWAYFKRAVDDKPIPGFEKQLHLLRCLKEGSPARRAVEVYPPSDGNYPVVVQFLKERFGDTDDLQRAIRARLLHLAPAKDNVNSLTTMIDEFERCVCQLEQLGANVDDDSFGPLLEAKLPVRVLTELRIRESMMGSKWSVREFRRAVTAQVRCMRSAESALAAMKDPEVRTDHRTERDHTGRGGKAGREPFQRAFMVRDSQQTRAQPNGTRKEEQCGTSARFTGRTVARGNENGHTGGNGPRFAQNGLPPSFGRGNCSFCLESGHRPSECRAYPTPQARRKRLIEQKRCLRCLGSDHTFEQCQRTVRCDACRKDDHHWLMCWKNQPGNQSRPSGEP

SEQ ID NO: 125772 - protein, 77 aa, Heterodera glycines
MNNRKKQTQSQTDLGFVELEDPEKTFLACCSPLMLHDLFKEFCTNFKESRSGFPDLVVWNENVAEMAVTYSLAFVMH

SEQ ID NO: 125773 - protein, 108 aa, Heterodera glycines
MTLLIDNSKMVTQFNTQLWSVKIHSLGIVVNRHINQIRSFIPKIPISKDFVEEQRPNSPTKTPTTKNNQPHGSHDEQPSVLARPQRERRPPKRLNIGPNAGARYEIEG

SEQ ID NO: 125774 - protein, 157 aa, Heterodera glycines
MPSSATGNTTSTSTSASSTASLSSSSSSTTLAASAAAAAATAPPTQPANSSQPTAGASTTAPKPASYTSVMVEDFENRAFDKDQFRFNKLLDIQHNDIYDEVLDKLPEVSSDEGSPSDHNFINVLSLDGGGIRGLVIIQVTECEKCTADPIRHFSKV

SEQ ID NO: 125775 - protein, 159 aa, Heterodera glycines
MPLKIDNAKRMQQIVPKVKASENVPGYLENKNEEKQQRISFKNYFNEVNAYFNYYVPKHIIGLIALKLINAIQRHLKLNNGQLAHVLTPDHLVAIRVGDQFSKSELLGNAHLEIDAEIQRVEDPRQRALPSADQTKIIWLKDFPYMSPQQIKVILISDN

SEQ ID NO: 125776 - protein, 176 aa, Heterodera glycines
MSMLLFVFSIGILTWTYDYIVGNAHINLSLINAEEIFQIQQFLGGNIGDFVLYCGRNDYFLGKITMGLYFVENIICYAVIVICGYKMVRFVYKNLDKSSARRQQINRQITINLILQAFIPLAMNLINLIISVEMVIFEFQLSPSFVYSNVHHSSLSLVAHPKGSTYQFPRKSTITQ

SEQ ID NO: 125777 - protein, 149 aa, Heterodera glycines
TIDALAYEAAKVLQRQPFLLSAAGGGGENGSVILENGGRTAAEGGGTLTPHAASAPGGSTDHQQHNNLQVLAQSRVLVIEWGFPLETFVENVPRLALHWAAVAPPRWVAVPPLILRAENATPTRPPSADCRPAPVDGWSGTNSPTLSTD

SEQ ID NO: 125778 - protein, 87 aa, Heterodera glycines
MPSHMVGKDGLTISAENALNVLLICYFLYAVEFVIFSANNKANLQNLSVNALRMLLSKELSVKLGTSVIYEEFKSNFKHYEMKDDDL

SEQ ID NO: 125779 - protein, 31 aa, Heterodera glycines
SPALNPSTGFLVNSFNCFCSKSLDCSEDIIN

SEQ ID NO: 125780 - protein, 80 aa, Heterodera glycines
MNAIGLGIDENCIVNGQQNGAGQVTPSAALLKIVEKNLAENNNELAEKVEKICGFGANGSSFPGGTAIRMEMAELPRNSQ

SEQ ID NO: 125781 - protein, 164 aa, Heterodera glycines
MKLHDNYNKNSQNANITAIFNGPSDFLSTLALNPLANLFSIANGPLEIDNFKRNQAQNSIKHGKLLLQIMGKDLTGLILLEHFMDVTGLSVEHFFEIGADGLEEKTAVQQIRNKLEIVLRKPEISVDRKSSAQAIIKLIKVISNVSNMLAHKDFDILQHISVKL

SEQ ID NO: 125782 - protein, 161 aa, Heterodera glycines
MPKVDFDYLDMFSPILVCFVGIYHFHFLFFLFRWHLFLRSSFFSSPSRASIGTVSRTRMTLRCSKRFLETSCSRKIRLLKMAPGFLGLDPGKTQALVKMALIFQFGTRLNLRLGPHSMAVIKRGGYASTYAREEAKRSECTGPQQQQLNTLGDGKCQISHA

SEQ ID NO: 125783 - protein, 643 aa, Heterodera glycines
MAFYSAADSDRQPQGQPAPQQPPQQEELVPAASPPAEESVAPNNQPVVPMMPASAGPEPQNELGTQHQTSPPPLPARAPPQLHFQIRNLGPNPEGIPGFGANEYKPNRKPLPSAAKEQSPAGSAAAFSPAPAPPVVPLAVGGSANPCGTVAVPPPAVAVPSSAAGAESTYGGGAEPSAAASAVGAAAPATAPPAGGDGGSAETNVPTTAGGVTASSAVTTAAAVSSPITAAAPQASSGAPCPSSAAPLLPAGGPAEQQHVPVGVEVKPAPATAQIGPGIAADYGEETNNGAASPSGAEPQPATVVSPAPGQQATTVCAGISAAPAVAAPSAAYGAEEAVSGDGPASSSDTVPPSTPTSPSAEGGAASSSAPLTGTASAVPPLSATTSCPSPAAVGSVSPPALHIGGSEADGPASAAVGAPAVAPSSGATASASSGYSEESAASGSASPAPSLGGISSAAPFSGSGASAAPGHEQTESEFASGSVSSVVGVSSAAPSPGSAASGSPGYVEEGAASVSASGPGETGGPPPVSAPSAAPSYGSVSAAPRAGNAASVSPEHGEEVAVSQSVSETTSSGISSAPTYGSGASASSAAGISPAAPSSGSAASISPEYGEEIDFSESASESASSASAAAGISPTAPSSGSA

SEQ ID NO: 125784 - protein, 103 aa, Heterodera glycines
MHSSSIDLHSHGAVGICAVCGDRADGHHYGVLSCRGCNAFFRRAVTFNLQFHCRRDGHCDISKIPTNSADFLLLSPPQADGPPFPTNLQVLGSGKTLDLVKIK

SEQ ID NO: 125785 - protein, 232 aa, Heterodera glycines
MHFPTYSSGGWFPCKNTKTNHWRSNVVYIFFFALRFLHPFHFLPDLSTGSATICQTLSIVGHGVIGLNVSRNLGVVPINQSCQFPMEICFSNTKKGSSFFFGLLLAHDSQHPAFTKAEQFRGLIMNKADDQEILSALRMPSDEPGGGGGGEFSTDFSIDAVAIFFSVLLKLSSRTMTHSFAALTRYINIALMTLTMRKCIDILRHCEKIENFYGRLIQFPGMNNGFANSLII

SEQ ID NO: 125786 - protein, 22 aa, Heterodera glycines
CCCLLISTMVMVDKLHIFEEHV

SEQ ID NO: 125787 - protein, 303 aa, Heterodera glycines
MSELIRQRLTAEVRTLSDLVKRLRQRVGRLTEFTRMAPEEIPLAEETKLAKGVRTDRQLLQRSIDRVNGMLQECFDHIQRLGDPFLKQAEEDLLAALPTFDDEQADPNVEEWPIITLLSKAQLILDGLQVYIEARFDTTDAISSRSSSRVSDHGADDENRIHRQRQSTDPPAQAQQANARQPSNSARADQNLFNQRTPAFPLNLTFPRASNRPTHRSEPHHGHFRQSTNDDDALRVSRIEIPRFSGSAEEWITFWAAFDFAVHSRQYPAFQKHLLLLQYLEKGSPPRRMIEGYPPSDANYSTV

SEQ ID NO: 125788 - protein, 61 aa, Heterodera glycines
APGNSTLRCPTTILGLRHSSLNSSRQPPFRLPTNPHRVVSRPFQAFDHSSLFSQPPAALSG

SEQ ID NO: 125789 - protein, 115 aa, Heterodera glycines
MNGWKFFVAFTSNHWAILRRRKWQILALINASIKLIPSNSQSFDADLYLYLSWQDPSLAHSDSDFVLLNDPKIRHYIWLPDLYFANSRTSRFHEVIAPNLNLFIDRNGTIAYSTR

SEQ ID NO: 125790 - protein, 25 aa, Heterodera glycines
MSLLAFLTYLVFIVTKIDKISLQSF

SEQ ID NO: 125791 - protein, 297 aa, Heterodera glycines
MARRMGMNFDSFVALAVRAEEVQKATKSAESGNKHRPKFQQKPTFQPQKIFAPKTNRIVCYNCNKTGHISRHCRLPFARKQSNCARKPPQQNFATKSADFRKNSEAEKKLIDLRLSNQPPAQPTNVEAGPKRKASNRQRNSSSSCSVKATKMEEKSAEIPKWFLNAIFAALVVFAGVFSKEKSKCGQIWKSKGSMSRTDEVKGRKAFGKLGTIFSPKAGEELADVAAANLENLLKIGKSMNFPIADRKYLTLQRDFVPNRSTADTLAAPFNAECTTDEPKALRTSLLRGRGCDIIVI

SEQ ID NO: 125792 - protein, 36 aa, Heterodera glycines
MEPFVNLYDFWLGIIPFSDSIRHFFHFVYDALEANF

SEQ ID NO: 125793 - protein, 112 aa, Heterodera glycines
MTSKNDVTFLQKSPSMSDMKPLRLRRPSIVSTSRSGLGNLGVPLTRHLSIEPPANLADALGMHNPNWAFYHYSSPNYRSAWPWRMFRDRFDVRSNWQKCKTKLNAFFDKKSS

SEQ ID NO: 125794 - protein, 42 aa, Heterodera glycines
MYNKHFSVQPIYRNVPLNVPSHRTNFSNHQRAGYWSFDYDYM

SEQ ID NO: 125795 - protein, 111 aa, Heterodera glycines
MYKQHAQALFSVLSSFLCSVGTKGTEKSDCKTTHLDNARQMYKQMGVTDEQKIKSDMLLARRTVFNTIIAYNDAKTGEAVHAAIVAVRAVISGGGDAANAAVSSSELTNEY

SEQ ID NO: 125796 - protein, 154 aa, Heterodera glycines
MPSTNANDGITSADDATRLRMVDPVDRYSALIVRAIHLGADSWNGCAWIRTFHSKFKIAFNHVKQIPQDYYQKGIIMKGIVRDLESNGIIKVEHRPAIRIPRLFGTKKSKVVAERRGLGLWERATWVERVQSYPSTAVQIFKHSVPAKLAVYIN

SEQ ID NO: 125797 - protein, 168 aa, Heterodera glycines
MYPPKDSDSNFFPNRMLSVDRSRSSSSHLVGLNAALRVSFSKDIKLHRMLRYLRACFVRDIREHNRGFNNGTQQTTKCQPEMIDQTNGVLNKRSWLEQNAYFAENNCFYPFYGQAVFYASFGQHSEGRVVCCSDGRIDEEESFKENCKKMTDHIYAAKAGWRKGKDAQ

SEQ ID NO: 125798 - protein, 23 aa, Heterodera glycines
MAGIYCLFFSAKNHKISHLLDVM

SEQ ID NO: 125799 - protein, 148 aa, Heterodera glycines
MMIYAYAISFVIHHFLLSFSNAVPSVDDSALIAFMKSDQKGSQTNDYKYSIQKYEAHLGILHFMVKNWHCDKMGDQFEGPTVQNFSRARLSRTRKTRPYIFWDGLDQTEVTQLGNLETLNGQNATNIANFWTFCTNICTENILTDCQQ

SEQ ID NO: 125800 - protein, 63 aa, Heterodera glycines
MKVPKLEEDKKKVPRWEEDKMKMPKDDDKMKVPKLDGDKMKMPINERILQLAIDVANHDQTNE

SEQ ID NO: 125801 - protein, 32 aa, Heterodera glycines
MNILTVKLLENKGINSAPCSSAFCCSYFEPPP

SEQ ID NO: 125802 - protein, 379 aa, Heterodera glycines
FMDEYAKRHEEEDGEVYEYDEDGNIIWTWKKIIDPLPPIDHANIEYKPFNKNFYYKPFNKNFYVEHGEIKALSPKDVFELRIALDIRVYGNDPPKPVVSFAHFQFDKVLMSSICKASFEKPTQIQAQAVPAALAGRDVLGLAVPAALAGRDVLGLAKTGSGKTLAYIWPVICHILEQPELCPVICHILEQPELCPNDGPIALVVVPTRELAIQVYNEARKFCVPYNISVVCAYGGGSKYEQQKALEQGAELCICTPGRIIDLVKIEATNLLRTTFLVFDEVDRMFDLGFEPQVKSISEHIRPDRQCLVFSFEPQVKSISEHIRPDRQCLVFSATMKSKIEKLVFHALFNPVKIVCGDVGEANTDGEGSVLVVQDTQAKF

SEQ ID NO: 125803 - protein, 27 aa, Heterodera glycines
MEKRLRKIHPNQWKKIPRLAQKVWKSA

SEQ ID NO: 125804 - protein, 27 aa, Heterodera glycines
MEKRLRKIHPNQWKKIPRLAQKVWKSA

SEQ ID NO: 125805 - protein, 43 aa, Heterodera glycines
MEKRLRKIHPNQWKKIPRLAQKVWKSAYGKFIQISGKRFLGSL

SEQ ID NO: 125806 - protein, 458 aa, Heterodera glycines
QLWGKKLRIVFDASSHEKGARSLNDTLFSGPNLYPDLAGKLIQFRATKFPIWADIEKAFLMISLRESDREFSKFLWVKDIKAPLSGKNIIVFRFKRITFGIVSCPLLLAATLKYHLDTHPSSLAREIVAKSLLYVDNLLLLADTHEEARSKAIEAQTIFAAAKMRLCEFIAAVPISLVGIPEKDRLETETPNVLGMKWVINEDNLSLSFPVPGPEGLTRRVVLKTIASFFDPLGLCSPCLVGPKMFFQKLWNESQGCDDLIPIAECTELMKIQKHWDSEILSIPRHTRRVGSNSLQLHAFSDASPEAFACAVIRAEMQNKNVVSMVYSRSRIRPKKMATSQSDGLTIPRLELLGILIGTRAIKFCEKTNYDIKKCFLWSDSRIALSWLASTDKMPIFVANRVREIRSNRLVFSYVRSADNPADLATRQTTPAELKNAILWWNGPEWLSKSNEFWPKEC

SEQ ID NO: 125807 - protein, 197 aa, Heterodera glycines
MENLERTLNHTRLTRQRAQNEGILLDRDGNVFFRENPPNRTLGVMNQNVVVADPNLENSEQLDSMEMRRRLLNPNNDSALGQLRQNERASLDENEEEETKQGFMRNRTDWTQNLGERAGPTQQIFRNFGFGHTQNEDDFFDHPNIRRTSTPVNENRCVGVGPQNLNEIGLLAEQIGRVIVGQLNSAHQNPNTNPAPN

SEQ ID NO: 125808 - protein, 51 aa, Heterodera glycines
MLGVGTSIGPVVGADRPRPCPVQSQAHKCRLLAIMGQQRAKCIIHELNCYS

SEQ ID NO: 125809 - protein, 27 aa, Heterodera glycines
MDINLRKLDRELFGLPNDNRFIQFGRL

SEQ ID NO: 125810 - protein, 61 aa, Heterodera glycines
MHPSVTEKHSLNGFINNNHNNNNNNNLSPTNLVFCQTDGPQSRSNNHLLTAPENSHQLLRR

SEQ ID NO: 125811 - protein, 46 aa, Heterodera glycines
MSSNEEEESGGSNDDQFSEMSKLLEFTKVWCPMSERTKLAMAQFFG

SEQ ID NO: 125812 - protein, 24 aa, Heterodera glycines
MFAGAKEKGGQKLLQQKDGLFDAF

SEQ ID NO: 125813 - protein, 86 aa, Heterodera glycines
  unsure (1)..(86): unsure at all Xaa locations
CPIKTNFSQIRPSLKNPCQFIARLFPFSVFLSVSWAVFGHVFLDFLGKSIFVGLPLLRRLGIERVVKSMRSVNNWSRXRMTSRMRR

SEQ ID NO: 125814 - protein, 139 aa, Heterodera glycines
VVRRQIRAQIGIIKIAEKYFCVLSVELFDECLFGFVPMAAVDNVQKGPIQHTLELKGGVKLFVGNWQQNRRRNRQMVKSRKGMLKETRLNTVVERIRHTTSKRLPPTAMEQSRTAKAKAGGWTTIGNFDVGTLQLAGGK

SEQ ID NO: 125815 - protein, 128 aa, Heterodera glycines
MNKKVIRRAKPLTLTTVQIICRRKTEMEQHSKQEEKVMDDEQLERLSQTLELLFSAGYFRAKIMGLGNFDKVGTERLGSRFQNRDRPGPESRPGFFLDPGLGPGHFSAAWIFPGPGFSWIFVQEIKVQ

SEQ ID NO: 125816 - protein, 285 aa, Heterodera glycines
MATKSAAATIERLRYLFTRHGIPETLVTDNGTQFAASEFTKFTEANGIAHLFSAPYNPMSNGQAERFVDTFKRAFRKIKGEGVPNKEIINTFLVTYRTTPNDSLPDEKTPAEMLLGRKPRTTIDLLMPPLPQPTERDTKMEHHFNRRFGARPQKFVSNKPVWARHRLSQNWRAGTICDCSGVIYTVKFPDGSTNRFHANQLRNRENTENGHEPLAILNEAFHLPITAPNVGIVGQDLEPRPDPINDEHQDEIEPEQARRSPTPQQQQVPRRSGRNRRAPDRYSPG

SEQ ID NO: 125817 - protein, 135 aa, Heterodera glycines
MPTLMRTSSCKETLKLYAVQLDHGETLRTQNWHNETKWWGGVTENRQDLLQRLSRADFAAPSVAFAPHGLFPRCPWRCHCAGPLCRQCVAGGADRQQNGAPPFFRRLYVLLFFAVVVSTDRNLQVGRHVASVGSD

SEQ ID NO: 125818 - protein, 94 aa, Heterodera glycines
MAGFPPGVVNVVPGFGPTAGRAIVQHPQVDKVAFTGSSEVGLEVSREASGKNLKRVNCYDVFDPAAPFGGYKMSGIGRELGEYGLSAYSEARKI

SEQ ID NO: 125819 - protein, 77 aa, Heterodera glycines
MTLTLLRLLKVLQNKTIIASNRPVNLWSRCTHKTLFCSSNLTVCNFCVFRRDQGLLQGTGFLASEAPTHEGLSGRAR

SEQ ID NO: 125820 - protein, 95 aa, Heterodera glycines
MTSSAVLTEQQQSTQQQQQLQNFAGVVANILPSAVPQNTQQQQMAAVSPAQVMWTQQAQQSQAHQQQQQQQMLRHQKKVHVPQQMASSSMGPSFF

SEQ ID NO: 125821 - protein, 22 aa, Heterodera glycines
SPAEEAGLKVHDKILQVNGVDY

SEQ ID NO: 125822 - protein, 27 aa, Heterodera glycines
MRSARVNQRQQIEELAQNSALLQDMTI

SEQ ID NO: 125823 - protein, 373 aa, Heterodera glycines
MDADIIELTGRDNDEHFLPHHAVINPKKLRIVIDASAHAKGTPSLNDCLHRGPVLLPDLCGILLRFRSATIPVLADVQGAFHAIEVEPEDRRFCKMLWLKNPARPVSGDNLLIYRYKRLVFGATCSPFILAAVLLQHFDKHEHPFAQALAANMYVDNLLIECETEEEAIDKSSIAKQILKDADMNLREFLSHSPNVMGRIPEDDRLDKTPAKVLGLTWDTPSDCITFSLPKDTDITATRRSVLSIIASTFDPLGLVGPCLLPAKRLFQRLWGEGTAWDTPLPETEAETWNQTLSLWQHQTLVVPRHSILGKHSRLQLHVFCDASEHTFAAAVYIRSETSDSSQANLIFAKNRLRSRIASQRFTIPGLEIFSRC

SEQ ID NO: 125824 - protein, 60 aa, Heterodera glycines
SFWPRYEAFPFCLFNIILKECKANVSVGGLVVVPSILFSSSKVQFPNPVNNYFVFFSYPN

SEQ ID NO: 125825 - protein, 592 aa, Heterodera glycines
MKTRPFPIGTPRVWTGEQLWQQQPQTAGGHPHTDCAKPSPPALRPPALPWCRPEDNPFRGFLFCRVLPPSADELGNREPLLPYRTQADGRLTFGLCARCAELRQQRTCRHTERERAWTAAYTHVELNRALLLGYRVLQVHEVWHYEQWASPESGNGLFNDYVNTFLRLKAEASGWPAGCDDEPARAEHVRQFAEQEGVHLRRDNIGHNPGLRQLAKDLLNSLWGKMAERPERDEVVYTDSARAFHELLMDARQEVVSFTHINEQLDRCVVRKREPFARAPEHNNLAVACFVTSHARLYLYEWLEEVRRVGGRALYCDTDSVLYVRRQGAAGVREGNALGDMKRELPGRRIIDFFAAGPKNYGFQHVDARTGQDLRAERKVRSFELTYAADQQLQYGRMRQLVINHFVRPEQRANHGGGGGGDIAEAATEQRTIAVPCQRFVRTRQADIFTRRSTRVYRPVYTKGRVLRPPPTAGGEAAAAEEEAEAVTPTPLSIRTRPFGWCSAEAQQMETDDEEEEGEEEADANSDDAGGESDGLEQPVRKRARAEPVQEMLVEVEEAAPAPVDPDLEEEPVAGCSTWNQQRRLNEHIFRN

SEQ ID NO: 125826 - protein, 42 aa, Heterodera glycines
MDLQDANKENKEPTKKQEEEAEDPSWISLIDEEMKREPLAPI

SEQ ID NO: 125827 - protein, 1109 aa, Heterodera glycines
MDAFQQFKREDGQFRHPFTMIVSGSTGSGKSEWIMRLLRNVDKMISTPVERVIYSYGELNRNVMNLQRAGKIGNVPVTVHSGVPRAEQVRECAKKEKTLLVLDDLVVGMSQQYLDALFTRGSHNWGVSVILTLCNAKKANALIRDASDEQLLCLVEICLNILKCRVPLRPRHLNKLKAHAQVLRRLARTRCSRSAKKVLLQHGDGLPAIVGLIASIALPLIADHTKRYLLVPEEIYQSLAAPPPADGTSIGLVRNRIKQIKNDDGINEAERAIKYEQELKRLNKLTKDEDERPVGVKLENLSDVVDAMPKPVNVTRPIVVSTRRHLKIGRARKENVEQLEDTDDDDDYQNPRGVGEGQVLRAGGRPFITSSVDDIVSHLLNKDKRGQNKEPTAFKEFVERAKQNPLLTIIMDLKKLRLLEFLYKDLSSPVTFTSVEPLLREARKSQPKINRNDVQNYLTSQRTYTLHRQSKRRYRRLPTLAPGLHTEWQADLAIFDRLGKQNRGFKYLLVCIDTLSRQVFVEPVKTKTSTNMIIAFDRIFKRSKYIPWKVLTDQGKEFTARAVQQFFRTKDVEHFCMLTSPQFHAGMAERANRSIKERLYRYFTERNTYKWIDVVQDIVCAINHSTNSSIGMRPVDVNFKNAEALRQKLHDAAENVVRRKQKYRVGDRVRIEKYKHVFQKGYLPRFTNELFTVAEVHSERSPVVYRLRDDNNEIISGWFYANDLCKTLEDKQQKMYEIEKILKKKRQNGVDYAYVKWKGYCTRFNSWIPIEWQTGNTVRIEVPPSNVTNPHELSKNLYRLLGEGSDPLAKKVRSTQNSFMLLINKARRWAREEYIKRKTKEKRSVRDEELLLQAMLTDTGTLVDLNSVAQGFLTREKSAATSNVPLRMPADDTNSYQEKLYEYFSKLSDKNLNIFDELGMTKLNAEIKNLTEEERVILEATKEMGTEAWIQAYREIRLVCQFNYDVHRNRFVLNIDPRYVKKVKVSLQLAYILGFNNTEFIQSENEARFMPDMSGGVSSFHVYTPDLIEPMMIGDVTAPVLRIVTIRGNPDQQIKYPPVQLSNFPTVWWLILTPAHHMVLIGWAYIALLLCIWSIMTHWGCGHRPVFTL

SEQ ID NO: 125828 - protein, 89 aa, Heterodera glycines
MSPNECSDRPFQQPDNVQQPHQQPDEDAELRAQIEDAEEDLLLNWWREDPTIIRFLFGHGRAPAIEAALLQRAEREAEILRQYAENQQQ

SEQ ID NO: 125829 - protein, 433 aa, Heterodera glycines
MRDNGWTLRHVESPGGEYKHGNFLLDGMLERIGEDMNLAIEVNGCYWHACPHCFPEDDAIVGGGETAGAIRARDEKRIRQIARDFEVEIVWECQLGRMLEVDPPMKAFSTTRPTPARLTSMTPFSEVGLAPSGSEHPSSRTKKDRLGGPLKNMFTNYPVGHPKVIQMDKDVNWTAKEHIVDDDGVKMEGIIKCFVVPPRHCLYDIPVIPMRRNNRTLFPLCRKCAEMYPKGLVDPEYNCPHFEDAERGFSTTIPHIELEAALRSGYRVTHVYRAYVWPLYCDWSNGLFHSYLNKFLRIKFEASGFPADCAVDDIDEEERERRKQQYIDNPWKGCTVRLDANNIKPNPGMRYLSKLCLNSLWGRFALRNRLTKTEIIDCHADLAKLLNDVKIDISSIDQLTEKFWMVCYKAKDEHVVEHDTSNVAIALWTTAAA

SEQ ID NO: 125830 - protein, 227 aa, Heterodera glycines
MPKLPETLYTDRGLEFVAKPMKEFFAENGIKKYETSSKKKAAVAERAIRTLKTRLYKYFSAKNTSAWVDVLPKFLSAINNSVCRATGLRPNEISDVNAREVWKRVYGEGLVPAEKRPKIKAGETVRIPEPKHIFEKGYIPNYSDHVYTVDAARATKPQHYLLKDYYGTKMNRKFYLPELTKVQVDENTMYRIEKKYKERMRDGKKEILVKFIGFPEKYWVTDEDFEK

SEQ ID NO: 125831 - protein, 327 aa, Heterodera glycines
MNTNALIASSSVVPLVIEEFQRQNLCDECKAATKCPDNRRLLQYGVFLLHDSFALVSRPERKLLVALCELVVRSMRSSAMSVSFASLFLSTEFVHVASRTISALLSRIFDHIGHTDLSKVVDGRAVASFIAVLDLFSGCSTDKWVLLRDNAPVASILETLCVKMSTPCATRAHILTLQKVLFAGLKGVRQPLSDQSIDELFRVIVRFMRIANFDAGEACATFVQLLKAPSLTMAFIFAIGEGVEFVRRLHFVSFVGQKSVGTARIGHLRNFAFGGEFNPFGKCGQRNDHSETVGVGPPREHFAPKMHPKGRKPSAQQLLAPSFVGMD

SEQ ID NO: 125832 - protein, 59 aa, Heterodera glycines
FVVKCLLLEISSFMSLGLFPSSTAVYSSNSDNENDQNNKFRGSTVLRASSENSATSNNS

SEQ ID NO: 125833 - protein, 76 aa, Heterodera glycines
MDGIAQSNQKDHFLLNFFVGKVTEGAVVAAQSPQRNSHHLNEFEKQLMRENVKTIRISIKRRDLPLKSNQQQQKFC

SEQ ID NO: 125834 - protein, 284 aa, Heterodera glycines
TRKNAGQGGAAGMAEPAEQKFPGKVVQKLYEFIEKSEVIREDEIKREAHKLYKQYEQSLVFAHKLYKQYEQSLVFAVNYEGYDEKYDDSHPTFQWTYDEKYDDSHPTFQWTFSGALLYSITVFTTIGYGHICPKTALARGTIGYGHICPKTALARGLTIVYATFGIPLMLLCLANIAESLAQVFTFVYVFTFVYFKVCCAYCRWQAKKRQEKRSALKLRYHPNAPVNVRRVHSGRSAQRYNSLLRRHASQKSETINEKKICIMEYYIKTNLKTIINPFKTLEVP

SEQ ID NO: 125835 - protein, 61 aa, Heterodera glycines
MSTSTNLSSSSIFTPAEREASCYDGSLIGQKLDNPRSFSDQQQIEVDERNRNNKNGNKFYY

SEQ ID NO: 125836 - protein, 500 aa, Heterodera glycines
MTPANSEDSENPLPCSVKPRIMIGVRDFWRFILDWDEIRPGIYRIRTVFGVIFGGEDCGVPEKTSNPSLCCPVLNTPHPIESDVAKLWALETIGVSDSPILKDDEMALEKFNKTIKKDKEGRYEGCNEIIEDYLARGIIENSSRTCDPQHFLPHHTVMGKKLRIVFDASSHEKNVPSLNDTLYAGPNLYPDLAGKLIQFRATAHPIWADIEKAFLMVSLREADREFSKFLWVKDVNAPLSGNNLLVYRFRRITFGIVSCPFLLAATLQHHLDTSPSDLAREIRHKSLLYVDNLLLLADCPAEAEQKAIEAQEIFSEAKMRLREFVAAKPELLTTIPKEDCLSEDEPSVLELMGPVPRLGPAHRKFRKKCMGFDQKCFTQCFCDGGISESGNRGPSWISSTEKQPVFVSNRIREIRTNRSVNFHYVRSAENPADLATHPTSPNELRSANIWWKGPEWLEKPANLWPDELTAILPPEESSAPDPVVVAVVKIGPDIFEFDRF

SEQ ID NO: 125837 - protein, 365 aa, Heterodera glycines
MGKLGHGEFKQWTEILSKKNLKSRNNALKGKAPPEESGAVSAPCQSCAQSHGWAETPALLSACLVSTEPEPHLRVMASTSPGALGDSAGGTGTTNAAGGGTGAGGGMKPSGGGTSGGGGGANTISSASSATSSKPAMGSAGAGRQSALGANVGAQQQWWSQTAVACPDDRSVTHIMVFQTILNVSLGHHQGEDMLQSAFDDDGDLTNVLGGFNFVEQNQEELDLDNLEIDKDEETQINNQPMAIGYTVSTAPLPPGMPSSFWHRCPAARRRAGASGIAHLKSSLHINTSNLNEEYGGGAAQQRERDSGGGGTTASSAGGGAANAKATGAEQQQLPHAQHPLDAVATDDVLRWYLRLNEKIKPYQE

SEQ ID NO: 125838 - protein, 27 aa, Heterodera glycines
MAINSKISEKECNFLGSDKPFLNLHIV

SEQ ID NO: 125839 - protein, 141 aa, Heterodera glycines
MPLANPIKSHQLPMPLANPIKSHCYWPIPSNPIAIGQSHQMPLPLANPIKCHCYWPIPSNAIAIGQSHQMPLLLANPIKSHQLTMPLANPIKSHQLPMPLANPIKSHCYWPIPSNPIAIGQSHQMPMPLANPIKSHQLPMA

SEQ ID NO: 125840 - protein, 64 aa, Heterodera glycines
MLRHEPVFRDEVKRLVESMVAPNLLKPKMLNGRPMTVRKFVECVRVYVTLKPTVKACLGMEKDN

SEQ ID NO: 125841 - protein, 319 aa, Heterodera glycines
MASAMTFTETKTAASPASASKGSNNKPKQQKNSASASMTSVMKRTQLASKYFGNYLVVFQDHNRSISSAGIWTKTAASPASASKGSNNKPKQQKNSASASASMTSVMTLTQTKTAASPASASKGSNNKPKQQKNSASASASMTSVMTLTQTKTAASPASASKGSNNKPKQQKNSASASMTSVMKRTQLASKYFGNYLVVFQDHNRSISSAGIWTKTAASPASASKGSNNKPKQQKNSASASMTSVMKRTQLASKYFGNYLVVFQDHNRSISSAGIWTKTAASPASASKGSNNKSKQQKNSASASATMTSTMTLTELTIT

SEQ ID NO: 125842 - protein, 120 aa, Heterodera glycines
KSRVRVQVFKPGTGGPESGRGTESGRESGRGTESGRGTESGRESGRGTESGTEIETESGRGTERGTEIETESGRGTERGTEIETENVRGTESGRGTERGTEIETESGRGTERGTEIETEN

SEQ ID NO: 125843 - protein, 58 aa, Heterodera glycines
MSIPALPPPFVSVLARPLLLLPRLITTVRRRRMSPSFIRPPIQPPMQWHHRRQQSTNT

SEQ ID NO: 125844 - protein, 70 aa, Heterodera glycines
DFRAPKCANSKPCDCQPWPTEFGWPWKDRRTGWHRTSICEGTEKEIYILGGKFIVKKTILFAYSEENLFW

SEQ ID NO: 125845 - protein, 141 aa, Heterodera glycines
YIDHNVIAFLRRFCPIFAAFPINLAIKTDSDLISEFILRNIWPMLGRNICGLFLFANVFHRLRKFVPSILNDCPSLRVVNLCDADLFIEFPADDSAAASDGQAVAKWLFTPLQNNVPKVFMCWWDNNDDGNLASELEAFKA

SEQ ID NO: 125846 - protein, 78 aa, Heterodera glycines
MSDNRKEAEEKMAKAIFISADCWLKVFDLLSPRQLGLGIAMISHRFDFYVDEHFKIRKWTFGTVQFGDKMHENCSKFN

SEQ ID NO: 125847 - protein, 289 aa, Heterodera glycines
YLLVRKATFVCKITKNIIYYKCSSIKETAFVVRNPFTNHGLRLSVTVFHRLRQFAPSILNDLPLLCIGKFHAHDDDVDDLFAEFPCNDSAAASDGQAVAKWLFTPLQSNVPKVFKCGLDMDYVKNWSSNIEQFKTAFANASSPVNFIVFICIPLPFADSVLAFDFTNELTREQLTLKRTDFHYCFLLVRCPIARDESKWTKWEKEAIGWRTDDPWNRIIIHIRALASPLSLSTTNSVMRTIGQQHDVPSNGTVTVTLIVTQSSSTESKWKQMAPSDLLANVTVTPHAMV

SEQ ID NO: 125848 - protein, 159 aa, Heterodera glycines
MDEYKNVEEGISNGIRIQLNKEQGNREFIFSTVAGHFKVLQRVKLFWQNCLEAEKQKKLALARQSASATVRRLNRKIVREPLYAHYPHRSVPTPTANTTVGTTLAGTADADAVGPVQSRTARRWEKLFHDYGHNYSMFRTIELHRLLLDGAVVVQQIAK

SEQ ID NO: 125849 - protein, 124 aa, Heterodera glycines
SPPIYGWGMPNGIVQFLKKIKELCNREFEYLSITRDTTEVDIKQRREIRAGSAYYTDLCAVRAALCGRILFIDGVEKAERNVLPILNNLLENREMQLDDGRFLLSAEKFDRLLRVSELCLLLFL

SEQ ID NO: 125850 - protein, 138 aa, Heterodera glycines
PPYHPQSNGVAERYVDYFKRQLKKCSGLIFEIRSPQLGNRIITRHANQMRTTMAQSGDETCSVPDDIIFAREEHGTGNETTTGNETTDDQQTNTQPQQQAAQQEEQRQNQQPTLRRSERTRKSVRFLSPTHTGQSYDH

SEQ ID NO: 125851 - protein, 107 aa, Heterodera glycines
MQMVHKNYGPLLAFGGQRTKKKRGTKERRNGEEKKWKQEKEWRRGRYENCRGKVHFAKRQRQREEKHLEKKHFWESHGDFIHLRFVWLVDGLGTEVDKESEGAEANF

SEQ ID NO: 125852 - protein, 38 aa, Heterodera glycines
MTPFCAFVGLTQLAVTVIGKGVEVRQNKRPLIEKLEKG

SEQ ID NO: 125853 - protein, 51 aa, Heterodera glycines
MDNTNNKFILLKNGAKLFYASEECVRQEAKNFVGGIVGLNGPSDLEEGIYE

SEQ ID NO: 125854 - protein, 26 aa, Heterodera glycines
SSRADEFNECQNTSADAEIMRFGSQK

SEQ ID NO: 125855 - protein, 45 aa, Heterodera glycines
MSLIIKLNYLQRNGQFRSSPVCAADWCSNCSISTQFANFIIKVFP

SEQ ID NO: 125856 - protein, 972 aa, Heterodera glycines
MPDDSPFMYQIIRSKLPSTVLSELIKMERAAGIPWGTPQLRAGLAEVLGVREEVERCLRETNADRQTRFRHEARPNRPQRPERHENARVFSVAQSVRNSDDKRVPSCLFCPGQHWASECNKVTDAETRKRCLLQQNRCLNCLRKGHQLRECRSKQVCRVCKERHHSAICPSAKGTSSARSKQQKPSPRNKQSFGNERNSRPLVSSAVANEADSIPEPKTVNTIMAIVSPSVPHLVMLMALRAPVFSESAPNKRRDALFFFDPGAQVTMVKTPLIRQLSLPKLQDDQLEVNPFHTRQPIKMKAPQHVLCVQREDGGYETLVAHRTDWIVPSVRRATFLQGMLVPVDEEPDILVGMADFWKFFNGVQRVSPQLFKVQTSIGSTVCGRDEIPSRPTADHPLSVMPVTVHVPANEDEMPNTAVSGIQRNESISDLDSLRQFWDLQNIGIRDDPLENDDETAQQIFDQTTTRLANGRYSVGWPWKNFPPDLPSNFAITRSKTKALASVLSILMCLFLIGASQTNASSTTKPKRGKGLPIRCRGCELTCTKTGVDISIPNGIVKFLLCCAGGTQCITQSGVRKSFHRLPKEHLLFDYDCEAMYWTKRGNKRIGSVQCPGRDACELIDCWVCLERLANPDCRPDVTFGLIGGASFFTFLFLFWILPLMCHVTMFWILQHLFTLLVRLLCCFWPSQNAPQREESPLLAFQSLPTPRRRQMGRSRFRPFPKLQTTLLLLTICAFTSCARAQVVSITASAEKCQRSDFGSVCHLESSTTVTLLPSGLPVRLLLRHPDERVLGTLEISMRSLTLHCLPKSEQWLRSYHIETVSVKRCPSRGNCTREFCDDVNNGRKTEVQELSEWTKHPGFNRCSASCSFWWCGCLNAGASCIFYRPHAIANSPIVYEQISCPTWEYRLRTSLKLSVNANFTKEPSVSLTPGITFRWKDLSITPIASSVPPAPIMANKFLSDGNNVAISDEIQ

SEQ ID NO: 125857 - protein, 22 aa, Heterodera glycines
MAKFEGRSGGKFFHGHPTLYLP

SEQ ID NO: 125858 - protein, 755 aa, Heterodera glycines
MSKGLFGCYSCHTGAHLHLQCHTDFGSALGYVRGSDGTEFTALCHKTPKVLNVSLSFNRAEVDINCTIECSGGRNPFVINGHLRYVPKHFQAPNEGSSFASKAKPSNSCLIWCPDWNFDFSDVFWYFFGLQNALRTVGIITLALFIVYVLLRCNPALRSWRAISRVVLLFLALWPTTDSSAAGGLSHLLSIQNSAPKLQFEGHSSVSRRVTETLDIFDAQIGTIHLAKNQKSPMDFAIKAVSVPVHSPFLQIPESAFHIQTQAQFPPFPMATLLSFLANTMNIDVDRFGLAVTTSMSRWNEAQAIVEGLHARGYELKTRHLYPRERNVRLHGSELSRSGASRLGAYNGSARGPTVSELYRSRHGITLRHPSAPCLMEPGGNEHHDFFPIEMIRVVAPDQVSTPRGLSTRPLPRPRPSHFELWDRTDHPPRSRELVINVMPHGDSTSRGAAEEYRIGVGRELTISGPLVLRIYAGALLLALFSVALVDGQSSIAGLCPAHSFALCSSRLHKFSCHCPSLFGPSAFDFVQIVNKFAPLAYSPSSGSEHFVKSHVKSADSPFSPLFGRVHHLPLFKPLVAKLGHHSLPSDSSISVALVAMPSTHCSSTLAPVASHVQSGTASLFDPSSPRVCTADFVRAPESCPPTIGLCTTDRMPTISPIADNQMATGVTSRWMSIQQREKYERRLLRLNGFRPTLVICEPMSSAIRRERLRLKRLHMATPQEPRKPGAVSEEEGTAVAGPSSAGSVAKATEKMEEN

SEQ ID NO: 125859 - protein, 80 aa, Heterodera glycines
MTSKDRAQRMTAKGVVDYLEGKCKPRQNGKSPEANCVRKSPKRIKLFGTMLTDETPGQSVSGQSVSGQSVSVQSVGVKNI

SEQ ID NO: 125860 - protein, 229 aa, Heterodera glycines
MKRSNTTKDTPPQPKRSMAPPLDLDPNTVALAEQERQRTLVFIGIPESNAVRPSERVKEDREATTKILDHLEVEAEPTAVFRLGRFDPQRTTPRPLKVVMPTPAHQHMALGGWKRERARLRSQQNLARLFVRPALSKEQLKEEYEARVRKRQQNTAPVAPAMQPPQTNVPAPAKENGPKPKEASEDTSKSSQVEKTITQNQIPNSLPKIDNFLLQLQSFQKQFPQCFDK

SEQ ID NO: 125861 - protein, 18 aa, Heterodera glycines
MYVKYVRPLNGDYFDTKK

SEQ ID NO: 125862 - protein, 69 aa, Heterodera glycines
MLIAVMKGRPKIQISQYSVQKYEAHLGIVYFMKNNWQCDKIVDVFDEFERAECQKYRKYLDILYEYLFR

SEQ ID NO: 125863 - protein, 140 aa, Heterodera glycines
KFQWFGEQMFVFCYFNYSLIVPLTPQLKLNAKRGDHCKVPTNCASFRGPFFRRSKCHLAVRRAVALSVFLPNCARLQKSVVPFFDLFSRRRVHSKFGPKSSCCLGVRIGLFKPTDQFGPFQNAKNARRFRRSGHIGNKSE

SEQ ID NO: 125864 - protein, 111 aa, Heterodera glycines
MFFLPFAFMLFSPTFATLSVGNPGVKRRKQHPIRTSREDELFDETRGAEMLSKCKASNMDLTVRKAIEDIKYRGGSTLTSKAVELALQDMRRGMRLDARQVIMSPVKKPIN

SEQ ID NO: 125865 - protein, 205 aa, Heterodera glycines
MCRQIGLGETGEHFWIPPQFLVKSKEELIDYVYPNFQQLLGNDKELLNRLILAPHIDTCDEVNEIMMANVPGQVREYLSTDKPLDDRPLDIDEIESEFPIKPAFAMTIQKGQGQTIRTVGIDLEREVFSHGQLYTAFSRATDGNNVRVHAPNREIDAQGRAKVLNISSWYMVFGEMPKHSIPICTMLGAKMVRSLDPGHGPVSPL

SEQ ID NO: 125866 - protein, 231 aa, Heterodera glycines
MKFCILLFLFLIALIIPIESEKKKLQQKSFGEIFGEKWEEKEEEKRNELKKREIIAKFYKIKEKIKQKGRKYSTKEWGKIEIKIAKKLGTNRMKIYKWIKEFGLQKYKSKSDAEKIEIVQEFIEMTNEYKQKSKYSRKEWKQNYDEICKKIGVNRETLRKWKKQFGISKKRITEEEKMEKMKIYWEIKSENPKMSDNEIAKILKIHQNSIIRWKKLFGEEMFKKRAEEEEC

SEQ ID NO: 125867 - protein, 65 aa, Heterodera glycines
MPSKLSQKYAGHLPNSLTTLASFPIKNSEKGIIATNQIKIDIVQIVDTCLVVLLTYIFLNVMNSA

SEQ ID NO: 125868 - protein, 25 aa, Heterodera glycines
KERTPSDIPIFPFHNWPKATVLIDT

SEQ ID NO: 125869 - protein, 65 aa, Heterodera glycines
MVTVRTKRIKLSESEFMGKRIFEKWTREGRVTGSENTIQISISTQFRTPDEQKSKIQIFIFAFLV

SEQ ID NO: 125870 - protein, 44 aa, Heterodera glycines
MSSCLDVFKLTDDDAMKFLVCESHIGTKKMDYQMEHYVWKRRSD

SEQ ID NO: 125871 - protein, 18 aa, Heterodera glycines
MRNSKNLKFRLFVRNLVH

SEQ ID NO: 125872 - protein, 135 aa, Heterodera glycines
MKRQFNDKNGAKPITFQNGEPVFIWNLKGNKANWLPATIIERVGNSPTYRVDVPTLRCAVHRLVNQIRRRFPVEMETPQLGQENGNDLAGDQTNQTPIKEIEKAKSPIGRSQNAPRTSARAKRAPQRLDMDPSKP

SEQ ID NO: 125873 - protein, 509 aa, Heterodera glycines
MDDSVSLAGSDDESQQPRPKKKFKIPKRRSALLRPIGQQQSPLQGQHKRRKQLQDSGLRKLFQAISDQQGSSKATTKAIEESRKVQKAPRHEKIEHEQRMVKKSQQEANRHLQPEKRQQKEIQEVPHSTTEEQQRETKRQQIERQQNDEQRAINQQTRSKAWQELARQFDYDLMDQPDPTEKQPEETDQPTKSKQQSTKDKEDKELERHRIGRKKTIDMQEKRQRSRDEWPEENETLLSYVQRIYGPENWTSAWQRGRVLRELHELEDQGRWMIHHKSDRLQLSVSRMYGGKRPFAEFRFVEGRYYSHMVPEDVIFLQAVPTEEQPEIITIDDTTTPATNTEQTKHPTKPQRPQSPKLEEYRMADSKPNTHSQFNLFQPCDNTHTTCAKTATYGSTAGNRFQMEEFQNFRANNFFEALLFNWLTRNMNLPAEEIWAAHEGYIQADTTVEEVAQMFYQQQVADSGRQIARDQHLAEVINVWRNSCDRFGELYNQPAHKQVKFRPITTESE

SEQ ID NO: 125874 - protein, 1189 aa, Heterodera glycines
MASYRADWIVKSIRRAEWKTGNVEITDEEPDLLIGMAEFWRFFQRREQINRNLFRIYTSVGPIVCGKDIPQEIGETRQICAVMSAKADCEFAETGIDTAKNFWDLQLIGIKDDPKENDDDTAMEIFEKKAKRLADGRYSSGWPWKEFPPDLPSNYNMAYRRLVNLLEKLRKTPELLDKYHESISREFNLGFFELGERREGFPEHFLPHHGVLTHKLRIVFDASAHPRGEKSLNECMFRGPVMIPDLVGILLRFRLPIIALWADLEKAFNAISLDNEDREFVKFLWVKDPKKKLSTDNLQIFRWARIPFGVISSPFILAAVVQKHLKEKASPLALEFAGNAFVDNLMTSCKDAGEVLKKYREGKALFAEAQMNLREFICNSMKAMEQIPEEDRLNKPGTKVLGIPWDIQKDELSIGFPPTNEAGKISKRIVLKTLASIFDPLGMVAPCLLQAKLFLQRLWDRTLGWDEILPADETAEWFAVIREWKTEPFKFPRRSVLQDEMVQLHAFVDASKDAYAAALFIRSQKGEETNVQLLYAKSRLKPRKAEVTIPRMELLAMLIGARMLNIKRMHSRRAEIPSSLVEWTNMAPRTNEKLADRLRELDNVVAVPATTSEDNPWIDPCRFSSWTKLRRTVVWFLRAINKMRKTRIFEISEGVPMSSEDYQYAEILLVKMAQKCWPMWKKQSQELVKTSRKDGLVRLSTRLAMSNASEDMVNPIILPENCPITRLIAQSVHESLAHSGVESTLTEFMGKYWTPRARLPIKKVIRACGRCRRIQCPAYKLPTMSPLPEDRVRRTAPFESIGIDYLGPTNTKINGELQKAWIALFTCLSTRAIYLEPVLDLSAEAFLQVFRRFTSRRGTPKRIITDNGTQFVLAAKVAAALEAGKTPTCPLEEHLANEGIKWRFNPSLRPWSNGFLERQVAGVKAAFKRVLGRRILPYDQLRTFVAEVEATINQRPITYVDEGPNAVQPLRPVDFIMPKAILSLDVRRNEQSSDTEFENEPKNLQKQLQMRWEGTLATLDEFWTRWKKEYLLMLRNRLQWEHKGPRSCLADQPKIGEVVIIEEEKTPRNCWPLGRIVELQGSDNIVRSAKLKIPKANGERISWLPGTNVATPSFGAKVTSGDLRTALLSNKVGEEDASSVDPIDRSYAKHLINQANSGITIELGRPFILNNIKLHLMDRDQRTYSYFVE

SEQ ID NO: 125875 - protein, 63 aa, Heterodera glycines
FLADLKPSIACRFSAQQSTNRVFDSLQKNNSLPKSFLQQFISNLISCRLKAINCLPVLGTAKH

SEQ ID NO: 125876 - protein, 27 aa, Heterodera glycines
MNTDFVSTQRPENEHLYKKKNVWKMGN

SEQ ID NO: 125877 - protein, 28 aa, Heterodera glycines
MANFFNIPRRQTIQLLLIIILFKMTLQQ

SEQ ID NO: 125878 - protein, 242 aa, Heterodera glycines
MSNGQAERFVDTFKRAFRKLTGEGMSSVKEIIETFLVTHRTTPNDSLPDLKSPAEMLLGRKPRTTLDLLKPPPIQPIERDQAMEKKFNRRFGTRPQIFASKDAVWARHRLSQSWKAGTICGCTGVIYNVKFEDGSSGRYHANQLRFRKATQIVEDPLNILNGEFNLPIQMAPMVNGHQNGQDIENRPDPINAQNEVEEQPIEEEQQDVIQAAQSPTPAVRSPTPQRRYPYRRRQPPARYSPR

SEQ ID NO: 125879 - protein, 109 aa, Heterodera glycines
MTGTCQELSIYIVAIPGAITLAGLHLKQWAPVRLNVEVNGMVSKFCLIEKFVALLHHWTLCLLMKSVKNVNSMESILNLFLPQYYRKAIILIPFQSRLCCNRIRSSSNN

SEQ ID NO: 125880 - protein, 45 aa, Heterodera glycines
MSNIRIRPSLSQEELKARRVLQEECSRKRKEDGGEWVVYADKVML

SEQ ID NO: 125881 - protein, 131 aa, Heterodera glycines
MQRIIGKKKKAYDRADEMLAPPASPTSASPIERPLNSNNANLMVRGWARISGRKRHRRKVPNLESNNNSSNNFGVTRRESGTMPYNIQNGRRESGFSVESTWPMIRANSNLSRVAHLSENTGRTEDETERK

SEQ ID NO: 125882 - protein, 354 aa, Heterodera glycines
MPAPHDKTTLRSFLGALNYYGRFVKPMRETRAPLDQLLRKDESWSWEMTNSPHKKEKVIEHASTVLTNAQQNYSQIEKEALALVFAVQKFHRMLFGRKFTLFTDHKPLLAIFGSKKGIPIYAASRLQRWALIMANYDFEIRYINTASFGQADVLSRLIANYPRPEEDILIANICTETECYISTILQTKTEQLPVTADEIAEVTPKDEILKKILAFTQSNWPKKCSDPDIAPYFPKRENILEIEGCLLYQNRVVVPQSLRNRMLKSLHMAHPGIVRMKALARQHVYWPGMDSEIERIVRQCEECQKAQKAPIKAPLAPWTPTDKVFQRVHIDFAGPCQDGHVYFILVDSFSKWPE

SEQ ID NO: 125883 - protein, 768 aa, Heterodera glycines
MVNPLENLPYEDIVAIDRRLFSGRNPSVQAKVSDLENVLSQVSGFEDASNRNLRYLNRRINATNEAIFKLSEELNTGLATMATRIDSLTDPNPFHFPFPIPKQNKQNRSKSQTPSRQFPLNVDLNAQSSNSITPNLAQNSDIRNRGLTDSSTPPPLNQVIVEEEQQDDSHVWADESSDRINGLTFENQSSGGLNSFTGESSQTFESWSRKFMDYIEATGRRMEEGDKIGRLKMMLEGTPRDIFEDLPADRKATLQAAIHALKTVLDTPFKSQLAKQSLASCRQKEGEMVETFVERLIPLVNAAYQELDPKFRKDMLKSAFLEKLRDEISFHVRLGSSASQTFEETRIKALEVENLLATRKPRVDPDWINVMSSSSSARSPPNLLQGNFTTWQPPPPQQKRVSFGPSQSANPNPNNYTNQFRPPSPPRFQNRNWQQTPNQTPTCYYCKKPGHVISECRILAYKNQNRNSQNWTSQPPMFTHSNPNSIPISRPPPYNSGRGNQPHQRGTWRNQQSFHHDQRGAWRNQQPFHHDNRNWNRYPNPNQPYGRGRQINSLNTYDSLPPDSFQNLSMSDNGPHPSFNTLTFSDQVQQPVTASPSQIKEQLVCSGSADKQPNLTDALKSEPKPVSPTPIVTNWESHPRSSNFSIAPFLTRFNFILCIITLSLSASLVSSSHSQSSLKVLPMVCQTHVEGTIWSLPIWLPCPKLKHTPSDTPIKQPIRLFQPNPFEQKSKAWVCRKVKKSLIEYTNPWNDLIIKQLPSENLPVLLDE

SEQ ID NO: 125884 - protein, 339 aa, Heterodera glycines
GLPHVHFALILDWDRVRSGGIIMTPEDYMVQYISAEIPENPSGRSPEVILRRQLYNTITTKNIHTCSIRRCIVDGKCTKRFPKPFSYDDVYSETAYPRYKRRPPALTEKEASKNPDNYGRFIQYKDKSGKIVRVDNRQVVPFNAFLSAKYKSHINTEFVAGEGCTKYLCKYVMKGADMAFIEVKGGPEKQQKVDYDEFHQIRLARYITSMEAYLSLTGAKLVRRSHEVAILEQLKCNINYDKVDELDVHGPSGHRIAVEFGLKDEEEDLNAVCEAAQAEEDRRARGEERVTQLTAYFAFNKDNAPLGLTYAKCNKKLWYDIAKKQWKPYVGRVFRSSAD

SEQ ID NO: 125885 - protein, 329 aa, Heterodera glycines
MISYVLWDYNPPEGNMPHLHGQLFTIPPAEARTRITDISTENSLDDSVMDALHRILREHHLLAVVYESAAETYRQLPAEERVQLRMLLVDTDKTGAERTVESDVAQAPANLHADDRANVKQIHPGRLGTETAAGSRLVAQFYLDTGANVIPVSEYDIILMGRDETKVRSMKWWNRNIDPALFPLLFPFGQFGYEYGIKLVLLKNERFDSTYRQIRDKDNMLLDADEDLGEEEEFLGAEQEQQFHRRDQVSRSQWFRYMAHIRGLNYNWRDGHWLWDWRTLAQLYTISYNNRMEAQKVQFMKQHQERRRLILPSSIINWLKALRDKKGKK

SEQ ID NO: 125886 - protein, 89 aa, Heterodera glycines
MPLSNQNRNTIIKHVAIWCKGKQDQRLEVEQRRQQLEGEVAALVKACGRLKRNAQKKDIAFKLKSLEMVKWPPAKAFDNPYIKQGIQIH

SEQ ID NO: 125887 - protein, 25 aa, Heterodera glycines
REKKILFFSGTLYLLVHISFFETVC

SEQ ID NO: 125888 - protein, 25 aa, Heterodera glycines
QFIYKGQGGNTNNFPSKKLCDQVCK

SEQ ID NO: 125889 - protein, 129 aa, Heterodera glycines
MNMTIDELKHKLTQFLYRPINRLQNSVNFFCKIFANEVIHQKVLASLRPKDVGRMESVSVSLKNILLSGSVDNAFWKVHYERLFGKVQDDRQIPYRERFGEKMRWQANAARMLMAIPLREPKTVDVPDE

SEQ ID NO: 125890 - protein, 44 aa, Heterodera glycines
MEEFEEMVAVLQLDGVLDFDAVRRAVSSGAIRVRECDAETPMVQ

SEQ ID NO: 125891 - protein, 79 aa, Heterodera glycines
FEYPKRTLEKIDFFVFGAVPPNRCAQIYGETESFRNSFPIACTLILRWIFAPHDLFEYPKRTLEKIDSFVFGAVPPNRC

SEQ ID NO: 125892 - protein, 136 aa, Heterodera glycines
TKARTLAQNAIRRRLQHPRLHRTPPPPPPPPVAVPTARPAPSPVRKATEGRRKVERHKLVGCYGMKTSEKQPNRRRKSEDWTKEKGEGRDTAEEKGKNGEEKANGRGKHPSDGEKAAYQRELLRERNRGNEKLGNC

SEQ ID NO: 125893 - protein, 60 aa, Heterodera glycines
MPDADQILQQLEHHFVNNWLLDTGKIDEMKQRQSDQREEHDEFDQTEEETDEISLINVID

SEQ ID NO: 125894 - protein, 183 aa, Heterodera glycines
MEMPTNRELAQRKRRAEEAEFLHSIDEGEQLDELTPGRICLHEVGHLKFLWDDVDCVDEFRKITAAADPRDGSAGAVHFQPPAQHKYTRAQLKAKLQLSLGGRAAEEVYFTRCVGDGFDSLEWPELAPRLMGHPEASKQFAAEARANAANAMEWDQMSNSNASGMEEDEEEATYEMITPGLIR

SEQ ID NO: 125895 - protein, 23 aa, Heterodera glycines
SKNAQFNRTRTKEQQRTNSWLRF

SEQ ID NO: 125896 - protein, 35 aa, Heterodera glycines
MPGPGPGPGFHVGPGPGFPGQKSRKIQFGISNQSL

SEQ ID NO: 125897 - protein, 27 aa, Heterodera glycines
MALIIRGSADCFLPPPGRCWEKKGTKM

SEQ ID NO: 125898 - protein, 88 aa, Heterodera glycines
MECHLRANAKSAPKVLPRGLRPVVLRPLHANVRMAPPPGSAVLRRLVGPTTKIRWAIRRSIATEQKQRGKGHEEADNASNADWDDDSD

SEQ ID NO: 125899 - protein, 340 aa, Heterodera glycines
TRMFLNLVVLIGGDWKQLTPVIPGGTDRHQLEASVKNSSLFVNFTTVRLRANHRLLPGQHHYRAFLKRVGTGTINDSQGRVKLPSLMVQPSRDELINEIFPADLPNPTNNWKQLAERAILCPLNRDTLTLNEIIMERLNTAEERLNTAERVYHAVTLPLVDETGENELDADADHENLSRMTPPGIPEHILRVRVGAVMMIIRNISLEEGLCNGTRVQVTELFDNIIRCRILTGTHVGNEHDLPLLVVTKAPHEGPFKCERIQFPLRPGSVMTINKSQGQTLARVGVQTLARVGVLLDSAQCFSHGQLYVALSRVRDANSIRVCTTRNDRRVKNVVMRELL

SEQ ID NO: 125900 - protein, 44 aa, Heterodera glycines
MAHCASLVQMDEDVYEEMKLWMKGLVAMWRDEKGEDGMDCVFVE

SEQ ID NO: 125901 - protein, 1576 aa, Heterodera glycines
TIKTFIDRNGLIRMDTRIKKCEMEFSFKFPIVFPKRAPIIELLIWRAHKKAKHGKVDSTLNEFLSEFWAPNVRATVKKIIKMCSSCKKLNGPSFALPIMPQHPEERVKISNPFESIALDYLGPSLVKNDGKTVKFWIVLITCLITRAVYLEPVLDLSTYSFLQVLRRFASRRGTPKRIISDNAQTFRLAAKVAGAYEARGGKTRDELENYLVKNKIIWRFIPALAPWANSLAERLVKICKDAFKASLGKMVLQLDELRTFTTEVEWTMNNRPITHVSIEPEGERALRPIDFINPGLNLGLTMPNTEKEEENNDDDDDDYNPEPEKLADHLKRQWQKTNKVLQWFWERWHKEYLLVLRDRTQWFHKGPNSQEKREPKIDEIVLIEDEFHPRNTWKMGKIIKLNGEKGAIRSVQIKMTTKGKEMTGRIIERPINKIYSLESTSEDCERQLNGSVCRVSGTTELTILLAGQKVSLALKDDKGKIMGNNFCKKGDAIWGHKCALPSSECFFYRTYAEPTSNTIWELIRCTGWDYELKMSLTLTIGNETKSKDLTMFPGLTVKWSKFSFTPEGLTPPISPIFKITIHNRKIKYSKRSGCYNCGTGGTLNYVCQTEFGQAEAEIKCQNGPIFLAKCSENGHEQKDILPFEMADINMNCIVECPGGQTNFKLKGTLRYVPQLENEVKILEERGARIYSTKNGKRKPHINNKNWVLSMDKPDDEERNVHGKDIVKRGDGLLNLKVKGSQPQVRKMSLKGIIKWTILAIFILFGHVKGMDNTKKLDESIIDELSDDVNEADDGSDTLSVELGAQGNQQKINQNENEQRIGNRERVETPPVYYPKLPWPNFYGDTMSWPVFWQAFQANMGDKPIPEAQKCTYLLLSLKGKAARAMRGYQPTAENYNLVINALKRLYGNEKVIKEALQNELLNLPQANEAAISLRICLEDVERVVRQLNNLGFAGDKDYVMMTIKNKFPRNIILEALKAEKDSGREWNVEDLIKGLEEIISMREEAARCTRMNKTAGTQRENWNNNQKQFRQFGNQNNKWQNNQPRNNRNDERNPQRVFFTQDSNNKQNSRPPIINPKCFLCGGAHWPSKCRQIIGQENRLKIINEQSRCHRCLKKGHEKINCTGKMCFNCNGDHNKLICMREFQGTGANRTEIRLPFNRTNQKQNPRSNLAATAIKNTLEEKEVLLMSKRINSYDGLDRKKKSVLVFFDNGSQIAMATDELIDKLKPPKISEGELELLSVRKSKPTHLNSPKYLIKLETTEGGMEEIIVNRVDLITTKIKRANIISGKIELIEEKPDILIGMREFWRFFKKVEPFKEDLFKVHTVFGPIICGEINGNDKLCALTSMGLECIENESEKIWDLETIGIKDNPMEKDDEVALKMFKDTIYRKDGRYVVSWPWKGPKEELPTNFTLAYRRMISIIEKLKKSEEHLKQYDEIFKEQLKEGIVEESEIKGYDEHFLPHHCVLVAGKKPRVVYDASSKIRGKKCLNDLLFRGPIYMPELPGLLMRSRLSKIALWGDIQRAFWTLELQENDRDTVKYLWLKDVNKPITKANLCAFRFKRVPFGVISSPFLLGAT

SEQ ID NO: 125902 - protein, 243 aa, Heterodera glycines
YIDQNVITFLGGFRRLFPVSSINLDIVTENLRILEFVLFTIWPMLGNSICLLKLNKIVLHGLRQLAPSILCDSPALLYTTVDRVMPFVFPLGDNANASDDQALTKWLLTPRPDGVPKLLDCNVNSVGENWFAAMDELQNAFRIASSPVSFRVFLGFPKRQIDIAVPFELNNEVTGEELTLRQIVPRHFVLTRCPIGWDHRNWQIVSALINARPNPIDIVIKDGEFDERLLNTASPAPGGQQQQ

SEQ ID NO: 125903 - protein, 70 aa, Heterodera glycines
LKNPIAFTASARPICLMEYGTNDQSTFVVAGWGRTSPYCSNDSKPGPSKQLMYGKMKISAPENCQSASIK

SEQ ID NO: 125904 - protein, 35 aa, Heterodera glycines
  unsure (1)..(35): unsure at all Xaa locations
PGLKCPAQAKNFFYFREKIEIFPXKYQSIELEKLC

SEQ ID NO: 125905 - protein, 115 aa, Heterodera glycines
QQKVTLGVERFALPELLIRPGDVEVQQMGIPEALCAVIERLPKEMQLLIARNIVLTGGNALFPGYRKRIEQELRSMMPEQFTLGVQQPSDPICHAWECARDAIQQQQHDGAEMHK

SEQ ID NO: 125906 - protein, 130 aa, Heterodera glycines
MRQIVLIASKKNKIWFCTDFLMDIFPFFDHAELGLKLALISPHFDVLVDKHFDGKSELTLWRSITIRKDIVAKVPKLYTLIIPSSLFSVPITKFGTKEASICESYGTPCGCISRLAVITDHGNHGVSEMP

SEQ ID NO: 125907 - protein, 128 aa, Heterodera glycines
METGILFFNLLRRGYIIGGRQINGDWHIKRVYTKGLCHHPALSDFIYEVSRSIDKQVDAARSARNFIHKRHKRYVLQNAVIIRILADATYDNDAEIHDVMTALGLQVKGYAGKLKDYENFDDSTTHVP

SEQ ID NO: 125908 - protein, 42 aa, Heterodera glycines
FLEGDILTHFGLGDIMTQGHYDAGTFRRWDIMTQGHYDAGTL

SEQ ID NO: 125909 - protein, 165 aa, Heterodera glycines
MAHIKRVELLLRRAICGGGRKSEKGKAKGKGRGTEEERKNPFISQRSSGDNAKQRMPKGGGGNGNLSEESISKELTSSDCETHSAALSRLFDLFSSDILSLLGKEDIGRMKRILAEIEIQMPKERGESEQTQKKLRCVIERLEMATEEKEEEEEQEEKKEEEGEE

SEQ ID NO: 125910 - protein, 382 aa, Heterodera glycines
CASANSIPREVNRRAVDGVNEVIKALLQLEWPSDQPRMTVFGWNSFLFSAFSQIAGSDSLCVSETFLQVGQVLLSFQLIRRNVKESPNCPLVALILDIFEKFLAISKPFVLLIAFSGFVDALSLFLSLSIDDNSSIFEQLVSLLERSECVLIDFLFTAPIELPLAFIEMINRKWEDKRKITMANGQRNTEEADADGYVNQLTDLRTLLSDQREGMAEGCPIMSKWLDEGEGGAKVGSGQRKSEGGPKANGPIIERKMTALSDSTWPSNLPICHLSPTSPCKVVALHSFNLLQQLLKAMLNNRNDSFNVTNQSRLTLNFGNFLGELSTNHYTLFPVRLLISQFFVHSTDFSSDLGKMRVSYRLGLNPAEVEECVDKVNKLANQ

SEQ ID NO: 125911 - protein, 81 aa, Heterodera glycines
LLCTFIDTLRSFSMHRMIMEGLKQRENEKARNSKGQRNAILNGRWSEITFPIGGQTRSEGGRAVTVVMSDIAGLAVEIPRD

SEQ ID NO: 125912 - protein, 309 aa, Heterodera glycines
RKSKENFSLFPVGHQFRRITELRTTDPLEFTQPFTTPTLLGIFNNVLSILNFSFSDFAESMHSVARLPFQTKLSSAGLIYAHYGKSLIANTKLSSAGLIYAHYGKSLIANILNLAEDDADMDRLYEHVYRKFVEGVDAIDNGIKQYDGTPRYQMYQMSSTLDSRVRNCNPAWNDQKPDPEKGFHNAMAIVGAEFEERIRYLHSAWIPARNIVIEAIERRNEAHPSGRIILFPKSGAPWKEHRRNEAHPSGRIILFPKSGAPWKEHFFQLENELGLENVGICLVVFADNSNNTWRVQAIPVSDVSSFDNR

SEQ ID NO: 125913 - protein, 90 aa, Heterodera glycines
MDHRYKAIIIGKSDQHLSDMCLKLWLIGEWKCVDIKFGRYGGYNLLDPVDVGDFVELYDGGGPIRRLPPGPALPKTRILDGSNGTRSCLK

SEQ ID NO: 125914 - protein, 56 aa, Heterodera glycines
MGRTFIFWLGKATKKKRVLIPAHKTILASASDVFEAMFRFDAGNTGRKSVHKQTIT

SEQ ID NO: 125915 - protein, 134 aa, Heterodera glycines
MGGKDSSKKVCFLFVKVFAAAANKLILLKLKLIQYSRENLLKKDFLENFRFLGSKRPIWLMGAVLIEVFLEKSQNMDKNAKIWKNMEIWIWNSILEASNQAKNMFFVHFRPPTVQEKNMDFHIITNPTHKLFKT

SEQ ID NO: 125916 - protein, 41 aa, Heterodera glycines
MTANINPTTAMNRKRKDCTACKCEAISHGRRSNKKSDSTCQ

SEQ ID NO: 125917 - protein, 47 aa, Heterodera glycines
MRTFLFIAVVGLMLAVILENVNATGKNSPSKGKQSLDSPNHKKDPKN

SEQ ID NO: 125918 - protein, 186 aa, Heterodera glycines
MPGGENNISHSLHTFVSSARIETGIRPWKEQLELYKKKKCLVVKTIFHISLHNFVSSARIETGIRPLERAARALQEVKKLFEFLQFCFHNFRKLFGIIMPKQNEIVLKYSFLDLTWFLDIEAVFYAISKTKKCLVVKTIFHISLHNFVSSARIETGIRPLERAARALQEGMERKNSYFWDFFRNQN

SEQ ID NO: 125919 - protein, 31 aa, Heterodera glycines
MTFPFLLLPVHLLLMLVSAVVFIIFSQCCGC

SEQ ID NO: 125920 - protein, 312 aa, Heterodera glycines
MSDEPPPPATPETPKEPPTQASEVPSPAAPETTKEPPTPASEVPSPAAPETTKEPPTPASEVPPPAAPETTMEPPTQASEVPSPAAPETTMEPPTQASEVPSPAAPETTMEPPTQASEVPPPAAPETTMEPPTQASEVPPASADTSSATLSAHQQLQGCAPGAAGDARPVAPSDHRHCGATDRDGPRAAVLRRGRPVDVLPAVWLLQHLREQCARQMLPGLPERDDHPIAKQNGRHPMARLLVRVRPLLAGRPLHRAVRAVSAAEDGRARLHAPPADVRCAQLLRQLCAADDGAICGAPCPTPCSLMRPPAS

SEQ ID NO: 125921 - protein, 16 aa, Heterodera glycines
MARRRRKKEPRKVSYK

SEQ ID NO: 125922 - protein, 93 aa, Heterodera glycines
MRALNIMNSFVIDALDRIATEATRMAHYDRRKTVTLRDMEFSCRLCLPDTMAKHANQKAQKTVTKFYAAKVRDRMRRTEMRRGEFAMMQMGAL

SEQ ID NO: 125923 - protein, 250 aa, Heterodera glycines
SESNQDTISTKNGETVTVTTQKPTKNGVGRPRKRKRVEDEKRKKEVSLEKKKKEEEPLESEESAKKCLSDTQQKAKRTPFYKHNVSNSTKEAESVINSSLSHPIYHSNKSFSKSLPLSSADYPTSSSQLQHCHNLPIGPNNEAKCDFIKEEQASNFDHADHAYEKASSSLPIENNVTNANVSSAVPAVIGNCAAPITVQAENGLVVSNGTCDNGTPSNHLTTLTTLDLLRTKEFIANQSISMDEGQILNE

SEQ ID NO: 125924 - protein, 224 aa, Heterodera glycines
MVFSRAQQISDNYKNLENFSASSHGWLEKFMSRHNFSLRKPTTLAQKPPDDYAEAIVNFIVYVQKLWHEKNYTAVFACDETAVWLDPTGGNCVSETGAKSVTVLTTGHEKARVTPPDVCWNAPFKNKIRQIYDEWMVKGEKETTSSGNMKAPPMETYLQWIVTAWNLLSKELIAKSFLSCGITDEIDGRNDEMINVFKVAYLEYFVYFSSVLRRTEPYQMGFIF

SEQ ID NO: 125925 - protein, 99 aa, Heterodera glycines
PIKATALLWESGPLICLGTKSLIDCDNAIKKFIEIIKGSGCPGASYTGLNFKRGKSITALIFWTGKVVITGTKNNSEIEEMYHHILPYLKMAQKKLGRR

SEQ ID NO: 125926 - protein, 246 aa, Heterodera glycines
MQKNNFMKIFLIIILLTILFIIITEGIDEDLWKDLKSSTSRNLKKQKITKNFSINEEIAVKNEIYQQQNANKIIIKSENCDEHETENIKPKVSQKIKTESLDGYNNKLKIKIKLPKIESDQWNGEALENENDEQQQAGLCNCSADQSNSSADQSNSSVNHSNCSKEQEELDYTETQKMGQIKKKKRETAETKMELIRTFDQMRKEKIYGFKYEAKKKFQIEREIAGSLGVKRDEIYQLKNEFGKIS

SEQ ID NO: 125927 - protein, 154 aa, Heterodera glycines
MKLILQLNVLFACFWSAKLLICRVGLFGSVDKPFVRKELNYSTIDCPAKAKFCVKEVCFQDGKAENYVNIYACTDVIKDCNTDGTSLMAYRECRLKNKGIKNACKNEKEKNEAAFVKKYGSNYRCEQCQYGNENEDKGNENFAPYRPDADLIII

SEQ ID NO: 125928 - protein, 105 aa, Heterodera glycines
PGLKCPAQAKIFFNFREKIENFPKKLPIDRARKTMFWKWSSFFWENSLKNPKIQKPENRFLGLARKILKIFEILKFGKIGLLKLYNKSAGHPALSSKPNELFAWY

SEQ ID NO: 125929 - protein, 51 aa, Heterodera glycines
MVNTKNGHGISHMVVFFCLVLTIGCWPSNGGWTPFGFVHLGGLGLKNADLL

SEQ ID NO: 125930 - protein, 321 aa, Heterodera glycines
MEGQIRNDKRARDESQSKEPVRSQRRLKARDPLDEQLKRRKKGQQAEENPGRIKLAPASPGYRRTINYSLFTRCEPGVKRHEGCQRNCTMGSLSHGRLTKIPQAESKAVCLAQAFAFDWLGRMHAKKFNENWCALLGSGSEIEDSLKNWWTKVLQNNEKTIPQKQLECVLTAWDNSCQVFGQEWKGKIYGPVGLEDVPMKTNVISAEEQFENWLRNLTERFGQTLTKLRAKEYWKDCHLQSKRVLVVSNQEAAELVAKEFVEEGSSWFVHFGDKPLREKMFPANWNIKIIFNRDDNADHVIDHTVATNGDQRTSHSAGTKR

SEQ ID NO: 125931 - protein, 67 aa, Heterodera glycines
ETGNFKFADPVAGLEFKIFYRTGSGRINPANPAILQILHLKSAGSCAGLRILGNFKKFCINKKSFKV

SEQ ID NO: 125932 - protein, 116 aa, Heterodera glycines
MAIKYGQQIAKYGHKIAKISKYGHKFFQIDGIICQYFFKFVKYICSKIFKMVKKANLSVGGRSVRGFLEKCQNMGIKYGHKCQNMEKYGNMDINCQIWRNMENMDIEIRPRGFKLS

SEQ ID NO: 125933 - protein, 182 aa, Heterodera glycines
MDYFPTEVVDLCYFEGETEIPQQINRPLRQDDTDPGGDRNLREFSEPPVARGQTQLTTDQNWTEQRETPNSQNSDFGLSQNEGSGSLSSIPTIYIIFSIFLVQNVMAIADSLECPFTHSKKEKGEITSRVFNKITKSSSSSTEGELSDASFSQMTRFSFVKGESKEIRWIWWTRYGRIFHCF

SEQ ID NO: 125934 - protein, 204 aa, Heterodera glycines
MRTFQGEQQQQQKQKLEQGNSRTFQGEQQQKLEQDSMRTFQGEQQQKMEQDSMRTFQGEQQHQQKEQHEIQQFEQQENKQQEPSLALERARLEELRIKERARVAKLEAERQARLVEIQARERQAKLEAEMRVRNVENRVRQAKLEAEARANQAILEAKVRQAERRARLGHGGGFADASEELQKDEQQAQQRQQQQLLEQPVDVV

SEQ ID NO: 125935 - protein, 107 aa, Heterodera glycines
MPDAEQRVPVPCTRFVRTKRAEVFTRRGTKLYQPVYTKGLVVALDEREAGGGAGNAYFTRPFGWYDDDDDADRDDAEEEEAEDGELLDESDTDDDDDDDDVDFLVLG

SEQ ID NO: 125936 - protein, 240 aa, Heterodera glycines
MDSFGNVAWILRPTAQTTGTAVGSMEYEEEENGTAKLVHSDTATVTTPTTAEFRLEKEAPSSEKDGAEEGSGGHGALLFIESDDGEEEEEEDEDIEDTPVATDSPSAATATVVDDSSDTVKGVEQRSSEHSDMTNGTGGGGGSEGAKLLGGGEEEEPVRMPLLNYLCAFNDCSMKELQLLFHSVHARQRMVSHLQQHCRLHTAYLKPAERNIALHCHDLSVQNANRTFACGGYLELTVSR

SEQ ID NO: 125937 - protein, 373 aa, Heterodera glycines
MFKHPFTMCVAGCTGSGKSQWVDRLLSHIDLMVSEGPITGVLYCYGEVNDNVLRLQRMENTATTSSDSNTTEGKHSIRMCHGAPEERDVEREARATGGRLLLVLDDLMSGGLRCSFLDTVFTRGSHNWGVSVVLITQHLFTRELRIARNNCHYMVLMRNPAGALQIRNLGAQLFPGGALRYFLEAYEDATAEPFGYLLVDMHPTTEQQLRLKTHIYPGEMCVKRTEGSGEERRPSSRKLAPSRPPVLSEHVRRHIDFFRQLKAARSSPTRCQALVAGASSEQLLCLVESALNILRARVPIQRRHLDRLRQRASDVRTLSRVRSTRSARRLLLNAHAPSTAQTGRGIPPLVGLLASVLVPVLVQRVFETTSSSS

SEQ ID NO: 125938 - protein, 745 aa, Heterodera glycines
MTLKHTVRMLLIPEDVYRRLMDNPSAAAATSSTTCMNKLPTPATPIEHTARKMVAASSKHTNDDERLIHYQQEFKRYQKLLEDEAERPLNVQLSQRTTNALRDTVLQKASPATATPPPARPQRTTPLSRRRGLQHQNQAPSASSSSSTRPAKSSSSNEQQQPLPQQTAAPQKIGDLPKQAEPRIHAAMAYAQQNPGLLGVGGEDGQQILHLAQGAYRPIRGSNLDTLLRYHFVGRHQQQQPRSSTTTPTASVAKAPPGYKTFVNNARDDLQMWRLLFPDERAAAAGSDSASTVGGQPRRHQPLRGQKKTGAGRFSLSRLLQPNHHHAHKSVQKTSIMVIGSNAVRSLTVESLLDPIYKDERSPACFTSVEPLLREAKRRHPDARLTRAEISRYLASQRVYTLHRQVRRRFRRLPTLASGLHTDWQADLADFQRLRAQNRGYAYLLVCIDTLSRQVYVKPVKSKRSDDMIAALKRTFARCGYTPWRLLTDKGREFTASAVQRYLRDEAEVRHHCMETSPLWHAGMAERANRSIKERLYRYFTHRGTQCWTRVIQRIVSSLNASPNSSIFGMRPNEVCFDNAESLRQRIADRAEAERGGRASQHARFRPGDHVRIERARGAFRKGYLPRFTDEVFTVDRVCTGRRPITYKLRDMDGEPITGLFYANDMCLVLVPPSLDDSSIRSRGSIDKRKTRKRLPGGIDNNNKVYAIERILERRYRKDGTECCLVKWKGYSTRHNSWIPAHTII

SEQ ID NO: 125939 - protein, 161 aa, Heterodera glycines
MVVCVINGMTSILAGFAIFSVLGHLSESAKKPIAEIVKPGVGLAFLAYPEVASNLPFKQIWAFLFFLMITILGLDSQAFKNHFCNLFFRNLQVCMVEGLFTALEDTFPTLLLKHKKVKVFKVFFYVFIKLSLLVACIIFFIIGIPMVTYAGAHWLTLVNYN

SEQ ID NO: 125940 - protein, 321 aa, Heterodera glycines
SEEIVAKSQKHNFQPRFDFLMSMIAYAVGLGNVWRFPYLCNVWRFPYLCYKNGGGSFLVVYALFFTFGAVSFLVVYALFFTFGAVPIFIMEVTIGQYLQKGAMEMWKMCAMEMWKMCPIFKGVGIGNVVISFVGIGNVVISFMCIAYFCVIVSWAVFYMISSFNSPFPWETCNNWWNNGQCVSETCNNWWNNGQCVSGKENETDIQQLSSNLSVYGLTIESSVEQFWERRVLKQTASIDDIGGIQWELLGLMFLAWVVVYFALWKGITQARKFVYFCALFPYFLILVLLIRGLTLEGAGKGIIFYLKPNITKVTDTTGPYL

SEQ ID NO: 125941 - protein, 46 aa, Heterodera glycines
MNEGRAKCEGHGHYLYTPPVVREKRNVIEKSNYFGFFGLKNPSPTH

SEQ ID NO: 125942 - protein, 46 aa, Heterodera glycines
MSGIYLIPFLSRGIKKKDIHFHVKAFIAIGVSDTHRLKVEELVNNP

SEQ ID NO: 125943 - protein, 220 aa, Heterodera glycines
ISFFQVKHLEPWERGTRRTTGMTGMCGGVRGVGAGGVISTAFCLLYKLFTLRVTRKQLVAMINSRQSIYLRGIGFMYIRYTQKPADLWAWMEPYLDDDAEIDPRSDDDAEIDPRSGGGDTMQMGQLVRMMLTKLDFYGTLFPRIPVPIQKDIESKFGERAKLYGYEDERYGGGTRRRAESRKKGSKEKEREQRRSRSREKRGKSRRDRNRRSRDRNRWAN

SEQ ID NO: 125944 - protein, 202 aa, Heterodera glycines
MKFAKKMLIIPEAEYLALRSAMNSGDYLQNEKASLDAKISQNLQDPGISEDLKAKRHDWLYKERRTVKGILENRPQKVVIENHVPGPNVAPYLGLNNQSKPQETDEPRKIIIPRKRLKEQTPDLESDNDTLEELSPEPQTTSTLKTPIPIKTIIHPTLLNGLFRDVLLYLAGKKDETPRGAKFLKDRLLKDPTVKDMVDKSK

SEQ ID NO: 125945 - protein, 113 aa, Heterodera glycines
MDPSAVSSSSSTDQQQNAEEAQKGDLTLAQQIAEDKQKMFERSQQYQQEIEDEELAGVYSDIRRIRGDGNCFYRAVLTAQLERCFEDAEELKRLEMADNSSRTSLVLFKKHLF

SEQ ID NO: 125946 - protein, 125 aa, Heterodera glycines
MDFAVLVVSDSSDKDHKMDKSGPLLVELLQNSLLIRRGQKVTVANYTIVPDEKSKIVEYLREYSTKVDCILTSGGTGFSKRDVTPEATKEVIERECPGIAVALLKKGLDITPFAALTRLTAGGLK

SEQ ID NO: 125947 - protein, 20 aa, Heterodera glycines
DYFSKHLLDWGIIGDCGINR

SEQ ID NO: 125948 - protein, 120 aa, Heterodera glycines
MVSLTIINLKNTFCNINNAQISVNGYLGFATVLDQGPTINVGPDSTDWPRVQDPAMIAPYLCKQQACPSTAGSYVRCDANSDYFLDEMMRWLQEGVAGASAFRADAAMVFIFCIFFYCFH

SEQ ID NO: 125949 - protein, 19 aa, Heterodera glycines
MSIIFLSNRKYLELRKISK

SEQ ID NO: 125950 - protein, 445 aa, Heterodera glycines
MNLALNPENGDEPAYGQIFIVDAEQAMRSMRQGNVDVDPQLLITVYEVIRNMNVFAEAYMMMKDEEEEEAERARNEMREPTEIKLLFDTGRQLDRRLGYNVPRANEVAAVYVPGADGEVPNAKIVIRERGKELKILKSTDSMVTPMTYPLFYPRGTLGWNPEMKHRNSNRRVTRLQYVCYTLAIREREFNPILYGGKLFQQYCVDEYVKIEGDRMNWIKCNQKKILADAYKNVDNMLMRRAQERGLPLGRKVILPPSMTNSPRYVEKHFQDAMAVVRRFGKPDMFLTMTCNPQWEEISENLFHEQKSSDRPDLVVRVFNLKVKAIMNEIVKKKVFGEVIAWMYPVENQGRGLPHIHLLLTLAEQDKLINGEDVEKKGISARIPDKEHEYGLFDLVKRFMIHGPCGNLNPNCPCMEEFVDKNGIKGRKCSKGYPKAFQEETVVLKM

SEQ ID NO: 125951 - protein, 49 aa, Heterodera glycines
MFFRRFFRLDKYANGRPFQILKNLFPYFAILVHILWPYFAILYPYFWTP

SEQ ID NO: 125952 - protein, 39 aa, Heterodera glycines
LRVTRAEPLVLEAEIELGSKHLNEGGTMHGGFVATLVDI

SEQ ID NO: 125953 - protein, 42 aa, Heterodera glycines
MARKDFRFHIFGVGIPTSEIFDEKSEIFLIFFFKKLASFVQF

SEQ ID NO: 125954 - protein, 52 aa, Heterodera glycines
MLRHHLVVPSVPTDWARDGEEAEAEEHLKSSPTDQEGLRWAKRGSYPYKSAH

SEQ ID NO: 125955 - protein, 154 aa, Heterodera glycines
VILAPSVLSPWVLSPAAPVPYILSPYVFGPFILSPMAMAPFILTPYVLSPNVLNPFALSPLTPYVLSPNVLNPFALSPLILSPTVLSPDILVLSPDILSPQILGGGILSPTVGSPAVLTESALMASVLSPSFQPNTQIISRMSETREFLQMDEC

SEQ ID NO: 125956 - protein, 468 aa, Heterodera glycines
MRLRLRLSPWSFRGAVPGVVWVGADEVFSVSDDHSLCRWTVSKTEANFLSNALKECVLPPFPKSLFFHFRCHFQLHFPHFSQGKIHLITPAGKIERTIEAHQGAAILARWSTSEQNVGTGGEQNVGTGGEDGLLKMWSRNGMLRSMLAQLGKPIYAMDWNGNGTKLVYSAGEECFIKQMKAQNAPTKWRAHTGLVLCLSWSAVTDLIASGGEDCRYRLWDGQGRPLWSSASHGHPLCSVSWSRPLWSSASHGHPLCSVSWSPSGETFAIGSYNLLRLCDKSGWSHSLERPASGTIYSLNWSADGVQLIGGCANGQILHAHVVERRVRVVWAPLAAVQARVVLRGLSSVVARRLVPRVGVVRFVFGFSLVVAALSLCVFGSLPAFGSFFSFRGGFSVPSRCFLLVGGSAVRVFCFVGRFLGSLFPPSAAGGLAVSVASSALLVLRPSSLKDLFAGAPGKTHNVSGGAGA

SEQ ID NO: 125957 - protein, 238 aa, Heterodera glycines
MCGTFAERRVAFVDQKGDCFLALVSCYGSAQRTAKIGSLISCLSANNLTNMLAALQENQRLLVWTLPTLAQWEQAVRICRTTNEEFLWATLAGLACIEKNYQIAEMCYGQLEEMEKVLFLSELRSQNVPQLRDAKVAQFSGQRREADMLLVNAGRTFEALMLNLGTFRFDRALELATKMGRHLDTVLGYRQRYLELTGRKETDQRYLKHLSEVEIDWTHIFEKIQEDEAKANQQNKSP

SEQ ID NO: 125958 - protein, 257 aa, Heterodera glycines
TVNGLLVFPISTYAPSKGGHLNPAVSLAFVSLGKLPFAHFLLYSLVQTVGAFFGSALCFHVYRESFEKFDAGIRTVGGPSSFEKFDAGIRTVGGPSGTGAIFCSFPDEHIGHYTAFVDEIVGTALLLFFVNALIDPRNQVPKWVHPIGFGLAIFLITSSFGMNVGSPINPARDFNVGSPINPARDFGPRLFLLFAGYGWEAIASYYFRIFLRMFNFKCHFSSFSRRFVVGWPLPRPLGSSQKCVSSQFPPPKDASNI

SEQ ID NO: 125959 - protein, 107 aa, Heterodera glycines
MDREPDPAWEIAHEKLNKKLFLTGPVRVPDQALLVPRKCWICTDIWLDTLPFTPTTTPTTTTTSVKQYLFGIDIGSKKFEKPCEKNCFLASELIAKVVEAIDSEEKK

SEQ ID NO: 125960 - protein, 150 aa, Heterodera glycines
MCKNEVHNKYNSGKFSSAKTQFKKKTANVVTENCKVVSVAQADCNLVSVPPQMIALQVHKKTANFELDTGADVTLLSYEDWENIGHPKLDNYKCPTVLMAFGGIPIKGVIGSFKVCVAYKKQKMEATIYVFKGTRRNLCGRDLIKGLQID

SEQ ID NO: 125961 - protein, 179 aa, Heterodera glycines
FLTDWHKWLNNATSGGKSRKRPWCLFPRDEMSWYTWEERFEFFIKLRGITDESTKKLLLFTEIGAIYEELRMMAQPDDVRTLPFSEIVKLMKERFGESKTLAAKRHELFSATQSSGMSIRDFAIQLRSLIAKAEWDRNSIEMCLCALFINGISSDMVRTELIKGKAMAFKDAVETAVLL

SEQ ID NO: 125962 - protein, 170 aa, Heterodera glycines
MTGSSARVVPADKLKADPISVPIERMIRVPPGIPNNSILPKGKAKFKNLIGLICVSEEIKNGEINFENETDKEVVYSLGTMNFSGADGKEAAKCDEYCLGDGTCFWTTICSGEGHEHCTQLVVADFDAVLNRKIGIGAKEVTTPLQALFCAFLLKKFGSTTASRRLVDRP

SEQ ID NO: 125963 - protein, 222 aa, Heterodera glycines
MTIFSSQHSFVNWTFKTDDGSDAMDSDDEDQSDEDANRRADALTREQEKQFWSIVPVEQLKTEDGNSQSSDKPSTSYAASQAGLPPSQKKNQASSSSMRHPNVCLDDSSMPCSICLSDMREECDDDVVVQLSLCSHLFHKECIKDGHIRPGQPYSSTTRIAYLPNNAEGTLVLKMLQLAFTRRLIFTIGDSVTTGRKNVPVWNNIHHKTNKKGGPQKCAFVI

SEQ ID NO: 125964 - protein, 169 aa, Heterodera glycines
MEALKAKISLKEILEEQRKVKELSKIFNILKTGKFPEGEPKWRKIIENYGLINDAIYYKKGKTNSENPKLIIPYPLRERIFRIFHNEGHFGFEKTWPEIKNRFYWDGIKEDIKLLNETCEFCQKRKIFPGQVKAAPSVPIKSTEGPFQRIHCDLMGPLKKPKKEISTFS

SEQ ID NO: 125965 - protein, 210 aa, Heterodera glycines
MDLYLDFDDVYDNNGIVQSIWSVFAREFWPIFAPNIRHLTVPIGHQLDDLRHHISPRIFTDCNQLDSIDSDSRLLDAIGDDGPNATVGQALSKWLRIPTTNGQPKQFRDDESSETNEWVNNFKKEFLRANTSSASYIIQFKTYTTSVAQFELVNERTNEMLTLKAEDDVVYTHINCELKRCQIGQTIQWEDKKTDNLNNVDISLHGNCIG

SEQ ID NO: 125966 - protein, 340 aa, Heterodera glycines
RAGETITFTLPYSSGGLKPNVDVLNNGKTIFEDDRTTIEVEDDKIVFTTRDSKRNDAGPYKVVAQNRHGKDSAKLNVNVLDVPGKPSGPILFSELAADACTLHWSPPKDDGGSPLTNYVVERKSARGGDWERVGAPAGLSLRVRGLTSGERYEFRVCAENQFGVGEPLDAEDPLLAKAPFDVPGPPGAPEPLHTAYDSITLQWARPLRDGGAPITGYVLEKREHGTNAPWEKAAFGNVPDTRCKVTGVKPQHTYEFRVAAVNAAGQGEWSENSVPIVAAPSACKPLITMGMLARDMTVLVGEPAKLLVPYAASPRPEITWSKNGVPVEVRADPRAEVESS

SEQ ID NO: 125967 - protein, 62 aa, Heterodera glycines
MENPDANSSTIHQLNGVGLGGQNGRHRSSDWRYKIRNQMAEREGRDGVNSSVGFSAARRHIR

SEQ ID NO: 125968 - protein, 62 aa, Heterodera glycines
MTFPNSYKIGPSANCDAKIKVCPHSQAINVFRSVTINPAVENIPRYLPFLLNNKKLDYIGEN

SEQ ID NO: 125969 - protein, 30 aa, Heterodera glycines
QRCAEPDKIRFRLNRRFRLWPKIRLIAIPI

SEQ ID NO: 125970 - protein, 51 aa, Heterodera glycines
LQIYWFKLHMRYISKFFDSVRRFDKDGFRFAISRSTFGNWSRIFSAITCNH

SEQ ID NO: 125971 - protein, 79 aa, Heterodera glycines
MNPTFVFICICIRDRHFEKSLDLDLDSMLDLDLDFLDKNPGKSRFFPVLPGPGPGFFFTFDLDLDFLDKNPGKIQVAEK

SEQ ID NO: 125972 - protein, 68 aa, Heterodera glycines
MNPTFVFICICIRDRHFEKPGPGPGPGFHVGPGPGFPGQKSRKIQVQEKSRLLETWIQAWTWIFLNSF

SEQ ID NO: 125973 - protein, 58 aa, Heterodera glycines
MTWTWIQEKSRPGSSFVRLADPQNVQATKCPSLEFEFFIIRMGLRLENLSAFCKANRA

SEQ ID NO: 125974 - protein, 51 aa, Heterodera glycines
LHVIAEKIRDQFPNVDRLIAKRKPSLSKRLTESKNFGNVSHMQFQPINLKE

SEQ ID NO: 125975 - protein, 282 aa, Heterodera glycines
MDFVKTLQNIVSVDQRLKLQEFEQRQNSFWKEKNIAFSELLFSLAIRLCVQIEQQNDQIIGNYLKAFTFAYRTGFKIHRNGIPRHQKISEVEIPTPKMLEVGTRNSVPSLLCTGHSKLHLGNYEFLLILTKPAYSPTVYEVIKMVQILDQMDSDGEYILEELDYLKIFNHVLNFLLTNERISKSPNQIRNKFAFLAYFVEDLLQEIETTNYLLNNEAIKMLIKRFREKQRQLCAKSTFYCSLNPNFVLIYENKKDAYMKYFGENYVNFVKAIKIDFNSDKGC

SEQ ID NO: 125976 - protein, 149 aa, Heterodera glycines
FEPSLPPPTAQQQQPSVFTAATAATAKTDHHHHQQQQQLQHLDILLQQQHIGTARGGGGTPAMRGGVGGAVQPSPPHQQQQQYMQQQQLLLMRAAAAEQQAMLQQQQQQRKHEQQKMAPPLTTVSAAAVALTPAALAIDDFRLIAVLGR

SEQ ID NO: 125977 - protein, 94 aa, Heterodera glycines
MASSFSISVFISMIGLCCLFNESIGGDEYEYYNGLSEIHNVQPYSDYYPTSYDHRNWDHSSEIAYGQLPPAALGQSNGFIKYEGNRKLENKMIT

SEQ ID NO: 125978 - protein, 38 aa, Heterodera glycines
MNNNIIAVAFVMNANRENFWLANDTKIVKLADKGKGYI

SEQ ID NO: 125979 - protein, 80 aa, Heterodera glycines
MLLLLCRLLVLLLCWLLLLVVVLVVTKTKMQPPGVGYFMKNSAIGESFLLTTTFNWLSNSQFPPSSCRSGLQTLNWPKFG

SEQ ID NO: 125980 - protein, 53 aa, Heterodera glycines
MKGPFDWYIVSKMQKPIIVNIIALANLGTGIKLNSLTITECEFKYNPRKFNAA

SEQ ID NO: 125981 - protein, 84 aa, Heterodera glycines
MSSSTIAPISSADGTAGSAAAVASAGPSSVEPMPPVEQLMEGIEEKCPPSLDQRLNAMDEVDMRIDDLLTVVAEVMAGLDKDKP

SEQ ID NO: 125982 - protein, 87 aa, Heterodera glycines
AYLFLSFAFINYMLFNTIFMIINHHPIRSVLILRPLFQHMGRSVVGTVRAPCATGQQHSAASPPPGRSSDALDVSKSYRCVRPAPGP

SEQ ID NO: 125983 - protein, 240 aa, Heterodera glycines
MSAHSHVKERLFPAAAQPAPAIVQPAAAAVVPPAPVVVLPAAAEAPPADVEIELDIDGEQLTNFPAQQHPQQLFPAQQHPQQLFPAQQQQPQQLFPAQHQQQLLLPPRPMISQIVDNAVSVLQMHFHNMSPLRPAFPPFFINSPFPRLQGALELPSLQFGQQHAFAPPPAPALQIVPLDDAPAPQPLCDVLQTRRQFCLETAGREPRSARCPPALPLLHPPLPLPRPLFRSTPNETKESA

SEQ ID NO: 125984 - protein, 108 aa, Heterodera glycines
MATSFLMSLIFCLLVPAPSPRHGLRDIAEEDDGSEEFEISAIMLYDHCACMLCGRIRFFYLIDYATPHVVTKWGGSYLKDENVLTHAGFCLGRLLTFVNTSPHGWQPA

SEQ ID NO: 125985 - protein, 141 aa, Heterodera glycines
MQWIKFNCTLCPIGLQCFYPRKYAKPVLCAHPSVRNITDFLSTGQLGEAATTTTTTFPTTAETAAATECAPPPAHLTAWIAVCTALVALLVIAEAAGQRRADGAIEEGEEPVYDEVPLDSDIVVEMRDEENGEEEDEDSDF

SEQ ID NO: 125986 - protein, 105 aa, Heterodera glycines
LARIQYIHSKDFIHRDIKPDNFLMGLGKRGNNFLMGLGKRGNLVYIIDFGLAKRYRDQRTKQIIDFGLAKRYRDQRTKQHIPYRDHKNLTGTARYASINTHLGVD

SEQ ID NO: 125987 - protein, 80 aa, Heterodera glycines
MMFWRNELCAVNPHIYWRLINEWPSDAILRPSSPGGKKTKKKKGRDDYFQPNGHPEFSFSCICLPEGYPKFSLIFILMGI

SEQ ID NO: 125988 - protein, 48 aa, Heterodera glycines
MVLALCFALEFVVVKDLSSVWILDLEFDATAFEHFDLLWPRVGQITDY

SEQ ID NO: 125989 - protein, 543 aa, Heterodera glycines
MDYNDLNVCDKKLMDGKILTNQAKLSDVGKVHDEVILLEDGVNRNLRTINRKVTNVSNRVVEIASDVNVGFNTVAKRVDTLGEIVTELDGKFSTWKNEIDTREQLEFDEMNKTQEAHGTVPFPFRRPPGSPRLNIPATPPANLALILQIQAPNRGNVNALTEVGTSGPQPGLFNGEIASAFDEWEIKFRDYIDVFGTNWNESEKLNRLKLHLGTQTRNIFENLLQNERNTLANALKNIRAKLDSPHFRELAYRKLAACYQKEGESVSDFIKRLVPLVNTTSAQIPPEAREEMMCRCLIEKVRPEFQRSLQLVGPLIGRKDFQKLTAYIQELEVSIERDVRNESFGIHALNTNPSQVPQGKFNTWGPSNPNNIQLGHKTFRNENRDQSDRRPNQFSQNNRYNQQRRDWGPQNDRRWNNRPVCHYCKRTGHVQYNCRIRQNDFNGQSDNRNQTRWQHRPQNSNRDNWSTNESKQLKDMVEDLAVQVHEMKMNNNYASARQQNIKALQMIHTNEEIQKIEPRKILNPKVFQVGRISKGNPKHFQAF

SEQ ID NO: 125990 - protein, 431 aa, Heterodera glycines
MEEKSEPENFDVSLDECRQMIKHKSCSFGNLKGITNFWQTENKIDLTPRFWLLGSFGWKNVSSENCFLLETRIDSHFGANSIVTPLRLSETHDCPYSKGYCILSDKTVLIWQIDTERKCNFIPIGNKNGKMMDKIWLSDDEIDQIEGKITSVSPNKLIHHEIKFGLNNLLPQIEAHAFHKLVLLNLTDIKDHAFVSNMVKLSQMTYQIHEKDTKITATISQEWEEVESQMIKAVIGDYRKMWLIIMSLIITILSIDLAIRLTIGLSEIYAGNGRLGNLLFGTTIQKAGKRVRKLRETKIQEEREIYEEPINQISWPPRIRRAGNSLRKSFTRPFKRNRHGPNPTQMSTHFELNSLMGQLGSLNNNTMTGTTFVSLNNFQMKCLVDTGSSTSVAPKALADYLGIKTFTSEAHLMSASGHPVHVKEAARVTLK

SEQ ID NO: 125991 - protein, 664 aa, Heterodera glycines
MSFAFSQSLRTFTLNREHFAFIDPTSMIVSPSSRKGTCEEFRKIIIQIEGQILEIDQIEGKITSVSPNKLNHHEVKFGFNNLLPQIEAHAFHKLVVLNLTDIKDHAFVSNMVKLSQMTYQIHEKDTKITTSISQEWEEVESQMVKAVIGDYRKIWLIIMSLILTILSIDLAIRLTIGLSEIYAGNGRLGNLLFGTTIQKAGKRVRKLRETKIQQEGEIYEEPINQISWPPRIRRAGNSLRKSFTRPFKRNRHGPNPTQMSTHFELNSLMGQLGSLNNNTMTGTTLVSLNNFQMKCLVDTGSSTSVAPKALADYLGIRTFKSEAHLMSASGHPVHVKEAARVTLKIGNEYVDIIIRLFDDELSWTMKDYNFILGCDALASLPPITFDFQNKCVIITNPTSTVKRIFKGTCLGNSNEVLKTENSTIFTEIEKEDSEYEFNALIEKEIKIAIVTAANLPLAKLVQELNDVFGSDEMEESGSVAFFSGYAKEKYKEMLEKLKRHLLISKISNEEIISKFETQDDVKEIETYCKNFEVRPRLTKERKVANLYSEVADLRIVFTTVSMAENLIHTALDGTTVLIFDEATQGSWVCLAHLVARMPKLEKVLVTGDQLQLGVHLQKLPPLLQSGFGLESMVDQLILSPTVVQTRLTTCYRMHPTLVKAVASA

SEQ ID NO: 125992 - protein, 140 aa, Heterodera glycines
MPKSSQKRCRMSPVLEDNDDIGIRLNRLEKLVSSLNPSINATIVERLDRLELLVQKLVNDNTKERSAGDSMSFSNSSPSVLWGQPPPHIGMVTQLVNNAVLDSEEIIAKSKRAVLEKVPEQIDAVKLVRKVATECGLMDE

SEQ ID NO: 125993 - protein, 48 aa, Heterodera glycines
VSNHRIGVKLKTIDINETNHTSQWGKYALLLNYFFCNFSEFFGVIYFH

SEQ ID NO: 125994 - protein, 50 aa, Heterodera glycines
MCAIAANCGRKQFLRCKSDFFLPKSMSTLVTQETCLYDFLIWIPTNVIQW

SEQ ID NO: 125995 - protein, 56 aa, Heterodera glycines
MVLEGTADEAGGNAAEEEEQREDGEEMDEEEEEAEEKVIIPTNGRDEERKRVTEKK

SEQ ID NO: 125996 - protein, 81 aa, Heterodera glycines
MLCRVIVFPLSFASFAFIKCQFPLPFPFLTFLCFLCCSFSFHFFRSFVSNHSFFDSMIDQMSFKSIETFLPILNLNCSNYK

SEQ ID NO: 125997 - protein, 39 aa, Heterodera glycines
MAKKRSGRMKRKRKKGKKEQNQREEKGGDGYYSFVIGTI

SEQ ID NO: 125998 - protein, 19 aa, Heterodera glycines
TFAFSSLALPNTHTIFEML

SEQ ID NO: 125999 - protein, 19 aa, Heterodera glycines
TFSFSSLALPNTHTIFEML

SEQ ID NO: 126000 - protein, 19 aa, Heterodera glycines
TFAFSSLALPNTHTIFEML

SEQ ID NO: 126001 - protein, 19 aa, Heterodera glycines
TFSFSSLALPNTHTIFEML

SEQ ID NO: 126002 - protein, 19 aa, Heterodera glycines
TFAFSSLALPNTHTIFEML

SEQ ID NO: 126003 - protein, 19 aa, Heterodera glycines
TFAFSSLALPNTHTIFEML

SEQ ID NO: 126004 - protein, 173 aa, Heterodera glycines
QRVAKELEELAGICETIAETKGKRESAKTEKEEKKRDEKSTKARKVEETQSNLKMVKRTTFEWQEVKIIKPIWMRRHSELEKSDDSFTNKMPPTAGAFQIQNLAFSSGTMKNLREGKKIGSSETGKKNGLMRIWRFDKYSVKVAGQIIVESAKWLKTWIFIKIPDKILLDYHI

SEQ ID NO: 126005 - protein, 92 aa, Heterodera glycines
MNRRWICTDVWMDIFPSFDRPKLGLQMALLSFRFDVLVDKHFGGKSELTIWRPIVINKGIGPKAMLLVDWKPVALPDRPLPNKIRFKELWIL

SEQ ID NO: 126006 - protein, 487 aa, Heterodera glycines
MAAPPIANTAKTDQQQQQQTTHTPQHFYHQNYFGRQISAQVGDNSVTSQAPALFIPMTKPNSSSSTTTAPQVQAVQQQTTTKQPEFVVFELFGQQKQQLNSSHRQLFNVHQQQQQQKFATKWTPFSPLMSLNSREAPSLSNNIKTETNVEESSAVAPTSSNGICFATVHLWPNHPSLGNNNSSSSNINIVSRHSKTPQQQRTNRLLFDNPMFRRLPNWHFFGDDRRLVPIPPLIPLLPVMPIERTLLYIAPNESSSRQLLLLAMLDMKRKKEIAGGMPAIGDGEADSESAETAAVAELLQQDDELLPVEQECPSSTSGVESMSSAEESGSALTERSSRSTTPTNKGGRSTPGEQQTEPKYQQNNAHAYEGDERQDGNEMEEYDEEDEMLRLGQQHNHLLRRQSPISSATESCTSSTPNSPPTFDRRIVRMSRGTRDAVRRLSRRFEEDREEEEAEEESGNCAAEDESDEHEFGKANGRKDEESVCAN

SEQ ID NO: 126007 - protein, 83 aa, Heterodera glycines
  unsure (1)..(83): unsure at all Xaa locations
MADELLPPYNFTANILSPGKVRLEWRTPPLPSPSSVPFYIVNVRQLSANTGXSLPSPTLRVDGTHFLLGNLVAGENFEFTIRT

SEQ ID NO: 126008 - protein, 84 aa, Heterodera glycines
MVIRRGTTVIRRGTTVIRRGTTVIRRGTTVIRRGTTVIRRGTTVIRRGAKLLKENPQSHRDSKVLTMSEVKSDHAFVISNPNNA

SEQ ID NO: 126009 - protein, 52 aa, Heterodera glycines
EGNSNVHAVAESLAVTRTEEFLFRFVEYIPLSCYLFVMEMKSFLSIIKEKNC

SEQ ID NO: 126010 - protein, 15 aa, Heterodera glycines
MNIVVVIKTEGNGSP

SEQ ID NO: 126011 - protein, 53 aa, Heterodera glycines
MIVSFLTQLKTYLRKHTISEFIEQKLKKKSLFFKNRTKDEGLDMKQGGSIGRN

SEQ ID NO: 126012 - protein, 150 aa, Heterodera glycines
MMERLRGGVPEATTAKFVPPSAPAALQQQQQHFADNNTHNNNGTVVLAQQQQVPLNFGSLSNLSSSSSSSSSAPPSSSAPPQQQIKTELIKKSSSENATADECEAQQTQFVPTPSTTADELIGHALAHLVEQMDTDGTDATDDGHFQEAT

SEQ ID NO: 126013 - protein, 55 aa, Heterodera glycines
MHKSLILTTVQNKSIVDEKIGVGVLFLPKSRTIYQKLKLKKLDVSEARSRSFVHP

SEQ ID NO: 126014 - protein, 32 aa, Heterodera glycines
MGICLSLQLYIVHEQHKFMGIGTAPWIAFLQN

SEQ ID NO: 126015 - protein, 52 aa, Heterodera glycines
LTSVRSVGMFKFVHFFCSLATFPLLISAISSNCFYLPHIVLNGGTYDEFNAS

SEQ ID NO: 126016 - protein, 165 aa, Heterodera glycines
MVQYDPINKPVKNIITEKFNIFFNLLRFFGVNIDDFLALSAPPFIDGISFACPTFCRPFQSCGDGVAALAFRPIFGCRGLCATTQVNLLPMGINYCSRRQIGMLMCEVLFSLFDFPSPPQFDYAETDPMLREFRAALQNHPYQNSTESNDEDVLLENTFCNVLTI

SEQ ID NO: 126017 - protein, 42 aa, Heterodera glycines
MTFNKAIALTVYNLLPPQSYLNHGLYGLLKALILNINLKRII

SEQ ID NO: 126018 - protein, 168 aa, Heterodera glycines
RRVVRHDNGRNTLRQLPLFLDLQTGALIRKTDGKVFACEMAKEREKAKTTEQDPNLELCLQKHKDVFSTHDYDLGECLIKCPPILTNSNVPERVKPYPVPEKYEKELKLHIGKMLEAGVIKESCTPWAHNVVPLNKITIPDPYPIPRMDKTILRVSGQKYYSTLDLLS

SEQ ID NO: 126019 - protein, 231 aa, Heterodera glycines
MNIILHLLILNSAVDLLNSNNLEQTKILIGKLKNLFLKRDAKYSKMTNKPTTQANSAKLMQILKNYAFLKMNQFLAKLKKEEGQIQNFLSEKNDNKRKILKAIVNFFDEISKILTEFSSKNGKFAEKDYRMLSQLIETLLDKLSTINKNGWNNVEKNSKNLFKQFETPKIFAKAHQKRRVRRRDNEGIMPIGVIEVFLLLTTYCAITVLPLITAILLLIRLFFMFRNEKMN

SEQ ID NO: 126020 - protein, 435 aa, Heterodera glycines
MVYGQPSNAIELWNKYKDQMYNPQGIITPAQHKAAELEALADLDWRLHSCFNLSCVHFGLPDPPNSIAKNTDAAIEEFFFGDDDLNLPPGQPNLRPQPKAPPPLNSDQQKVFDAVLLAIQSNPRDPTVPRRFFIYGDGGTGKTFLFGQIIRRLRKAPYTYKVLATASTGCAAILLPYGKTAHSTFRLGREVSLDKLPSIPLESFFARRIREAQLIIIDEITMLHNTVIEVIDRVCKEMAIRQHKDLLFGGKTVIFSGDFKQSLPVVPHEGLTAQVTACFQTSPLFGQFTTMKLTINQRLGKGQQAYLQMCRQIGLGETGEHFWIPRQFLVKSKEELIDYVYPNFQQLLGNDKELLNRLILAPHIDTCDEVNDIMMANVPSHMREYLSTDKPLDDRPLDIDEIESEVAALNPRTDSGMPHTVSGLSRMRRRPLIIK

SEQ ID NO: 126021 - protein, 190 aa, Heterodera glycines
MPSGPPLLNYVCKSNGNSERRHISFLNQFDLQIVPTIPKDDDSIYYVETQCHNKGNEHQTFKSVTSGSIKIVLHKFACKSYDIMARKVPKNWTQQIELYKYAIRQIKDATELNVNIDNGYVYIFDYETLVRTNRRWRNAGPSSNVNLFDLNVEDYVASDYDKMEEEDRKETELNKARMDETDDDCFYYFN

SEQ ID NO: 126022 - protein, 27 aa, Heterodera glycines
IISLSTPNGHLKLSIFLFHKYFFRKCS

SEQ ID NO: 126023 - protein, 124 aa, Heterodera glycines
MENSNQEIKTKRNKQKLEHEGALYVLHQLSDDGLRKYWRCEFFGPNDKCKGRLHTDIHGNVLKIIGSHTCDMSAAQVECQRRVTQLKRRAVETCEAPATIRAQVLHNTATPVLAAFPTKAATKK

SEQ ID NO: 126024 - protein, 1377 aa, Heterodera glycines
MANQNATIQQLIDTLTQQQQLVQQLLTHQTQNLAGQAIAPTTIPALPDIMAFEQNDDKSRVSEWISRFKFALDCAAPNAADGIKVKALMNKLSEAAFSEYSRSVLPSAVTDFNFDATVQRMEKLFARPQSVFIDRYECLKAVRSEGEDFRSFINRHRKLLADFKFSELNKEQFNCLMLLTALKSHSDSALRQRILAKLSADGTNITYDGVVEDLINFQATIVEAKAIEAPTNWRNVNAVNRPVKQNNAPKMQVAKVPENRQANKNCWRCGATDHWGSECRFIGAKCRKCKFTGHIERQCESVQQWRLKNKGKRFGNKRIGQLQIGMVNPKNDTDSLKTKIRFNKKPIQFALDTGSDVNVIDVDSHVEAGSPPIEKCTEIGRAFDGTPIRFIGKGFGTFEFGGILIENEPFYVAKRGSLNLLSRQTMGKFGFLDGIKQRISEHGINSCRATNQFEKHISELRKEFPTVFEDALGHYIKEKAHLELKGGAAPIYRKARPVPHHSKDVIERELDRLEGLGIIRKVEHLDWAAPILVVKKADGSARLCIDYSTGLNDALIDYQHPLPIPEDIFATLNGGQFFSQIDLKDAYFQVELDEDSKKLCGLSTHKGNFAMERLPFGVKSAPSIFQSIMDKMLAGLNFATAYLDDIIVASRSFSDHIQHLKDVFNRLQSYGFRVKMTKCSFFQEEIKYLGFVIDKNGRRPDASKIKAITEMPAPTNLSTLRSFLGMVNHYQQFVQNMRFVRKPLDDLLKKDAEWIWAENCRKAFDKLKEILTSNLLLTHYDPNLEIIVSADASEHGIGAVIAHRFPDGAIKAIAHASKSLNAAEKNYAQIEKEGLALIFAVQKFHKMIYGRKFVLQTDHKPLLAIFGNKKGIRQCSANRLIRWSLILLAYDFEIEYLNTKDFGHADALSRLIAKGSDDEDERVIASVTEESEMEDLLKLATKNLPIKFHDLVLATKNDALLKKVVQFVQKGWPNDKDLSKEEEIVRLFHRRMADLSILKDCLMYGERVVIPKIFQSKILHLFHKGHPGMKRMKQLARQYVFWPKMDQNIEQFVQNCEPCQAAAKAPVKSNLHSWPKSTEPWQRIHIDYAGPFYGKMFLIVVDSFSKYPEVFEMTTSSATATIDKLRYLFTRHGIPETIVSDNGTQFSSSEFAKFTAANGITHLFSAPYNPMSNGQAERFVDTFKRAFRKLKGEGMPNQEIIETFLITYRTTPNDSLPNSVSPAEMLLGRKPRTTFDLLKPPPFRPLIRDLAMEERFNKRFGTKSRKFEIGDKIFARHRSSEDWRPGVIKGCSGVIFEVKFMDGSKSRFHANQLRNRQNMNNGDEALAILNDAFALPLPPAQANEVPAADPPADDHEGNGLEDQGIVRSPLIADRNQR

SEQ ID NO: 126025 - protein, 33 aa, Heterodera glycines
LSPPPSSDIFICYFNLSSINIYLFVHSTFRGPN

SEQ ID NO: 126026 - protein, 21 aa, Heterodera glycines
FGPRGHLGPNPKIEKCAFLKI

SEQ ID NO: 126027 - protein, 194 aa, Heterodera glycines
LIQELQATKSRLQTEASDQERQSEELESQLNQMGKRKAQALAQLEDAKRILEEEHQERMEVRPVSANVKALEHDIEQIREAIDEEVQGKEELLKQLSKAKAEAAQWRGKFEGEGLVAVDELEEERRRRMNRKLEISDHLAELNSKIAAVEKTNSKWQKKQETHERVLDDWRRQCDDLSAQIERTQEDCRRSTAD

SEQ ID NO: 126028 - protein, 74 aa, Heterodera glycines
MTIKTEKQSNSIQKAKRICPGSDWMSSKQGKQMPKISAHLILTDKHGKRIFRLVSDVYDDFYNAYFCLFRGFCA

SEQ ID NO: 126029 - protein, 37 aa, Heterodera glycines
KGRARNYHHPFVICASYLIIYFALIIRFALLILFKWP

SEQ ID NO: 126030 - protein, 113 aa, Heterodera glycines
MQMVPFEFLNEWTKEKLTMTKANENELDNSWIMKRCKIIGEKKEKQQQKKDDNWDNNCNNVSIWFFNANDCIGPLSPPPFAEESGQSITKGPSSADKMSDVQNNKINDQMQKK

SEQ ID NO: 126031 - protein, 28 aa, Heterodera glycines
MIVDKKSFKSNILCRILLLEVTVQNVPL

SEQ ID NO: 126032 - protein, 54 aa, Heterodera glycines
  unsure (1)..(54): unsure at all Xaa locations
LCDQIDALAREAEELRQKLEQERHKLNDIPIQQAAERLELLSXIAIKQRRVLKG

SEQ ID NO: 126033 - protein, 221 aa, Heterodera glycines
PLESLPPQICTKSRPLSLRAVQALKRLYSTKYQVGSGADLLYEASGASEASGASHDFAKGSLNIPYSFLIELRPQNTLHSTGFLLPEAEIMDTAEETWEAVKVVADEVLQRFGQFGEERKAWNGRKEKKTMKRVPFSVSTAKPTQTVSSTTTTTTEATTTETTTTKATTITTTTTEEATKGTTKRKTTKIRGKGGEKKGKKSLAHKHTFKPNTTNNRTTAA

SEQ ID NO: 126034 - protein, 147 aa, Heterodera glycines
MKVYTATFLASSVSGISLLASLVLIANIYSDVQQIWQELDQQIAGFRAETDDLWVDMMKLGKKLRVRARRDAGYAGAESAPKANAPVGVAPSARKNESLHFQIVSLLFKLFLALVPVEMPLAFPQAALHPQAFRRAFKQTDREVPDA

SEQ ID NO: 126035 - protein, 125 aa, Heterodera glycines
WPSISPSFKNRMWRKNRRPAFCRQQYFNRICCSGVDLNRNFDWFWSTTGSSADTGSSADPCHETYHGPSAFSEPEARSVRDFLEDHSVKAFFTLHSYSQLWLIPYGHKRRNYPEDYTTLVRPPTI

SEQ ID NO: 126036 - protein, 179 aa, Heterodera glycines
MDTFLGMAFPTIRSELTPIDCTLINWLLATHCAHLQGVRQLSCLHRVGSSIGAELFMGRQKDDKRKTNERRNGKNGGRRKTELGKYIWSDQSTKSHCHVHFDLNKSGQKEEAIGGGKALAMIAEEETEMGRTEMGRTEKGRTDIPTPKSSLGSASSTSSSAAEGKEKDKTNDGVKRRKE

SEQ ID NO: 126037 - protein, 68 aa, Heterodera glycines
MDFQMEPFQRSKRRKKPRKVEEETDKELIEHNQKERTSEWMISASKKNGEKAKHKQMEEEEEERRNII

SEQ ID NO: 126038 - protein, 179 aa, Heterodera glycines
MTITYSLSVSSSTFLGFFRLLLRWKGSIWKSIWPEFVCWLCTYYALSFSYRKLMRKNQQILFEDICMFFHAYSDYIPITFMLGPITFMLGFYVSAVFNRWNEMFTNLGWIDSPALLIATILRPALLIATILRGKSEEARIIRRNIVRYLVLVQAMVYRDISAPVKKRFPTMVSKGILKY

SEQ ID NO: 126039 - protein, 43 aa, Heterodera glycines
MIKANRKKCRWKFDKVRRQKEGRTKEGRSRFFVRAEPAGRAET

SEQ ID NO: 126040 - protein, 79 aa, Heterodera glycines
MVRICANFAILCLTFIVCPAEESKIPKVVLNACFAFWLLCSFTKRPLPREKRHTFTEWFMAVQKRRKRPNDSSNHAPYF

SEQ ID NO: 126041 - protein, 247 aa, Heterodera glycines
STNYFLFSLALADLLVCAVVMPFSILVELGNGLAALLHKCLKFRIAFPPGVLPWTFRWDFFSCLVYTYADVFLCSCSIVHMTVISFDRYLGVSQPLKRHNKRKRIVLMKIFVAWVLSTIISSPLAILSFVEQQNILMVRLIPKFIRYPSNCIRVFLSHPFGHYGNYHQPNGPFTAASGSSVELRQFLRRIAPNYGTAAQNGRTGADDVHRQLQRGVCQQQHGEEQQYYDDDEQQWQQKPATPKADEL

SEQ ID NO: 126042 - protein, 59 aa, Heterodera glycines
MSFYTVHRDQLPLRALFNQHGLSFQQRWHSPHYKYSEVLGGTYHIPHSRYPPHDVYKTP

SEQ ID NO: 126043 - protein, 67 aa, Heterodera glycines
MRPRSKSLSNINFEITQTPICRFYLRFMDALYEAKHDRIFLKRKKNNRWVKIRRVYPVFILALILFK

SEQ ID NO: 126044 - protein, 51 aa, Heterodera glycines
MKKTMDETNGQLCNSTFINSDALTVFLNLYAKVTSFVKGGGSQNRKVPGYE

SEQ ID NO: 126045 - protein, 309 aa, Heterodera glycines
MIKNIGTRVDFRETLTTVYSLLEIESQLVKVDEKSAKTIQRLNTDLMTNFSNGKISENEGLKELDNELDKTFKTMKNKEDTAAKVGIGGMDGLAQIFPKANEQGKSVRLQIYGQAMEVLKLIHERIEQSTEKEAIGKVTGKSTVANNGSTVMPSQLVGLMMGLWTHFLQRVRKSDQDKATQTNPEEKQSSPKLRTKLNTPMAQKTKAPTKAAKNQAIPKNQKHTASSDRQKKVTEKKAVSLGNDKFSRRRRAITPIDSSTIHALLIALAILCITVLAFSSDLNPWAIVAIVFLTLNSQQANNRPNQIAK

SEQ ID NO: 126046 - protein, 174 aa, Heterodera glycines
MGQISKNNDISHLEESFKEMLKFKNSQSPRKWETPNSTPSSPAPSNSAPCSREPSSFTPSSSSPQILKNWRRRIGERPSNTDQTKYVRGNHSKSNNLEESFKEMLKFKNSQASRKLETPNSTPSSPAPSNSAQSSWAPYSLELSSLAPSSPASRVIIFFIREQNFIKIGVTRKR

SEQ ID NO: 126047 - protein, 35 aa, Heterodera glycines
MDGFNTGMNQMTNVLDASQPWVELMSLDDKEFDAG

SEQ ID NO: 126048 - protein, 210 aa, Heterodera glycines
MRYQNIFFQPMVTALADKYPEVRQAAAYGCGIMGLKGGQNYAKHCAQMLQPLINAIEKNGSRSTEEDTRATENAISAVAKILKYNATEVNFNEVVPRFVGWLPIWNDEEEVPYVFDFFCDLVESQHDAVREDPSRVFHVIFHYLLITLIKKRLAFGFVGVPLECRSFKWQNAFLPFLQIILNAFSHGAFEDDSAEEMRLVKSRMVRFQLK

SEQ ID NO: 126049 - protein, 507 aa, Heterodera glycines
MIKLEVAESETVDKVKMLIHQTEGIPPDQQMLFIQLEDGRRLSDYNVQSSSTIGMVLRPSSAKENPNMHEVSTLSMANTCAVSPFGMPVLPSPAAADASMRDVPTFGMPGTSEANLHDTSPLGIALRPVSVSSDANMRAVTTSIAVHPTPVIIAEVPHSFAALMRKRPFSANEMPSEATTSSFTQHEISVFVSSLNNIMLKFAMKRSDNVQDIMEKIWELKGIPIGEQRLFFRGIQLNKAELQIFLHNGGHENEFVFYLVPRPALPRSEEMPILVKDLTNKKMIRLRVKSTDTLLNIEWMIKAKVGIPRDQLRLCLNGNGYSLKQELAKYIEGANWPEITLEIKPQLHVSDEINIKMPNGKVIQMRVHRWYTILYIMRKVQELENIPLIDQTLLYKGKRLRSDVTLANYGIENYTNTEYEIKTLDLLVSQALPIITYEIFIGELVLLKLDVHDWNTVQQLKKKIEEKKGIAMNKQKLKHGEIELINELTMSDYEIRKFSILSLIIIW

SEQ ID NO: 126050 - protein, 98 aa, Heterodera glycines
MTTTTPQKYLNCHNLHAFSNGNGCRNGVSCSSTREKRKKCWDYSDAMAFHQQQRQPQHQHSKRNGGEPTTITTTTMHVGDGGGGEIGGTTTPKKLGAI

SEQ ID NO: 126051 - protein, 180 aa, Heterodera glycines
MKNAVKMALIVQQRIAVKCLARHCSKFAFRFCQTWNLRGKLVKNKSKFQTRSLMRCLPFGVLSKDEVIAVYQFKSLPNCHGISDGLFPMPFSTNGRISDRKKGTLLLDIEKVSEFAREEVGSSRYSEKVYINGLPWKIVAQIKTKNGGTDNEKWLGIFICCDTSKKGAKLLIVNIYINNN

SEQ ID NO: 126052 - protein, 68 aa, Heterodera glycines
ESHTEPNHRTARKVGKVGGAARGGRESIWTSDLVTPSTPPPLRLPPPQTAIFNGVNRRLLLAPAQCRG

SEQ ID NO: 126053 - protein, 41 aa, Heterodera glycines
SRDRDQVFRPGPRKNPGPGFLFFQKPGPGSGPGPENPGISR

SEQ ID NO: 126054 - protein, 114 aa, Heterodera glycines
MPVQCSMFVARAPFLPTIVLPAKLVPYYKFRKKSSPHSLKKEMIRGNSKRFRKTPPHSTRKFDLPGAEFALVLLPTRAAHFPSPLSWITLILFSYYFWLALYAGKKKLTMKVHI

SEQ ID NO: 126055 - protein, 251 aa, Heterodera glycines
MLLLASLRGPCRRPRVLKTLRSLKVPHFSTMNRDYVIETVNFTSERDSVFKFLQEVFLVNEPITRVIGCTPSDTSPIFDDICEKCSKFDLSFAAKNNDGKILGVLLNAPFKLENIHESYRDIGRMPNKKEFGEEIRNGPFPSQNANRIHAILTFVNSHIALLPPEEDIKLVELQAMAVGPGHARTGLGSGMLRALIQTASAKGYSHLFTCATAIASQTGLKKFGFDEIKTVPFNSFLEDGVPIFSGVHDNG

SEQ ID NO: 126056 - protein, 220 aa, Heterodera glycines
LLPNPNPTLFYIDGPGGTGKSFVSAIFHLSRGFLKKVTNMAFSGIAATLLKNGRTVHNRFKLPLENINSSSSIENNSKEAKEIRETDIIIFDEAPMAPKFVIEIIDKKLREIHKNNIIFGGKIMILSGDFRQCLPIKNKASKTEILDLTLQKSELWVNFKIFHLRKNMRTENESQNFANQILEIGNGKGNDENGICLPKICDIEDNDLVDEIFGEIIKTT

SEQ ID NO: 126057 - protein, 103 aa, Heterodera glycines
LNNFIEELFLFIETVLESEEFEIRNDVMNKFWSAWTVTLKRIAQMDNLAQRFCTLHKFTIMNISLFWTNATEQQREELWQMLREKTVVGYEGFCGPIYRISLH

SEQ ID NO: 126058 - protein, 132 aa, Heterodera glycines
MGGKDLDFGNGIGEEWHSTNTIFNENPVIFGESPEISSMNNDDDNNNNYHPYYYYNNYGYGNDSNFPGNNNWYNANAYTDNWYSVNDGDDDTSGYGSTTSGNYGFETNSYSSSTLGGNYDYGNSSESSAPAY

SEQ ID NO: 126059 - protein, 109 aa, Heterodera glycines
MLSRPLLFIAALLFLFGCCRADGNVVHLSSLNCATKDGGIDGFKAVDDGLILDSSSVTADTSDLPLIGFQKNGKEDLIFKLFVRNGGCVSKANFFTNGQPCTLGESEDV

SEQ ID NO: 126060 - protein, 38 aa, Heterodera glycines
MLTNPILSPYLGTVARREIRRYQSTTELLLRKLPFQRL

SEQ ID NO: 126061 - protein, 205 aa, Heterodera glycines
MKLFPLLLLIILFLIDKIGSERKKLQQKSFGEIFGEKWQEKEEEKRNELKKREIIGKFYKIKEKIKQKGRKYSTKEWDKINSKIAKKLGTNRQYIQKWIKEFGLQKKKCYKSKTDEEKLEIVQKFIKMKNEFKQKRKYSVKEWNKNYVEICKKIGVGYVTIKKWKKQFGIRCKRITEEQKIEKMKIYWEIKKENPKMSDTEIGKF

SEQ ID NO: 126062 - protein, 230 aa, Heterodera glycines
MSTNDGDELEQMSANSGQISDHFSSEIDKKKREIVEKFDKIKEKVKQIGKKYSTKEWEKIERKIAKKLGANKMKIYKWKSELGMMTKKNYSVEEKRIMLKQFDQIYSKLKIKLNEKLEGKREKCKKIIAKHLGTNISSIYHWKKQSGKTKKNQQIDDEKREIVEKYFKTKNEFMQIGKHSRKEWKEFHAKIKQIFGLSYMTIELWAKKIKNQSNASKERNFIQMPKKWKL

SEQ ID NO: 126063 - protein, 34 aa, Heterodera glycines
MHTDEDLSDDGTESYTFRSLIYYEKKQCSKCKKL

SEQ ID NO: 126064 - protein, 217 aa, Heterodera glycines
MDNKSLTSQLLPTVNFLVTTQGVTVHSDRLDTPRVVFFNDDGTICRQCRYNMDLDYLISKDGVYIHSSRLKGTEKFVPFDRVYDLPRFCAFRVRSRRIFKVPYIFSDSPLEKAMSSTVTSTTENPLIDNVERKKARFDSDLRDITTKNGEDEKAELTNRTDELNVGEKATDGMIRTDKMDLSQVQLMDEANTMENTPKFRTNKFISNLDTIKEEKDV

SEQ ID NO: 126065 - protein, 147 aa, Heterodera glycines
MPRTDGRPKKLRCLTSTLYRQQPANLEWITNFKEKFVRATTSVSYQMNFAMKGSTPIVLFGLVNERTNEKLTLEKVPRHPGNWVMKRCPIGETAVQWEDGTLDANFNSVHFIMDIDKQCIGPLSPPAAEEAGQSNEKVFSTDDSRAN

SEQ ID NO: 126066 - protein, 64 aa, Heterodera glycines
MHAFCARAIYHRACQSKAKQQRCCFERIKGIESVHRLLEKYICNLSTILRKSVKRILEYIFGIY

SEQ ID NO: 126067 - protein, 77 aa, Heterodera glycines
MHAFCARAIYHRACQSKEKQQRCCFERIKGIESVHRLLEKYICNLSTILRSELEMINFTIQPIFVALINRDKNIQIN

SEQ ID NO: 126068 - protein, 363 aa, Heterodera glycines
MIRLLCVQLDSSSEREESTHGTDLMLERNKERLSWETAEALDQPAAAGDKQALKNPRGEFLYTVTVITGNRWAADTEANLYIDMHGTDSDSERLWLKQELASQWTSGTTFSAKPIRFLYLSSPVTAGHHQQAYCAGVFIDRILVTEDEVDEADEETGAEAPEGQMPPFVEHCGDCRQFLFLCNRWFDSGQVDGKLERNVRLSAFYMISSIPVDGRVTRGRWEFVLHGGTTDGRGSTSSQLAITGYGTAGQSTTNGLYDSRMANAPSDALMQLDFGNIGELLKVRVELDGGDGTSPDYFLNFVEFKDLDTDENFVVMCGKWLRWRSAKKGDQPFRELIAFHIGVEPLPCNMTGWEWGIYIILSA

SEQ ID NO: 126069 - protein, 40 aa, Heterodera glycines
MVITDFRGRSAPFYAFKFASPFSVQCRAQIANVLPFTDAL

SEQ ID NO: 126070 - protein, 28 aa, Heterodera glycines
MKLGALHREFFGLSNDIKIIMNHNLAQT

SEQ ID NO: 126071 - protein, 54 aa, Heterodera glycines
MFLSLELRPAPAAVCASGAARNTTRCQCDHSALCRATERLGPSQGAVTIFENGC

SEQ ID NO: 126072 - protein, 144 aa, Heterodera glycines
MQSAKFHIALVQSESMLSSLLKIVKVWAKTSEILAENPQNWERIFKEINYEEKFEHFALIVCSQSVGFDFDSYSSNCAYQKSRLRQNLLGWVNSVQAQLDNYHQIPKFEQKTICYILKIDQLKHLLNESEEFDENVQNEMLLNA

SEQ ID NO: 126073 - protein, 123 aa, Heterodera glycines
DWANKCEGDAPVLPCQDVNAPDLYIPLMAFITYVLVSGFVFGVQKRFSPEKLGMLTTNALFYLFLENGIVFVMKYALNISQIAQSEDVYPGHGLEPAQRAQAEAVPVVVHHRVPVADHVVVDQ

SEQ ID NO: 126074 - protein, 154 aa, Heterodera glycines
MERIMKSQAYAKARDPSQEFYAKMKKTFEVNPRHPVVRELLRRVQEDAEDPIAVSTAHLLFETATLRSGYSLDDQVGFAERIEGILRKTMDLSETAEVEEEIEPLEEEEPEKKEEEGKEEDGGEEDQQKEEEDEEKKIVVEGEEEEEAAARDEL

SEQ ID NO: 126075 - protein, 31 aa, Heterodera glycines
LNFVSFCFNFFCWSILYNLNSLNLVYKLIKL

SEQ ID NO: 126076 - protein, 35 aa, Heterodera glycines
KYNVSYEFFFICNHAKTATRKRTSRENGHAKTSWP

SEQ ID NO: 126077 - protein, 148 aa, Heterodera glycines
MNSLKRFQLPEQGTRQQEELDSVEPKHISDVVNFNSAGVFYVLGKACPFRSKGLICRRKLSDDNMCEACGQKAIAPIHTVFVRLLLQDVEQADIAQRVTMFSSVAEEFLGMKAAELLAKEKEPESLAKHLDDLIAVKLIAKVNIKVFC

SEQ ID NO: 126078 - protein, 40 aa, Heterodera glycines
MAKLINGNEIAQQFLDEVAQGISRIREQNSDFNVGLAIVQ

SEQ ID NO: 126079 - protein, 73 aa, Heterodera glycines
MDFDRFRQYLTSGCGVGRNDCKDVRIECRTNSIQQLYLSAPVEDALEAAATAIIQIHVEKQYGDILVFVEGEE

SEQ ID NO: 126080 - protein, 39 aa, Heterodera glycines
MKRKRVCREGKCHKYTSQITYKNGQFKQISWDRDYAFLT

SEQ ID NO: 126081 - protein, 124 aa, Heterodera glycines
MRKRRKSRSNEKSLEMVKWPPAKAFYNAYIKQAYGRGTDHQFQKAATIAGRFRANFLGSSTARLASAAWYATRGVYYPIEDCPPIPDDQDGYVPPEQPGLNADDQPVTLAKALQDVSNFLRLQF

SEQ ID NO: 126082 - protein, 216 aa, Heterodera glycines
MYSRLISNSPLPPHPLPRRHLRQQQSASASAAQYRWLGQQEERKVAANARRQQRKELEAGPMYCSFCHLFGTHVVSNCPGDKGENLAAIASAGKELTFKWGKRRFDARGYAEKMCIPLASAWDVLDGKIVRRRQQEEEAKAKLRQQEAAAKLHQQEAEDKLRQQEEREHLRSLGRMPAALLTLATGHPVDHLDAKNSIVRMLMQLAEEEEAEKTPH

SEQ ID NO: 126083 - protein, 65 aa, Heterodera glycines
MSSATVLVTKVRTLPQLRQPAGKELTFKWGKRRFDVRGYAEKMCIPLTSAWDVLAKDNYQFFDIL

SEQ ID NO: 126084 - protein, 91 aa, Heterodera glycines
LQGRRGAEQLKKRREEEKRRRRGRDKADGPRKAQILSPNDLDGLERSTDDFKVFLAEQDRMSAFLSKKPRPYSTLPLCAICTTTSIHWPFG

SEQ ID NO: 126085 - protein, 26 aa, Heterodera glycines
REKKIMFFSGTLYLLVHISFFETVCV

SEQ ID NO: 126086 - protein, 69 aa, Heterodera glycines
MPDAEQILQQLEHHFVNNWLLDTGRIDELKRNYEEREGEDDTDKEAAEEIDDECQIDNIYLSFYKSYFA

SEQ ID NO: 126087 - protein, 145 aa, Heterodera glycines
MALLKKFESKSARVKGISFHPTRPWISFHPTRPWVLASLHSGVIQLWDYRLCVLIDKFDEHDGPVRGCDFHSQQPIFVSGGDDYKIKVWNYRQRKCIFTLLGHLDYIRTTFFHKQHPWIISASDDQTVRIWNWQSRNSIAILTGY

SEQ ID NO: 126088 - protein, 36 aa, Heterodera glycines
MYVELLRRRHPTRKWAAANGSHSPGQVHHVRQTECE

SEQ ID NO: 126089 - protein, 43 aa, Heterodera glycines
MCNFSKKSANKQAKFYIIPGCVLSLDTNSQVEKIPLLIKKAFN

SEQ ID NO: 126090 - protein, 190 aa, Heterodera glycines
MDKWAALVLLIALINALDSAVVRQQRAANADASKPEPNNEKPGNVDWDKGNSDKSQGAGTEGKNPDEPTESQKVEEDGPNPKNPKESQEVEEDEPNPKKPKESQEVEEDGPNPEEPKKPGTREAEGTWRKKGQGGGGKKTGGKGGKNAKKRGKRAPDEPAPKSPKMPDKFDLKLPSMHKTLIVLGSDPIF

SEQ ID NO: 126091 - protein, 154 aa, Heterodera glycines
VLNADQSGFELELHQKRSLAPIGTKLVECVVQSVSSTTHSYTIMPIITADGMLLSPLYIVIAERQGKFPQKGIFQAKNVFAVPNTSHIMTKNLMIDWVHNVLVPVLRPGEQSLLLVDSWNGWNDFRLPDNVKLKVKQIPKHATGICQPLDVYIF

SEQ ID NO: 126092 - protein, 57 aa, Heterodera glycines
ANIYLIYCDKKSLARHNSALRLISQKIKTLFLRTHGCSIHPPNFIWKSHGHLGTFLC

SEQ ID NO: 126093 - protein, 37 aa, Heterodera glycines
MNTFSAFLRPCGTRISSRPITTTADIGVTDFGGKLVF

SEQ ID NO: 126094 - protein, 72 aa, Heterodera glycines
MGKCSSKLVKFLFCFLRLILIGSLEHYLIQLNVVSFNFMMRIIFRNSQLLDSLITLWSIDTDKHLCPSMAIH

SEQ ID NO: 126095 - protein, 134 aa, Heterodera glycines
MSLFLLRALPLFFLFSLCFAASPFNFRANHSLGAETTQQIVPTVATETTDGPKPTENVPLMLENDNVTEVAKVEGRNASDSEIEMREDQGLQKECKKWVFIFNGFGMDFLRFLIWDGFNRLFQSVIRFKYVSFV

SEQ ID NO: 126096 - protein, 38 aa, Heterodera glycines
SEITSEQLVVLAKVNVNEAGCFYIHFRRAVKIQKSHPY

SEQ ID NO: 126097 - protein, 118 aa, Heterodera glycines
MNLNKIEFKRMKDSFYNEKKKEFFERFDDFKRLCKGKQKEFTKELGISEKAFRRWKKELVPKYYKTCKRHSDEEKLKKLKQYFNQRKKSKVSDGIIAKQLKIGYETLRKWKKKFASVS

SEQ ID NO: 126098 - protein, 61 aa, Heterodera glycines
NLNKFWQNVPLFLFLLSIVALVLLLAASPAASFAFYPVPWPLTTTPSAEDDEAFYDNYDDE

SEQ ID NO: 126099 - protein, 147 aa, Heterodera glycines
MEEKTFVAVERQKPVPKPRRHHTIGILASAEGQLKNEHPDKEEAEKADKSKGKNGAERRKSVEEKHETQQKYGTDEQQRNGVNNSLIAAANKRPFQTTKVGNKDKKLTFYHTKTKRNAQRNIGRPKVEGKRLPMVGKWQDKANEDKE

SEQ ID NO: 126100 - protein, 96 aa, Heterodera glycines
MAAFCADYFLRRRSENTRRRTERRQAAEEGQWQGMKSIGLPINNAYFLRAKLKNNRKAANPFSPDLRDSSGQIPLFLWAQNATTPMAYASMTAAAL

SEQ ID NO: 126101 - protein, 387 aa, Heterodera glycines
MAERQRGDEKECKTPAEETAQQKQNFAIPSAEEICSTSSLHRRADNSFSMNRNKSDLPHISLPINRLLQQKGTTMDAFPISGQHLSTTSNRLRQSNAMEGFERRLGDENLGWKKANDEHRNSTSTTNSSRRTSKTAIAAVRPQLKQMQLNGISTKLRKAPDVPTKAHSSDYSLLGEMFPHRKSSDQRNSGEIANSQLATDGNVDETARHGLIMENDSLAVMEKAAKMVNCLRTQIPHFTTGEHRRSLMRVHGTNSMMDISGIGSNKLSYPISTEAANEPMRANGLNFGQNSIGKQQQQIRHHRPVPACSSSVDELNAYNQPNKVTSICPSLVPVFLSSRLRNLAHEHPGEEDPAKVIQRYVEDQIEGPFVPSDDFGEHQQRRAEKAV

SEQ ID NO: 126102 - protein, 127 aa, Heterodera glycines
MPYYVLMLCLMFHTVFMEFILPKFSIFYKTEMNQIVPILKNEIKKMFRNKDWDYATFDCMHTIEWNLLRIDLAKMGQTQKWKQMEKLLKEWRILYNNWVLNKSEMNRPNFAKIMQKIVQNLEMMSIK

SEQ ID NO: 126103 - protein, 40 aa, Heterodera glycines
MPGQSRRLKNWPPKVLKHPIDVTDTCKFIPKCFYGVEPNE

SEQ ID NO: 126104 - protein, 66 aa, Heterodera glycines
MENGDYTEAKFGMFKYDVIKNNCIHFVRTFAAKLIGEERLAKASDGFISDIKSGKILPDSLTSLYK

SEQ ID NO: 126105 - protein, 209 aa, Heterodera glycines
FLNLVYGQNDEQGNLVYGDFANWRTIEGNGNPNIRRGVGRDGKGFTEDEINWFINWFLSQQQIDQILAFSAPQPGCPIRIEFRWMEVTHGNVHLFVGGDMSEQTRAANDDMSEQTRAANDPIFFNLHSFVDYIWEMWRQSRQTRESRERDYPMDNSQCSSPQHFGSAPMRPFQPWPWQNRDGLNNKYTDNMYEYAPRPSCQMPNCGSKF

SEQ ID NO: 126106 - protein, 118 aa, Heterodera glycines
MASAKITDVFRRLTLFYYYLFQSSTPWPMPPTDVTTPNPIRPVQSCYNEHECCSVWSQKGECQRNPGFMNSWCKASCQQCQPDYDLYQGRKLSSIMWKMPRFTSTGVQRRARQSAKSG

SEQ ID NO: 126107 - protein, 17 aa, Heterodera glycines
MIFDQFGTIVKCLETLA

SEQ ID NO: 126108 - protein, 132 aa, Heterodera glycines
MRNELGANRVITKPQEFYKLVLDHKVEIYAIIPLSDDVIRVSYRTKKNFVDEHSSSNIMLSLWTTSRARLKLLDSMQQVHETEGAELLYTDTDSVIVKHRRDVSPLQTGEFLGQMSEEYAGYAIQCFVCGGK

SEQ ID NO: 126109 - protein, 379 aa, Heterodera glycines
MSSFFYFLLIAFIFFNVLHLSSGEWINVELSVDPPNFFDRSFRTISKTSPAQHWFGYNRDTACHVELERNINRLYTNPDTWNIALTDVDNLMSLGRTTIEIPSTALPWACFGHGGHSFVIFNLQNDAGEVTVLRGHQQKIARQLSAYGRILFDHIAARLYIVDKSERRINELLIADLERWWTLNNTDDALNTTSAHVLRSNFVGFLPEQKTDYFIAADHVYMIWRRRVYKFRIGHYFNDPSSQLQFLTNSSDIRFNFLLFEAGAEKLGEDGDRRNSRSAIVVPAVSSNGIERLLLALTYLFDLVVILLAICAFRHFRRLGTDGGSARNGHHAMELNEYDLFHSLSFQNNNNGGGAYGVPAAYNPTNTTLSHQLRSCATI

SEQ ID NO: 126110 - protein, 140 aa, Heterodera glycines
MSSETGAEDPTEQNAFDEMTQDRAIELDISIKGLSKQKRKKGQFETNDLCFFAPKCKNNVLEEMGYAIIDCGHKCHWEGEYAKWASDGHYKRCHNQRCKKNAFIKCKSCKKKIGYGLYECGCYCTKNAHDMDIHADTLEK

SEQ ID NO: 126111 - protein, 40 aa, Heterodera glycines
MSNSIARSCVISSNAFCSYKSSEAMEHRFAMIRPIEDLGF

SEQ ID NO: 126112 - protein, 85 aa, Heterodera glycines
NQPRGEVVELQSIANNSKLIINDESLYLYFLHKYEANPNDKASAMIATKKQYGITVADRFKLNIWWLNLVRGSSMMQCCRKCWNN

SEQ ID NO: 126113 - protein, 114 aa, Heterodera glycines
MATTHQHNPTPEVKELCKCLALDDNQLRDIMAKIEMDYQKGLDPVTAPTACVKMLPTYIRAIAVGEEKGEFLALDLGGTNFRVLRITLEGGCRSTMHNKIYSMPDSVQQGTGTE

SEQ ID NO: 126114 - protein, 208 aa, Heterodera glycines
IKCQSLLPPPTTQPHSIKSQSSSQLHGRSIDVVALGHASFFPQGMHPRAKSMGETFLVCVHNISDNHPYAILRTSINNTARDIIKQIFAKTQCYEVDLDEYAIFAKTQCYEVDLDEYALVEEIVVGQQRTEPNRTEKGTGGAMKPQQQANFRVLEPEENIWKVQSRWSGASGRFLLERRDQQVTMNEMTNDWTGERPSPFRSQANGRR

SEQ ID NO: 126115 - protein, 51 aa, Heterodera glycines
MNFLKNIFLFLLFLLICVISVENSCFNFLCPPKEQRPKSKESPKERKNLSA

SEQ ID NO: 126116 - protein, 191 aa, Heterodera glycines
MNVYMANPANNNTMNNNTGTFYAQQQLHNSSNSWNSQTPQYYIEPLHSYFSDSSYFGQPSSMLGGSASLDSLNAYGHFGPLFAGQQEIEYSANFSTAFSAFITGGIEAAAPMQYHQQHHHHMVGHHHQSAALGGGGDFLMGSLVVHPLPSQQLAAAATAADRECISCGGRLYEAESVRVDARGYSNQSINQ

SEQ ID NO: 126117 - protein, 157 aa, Heterodera glycines
GHDSFRAFRSAYVNSEVRFETNSWEQLNRQCPQILLYANTFKCLDFLMRTLMTVNRPVKRGPLFKSTQAKRYQLSRHFRNVQLMASMPRFLISYWMSFSSSHGFRVISDSLQFACDFLLQIHPDQSNVRRGTASSAGSGQRGKFCTRRPSWTMPKFT

SEQ ID NO: 126118 - protein, 131 aa, Heterodera glycines
MLLLLSLSVFLLASPSVCSASAQFPMSAGIGDSPPSLQYVASSSSFSASSSSSEEFARKNQMGEEKADDWEEEEDTKLKQDQNQLKKNPHRMVVKRQMKRAAEAMEVAEDEKLVEEEQEEQQQSCTVRVQV

SEQ ID NO: 126119 - protein, 62 aa, Heterodera glycines
QGWAEVSLFAFRLSHYSHFLAFRISLFAFRFLARKATFTPLRIGLNSHKIFQNFTYKLANFQ

SEQ ID NO: 126120 - protein, 627 aa, Heterodera glycines
MRKKEMKAMVFRPRKWDKNTIGTEIEIGTITQCIVIWRETMDAELLAVLTKVEEICYELLCIWVVPKGVPIHVMKKRFPAIVRVPEEENIDNLLTKLEQIGMPIEKKGEQRWHETASTNAPRVNWNQLGDGHRVQAAGSHSYNSFVAPHFSSYLPTTTTKMFFPTPEMPKKGENFGKIQSEKFDPFVVLGVKRKSQSPESNYEEEDIFEGPLCTKRTKFWVNSKCETTNTEPLGVKTFFKNENKEIYQPHWKPIVLSSPSGKKGAFFFGKNFVFSNFHPSSFMMDGFKWDNVEQKYCFEKASYFGYFNLAKMIKFKNGITEPSEFKKFTDKDMDQYKSLEENPKSFDQYEWNRVREGVIRPILWAKFTQNEKFGQMLWETGKFPLYEASVNLSWGIGIDIRERQLIFSNMDQGFKGKNMCGRLLEDIRQKLNPMGTVNQKRPTNQINEKDLDQILKKIENDRKISVFKTENILRQCTRIKEVVKENWDMNVFIQGSIYNGLGRKESDLDLVMINSKGIPNDWTKNDSCQFFDKLRKKLRESGMALTRTLIIPSRNVSILEITINSDDQEINAQISCNNLIGLINSKWLACCVQLDVRFKTLYFAILEWADFFEIHQSANGGGTLNSY

SEQ ID NO: 126121 - protein, 17 aa, Heterodera glycines
MVIQIRNSMKRWRFQLG

SEQ ID NO: 126122 - protein, 206 aa, Heterodera glycines
MDDPKTYNFSFPELAAKNALHFAFRKHTKIERILKRIDVELQKDGTESGVRQLLFHGIGDGCERCVSCVEVLKSRLASQGKNVFQWNALSNKKTSSTTTENSSKCDEMEALKISENSPKFNGGTTKPSKKDENRPQPVLAILISLDPFSTTDGDDSQHSLRCGGHRIQIEIRVFKMFQKLGDFDQAKMTKFGIPRPKSRKSVLEWY

SEQ ID NO: 126123 - protein, 79 aa, Heterodera glycines
QKDGTESGVRQLLFHGIGDGCERCVSCVEVLKSRLASQGKNVFQWNALSNKKTSSTTTENSSKCDEMEALKISENSPKL

SEQ ID NO: 126124 - protein, 175 aa, Heterodera glycines
MKKKFGLINGAIGALLNRSVSESKALNQQHQNGGGHYGKLKAHQQFPFSQSFPVKENSKKQQQAPIAQSEPSDTDFDDSLSATSAVETGSTPMGSGATRTPIGQGSAEGDTSQHEKRPFVAMYNQTQKHQTNYEATTMANSSIRGSVFAVKTKAVQNFELKTPKVLIVTLVFNLM

SEQ ID NO: 126125 - protein, 142 aa, Heterodera glycines
MKAFFAKNIKLTRKAHQDEAGHLTLPPLEKQFLISPPSSPPVGWIQHAEMAPVVCDFDLMARLASLTVDEKFELFEGDEHQRRPSIVITPCEKGGGGGLLAKDGGQMANSADESEAEKQRQAELRSKVPLPHTPRPPTLKEE

SEQ ID NO: 126126 - protein, 113 aa, Heterodera glycines
MTFQSLGLNPPAFQSLRLNSQAFQSLGLNPPAFQSVGLKSPAFQTRGLNPPAFQSVGLKSPAFQSLGLNPPAFQSLRLNSQAFKSSVLSVAVALTHFLQIFDYYFYFSSVLSA

SEQ ID NO: 126127 - protein, 109 aa, Heterodera glycines
EMSFPVPSDDDFYDETTDYLYLTNDNANPTNCEQTLANEHSAVALSSAIPGNDENSSSPAVPSERSLELLKKYFGYSRFRPLQYEVIEAALSKRDQLGRYVHRSFHRSF

SEQ ID NO: 126128 - protein, 80 aa, Heterodera glycines
MSEEVDRHIVERYKIQKRLGKDEEEIMFLQEFGRHPNIIKLFNILRADNDKDIYLVFEYMQADLHNMDDYLDGTNVPELT

SEQ ID NO: 126129 - protein, 143 aa, Heterodera glycines
MRSPPMSVSRKLLVRLNFSSPTACKDFNLTCVLFCAKISGKLKPSRFCFSTEAFEKAQKDMKQLKDEPDNDTKLELYALFKQANEGDVRGDRPKMLEFVARAKFDAWEKVKGMPKADAQHKYAEIVNSLLKNAGINNANTSET

SEQ ID NO: 126130 - protein, 32 aa, Heterodera glycines
MSSIPILSSFSRALQMRQHPLLFGMIHVPALP

SEQ ID NO: 126131 - protein, 191 aa, Heterodera glycines
MSAPPQYKMGEKVATRQAYGNALLKLAEANKRVIALDGDISNSTFSNLVQKKLPEQFVQCYIAEQNMVGVGVGMACRGRVLPHVSTFAAFFTRAGDQIRMGAVSFTNVKFTGSHCGVSIGEDGPSQMALEDLALFSALPASVVLYPSDAVSAERATELAANYTGITYTRVSRPATPVLYTSDEKFELGKCK

SEQ ID NO: 126132 - protein, 58 aa, Heterodera glycines
MIDIFYNFTIGKCTTSRPLMLEVNAFKTEKELAEFMMNHGEKLVDRVRLLSKIPTIFV

SEQ ID NO: 126133 - protein, 101 aa, Heterodera glycines
TAVNKILEAKAKNDAELESEVKTKTATLSEDSKKASAELTLIIEDKKTTLDEKVKRTEELTAKMSDNTKKELNLNNSADVVAFVKSYSAVAVPAVATEGKA

SEQ ID NO: 126134 - protein, 158 aa, Heterodera glycines
MNEGSKHFKKTLISRGRTAGHRHSPQNDDGDDDQQQRQQQNQFDAYLNPQQMDNFEMGAEKEEEEEGEEEEEEEDFYALLQRFGGHGREGGKTAEECGCGRRRNGIGTAGKSAADGPGREYDAPRHSLGQFFNSEQRLRDRGPSRLLLLIGNAERHNN

SEQ ID NO: 126135 - protein, 18 aa, Heterodera glycines
MTNFDSKNNKIKQNHFYL

SEQ ID NO: 126136 - protein, 164 aa, Heterodera glycines
MPSKRVSEHCFPFYKFFRFFGEKSVDFGRLDVRVGRVVAVRKHPNADSLYVAHVELGELQPRTVIAGLVKFVGLEEVPNIGQSQDIEMVHNICFINGCTASKPARRLPLQFETVEKTWHRFACDDFDMLVSGTGECVFKGTPLRVDAEDGASSLVTAPTLRNVP

SEQ ID NO: 126137 - protein, 182 aa, Heterodera glycines
MKSKIPLLIYPLIFPLRMANPSAAIIFALFSAFWSIIFEATCNDSFSDTFATFIISRTEAVDDNAAPMENPSFEQQQNLVALDLGRVRELQQMIGQNAIDHIVVEDGIFSGVYSCQSNIEFQFDGLSLGDGKMHRMLFSFGAILSAEIDGPKQTASENSNYLRSLLKAYECVGGSLKQDEGR

SEQ ID NO: 126138 - protein, 125 aa, Heterodera glycines
MAQPDSTRCGRPATAAERGTVSASSAATISGGLFDWIGEPNRRMDGQSIGKSNENGFIFSFNLIFITINGQNCWRCQKEWPAKSVMKNNGGQNEERSNGRKKDGTVKKKRTNAQRKGRRGKGKLK

SEQ ID NO: 126139 - protein, 57 aa, Heterodera glycines
MAPRDDSSNNTNGQPVIQFDQQIRQDPGLNAVFDFVREQGARQMAQHRLNERRAGNN

SEQ ID NO: 126140 - protein, 120 aa, Heterodera glycines
MAFPEPEKPKEPTPPPAEPEKPKRASDFGGRRRRRRRRRRIRGDVTAKGEENGERVDAAQRANGTEGVRVGGQMERGGGTAQRQTGERKRSGEKAKGRKSHEKGKWGGKAMRGKDKTITN

SEQ ID NO: 126141 - protein, 119 aa, Heterodera glycines
GVYDPIAIRSKAVENLVFAVSQMSEYEQSQMGYSKREFITKCSFNGRECSVEEDFSLYVDPTYGNCFTFNAHPDKNVLSERAGPNYALRFQVFVNVSDYLPTTEAAAVNIAVHESMRPV

SEQ ID NO: 126142 - protein, 353 aa, Heterodera glycines
MAANLVPYPHIHAWGKPIHTIEMVFNRRIALPAHRAIGFCKQLSKGTDQFGLKGNSEKQLDEMPKIRGIILGLREEFNTFVIEIMLTRIENEKGANENGANKSLEKMNEILKFLKEKNGSAFCDQSIIESAQGKAEAQMKKMGEKKEKQQMMENIAKAFVVKAKLSILTEEMRNKKDALSDWKELDALIPIAFFCQFGTALENIRQYCKITDEAGMEEKLNNLAEMARPLTDQVKWLVSHHLSELITDVSHVLVLLYFNESKINKFVHSIDAICHTVLIAVQTIGIEYLDIVSKITDIKALIKEMENVHKDKVTKTIDQTDKDKVTKTTNELLQLLETKQDAFLENFQLLYFA

SEQ ID NO: 126143 - protein, 84 aa, Heterodera glycines
MKKFIPSFLFVFIQFFICFDLSVSVEFHRWVKNCEEVISNIETKPIVTQNSSTVDVGELINLEKELANFEQNILQFYKLGNYIN

SEQ ID NO: 126144 - protein, 70 aa, Heterodera glycines
MKAKLSQDGLRARTFYQHPHLSPFLHGLIRDGKAAWGNLESHVPTESRPGHVAMMAGFYEDVSAVTRGWK

SEQ ID NO: 126145 - protein, 170 aa, Heterodera glycines
AEDSIDFSDNATHPITLSRRSNFTKTDLAFIAGWGRITDWSSPVTLQGANVLIWPWSSPVTLQGANVLIWPKDEARCDGIMESEVCAFGEDGANVCFGDSGGPLLVKSYDGGDSGGPLLVKSYDGQRWEQIGVTSRGNFVCESNGFSCVYIYCEWLAKITEGEVQCLNNE

SEQ ID NO: 126146 - protein, 105 aa, Heterodera glycines
MHSFLVLTILFANLATNAFGQQWPKATSEETVKATIKVSGGVKDFGFKRLTASSALGTGDQSEGQKALIRAEKNAVIKNLIIGQNGADGIHCYDGCTLHNVWWEQ

SEQ ID NO: 126147 - protein, 26 aa, Heterodera glycines
PWVLYPPTKFHLEIPRTPGDLPLSAR

SEQ ID NO: 126148 - protein, 293 aa, Heterodera glycines
RILTVVLKVIDGLAFRFGFLLFNRSFFPKAQKLSCSFGVLVKLFYEKFPHPMLVDYSNRNIFVSSGANTRDHKLFSKEDSRSFTAILEFHEKTLKQGIELPKIFKDRVSGPSEAPKVLVELAKKYNVKGGHWIMFFNKLATHKWEKVFDELLSEALKHWGILNRFNARISSDNLIICFGNEKTLAASDPTILDSSDQLQRNNVKNDPGPYTVLRIIDEIYKPNTPVASNGTISFGQQVKFGRIPQINSWSNPRIRSPFSVYQANYGEYSQRFVPSNLPLSRGGALEGMPMPTG

SEQ ID NO: 126149 - protein, 549 aa, Heterodera glycines
MIKILKNAHHEMQQQEEPDLDQISDDELGDEVPIDDIVGTQQNDEEIDEMPELELALDNDVVEEQEDPEMDAVGTSTAQPNPGRNENEDVIFDHEVETRGGRTNISERQFYRYRMALRGSGKNTFHWLWFARRLAEYFTISVLNRIERNELNHLKAIQVKKNYRQLLAREYIAAMEKGVRQQGPNAKLGRVFLMPQTFAGSRQYYQGKFVTFTGNPKWPEIDEALRVRQNYAHRPDIVCRIFMDKAAEFIRDVTERGVLGKVAGMPHIHMLLILERGVRIETAQQVDEYVSARIPTLPPSSDQSPEGHQQRRLWHYVTSMMLHDCNAACLEGSRCRKHFPKPYSDRTELSEVRYTNYVRIPPDESDTFFGRAGGQDNQHDDDHHDPAADPERDWAEGEQGQTHYKKKRGVRSAILMDDSRVIPYNPFLLLKYGCHINVEYVFGQKACKYIFKYLLKEHSGFEKAYVRVAQPRRSAQQGRSNETAGADEVYDYDEIAATFKVRYMTAMEAYLRLNSYKIVGMSHQIYTLSVHDELGQTIVVEEGHEEEGR

SEQ ID NO: 126150 - protein, 95 aa, Heterodera glycines; identical to SEQ ID NO: 125597

SEQ ID NO: 126151 - protein, 39 aa, Heterodera glycines
MGLKRPGPGWMDQQVVELIAGGGMLAPFTAHEPINLKRK

SEQ ID NO: 126152 - protein, 27 aa, Heterodera glycines
MSWRRLNFSISQRPVNEMLVEILLKST

SEQ ID NO: 126153 - protein, 46 aa, Heterodera glycines
DTFVEAFIYHLIILLLLRVLLRHRPANNWPHFRGGHQQQFVALCQK

SEQ ID NO: 126154 - protein, 46 aa, Heterodera glycines
MAKYGPKYGLNTAKIYVLNPQKFQKSFTIANQIRLKIFVIISFCCQ

SEQ ID NO: 126155 - protein, 51 aa, Heterodera glycines
MSQSPQMATFSGLTANIYHEKQKRQLCLLHTLNNLFQREEFVRDELDEICE

SEQ ID NO: 126156 - protein, 64 aa, Heterodera glycines
MAELLRPKATSIATRKILIAEYSEVRAVIDPLISLKFAKLKSEQSDRSCKFFAKFRHVTQNRQC

SEQ ID NO: 126157 - protein, 99 aa, Heterodera glycines
GTARNQKNRFFKCPFGYSNIYGSKIQRRIKVQAIGSYPEGFGLPINLGASVRGDCPENKKIDFFKCPFGVLKQLWGAKIQRRIKVQAIGKLFPKDSVSP

SEQ ID NO: 126158 - protein, 429 aa, Heterodera glycines
MKMFFDGNILLFVILALCPNRISSASTRSVASTDDEVERKMKLDLATHQMKKKLGKYVDAIENPFQATSSSEVQQTPPVTDSKRNETIKTRTNASNSTSKCVNTNVARTLSQNNGEDKQLTIGTKFPWENVRRNLAEEKPDREREKKVREPKQQQPRESTSSKIVPLEEKQQKQSMDKSAYEEPEQYEQQPARKSNSMSEMLALEKYEARSKSRQIREESSGQRNHRRSSARRSNFDEQMKYEKPRKSRYSKEESLREHRPRKSHAKEKQKQREAPRKSNYVEDESKDSHAARTSSSTAIESLRKLRRQKSSRRSGGMIEAQELSRLLTMTSDTRQSSGRRSFSKSRTMMTDRELSKWRDGGAIGEELATRSSRPIVAMPVAQKRKENSIADMQNLQDEMRAIRLRELALNASNKKREEAVALFRNQIE

SEQ ID NO: 126159 - protein, 29 aa, Heterodera glycines
SRLKTGASRPFLNLLALDGRFAPVIQILL

SEQ ID NO: 126160 - protein, 197 aa, Heterodera glycines
MNRRWICNDVWMDIFPSFDRAQLGLKMALLSPRFNALVDKHFDGKSELTIWRSIEIRRKDKGPEPKLSVRIDDKFVPFPLPDRPLPSKIRFKHLRIEYLKIRAIAIKAFIPFLGTSITPSSLFFVQITKFSTKEAPIYICGFLLHIPRMANKFGTFLFVKFGQFFLKTFATWAFTMVIIWTICFVALRQQFSPISTN

SEQ ID NO: 126161 - protein, 187 aa, Heterodera glycines
MDHTPWRVVLYVIDDFRIHLNRRFDHLEQWQIVLYTLSFVLFVQWVRKWNDSLLSFSTYKHKWEENKENAYKELEDRMHRADRLREFYKYLPDRGLPPDDIIREATAYKTMSDILFERGRLCGSLYAVEDEDSNYQRMIKQLIGTLPTKMAFEDRKLLCPSTPMSDFLKQRNYWECVWSASAPTAKA

SEQ ID NO: 126162 - protein, 73 aa, Heterodera glycines
MNGVVVEIEYAASNILHQCKALLEEIVEFFFGQSKVPEPEVFKRHSEQLDNYMAIDTLSQYLDIFTAIRKRSS

SEQ ID NO: 126163 - protein, 332 aa, Heterodera glycines
VYGEPDLIIGNDYYNRLNISVLEELQSGLYINDSNIGQFLSGQGKVQFFKSLNGSQSDISSSVIHHTVNQKCVEWELNSDQLSRNYFNKMIMDWNGLEHVGMSDLNSDKQNVRQRMIDKISFNGDRYQTELLWDEELAAQLPTNYDMAFRQLMSNLGRLRKTPDLLRQIHEIIMEQVETGFIEECEPLPIEERYLVGSKVHYLPHHPVVKETSEHTKVRIVYNASARCRGGLTLNQVLEKGENDYNDLAGILIRSRIKPILLTCDIAKAFHQILIHPKDRNAMRFLWVRDPYVDDSPLVEYRFTRVTFGVICSPAHLSLTIKLHLSKYTDKK

SEQ ID NO: 126164 - protein, 442 aa, Heterodera glycines
VLSFTLSQWKISKSTILQPTHNHQHLLVAGNELAPDCIYMFHIIYMFHIASQLLVRTFSSSDQKQDTVQQHNQHHFFVSTSADGAVRVWSFTQVEKLKTLHACSARILCSVLSSDDQWIAVGSADSCARVLLLDSGQVTRTFKEHTGPVVGLQLSSDNTLLVTGSGEFVVMVWDIEKGEIVVRLQGVWDIEKGEIVVRLQGLMAPVTCLALTSNNDAFLAVACEDETLRVFSLVSAQELHELTGHESRINALVASGDDCKLFAGTRGRVIVYDIHNGQLLEVLQCAQRQPVSSVSSVRISDDDSFVLVACGDRIHMWALDSIERDVAAVQQHKMAAVTVAPPESPSSSAGCGTADGIVAFWDLDVCQCMWTSNAQRNGAVSALCFSSDSFLLLSGSEQGRVLSCDSSDNAYLWSLASLDESSGGESFGVSLPCFGRPRAIFI

SEQ ID NO: 126165 - protein, 75 aa, Heterodera glycines
ICLHNTPANLHSTSASRYERVTMPSPSSSSKNQPEAQARAPPARGGAGGGSFALELSATTTGAASEQIGEEREKQ

SEQ ID NO: 126166 - protein, 69 aa, Heterodera glycines
MGDRIPPANGADKEPVTSRATNSAIAAPAERDAATASATAAQSPDAAASTAQQSQKERRTRRSKLCTIM

SEQ ID NO: 126167 - protein, 232 aa, Heterodera glycines
MTNELASTETQTEPEEKPKTFAFGLQTDQTGLIDSEMQTVSEEKPKTVTFAMQTVQTDLVNSEMQTLSEEEPKITNKLITTEAQTEPEEKPKTFAFGLQTDQTGLIDSEMQTVSEEKPKTVTFAMQTVQTDLVNSEMQILSEEKPKMTNDEVLELNVSKLPMDADSSFLSNQGRSSPLLDESLRRKYNEKCEEMAELRYAYEFQQSIISNQLDEIARLKQQQQLRNGVQKNG

SEQ ID NO: 126168 - protein, 64 aa, Heterodera glycines
AVAKNGVSKNRNYAQKALQTILALPIPSTIAFIHPIMSAKIIRVPKIACDLSLAKNGVSKNRNY

SEQ ID NO: 126169 - protein, 61 aa, Heterodera glycines
VKSGSSLLISFYHRPDHHRCRFSVAADRIAVLYRARTGGRNPWRIFPFRAFVGRFVLSTDA

SEQ ID NO: 126170 - protein, 91 aa, Heterodera glycines
MAVRRRVAHHEAGHIMANHLNKDGAECLASDIVEDQFNDGHTWVSLREKYTLAQVTATLQYFLGWFFKLNPKFVLHIKEVRHRRKQYLVFT

SEQ ID NO: 126171 - protein, 27 aa, Heterodera glycines
MTCIIYIFDSPLFYINRKQPDSKNNLN

SEQ ID NO: 126172 - protein, 670 aa, Heterodera glycines
MAEPKAKAGKGPGPYTAEMAWKIWEERFEFFIKLRAVTDADTKKLLFFTEIGPIYEELRQMALPDDVRDMPLDKIKALMRDQYGETKTVAAKRHELFAAKQTQGQTIRDYAIKLRTLIANAEWHRDSVDMCLTALFINGLADDSIRAELIKKGDNALKFKDAIETAKKAGGNSTPGKCHRCGRNGHWASECPSKNTECRKCGRIGHWAVACKAKQSTVSNAAKGRQGSSYYKGKPVHQISAQKRDSSADVASVVKSKQVKSLTAPPAFVQLQLQKEEADFELDSGADVSLVSEDDWIANGEPKFSTCSGLHAYGGKPINVLGFFESKVKYLGRETTTDLYVVKDNVKNLCGRDLIKKLQIDLNKAFGIGMVQQIRDTKFGSKLDEVLQNYAEVFSEGLGRCTRHIALKFKTDVQPKRCKPRPVPFALRSEVEKVINQWEKEGVLEPVATSEWATPLVIVPKPGNKIRLCCDYKVTVNPCLDIHQYPLPRPEELFSALNNGDKFSKLDLKEAYLQLPLDDQAKECLTICTHKGLYRFSRMPYGVASAPAIFQQVMEEILCGIDGVAVYLDDIVVTATNNAEHLKRLDAVLQRLQKAGLRVKKEKCSFMQESIVYLGHIIDHQGIRTSPEKVEAIRKMPAPENLKELQSFSRDGWLLRENHPFIGDGLGTFE

SEQ ID NO: 126173 - protein, 73 aa, Heterodera glycines
MDFHIIGLSSYSTNCSMLSYDIFSSIPICFHSAQFVAASSCFSVQRTDCTSKITISGRSAPFTEMPAEANDLP

SEQ ID NO: 126174 - protein, 32 aa, Heterodera glycines
ENRHFKRSIFSLSGIKPLIPVCPSKAGWDPWA

SEQ ID NO: 126175 - protein, 157 aa, Heterodera glycines
MKLCLFLFLFMFLIVEIAKVGSEEKKLQQKSFDEIFGEKWQEKEEKQRNEQKKREIIRTFNKIKEKIKEKGRKYPRKEWNKIDQKIAKKLETNPMKIYKCIKELGLNQKNSYKSKTDEQKIEIVQKFIEMTNEYKQKRKYSSKEWEQNYEEIGKKIG

SEQ ID NO: 126176 - protein, 30 aa, Heterodera glycines
MPNSALQSIITRMKLCQIMELSLIAKYGKL

SEQ ID NO: 126177 - protein, 43 aa, Heterodera glycines
MIRRGTTVIGRGTTSFNSLKLTVIRRGTKLLEEVQKCLEEVQL

SEQ ID NO: 126178 - protein, 36 aa, Heterodera glycines
MAQQRQNVGGQKPAVGTAHVDDGRAVERAGGGEGAA

SEQ ID NO: 126179 - protein, 33 aa, Heterodera glycines
MAQSLDPKVRRRRPMGPMKVPAIGSRIGRWPTK

SEQ ID NO: 126180 - protein, 78 aa, Heterodera glycines
MDQIEHFSVCEETPPKEPSVVDITYDPAIVSVSKPPVAADASAPQQPVQQPSVAEQLQRIADDKSKEIGTRHFEKDWK

SEQ ID NO: 126181 - protein, 331 aa, Heterodera glycines
PTGVLTIEEVNSVYQHYSHQNLSDATGLFPLKFPTHRRNKNKGTIEMEIEKVSEFVLEPVGSGRFSDAMDIGGFPWKIMAQIRTKNESNEKWLGFCLSNDGLENENWSCKSSATLRIVSQKNGTEDLIGTFNDRIFNKEWSIYGKYFISFAELLDPGKGFYDKSEDKVKLAIDVIVDEPKTEKSISDPNKSNGTLSTEIEKLSEFAREIEGSERKSETAVYIKGMPWKILAYIKMKNESTEKWLGFLLLCDASKKGGNWSRKCSTTLRIVSQKNGVEDFKRESSEKRIFNNAKPSWGWNYFISFAELMDPSKGLYNKDEDSVTLAIDFTCE

SEQ ID NO: 126182 - protein, 49 aa, Heterodera glycines
SSGRTIPEKVDEAVQGSIPVRSAKTLDDFSPQRPMPEFKIGQLHSTLTF

SEQ ID NO: 126183 - protein, 176 aa, Heterodera glycines
MPPGISRENIKKRKTSTSEGSDEEDSGQEEQQAPELNIASRQRRTAAMKSHKVWDVLKPGAKMHAEGETEPNEAPTTAPKVGRPSLKRKTPSSSFTSPLEDNAKMETEFPTEIVKEQMDEKTDDHLPTQRGIQRIIVNRKMAATSLSTTNLWPQPQPAKDKGQLQLIEANRRKNKS

SEQ ID NO: 126184 - protein, 472 aa, Heterodera glycines
MFNNHANHFMPNFCIPPPPPPQLPQPLNSAVNSFGVDFCDPCSLASFLSAGSSSPSSGLLPSTSTCTSSYEPSVLQFKRSASSNYAKYQHKTFHTGHANGFTSKGNGAPLSRSRKRFLEQITNEEGTSGELRIELDTAPRNRPLSGQSSTEVDQEAADESPNSKESGCSENSQESLRLVPTDNDSDGEHPEMGRNWRILMLFNGLVRDEDLAPNCERPQAEDGRTYPDIQKKVFTQNGVEQKEQHEQHKLLKLMSLKLPLDTNHEVVPASSSSRLGYGMRTSNVWVSTDLMAKMIQQQQTVSFTTKSSAASDNSIPPPPIVHDKNNLQPNTRETVDARHPGTRKRLHHNRSLIILKTGQRVYQGSKDCFQFLETGNCLNGVFCEYEHEESTEHSAKKVCPFLMRGQCRNIDDNCSHGPHSTLKAHQMPVCDYYLRMCCSKGKDQCAYLHVKHTDGMEPCEEFNRGCCQQGVM

SEQ ID NO: 126185 - protein, 184 aa, Heterodera glycines
VFMCQNAKICVFVFISRSKTKIVRRKCYFEMTSIIKLEALSGVQDDGPLCYLLQVDQVYFLLDCGWDEQFDLAVDQVYFLLDCGWDEQFDLAYIEAIKMRIPQINAVLLSYGDVPHIGALPYLFKNGLNCPVYATVPVYKMGQLFLYDWINVPVYKMGQLFLYDWINGHMTGKDFSLFNFDDID

SEQ ID NO: 126186 - protein, 60 aa, Heterodera glycines
MYLTEKFEILLAVKSYLKELEGQICLSPTHLTHSIRNRSKSSGTKIWCPNFSPQFGTGAT

SEQ ID NO: 126187 - protein, 100 aa, Heterodera glycines
MIVLLSTAKGADAHFLVGKSDKKELVHAHKGILMISSNVFEAMFQKEAENSNNRTTDGKVVKDGPLLISDADAEAFKVMLRFIYSDDLSELNGQNAVEII

SEQ ID NO: 126188 - protein, 448 aa, Heterodera glycines
MAQHTATWLEYEDGFCSLALAKGGKGKVLVMPFAESDVSDQGFLTESGVSKTVDELERILRGKKEEASSSLDIRLQRFVEARTHQADEVNTNMLDVDTSKPMVVLAACTSAAQHPIEHQEEVHIAMPQAEEVPWTWGTKHYFVNDVKISATKMRELDEALEALILSQVPPPEERELKQLTFEAVKRILRRDTWEDFEMRIAGSTRANTALRNGDLDIILMPKSGEPLSHERKLRELKFLVREFRLMKRQYPYRHCVAITKTKAPLIKIRTSEDVDIDITMDNTEALRNSNWLAEQTNDSKLWRLYMTVKIFAKHNGIGDASCGGLNSLAWAVLTTHFAASRGQERCETPLLDFLQMAEYFSEFPFEGYTITTTGWRERKSSSVPIYVEDPHNREDNCARNRQAQDVCRVKNKLTQAWSQFIRKKDKCRLADLGFPCPRDEDVGWPSAR

SEQ ID NO: 126189 - protein, 95 aa, Heterodera glycines
QIHCYDEYEASVDKEGNVSNQRARVRLFCLAFLSGTSFLEIGLNDRRREGKEVVRRKDILPMYTERWIRFEAPELHETVDKVVWEEDQVLRINPP

SEQ ID NO: 126190 - protein, 231 aa, Heterodera glycines
LIGFTTNEFNAMFVHRSLPLCQIQANYSLSDIVLQPYDVFTKIHTVKLQHILYKERIGIRPGQISRLVEGHLTKYGLPLEHAAQCTVLAKFGSLNERTIASFTDALENVLFHCPAKRETAPTYKQDEVQIHCYDEYEASVDKEGNVSNQRARVRLFCLAFLSGTSFLEIGLNDRRREGKEVVRRKDILPMYTERWIRFEAPELHETVDKVVWEEEQVLRINPPQVLRINPP

SEQ ID NO: 126191 - protein, 315 aa, Heterodera glycines
MYRPSQTPRLTLSSARVGVARLNTKMDTLSGALPFYRLSKESMKVVVFHWRLAAPTYATPLMILHKVRLESSSTGSSFPAKFAKPVPLAVVSLDSRRDSGNLVDPFVRVGKPTRHLATLRESCYSPVYPRLIKFPWLNIQSTGQKSDTVNVHKDHPSPLFLDSRIPRVRASSKLVVQRQPKCIPRAYTQLKRSTSSSHHSTHHPRKNSTQPRAKAACFTQQPGPDLSQFFSRSYESNLPTSLTYIILSTRGCSPWRPAADIDGSISLSPLYPSQTIDLHVRIASDFHQSFLWLHPAQEVTIFRVSAHTLCLAPSH

SEQ ID NO: 126192 - protein, 611 aa, Heterodera glycines
MKVRKQKRRNPNVVFRDSFNLMPCSLAALIPSYGLDVEDKPFFPHLANRPENYGRAIHPTPEDYLANGMMPGKRRQFDMCYCTNDVEILMAALVAFRREFFEITRRQEYVEGIDDRENHDGIDALRECMTIAGACMRHFRTNHLPAEHLAIVPERGYDNAQNQSLLALRFFYWYSEEYDVEVQTAHSAGGEKRIGPYSLDGWIEAEGRAIEVNGCTWHGCKKCYPNDNMVLPSGKTAGQIRERDGKRMEYLSARVNRIDVFWECKIDEMLARSKAMRKCFANYVDDGPLVIRDAFMGGRTGPMKLYHKAARGEKISYYDFTSLYPYVNFTTRYPIGHPKVHVFNQQVVWTKEYPTGGVDDDYHCQHNDQQRGWVSTCTSIELNAALDEGYRVTRLFRVLEYEDSDDQLFRPYIAEFMAQKIQASGFDNEIKGNAAMEEQFVRECAEMFGINVDPTKMAINKGKRSIAKLRLNNLWGRFSLRNFGLCQTLITDSPVVLAEYLDNKSVEVASIDQLDEKHILISYQHKKDWVDEHACSNIVISLWTTSTARLVLLKAMQKVVRSERCELLYTDTDSLVLVHPEGRCPLKTGPHLGQFTDEYPDHDIVEYCSGG

SEQ ID NO: 126193 - protein, 136 aa, Heterodera glycines
MAFLCHFQRFFGTNLSIDTKNGQISDFTIRNAWPMIKDNVCTVRWFSSKHSKDLGQFVPTDLNECKSLRYLYSDGNFIELPVHDGTGALSIGQAVAKWLFTPRPGGVPKNVSLLLSKSMAVRLKKFIQWHFVQKSV

SEQ ID NO: 126194 - protein, 69 aa, Heterodera glycines
GRGKQINENQLNKLLKQHLFGPLNLCFNLPKNQCVNGTLYKCKFVQLAAFRTKAFQINLKKANLFLAFF

SEQ ID NO: 126195 - protein, 25 aa, Heterodera glycines
MSDNGKEANKQIEKETIKPKLKPKA

SEQ ID NO: 126196 - protein, 84 aa, Heterodera glycines
MGMPTAFTNSANFEGISGKKTLLLSEVVQKAVIEVNEEGTVAAAVTEEEVECCSSKEYRFVADRPFCAFLIRDDTVLFSVIFRK

SEQ ID NO: 126197 - protein, 40 aa, Heterodera glycines
MDNILLEIFICCFCITTYSRAIVTNYPPREEAKDFHLQIH

SEQ ID NO: 126198 - protein, 1421 aa, Heterodera glycines
MDAQQLQQILDAALKKSAEVFAAALNIQNQNPNPGSSTTASLAASINVRLEKFNYNPEVGQTYDAWLNRYGKIVQQDGASLPEQSKVQLLVGKLDEEEYKRYIDSIAPKATEQFNWLETVANLKKIFGETRSLFLRRFDCFQIRQCQNQDLSSLLAQINSSCENAELDLKKEELKCMILIISLRDEFSDLKQRCLQRMEEARTNGKSITLQELGEECKKYQILKESTLALSTKQYNANAIRAKPQQVKDKADATKQYAKPKAVPKPYESKHKLPNRPCQSCGSTNHWRSDCGHRDAKCPKCGKIGHLGKVCRSNSSIRHIQTVNTTERHAQINTVIIDLNCMEIKADHPKWWKIPIKVNGSDYPMHVDSGAQITLFTIQTWIQMGKPPLTSANIRVKNCNDQTFAINGQFMCKVQYMDRPPMKLLAYVSPEISHNLLGMPWIEALEVIPKEIMHPNLHPKINTISTKTNEIKDTETLISALKSTHSDVFSPELGHCTKFKANLILKNGAKPIYCKARPVPHGALDDVNAEIDRLLKMEAIKPIEFSHWAAPILAVKKRNGRTRVCIDFSTGLNDALELHRHPLPRPEDIYNAIAGSKYFSRLDLRDAYLQLELSDESKKLCTINTHRGLFQCQRLPFGVKSAPAIFQSLMDKIITPINGAFVYLDDVIIANTTLDQHVKTITKVFDKIKQFGFQIQQEKCSFLQKETIFLGHIISENGIRPDPSRAEAIRKMPAPHDKSTLRSFLGALTYYGKFIKQMREIRSPLDELLKKDVPWNWETDQQKSFEKAKEIMLSDLLLTHFDPKLPIIVAADASKGGIGATISHQFPDKSERVIEHASCTFTAAQQNYSQIEKEALGLVFAVQKFHRMLYGRKFILLTDHKPLLAIFGSTKGIPIYSASRLQRWALILSNYEFDIKYVNTKAFGNADVLSRLIANYPRPSEDILIANICNDTDCCVNFVFEAKIEQLPITAKIIADETAKDEILQQISAFTKQGWPQKFDNIKLSPFLPKKAQISEIEGCLAYGERIIIPSTLRNNILKSLHFAHPGIVRMKAIARNHVYWPGIDSEIERLVKQCEECHSAAKNPTKANLQPWKAANGVFERIHIDFAGPCADGQTYLVLVDAYSKWPEVWQMERTSSQLTISMLKSFVHRLGIPKEIVSDNGSQFRSAEFAQFCKEFDIKHTFTPPFHPMSNGAAERFVDIFKRSMKKCRQEGKDWLQKVLLAYRTTPNTALNGHSPDELFLGRRMRTRMTLVHPEKQKLQPTNLENFQQFQGQYIKKMENQFNKKHGAKSTIFQNEEPIYFWNLKNNKAIWLPGKIIEKFGTSPTYRILAPTLGRAIHRHANQIRRRFPIELEDNDQVVENDQTQAQNPQQSPIAHKPQTNRQQSPAQPVLLRRSGRAKQAPQRLVLDPTKPKYGLIRS

SEQ ID NO: 126199 - protein, 337 aa, Heterodera glycines
MGRPPKKLLAYVSPEITHNLLGMPWIEALEVIPKEIMHPNLHPKINTISTKINEIKDTETLISALKTTHSDVFSPELGHCTKFKANLILKNGAKPIYCKARPVPHGALDDVNAEIDRLLKMEAIKPIEFSHWAAPILAVKKRNGRTRVCIDFSTGLNDALELHRHPLPRPEDIYNAIAGSKYFSRLDLRDAYLQLELSDESKKLCTINTHRGLFQCQRLPFGVKSAPAIFQSLMDKIITPINGAFVYLDDVIIANTTLDQHVKTITKVFDKIKQFGLRIQLEKCSFLQKETVFLGHIISENGIRPDPSRAEAIRKMPAPHDKSTLRSFLGALTYYGK

SEQ ID NO: 126200 - protein, 35 aa, Heterodera glycines
MNLKRKINLFIFKSETECPKKTKMMMNVPEKHFGK

SEQ ID NO: 126201 - protein, 49 aa, Heterodera glycines
MQTYYYFLICLSCFLANKIERNNSDDEEDYWPNETVESYIDDTDSVVKL

SEQ ID NO: 126202 - protein, 69 aa, Heterodera glycines
MNLKRKRNLFIFKSETECPKKTKMMMNVPEKHFGTKGIGCGTDERHKCEKCDGRRKEQQNGNGRWTRHF

SEQ ID NO: 126203 - protein, 120 aa, Heterodera glycines
MQTYYYFLICLSCFLANKIERNNSDDEEDYWPNETVESYIDDTDSVVNLPPNVKEKLRDFNFIPMTPAPPPMGRIFFTVGVMVAISILFGIIIFLIYKKRNTNGTHTEAPADEFEMETLV

SEQ ID NO: 126204 - protein, 87 aa, Heterodera glycines
MQEVALANDSAQFAEKSMSMAATKSNGWVLLMKVVIILEQNKFVSFNNETRSPTRVFCPHYAQLLRASADQGTLSAESLRWCCALRK

SEQ ID NO: 126205 - protein, 36 aa, Heterodera glycines
MPGPGPGPGFHVGPGPGFPGQKSRKIQSHNSAFMLI

SEQ ID NO: 126206 - protein, 37 aa, Heterodera glycines
MDVLQTKRIAFIEFARNGEAENAISKMDGRTIDGFVL

SEQ ID NO: 126207 - protein, 215 aa, Heterodera glycines
GGLSEAKLISQMALLELGNYDTIPETLSKLMQKKLANVVGPGRWIVPTSEGLQRLEATFQSVLNKHGLLIKSFRQDGVDTDGNTEQVSDDVLEERDEDDGSDVREVKQHSDRRARKRVRFDLTVPTSALLRSRSMGPMRSLDFNTGGVHLGGIGLMAIQLLDRSPPIRRHRRAPSPEISRKNFNDFSPTDRSHHPTLRTSFSRHSMQEIGKQQQR

SEQ ID NO: 126208 - protein, 217 aa, Heterodera glycines
YLDQIRKDDVLNHGAITNEYLNHGAITNEYLIKRQLKHAGKEHGKLRDTHLDSDRRLPLLIKRQLKHAGKEHGKLRDTHLDSDRRLPLFSYTPDTFSLILVPMIMERKILVPMIMERKEALGSMGNDAALACLSDYSPILFSYFQQLFAQVTNPPIDPFREQVVMSLRCPIGPESNLLEPEIVVMSLRCPIGPESNLLEPEIQLEGRILLDHPVLSL

SEQ ID NO: 126209 - protein, 217 aa, Heterodera glycines
MRVALIVESGEVKQVHDFCVLLGYGADAVCPYMVYETRYRLRSMGLIDKSLTDDDVFQGYKAGIERGIYKGAQIFEIVGLAQEVVDKCFTNSVSRLGGADFETLAMEACRRHRIGYPNVLNSDLYLYGDSKVLVSPGVYHWRDGGEKHVNEPVNIAKLQAAARLNDAKSYQEFSRASNLAQRLCTLRGQLEIKTNVKLQIPLEEVEPAAEIVKRFVT

SEQ ID NO: 126210 - protein, 133 aa, Heterodera glycines
MPFNPGLRLIAKTLANSLWYFIFLRYIKKMIGRGKLAQRVGHTEIQYTRTPAEFHKLLDDPTYDKLDFVHVSDHMDRVVVRKRPEFAKAPLTNCLPVAIFVTSYARLHLYGYMEQVLTLNNAELLYCGLSFTV

SEQ ID NO: 126211 - protein, 188 aa, Heterodera glycines
MHRLSAELPFSQVLSPSGKLMSANANAFPLLHNNNNNLQIFSSPTKSGILAADSPSASPGKQSEDDELAKQKIRSTELNGRMKQLEKANEQLNDQLNMAQEEYNNLEVKFEEMRVVNIKLQETIRNLNGRLKEAQDESELRRYEFEQLKREQRNANERNTKASGKMDKHAKEVEEKERELQLLHKRWI

SEQ ID NO: 126212 - protein, 174 aa, Heterodera glycines
MTGSGPIQFGLHSPQPSTPTIPLSEESSLQLIPRWEQDIVCPPRFPISFWNVYTRAQMAIERTNNGMEAAHGQFARELNHHPSLSDFIAAFTKDINKQLDIGRAEQLQKSTKRRQRYVIKEQNVVRILDEADFESEEGLTNALHLLGIVMQGFAEGLHVRGNSESGEETEADEN

SEQ ID NO: 126213 - protein, 161 aa, Heterodera glycines
MPTVREILESLQKPIKRPRIPTNEDSVLNAERTDAEQQMEDTSTRNDLDVAASDDEENCFRFLKIRKDGSWFRCEQRNCPATAKLEDNGLVTGILGPKEHHHGCAPSRFDAETKRNQMKRLIKEKPKTKPCQLRAQIRTDIDDEVLELLGTNEALDQMTNR

SEQ ID NO: 126214 - protein, 81 aa, Heterodera glycines
MAKNVGVRVTKSLVTKGVPTFRQLDISPTDISPTDILPTQPKTFISPTQPKTFISPTQPKTFISPTKPKSDISPTDISPNS

SEQ ID NO: 126215 - protein, 67 aa, Heterodera glycines
MAATVAEVAAEAAEPPVGEQDADDEADDAFAAPAAGVAALAANDDSVPPFSTMPPMPLLTDEAGTRS

SEQ ID NO: 126216 - protein, 179 aa, Heterodera glycines
AFLSHSHSLSSLFLNQKYYYRTISSKFYFFHYYFFQNAIFFFFFGMAPNLALSVLTLLLHFLSFIPFPFVYHWSVVCFCSVIVCQLSLLPPSVALFHKSLLFSPFLFLMLPIKFSLRYDNIIYVHLCFPSFYLVPIPPKSPFFFHVCHHGNHYFLILLIINNSFFCFFKFVNISPSLCP

SEQ ID NO: 126217 - protein, 276 aa, Heterodera glycines
MAYRRLTTMLQRLQKTPEVLKLYTTVITDQLNAAIIEETTIGAGKHEHFIPHQAVITPKKLRVVYDASAHTRGAPSLNDCLLRGPVWLPDLAGMLIRFRACRVPVIADVEKAFLMVGIEEDDRDVCKFLWVRDPFRPVTTDNLVTYRFRRLAFGLTPSPFCLAAVVRHHLRKYDSNFAEELIRDTYVDNVLIPADTAEEAAIKGREAKRMFADARMNLREFLSNDETLNSSFSDAEFLGKTTAKVLGLEWNAETDKIRMKYPGSEPGTPISTTRRT

SEQ ID NO: 126218 - protein, 83 aa, Heterodera glycines
VLSANAEAFAQVECVFEDRDFRVKVTRDELEAMFRDFEQRHMEPINVALTMAQLTLDKLDRVVLMGAGTRMPRLQTVLDIFLQ

SEQ ID NO: 126219 - protein, 90 aa, Heterodera glycines
MNRRWLCSDVWMDILPSFDRPQLGLKMALLSDRFDVLVDKHFDGKSELAIWRMIRIDKDKGPKAEIICADRRHFCGISVPRPSAAQQNPI

SEQ ID NO: 126220 - protein, 25 aa, Heterodera glycines
KERTPSDIPIFPFHNWPKATVLIDT

SEQ ID NO: 126221 - protein, 79 aa, Heterodera glycines
IVKNIRKLFSVLIMQYNAFKPRREAGQFQNFVPHFTVESPSTLLDNYVSMSTVAFGQLWNGKMGISDGVRSFLKIPLFV

SEQ ID NO: 126222 - protein, 224 aa, Heterodera glycines
MAPPPIRQSSTSSSVELDDERDELPPPPPPMVQQKLRNGMQREEREEAHRHSQPLPLPSLPPTTAQLPHHQQQQQSLPPLRSHLPLPSRVHPLRPPPPPPPSVPPVSKPSVTPLWGRNERLVNYLHGYGTLLGKNMEEKENIIVGPRRDAKLEEEERRRADEWAVHPIMLKEQRGRPEERVIPIQRRTTAQETTPWRGSPLLRSPRRISTEWTSGPTQNGHRRN

SEQ ID NO: 126223 - protein, 235 aa, Heterodera glycines
MKQDELLANFLSSPLPPLPPRKNSSTNTRKSTSVNDQHETNFHKQFGQNIFNSKDGSTESEKRSNQQTKKNPISIYGREGQEVSGNQSDQNTKKTSSDKQRNEKNKDISFAKKVVKYLSGHSSDTQKDQKPKNGKNEAGSTGKNTNQSNDVPSINNQRDQISQKATNDLYGQPSETPSYQKKANRMNGAGPSEKKSDQNDKSELNEGTPSENQIDKTKTNRLLKAKEILPFQQKE

SEQ ID NO: 126224 - protein, 134 aa, Heterodera glycines
TVHTLKMLSGDFEYEDPKSEEEVVNITYVTRDGTEKKIRGKVGDNAMYNIEIEGACEASLACCTCHVYVDEKYYDKLPAAVEDEEDMLDMAPLLKPNSRLSCQIILNKDLEGIRVTLPKITRNFYVDGHVPEPH

SEQ ID NO: 126225 - protein, 129 aa, Heterodera glycines
MQLLADPLVKQIANKTAFVPTEKFAILFKNIRMNCSMEIGNKCASGTKLIMLAMSGRDSFERRTGARETWMKEAAPGEIQRFFIADPSGGEAADVKQKLKEEQKKHGDIVFLHGFVDKYKHLHLKVISK

SEQ ID NO: 126226 - protein, 121 aa, Heterodera glycines
MISIKALTDANFKSILVELLNAKSDGSTQTEVSFKIGTDSDFEVAFPGSKSMPGKGVRLPPGSYLLNLDIVLNEHCSIMLKLNGTQFGEFICPTDVKMPLGAISWIKVKPMGENSFLGVED

SEQ ID NO: 126227 - protein, 327 aa, Heterodera glycines
MSTVPSGFPADCAADDIDEEERERRKQQYINNPWKGCTVRLDANNIKPNPGMRYLSKLCLNSLWGRFALRNRLTKTEIIDCHADLAKLLNDVKIDISSIDQLTEKFWMVCYKAKDEHVVEHDTSNVAIALWTTAAARVHLLNSLQLVYRQENLVQRYDTRILYMDTDSIFYDFKTALGDPLKGGNKLGELADEYHSHTIVEFICAGPKAYALWLRNNATGEDEYKLKLRGITLDSNACTRINFEKMKEMVLEKWGTPGNHVRFDYPTKNFRITKQGDILTVPITKQFNPTVNKGVLRDRGLKVVPFGYSSWEYCKAHNPYDCLCKRE

SEQ ID NO: 126228 - protein, 190 aa, Heterodera glycines
ADLADFQALSRKNSGYRYLLLAVDVLSRRMFGSPVKSKRPADVKRAFEEVLGQMPRLPETLYTDRGLEFVAKPMKEFFAENGIKKYETSSKKKAAVAERAIRTVKTRLYKYFSAKNTSAWVDVLPKFLSAINNSVCRADLGQTKSVTSMRERCGRGSMAKDLYQRRRDQRSKREKLSESQSSNTYSRRVQ

SEQ ID NO: 126229 - protein, 201 aa, Heterodera glycines
MEMGVEEQQTDNNPQQQQKHVPSLTSNPVDNAVGGVETATTAHFDGHGERAATASPASSFEEALPAETTRSNSGSGGEDEHDGARHGNVDGDEHDGHGRQHSRHYQQQQEQQQRPQRQQKRCSRHFFSQEPPKLCSIIYAEFDNDIGRVIRYQVPDEIFDKQRFDTISSAIIPSEEMRDRMIKINMYDYKITGHPVGISEH

SEQ ID NO: 126230 - protein, 34 aa, Heterodera glycines
GPFGGLKQLWGAKIQRRIKVQAIGKLFPKDSVSP

SEQ ID NO: 126231 - protein, 135 aa, Heterodera glycines
VFGAVPLNRCAQIYGETESFRNSFTIACTLILRWIFAPHNCLSTPNGHLKKSIFFVFGAVPPNRCAQIYGETESFGNSFPIACTLILRWIFAPHNCLSTPNGHLKKSIFLFSGQSPRTDAPRFMGRPNPSGIASL

SEQ ID NO: 126232 - protein, 145 aa, Heterodera glycines
MRVAIGRRKLFGQSIWCPDGTPTVAFADAEERKVHVDRKAEKGTRDCTETAKANKDDKSSNIGGIETKAPPGKETNIQKNLEPKDSHISLKFSCSGDSGPRASVVCSERIALPTDCVRRAVVRPLPGTSAFAVRTHRSVPKGQRS

SEQ ID NO: 126233 - protein, 688 aa, Heterodera glycines
MSNLFYVLLPSDSPGYDNKPNKFRVHLPRTLTFGGQWLCGLHSIIYTNSWPAIGTTENQWIKVHLKNGDKIKIDIPAGSYQNEQELENAINESIKNGIKQPATRMKRQTENGVDLFFHYNPDDYWDKIEEERQRYNELLKLIETKSSERDNEMDTHRKRKIQEEKITPLQNQSLTKKARIEALEEAARQRDDGKEEKEERTGQEFLKMYPVNYREKLNEVRLELIRDLFNIQDHMKKYQGVTDGRTIQELNEIAIKMRTAMKHRRKNLNAFNKAVLKNDLQISAEEYERTSYEQNKDYVEPFFDSHPTDYWEHIHKKYEGLQDDYKKIRELREQQQFLTDEQKKQSIQDEIDQLRRLVDYRKKRFAALEYEAKKRDALQQQPMALALTHGEALKERIGKIEGTTTTADGEETKTHGKSLVELIEQVQKERDDSKAKTEGKTRGEILGDKLKAKIDEQDSSADGATHGEALKNKPETTIGEKVMTRGEILGEKLKSKDEEKKEERITHGEALKNRIEQIPEEEKTKGKIRGEILKEKIGASKPIEEEKKEGKTRGEILKEKIGASKPIEEEKKEGKTRGELLKEKIGVDKPIRQEEIEGVKTRGESLKDIIVSKQIEAVLFKYLNERRKFSIYFNDRRIEFIELSAQLGYILGFEDTTKIKNGDIAKYYCDLKGGIDSLCVYINGITEN

SEQ ID NO: 126234 - protein, 22 aa, Heterodera glycines
MQKWIFKSANLFYKIMKIFDTY

SEQ ID NO: 126235 - protein, 55 aa, Heterodera glycines
MAKECTSRKRPNCKDGHNNLIEGRTDRSIYRRSSCNHQIPSGHCVQVGQYAVLLP

SEQ ID NO: 126236 - protein, 21 aa, Heterodera glycines
MKEEKGWGEYEYDGQYGEKER

SEQ ID NO: 126237 - protein, 22 aa, Heterodera glycines
MALIEDSCGYRKIPRMLNLDSV

SEQ ID NO: 126238 - protein, 46 aa, Heterodera glycines
MNSTGFRMIPILKKSTDEQKSYGHSHSNCTKRHCTNCLDPSFLHCF

SEQ ID NO: 126239 - protein, 284 aa, Heterodera glycines
MVNLPFGLRNATSAFARCMAHVLTGLDDCVIAYVDDILVYTRDDNFDPKTIREVKHVVGMASFFRKHVPNFSTIVEPLTRLTKKESNFEWGTEQAAAFNEVKRILTGKQNLLADGLSRYPHERTQEIAIRDLAELEDIANFPVCLALNMKPRMVHEHSLLTITARDIEGKTFAIDVRKEQNDDSEYSGPPCTTKNLQKDEEQALKELESREQTNVPGYSHDSYQNISDNTVLIENAPALTPNPSPSSQSNNQVKEKELNRNLCSKHNLRENPRKKKHFGNFSED

SEQ ID NO: 126240 - protein, 75 aa, Heterodera glycines; identical to SEQ ID NO: 124542

SEQ ID NO: 126241 - protein, 162 aa, Heterodera glycines
FKHCYLKFGGCTSLLTDNATAFTSDFFKSFCSLLYINKCYAIPHWSQGNAVVERSFRTFHNILAKYISSEEPDFDEFLECANFCYNTSIHSSTKETPFFLVFGRDPIFCIEQILNPNTEPENITEVDNVKQKLVKSLRKAWESAAAVIKEAQLRSKVQYDKL

SEQ ID NO: 126242 - protein, 87 aa, Heterodera glycines
MPLSPAPSVHFLRTEVEEREARSNLATDEEGEGLEEHRRMKEENRRGRQERMEANRLPPAEPEAEEEPVEVIPWQDVAWNFKFEHIR

SEQ ID NO: 126243 - protein, 74 aa, Heterodera glycines
KGHYANRCTKGILAFLSNTATASDQQREQPRDNQQKKYAGGEGGRKRKMTDRKISIDILFCKFICCYFPLSEKN

SEQ ID NO: 126244 - protein, 261 aa, Heterodera glycines
MPTDVVVRKTVEEREPRTGAKIRESVIKAASGSVNEMGENVLKFGFFQINFFHEGNLKNLMNNRHEFAKLVNKRDNDQHGKGAETVSKLIAYLKEKRDPVINEIIAEVLEESAIFGDNSQKGQKHILLFTYIRLYRKLANALRWALISDSGDNETFVQETNTLLKWLNEMGDTLLNALSKSPITARWVKNLCRMEAAVELTNFGIFLILPSHTWQSVGAERPTAVNDLFETIGTTEILEQINDPCDTNCIDQMVKQKLELM

SEQ ID NO: 126245 - protein, 251 aa, Heterodera glycines
MRAVLFLAMVCLVMAVILETANSKAVKKDGKKGAVASPAKGKASPKGASPAKGKAAKGGKKDAKKAGKKDGKVKKEKKEKPAKKAGKGKDAAKKDKTKDKKVPAAVSVTAPDQPANMSYLPMFFHRQLPFISFICVLNLPYNIPNVIMLGSHITVIFTLATIVIYIVMGIILKAQLITIAGAINAPILYICMRCGNGKAIKTLKIFFIRSEYLEIIKSEFAWIKFVLCLNNNNIDVISVVVGPKILNSSGV

SEQ ID NO: 126246 - protein, 58 aa, Heterodera glycines
MWEKLKNMCTSPNWTNDISFDASRFLAMSNTDFKCLIVKAIKKLKNFSINPMTVCSGY

SEQ ID NO: 126247 - protein, 66 aa, Heterodera glycines
MLISPQYWQNSNGYRAEDEALTVAFDVSTPFFFAYQQKIVANQKFKWNFMVKEISFIFCCCAKFAN

SEQ ID NO: 126248 - protein, 120 aa, Heterodera glycines
MDHKYFNDSEKMRLNNFYDRFRHNLSIDQFFNEFFDNFGLSCKQFFQFCQLGDTVLDCCKIFEPIYLIRRGRCFRSIKLYQSNFDELGKLRVQLRQPYKMDPQMKDQEVIKMLKCLSNNK

SEQ ID NO: 126249 - protein, 100 aa, Heterodera glycines
MAFIAEYKPQLAPFPRHYLQQGTWTKMRLNAKHISLFPAEEVCSQTNDQLGKDTCYVENWLQTHVEGPLNCTFPYVQEITKDRQLESVCWLVTVGSTWFP

SEQ ID NO: 126250 - protein, 107 aa, Heterodera glycines
PSEVLSEDEVIDIYQFHALPNCHGISDGFFPMQFSTNERFMNTGTLLLDIEKVSEFGQEEDSSRCSKKMYINGLSWKILAQIGTRIESDERRIYIYLLCDAPNEGAN

SEQ ID NO: 126251 - protein, 253 aa, Heterodera glycines
SVHRHHSSSGKFQGDIDGVDEHLLRLQNPLQNPAIQFNALRNRQLIWPKGVVPYELDVAFSLSEARLLSEARLLQRVFRTYRRRTFGCIRFRPRRSGETDYLSIVKGNGCYSQVGRTGGKQELSLGRGCLFNETITHELMHSLGFWHEHSRADRDEHIVIRDEHIVIRWENILPGMDSQFDDSQFDIVSSAIQDTLGEPYDYRSIMHYGSSAFSRNGRNTLEAVVDQFTNVIGTAMELSEMDVAKVNEGGGTK

SEQ ID NO: 126252 - protein, 637 aa, Heterodera glycines
MATKPISVMVRSEDCSRSAEGLKCAGTAATVLALLPSDQTNSFVIRTQQDELLGAVRLRLASITMMCVPKTESWLRSYSISTTAVKRCPSAGSCRGNTCSAIRNRETIPELIALNHRPGHSFCMRSTSFWQNSCGLPSASCLFYRWAAVPTTTTVFEEFTCLEWDMQISAWVELETNNGQIDSQRLTLHPGVSEPWGNMTISVIPTSLPPMPALSAHFVTDGRAVAMGRPMPSDLHCPDEETARGFDKCQLSIGACQKCAPDHDNGTVHCHCRDLDIGRVLNNPEQRLPLDVARLHLHNHGSSIRAEFQYSPVQVHIQLNGLELISEYSNTKCWVSSPTLSGCYRCTSGATFNATCRTDHGTALAKVKCADGTLFALHCGGNDSTREAIPFDRAEIFTECKVKCPAGTTTFRLKGELIFLPKEQQFGFHRRDSSGGKIEPGITFNFPDWQIDPFPLLNLLSSWQWMLMAAGAAAIGFVALFLFIKFNPHFRLYRALMATILLVILIGKTEAKDSRGEISPATFDRWTNGEKISVTTGTDFVALGPQRLTETPQTTAKGDPNNFSEGAFSLIICAIYLYFTIISLFCRLLWTPRHRISPLFAPPPLTVVILGAICAANSLTGAREPKWREGDNFPTSL

SEQ ID NO: 126253 - protein, 1164 aa, Heterodera glycines
MAALIQRRSNTPSVASVRVNNPVREWMARNRGGENEPPAQQQPQAQQPLQAEQQRFERLTLNDQGQAFPRASHHARIRREEHPSRERLRTQGAAPSHHHRSETRADTLTTFETVRLQPPTFSGKPEDWTTFWAYFQRAVDDKPIPGFEKQLHLLRCLKEGSPARRAVEVYPPSDGNYPVVVQLLKERFGDTNDLQRAIRAQLLHLPPAKDNVASLTAMIDEFERGVCQLEQLGANVDDESFGPLLEAKLPVSILTELRIRESMMGAKWTVREFRKAVAAQVKCMRAAQSALAAMKEPERRHEQRSEADRGGRNARTGQGFNRAFMIRENPPERHGTVGAGNHGSVHTPPRSGFLPPGSNSRQTESRRMGQGGSGCSLCGQAGHQPSRCIKYGSAQAKRRRLIEQRRCLKCLGSDHTASQCTRAHPCRKCQRPDHHWLICWEGGKKDEPQIQAKAEEPRANRTMVIQRMEPTEERTFAANSGMEGRGESPSPHQEPRTFTTVGQQLPAYLMICQVVVAADDEKGECQTTLLLDPASHGDYVDTELIRQLGLEKSESETLTIQVFGGKKVKVPSGRYKAKIKRTDGEWESIELSEVPTICTPIKTEFVLPGVAPEQIRTTTDTVQPQLLIGIRRFWDFVRAFRKTDEGTYLIDTVFGTVICGEQFQVSTGVPPDSSVFAIPPCGEDERDQMPSVKAIEQFWSVEAIGIRDDPTQDADSAAIIQFEQSVRQQDDGRYNIRLPWREEHPELPNNYAVAYRRLIGLLQRLQRTPEILKQYQQVIEEQSRMGVIEEATIGTGKCEYFIPHQAVITPKKLRVVYDASAHAKGVPSLNDCLLRGPVWLPDLAGMLIRFRACQVPVIADVEKAFLMVGIEEADREVCKFLWVRDPLGPLTTANLVPYRFRRLAFGLTPSPFCLAAVVRHHLRKYGSDFAEQLIRDTYVDNVLIPADTVEEASQKAREAKRMFTEAKMNLREFLTNDQNLNSSFSEADALGKTTAKMLGLEWDAEKDSIRMVFPGVTPAGAGGHSSRRAVLKTIARLFDPLGLLAPATLPAKQFFQRLWESTHSWDAPLDADDAREWNRIMASWDGEFITIPRVARADGAESCQLHVFTDASENAYAAAAYLRSEGVDGSILSRLIMAKSRLKPKKASGTFTIPRMELMGLVLS

SEQ ID NO: 126254 - protein, 22 aa, Heterodera glycines
APTHHGKTKHARVGDIVQGCLG

SEQ ID NO: 126255 - protein, 188 aa, Heterodera glycines
  unsure (1)..(188): unsure at all Xaa locations
PRCRLICFDREMLCSLSSSQNVCLIACRSRKRLSANWSSRQELDAPAVXDTSSKAGKGAATKSYKXSCRSSGAAPAFCYSLIEMPFKNPSDLSKSPFHCHQPRGVLGRFAPREIRVHQLPRFCDSRRECVSRSLNPISGRPHRHCSAAQILRCRGCNTRLACPQALRVHPFLCFGLLRRIRSFPVLSV

SEQ ID NO: 126256 - protein, 102 aa, Heterodera glycines
KFYANRKNKKREQIASELGVTIHQIKNWTRKFGLGNQKWLTDRQRKMLIKKFDKIKEKRTQNGLPAGEIRELEEKIAEEIGINIRTIYKWRKKFGISGSWQK

SEQ ID NO: 126257 - protein, 50 aa, Heterodera glycines
MFNSAKLKRKKHFLGNNKNKSQVNLSHLSKNADNNKRINKIDRICNTNPT

SEQ ID NO: 126258 - protein, 152 aa, Heterodera glycines
MFQFEPLNNVASTSSTTNIGTHFLGGLRGNLIYLFIKWALQLDSDKSQRSTYSQKSTSTQKQTQQHVRRAYSRLGIERPEERETARQAITASTSAASSSASSQGSKRERGETTKADKMKKEVVRKLKGKCEDDCDICSNFLKKYLQKCFVLG

SEQ ID NO: 126259 - protein, 46 aa, Heterodera glycines
MINRRDKFKNENSIRRIRPKKISKCWQHLCMTSKNVPSVGKSANVI

SEQ ID NO: 126260 - protein, 184 aa, Heterodera glycines
SKNIAILPRRDSDLEAFSHNPSDGSFAPLVYRPSTTKCLNLRFLSYAGLLLATGLGKTNLSHDGLNPAHVPYWWVNNPTLGEFCFAMIGRADIEGSKSDVAMDAWPPQASYPCGNFSDTSCWKLYTLKDRATLSRSVFVLKIRIKAFAFLLYERFPSSLSALGHLRYALTDVPPQSNSPPDTVI

SEQ ID NO: 126261 - protein, 660 aa, Heterodera glycines
MAAKFNLCLLLERGHFNYIGRVEQLFDVQRYCIDCERRAHLRYHFSGCKVVCRLCLRFGPEYPCQAQQLPNGASTARRCAACQFIFPNDDCYDYHLIEHAPAPMDARGQRQRQPICQWRRVCRDCGRIAYQGKHQCPCQHPDGNRNCKRCDGPHTTDEPCFIQPICDASARQRASIAVDNDDDNSDDNDEDNDEDKDDVLPLRLCFFDAETSQDSPLQLNNRLVQKHVPLLIVAEVICERCIQAGISVNDGLGRRAPDCVCLCRMVRGQQLRQWSSPPFANAPGDNTAVPVEAPTFNQRRFYFHSFDNDGNDPVDQFLDFLTHHGPKKAHTVCVAHNGGKYDFHLILEALHRRNMPPKRLCTTGLKIYSMRLSGRNQRRVTFKDSINYFFCELDALVKSFELPEHQAMVKPFFPYLYIQRQHLSQRLNGLPAQEFYSPDTMKADKRAKFLRWHANNNGNRFQLREQLIMYCANDVAILRESVIRFRQLIADNTQGLDPFLNASTAAGLALATLRRCFLAPNRLVHSPEGGYLRGRRASAESQRYIRFFELENPGAQVQCASWSVGEAHIEDTGYRVDGLWRRDAPLRPLAIEWLGCYYHGCPKCFPDRQQRLAAGRTAEDLYERTERRLFELEHDYGCEIHKVWACQWSERMRHDPELKR

SEQ ID NO: 126262 - protein, 107 aa, Heterodera glycines
MMAPPHLGGQNAQPQKETEMAFSDEAPPCPQPTWKEAMEKALSRAVRGTFIVACSPADRREAFQKKMRLSATGDNFCHVIKDGVWCQAGHSGLAPFQKFRLSFEDSQ

SEQ ID NO: 126263 - protein, 57 aa, Heterodera glycines
MGKLKKFEDADKRPKYENKTVGRFVKHALFELNSSSDCVNTTSEQTECEKFLGPTDV

SEQ ID NO: 126264 - protein, 223 aa, Heterodera glycines
MGTTKLEVFVDAIDTDVQPIWDVFIRQIWPIFAKSIRHLSFEDGNHLDNLRRRISPTLLTDLDQLISIDSGYLCPDGIADDGPNGIAGQALTKWLHTPTKNGQPKQLHRYNCFGPQNLEWVNNFKETFRRATTSVSYHIQLFFLVEPMPIEPFELVNERTNEKLTLKQEIDEFDLNAYNWLLQRCPIGETATAPAIKWKDSVNPSANLNNVTFDLWSFDKSIG

SEQ ID NO: 126265 - protein, 105 aa, Heterodera glycines
MSLIILVFIGTMCDNKPSYCLIIKRRIDYTVLAFLRSNKPIWDRMGTKLELWPYRTEKDQSIWDVFVREIWKELPMPPLLSLKQEKPRKFGCHFEQYPIYFLGRQ

SEQ ID NO: 126266 - protein, 182 aa, Heterodera glycines
CALGFTSGDALDNLRRRTSPTILTDLDQLYSIDFALMCSGTIDNQILSKWLHTPSKDGQPKRLRFRAYVGPPNLEWLNNFRETFHRATSSASYTVRIIFRVKPMPIAPFELMNEVTNEKLTLIKGGTFRWLLKRCPIVGETAAVVQKQQKKDEKLDRLNGVYFCLYDAIFSTPGHIDQRKKK

SEQ ID NO: 126267 - protein, 88 aa, Heterodera glycines; identical to SEQ ID NO: 124691

SEQ ID NO: 126268 - protein, 212 aa, Heterodera glycines
NRSVQSNGDEGMEMVEMTEIRYEQKQQVAAGGLCCCCIPCGFFNESSNEEPPKIFKFFMTKKKTPQPPPAAEVVQPQNSVPSPKALPVENYTLNATFRKEEARGYAKMTFKKSKKRAAQTKQPKLVRISIFFAFPCKISTSFRFRPPVSPAKLRCWVRLPHLQQQASEPLSQWEAMSVRRKANTKWILPPIRLQRAAHTFKKEGPSHFNCER

SEQ ID NO: 126269 - protein, 17 aa, Heterodera glycines
HKHLFDLFYHIHNLIKI

SEQ ID NO: 126270 - protein, 80 aa, Heterodera glycines
MARQFDQHQGSKSVEFLPKDPVLLLNFNRGKRFWLNGKIIERLEKSPTYRVHVPALGRNVHRHANQLRRRYPLEEDGNDT

SEQ ID NO: 126271 - protein, 97 aa, Heterodera glycines
MLRPLFDCILRLLRQFYRKIWLVGIELEDNIFTEEHSSAEGKKHNQQTNWTEWSQRLNSMLSSLFDADIVRAYRIKKNLMDAASLNIQLSSNYEKRG

SEQ ID NO: 126272 - protein, 33 aa, Heterodera glycines
ILRHMPFFLRTSFDILSIKNAFSTWFEASTLTF

SEQ ID NO: 126273 - protein, 56 aa, Heterodera glycines
GERILQYSKKDGKQSKDSFFVGMAMTFVNTLFARFIFPLLNFDAFAIGFFVIQLVE

SEQ ID NO: 126274 - protein, 69 aa, Heterodera glycines
MFRLVIMQLYVPPTMMFTYGQGPGLDPDLKEPGFFLDLDFPGFCPGNQGPAPTWNPGPGFFQNVDLYYF

SEQ ID NO: 126275 - protein, 55 aa, Heterodera glycines
MAKKKNINLDFIWSIKTTLEKITLSKLLNEPFVLDINIICIRSIIICVKKRMKSF

SEQ ID NO: 126276 - protein, 21 aa, Heterodera glycines
MFRLVIMQLYVPPTMMFTYGQ

SEQ ID NO: 126277 - protein, 55 aa, Heterodera glycines; identical to SEQ ID NO: 126275

SEQ ID NO: 126278 - protein, 295 aa, Heterodera glycines
IKILTLFAFGVLGHELMHAIGFHHEQSRSDVRNYVILREDIIFHVLILKQSEIDPYTKIIFHVLILKQSEIDPYTKNFDFPYDFGSVMHYQSGAIMNSKKKLVITLPRFYQQTIGQSERISITLPRFYQQTIGQSERISFKDAAIINRIYCEDSCKGHEDKCQNGSCKGHEDKCQNGGYLNPNDCTKCHCPDGYGGKYCKELEESEQAKCGGNGPCRCHWRIKAINNIFEFLVFLINANFNCFQPEAGKKVRIQFIEQFFECTYNCSSAYVEVKYRDDKRAQGNHFCAPFNKMDH

SEQ ID NO: 126279 - protein, 170 aa, Heterodera glycines
MRAVLFLAMVCLVMAVILETANSKAVKKDNKKGAITTPAKGKAAPKGAAKGGIKKDAKSKGKGKKDAKGKKDKKAKPAKGKGVPKNAKPMAAVKAVPKAAENAQKGPSSAEVVAEENNLDTEAVDDLGAEESDFDQLAEDELLEDDAMDGEADEWEGMGEETEMDSQMAL

SEQ ID NO: 126280 - protein, 125 aa, Heterodera glycines
MIKTPSTYNFTYKFKVNGIQIQGKRQTVFTDPNNEKYNWTKIDVDCYKAEGGTVNFWGYSKPETNEIIRVDEIHCLMDDAVAEVPKQSKSLQTDEQPPMKLSPSPFLANNVSSLIHVFVPFVGNP

SEQ ID NO: 126281 - protein, 222 aa, Heterodera glycines
MLDGGSQISLISVKFFLEIMDKRGPLETKIRVFVAQSTFGYDLLFGTNAMDQLGFKMLDAVNCRIVDFSPASKPENSPLITFKAFVCHGNTSTNREGQKKGNKHRSDPKNDTGTKKGKVVEKKSNRNAVDNKRRPLFNKTFVPQLKTKEIPIKNSESFGESAANKQRLNSVQVKVGVPNEKPMKCVWKRKNLGQIQLGTTEKLGRGKVNPTTCNKTKNKQKI

SEQ ID NO: 126282 - protein, 273 aa, Heterodera glycines
MPVLRSPPLTRTRALNQGIIVDRDGNAFRAENFGVLGGRPISPLANNENQRLDDNHENVLAETEIRRRLLYGGMDQSAPDEQLEYDEMENGDEQNVNGMVQQNLENGVEAGDRGSFGNDALDAHGLRAFSTPLNEQNLSALQRDRMQLPENLSVIQNQIRVMNFMQNQMPNPVAHNFPALNHPQAVNPIACRPNGQLYENAGGNFERQREQQIRLTQQPVVEDQQSHVRRILPHMPIHKDTAGPKTKDLSFTKDSNTQISKKPTYEERSTRSS

SEQ ID NO: 126283 - protein, 31 aa, Heterodera glycines
MDKRTEKEPNRPTDGRTETKTEDKMPRIYVI

SEQ ID NO: 126284 - protein, 190 aa, Heterodera glycines
MIINSAKDMFHQEMDQQILESFSNSADHNLTEHSTNDGMTDEEIQLMFEYKDNWTKQYEQMLSRLTPEKQEMVINYVITQENDIELLKRFLKTDRYELLRGLKNNRLKKKLIEEMLGKMELEEFKIQIAQAIAINESNNPPTDLRKESKTKPKIRELKIDAHQSSQNLATNLRDKGKAKLEDGHKSPNIR

SEQ ID NO: 126285 - protein, 467 aa, Heterodera glycines
MATTHQHNPTPEVKELCKCLALDDNQLRDIMAKFEMEYKKGLDPVTAPTACVKMLPTYIRAIAVGEEKGEFLALDLGGTNFRVLRITLEGGCRSTMHNKIYSMPDSVQQGTGTELFDHIAACLADYMREQNLTSHSKMPLGFTFSFPCQQNGLTNAVLTNWTKGFTASGVVGENVVHMLHDAFKRRGDVDIDVVAVLNDTTGTMLACSFIEQHCYVGVIVGTGCNAAYMERLENVPKLKGIVNSAEDGLPAEMCVNTEWGGFGDDGALDQFLTIYDQQLDQQSLNPGRQRFEKTISGMYMGEIVRLALEDLARRGLLFSGDSTRISERGCISTKMVSDIEGFMHSTDGNPFAKVGEMLRAIGISNSSAADCANVAYISSLIGTRAAHLCACGLAAILNRMQRPRVTIGVDGSVFRFHPTFKFNLDQKIKALLAVKCEFFMVLSEDGSGRGAAVAAAVALRMNRLVGA

SEQ ID NO: 126286 - protein, 43 aa, Heterodera glycines
MKISSTTNIDYILLFIFSVSTLLSPRFNALVDKHFNGKSGLKS

SEQ ID NO: 126287 - protein, 51 aa, Heterodera glycines
SVASGWVGWRKTGATHGRRRTRTKSADARSAPATASGSYGGHPSLRCSSAS

SEQ ID NO: 126288 - protein, 152 aa, Heterodera glycines
MVFCPTFRYWEQHPELHDIPVYYASSLAKKCMAVYQTFVSGMNQNIKRQISINNPFVFKHVSNLKSIDHFDDVGPCVVLASPGMLQNGLSRELFETWCTDSKVRLFHTPKLRGLLKSALPELTNEIVGLQHMKFFVFDDSVLITGFVFLCYK

SEQ ID NO: 126289 - protein, 416 aa, Heterodera glycines
PKNGQFGDDGICAIPLREGTEFDKSRRIWRVLVSFLRKRAETIVGVSANLSVLLSVLLYPFMPNISAQIQQQCNLPKNIVMPEHFVLFLKAGHKHNKPFALFTKIEPAKVAEWKELFGSGKQQQNQPKKTAMSSSSSKKAPNTTEKQQQKKKKENMAKSGAKGQIYAEVMAKFEKAKALFVTNESEKLDTEIAALKEQITEQKARLGFTGALFSPPMPKATPAIVVPPAGTVSSPQTPPKLTAASNASKEQTQQKQQPKQKKPQQQQATAPADDTVDVGCLDLRVGRIIEAQKHPDADALYVEQIDLGEEKPRTVVSGLVRFVPLEQLKNRLVVCLCNLKPAKMRGVESQAMVMCASTPEKVEVLEVSPDSVPGDLVVCEPFVRRPPQQLNPKKKIWETVAPDLSVSETGECIYKG

SEQ ID NO: 126290 - protein, 289 aa, Heterodera glycines
MMMALDAAGGATAAAADSAQLISTDSLDMEQLRVRCECTKHNANYKLTFDEDSGQWTTSGIGGSFTTTATASPPAAQQQKQQHQRRLKQHQQLKQLLAMNTTATAMNNNNNSHEEEDRDGHGDEHQQQQQQLYTAIMDNNGALGLQLLEQLNNADDDDQDNDTSAYSGGVFNATAEKRSGVRRRPATSVGHGTTTTATDGWRKNSFMDALLNNNPNHNANTSSSASSTFHGNNFRGDAATKKGDGGGMGMMTTWGRLHQQSDDMGGGQQPPFNSEKVHRSVFRKARGRG

SEQ ID NO: 126291 - protein, 89 aa, Heterodera glycines
MATYQQQQPQQHRHVQPVHGSVSSSSSSAGLRRPTSSSLLDNFIATQRQQQQQWNGGPQMVDYAYSETYLGNGRYIDMNENESPPFIID

SEQ ID NO: 126292 - protein, 191 aa, Heterodera glycines
MTETAPLGHKLGNDNQLQHNANANQQRQQQQQRRQSHHQMGATKTKAAATMAMPTTATMPQQQRRTFADLSASRTVPDLKFIALAHNVPTICPPSSVSLDNLLCRVRNSATAADGNGGIGGANAAAIDELIDCCASSMRILSEPDGGGASDGPDSGLGSSHSDGPSHIEDWSSLSVLLPRLDSFLFFNFEC

SEQ ID NO: 126293 - protein, 284 aa, Heterodera glycines
MATRTMMAWCGGSAARLPKDSRVPKSSSMPTKLVAAAASSTKLSTDCIEEEEQEVEVVHCQQDKQQHHNSIKLEDVKWVEVQQREQEEDKTAENERPNSMADNDNVVQSRNTDAVGGAADTVVHAGLRPSSSRIPILRTRSRSSIMHSDGGSPIAAQQRHSPTTLSRRSSSARPTPSLSPVYICPVREAITGEHTDQQSASLPHGSAAGGGTLLYPLRKGERVRVLAIRGEYTRCSRLPAAEHRQQQLQQQRLALQNGLVPTRTLQFGANNGTTALNDERMTEL

SEQ ID NO: 126294 - protein, 106 aa, Heterodera glycines
EGKIIYRSLCKSIKIKRSMSMDHSVDRQSVRLHFRRPFLLLLLLLLLLVHGRLLLHFNGNGSSAFVSRFHSADEQATAVQLALDALLLDALRDEHTARELTVDRFA

SEQ ID NO: 126295 - protein, 74 aa, Heterodera glycines
NFALTNVKSSNVRPFFDSPLFLLMLLLLCLLLSVFFIAFYSTLPRPLPPPPPGVPFLPKHHSHTNSFSSNFPKC

SEQ ID NO: 126296 - protein, 58 aa, Heterodera glycines
MPYIGETNDFKFEQKDVEQSLVLMDDDGATDVAKSSFDVEDKIEIIMTSQNLKIGKLK

SEQ ID NO: 126297 - protein, 20 aa, Heterodera glycines
MKCAQRRALQVIGTDFHYIH

SEQ ID NO: 126298 - protein, 112 aa, Heterodera glycines
MVIDGLRDCLLQVLRDYALRVGLLEHSNSVASSDTFALFQRRLRPEPFVAGTHGMVTELRCEICFDPLVSPSASAPVGDVRLLVNGSAVHEKCHGQKQMPNAKALYEERRNE

SEQ ID NO: 126299 - protein, 360 aa, Heterodera glycines
MAVPQEVIDKIEAGYKKLQAAADCKSLLKKYLTKDVVDACKDKRTKLGATFLDVIQSGVANLDSGVGVYAPDAEAYTLFKPLFDPIINDYHGGFGPSSKQPATDLGEGKTQLLTDLDPEGKFINSTRVRCGRSLQGYPFNPCLTKENYVEMESKVKAVFEQLKSDAELGGTYYPLQGMTKDVQNQLIADHFLFKEGDRFLQEANACRYWPTGRGIFHNAKKTFLVWVNEEDHLRIISMQNGGNVGQVLERLIKGVKAIESKVPFSRDDRLGWLTFCPTNLGTTVRASVHIRLPKISAKPDFKSICDGLKLQIRGIHGEHSESAGGVYDISNKARLGLTEFEAVKQMYDGVKHLIELEKKA

SEQ ID NO: 126300 - protein, 92 aa, Heterodera glycines
MSRSFSKRTITERVDIVRLLLTHGANVEQMDFEGFHFALKSAAIGGSLEVCRLLVEEWAADVNQQTIQERYTPVICAASIGHLAIGGKKIGF

SEQ ID NO: 126301 - protein, 263 aa, Heterodera glycines
MAVLSFLSWSWSRALDQGLRAPTSGASERRVACAYLRRKLAESCVRLPQARASKELRTPISSASERRVACAYVKRKRAESCVRLPQAQASKELRTPISSASERRVACAYLKRKRGESCVRLPQAQASGELRAPTSGASEQRVAYAYLKRKRAESCVRLRQAQASGELRAPTSGASERRVACAYLRRKRAKSCVRLPQAQASGELRAPTSGASEQRVAYAYLKRKRAESCVRLPQARASGELRAPTSGASEQRVAYAYLKRKRA

SEQ ID NO: 126302 - protein, 69 aa, Heterodera glycines
MSSLRKGWRQNNANDGEELEVGGGTETRCEKQIDVKAPPLRPPLKPGCVLRQNTRMAQIRKNTEMTATI

SEQ ID NO: 126303 - protein, 224 aa, Heterodera glycines
MTFTQHRDTQEVLQTLDKLELDDEAMRNEGRRDGRTDQPIQEELYKRFGFEEQYKNKELNCWQRTKPKLWRMFDEPSSSTGAKIIETICNVWFTIEIIIRWGWVGIDSRLNRYSWALANRSFCHFCPSFSLRFVACPSKVDYFKAPVNIIDLVATLTFYIDLLLTTRFGATADLEASAKELMLLVFFLLLGIVVFASLIYYAERMEDNPENQVKKHNNRIDHVG

SEQ ID NO: 126304 - protein, 264 aa, Heterodera glycines
YLGLYTEENYNRETVRLLASAADTAKDGLISYEEFSAFEASLCAPDALYLTAFEIFDNNASESITADEFEKVIRHTTPLVELDFDFNSEFIKKYFGAKKQRSIGYHAFCQLLHDFYEEQGLQAFKKFDTQNDGSITATDFFQLMTTVKGHLLTDFSRNNLIAVAGGTSSAHKVRFPFYQAFNSLLAKMELIKRVYQSIARGNIDLKVTREEFLQATQSYAQITPYEVEILFHLAELNHPGHRTVDLTDLDKIDPERLKRVSHMI

SEQ ID NO: 126305 - protein, 79 aa, Heterodera glycines
MSVFSSSDGSCKSINSEAVFETAEDLGEALNLDAGVVEWLKEAPRSDEDPILVLDYTDLFHALPGTLNYNKTWVANLLV

SEQ ID NO: 126306 - protein, 56 aa, Heterodera glycines
MVDYFFAQMHFMSPIDFYEPKAKPIFLVSFESTKCNEAKIYKIAAFMQLPKKLWIE

SEQ ID NO: 126307 - protein, 108 aa, Heterodera glycines
MESLLEVQRNCHEERERCIDLMVKEFMMDKKSQRERINSDQRIKRLIERNQLATEKLINAYKDEHGERSKEVQSIGGPNEFAEFYSRLKTFEGCSSKKPERHCSNTDN

SEQ ID NO: 126308 - protein, 44 aa, Heterodera glycines
MYIWAYFKNPEVAALPWECTCEIGEKYESFAVSAPSLLLNDYYF

SEQ ID NO: 126309 - protein, 326 aa, Heterodera glycines
MSNSKSLADFCNDEEEEEEEEEYGGGETKESSEEEEEKEEEKEEEEEEEEEDRKKGNKEGKEKLREKGKEKESMGKSDQNQAEDDNVDHDHDQQQMDDDPFDQTQKQADQTDGQAKSEQCEADQTDSEQTEEETMLSDLNEDDGNGGEENPNSLGFGYTSAECPPKEMPLKMLQEIDRKNVIDPEQHHLMGNYLQLFWHDNENFLPLSPQNSVIMKVTQILATIAFYRNCAMELFALPDLYTENGTFSAKIGDYRQKWAVTQMTESETMGENICKIYQFIYEMVNDEELKAAGAVWEQYLARNVVKIGQMEAKEQLKKVEILNWKI

SEQ ID NO: 126310 - protein, 18 aa, Heterodera glycines
YREAIPEGFGLPINLGAS

SEQ ID NO: 126311 - protein, 74 aa, Heterodera glycines
MGAETIAKPTAPPQKMNTHFLNSSTTPQQTHHRNNSKQPPQPQQQPQTARRNSAARRHTTPDMAASAAYGMGKR

SEQ ID NO: 126312 - protein, 119 aa, Heterodera glycines
KMALFRFNETKTNRGRSLISCHNFDYCFERDARIAEGFEYWRCPRRPPYCPGRATVQSAWQIDPDGNRFKMGRVTAPHNHPPIFGQHNIREANERVREEARSDFPTTSRNIVRDVRSEM

SEQ ID NO: 126313 - protein, 106 aa, Heterodera glycines
MSVIIDHSAVPVVYGLMPNKELGSYTSFFETIRNRIGNNWFPTRIMSDFELAAMNAAGIVFPNSVRTGCLFHFGQALYRRVQRLPNLHTQYLQNRDLQTSIRSLQV

SEQ ID NO: 126314 - protein, 80 aa, Heterodera glycines
MAKRKQHFFRVELSAGVMRRRKHTEGIGRELKGEREVFHNSPQNPLLSTAIPTKGHWQNQKPRHTVLASRRAEVVLPVRP

SEQ ID NO: 126315 - protein, 91 aa, Heterodera glycines
MFITELEEILDVIDPIEALKLFMEENQKLFDLCVQNFNKQKEQEQLKQQNNRRRWELLEKAAMENARAIRQQQTDGEAEPYSIGEGEKKPK

SEQ ID NO: 126316 - protein, 130 aa, Heterodera glycines
MDFIECRHFKASKIEAVLETARINLDVDNSDCQIPNMQHLFSNFFLQTILALMHHYFSMAFQMRLVQPYEFHYIYWAETLMCQAMCSMNLDLIISQRMAVPPGEGLRYTKRVELFSSIPPLLFYSYEEYL

SEQ ID NO: 126317 - protein, 41 aa, Heterodera glycines
MSKAMKKLVEMDAKLDEEELNLLFTGYRKAIKILQNQLLKK

SEQ ID NO: 126318 - protein, 41 aa, Heterodera glycines
MTAHDDGNADLLAETTCDSFEVSMEILEKINAKLNEWARKQ

SEQ ID NO: 126319 - protein, 188 aa, Heterodera glycines
MAAETKEELLFLINLCDTSECFNEMVDAVKKVIETYREELESELLVNCRGVLEFLDSTLIPNATTNLEAKVFYLKMKGDYNRYISEIALGEDRTTAIEEAKQSYNQAAEHAAQLTPSDPTRLAVALNMSVFYHQLLKDVDQAIQMTERALKSAKAIPATHIDSKNIIIQMKKNLELWKPVNPKHAETK

SEQ ID NO: 126320 - protein, 27 aa, Heterodera glycines
IWQHGKSYSELIAFSKPLNSFALLICT

SEQ ID NO: 126321 - protein, 66 aa, Heterodera glycines
MYIIPSCILPSSYIIKTYKVIMHFCNQLQHAEVLFALLNHSKSSAISMRRAAGVQINCFVSCQSVE

SEQ ID NO: 126322 - protein, 38 aa, Heterodera glycines
MNQQQVIKTKRNNDKLVHDGALYVFHKFSNDGLKKFWR

SEQ ID NO: 126323 - protein, 147 aa, Heterodera glycines
MPKKKWLCPEGIRGDHAHNETVHKCRILKFANKALRNYLRFHALRVFNEETNGMEKLAFIQKEDLLENLALKPSFLSSSNDNISEIKIILLKAYKHFNITPEEENLNEFEKITQNFANKENYEKVQKLVKAFKMSRVLERNFILKIF

SEQ ID NO: 126324 - protein, 84 aa, Heterodera glycines
MRGKRRKRRRKEEEMRRRKRKSEKMKRKGGEAENDEEERKEEEEKKEEGRERGRMGGKRTNWGRKKRAVERGRDEEEEEENYPF

SEQ ID NO: 126325 - protein, 113 aa, Heterodera glycines
MTHFPPNFLPTIFTRLLLIIFIIIIIIDETLLSKGEVEAEKNDTYYTFPFSLKNDQKISTNEGAECKDYKDKEDKELEKLLLALMDRKRNYENAKNELEKKQTAQDSVSKNEK

SEQ ID NO: 126326 - protein, 95 aa, Heterodera glycines; identical to SEQ ID NO: 125597

SEQ ID NO: 126327 - protein, 57 aa, Heterodera glycines
MAILCILLMHITKDYGGGGREGEVSAGNHANKEAGGRKKRKKGTRKEKKMPELFKKI

SEQ ID NO: 126328 - protein, 259 aa, Heterodera glycines
MSANFATKKLNQISELWQHMAFGEDRFNELDIYNLKNEIAKGNNYLIFDVNQKAMVENIIREMDELLKNWSSKINCHFSDEWLFRPKEEAKLSAICIMPFEFDISSFLGTYFSSNSSVFHDQSLFCRLSKKENLLALQRIQKDYFNSVPQIHFTYQTLPVTIMAILVPNLGQEVPNGPLDDQKIKTIAQKFGDEIEKLIRADHLFDEGQFRISQRVNDQTMEQLANSIVHADFTTHAKISLVFIGQIGHNTKRSSQHCA

SEQ ID NO: 126329 - protein, 167 aa, Heterodera glycines
MIILALKTLRNESEKNALIGPLINKTFSQMYEHFIVVICAAPNYQIETFANFVGIRIGHELPEIIENPLERWIKFCHLFARPISLGECNNNNNNAPSPKSSSTYCKKIWLVGIEVNEKQKELSKFQDKMREKLKKKLAKKIISNFEGSFVEIETDYVNEREQLQKLW

SEQ ID NO: 126330 - protein, 150 aa, Heterodera glycines
MASHSDEYEIDEFWLDNIAYDDGEPRPKSKKCEIIAGIDLQSHRQRREWAESRIFRQYYDIILDGNGNLTNYVICKSCVPPAKPVTFNYAGFHNLRRHLKNWHGIKFGTNDKYDKMELALVEFCVADGRPFSIIKGEGFKHFMDAYAELM

SEQ ID NO: 126331 - protein, 52 aa, Heterodera glycines
MAYKCIDMGIRGNSKKIIYNWKMAMKLIINSFKTLKNCIKFYQGYLDNRRLF

SEQ ID NO: 126332 - protein, 209 aa, Heterodera glycines
PVSINSVYCGTFALLQLFQTLKLTPFVVLGWSEGGRTSIHVAGQGKGLVSHMVLLSSGSQVDMRGDLAFKGMRNTDQWMPMRNTDQWMPAAKAPYLEHYSNEFLKEQWAGLCDVVAKVYKDLGGSFPCDRVLNTLKIPVLIVNGNMDRFVLDPSLMSKKLENARIEIHAIEIHAQGGHDLHIKYPRWFALKVTSFVKESAKSDVKANRK

SEQ ID NO: 126333 - protein, 172 aa, Heterodera glycines
MGAEFVKRHGEKANNRTLHELQRLAMLLNPGPENKQCTPIQRCSDVAVSARPQFPSKCPLDRLATRLMDSFPTITLKNNEPLTLTDATFSMAKRALLAAQERHSLGVNNTRGDSLASEAPIELNPLRSISDQTMCFFRASEDEAANYSDDQNGEISMDESPTADIYVRNTTH

SEQ ID NO: 126334 - protein, 87 aa, Heterodera glycines
MIFSNNSSSNSKCLFCISSLFVLFAVLQLKRHAINRARKLAKLDKLPPIPEVKVKRVIRNAKGEYNPCSVVDNLCLNGGTCYSDNEE

SEQ ID NO: 126335 - protein, 113 aa, Heterodera glycines
KRVFGSMIFDIFFYFLKYCSLIPRIPFKILRVFKSPVLFAPFCSYVEYSLAQFLYYAMKEGATSEQASRMTAMDGASKNAGEMIDKLTLQFNRTRQAVITRELIEIISGAAAV

SEQ ID NO: 126336 - protein, 69 aa, Heterodera glycines
MLKGCLYIILVLIANFYVQLKIQLDRFMGSGQTPKKQGVLILMQNSVQIKYVTRKANDQSNHYFFRQFK

SEQ ID NO: 126337 - protein, 172 aa, Heterodera glycines
MSQKLTDQGAEKRKSSGPQNLLKGEAQDYEEILMDGFFWLYETCYFDGTSSSSSAASAALLPIAPQVAPPIDPPVALPIAPPIAPPMAPPIALSIGPAALLPIAPQVAPPIALPIDPPQPPNNAERIDELIKLASQMRRMDRRIRRLERIASIAIGALLTTALGTVLSLFRK

SEQ ID NO: 126338 - protein, 41 aa, Heterodera glycines
MAHPPLNHYVMPTPIPLFGGRRFAPRANFPRETQRKFEHKC

SEQ ID NO: 126339 - protein, 29 aa, Heterodera glycines
LCTHTSPGTGRLSFPGSSPPGRINPPADR

SEQ ID NO: 126340 - protein, 26 aa, Heterodera glycines
RSAHCDGPNWHGNGRNCKCGHRGEDK

SEQ ID NO: 126341 - protein, 270 aa, Heterodera glycines
MGELLGIYQFNSHPYNLRGDPGLYSLKFPSHGRIFDWNIAKDNRRGTLALQIEEVSEFAGESVWSRRLSDAVEIKGLALKIRALIREKSEGTDEKKCLGFYLWCDPKEGGPRNSVFSATFRIVSEKIKVENSIGKLYDNVIDPVYQFGFGNFITFLELMDPRNGFYDREEDKVILAIDVILKDEQMEKFISDPNKSNGTILMDIEKVSEFAREIIGSERKSEAVHIKGFPWKIRAEVEKKNDNEKWLGFYLLCAAPKKGAKLKLIDNNSN

SEQ ID NO: 126342 - protein, 132 aa, Heterodera glycines
MANQFSLFFLLIIFNGIMSYVFVPRRCYQFYTTDDDEIVGEEQKWSRTDCQYQVGFTFVQLKSKCYFMNCSNGIFSNKILTIIMYLFIIYSNILNLNQGDTNQKTYGCATDFDSSYNDKCFPYEKDGNACWI

SEQ ID NO: 126343 - protein, 123 aa, Heterodera glycines
MCRTLRSERIRTPSEMENSLMLLHSYNLVKVLLKKGDNYAGGRLLCRVVADIGQFPARPWEGSECQSQKVGPFRCRADSDQCRDHVHKRFLLYLNSSCPMCYETITEQIMPSKFEQFIKDNSF

SEQ ID NO: 126344 - protein, 19 aa, Heterodera glycines
FGREILFFETKLKTYITYI

SEQ ID NO: 126345 - protein, 201 aa, Heterodera glycines
MKSLKSNGTARLVVSGSHFLGTRSSDSDIDTICVVPQKGSIGEEKAKFSGTFTCVLAIPLEQRICEDNSLYCRLCKHPKIRHLSKFPSAYLHLIQLKLFGVEFDLSLVSVPDMEFLPDEPLEPIDVELMMEVLANQRMPSEVMIKSLAGSHIYGNIFGFFNGTILCILAAKVILWYPNGSVQFLFQKFMLIYATWWLYPFI

SEQ ID NO: 126346 - protein, 126 aa, Heterodera glycines
MYLEQKTGSEQHIITGTRLALPMLLIFVKCQTKQMPQSVGTNQKTLQQSLKEKLKQIRAQIYPKMGQAHHRIWALCILQQFINFIREIKNEEVIKMKEYKIQRWDGEEKCADVNEQMRAFNVRMNE

SEQ ID NO: 126347 - protein, 68 aa, Heterodera glycines
MTSERINRKIISLILFLFIILISSNFVLSGKNKRAKRKIDGMFAFAGELGEKMNEKEFLEEMEKQKSE

SEQ ID NO: 126348 - protein, 183 aa, Heterodera glycines
MTVPGKRIRPSGTPQQLGAHVWAPACFWLTLLVSFLNFFLIINLLQKPKILFYFFKPQGNIIFKNGPVPNHGIVEIWKKRKVTILRDFHTGRSRECAFIRFDSEDFAKKAMKIRYVYLIVNSYDAKLAKRKAEEQNLKKGAKRTNDVWQSPPNFVQVDDISSTVEMAGNEDKVPEKKFFYSYI

SEQ ID NO: 126349 - protein, 85 aa, Heterodera glycines
  unsure (1)..(85): unsure at all Xaa locations
TNRQLVAIVMLAISNLCSTVVVSCIGPIYPGEAKRRGSLLNSHAKSXQLRGFRMSEAQIGLVFGLFQLVMFISAPLLGKYVNIFF

SEQ ID NO: 126350 - protein, 50 aa, Heterodera glycines
MIPKFSNCCQFLKTFTRAHFRDVTKSLVTKGFSDETSAGSLTSWHSTSYV

SEQ ID NO: 126351 - protein, 45 aa, Heterodera glycines
FKILPINWLIFSEKLFINDQNFQFFPRRRLSAPPRPQNSYFFLEN

SEQ ID NO: 126352 - protein, 116 aa, Heterodera glycines
MSPAVIRRGTTVIRRGTTVIRRGTTVIRRGTTVIKRGTTVIRRGTTVIRRGTTVIRRGVTVIRRGTTVIRRGTTVIRRGTPVIRRGTTVIRRGTPVIRREYLLKLKGINFSKIQIK

SEQ ID NO: 126353 - protein, 37 aa, Heterodera glycines
MAMVGVLKRILFCVMFCLLGQCYVGVVSDFPRAINIP

SEQ ID NO: 126354 - protein, 332 aa, Heterodera glycines
MSDIFGVGIPVSDIFGVGIPMSDIFGVGIPMSDIFGVGIPVSDIFGVGIPMSDIFGVGIPMSDIFGVGIPMSDIFGVGIPMSDIFGVGIPMSDIFGVGIPMSDIFGVGIPMSDIFGVGIPMSDIFGVGIPMSDIFGVGIPMSDIFGVGIQMSDIFGVGIPMSDIFGVGIPMSDIFGVGIQMSDIFGVGIPMSDIFGVGIQMSDIFGVGIPMSDIFGVGIPMSDIFGVGIPMSDIFGVGIQMSDIFGVGIPMSDIFGVGIPMSDIFGVGIPMSDIFGVGISMSDIFGVGIPMSDDVGDSIPILQLLGFSMCGLVPSLEHNYYKNGIKSKNPTK

SEQ ID NO: 126355 - protein, 292 aa, Heterodera glycines
NSDSKNVGHRNSDSKNVGHRNSDSKNVGHRNSDSKNVGHRNSDSKNVGHLNSDSKNVGHRNSDSKNVGHRNSDSKNVGHRNSDSKNVGHLNSDSKNVGHRNSDSKNVGHLNSDSKNVGHRNSDSKNVGHRNSDSKNVGHLNSDSKNVGHRNSDSKNVGHWNSDSKNVGHRNSDSKNVGHRNSDSKNVGHRNSDSKNVGHRNSDSKNVGHRNSDSKNVGHRNSDSKNVGHRNSDSKNVGHRNSDSKNVGNRNSDSKNVGHRNSDSKNVGHRNSDSKNVGNRNSDSKNVGHRNS

SEQ ID NO: 126356 - protein, 83 aa, Heterodera glycines
MKEQQQAMNNKLNNGFNIVTRNQHKLYKKMAKIEKNQHQLKKNQHQLKKQQQEMNNKLDVLMSINQQQQQEQPQQNVYNRHLQ

SEQ ID NO: 126357 - protein, 56 aa, Heterodera glycines
MSSKVRRPSWSINQQHNQGAAAAERGSKWSAQSDQNAGQIARRRGQSGRIGRCHDR

SEQ ID NO: 126358 - protein, 346 aa, Heterodera glycines
MQDKWHVDVDNQDESDGAMRIQGKLDVVNRNQHKLYKKMAKIEKNQHQLKKQQQEMNNKLDVLMSINQQQQQEQPQQNVGPNGARNQIKMQDKLHVDVDNQDESDGAMRIQGKLDVVNRNQHKLYKKMAKIEKNQHQLKKQQQEMNNKLDVLMSINQQQQQEQPQQNVGPNGARNQIKMQDKLHVDVDNQDESDGAMRIQGKLDVVNRNQHKLYKKMAKIEKNQHQLKKQQQEMNNKLDVLMSINQQQQQEQPQQNVGPNGARNQIKMQDKLHVDVDNQDESDGAMRIQGKLDVVNRNQHKLYKKMAKIEKNQHQLKKQQQEMNNKLDVLMSINQQQQQEQPQQNV

SEQ ID NO: 126359 - protein, 253 aa, Heterodera glycines
  unsure (1)..(253): unsure at all Xaa locations
KSREELINFVYPNFQQLLGNDKELLNRLILAQHIDTCDEINEMMMANVTGQVREYLSTDKPLDDRPLDIDEIESEVAALNRRTDSGMPPHCLQLKVGSVVVLLINKSDREVLINGTRIVLEELGDDRLVGRVINXSNAIGGQVRFFLERSHNIFEDKTPGGLKYARLQFPIKPAFAMTIQKGQGQTIRTVGIDLEREVFTHGQLYTAFSRATDGNNVRVHAPKREIDAQGQAKVLYIVAKKMLKLQQKSNPSH

SEQ ID NO: 126360 - protein, 255 aa, Heterodera glycines
FLDHFLGVEELINFVYPNFQQLLGNDKELLNRLILAQHIDTCDEINEMMMANVTGQVREYLSTDKPLDDRPLDIDEIESEVAALNRRTDSGMPPHCLQLKVGSVVVLLINKSDREVLINGTRIVLEELGDDRLVGRVINNSNAIGGQVRFFLKDLTISSRTKRLVLKYARLQFPIKPAFAMTIQKGQGQTIRTVGIDLEREVFTHGQLYTAFSRATDGNNVRVHAPKRENAQGQAKVLYIVAKKMLKLQQKSNPS

SEQ ID NO: 126361 - protein, 263 aa, Heterodera glycines
MSLWKNISDDDDLLQCEWKAFIDDVVVLLNKAESGAELLVEQCWQKGGILNTKDLLFYALLGGGLIILAAVLTIVIVLVVRRQRKSASHTVGGDDDMDDKRTKKMGRPAATRIVVHNCRMEQPAGNQSQMSHEGYSARASEFGVEVPESLLSDREDGGRGPFIRKAMIAPKFGVEVPESLRSDASRDVTMPHKFGVEVPESLRSNGSDDGSGRLLLVTATARPKSAPKKPMPTDDMYAPPKKSARYGTGKLQQKEIYAPLPPI

SEQ ID NO: 126362 - protein, 42 aa, Heterodera glycines
RRRKRTESFTAEGSSIGEGDRWTLIRDIRQRNVSTIIKPNKY

SEQ ID NO: 126363 - protein, 16 aa, Heterodera glycines
MCLKVGNYGHVRFKDF

SEQ ID NO: 126364 - protein, 57 aa, Heterodera glycines
MSFSPTLLREILISLIISQFSSITDYLFYVLFAYPVKRNLNFTNNFSIVFYNRLSLL

SEQ ID NO: 126365 - protein, 56 aa, Heterodera glycines
RQNAHLKLRKYKLIFAIRTDYLVNRKQINHKIRTKIDFILECTLKMHNKLIYSNLF

SEQ ID NO: 126366 - protein, 266 aa, Heterodera glycines
MAITFWLFYRKFSEFFDVYQLPKESNFAFQLRILHINNAKVKLTQIKKEMKQLLDGKHWTILEFEALTYLAPELLDEQSLAMKYLPIISMGHNEIFTVVEAGVRIYFGRIWKIFLAFKRQEKDSVQRSDWAAISKKLENKLKIFFGEQVKKHSLSFSHKIWLDLAKMYNETFALNENEKMAIKNFDFSNLELIEQEIVEDHCQNMEQLIGGKNEFSEVIKGASNLAKFRVKQFITARLNRENLDEENELMAKFPALGQMLQFGILT

SEQ ID NO: 126367 - protein, 91 aa, Heterodera glycines
MLETALSGADLDTFNTNVLYYVFRQMLIEKVDARQLVKLGAQNAQLGRKVAELMHANADGRLEGEAEKRKQICHLERFMKWYVKNNEKQDE

SEQ ID NO: 126368 - protein, 333 aa, Heterodera glycines
MIFSPYNDDNQMYAEIMLALRYAMIRIYGLKDQIKGSHSEDLERETIRILIVLRIIELFDDRMPNVRMLCVAMSFLKMIIDKRKTKRLSWDPSAVVAQCLETEAEPIFAEQRFYMVPYHQEYFKQFLALCKRDDALTTIIREGLCKLSLLSRLIGDDSLFRLFNFTLIREKLIDRNFFNNKKFLLSQNYLGLLIGRTDEERQTNRVLADLIVLTTNYFEVDKFGHSEAIRKIVDFQWLHCRFLYESVVENVEESRKISFFVGIFIPANKMLANNSKKFTNALQVTEREAVAEMDTQWFNSKNEYAKPSEIVQKMHFDQLMMLRNDENFTEIYK

SEQ ID NO: 126369 - protein, 82 aa, Heterodera glycines
MNVYEDLRKEGLRKMYYGLQKVKSTPKADKRIHSNTKPNLKRKKRRKMWKRKKKMKIEKMERRKMMKMLMKMMKMLMKQGNF

SEQ ID NO: 126370 - protein, 342 aa, Heterodera glycines
MNMLTLGGFINEIEDRFKMVENISKMENLSDFMCKEKAQNLLEKWEEFKNEMDQFKKVNKKEFENLEEKLYEKLRNLLLFIDGEGQLSGLNVKNNFAKANLKVQIHLKNILWALISDKKMGKNWQKFDNETKKMKLFKLLQTQMEQFKIEQSMEKMEKMMEQNEIDNELFEKSAIKEDEQQKYLLTIFPLHSQQITISNKHARLLISGSLLLDVHTIGSDVNLFCVAPGERLKLSDFMGSDKNGKCMENKCKSEEADDAKSLFCQICEDKSTANLIKIESASILLIRFAFDGIEFDISFVVVPKVKTLAHKMDDNELKSLLEHFDWSVNEQKHMLRSLSSKK

SEQ ID NO: 126371 - protein, 188 aa, Heterodera glycines
MLLDSSHIQMQKSSVAKCLMPLNQISSMKNKQFELDALLKNSIPFSQKFGNFIVINCVAEDKEEADAFCDFVEWRMRLQIIFDIDKKGGGGIETHLYPNVYQENCILTQKLVKFSFRANHCKIWLLGIYGKNAISERITAMAQSFDTTIKRHYFLKKVENGNIRKIDDFFNTTKIELKSIMAKKEELI

SEQ ID NO: 126372 - protein, 20 aa, Heterodera glycines
MRHFHIKISDRLVHGKQFNP

SEQ ID NO: 126373 - protein, 66 aa, Heterodera glycines
MQWVDYEKVRPKQTVPEQPQDEDGTFGGRRTMETQTEPPEQKAAQRGEKAEEKPRGQWQEDNRPHA

SEQ ID NO: 126374 - protein, 65 aa, Heterodera glycines
MDFTTIEVNYKSPFFALPFYHSEPGVKKESWATFHVEFFDPPENEFNISLLHDSPEHSEKGKTKL

SEQ ID NO: 126375 - protein, 172 aa, Heterodera glycines
MGMNVKPKDKRVDVIFWNCFKKLPGNKDSCDETETKSYKNENLGKAAEFHIEVLNDSFSVIINGDQKKPLEYNSTLPVWATNFFRVEGNVRLLGRPLWKEWEVYGDEKGYFHNFSIPLKTLLNYGDQIILRTLIIGSETEFPQPFNITLLHEAAEWNEKSQSMAQKWTKEWH

SEQ ID NO: 126376 - protein, 71 aa, Heterodera glycines
MGRLDKNTQPIEQIWPRVHDEDHGQHGIGLTLRLKLWPLWRKSNANIRFWTMCKFHRGQLTTFGLMAMSSE

SEQ ID NO: 126377 - protein, 171 aa, Heterodera glycines
VVIVKNGKLPRGNNGALFSNDPTAHAEVFSNDPTAHAEVTALRGASKVLDSFDLSGCIPYTSCYPCPPMCLGAVLWSRISNVFYAAAPTDAASVGFDDQNFHEFVSNPKTDAASVGFDDQNFHEFVSNPKYEKLMALEHLYEKLMALEHLPVEGHMKVFKMWEQRDEKRMY

SEQ ID NO: 126378 - protein, 80 aa, Heterodera glycines
IAMVRIGRLKRELENAQQSGDDQLLFRCCDALMDRMPDQLQLDSDECTVAFDLDKFDEGAVQTLEQLLLIDPLTPLNGNS

SEQ ID NO: 126379 - protein, 287 aa, Heterodera glycines
QATTVQKTFTQQQQQQQQPSQLQQQQQFKFAQQQRHMDLMAQQQQGRQLHAAIALQQHPVAAQVVTDGCVFVGGQQLANAATVAASASDSRPTTMLPVSTAAAFAQQQFIGANGLQHQQQLQQDFQAATVYQHHQQQYQQQQMKYHSQHAEAVQQQQQQHQYGREGAVAAQAAPYSNHSRMGKFLCSPPPYPAAAGGGVVLPLHAYGGAPYSMLHHANAAGGAAESGGKELLFLQNSPAMAPPLPITVKLEEDGGGDGQQQKQQQNDEKVPQKKQQQQIGKCQPPKR

SEQ ID NO: 126380 - protein, 572 aa, Heterodera glycines
MDTLSTRLDQVVEKVESLESQVENWDDPNADKLSQNGNATVVLRGRVGLLEEEDDEDEFLNVLTTVDPFASQLPACRDENLTSFDNWAQKFRDLLDYAGTTWSEKEKLGRLKFSLEGQIRKLFDKLPDNKKDTVDKALNAIRDKLDSPERREMSKRALVTCKQRETETVREFLSRLSPLVTTVCAGQSEAQIQSRLRDEFLERVKPNLTFLIRLTGVTKNQDFEAVFSQAQELELLLTNTNENNVLDPLKFTVQAITQSPVNQSGYRTNQFSSSNVNSWAPAGQRYTNNRQVNQQTQNNQPNGSGRGYFRGNHGESNRPQFQRNRANQYRSNRGRGDRNWTGRPKCHHCGRLGHVAYNCRDRRSQFQMNGPNNNSNRPTYYTPVNMVQPNYPFQANDVVPQTSSNPQNVTVDLSALADQLIQRMNVRDGLPPDQPISSNMQHNACNALMPEEHLNDQSSTSEWASNEVDSSVPPLKVSNWGFPTTGPQLSRILMLTLTLIASMLISTNADQLLVPEHPLICQTAFHAATWGLPKFNGCSSIAVNLSHTPKSQRKRIYTPIFFESELKNGHVR

SEQ ID NO: 126381 - protein, 170 aa, Heterodera glycines
QLLELFKVFVVGTNETSAASADFLCPCTSNPELIVPLDRRVYSDLLVGTVDAAQGKEFDYVIVSVGRNNTSTLGFLADSYHPTLRMWKNGRVNVMFSLHRKALIVLCDAASFLANPLLTTNTAPEGTEAVEFESGIEAGRFMPYTKQSFMVFLKEARREGLIFDAKDLEL

SEQ ID NO: 126382 - protein, 330 aa, Heterodera glycines
MCLNIVKTPLMRVCKFDRPTTPNGHQISPIPEENDELDQLVSALVDNHNQQQKQGTAATTAYDQRAVKSLVTQLRDVIAQWDWAQARHRHVAKIYFERQNDELNAKWEQLNAEVAKFNETKADEWAQIAKVRTALRAEREKRLGKKEADRIIQLEKELADFKAKDARASRLASELRTQNRELQGVVRVREQSYTDNMMRLKRLESQLVSAEQENSRLRTRLKLIRQEPAATKVPQHPNHHQQQKQSQQQLPQQQHRHHSEQQRGVTFSTAAPAVFPPSSSSSSTTTATTVSAGRQQQQQHVRHQQFPALGGRLSPKRSVAMAARGTFKMR

SEQ ID NO: 126383 - protein, 54 aa, Heterodera glycines
MDEEQSNKERNANFGQMELVPKKAALQQQKEPIEAMIIKHRTMADEEEAGTGMD

SEQ ID NO: 126384 - protein, 153 aa, Heterodera glycines
TIYVNDALFDEFIELFSRHCIRSPATVKEATESVYMWLLADYLQYLLPVDEQKLNLLKNSTWISAPFSSLPTSAVTSPRRLLRPEVLAQCAPLEHVSLRSGAFKTLYPRLLQFVGTMLSHVASLSNWPSVAQFQVLRIILDHYLTFLFSETED

SEQ ID NO: 126385 - protein, 68 aa, Heterodera glycines
MTRRCTTSMARARNSGVVYSEMQARDSEMDSMLDKKRKELFYPAGSSYRAMTGRLKNAIWTLKMPQDE

SEQ ID NO: 126386 - protein, 32 aa, Heterodera glycines
MANAMYAARARAAKAEKRQAQLRKAARARAGN

SEQ ID NO: 126387 - protein, 57 aa, Heterodera glycines
IAFCLSTFIPFIHSIHLIIRPPPPPRQIATSRALFNLPGPTEPNHAYHDGLPPSAAP

SEQ ID NO: 126388 - protein, 75 aa, Heterodera glycines
CSSIKKEDGEKIFPYILVISFCFWWGAWNSGIMRTRPIWQVKQRLLTSQKVRCRDETNQHCLPRGTRHGPPKEWI

SEQ ID NO: 126389 - protein, 172 aa, Heterodera glycines
MSLTAQNSSVPSSTSVAERRERRRQKILQNAEDRISKILTAHGGERRQAPTIDGMYGEERADSGGETAPVELTSNEGSSVMDDGDVQCRLVNCRERFDCHRLSAAASFGVLLRLLVHFDLVRSVPLTFLPAFIACQFFLRFRFSNGVTLNAQDSLMTNFLLVCGLNERSVRL

SEQ ID NO: 126390 - protein, 173 aa, Heterodera glycines
MLKAKPHVLFVQCRFLRMMKSIPKDSKFTAKFGDTSMVGFSTVFFQWSMVGIVVRFWRGSDESAEEGASAGREVQAVVPDGPRRTDPIGLQPIPTGRPKVSVVRAGHPIGLQKRTAAPTVRLQLQRARVRPARDRAVQKTVPDSVGHHRDQSQGWLHAGAGEGRQIFARPETV

SEQ ID NO: 126391 - protein, 29 aa, Heterodera glycines
MRKAKCETPKNANNAKGEMRKAKPRPIPG

SEQ ID NO: 126392 - protein, 114 aa, Heterodera glycines
MKFVLLPLSLFCCFAFPCICYGIHCKVGMYDTLGNAAIVISECWMDQHFCSAIGCAIGTDQITVVWACEQQNDPKVLVKRTSFKNYTCFAKIGQKGANMSNEEFAFPELAELVK

SEQ ID NO: 126393 - protein, 50 aa, Heterodera glycines
CPPTVAEMFRRKKSCIRTHSSSQRSRCMLCRSRARSIRVVSRGSPGAFCV

SEQ ID NO: 126394 - protein, 124 aa, Heterodera glycines
MVLLVSALYAVCWLPQNLLMNIFVTYDPSILSHPYILYIWWGSHSLAMFHSAVNPFVYYVTNRRIHAAVKHLLRWMPCFRNARNLALAEFDVKKRLASSFRYTSADHQQQRRTTLYKTVSNSLH

SEQ ID NO: 126395 - protein, 275 aa, Heterodera glycines
MTTALLPRSLSSLSVLTTATSAAANANNNRHGDDGGGGANNGRAGGDDSAAASAAIAAAELLAPPSPLAPPTVASEKDDEKNINGKTADFVVPPPSTNDGREDDGATATMPPFKPSPVAEGAVTVAASSPATSVDSGVASPGAAADYLLLNGSSSSLRAKESTAADKSEQYNNTNNSANSPCWATVPRTRRRIFNFGTIIAGDTNSTGSNESPLIDALTLSSTMSSSSSICTTTTGASTKPQKTGQHSSTSSMAPMPSLTLQRPPLKKVGDVGFS

SEQ ID NO: 126396 - protein, 102 aa, Heterodera glycines
MHNGDRLAVALFNDAAAAAIFSDRSNSARNSSTRWMRSTMAPPPMALWEEDDEEVVDEEDMIILRISQRLYGGMNMCCTSNLYANLKMEKTLKMAFFGKLGK

SEQ ID NO: 126397 - protein, 439 aa, Heterodera glycines
MNNRTFVLPDLSINYEKKRILWHINELYGSDNVPYHPREGVPTPCPIVYRHTDEAQSTSKAAELMEVDEHDDIMIIEPQTSGQAVGAILTQAQVAGENQADTLGLVSESCIPQEPIAQADDVIFIRPKTPPRRSLRVQKRLSASVSRSPSPAPKRPPPANSLGMATPITRRCSAFHKGWQCAAAAAKHFPEYCDSGKLGDKKCADCGAHLFSHEDSNICCRKGRVVLPMLNPHPDELKELIVGNKQSREGKEFVRHMSRYNNLFQFASVSAGNKPSPAGGPMAVILNGEFHRRISSMQAGTTQIPGFGQLYILDPVEAMEQRRNNPRFTGEKITNEDEFVQGHQLNEQTLEILEKMIQVHHPAVQAYKQAREQLTELLQQQNQEELRFFRMTLLDSRRAPAGLTDPKLHPHQIITPSTGEGMFAIHADPTGAPPPQEFA

SEQ ID NO: 126398 - protein, 367 aa, Heterodera glycines
FPPPSPFSALPSAPPPTVGGQSQFHRTTNAKQSVPKRRRKVILRRKLLRKGATAGDLQQKKKSGNAKSGAVRRVVWRVVPLQRLPPSEDGAGQMAEGGSAEERQSNPWNTFPFENEFGVPSTGGTEKGATMRTKTGTVVVRGTDRGEGVQLGRRMARRRTTAPNDGQKPTHDVDATASSADDSLSVVDFLAPNPIAFRRLPPFNRSSAVPPPSLAHQLVALFSVGLCLCRAVFDCWALLQCFCCALFLLGLCLRRRPLSLLPLAFDVLSVLLALFFCLSLVVLLLVLSLLAPSVPPPPLSLFRCFLFIASLCFAVILFTFCTFCEQSAVAEMTKKRKRRKTEDKREEEEEEEEEEKEEEKDRRERRV

SEQ ID NO: 126399 - protein, 116 aa, Heterodera glycines
MPKALSARVPPPFSFVEPPAEVVDRRWGAGDSSSEDMRQGNGTEEAEPVPPLVPFCCVVWKWDDKGWNMGLEGSAEAECRCRNASVPFLLSGGGNKSWFLVRMPTNKWQLALFMDF

SEQ ID NO: 126400 - protein, 184 aa, Heterodera glycines
MAKHWWHFQLIPQALTASEFASKTRHSPDWTITLTKRRTKSNQSSLMKHERMSLRQAYHYVKSARPIIRPNLGFWQQLVEYERKLRGHNTVTMVPAEGSALPFPDVYSSDLRGHILSNPGPPQHDPQIVALQRRQREREQQRETNAANARATATLIPVQLVGGGGSRQMGGQQQHQQDNHHHAR

SEQ ID NO: 126401 - protein, 52 aa, Heterodera glycines
MARKFIGLLLVLKLVHAQWDGGMNGGAPMGGGMGGGVPLFFLLNWSFQSLCF

SEQ ID NO: 126402 - protein, 70 aa, Heterodera glycines
MSSLITFIRKLSNKAKGAFGHCLGNFIRNGFNVLAKPLEEVVTLFGSAAVQLNSLTISEFSKNGFGSKEN

SEQ ID NO: 126403 - protein, 141 aa, Heterodera glycines
NILEEEEEECLHYLTKVEIEENEDIKAGYKLKFSFDPNPFFENSEIVKEFNWTAAEPNSVTTEIKWKQGKNKLANGTGSEEQTFFKWLCQNIEPVIKDDIWPNPLQYFLAPDVEALDDEENEEEDDGGDEEEEEEKEGEGQ

SEQ ID NO: 126404 - protein, 99 aa, Heterodera glycines
MLAYLSPITPLLVFILPNFRPSLFQCFVIQSVPLVANFYIYSLILVIGLDRLLSAFCPIWICRINPAGSCPVKNFEFQSCNRTRKFDLCRIQQDPALIF

SEQ ID NO: 126405 - protein, 61 aa, Heterodera glycines
ATQFGKSVFLNALKKIQSIAWSVSKKLINFSSSSFFGLKIYLNTFFTLKDFFINTEFFEIS

SEQ ID NO: 126406 - protein, 151 aa, Heterodera glycines
MPSTAIPTATILFFQDEIDKEPKNRDFSRVKDDAFWAFLRGYHPLDSLRKRRLEQIIDLIQEYGVSRPRDVGKSILLNTLNECYRRIYHINLFNGKMLTAIFGTQTGNKDLDVFNFIRKWCGAIFRAEQQSGHSIISYVLEDYPGEAKDIF

SEQ ID NO: 126407 - protein, 336 aa, Heterodera glycines
SRVKIGNKMPKQKNGARHFTQYEINPWMKRGTVVDERKAMDQWTQLKRAIEGEGVEVLTLDQVNGLPDMVLTLDQVNGLPDMVFACNSGLFYRNLFYRNKLYLSHFRHAQRIGEQRHFADFYKGLGLELYGADCAEVFEGGGDAFFSDERTLWAGWGGPRTNRAYEHIRKMGDFETVPCELAYEHIRKMGDFETVPCELVDPRFYHLDTCLCPVGIDSALWFPPAFSENTKKELWFPPAFSENTKKEVLRRLPRAIAVSEKEAMTFVCNAITIRRRVISPKGISEETHAKLASIGYAVKELEMGEFMKSGGACQCLVMKLEFMKSGGACQCLVMKL

SEQ ID NO: 126408 - protein, 69 aa, Heterodera glycines
WQIVTLAPALPTPVRQAKELAKRGRANFGELKRTPQYIPRAENQQIDYQQLNRRLCYNGHIFADTRFNA

SEQ ID NO: 126409 - protein, 100 aa, Heterodera glycines
MNVLQLKPDKRLSAKGIVQYLNGECELEEFLSLEGNDARKIVIFNDLKMQNLEQLISNLCGEESNLFRELKNVIEKQQKELLAGNEKLEKCDTKGTNFDE

SEQ ID NO: 126410 - protein, 224 aa, Heterodera glycines
LKRILNDMLSVYQVISGNLNKAVNEQGEQALKWPLVKQMRIVKKEILTLLSTWISRAFEPRVAIPDPLFVPVQLVIENVIKPLFSTVLVDYEMNIPQAREPKVLSLLSITIVSLKVSHRHFEFAIVGFLKEDASAQVPAILDAVFTCTLEMINKDMEAFPEHRTNFFQLLKAINQHCFDVLITLPDEVFGLLIQAIVWAVKHTMRNVAENGKKFALMNECFNLR

SEQ ID NO: 126411 - protein, 87 aa, Heterodera glycines
MLFLLVLLPLLPLSSQRYSNEPVYGRMFPGYGRTPGYGDENVPNAAGAYIQTEMPLGKLGKGVFGRAKGNVKGKSNGSRAGRTGLYF

SEQ ID NO: 126412 - protein, 78 aa, Heterodera glycines
LGPQIRVTVKGFFSFNRTVTKMREHIRDFLVQIREEAGDDTADLFLEEKEAEIQRIQSLKQAIPGVRNPNELLEEDMV

SEQ ID NO: 126413 - protein, 82 aa, Heterodera glycines
FEERRKPSEKGNDAKIGIWGGELRLVAIVISTKNVLDYYGILATICFCLLFWSPICPSIRQIIPFVSVPRQIPSHSASRRCF

SEQ ID NO: 126414 - protein, 175 aa, Heterodera glycines
LRTDEKFFTPSSAVVTQIILPTIAFCVGMVVAMLIGINKCKQWELDKVIEIRRTRRIIQRLTARLRERNFKAIQKARDVRKRAIAAKEARDVRKRAIAAKEARGEPTPPEPSAVPPPFYRQSPPTGNSPPPTYEDSLLHQFFMECSEAAQFVPFDSDPKKASRKAKGRNAIGRVH

SEQ ID NO: 126415 - protein, 74 aa, Heterodera glycines
MNQQKSAKRATRGQRQIYEENKQTLLCYVLASICSSVLVFSLNYFLFLPQKGAWIGLASCVEQSSIFCDSYVYD

SEQ ID NO: 126416 - protein, 44 aa, Heterodera glycines
MAALHYAEFFSQSIAKFGATCMHRKKVIWREVNVVFYIIKNEEI

SEQ ID NO: 126417 - protein, 39 aa, Heterodera glycines
MVSPKTMILDLTLGLGINLPKKSITSVIQGPRHLDKNCV

SEQ ID NO: 126418 - protein, 174 aa, Heterodera glycines
ICRDLKPANLMFSDPQTLQLIDFGSATECPLRILDARDSRRILDEAAELCTMPYRAPELFPYRAPELFTCEIGAMIGESVDIWSLGCVLFALCYFRSPFDGVHERGDSVALAVQSAKINFDTAVPVDRHIAELVDRHIAELIQSMVLIRPSERPHISQIKKRVDQMQTLDEVKD

SEQ ID NO: 126419 - protein, 56 aa, Heterodera glycines
IVTSFLRLRSPRSYVGSLRAAPGIACACALRNMEEGTFERSAAAIKRHETKEVPGF

SEQ ID NO: 126420 - protein, 219 aa, Heterodera glycines
PLSLSLSLSLISLSFSVSFLVLLKRNNRSGRFLTYLADLCMCRGEANKKIQELICNTVLNERNRDIFMRTMMKPMGAKVDKETNCRTLVATNCRTLVACAESCREEDREMIDYYRHQLELLAQMCQDQQYLAIDPPPMCQDQQYLAIDPPPERKLWNISRELPADLVLQCMSDHCMSDHRLPFDIRASFTRVMVHIHMIRASFTRVMVHIHMIRWELFI

SEQ ID NO: 126421 - protein, 89 aa, Heterodera glycines
MANLGKCHLNEILSSFNCYLFIFQIKYLILSYIFILVYLNKYSHAGIHNANIRMNNAKLFYVIWFFIYHNEMIFVLFDLLIGDHRHLAH

SEQ ID NO: 126422 - protein, 46 aa, Heterodera glycines
TEPPETISQLLSVESLNPFFDALLFAANITSSSSSIIKNNSKNRKN

SEQ ID NO: 126423 - protein, 270 aa, Heterodera glycines
MDTTNDNNKVFVHQQKRGIRREMSVSIASQRPLNDLFWHRVLVEVFRGEIRFSVDRLNAFQPLSFPFATSTKFSIGGDEKGNGFVGCIGNFQIDQMLHDWTQQLAQKDRDEDDINENSSATFRGGSSGFLRFFNLPISALHSDVIFSIRTDQRRALLLYEHDQADNFVQIHLADDYRIVLTMNNLSSIVSCSVFAPPIKTFNDMRWLQLILERSNEPGATAPQTVVLHVDDDQCQIGPVLLNDPDSTDHQNGLSLMDDEEKTVEEGKNVN

SEQ ID NO: 126424 - protein, 147 aa, Heterodera glycines
MREILARRSANANEQNENGQQRHMDKIGTATVKVPNAKSTTASTEFLWPQQIVHFVGCISRNSFVHWLFLIFLLLILLAFCLFLISLICRRKIRQRIGRTYYVLQKSEPKNGGPTFEDEKQTSSGDEDSTTIGQAFEENAPELMDER

SEQ ID NO: 126425 - protein, 35 aa, Heterodera glycines
ELRAEGNEVLCLETPPNFSAVGLHYQRFDQTSDEE

SEQ ID NO: 126426 - protein, 20 aa, Heterodera glycines
GLLGSWVRVPPGELPFMFYK

SEQ ID NO: 126427 - protein, 151 aa, Heterodera glycines
GHFGNVFRAQLSAFSGQIVPVAVKTLKAGDNMHTFEQFLREASIMRRLSHRNVINLGERSPADDGAAAPSVVMPFMHFGDLRTFVGDSFRVITVMELAWFALQIATGMAYLADQGFVHRDLAARNCMLTERGIVKVADFGLAVDLNDATLW

SEQ ID NO: 126428 - protein, 80 aa, Heterodera glycines
MACSESYWTIVVCEGGLASLHCPAQHGIVIHEANFGRFTLLECNPNRLTNITDQCANNRTKELMQARYTVESITTVIITE

SEQ ID NO: 126429 - protein, 64 aa, Heterodera glycines
MAMISRVGKRNERMREKSDGGGEKAGKRERERESSREGKNKDKVDEEKNRKNPSRGESNKFFKI

SEQ ID NO: 126430 - protein, 83 aa, Heterodera glycines
MPLSVTIIRYGKAQVAEECRRLEECVRNCDVVKQFYRTEGFEFLNRIFQSPAELEQITGLAELQRQADAFQSEVIEMDDSESI

SEQ ID NO: 126431 - protein, 29 aa, Heterodera glycines
RQSDQREEHDEFDQPEKETDEISLINVID

SEQ ID NO: 126432 - protein, 330 aa, Heterodera glycines
PTILIYFTGQNVLLTDTAEVKLVDFGVSAQLDRTVGKRNTFIGTPYWMAPAPEVIACDENPESTYDSRSDLWSLGWSLGITALEMAEGHPPLCDMHPMRARALFLIPRNPPPRLRSKKWSKKFEAFIECVLEKDYTRRPFTECVLEKDYTRRPFTENLIKHTFIRDQISDRIVRNAIREHHTFIRDQISDRIVRNAIREHVERHRKVQKKEVDDYFSFSGSDEEVDDYFSFSGSDEEEVQINNNLDRLSDNKSNAKSERKSQSEGAGEGDTTTSSDKGRSSPSWDRQAQKDRRRRGGRDGNDQRGRRPAQRVPAHSGEQPKRIRKREANE

SEQ ID NO: 126433 - protein, 33 aa, Heterodera glycines
INFLIFLFLAASIFYNNWSVWSDVRQTEKIIKI

SEQ ID NO: 126434 - protein, 748 aa, Heterodera glycines
MRSLNNKLNEFTAIIALKDFELVFVTETWAKEKIPFQPFITNNYKIYEASRSGKNGGGVMILTKTSVNSFSVLSCSKFNCEIQIIQINGAKKLRIVLLYRPPNTSANFTKKILNLIGNYFEENFILMGDFNLNAKDITWTSGTPYAKSEKGNIFCEFFNKYGLFLMTNGPTRGSAWLDLILSSKPDFVNNVLIEDIFSSDHLSTNFSLSFPQNKNVPQISSCPSNPNGPSISDVEFNADEISKILKNLPNRESTSPDEISFRILRNCHLTLSPVISELFRISMDTGKIPEIWKKSIVIPLFKKGDRNDPHNYRPISLTCCLCRVMEKIIAKSIYNFLHLNNLISEHQFGFVKHRSTNTQLITVLEDWYDSIYGKKNIDCIYVDFRKAFDSLPINILINKLHNIGIRGKLLSWLSEFLKDRFYRVKINNKFSNLYPIQSGVPQGSVLGPLLFLIYINDLPQVIPPGVSIKLFADDVKIYVSYKTRDERSKLNVALDNIGKWANAFGLNISQNKTFILFLGKNNSKQQYKFCNNIINEVESISDLGILIDNKLRFSNHYTKIIKAAYLRIRNIAKILKTRSIRIWTKVFKTYIRPLLEYAPEIWNPTYKKDINKLERCQKYFTKIALFKCRLPYIPYEQRLDLFKLQTLEERRKTIDLVQAFKIINGLTHLKKDIFPQFSGHIPYNLRRKVVLKPQSSKTSNSFINRTALIWSKLNKDITDAPSVDSFKKRINKWIELNKNLVCKRAPWT

SEQ ID NO: 126435 - protein, 50 aa, Heterodera glycines
LCEEERRLHSVVVLNLPESEETVPSARVNSDFVDAQSMLDTCEIECRPCQ

SEQ ID NO: 126436 - protein, 126 aa, Heterodera glycines
MFFVELVNSFRMIPRLLDLDNKEKSYSQKHAGVKLVGPTVQFLAVLFFLVLIIIVIIICAYDMGEKCRTESGNLKKNMGYKFQYKFEFLKTRENTSPAVYMIADHSGSDFYVLKNAEICAKKPKKC

SEQ ID NO: 126437 - protein, 239 aa, Heterodera glycines
MAENKKHNETDGCAFSVSPSKSLSNLLLDDSPSDESADERDDQTDFCGQRQQIGDTHSHSSFVAEVVDSLQGALEDGFLRENEKAKLSGDLLNKIKLEVNASKLAYNIPAEEVPGLLFTAFLSLPGVVDKFSEFTKVSITHNYLSCIYNYLSPTTFAQSQMLFAIEEKASDSDRFRRVLPKVLYFLSQEVKAMDDALIVDWYSNLEEKSQLKKEEKLAELVTWLQNAEESSETDDEGED

SEQ ID NO: 126438 - protein, 117 aa, Heterodera glycines
YDGSKACGSCWAISAAAVLTDRICIERLKKGIHSYTNHASSFASAQDILDSHLDNKCPSFNVALLKNKLITKVPVRPKVRQQLYGNGSPRRASSQAQITQWAWAASRTFIPQQKNCL

SEQ ID NO: 126439 - protein, 59 aa, Heterodera glycines
MKNGKFPSASFSALVDEQCRNCRRICGRPARRLPPPPAPLSHIAKPFKNNRSNNCKNKN

SEQ ID NO: 126440 - protein, 173 aa, Heterodera glycines
TVNDSRMYEFFREDFKLEKWRKGALKNAFVLMSKQRFQHAAAFFLLGGSLKDAIQTILSRIGDLQLALVVLRFYESDPERQFELLTELLCREILGCEPSQFHSLVKEGKVHFPSASRDPFKRSMAFWLINEYALSAATLLEEPSTAQNDGEDEQRRGSLVKARPFLFDCFCVE

SEQ ID NO: 126441 - protein, 78 aa, Heterodera glycines
MSDSQQSDQRNERVTRRSLFGSGRPNDADEWLKSLENNAMEEKVRKWSFDFRIGCPLKKAGAESPSSSHVYEAIDERE

SEQ ID NO: 126442 - protein, 57 aa, Heterodera glycines
VAKLPQLSQSFAKELKPLSDADSVAFAPYGQLVADFVHHVEQSTEVQWPGVPEGEMS

SEQ ID NO: 126443 - protein, 122 aa, Heterodera glycines
MCRFTTCLLKFVLLSPLASESFQSIGTIYSFFIFERNTMAHVLIIERVLATISLGLFNAIGYKENGFSIVLTNFALLFSAGIELCVFSLLRWHNEKAYFRTLHSSNGHNLSERYQVGKRSQK

SEQ ID NO: 126444 - protein, 118 aa, Heterodera glycines
MDTHYADILFNDHLSLSDRSNLAYRIGGAIVHLNVERSLDLMGNMCHKTGLKIQNASLLIVGLMREQFGQMIEDFGKEQLQKDIFSLPLVPFVENGAEFGQHEKIADEQSKAGQTAGP

SEQ ID NO: 126445 - protein, 38 aa, Heterodera glycines
MEMGQLSSFFYRYLGSYPIFVPISRLFVVPFKRHLPEI

SEQ ID NO: 126446 - protein, 472 aa, Heterodera glycines
MFNLVDFNKRDSINCDELENVLSQAQRKGNKIELPSWAKDFGNYFSDLHFYGLHLSLNAEGTEKGFKMSDWLGQNKLDGETTIAHSLRTMHLRGEMGRIKEIKRRMVRHLISHFQLERLEMIHPIRMAAGHVDEQTMSTYYEMMFCQNIRLTEELLEYAILCSQIFAYFLHQKGAKTEENDANWWQKFVHSTRQIILFTNDAGATEKLAKKEDVLGTLHELWHNIKDGDNFDEKALRKGSKMGRELVENLAKCLVEIYAGNEEFRKCFGEQRERRRKLEQMLRIAEKELGGRSAVPEQFWHIFEELFSYTLMKQYVELLLADRQSVDKELETIESKAIIFYYRERVRALFRKAIIAQPKMENEQFMAVINNYLTQWESLMDEWQQNAKGTANGWPQLVCKCYQFTYKLVTDKQLKELNAEWHKLVGMNVKEWNGTMLTELISENMMSWFGVGCLLICSDRVLFMGFQFVIKR

SEQ ID NO: 126447 - protein, 453 aa, Heterodera glycines
MADFTKRPSTLDLFIFVRWIDSQVTALLILGNSFSAQRCAKFWVRCKVLILQLYDRYFDEQMEEMPSLQIFQYHFLSHLNLYFEKILDRKIGAKKSEKAMNDELRKIVQNSQKVYEEDKLMDSFVSEEREQYERFEMVLTELRIKTVNELANRNEVFKEALGHFLSKMKELPDFVGKDTIIETWRAIASEHFEELGKKLEEKYGKKTAETKPKKKKAKRTKNKNGKNNAKKEDGEKETEVAMDTVFTEEGNTVSGVGTNEEAKEDAEMSTVDVDTVGDKMESANTEEEAFKNENACEMNGAEKAINNGHNESLAPVGGEDQRNEEDKSQQENTDEGSESTAVADRATKLKEFADDDFLAQKYAEFVHTFMMEEQQNGDGIGQLIRMLTIGAFVNEISHRLDAIEWMGGDQWQNVKKKRTFLWWKSILADQQYSADLVDQLYDVLKEIWSEREK

SEQ ID NO: 126448 - protein, 466 aa, Heterodera glycines
MEVAMDTVFTEEGNTVSGVGTKEEAKEDAEMSTVDVDTVGDKMERANTEEEALKNENACEMNGAENAISNGHNESLAPVGGDDQRDEEDKSQQENTDEGSESTAVADRASKLKEFADDDFLAQKYAEFVHTFMMEEQQNGDGIGQLIRMLTIGAFVNEISHRLDAIEWMGGDQWQNMKKKRTFLWWKSILADQQYSADLVEQLYEFLREIWSEKEQIIGTNLEKLTGNKKEQMESDQRRGIELISRQIHSRKFGRAIIGGKVKNWAKMPKKQKEKALLSLFGSHEDGTKNAENGNNIVGNFERKLELLEKAFAQQKLDQMLFEQYKNNENLSLFIEMKDKINFNGKNAQIFPTENWQELKFTEEENDGKLKEIEKLKDALKLRDGEQKVAQKLMIKLNEIFNGWSAEAQFQPSALHFLMNSVAKLEPICILPDGFDQKLIFGQATECDQSKREQCSDQSLYCTLCK

SEQ ID NO: 126449 - protein, 97 aa, Heterodera glycines
MRLKLLELLLPKTDYLSMFSNKQNKLDGQFAVGILDKFRTIFAFLERWAQNNFIYCEDLGYLNGEMLLIMLTKVFLLFPDSSVSFLVDKFFLIYSKW

SEQ ID NO: 126450 - protein, 146 aa, Heterodera glycines
MDRLGLSDSIRNGLKDKFRNEASKENGASQKKKKKFFRKDGRGKKKNFFAVGANVIASLGDEPWRAGRVISRKEGTYDVQFLDGTIPAKGVQPYKPDEDENLNFLLDGFGLKRASSGGSIGKHGSDGRRDQTKDDLREASDCGHKA

SEQ ID NO: 126451 - protein, 191 aa, Heterodera glycines
MSDDICTYLNITSARKFDSNNLTKKFSALDSSKNVTIFEWFFSSIIHQFVAAKCAFQYNLNKVVSDDYRDTILVLSDKFNCISQTAAWIVLPSLFTAISIVLNISLISVTIIKREHHKVCNWLIAYDALFQLFVVAPFALNLVDVIFQYSPIDYRICLATLMASTVASYGSILALYLISIERLLIVLFPLQ

SEQ ID NO: 126452 - protein, 76 aa, Heterodera glycines
MLKYAHKNMNEMPKYAHKSRNMHKYAKYAYGSLPQFRKKYACAYNFTPYSSVSASHWSSFTNSNGTIDGVDTAELK

SEQ ID NO: 126453 - protein, 119 aa, Heterodera glycines
MPGSKFKIWHTVKCRFGMCRTETINVCTLFYFSRYFNGTGCEISFISESFARKANLLGNIDRSNCQTIYVPVFGGGKLLGWVNDVEIRIDELKLKFGHRLGVMEDKHLPMYCQEKFDML

SEQ ID NO: 126454 - protein, 27 aa, Heterodera glycines
MSFFNHLTNDTFTADQVLRLLITLKNF

SEQ ID NO: 126455 - protein, 97 aa, Heterodera glycines
MASPAKNEKKLSSADHCLISSATIGENQQQSLGSSFETAFGEHQMKMEKRILRKIDVWMDIFPLFGRVELGLKLAMLSDRFDALVDAHFDGKSEWAI

SEQ ID NO: 126456 - protein, 260 aa, Heterodera glycines
MESTSSNNSSSSRPVSSHRPPPRRHNNTQAVPATARNGTARKRPPTATTAAGTTLDHHQQQQHQLQQLQTNRQQQAQHLFIDPGDRLVLSHHHQQSSSSAPLLAHHQQQPPIGPNSSPHSTDSYHNSPKGPHVVNSASTSGTNRSGTSASFRQHQMVGVGTPSSSSSSSLMMASAQQQPLPQYILSTATAAAAQHHSQQQQQQAVHQQQQHQLQQLQHHHQQQQQHHAQQQQQQQQQLYEVESEIIDLLVRHLGNLNDDE

SEQ ID NO: 126457 - protein, 144 aa, Heterodera glycines
MCSPHGHGYECPANMQCMKLSLKANQIGFYGMFNDFGTINYFRQKLERDDDGEWRLREFDPKVNDLDTIDQCRVRRWLSALVRSTSFHTFMLCLVVFNALINASFVYRHNRSDARRKRIYHAIEVQLKCQANPSHHSLIASLIG

SEQ ID NO: 126458 - protein, 78 aa, Heterodera glycines
MFLIWSTLTKVMTFFCRKTVRVEAVRVEQYELEQYELEQYELEQYELEQYELEQYEVEQYELEQYEVEQYEVEQYELE

SEQ ID NO: 126459 - protein, 89 aa, Heterodera glycines
MVPFEFLNEWTKEKLTLAKAKELGNRWIMKRCKIIGETAAVQQQKKDDNCNKVAIWLYICNDCIGPLSPPPFAEESGQSITKGPSSADK

SEQ ID NO: 126460 - protein, 66 aa, Heterodera glycines
MLENIFKQKGIYLREGKHSRKEWQEFKAEINKESKILKLPKNEECEAILANEKEKGKNSDRKIAKF

SEQ ID NO: 126461 - protein, 44 aa, Heterodera glycines
MNMEYRNAFQKVFKFLQPTNYNTTIIGTQQQQWAIRVATENVQN

SEQ ID NO: 126462 - protein, 121 aa, Heterodera glycines
MAASISKQATVPPAVPRKPVPPTETKTAPKTMPNSTPKTMPNSQKMPKSETTPKEMPKSETAPKEMPKSETAPKEMPKNETAPKEMNEAIKSKTNKTTPPGTKKGNKSVAPPVFCLSFVAK

SEQ ID NO: 126463 - protein, 208 aa, Heterodera glycines
MAKTQYYGQSLMDTGTAAFIFVNAIADHDGMARGQSPRQRAAKATMQLFAFRVPTLLALFLIGVGRSVFIRFSGYGQDVTEDKKLSPLNVAGELGFSLCCYCSQRVLEAHFGLSASRRLANLAYSFAMVRGGREKLFANNCHPSLGTVDPVQHHLCPVPAHSARRSVAAGCAPGWTCGSNQPKRTAPFSVCQSDDWLRQSVGNGIAAP

SEQ ID NO: 126464 - protein, 601 aa, Heterodera glycines
PNACGPFVPCPPQNVHLAFSLPKSNSYIFAVEHNAIRRSVRRHCASPSCSATTFAAPAPPGAVAHPRQQRPPLSVEQIERYRNEEKWRYVRLTFYSVLWLGWLFSLMFALLLVHVHPKCAPSSSLSLEWWKGTLIYEALLKSIFDSDGNGVGDLAGIQLKLGHLRRIGVGAVFLRPILRTESTGMGVIDFTALSQQIDATMDQFDAFVDAAHRKGSADLPVLNWQNANVSSAVRAALSFWLGHGVDGFHLAGIDYLHRTADGRRPSWDEVLTKTTQIMKLMYISRKTGIRGPSHLFLFTSHEHLSEALKVRLVDEVGLDAVVNTELRDLALGNRVCANKTAHAVPAMSVAECANEILADLLLFHQSFTNVWPLWSVGGSFARRLASRVDGKVYAELIMLLQLALPGTPIIYYGDELGLHDVLNLKAYFPQRGPMPWDSSFPQRGPMPWDSSSPFDNRTDGAGSIETNFDVINLYCRMQLADSRSFLHSVRAMARLRLRDAALRADSTVNNAILIGMPSYIVRFPSFSRSQSVVVLVNFGPAPLTFSLSDLPPFHRRGVYRRGRIVARSANAASKFARLGIELDGRQVHIGAGQGIVFKAFE

SEQ ID NO: 126465 - protein, 65 aa, Heterodera glycines
MFLGQTFWADHLALLLLVQLALCAVIFACCDSARACGVTPLRSMRPLRVDAARAQRDAHTMFRKI

SEQ ID NO: 126466 - protein, 36 aa, Heterodera glycines
MKCKNGRGSEEGMIEEREEEYFEVGKCGAVFCSADN

SEQ ID NO: 126467 - protein, 123 aa, Heterodera glycines
MRLEKCWFCSSTIYPGHGIQFVRNDATVFKFCRSKCNKLFKKKKNPRVFKFCRSKCNKLFKKKKNPRKLKWTKASRRIRGKELVELVNDVTQAMEIRRNEPTKYDRNLWETTSMSNKSSIILI

SEQ ID NO: 126468 - protein, 42 aa, Heterodera glycines
GALFSRKRTTPMSFLKSGRYDSKHLKMNATPRESSLKRRPFC

SEQ ID NO: 126469 - protein, 157 aa, Heterodera glycines
LFCFISVIIFIKIHSLLKVAKKFCGTYCGTSLLDSCLIAPVIWFCNFQKSNKLRISNFIFENFAVDNCCYNHDVCYINKYQKRYDCDIKFCNCLNEYPNCFLTKVCSPTHILNILFFRIYYAGQFIFLENVLKKDKNNYFILPSIDMHMYFKFFIVM

SEQ ID NO: 126470 - protein, 118 aa, Heterodera glycines
MEKNTESLSKLDPSETLGTDALLQLMELIKLRPKQKQGEVESEKREMEKPIADFHHRKTDQINPDSSELKKELREKGKLESYGRITDEKGEEKDSWGHALQKELDEKVRKFRELNRKK

SEQ ID NO: 126471 - protein, 144 aa, Heterodera glycines
YDLHFFERNYKLGPELGRGGFGVVYSGFRVADREPVAIKYVARRNVTDWAQLRGKDVPLEIALLEKCSACPGVILLLDWFERYDGFLIVMERPSPYCDLFDFITVRGALDESVTRFFFKQIVDTAIACAGRSVVHRDIKDENVS

SEQ ID NO: 126472 - protein, 109 aa, Heterodera glycines
MPTGSTASASSFASSPAAASPPFSSPSLLRGAVAEICSQIPLNPSALFPVPSQLSTSAARDNSAPIVPQQQQRRAETEEEDAEELACFGQSISRNGQNAPGKIPRGEGG

SEQ ID NO: 126473 - protein, 232 aa, Heterodera glycines
INFHFGDRQSEPFGQSKIQKYLKPEFASITPSVSFVCSDTHLGEIWVSSGHNASGFFSLFSEEAHLQTNHFNAKLKTGDTSTAFARTGYLGFLRQTQAITADGELHDAIFVVGALEEALMLRGMRFHPVDIELSVSRAHRRIDESCVFTWCVFTWTHLLVVVAETHAPEAEALDLVPAITSALLEDHHLIVGVVVVLDPGTIPINSRGEKQRMHLRELFLDQLDPIYVAYNM

SEQ ID NO: 126474 - protein, 90 aa, Heterodera glycines
MVIEVAEEMVKHEEEEVEEDERQDEERHGTTEGRSSGGGAQMAEPTPAEGQTDQREDITAGGGATNGGRENGGRDKKGGEGGTGAKGAGD

SEQ ID NO: 126475 - protein, 49 aa, Heterodera glycines
MKNKTEWKSCIYTKRRPFGEFGVEAIISLEFERQHFGDKNHIVESVQTF

SEQ ID NO: 126476 - protein, 68 aa, Heterodera glycines
KSCALSKCFKFLIKFFCAFLHQFFGLFTKRNWCCQDLGNGRNCTILTVIRILYHLSFDLFQRLTVLLS

SEQ ID NO: 126477 - protein, 58 aa, Heterodera glycines
FGPRGRLGPNTKIEKCAFLKIKILKTKPEGSLATWHKLGLINIRSFFTILLIPNPIIF

SEQ ID NO: 126478 - protein, 102 aa, Heterodera glycines
MDESNLGLLFSSYVFPVQQQPTPNRNTKTPRRDEDDAEVAIVHSCSKRVATPNQNTTDLEVAKLAANIASMEEGSARSRLLNKMMTVQRQKMGIKKKKSILR

SEQ ID NO: 126479 - protein, 78 aa, Heterodera glycines
MSFTVVPILFCFFLPALSIYKPNWDSIDSRPLPNWYDEAKFGIFSHWGVYSVPAFGSEWFWWYWKGQRDAKFERFFKN

SEQ ID NO: 126480 - protein, 23 aa, Heterodera glycines
MHQIINFYLFILFFAPNFAEKLR

SEQ ID NO: 126481 - protein, 167 aa, Heterodera glycines
MVSELPEQRHFVALHHCVLLLPTEHREALTQLLRFLGTVTRLSPRMTSLCMATCWMPTLFKMPGDNKMGKLMTPDNTKRSRNSKLTRRKTICTPVLDSLDAVKRLLMTMIDQWERLLYLPSALAKLVAEDKRWKVCHDLEMPIKNGQFDFSTELQYNFRQQLSRLKA

SEQ ID NO: 126482 - protein, 175 aa, Heterodera glycines
CNGRLGYTLVEDDSSLLGGITFRSIVSGDKLPLLRDSPPESHVEPVAQLLRSPRDHMDNIFNPADNNIVDNTNGFALAPYTEQRRPCHDRPGFLSGNAGAPSGVLAQQTMQRFGNAYFMGNSNNSTNNTTTSSAYSLATIGTNTTTYSGGACNGSGGTLVTNATGTTGGRRKEVY

SEQ ID NO: 126483 - protein, 253 aa, Heterodera glycines
ALRWADEKCLQNAIECSAENRRAALGPALFKIRFPLIPSDAFELMDPCKGLYDKGGDKVTLAIDNFVEEENEEKFDLNPNKSNGTIVMEIGKLSEFAREIIGSERSSETVFVKGIPCKILAIIEIDEKSNEKWLGFYLWCTASQSEEDRNWSCKCSATFRIVSLKSGTENSIGKFYDRVFNNERTIRGFENFIEFAELMDPCKGLYDKGGDKVTLAIDIFVEEENEEKFDLNPNKSNGTIVMEIGKLSEFARE

SEQ ID NO: 126484 - protein, 27 aa, Heterodera glycines
MPSKNLRTQSFGLKKLILGLNNGLNSF

SEQ ID NO: 126485 - protein, 79 aa, Heterodera glycines
MNGMVTLFWAGRETECTVEKSFTVEKSFTVEKSAVEKSFCRKVRCRKVLAPPVDLDFLDKTQEIQVHEKSSLDRRSNSN

SEQ ID NO: 126486 - protein, 87 aa, Heterodera glycines
MSSGSSGPEEGEIGAELFANEAFEEAEEPAGLVQFFRPESKRGRELIRSGGFEYAFEADSGLQEELAKYFAKNWLGCRQIWHEWNSW

SEQ ID NO: 126487 - protein, 156 aa, Heterodera glycines
VERELDQLDSIVVSAQQQADDVEENNHYASASAIDRRLSVDNVSSASYRNKLPASMVAAAQQLERQSKSLAALSLLDTSMTSLPSPPRCDGTSVVAELQHRNRHLPQQQGQPTAEGGNDVRSAEVQQNEQRRHQKQPPPAVPAKPAIRCETRDSLF

SEQ ID NO: 126488 - protein, 377 aa, Heterodera glycines
MSDNPKEAEKEMEKAIFISADCWLEVFGLLPPSQLGLGIAMISHRFDYYVDEHFKTRKWTLGKMEIRSKIRRWRLGYLEIRGKIGENGAIEMEIVNSDGKELPIPQNPLPKKVIGFESISIDFIDQNVLTFIGHFHRLFSVCSAKLTIHASVRISEFVQFTIWPMFKDSIRLLYLSSFVLRQIRQLAPSFLCNWPSLQFVTLFCDFLPELPPDDSANTSEGQAVTKWLFSPHPDNLPKLFYVQIWEDMGQQWAAIVEQIKAEFSIASSPVSFNITVAFMPFHSLPVVVPFEMTNALTGEKLKLKTSIGTEDNEDIFELIRCSIGEGSEQQMEKALNELIDGRENNKIEISIKHGGVDDGLLDDLPSGPSGDQKQQKK

SEQ ID NO: 126489 - protein, 224 aa, Heterodera glycines
MGNKSFINKIFMVFRVEIENTSTLFLLMENVFQNAKDLTLLNFDVKGVFSRQPKLVKIDQEQRLNDVVLKWYNYFGAEPPLVPKIVEPMFPEGILLDKKTHHNIAEQLKRDFEVLAKNNVNDWSIIFGVYFEQNGEHEKITESSDEIPFFKATCNQCRNHPNSATLLNSQKLRLYFGIVDIFTPFSEERKKRYIDGLKRHITVQEKDSANLMAYVKTGRRWVKS

SEQ ID NO: 126490 - protein, 162 aa, Heterodera glycines
MLFLHIFQTILFVYLINGSPIKKKNDIFETDEHNEVKQLLEKIKIEAQKNLKKFSDEHFVKLSKQRPSPKDSDKDSILNLNHNLLDQLFEGDILLSVPQAKNILYQLEYANFGHKRTQRQANPAPDSFWSNLTIPYTFRSDYLNDSKLIDTVKNGLNHIEYV

SEQ ID NO: 126491 - protein, 133 aa, Heterodera glycines
PTWSFTGSTEIRSIYSGEAKVYDLKKFVFNAGTTELNYAIHLNEVCEQGWAKLGLALEAEAEGEAQFLFEAEVRSSKPKKPEVFEAEAEGCIFPETSGKIAEAEARSSKLKKPEVFEAEAVSPSPVPDPGSNL

SEQ ID NO: 126492 - protein, 81 aa, Heterodera glycines
MDSYTTINNEPSVTGPTEEESVLSATATTAVQISSPPPLLISPNATSLCKTPFLGIFLVAIGHQFLPIPNPGPEFEQEVEN

SEQ ID NO: 126493 - protein, 94 aa, Heterodera glycines
MVPFESVTKWQMEKLTLTKENENEWDTICIMKRSKIIGETAAVHWNDGNWDNNCNCVFFWLDSDTNCIGPLSPPPKEEDEAGQSSEKGASSADK

SEQ ID NO: 126494 - protein, 161 aa, Heterodera glycines
PSCLFNGNSAFNASPPRPQAIIWLLVADAVFIFLLAIADVLIWELINPVDFLYPVFLCLSMLILRSLLHACRLHGRITSGPIFLSWFLFGICGLPELYDWVLTATHPNQYAVTDQRKEDQKTVDSQVMEVIRKHPEKKFLFGYLGSRFHLAKGMHPHKMVF

SEQ ID NO: 126495 - protein, 171 aa, Heterodera glycines
MAPRKQNEQFLDEIQNIDDDVILVDSQSSHAEERPALKKRGRKSRWEKLLEDVNNAKKSNPAEVEVTDVDERKAANVFDYPTIFWKLARPKYGVFTFMCNECRNENFKRGDKRFILNTGSGQEKLEFTQTFCQDCAIDCTDLISSKAETALKLFESGVGTPNSSKAGLAKY

SEQ ID NO: 126496 - protein, 161 aa, Heterodera glycines
MTQPAAVQPNLQQLIDVIAQQQTQINQLINVQRNNQPNPAIIQTIPSMPDVAIFEQCDEKHRITEWLERFTFAIDSCAPNAADDIKVKALMNKLSETAFSEYSKFVLPAKVTDFDFDETISKLEKLFAKPQSIFVDRFACLMATKDDGEDFHNLLTGTNDF

SEQ ID NO: 126497 - protein, 171 aa, Heterodera glycines
MWSDSTHDGHRLPLYKDDERPDKPDNAQEGDFGNYRFNRKCRVAIEYNDIFVQQFLDKFPHISGIFRAHEPQPNGYRINEGQTHLTLHSSIRYAKPSDCASIAHISADCQKIVIITLKPKGGGGGQRQQQRTTTKEEQDEQQQGGSNGGTDGGGGGGNDVEVDFTELSKNT

SEQ ID NO: 126498 - protein, 55 aa, Heterodera glycines
MKMMGKNEPFVIKTEANKIVFAEDNITKKQKEKAQNEIKDFLMSQKLQMEAVLYW

SEQ ID NO: 126499 - protein, 85 aa, Heterodera glycines
MTTPKIPAEIARITVEKVLPTHFAKSRGPGRPVFELVPAKGGEILADYVLFEETMKKTKVSWLCFDKMTSQFLSFFFLHLISHPI

SEQ ID NO: 126500 - protein, 125 aa, Heterodera glycines
RLERGELSDDDKRGLEALKTQAEQMHINLSDLWREEAVEKLKTSYANARRSTFWEAVKTAASSARGARDPCLDQFLAALEDALGTGRPATYIVEERSERVGTGLTHTQGGSETSRTHTVSKTSAG

SEQ ID NO: 126501 - protein, 99 aa, Heterodera glycines
MFSILIEKKLGYRVVPRIPEDIRAKVEHILNITIPFNEEQIRQLSENIRQKVYEAKEPEKILTETHANKTAASELQAKAEKASQRAASIHSKMMNIDKN

SEQ ID NO: 126502 - protein, 48 aa, Heterodera glycines
MPKNAFSTRAMPFFTKGSNTGRVVGAKPPILPHFWTNWVALGANTAGK

SEQ ID NO: 126503 - protein, 72 aa, Heterodera glycines
MFGIDRDRDSVGIPTRDPSDPSCPVSSVHAVEVAKKGERMSARVPLLLCRFLGQCAKENPFFGRFFGNVSNC

SEQ ID NO: 126504 - protein, 92 aa, Heterodera glycines
MDRRRPPNPSRFGPRLGCHGPGISVKTRDRDEPPNYSHFGSRVISALPGDAVVKKQKRRRKNIRNLWQKHQPGHFDQFMASDHFGHPQFLEP

SEQ ID NO: 126505 - protein, 49 aa, Heterodera glycines
FYANFIVPPINRNLIFSNFVANFHLLIDHFYLFNYTKGHSPSIIKTVHS

SEQ ID NO: 126506 - protein, 98 aa, Heterodera glycines
SDFDCAVDRWLDDRHAEFFAFGTCHFRGDDGRECEQNNGGAWHLRWGEERGRMQLAGVGLFILFASNIWFIYKINDPSVHLATSLCLKKGHCLIIIHI

SEQ ID NO: 126507 - protein, 26 aa, Heterodera glycines
MTLNGTYLFNLSLYCSNSMREVRAVQ

SEQ ID NO: 126508 - protein, 121 aa, Heterodera glycines
PKNIKSAILETDFVVTEFNNDSISELMNCLEKRGASKLLDNDDLKHRIERDFPKSLLKLPPDWLLLSLGQIRSQRQLKAFDYSARNFFATFDKKVIKLGKSTKKKCVTWRKKRIYAAYAKC

SEQ ID NO: 126509 - protein, 76 aa, Heterodera glycines
MVEWYKKGEFTEEKLINYDYGLKYSREKQNSLDEVNNLQQLLTEMGYTVEEVPQNTVVISNGIKFNKDKLPKQYHN

SEQ ID NO: 126510 - protein, 298 aa, Heterodera glycines
MRMKCNEIQHQNDIIETGNNDLVNNLPNDLFAADNQSFDQQKFINEFLCRRENEIGKTISKLAKNILYEKAEKMRKDFCEELRKGKSIEKATQKVGKAAIKLAKELENDENIKENIQKALKNKNEKIKLDNANLNELKEELAKNYSEENMNKLKSLFYSKLHEFFASIKGSKIEFFEPHKINPSHFNGRRQKRANVRELFQGAFQRIRRHGTLIACVFYVFVASISLFIVIFLIARLVLVNPADYLAWLLMLWLFYVFLHYSNEFIKECADCLRNNNNQIHSIELAENGPAAGGANGQ

SEQ ID NO: 126511 - protein, 19 aa, Heterodera glycines
FGREILFFETKLKTYITYI

SEQ ID NO: 126512 - protein, 52 aa, Heterodera glycines
MSLSNVHTNLVQNGKETNDPFAFSAADHPQNVGNNESSSSIEQKRVSKIVEK

SEQ ID NO: 126513 - protein, 37 aa, Heterodera glycines
MNRRWICNDVWMDIFPSFDRAQLGLKLALLSPRFDEL

SEQ ID NO: 126514 - protein, 183 aa, Heterodera glycines
MMNSELQVCEKFIKMEMELKEAKHLQTIAKLEFENKALQEKLKQQEMMTDINALQAKVAKLEKEQQKEKEGKYVTVEQFNKILERISELEKQQKNEEKQRLTSKMAAENANAIVEKTDALFERVAEIEKQQQQNGITGEEQQKKLDNFIGILKDRFGNELLNAVHPKLRQNIAEVWKIKHIHN

SEQ ID NO: 126515 - protein, 42 aa, Heterodera glycines
MQQFLLLFLLYLNGIGNLLGLVKNCAGFTQSNYTILVSYDSP

SEQ ID NO: 126516 - protein, 48 aa, Heterodera glycines
MGEWDSPLLLCVCVCCGGAQQILNYKIFLIQRVKFLLTVIRQIRVGTR

SEQ ID NO: 126517 - protein, 190 aa, Heterodera glycines
MPTASGQVYANGQLGNFLPQPTEANGGPSPVYSLPLPQQQQQQQREGQAVLAEQPQQVPMFPQQQQQQVQPQQPQTVYVQQQPAQQQLQAVPAPLPPPQQQPQIVVQRPAQQSQQQQQFLLPNPQQQPQQNLVVVDAAAPAGGMPRAPLVQQPARVSSSSSSRGSYVMLRKNAIGGGNNIVGPKCRDYYP

SEQ ID NO: 126518 - protein, 119 aa, Heterodera glycines
MRTVQTARKSTGGMPPRKQTARKSAGGSGQRLQTARLPAAGGGEPILGTARRSAGGAAPRLQTARRSAGGSGQRLQTARRSAGGAAPRPQTARRSAGGSGQRLQTARKAAAGPSLRNGS

SEQ ID NO: 126519 - protein, 111 aa, Heterodera glycines
MTTLNIFVKHSLIFLRPICIVRFWLSFHLQHVCIFDPTAWTEEQFGTEFMKIAFPVAKVSKFVLHIWATPYEIACHKYAKPMEMFEKDPPPSYEHRHFDGCMKVPTTKCHE

SEQ ID NO: 126520 - protein, 106 aa, Heterodera glycines
MFARCVFRPFLKNSLAPSKTCRSFASFGVAQPSLNNNSSSNTFIDRELRFGAHNYKPLPVVLTKGKESYGNFLNICGHSCDNSMKFSETFLSNRAIQELSNDPKII

SEQ ID NO: 126521 - protein, 82 aa, Heterodera glycines
LFGLGFVCRRRMKQIEGSKAKPKLWTDLSPTRVLPKKAIFYPVIEFLYYFFDRMISRDTFIYFCPIYHPPKSIFIVSSLSLN

SEQ ID NO: 126522 - protein, 18 aa, Heterodera glycines
MKYVLFQNSRPEICVFRQ

SEQ ID NO: 126523 - protein, 204 aa, Heterodera glycines
SSAELALNDEKSWANYRRRLATFDVASRIAKPKEISPVVCARHGWKNVGEEFLQCDDCGKVLYIKLPGDEVSNRVLNHCIRHIQRKLVEAHTVICPWRISPGLNTSATYDITARYHQLVDSGQPELPLADNVLDEALADKFGVQSRFFLALAIFGWLPISKQATNDVEMNKPQPNFHCPLCGRHLCASVFSSDNPLDPREQHQH

SEQ ID NO: 126524 - protein, 460 aa, Heterodera glycines
PFIAFLFSTHSDDALPFLRISTFDNVPPTILFYTKGAKVKKPPPHFASRLTWCNNSLLALVAKVKKPPPHFASRLTWCNNSLLALVVRHSLAASHFKLVDESKKWIGYWGVRHSLAASHFKLVDESKKWIGYWGKHLKSPQYRTLKPFQKVNHFVNHFPGAFHLGRKDRLWLHIYEFMQRFEGDLFCIMPITYVLPRDARKLRLYLAGYTDRHVILKPPASARGTGISIVSRFDLVPPKAAPASARGTGISIVSRFDLVPPKAALVAQHYIERPFIINGAKFDLRIYVYLVAQHYIERPFIINGAKFDLRIYVYVTSYDVTSYDPLRVYVYDEGLVRFASVAYSSALSSYSNQFIHLTNYSINKHASDEPVPKWRLSEFWSFLEANGHNSTRLRNDINLVALKAIVSCETHIRSHGDHYSDFPFVSHELYGMDILVDANLRPWLIEMVCPIILHSFLFTS

SEQ ID NO: 126525 - protein, 173 aa, Heterodera glycines
MVAVRANVRLAADNCFECHQINVVAKSRGIVAIGLQKRPKFAETPFGDGLIGRMFVDGVIGENDMAIRIAGQIKSELSSVAREDISDGHNAEEVPFETLHKLVNVQPKAIFTAQMKGAGKMIDLEKRDVRNKPTKRTPLIIDRPFGTVSVSDIAVTSNASPNSQSISSIRPPI

SEQ ID NO: 126526 - protein, 94 aa, Heterodera glycines
MDLSIECGKRRDLCLRNRKKLSYRMAPRRGGGFTKPKRPFKIAGRGVNSHLAIRRIGTVIRRKFGEIFWVEFPFCPMSNCAFGSVRQRNSQIVG

SEQ ID NO: 126527 - protein, 61 aa, Heterodera glycines
CQLMNRLPTDFVSDLPMEVLPAFYPPPTFWMPQIEIPPLRKYEVSKKERSKMTYLSVHIRT

SEQ ID NO: 126528 - protein, 194 aa, Heterodera glycines
MANVGMGAQVAETLVENVDIPESAVGLGKSLIFTEPRHKKDRIVRFEYFVLVIGRGGEQIQLIQQQSSCRVQMSSESNVSGFRQCTLQGARHNIDKAKQLIQEVLERSNRSAPGPQNGANAITIELSIPGPKCGLIIGKNGETIKGLQEQIGVKMMLVQESHQPTMGTKPLRVSGPPDKVENAKRIIEQLLAGE

SEQ ID NO: 126529 - protein, 90 aa, Heterodera glycines
MADPLTLLQEYTTGKRGLRELKHNGTLYYVFDDAAYPHDSKTNLSVYNKPDEFYSIESILNFWRMREMQHTAYVRDVSGKGIASITRVQR

SEQ ID NO: 126530 - protein, 133 aa, Heterodera glycines
MSTDGGDQPEVRGLSNELPAEKVAQLRTLVKKNLKNKPLDDESKRENELLLQIPKNGVTVPYRVVDNPTRLKDEEWDRVVAVFVQCACVEIVPYEKAFGPGGAAQILGNARQAHFEEQQKGMAQILAKSAHYI

SEQ ID NO: 126531 - protein, 120 aa, Heterodera glycines
NRQSVLLLNNAKFATGAIKAILSTPADEQKCIREQISKAIGSEAETCLKKKVADFSGPLVIPDLEEGAFAIKEQVIDSISDYIWIHSRLAFCAERKPERAGSTSKCLKSPFLGYYQKHCQ

SEQ ID NO: 126532 - protein, 337 aa, Heterodera glycines
KIYCHHTGVEYMHLTNYEQQDWIRKHFEAPKVTELPPEQKKVLFKRLIRSTKFEDFLAKKWPSEKRFGLEGCEVLVPAIKQVIDRSSALGVDSIVLGMPHRGRLNVLSNVCRQPLSTILAQFSTLEPKDEGSGDVKYHLGVCIERLNRQSQRMIKIAVVANPSHLEAVDPVVQGKVRAEAFYSNDLHCDRHMVSLISGNCHLMCEISPKMNFCYPFPLPKKALVLHGDASFSGQGVVMETFNLNDLPHYSIYGAIHFVVNNQIGFTTDPRASRSSPYCTDVGRAMGIPIFHVNSDDPEAVMHEYVDEELKKYGAILENAHESAKQVTELRNRNWLDS

SEQ ID NO: 126533 - protein, 156 aa, Heterodera glycines
MFEVGDKQRRIATAFEAVRNRTGGADASFASMPFPSLIAHLQNRRAKRQTEACESCCIPGHPGRAGTPGPPGQPGTPGAPGRPGAPGRPPMICEEIEIPPCNPCPPGPPGRQGPTGQPGTPGRSGPPGRPGTNGLPGPPGPPGPPGTPGPTGPDGE

SEQ ID NO: 126534 - protein, 69 aa, Heterodera glycines
GMARNAARLASLGLALGTSVLQVGDQRREWHGGKGCVGAACPVAHRFKRCGNATLLVPHLEHDVPSRTL

SEQ ID NO: 126535 - protein, 119 aa, Heterodera glycines
MPSTLRDTNFLEPGLFLYRISGSHPLDPRQGQKGAGGSLTGEEESDYEYQQEQQDYEPGDQICVISENLAGSAYEKHSNGLHLGNVLPMLQKFFQTFLPTVRFVRCPWPLSPPLSALPT

SEQ ID NO: 126536 - protein, 89 aa, Heterodera glycines
MSWIPISPKWKLCAPKAWSWPSPAKKPCGDCAEYQALDQSWTNFLQFIINATWRRVGSCYFALFGAVIASSSHNFRAGGADKSRREIFL

SEQ ID NO: 126537 - protein, 21 aa, Heterodera glycines
VDGVAGGRTTASAFLNFVGHL

SEQ ID NO: 126538 - protein, 29 aa, Heterodera glycines
MVEIHPFCNIGVLRKTDDKSLMNGQLALK

SEQ ID NO: 126539 - protein, 49 aa, Heterodera glycines
VHVIQEEQATANLMCWSLILEGARNTLYDSEIFQLQFRFDDQYPFSSPE

SEQ ID NO: 126540 - protein, 47 aa, Heterodera glycines
MTNIRENCSFITPKILLNLISLLTILIAVFLPHELRRTRPTRRSPSD

SEQ ID NO: 126541 - protein, 132 aa, Heterodera glycines
MFVGHVLSVFRIPFSFIFICILTPVFEHRFTVFMVISMFVPQVPLNLVIKHNDQFLPIAPENLACREATNGSGFNCELSVNQMVVDDDCRDVSIWARMDNDTSTLQLLGEQVKKKKKLKQFRENWIRVTLEN

SEQ ID NO: 126542 - protein, 45 aa, Heterodera glycines; identical to SEQ ID NO: 124527

SEQ ID NO: 126543 - protein, 443 aa, Heterodera glycines
MNDNVLSLLAFALVVFLFRQKSNSVLAFDLEEHENRRIVTRFQARKFISLLLRHISPTFSFYNLIPPDSVKSINWQFKALIQLAKDSGGIIVGPFLREMHSIKGQIGEALIAFLTKMSARSTKLFAENEGTKEERNSARNLIKVGIIFSMAKIIGEKLHDYEINWAKEILETQQKRGKMRGENYQNKEEDQKEEEEEEKEREKEDREKEKEEEKEEEEKEREKEDREKEKEEEKEEEEKEREKEDIEKEKEEEKEEEEKEREKEDREKEKEEEKEEEEKEREKEDREKEKEEEKEEEEKEREKEDREKEKEEEKEEEEKEREKEDIEKEKEEEKEEEEKEREKEDREKEKEEEKEEEEKEREKEDREKEKEEEKEEEEKEREKEDTQNEHEEQREQHQQQQQVGHGHGQAAESVETRHGQFEMSAEERECLSFFGMTFDFLTL

SEQ ID NO: 126544 - protein, 159 aa, Heterodera glycines
MGQHTDGLWDIRALMPVGAMECGDKVYALDVVDNRAVVGTKDRRVIVWDVRNMKAPLQTRESPLKAFSSKPVLSNVSPLAKRLFCLQLKAAWLLNTSTRTRKYRKERFPSSVVSLSFSPDGGMLAIASTYMYEEERDPNPIPESSLTIRRMTELEVRPK

SEQ ID NO: 126545 - protein, 302 aa, Heterodera glycines
MEKIAASRNPQLAASLSTQPSNSPKLGLSGTTRKRRSDASTAAGGTTPRSTAPSAKKPRTATRRKRSKRGRRAASDEDDDDEEEIEVEEEEEAEKEDDVQQQGEQGDQSLRMEVDGEGSTSGRGRKRGTTPKAPADAGVPKTPERGSLRRTAGLDSSRKSEQKQKEELLYQVPELSPAEQLGVDCPRDAHLFMGVGARVLALWGNDYYSANICGREALGRYYVHFVEDNLNRMLPPTGVIPISALKPGTKISFIDIVNDEEIGKVCEVVEQPPTDDAGGWARGEFKLCELDEEGNRTDVIKT

SEQ ID NO: 126546 - protein, 40 aa, Heterodera glycines
FYRFLNVWIFFGLPKLHRTWFFLFSFKSPQIFFYSLTRPY

SEQ ID NO: 126547 - protein, 34 aa, Heterodera glycines
MRQDICALQTKEKIAVLDNTMKLASVKIQDVVKK

SEQ ID NO: 126548 - protein, 201 aa, Heterodera glycines
HLNPSVLQLIPRQPCSIEKEIFPKMCSVSNLYAFILVIFPKMCSVSNLYAFILVGFWMDVGQPKDFLRGTFQSFFAIIFRTFFGVRLYLAHQQQQKVMIDPSASIGANCIIGPNVCIGAAVRLLDGVCIRDSTILSGTVIRRSTLIHSSIVGRKCVIGSHVHMVNTSVLGEDVVIKDELYLSGARVLPHKSIGESVPEPAI

SEQ ID NO: 126549 - protein, 138 aa, Heterodera glycines
MAVLKKVVNDPFYDKARAFWRSWNRRHQQQQHPQHQQQQHPQHQQQQHPQHQQQQHPQHQQQQHPQHQQQQHPQHQQQQHPQHQQQQHPQHQQQQHPQHQQQQHPQHQQQQHPQHQQQQHPQHQQQQHPQHQQQRQEQ

SEQ ID NO: 126550 - protein, 232 aa, Heterodera glycines
MAQQRKPTLEPMAPTGTAHHSPIGTTLLDQPATWALMSGTIRPQCHPLGRHFTRAAADWRLVKGPTERRTKSAVSFSSATPVKPALLDEYKFLPTLRVDPPAFPAQAAPPTSVLASPTISAKPTTPAASAPTTSAKMITSTKPTTSAPSDSPSTSGKSSTSAAPKDMASSMSAPIIAEATALDRIICVMLLANWTVNLPFESVRCVQMKCDLSITFVYHVIAVLLFPLFLPP

SEQ ID NO: 126551 - protein, 160 aa, Heterodera glycines
MPVPSKAAADECRPPSPENIPLPTQFRSFVVACSVDSEKLAFRGQATTAIGAAYWHPMFFKETRRSRSAVQAHLKCASCGKEVNKVYEGTDDAGGGSRSAFGHYTDTEKRTELSGLGGVAYADIERAFAVGGMRSGHRRNAEDLVRCLRDYAKEKEEAAL

SEQ ID NO: 126552 - protein, 26 aa, Heterodera glycines
MFSDFDGTAVYVKQGLLCGNLQIFVP

SEQ ID NO: 126553 - protein, 161 aa, Heterodera glycines
MFVSNSVFLPVSRFCHCRALSAVNVVVHPFVARKCAFLSTPSLSFPFRRQYSSLASATTTGASNDKLNVDKLFEKINFEVRGHDFTVLKSYSLFVMVSEDNVYGKGSNALYESNQLTILGFYTITLFMFEQTLSFWYHSKAQNNEAKIYKIAAFRQLPKKI

SEQ ID NO: 126554 - protein, 96 aa, Heterodera glycines
MFVSNSVFLPVSRFCHCRALSAVNVVVHPFVARKCAFLSTPSLSFPFRRQYSSLASATTTGASNDKLNVDKLFEKINFEVRGHDFTVLKSYSLFVM

SEQ ID NO: 126555 - protein, 16 aa, Heterodera glycines
EAIPEGFGLPINLGAS

SEQ ID NO: 126556 - protein, 55 aa, Heterodera glycines
FEYPKRTLEKIDFFVFGAVPPNRCAQIYGETESFGNSFPIACTLILRWIFAPHNV

SEQ ID NO: 126557 - protein, 39 aa, Heterodera glycines
MRLPATDKQGHTIICAGAGYPSPTAACPSGYRCTMLAHM

SEQ ID NO: 126558 - protein, 216 aa, Heterodera glycines
MAPVLDLDPITAALAEQERQRTLVFIGLPESNAIRPSERVQDDREATTKILDHLEVEAGPTAIFRVGRFDSQRTTPRPLKVVMPTSAHQHIALGGWKRERVRLRSQKNLARLFVRPALTKEQLKEEYEARVRKRQQDPVPVAPPMQPAQTKDPTPVNENGPEPKEASHGRGPEPKEASEDTSKPSQVDKAIQNEIDRALLQIQSLQNELTHLVKRK

SEQ ID NO: 126559 - protein, 133 aa, Heterodera glycines
MASINTSSNDPLYLAYRFAGPSADLIVPAVALYLVVLVGIVLNGTVLAVTVKSRQMPSLRGSANFLMALICLCELVHQIGHTFFVVVVILGTNFVSLLTADLIMTPMIFALNCGLMAMFCAAFDRLFAVVSPF

SEQ ID NO: 126560 - protein, 57 aa, Heterodera glycines
MGGCCACLREILLEDEAADIRINVVEPTTVAKERDGTSNVAHGGQMYGTQLDVPKTD

SEQ ID NO: 126561 - protein, 71 aa, Heterodera glycines
MWRRARNNTVGALGTGKAEGGGKEAQHEDEGGTTANRQTFYWALEHFIHIFPLLKSYVIDSYFPISFTIFF

SEQ ID NO: 126562 - protein, 446 aa, Heterodera glycines
MPGQNASNSCQTQQNLAAEVSSSVLVMSRVKRVQNFASIKGAAQLVESFAKWLVEMLHRCPVELRDMLLVCTACNRGMIRERDKQIMTRAIVGELVAALKFKCELVEPNHLAIVRLVLQDFGEPLDSDWTASQCGQTVETTEGNGLKEEGRSTTDGAELIGGTGGGNGSGGDQFNTGAAEAIRPHVPELLEFIADLHVLAKMKKQTLSSSDRMGGDLKAGLAELIALEMSRPSVRDSRTVMRFIPWLYSPPSLSQALPGAFAESVANVRVLSWILLGTLHARGNGTVNAICSSVSGPNQCLPVPIACSGQMADYIHFVLAGFADQSKQSVVHMSALFHAFHLCQLWTIYCEQTAATCRSEETLQRTMQQILDFWARVTPAILQLLSHSKVLADMVNLHFVNTLQALQQVNSAVLCQLYPMWEPVLTAHHAHIPRQLRMKLDAVEAQ

SEQ ID NO: 126563 - protein, 148 aa, Heterodera glycines
MDNYTGRPWFNGGLTVPRFAPEEWSVHQRTLDGGDRTNNYAEAFHRKLQQAFDCTHPSVFHFINTIRCEQKSIDADISRCVAGELPPLKKPKYRAADARILRLLQGYNTINNNPANQNDHNYHANVNVNPDNINHLLVGVSRNYEMRP

SEQ ID NO: 126564 - protein, 306 aa, Heterodera glycines
TTSETVQTTTSAPTPDPTTICDDGTCGTHGECEEVNGTHVMCECRDYYVGQRCEEFRPIEYAAKFRPIEYAAKFDGSAFVVFSSDEFPHLSSEQEEVVEFKVRTTATYGLIIWQGQQDDEWTGEDYLDDEWTGEDYLSIGLLDGHLSFSFELGGGAAQILSESPVDDGKTHSIRAIRRGRIRAIRRGRDGWLFVDDVAPTSGRSSSSGILAMLNVEGHVFVGGVPDLHEMTGVPDLHEMTFGLHTQNFVGCLAELKLNGQKMDMMANAIDGRNVRPCRSWQPNRMNVRPCRSWQPNRMRRRRKWMR

SEQ ID NO: 126565 - protein, 78 aa, Heterodera glycines
MARGKFALPPFQRHNGDGSAIGESNASGRVESGASKTIKSRDKVPLNEPTTIRVQNDGQGKGGQIKRRAMGVAICFWH

SEQ ID NO: 126566 - protein, 420 aa, Heterodera glycines
VERVEWKRAGGDALPSDASDEEHRGVLRFDPFKADHAGEYECNAYRNEEVIATSKVEVHPEGDTRPDLLHVDISPPQVRMVNAGDSIVLDCVVHGSADEFTYSWSLARGGALIRELGRQSQLLVKSADPSNDYGIYRCEVESEDGETVGQAQAAVSVGFDSENNAVEAKFDGDSQAVLNCPVFVVPGSTVDWQRENGESLPENSNQSGDKLLIEKFDDSTAGIYRCIEKFDDSTAGIYRCTVHHGQSSVSGFVNAKIFVPDTIPDTIIKVLLNVSSESVQVGDQAWLDCVVIGDPSARVNFSKDGDALPANAQVTANRLLFTSISVEHTVTANRLLFTSISVEHTGRYRCQAQTKDGVLETSALLNVEGGKRRRRKSGGAASINRSSSKRRNRRRRMEHRRKKKRKRKRRGRTRLFGSWF

SEQ ID NO: 126567 - protein, 465 aa, Heterodera glycines
MPAIIFAQPMTRTTTRAKNGRSTRRQSGSVPNNYLSDLFLYDVAPQLDVRRPSPPPPARARNPPQVEPPYQRVDLGQPARFRCWVPGEPNAHLSWAPARGGSLPSGAVDRSGHLLFDAVAREHADSYICSSIDPETGQVLQSPPVRLDVNEPSKRPLVEPTEQTVQQGHPSRIHCWVPDEPRATLRWTARGGRPLPSGAVDDGRGNLNIAQTLPHHQGDYECIYEPREPSRGPQVSEPARIYVSPPPVGPLARKPGEPPRPVATPPQQTVPRGDPARFHCEPNSKTPAQIHWEEEPPTARVEPKVWNGQPGESKQFKCYVTGNPHPSIKTCTATNPLGEASDSGKVEIGPSIGINIIKEEKPAPARLKMIVGEPLEIKCEAEGEPDPDVEWLHDPGPERGDLPDDYVPITISEQFLRHPSIGLGNSGCYTCRASNDFASVTKGICIEGTDRVQLSFQITVIIARK

SEQ ID NO: 126568 - protein, 207 aa, Heterodera glycines
MSINGSGLSAFQRIWHGFLSKKKKVSRAEVMSLAEQIASEVNDNELFDEITALNEILESISDEKFGEMNAEQKWMKVFEAELPNLVLLVSKILSISVSNACVERVFSLCSAQWTDVRNLLKVETVKSLAQIKSNYDLTCTEIYDLLISSPKLLKMIMGDFLHICHFLSNIFQFEYLLGKIFDYALKLNPNLNGCANGSTAGRGSVLI

SEQ ID NO: 126569 - protein, 70 aa, Heterodera glycines
MVEELSNKVSQLKRVTIAIGDDDTKFDSTRGLLGSTMKKLGIVSKAGGKNVLCYLVLFSFFVFLIIYFLM

SEQ ID NO: 126570 - protein, 32 aa, Heterodera glycines; identical to SEQ ID NO: 125422

SEQ ID NO: 126571 - protein, 25 aa, Heterodera glycines
NDGSQNENPISAELIANQLIRLIST

SEQ ID NO: 126572 - protein, 72 aa, Heterodera glycines
MAINPDDFGKTIGTDPESGSRPNPDQIPMILEKRSERIPSRDPDQMAINHIIILNFPLKKILIFQMVSFFFL

SEQ ID NO: 126573 - protein, 122 aa, Heterodera glycines
FFFIENPLSVISSSILFGHFIIDCSGFTFVDCMGVNALKEIFTEMREQRVLVYFAAAKAPVRPVRDLFEKCGFFRYVQKHNFYPTIRDAVAIARKRQINKLKCEIMVKEGEGSLKIMKHSTN

SEQ ID NO: 126574 - protein, 23 aa, Heterodera glycines
MTSALPIHQWTIRKEANNYLMAK

SEQ ID NO: 126575 - protein, 38 aa, Heterodera glycines
MLDETMKVAELMCIKTALNEFIAYQRLAQMVANGTLNG

SEQ ID NO: 126576 - protein, 281 aa, Heterodera glycines
MPVIKHDPELKSVDQTVAKFNTTAIQTGGEHVMREVMFLCEMIEQNGEGTPPDCYMKFGPLFYMYSRISETIDFEGEMLYQRQDDHKKIRLLMSSEEINQSIEYTGDPVNIIKFNNGKMVPPPAPRAQLMPNAPPPPVFSLSLAKTKGGKLPEGKTDDQINEQTMPMAKMAASISKQATVPPAVPRKPVAPTEDKTAPKTMPNSTPKTMPNSQKMPKSETTPKEMPKSETAPKEMPKSETAPKEMPKNETAPKEMNEAIKSKTNKTTPPGTKKGNKSVAPP

SEQ ID NO: 126577 - protein, 196 aa, Heterodera glycines
IVEYLQSHGEITAMTGDGVNDAPALKKAEIGIAMGSGTAVAKSAAEMVLADDNFSTIVAAVEEGRAIYNNMKQLYGWEGKNLKLAFAISSRQTLVKSSPFSLSLRLVCHFHSLFCRVLTDCEHASGIPEALIPVQLLWVNLVTDGLPATALGFNPPDLDIMDRLPRSASESLISKWLFFRYMAIGTSVGVDYGYHL

SEQ ID NO: 126578 - protein, 138 aa, Heterodera glycines
MSAPLPIIIFHTISVDIRSAPGPIITRLPSKALTAQNISTFLRILAPIVHKKTHADHIYDEKQSLDPKSLVQTNKTTTQTIRTLKEARAITLWGEKSQAGSVKVGWIKSIWVGLGIYDLPLDPDSSCVQGSGCIAQGR

SEQ ID NO: 126579 - protein, 307 aa, Heterodera glycines
GLYTRLFDFLVASVNCALNVDANRNSFDISLAFLVASVNCALNVDANRNSFDISLAVLDIYGFEVFERNGFEQFCINFVNEINFVNEKLQQIFIELTLKAEQEEYQSEGLKWTPIEFFNNKIVCELIEAKRPQGIMFLLDDTSLQLHGQNEGADKKFLSDLKKQHEDHEHFRSGADSFVVRHYAGEVVYQIEGFCDRNMDILHVDVVYQIEGFCDRNMDILHVDLVQLMQNSEKCFMRQLFAADCFMRQLFAADCVSSNNKKPTSASTKIRSQANHLMDSLMRCVPHYVRCIKPNERKRALEFNEQR

SEQ ID NO: 126580 - protein, 135 aa, Heterodera glycines
MCDECRGENFRQGKSSFKLINQNGEQQQRLVFAQSFCQDCAKLNFDCTDLIMKHKKKDESATTTMAKSFRWTKDEENEPSWHTTYKDFFENFILVDQMTNFFFVILPSNTPGFVGNKTNKFKVHLTKKLVFDRAG

SEQ ID NO: 126581 - protein, 167 aa, Heterodera glycines
MVLPLTAALSKLLSCKPENLAEYLNNPEAVNKANAYLCGKKLKTTYQGRDCKTKDVKFGTFSLKPAAETYAFEGFLGKFPKILFRSNTMRSDVKVQQYFYIKHRIRLLYPQLKCIVEYHNKGHCKYYPLELLAIEEGCESAPIEKPAAETDYLDYLNFRSGWQSALY

SEQ ID NO: 126582 - protein, 38 aa, Heterodera glycines
MYGLWLSDNATGACICLYNPDLDMNLLSEEEHDPEIIP

SEQ ID NO: 126583 - protein, 29 aa, Heterodera glycines
MFCYRKSRKIVMEFFWDMAFMYSILQIDA

SEQ ID NO: 126584 - protein, 114 aa, Heterodera glycines
TQIFRKTAKIGSFFKIRALLTGGMTDGRPFRLLVDSMHGVTGPYVSTIFVDRLGAPAQSCLRIVPKPDFGGGHPDPNLTYAKGLVDQMALGEHDIGAAFDGDGDRNMIIGRNAF

SEQ ID NO: 126585 - protein, 105 aa, Heterodera glycines
MQVFGGRFNYNPMQQKPRANFDTFIQSLLTVFQVLTGEDWNTVMYNGIESYGGIGSLGMLVSVYFIVLFICGNYILLNVFLAICVDNLAEADQASDQSGNGLLNG

SEQ ID NO: 126586 - protein, 78 aa, Heterodera glycines
MNAKPEEEEDEMEVEGEYEDDDKYDHGEEEDEADEGDADDDDEIEGEPEEVVVGARPRRMRITDWINASSIDKDHQSG

SEQ ID NO: 126587 - protein, 68 aa, Heterodera glycines
MDFFEAHKAFQKLSNQLGTSENLFQQIASSPMGYVKDEEEEEEEEEDEERSNSGQNQAMGEPEDLSLK
